(19) United States
(12) Patent Application Publication
(10) Pub. No.: US 2011/0195843 A1
(43) Pub. Date: Aug. 11, 2011

(54) Plants with Increased Yield (LT)

(75) Inventors: Oliver Thimm, Berlin (DE); Gerhard Ritte, Potsdam (DE); Hardy Schön, Berlin (DE); Oliver Bläsing, Potsdam (DE)

(73) Assignee: BASF Plant Science GmbH, Ludwigshafen (DE)

(21) Appl. No.: 13/120,279

(22) PCT Filed: Sep. 18, 2009
(86) PCT No.: PCT/EP09/62132

§ 371 Date: Mar. 22, 2011

(30) Foreign Application Priority Data
Sep. 23, 2008 (EP) 08164899.0
Nov. 21, 2008 (EP) 08169680.9
Nov. 25, 2008 (EP) 08169875.5

(51) Int. Cl. A01N 61/00; A01H 1/00; C07H 21/00; C12N 15/82; C12P 21/00; C07K 2/00; C07K 16/00; C12N 1/00; C12N 5/10; A01H 5/00; G01N 33/53; A01P 21/00; A01G 1/00; A01C 14/00

(52) U.S. Cl. 504/189; 800/278; 800/289; 536/23.1; 435/320.1; 435/69.1; 530/300; 530/387.1; 435/317.1; 435/419; 800/298; 800/320.1; 800/320.3; 800/320; 800/320.2; 800/312; 800/306; 800/317.1; 800/314; 800/323; 800/317.2; 800/317.3; 800/317.4; 800/317; 800/322; 435/7.2; 47/58.1 R; 111/100

(57) ABSTRACT

A method for producing a plant with increased yield as compared to a corresponding wild type plant comprising at least the following step: increasing or generating in a plant or a part thereof one or more activities selected from the group consisting of 3-phosphoglycerate dehydrogenase, Adenylate kinase, B2758-protein, Cyclic nucleotide phosphodiesterase, cysteine synthase, Exopolyphosphatase, geranylgeranyl reductase, Mating hormone A-factor precursor, mitochondrial succinate-fumarate transporter, modification methylase HemK family protein, Myo-inositol transporter, oxidoreductase subunit, peptidy-prolyl-cis-trans-isomerase, protein kinase, Ribose-5-phosphate isomerase, slr1293-protein, YDR049W-protein, YJL181W-protein, and YPL109C-protein-activity.

[0001] The present invention disclosed herein provides a method for producing a plant with increased yield as compared to a corresponding wild type plant comprising increasing or generating one or more activities in a plant or a part thereof. The present invention further relates to nucleic acids enhancing or improving one or more traits of a transgenic plant, and cells, progenies, seeds and pollen derived from such plants or parts, as well as methods of making and methods of using such plant cell(s) or plant(s), progenies, seed(s) or pollen. Particularly, said improved trait(s) are manifested in an increased yield, preferably by improving one or more yield-related trait(s).

[0002] Under field conditions, plant performance, for example in terms of growth, development, biomass accumulation and seed generation, depends on a plant's tolerance and acclimation ability to numerous environmental conditions, changes and stresses. Since the beginning of agriculture and horticulture, there was a need for improving plant traits in crop cultivation. Breeding strategies foster crop properties to withstand biotic and abiotic stresses, to improve nutrient use efficiency and to alter other intrinsic crop specific yield parameters, i.e. increasing yield by applying technical advances. Plants are sessile organisms and consequently need to cope with various environmental stresses. Biotic stresses such as plant pests and pathogens on the one hand, and abiotic environmental stresses on the other hand are major limiting factors for plant growth and productivity (Boyer, Plant Productivity and Environment, Science 218, 443-448 (1982); Bohnert et al., Adaptations to Environmental Stresses, Plant Cell 7 (7), 1099-1111 (1995)), thereby limiting plant cultivation and geographical distribution. Plants exposed to different stresses typically have low yields of plant material, like seeds, fruit or other produces. Crop losses and crop yield losses caused by abiotic and biotic stresses represent a significant economic and political factor and contribute to food shortages, particularly in many underdeveloped countries.

[0003] Conventional means for crop and horticultural improvements today utilize selective breeding techniques to identify plants with desirable characteristics. Advances in molecular biology have allowed to modify the germplasm of plants in a specific way. For example, the modification of a single gene, resulted in several cases in a significant increase in e.g. stress tolerance (Wang et al., 2003) as well as other yield-related traits. There is a need to identify genes which confer resistance to various combinations of stresses or which confer improved yield under suboptimal growth conditions. There is still a need to identify genes which confer the overall capacity to improve yield of plants.

[0004] Further, population increases and climate change have brought the possibility of global food, feed, and fuel shortages into sharp focus in recent years. Agriculture consumes 70% of water used by people, at a time when rainfall in many parts of the world is declining. In addition, as land use shifts from farms to cities and suburbs, fewer hectares of arable land are available to grow agricultural crops. Agricultural biotechnology has attempted to meet humanity's growing needs through genetic modifications of plants that could increase crop yield, for example, by conferring better tolerance to abiotic stress responses or by increasing biomass.

[0005] Agricultural biotechnologists have used assays in model plant systems, greenhouse studies of crop plants, and field trials in their efforts to develop transgenic plants that exhibit increased yield, either through increases in abiotic stress tolerance or through increased biomass.

[0006] Agricultural biotechnologists also use measurements of other parameters that indicate the potential impact of a transgene on crop yield. For forage crops like alfalfa, silage corn, and hay, the plant biomass correlates with the total yield. For grain crops, however, other parameters have been used to estimate yield, such as plant size, as measured by total plant dry weight, above-ground dry weight, above-ground fresh weight, leaf area, stem volume, plant height, rosette diameter, leaf length, root length, root mass, tiller number, and leaf number. Plant size at an early developmental stage will typically correlate with plant size later in development. A larger plant with a greater leaf area can typically absorb more light and carbon dioxide than a smaller plant and therefore will likely gain a greater weight during the same period. There is a strong genetic component to plant size and growth rate, and so for a range of diverse genotypes plant size under one environmental condition is likely to correlate with size under another. In this way a standard environment is used to approximate the diverse and dynamic environments encountered at different locations and times by crops in the field.

[0007] Some genes that are involved in stress responses, water use, and/or biomass in plants have been characterized, but to date, success at developing transgenic crop plants with improved yield has been limited, and no such plants have been commercialized. There is a need, therefore, to identify additional genes that have the capacity to increase yield of crop plants.

[0008] Accordingly, in a first embodiment, the present invention provides a method for producing a plant with increased yield as compared to a corresponding wild type plant comprising at least the following step: increasing or generating in a plant one or more activities (in the following referred to as one or more “activities” or one or more of said activities or for one selected activity as “said activity”) selected from the group consisting of 3-phosphoglycerate dehydrogenase, Adenylate kinase, B2758-protein, Cyclic nucleotide phosphodiesterase, cysteine synthase, Exopolyphosphatase, geranylgeranyl reductase, Mating hormone A-factor precursor, mitochondrial succinate-fumarate transporter, modification methylase HemK family protein, Myo-inositol transporter, oxidoreductase subunit, peptidy-prolyl-cis-trans-isomerase, protein kinase, Ribose-5-phosphate isomerase, slr1293-protein, YDR049W-protein, YJL181W-protein, and YPL109C-protein-activity.

[0009] Accordingly, in a further embodiment, the invention provides a transgenic plant that over-expresses an isolated polynucleotide identified in Table I in the sub-cellular compartment and tissue indicated herein. The transgenic plant of the invention demonstrates an improved yield or increased yield as compared to a wild type variety of the plant. The terms “improved yield” or “increased yield” can be used interchangeable.

[0010] The term “yield” as used herein generally refers to a measurable produce from a plant, particularly a crop. Yield and yield increase (in comparison to a non-transformed starting or wild-type plant) can be measured in a number of ways, and it is understood that a skilled person will be able to apply the correct meaning in view of the particular embodiments, the particular crop concerned and the specific purpose or application concerned.

[0011] As used herein, the term “improved yield” or the term “increased yield” means any improvement in the yield of any measured plant product, such as grain, fruit or fiber. In accordance with the invention, changes in different phenotypic traits may improve yield. For example, and without limitation, parameters such as floral organ development, root initiation, root biomass, seed number, seed weight, harvest index, tolerance to abiotic environmental stress, leaf formation, phototropism, apical dominance, and fruit development, are suitable measurements of improved yield. Any increase in yield is an improved yield in accordance with the invention. For example, the improvement in yield can comprise a 0.1%, 0.5%, 1%, 3%, 5%, 10%, 15%, 20%, 30%, 40%, 50%, 60%, 70%, 80%, 90% or greater increase in any measured parameter. For example, an increase in the bu/acre yield of soybeans or corn derived from a crop comprising plants which are transgenic for the nucleotides and polypeptides of Table I, as compared with the bu/acre yield from untreated soybeans or corn cultivated under the same conditions, is an improved yield in accordance with the invention. The increased or improved yield can be achieved in the absence or presence of stress conditions.

[0012] For the purposes of the description of the present invention, enhanced or increased “yield” refers to one or more yield parameters selected from the group consisting of biomass yield, dry biomass yield, aerial dry biomass yield, underground dry biomass yield, fresh-weight biomass yield, aerial fresh-weight biomass yield, underground fresh-weight biomass yield; enhanced yield of harvestable parts, either dry or fresh-weight or both, either aerial or underground or both; enhanced yield of crop fruit, either dry or fresh-weight or both, either aerial or underground or both; and preferably enhanced yield of seeds, either dry or fresh-weight or both, either aerial or underground or both. The term “yield” as used herein generally refers to a measurable produce from a plant, particularly a crop. For example, the present invention provides methods for producing transgenic plant cells or plants with can show an increased yield-related trait, e.g. an increased tolerance to environmental stress and/or increased intrinsic yield and/or biomass production as compared to a corresponding (e.g. non-transformed) wild type or starting plant by increasing or generating one or more of said activities mentioned above.

[0013] In one embodiment, an increase in yield refers to increased or improved crop yield or harvestable yield, biomass yield and/or an increased seed yield.

[0014] Crop yield is defined herein as the number of bushels of relevant agricultural product (such as grain, forage, or seed) harvested per acre. Crop yield is impacted by abiotic stresses, such as drought, heat, salinity, and cold stress, and by the size (biomass) of the plant. Traditional plant breeding strategies are relatively slow and have in general not been successful in conferring increased tolerance to abiotic stresses. Grain yield improvements by conventional breeding have nearly reached a plateau in maize.

[0015] Accordingly, in one embodiment, “Yield” as described herein refers to harvestable yield of a plant. The yield of a plant can depend on the specific plant/crop of interest as well as its intended application (such as food production, feed production, processed food production, biofuel, biogas or alcohol production, or the like) of interest in each particular case. Thus, in one embodiment, yield is calculated as harvest index (expressed as a ratio of the weight of the respective harvestable parts divided by the total biomass), harvestable parts weight per area (acre, square meter, or the like); and the like. The harvest index, i.e., the ratio of yield biomass to the total cumulative biomass at harvest, in maize has remained essentially unchanged during selective breeding for grain yield over the last hundred years. Accordingly, recent yield improvements that have occurred in maize are the result of the increased total biomass production per unit land area. This increased total biomass has been achieved by increasing planting density, which has led to adaptive phenotypic alterations, such as a reduction in leaf angle, which may reduce shading of lower leaves, and tassel size, which may increase harvest index. Harvest index is relatively stable under many environmental conditions, and so a robust correlation between plant size and grain yield is possible. Plant size and grain yield are intrinsically linked, because the majority of grain biomass is dependent on current or stored photosynthetic productivity by the leaves and stem of the plant. As with abiotic stress tolerance, measurements of plant size in early development, under standardized conditions in a growth chamber or greenhouse, are standard practices to measure potential yield advantages conferred by the presence of a transgene.

[0016] In one embodiment, “yield” refers to biomass yield, e.g. to dry weight biomass yield and/or fresh-weight biomass yield. Biomass yield refers to the aerial or underground parts of a plant, depending on the specific circumstances (test conditions, specific crop of interest, application of interest, and the like). In one embodiment, biomass yield refers to the aerial and underground parts. Biomass yield may be calculated as fresh-weight, dry weight or a moisture adjusted basis. Biomass yield may be calculated on a per plant basis or in relation to a specific area (e.g. biomass yield per acre/square meter/or the like).

[0017] In other embodiment, “yield” refers to seed yield which can be measured by one or more of the following parameters: number of seeds or number of filled seeds (per plant or per area (acre/square meter/or the like)); seed filling rate (ratio between number of filled seeds and total number of seeds); number of flowers per plant; seed biomass or total seeds weight (per plant or per area (acre/square meter/or the like); thousand kernel weight (TKW; extrapolated from the number of filled seeds counted and their total weight; an increase in TKW may be caused by an increased seed size, an increased seed weight, an increased embryo size, and/or an increased endosperm). Other parameters allowing to measure seed yield are also known in the art. Seed yield may be determined on a dry weight or on a fresh weight basis, or typically on a moisture adjusted basis, e.g. at 15.5 percent moisture.

[0018] In one embodiment, the term “increased yield” means that the photosynthetic active organism, especially a plant, exhibits an increased growth rate, under conditions of abiotic environmental stress, compared to the corresponding wild-type photosynthetic active organism.

[0019] An increased growth rate may be reflected inter alia by or confers an increased biomass production of the whole plant, or an increased biomass production of the aerial parts of a plant, or by an increased biomass production of the underground parts of a plant, or by an increased biomass production of parts of a plant, like stems, leaves, blossoms, fruits, and/or seeds.

[0020] In an embodiment thereof, increased yield includes higher fruit yields, higher seed yields, higher fresh matter production, and/or higher dry matter production.

[0021] In another embodiment thereof, the term “increased yield” means that the photosynthetic active organism, preferably plant, exhibits an prolonged growth under conditions of abiotic environmental stress, as compared to the corresponding, e.g. non-transformed, wild type photosynthetic active organism. A prolonged growth comprises survival and/or continued growth of the photosynthetic active organism, preferably plant, at the moment when the non-transformed wild type photosynthetic active organism shows visual symptoms of deficiency and/or death.

[0022] For example, in one embodiment, the plant used in the method of the invention is a corn plant. Increased yield for corn plants means in one embodiment, increased seed yield, in particular for corn varieties used for feed or food. Increased seed yield of corn refers in one embodiment to an increased kernel size or weight, an increased kernel per pod, or increased pods per plant. Further, in one embodiment, the cob yield is increased, this is particularly useful for corn plant varieties used for feeding. Further, for example, the length or size of the cob is increased. In one embodiment, increased yield for a corn plant relates to an improved cob to kernel ratio.

[0023] For example, in one embodiment, the plant used in the method of the invention is a soy plant. Increased yield for soy plants means in one embodiment, increased seed yield, in particular for soy varieties used for feed or food. Increased seed yield of soy refers in one embodiment to an increased kernel size or weight, an increased kernel per pod, or increased pods per plant.

[0024] For example, in one embodiment, the plant used in the method of the invention is an oil seed rape (OSR) plant. Increased yield for OSR plants means in one embodiment, increased seed yield, in particular for OSR varieties used for feed or food. Increased seed yield of OSR refers in one embodiment to an increased kernel size or weight, an increased kernel per pod, or increased pods per plant.

[0025] For example, in one embodiment, the plant used in the method of the invention is a cotton plant. Increased yield for cotton plants means in one embodiment, increased lint yield. Increased cotton yield of cotton refers in one embodiment to an increased length of lint.

[0026] Increased seed yield of corn refers in one embodiment to an increased kernel size or weight, an increased kernel per pod, or increased pods per plant.

[0027] Said increased yield in accordance with the present invention can typically be achieved by enhancing or improving, in comparison to an origin or wild-type plant, one or more yield-related traits of the plant. Such yield-related traits of a plant the improvement of which results in increased yield comprise, without limitation, the increase of the intrinsic yield capacity of a plant, improved nutrient use efficiency, and/or increased stress tolerance, in particular increased abiotic stress tolerance.

[0028] Accordingly to present invention, yield is increased by improving one or more of the yield-related traits as defined herein:

[0029] Accordingly, in one embodiment, the yield-related trait conferring an increase of the plant's yield is an increase of the intrinsic yield capacity of a plant and can be, for example, manifested by improving the specific (intrinsic) seed yield (e.g. in terms of increased seed/grain size, increased ear number, increased seed number per ear, improvement of seed filling, improvement of seed composition, embryo and/or endosperm improvements, or the like); modification and improvement of inherent growth and development mechanisms of a plant (such as plant height, plant growth rate, pod number, pod position on the plant, number of internodes, incidence of pod shatter, efficiency of nodulation and nitrogen fixation, efficiency of carbon assimilation, improvement of seedling vigour/early vigour, enhanced efficiency of germination (under stressed or non-stressed conditions), improvement in plant architecture, cell cycle modifications, photosynthesis modifications, various signaling pathway modifications, modification of transcriptional regulation, modification of translational regulation, modification of enzyme activities, and the like); and/or the like.

[0030] Accordingly, in one embodiment, the yield-related trait conferring an increase of the plant's yield is an improvement or increase of stress tolerance of a plant and can be for example manifested by improving or increasing a plant's tolerance against stress, particularly abiotic stress. In the present application, abiotic stress refers generally to abiotic environmental conditions a plant is typically confronted with, including conditions which are typically referred to as “abiotic stress” conditions including, but not limited to, drought (tolerance to drought may be achieved as a result of improved water use efficiency), heat, low temperatures and cold conditions (such as freezing and chilling conditions), salinity, osmotic stress, shade, high plant density, mechanical stress, oxidative stress, and the like.

[0031] Accordingly, in one embodiment of the present invention, an increased plant yield is mediated by increasing the “nutrient use efficiency of a plant”, e.g. by improving the use efficiency of nutrients including, but not limited to, phosphorus, potassium, and nitrogen. For example, there is a need for plants that are capable to use nitrogen more efficiently so that less nitrogen is required for growth and therefore resulting in the improved level of yield under nitrogen deficiency conditions. Further, higher yields may be obtained with current or standard levels of nitrogen use. Accordingly, in one embodiment of the present invention, plant yield is increased by increasing nitrogen use efficiency of a plant or a part thereof. Because of the high costs of nitrogen fertilizer in relation to the revenues for agricultural products, and additionally its deleterious effect on the environment, it is desirable to develop strategies to reduce nitrogen input and/or to optimize nitrogen uptake and/or utilization of a given nitrogen availability while simultaneously maintaining optimal yield, productivity and quality of plants, preferably cultivated plants, e.g. crops. Also it is desirable to maintain the yield of crops with lower fertilizer input and/or higher yield on soils of similar or even poorer quality.

[0032] Enhanced NUE of the plant can be determined and quantified according to the following method: Transformed plants are grown in pots in a growth chamber (Svalöf Weibull, Svalöv, Sweden). In case the plants are Arabidopsis thaliana seeds thereof are sown in pots containing a 1:1 (v:v) mixture of nutrient depleted soil (“Einheitserde Typ 0”, 30% clay, Tantau, Wansdorf Germany) and sand. Germination is induced by a four day period at 4° C., in the dark. Subsequently the plants are grown under standard growth conditions. In case the plants are Arabidopsis thaliana, the standard growth conditions are: photoperiod of 16 h light and 8 h dark, 20° C., 60% relative humidity, and a photon flux density of 200 μE. In case the plants are Arabidopsis thaliana they are watered every second day with a N-depleted nutrient solution. After 9 to 10 days the plants are individualized. After a total time of 29 to 31 days the plants are harvested and rated by the fresh weight of the aerial parts of the plants, preferably the rosettes.

[0033] In a further embodiment, the increased yield is determined according to the method described in the examples. Accordingly, in one embodiment, the present invention relates to a method for increasing the yield, comprising the following steps: (a) measuring the nitrogen content in the soil, and (b) determining, whether the nitrogen-content in the soil is optimal or suboptimal for the growth of an origin or wild type plant, e.g. a crop, and (c1) growing the plant of the invention in said soil, if the nitrogen-content is suboptimal for the growth of the origin or wild type plant, or (c2) growing the plant of the invention in the soil and comparing the yield with the yield of a standard, an origin or a wild type plant, selecting and growing the plant, which shows the highest yield, if the nitrogen-content is optimal for the origin or wild type plant.

[0034] In a further embodiment of the present invention, plant yield is increased by increasing the plant's stress tolerance(s). Generally, the term “increased tolerance to stress” can be defined as survival of plants, and/or higher yield production, under stress conditions as fined as survival of plants, and/or higher yield production, under stress conditions as compared to a non-transformed wild type or starting plant. For example, the plant of the invention or produced according to the method of the invention is better adapted to the stress conditions. “Improved adaptation” to environmental stress like e.g. draught, heat, nutrient depletion, freezing and/or chilling temperatures refers herein to an improved plant performance resulting in an increased yield, particularly with regard to one or more of the yield related traits as defined in more detail above.

[0035] During its life-cycle, a plant is generally confronted with a diversity of environmental conditions. Any such conditions, which may, under certain circumstances, have an impact on plant yield, are herein referred to as “stress” condition. Environmental stresses may generally be divided into biotic and abiotic (environmental) stresses. Unfavorable nutrient conditions are sometimes also referred to as “environmental stress”. The present invention does also contemplate solutions for this kind of environmental stress, e.g. referring to increased nutrient use efficiency.

[0036] In a further embodiment of the present invention, plant yield is increased by increasing the abiotic stress tolerance(s) of a plant or a part thereof.

[0037] For the purposes of the description of the present invention, the terms “enhanced tolerance to abiotic stress”, “enhanced resistance to abiotic environmental stress”, “enhanced tolerance to environmental stress”, “improved adaptation to environmental stress” and other variations and expressions similar in its meaning are used interchangeably and refer, without limitation, to an improvement in tolerance to one or more abiotic environmental stress(es) as described herein and as compared to a corresponding origin or wild type plant or a part

[0038] The term abiotic stress tolerance(s) refers for example low temperature tolerance, drought tolerance or improved water use efficiency (WUE), heat tolerance, salt stress tolerance and others. Studies of a plant's response to desiccation, osmotic shock, and temperature extremes are also employed to determine the plant's tolerance or resistance to abiotic stresses.

[0039] Stress tolerance in plants like low temperature, drought, heat and salt stress tolerance can have a common theme important for plant growth, namely the availability of water. Plants are typically exposed during their life cycle to conditions of reduced environmental water content. The protection strategies are similar to those of chilling tolerance.

[0040] Accordingly, in one embodiment of the present invention, said yield-related trait relates to an increased water use efficiency of the plant of the invention and/or an increased tolerance to drought conditions of the plant of the invention. Water use efficiency (WUE) is a parameter often correlated with drought tolerance. An increase in biomass at low water availability may be due to relatively improved efficiency of growth or reduced water consumption. In selecting traits for improving crops, a decrease in water use, without a change in growth would have particular merit in an irrigated agricultural system where the water input costs were high. An increase in growth without a corresponding jump in water use would have applicability to all agricultural systems. In many agricultural systems where water supply is not limiting, an increase in growth, even if it came at the expense of an increase in water use also increases yield.

[0041] When soil water is depleted or if water is not available during periods of drought, crop yields are restricted. Plant water deficit develops if transpiration from leaves exceeds the supply of water from the roots. The available water supply is related to the amount of water held in the soil and the ability of the plant to reach that water with its root system. Transpiration of water from leaves is linked to the fixation of carbon dioxide by photosynthesis through the stomata. The two processes are positively correlated so that high carbon dioxide influx through photosynthesis is closely linked to water loss by transpiration. As water transpires from the leaf, leaf water potential is reduced and the stomata tend to close in a hydraulic process limiting the amount of photosynthesis. Since crop yield is dependent on the fixation of carbon dioxide in photosynthesis, water uptake and transpiration are contributing factors to crop yield. Plants which are able to use less water to fix the same amount of carbon dioxide or which are able to function normally at a lower water potential have the potential to conduct more photosynthesis and thereby to produce more biomass and economic yield in many agricultural systems.

[0042] In one embodiment of the present invention drought stress means any environmental stress which leads to a lack of water in plants or reduction of water supply to plants, including a secondary stress by low temperature and/or salt, and/or a primary stress during drought or heat, e.g. desiccation etc.

[0043] Increased tolerance to drought conditions can for example be determined and quantified according to the following method. E.g., transformed plants are grown individually in pots in a growth chamber (York Industriekälte GmbH, Mannheim, Germany). Germination is induced. In case the plants are Arabidopsis thaliana sown seeds are kept at 4° C., in the dark, for 3 days in order to induce germination. Subsequently conditions are changed for 3 days to 20° C./6° C. day/night temperature with a 16/8 h day-night cycle at 150 μE/m2s. Subsequently the plants are grown under standard growth conditions. In case the plants are Arabidopsis thaliana, the standard growth conditions are: photoperiod of 16 h light and 8 h dark, 20° C., 60% relative humidity, and a photon flux density of 200 μE. Plants are grown and cultured until they develop leaves. In case the plants are Arabidopsis thaliana they are watered daily until they were approximately 3 weeks old. Starting at that time drought was imposed by withholding water. After the non-transformed wild type plants show visual symptoms of injury, the evaluation starts and plants are scored for symptoms of drought symptoms and biomass production comparison to wild type and neighboring plants for 5-6 days in succession. In a further embodiment, the tolerance to drought, e.g. the tolerance to cycling drought is determined according to the method described in the examples.

[0044] In a preferred embodiment, the tolerance to drought is a tolerance to cycling drought.

[0045] Accordingly, in one embodiment, the present invention relates to a method for increasing the yield, comprising the following steps: (a) determining, whether the water supply in the area for planting is optimal or suboptimal for the growth of an origin or wild type plant, e.g. a crop, and/or determining the visual symptoms of injury of plants growing in the area for planting; and (b1) growing the plant of the invention in said soil, if the water supply is suboptimal for the growth of an origin or wild type plant or visual symptoms for drought can be found at a standard, origin or wild type plant growing in the area; or (b2) growing the plant of the invention in the soil and comparing the yield with the yield of a standard, an origin or a wild type plant and selecting and growing the plant, which shows the highest yield, if the water supply is optimal for the origin or wild type plant.

[0046] Visual symptoms of injury stating for one or any combination of two, three or more of the following features: (a) wilting; (b) leaf browning; (c) loss of turgor, which results in drooping of leaves or needles stems, and flowers, (d) drooping and/or shedding of leaves or needles, (e) the leaves are green but leaf angled slightly toward the ground compared with controls, (f) leaf blades begun to fold (curl) inward, (g) premature senescence of leaves or needles, (h) loss of chlorophyll in leaves or needles and/or yellowing.

[0047] In a further embodiment of the present invention, said yield-related trait of the plant of the invention is an increased tolerance to heat conditions of said plant.

[0048] In another embodiment of the present invention, said yield-related trait of the plant of the invention is an increased low temperature tolerance of said plant, e.g. comprising freezing tolerance and/or chilling tolerance. Low temperatures impinge on a plethora of biological processes. They retard or inhibit almost all metabolic and cellular processes The response of plants to low temperature is an important determinant of their ecological range. The problem of coping with low temperatures is exacerbated by the need to prolong the growing season beyond the short summer found at high latitudes or altitudes. Most plants have evolved adaptive strategies to protect themselves against low temperatures. Generally, adaptation to low temperature may be divided into chilling tolerance, and freezing tolerance.

[0049] Chilling tolerance is naturally found in species from temperate or boreal zones and allows survival and an enhanced growth at low but non-freezing temperatures. Species from tropical or subtropical zones are chilling sensitive and often show wilting, chlorosis or necrosis, slowed growth and even death at temperatures around 10° C. during one or more stages of development. Accordingly, improved or enhanced “chilling tolerance” or variations thereof refers herein to improved adaptation to low but non-freezing temperatures around 10° C., preferably temperatures between 1 to 18° C., more preferably 4-14° C., and most preferred 8 to 12° C.; hereinafter called “chilling temperature”.

[0050] Freezing tolerance allows survival at near zero to particularly subzero temperatures. It is believed to be promoted by a process termed cold-acclimation which occurs at low but non-freezing temperatures and provides increased freezing tolerance at subzero temperatures. In addition, most species from temperate regions have life cycles that are adapted to seasonal changes of the temperature. For those plants, low temperatures may also play an important role in plant development through the process of stratification and vernalisation. It becomes obvious that a clear-cut distinction between or definition of chilling tolerance and freezing tolerance is difficult and that the processes may be overlapping or interconnected.

[0051] Improved or enhanced “freezing tolerance” or variations thereof refers herein to improved adaptation to temperatures near or below zero, namely preferably temperatures below 4° C., more preferably below 3 or 2° C., and particularly preferred at or below 0 (zero)° C. or below −4° C., or even extremely low temperatures down to −10° C. or lower; hereinafter called “freezing temperature.

[0052] Accordingly, the plant of the invention may in one embodiment show an early seedling growth after exposure to low temperatures to an chilling-sensitive wild type or origin, improving in a further embodiment seed germination rates. The process of seed germination strongly depends on environmental temperature and the properties of the seeds determine the level of activity and performance during germination and seedling emergence when being exposed to low temperature. The method of the invention further provides in one embodiment a plant which show under chilling condition an reduced delay of leaf development. In one embodiment the method of the invention relates to a production of a tolerant major crop, e.g. corn (maize), bean, rice, soy bean, cotton, tomato, banana, cucumber or potato because most major crops are chilling-sensitive.

[0053] Enhanced tolerance to low temperature may, for example, be determined according to the following method: Transformed plants are grown in pots in a growth chamber (e.g. York, Mannheim, Germany). In case the plants are Arabidopsis thaliana seeds thereof are sown in pots containing a 3.5:1 (v:v) mixture of nutrient rich soil (GS90, Tantau, Wansdorf, Germany) and sand. Plants are grown under standard growth conditions. In case the plants are Arabidopsis thaliana, the standard growth conditions are: photoperiod of 16 h light and 8 h dark, 20° C., 60% relative humidity, and a photon flux density of 200 μmol/m2s. Plants are grown and cultured. In case the plants are Arabidopsis thaliana they are watered every second day. After 9 to 10 days the plants are individualized. Cold (e.g. chilling at 11-12° C.) is applied 14 days after sowing until the end of the experiment. After a total growth period of 29 to 31 days the plants are harvested and rated by the fresh weight of the aerial parts of the plants, in the case of Arabidopsis preferably the rosettes.

[0054] Accordingly, in one embodiment, the present invention relates to a method for increasing yield, comprising the following steps: (a) determining, whether the temperature in the area for planting is optimal or suboptimal for the growth of an origin or wild type plant, e.g. a crop; and (b1) growing the plant of the invention in said soil; if the temperature is suboptimal low for the growth of an origin or wild type plant growing in the area; or (b2) growing the plant of the invention in the soil and comparing the yield with the yield of a standard, an origin or a wild type plant and selecting and growing the plant, which shows the highest yield, if the temperature is optimal for the origin or wild type plant.

[0055] In a further embodiment of the present invention, yield-related trait may also be increased salinity tolerance (salt tolerance), tolerance to osmotic stress, increased shade tolerance, increased tolerance to a high plant density, increased tolerance to mechanical stresses, and/or increased tolerance to oxidative stress.

[0056] In an embodiment thereof, the term “enhanced tolerance to abiotic environmental stress” in a photosynthetic active organism means that the photosynthetic active organism, preferably a plant, when confronted with abiotic environmental stress conditions exhibits an enhanced dry biomass yield as compared to a corresponding, e.g. non-transformed, wild type photosynthetic active organism like a plant.

[0057] In an embodiment thereof, the term “enhanced tolerance to abiotic environmental stress” in a photosynthetic active organism means that the photosynthetic active organism, preferably a plant, when confronted with abiotic environmental stress conditions exhibits an enhanced aerial dry biomass yield as compared to a corresponding, e.g. non-transformed, wild type photosynthetic active organism.

[0058] In an embodiment thereof, the term “enhanced tolerance to abiotic environmental stress” in a photosynthetic active organism means that the photosynthetic active organism, preferably a plant, when confronted with abiotic environmental stress conditions exhibits an enhanced underground dry biomass yield as compared to a corresponding, e.g. non-transformed, wild type photosynthetic active organism.

[0059] In another embodiment thereof, the term “enhanced tolerance to abiotic environmental stress” in a photosynthetic active organism means that the photosynthetic active organism, preferably a plant, when confronted with abiotic environmental stress conditions exhibits an enhanced fresh weight biomass yield as compared to a corresponding, e.g. non-transformed, wild type photosynthetic active organism.

[0060] In an embodiment thereof, the term “enhanced tolerance to abiotic environmental stress” in a photosynthetic active organism means that the photosynthetic active organism, preferably a plant, when confronted with abiotic environmental stress conditions exhibits an enhanced aerial fresh weight biomass yield as compared to a corresponding, e.g. non-transformed, wild type photosynthetic active organism.

[0061] In an embodiment thereof, the term “enhanced tolerance to abiotic environmental stress” in a photosynthetic active organism means that the photosynthetic active organism, preferably a plant, when confronted with abiotic environmental stress conditions exhibits an enhanced underground fresh weight biomass yield as compared to a corresponding, e.g. non-transformed, wild type photosynthetic active organism.

[0062] In another embodiment thereof, the term “enhanced tolerance to abiotic environmental stress” in a photosynthetic active organism means that the photosynthetic active organism, preferably a plant, when confronted with abiotic environmental stress conditions exhibits an enhanced yield of harvestable parts of a plant as compared to a corresponding, e.g. non-transformed, wild type photosynthetic active organism.

[0063] In an embodiment thereof, the term “enhanced tolerance to abiotic environmental stress” in a photosynthetic active organism means that the photosynthetic active organism, preferably a plant, when confronted with abiotic environmental stress conditions exhibits an enhanced yield of dry harvestable parts of a plant as compared to a corresponding, e.g. non-transformed, wild type photosynthetic active organism.

[0064] In an embodiment thereof, the term “enhanced tolerance to abiotic environmental stress” in a photosynthetic active organism means that the photosynthetic active organism, preferably a plant, when confronted with abiotic environmental stress conditions exhibits an enhanced yield of dry aerial harvestable parts of a plant as compared to a corresponding, e.g. non-transformed, wild type photosynthetic active organism.

[0065] In an embodiment thereof, the term “enhanced tolerance to abiotic environmental stress” in a photosynthetic active organism means that the photosynthetic active organism, preferably a plant, when confronted with abiotic environmental stress conditions exhibits an enhanced yield of underground dry harvestable parts of a plant as compared to a corresponding, e.g. non-transformed, wild type photosynthetic active organism.

[0066] In another embodiment thereof, the term “enhanced tolerance to abiotic environmental stress” in a photosynthetic active organism means that the photosynthetic active organism, preferably a plant, when confronted with abiotic environmental stress conditions exhibits an enhanced yield of fresh weight harvestable parts of a plant as compared to a corresponding, e.g. non-transformed, wild type photosynthetic active organism.

[0067] In an embodiment thereof, the term “enhanced tolerance to abiotic environmental stress” in a photosynthetic active organism means that the photosynthetic active organism, preferably a plant, when confronted with abiotic environmental stress conditions an enhanced yield of aerial fresh weight harvestable parts of a plant as compared to a corresponding, e.g. non-transformed, wild type photosynthetic active organism.

[0068] In an embodiment thereof, the term “enhanced tolerance to abiotic environmental stress” in a photosynthetic active organism means that the photosynthetic active organism, preferably a plant, when confronted with abiotic environmental stress conditions exhibits an enhanced yield of underground fresh weight harvestable parts of a plant as compared to a corresponding, e.g. non-transformed, wild type photosynthetic active organism.

[0069] In a further embodiment, the term “enhanced tolerance to abiotic environmental stress” in a photosynthetic active organism means that the photosynthetic active organism, preferably a plant, when confronted with abiotic environmental stress conditions exhibits an enhanced yield of the crop fruit as compared to a corresponding, e.g. non-transformed, wild type photosynthetic active organism.

[0070] In an embodiment thereof, the term “enhanced tolerance to abiotic environmental stress” in a photosynthetic active organism means that the photosynthetic active organism, preferably a plant, when confronted with abiotic environmental stress conditions exhibits an enhanced yield of the fresh crop fruit as compared to a corresponding, e.g. non-transformed, wild type photosynthetic active organism.

[0071] In an embodiment thereof, the term “enhanced tolerance to abiotic environmental stress” in a photosynthetic active organism means that the photosynthetic active organism, preferably a plant, when confronted with abiotic environmental stress conditions exhibits an enhanced yield of the dry crop fruit as compared to a corresponding, e.g. non-transformed, wild type photosynthetic active organism.

[0072] In an embodiment thereof, the term “enhanced tolerance to abiotic environmental stress” in a photosynthetic active organism means that the photosynthetic active organism, preferably a plant, when confronted with abiotic environmental stress conditions exhibits an enhanced grain dry weight as compared to a corresponding, e.g. non-transformed, wild type photosynthetic active organism.

[0073] In a further embodiment, the term “enhanced tolerance to abiotic environmental stress” in a photosynthetic active organism means that the photosynthetic active organism, preferably a plant, when confronted with abiotic environmental stress conditions exhibits an enhanced yield of seeds as compared to a corresponding, e.g. non-transformed, wild type photosynthetic active organism.

[0074] In an embodiment thereof, the term “enhanced tolerance to abiotic environmental stress” in a photosynthetic active organism means that the photosynthetic active organism, preferably a plant, when confronted with abiotic environmental stress conditions exhibits an enhanced yield of fresh weight seeds as compared to a corresponding, e.g. non-transformed, wild type photosynthetic active organism.

[0075] In an embodiment thereof, the term “enhanced tolerance to abiotic environmental stress” in a photosynthetic active organism means that the photosynthetic active organism, preferably a plant, when confronted with abiotic environmental stress conditions exhibits an enhanced yield of dry seeds as compared to a corresponding, e.g. non-transformed, wild type photosynthetic active organism. For example, the abiotic environmental stress conditions, the organism is confronted with can, however, be any of the abiotic environmental stresses mentioned herein.

[0076] An increased nitrogen use efficiency of the produced corn relates in one embodiment to an improved protein content of the corn seed, in particular in corn seed used as feed. Increased nitrogen use efficiency relates in another embodiment to an increased kernel size or number. A increased water use efficiency of the produced corn relates in one embodiment to an increased kernel size or number. Further, an increased tolerance to low temperature relates in one embodiment to an early vigor and allows the early planting and sowing of a corn plant produced according to the method of the present invention.

[0077] A increased nitrogen use efficiency of the produced soy plant relates in one embodiment to an improved protein content of the soy seed, in particular in soy seed used as feed. Increased nitrogen use efficiency relates in another embodiment to an increased kernel size or number. A increased water use efficiency of the produced soy plant relates in one embodiment to an increased kernel size or number. Further, an increased tolerance to low temperature relates in one embodiment to an early vigor and allows the early planting and sowing of a soy plant produced according to the method of the present invention.

[0078] A increased nitrogen use efficiency of the produced OSR plant relates in one embodiment to an improved protein content of the OSR seed, in particular in OSR seed used as feed. Increased nitrogen use efficiency relates in another embodiment to an increased kernel size or number. A increased water use efficiency of the produced OSR plant relates in one embodiment to an increased kernel size or number. Further, an increased tolerance to low temperature relates in one embodiment to an early vigor and allows the early planting and sowing of a soy plant produced according to the method of the present invention. In one embodiment, the present invention relates to a method for the production of hardy oil seed rape (OSR with winter hardness) comprising using a hardy oil seed rape plant in the above mentioned method of the invention.

[0079] A increased nitrogen use efficiency of the produced cotton plant relates in one embodiment to an improved protein content of the cotton seed, in particular in cotton seed used for feeding. Increased nitrogen use efficiency relates in another embodiment to an increased kernel size or number. A increased water use efficiency of the produced cotton plant relates in one embodiment to an increased kernel size or number. Further, an increased tolerance to low temperature relates in one embodiment to an early vigor and allows the early planting and sowing of a soy plant produced according to the method of the present invention.

[0080] Accordingly, in one embodiment of the present invention, yield is increased by improving one or more of the yield-related traits as defined herein. Thus, the present invention provides a method for producing a transgenic plant showing an increased yield-related trait as compared to a corresponding origin or the wild type plant, by increasing or generating one or more activities (in the following “activities”) selected from the group consisting of 3-phosphoglycerate dehydrogenase, Adenylate kinase, B2758-protein, Cyclic nucleotide phosphodiesterase, cysteine synthase, Exopolyphosphatase, geranylgeranyl reductase, Mating hormone A-factor precursor, mitochondrial succinate-fumarate transporter, modification methylase HemK family protein, Myo-inositol transporter, oxidoreductase subunit, peptidy-prolyl-cis-trans-isomerase, protein kinase, Ribose-5-phosphate isomerase, slr1293-protein, YDR049W-protein, YJL181W-protein, and YPL109C-protein.

[0081] Thus, in one embodiment, the present invention provides a method for producing a plant showing an increased yield, e.g. stress resistance, particularly abiotic stress resistance, as compared to a corresponding origin or wild type plant, by increasing or generating one or more said “activities”. In another embodiment, the abiotic stress resistance achieved in accordance with the methods of the present invention, and shown by the transgenic plant of the invention; is increased low temperature tolerance, particularly increased tolerance to chilling.

[0082] In another embodiment, the abiotic stress resistance achieved in accordance with the methods of the present invention, and shown by the transgenic plant of the invention; is increased drought tolerance, particularly increased tolerance to cycling drought.

[0083] Thus, in one further embodiment of the present invention, a method is provided for producing a transgenic plant; progenies, seeds, and/or pollen derived from such plant or for the production of such a plant; each plant can also show an increased low temperature tolerance, particularly chilling tolerance, as compared to a corresponding, e.g. non-transformed, wild type plant cell or plant, by increasing or generating one or more of said “activities” in the sub-cellular compartment and tissue indicated herein in said plant.

[0084] Thus, in one further embodiment of the present invention, a method is provided for producing a transgenic plant; progenies, seeds, and/or pollen derived from such plant or for the production of such a plant; each plant can also show improved water use efficiency or increased drought tolerance as compared to a corresponding, e.g. non-transformed, wild type plant cell or plant, by increasing or generating one or more of said Activities in the sub-cellular compartment and tissue indicated herein in said plant.

[0085] Thus, in one further embodiment of the present invention, a method is provided for producing a transgenic plant; progenies, seeds, and/or pollen derived from such plant or for the production of such a plant; each plant can show nitrogen use efficiency (NUE) as well as an increased low temperature tolerance and/or increased intrinsic yield and/or drought tolerance, particularly chilling tolerance, and draught tolerance as compared to a corresponding, e.g. non-transformed, wild type plant cell or plant, by increasing or generating one or more of said Activities in the sub-cellular compartment and tissue indicated herein in said plant.

[0086] Thus, in one further embodiment of the present invention, a method is provided for producing a transgenic plant; progenies, seeds, and/or pollen derived from such plantor for the production of such a plant; each plant can show an increased nitrogen use efficiency (NUE) as well as low temperature tolerance or increased drought tolerance or increased intrinsic yield, particularly chilling tolerance, and draught tolerance and increase biomass as compared to a corresponding, e.g. non-transformed, wild type plant cell or plant, by increasing or generating one or more of said Activities as well as in the sub-cellular compartment and tissue indicated herein in said plant.

[0087] Thus, in one further embodiment of the present invention, a method is provided for producing a transgenic plant; progenies, seeds, and/or pollen derived from such or for the production of such a plant; each plant can show an increased nitrogen use efficiency (NUE) and low temperature tolerance and increased drought tolerance and increased intrinsic yield, particularly chilling tolerance, and draught tolerance and increase biomass as compared to a corresponding, e.g. non-transformed, wild type plant cell or plant, by increasing or generating one or more of said Activities in the sub-cellular compartment and tissue indicated herein in said plant.

[0088] Furthermore, in one embodiment, the present invention provides a transgenic plant showing one or more increased yield-related trait as compared to the corresponding, e.g. non-transformed, origin or wild type plant cell or plant, having an increased or newly generated one or more activities selected from the above mentioned group of Activities in the sub-cellular compartment and tissue indicated herein in said plant.

[0089] Thus, in one further embodiment of the present invention, a method is provided for producing a transgenic plant; progenies, seeds, and/or pollen derived from such plant or for the production of such a plant; each showing an increased low temperature tolerance and nitrogen use efficiency (NUE) as compared to a corresponding, e.g. non-transformed, wild type plant cell or plant, by increasing or generating one or more of said “activities”.

[0090] Thus, in one further embodiment of the present invention, a method is provided for producing a transgenic plant; progenies, seeds, and/or pollen derived from such plant or for the production of such a plant; each showing an increased an improved NUE and increased cycling drought tolerance as compared to a corresponding, e.g. non-transformed, wild type plant cell or plant, by increasing or generating one or more of said “activities”.

[0091] In another embodiment, the present invention provides a method for producing a plant transgenic plant; progenies, seeds, and/or pollen derived from such plant or for the production of such a plant; showing an increased intrinsic yield, as compared to a corresponding origin or wild type, e.g. non-transformed, cell or plant, by increasing or generating one or more of said “activities”

[0092] In another embodiment, the present invention provides a method for producing a plant; showing an increased nutrient use efficiency, as compared to a corresponding origin or wild type plant, by increasing or generating one or more said “activities”. In another embodiment, the nutrient use efficiency achieved in accordance with the methods of the present invention, and shown by the transgenic plant of the invention; is increased nitrogen use efficiency.

[0093] In one embodiment, said activity is increased in one or more specific compartments of a cell and confers an increased yield, e.g. the plant shows an increased or improved said yield-related trait. For example, said activity is increased in the plastid of a cell as indicated in table I or II in column 6 and increases yield in a corresponding plant. For example the specific plastidic localization of said activity confers an improved or increased yield-related trait as shown in table VIII. Further, said activity can be increased in mitochondria of a cell and increases yield in a corresponding plant, e.g. conferring an improved or increased yield-related trait as shown in table VIII.

[0094] Further, the present invention relates to method for producing a plant with increased yield as compared to a corresponding wild type plant comprising at least one of the steps selected from the group consisting of: (i) increasing or generating the activity of a polypeptide comprising a polypeptide, a consensus sequence or at least one polypeptide motif as depicted in column 5 or 7 of table II or of table IV, respectively; (ii) increasing or generating the activity of an expression product of one or more nucleic acid molecule(s) comprising one or more polynucleotide(s) as depicted in column 5 or 7 of table I, and (iii) increasing or generating the activity of a functional equivalent of (i) or (ii).

[0095] Accordingly, the increase or generation of one or more said activities is for example conferred by one or more expression products of said nucleic acid molecule, e.g. proteins. Accordingly, in the present invention described above, the increase or generation of one or more said activities is for example conferred by one or more protein(s) each comprising a polypeptide selected from the group as depicted in table II, column 5 and 7.

[0096] The method of the invention comprises in one embodiment the following steps: (i) increasing or generating of the expression of; and/or (ii) increasing or generating the expression of an expression product; and/or (iii) increasing or generating one or more activities of an expression product encoded by; at least one nucleic acid molecule (in the following “Yield Related Protein (YRP)”-encoding gene or “YRP”-gene) comprising a nucleic acid molecule selected from the group consisting of:
[0097] (a) a nucleic acid molecule encoding the polypeptide shown in column 5 or 7 of table II;
[0098] (b) a nucleic acid molecule shown in column 5 or 7 of table I;
[0099] (c) a nucleic acid molecule, which, as a result of the degeneracy of the genetic code, can be derived from a polypeptide sequence depicted in column 5 or 7 of table II and confers an increased yield as compared to a corresponding, e.g. non-transformed, wild type plant cell, a transgenic plant or a part thereof;
[0100] (d) a nucleic acid molecule having at least 30, for example 50, 60, 70, 80, 85, 90, 95, 97, 98, or 99% identity with the nucleic acid molecule sequence of a polynucleotide comprising the nucleic acid molecule shown in column 5 or 7 of table I and confers an increased yield as compared to a corresponding, e.g. non-transformed, wild type plant cell, a transgenic plant or a part thereof;
[0101] (e) a nucleic acid molecule encoding a polypeptide having at least 30, for example 50, 60, 70, 80, 85, 90, 95, 97, 98, or 99% identity with the amino acid sequence of the polypeptide encoded by the nucleic acid molecule of (a) to (c) and having the activity represented by a nucleic acid molecule comprising a polynucleotide as depicted in column 5 of table I and confers an increased yield as compared to a corresponding, e.g. non-transformed, wild type plant cell, a transgenic plant or a part thereof;
[0102] (f) a nucleic acid molecule which hybridizes with a nucleic acid molecule of (a) to (c) under stringent hybridization conditions and confers an increased yield as compared to a corresponding, e.g. non-transformed, wild type plant cell, a transgenic plant or a part thereof;
[0103] (g) a nucleic acid molecule encoding a polypeptide which can be isolated with the aid of monoclonal or polyclonal antibodies made against a polypeptide encoded by one of the nucleic acid molecules of (a) to (e) and having the activity represented by the nucleic acid molecule comprising a polynucleotide as depicted in column 5 of table I;
[0104] (h) a nucleic acid molecule encoding a polypeptide comprising the consensus sequence or one or more polypeptide motifs as shown in column 7 of table IV and preferably having the activity represented by a nucleic acid molecule comprising a polynucleotide as depicted in column 5 of table II or IV;
[0105] (i) a nucleic acid molecule encoding a polypeptide having the activity represented by a protein as depicted in column 5 of table II and conferring increased yield as compared to a corresponding, e.g. non-transformed, wild type plant cell, a transgenic plant or a part thereof;
[0106] (j) nucleic acid molecule which comprises a polynucleotide, which is obtained by amplifying a cDNA library or a genomic library using the primers in column 7 of table III and preferably having the activity represented by a nucleic acid molecule comprising a polynucleotide as depicted in column 5 of table II or IV; and
[0107] (k) a nucleic acid molecule which is obtainable by screening a suitable nucleic acid library under stringent hybridization conditions with a probe comprising a complementary sequence of a nucleic acid molecule of (a) or (b) or with a fragment thereof, having at least 15 nt, preferably 20 nt, 30 nt, 50 nt, 100 nt, 200 nt, or 500 nt, 1000 nt, 1500 nt, 2000 nt or 3000 nt of a nucleic acid molecule complementary to a nucleic acid molecule sequence characterized in (a) to (e) and encoding a polypeptide having the activity represented by a protein comprising a polypeptide as depicted in column 5 of table II.

[0108] Accordingly, the genes of the present invention or used in accordance with the present invention, which encode a protein having an activity selected from the group consisting of 3-phosphoglycerate dehydrogenase, Adenylate kinase, B2758-protein, Cyclic nucleotide phosphodiesterase, cysteine synthase, Exopolyphosphatase, geranylgeranyl reductase, Mating hormone A-factor precursor, mitochondrial succinate-fumarate transporter, modification methyllase HemK family protein, Myo-inositol transporter, oxidoreductase subunit, peptidy-prolyl-cis-trans-isomerase, protein kinase, Ribose-5-phosphate isomerase, slr1293-protein, YDR049W-protein, YJL181W-protein, and YPL109C-protein, which encode a protein comprising a polypeptide encoded for by a nucleic acid sequence as shown in table I, column 5 or 7, and/or which encode a protein comprising a polypeptide as depicted in table II, column 5 and 7, or which an be amplified with the primer set shown in table III, column 7, are also referred to as “YRP genes”.

[0109] Proteins or polypeptides encoded by the “YRP-genes” are referred to as “Yield Related Proteins” or “YRP”. For the purposes of the description of the present invention, the proteins having an activity selected from the group consisting of 3-phosphoglycerate dehydrogenase, Adenylate kinase, B2758-protein, Cyclic nucleotide phosphodiesterase, cysteine synthase, Exopolyphosphatase, geranylgeranyl reductase, Mating hormone A-factor precursor, mitochondrial succinate-fumarate transporter, modification methylase HemK family protein, Myo-inositol transporter, oxidoreductase subunit, peptidy-prolyl-cis-trans-isomerase, protein kinase, Ribose-5-phosphate isomerase, slr1293-protein, YDR049W-protein, YJL181W-protein, and YPL109C-protein, protein(s) comprising a polypeptide encoded by one or more nucleic acid sequences as shown in table I, column 5 or 7, or protein(s) comprising a polypeptide as depicted in table II, column 5 and 7, or proteins comprising the consensus sequence as shown in table IV, column 7, or comprising one or more motives as shown in table IV, column 7 are also referred to as “Yield Related Proteins” or “YRPs”.

[0110] Thus, in one embodiment, the present invention provides a method for producing a plant showing increased or improved yield as compared to the corresponding origin or wild type plant, by increasing or generating one or more activities selected from the group consisting of 3-phosphoglycerate dehydrogenase, Adenylate kinase, B2758-protein, Cyclic nucleotide phosphodiesterase, cysteine synthase, Exopolyphosphatase, geranylgeranyl reductase, Mating hormone A-factor precursor, mitochondrial succinate-fumarate transporter, modification methyllase HemK family protein, Myo-inositol transporter, oxidoreductase subunit, peptidy-prolyl-cis-trans-isomerase, protein kinase, Ribose-5-phosphate isomerase, slr1293-protein, YDR049W-protein, YJL181W-protein, and YPL109C-protein, which is conferred by one or more YRP or the gene product of one or more YRP-genes, for example by the gene product of a nucleic acid sequence comprising a polynucleotide selected from the group as shown in table I, column 5 or 7, e.g. by one or more proteins each comprising a polypeptide encoded by one or more nucleic acid sequences selected from the group as shown in table I, column 5 or 7, or by one or more protein(s) each comprising a polypeptide selected from the group as depicted in table II, column 5 and 7, or a protein having a sequence corresponding to the consensus sequence shown in table IV, column 7.

[0111] As mentioned, the increase yield can be mediated by one or more yield-related traits. Thus, the method of the invention relates also to the production of a plant showing said one or more yield-related traits.

[0112] Thus, the present invention provides a method for producing a plant showing an increased nutrient use efficiency, e.g. nitrogen use efficiency (NUE)., increased stress resistance particularly abiotic stress resistance, increased nutrient use efficiency, increased water use efficiency, and/or an increased stress resistance, particularly abiotic stress resistance, particular low temperature tolerance or draught tolerance or an increased intrinsic yield.

[0113] In one embodiment, one or more of said activities is increased by increasing the amount and/or specific activity of one or more proteins having said activity, e.g. by increasing the amount and/or specific activity in the cell or a compartment of a cell of one of more YRP, for example of polypeptides as depicted in table II, column 5 and 7 or corresponding to the consensus sequence as shown in table VI, column 7.

[0114] Further, the present invention relates to a method for producing a plant with increased yield as compared to a corresponding origin or wild type plant, e.g. a transgenic plant, which comprises: (a) increasing or generating, in a plant cell nucleus, a plant cell, a plant or a part thereof, one or more activities selected from the group consisting of 3-phosphoglycerate dehydrogenase, Adenylate kinase, B2758-protein, Cyclic nucleotide phosphodiesterase, cysteine synthase, Exopolyphosphatase, geranylgeranyl reductase, Mating hormone A-factor precursor, mitochondrial succinate-fumarate transporter, modification methylase HemK family protein, Myo-inositol transporter, oxidoreductase subunit, peptidy-prolyl-cis-trans-isomerase, protein kinase, Ribose-5-phosphate isomerase, slr1293-protein, YDR049W-protein, YJL181W-protein, and YPL109C-protein, e.g. by the methods mentioned herein; and (b) cultivating or growing the plant cell, the plant or the part thereof under conditions which permit the development of the plant cell, the plant or the part thereof; and (c) recovering a plant from said plant cell nucleus, a plant cell, a plant part, showing increased yield as compared to a corresponding, e.g. non-transformed, origin or wild type plant; (d) and optionally, selecting the plant or a part thereof, showing increased yield, for example showing an increased or improved yield-related trait, e.g. an improved nutrient use efficiency and/or abiotic stress resistance, as compared to a corresponding, e.g. non-transformed, wild type plant cell, e.g. which shows visual symptoms of deficiency and/or death.

[0115] Furthermore, the present invention also relates to a method for the identification of a plant with an increased yield comprising screening a population of one or more plant cell nuclei, plant cells, plant tissues or plants or parts thereof for said activity selected from the group consisting of 3-phosphoglycerate dehydrogenase, Adenylate kinase, B2758-protein, Cyclic nucleotide phosphodiesterase, cysteine synthase, Exopolyphosphatase, geranylgeranyl reductase, Mating hormone A-factor precursor, mitochondrial succinate-fumarate transporter, modification methylase HemK family protein, Myo-inositol transporter, oxidoreductase subunit, peptidy-prolyl-cis-trans-isomerase, protein kinase, Ribose-5-phosphate isomerase, slr1293-protein, YDR049W-protein, YJL181W-protein, and YPL109C-protein, comparing the level of activity with the activity level in a reference; identifying one or more plant cell nuclei, plant cells, plant tissues or plants or parts thereof with the activity increased compared to the reference, optionally producing a plant from the identified plant cell nuclei, cell or tissue.

[0116] In one further embodiment, the present invention also relates to a method for the identification of a plant with an increased yield comprising screening a population of one or more plant cell nuclei, plant cells, plant tissues or plants or parts thereof for the expression level of an nucleic acid coding for an polypeptide conferring said activity, comparing the level of expression with a reference; identifying one or more plant cell nuclei, plant cells, plant tissues or plants or parts thereof with the expression level increased compared to the reference, optionally producing a plant from the identified plant cell nuclei, cell or tissue.

[0117] In another embodiment, the present invention relates to a method for increasing yield of a population of plants, comprising checking the growth temperature(s) in the area for planting, comparing the temperatures with the optimal growth temperature of a plant species or a variety considered for planting, e.g. the origin or wild type plant mentioned herein, planting and growing the plant of the invention if the growth temperature is not optimal for the planting and growing of the plant species or the variety considered for planting, e.g. for the origin or wild type plant. The method can be repeated in parts or in whole once or more.

[0118] The method can be repeated in parts or in whole once or more.

[0119] In one embodiment, the present invention provides a process for improving the adaptation to environmental stress, particularly adaptation to low temperature, i.e. enhancing the tolerance to low temperature comprising but not limited to enhancing chilling tolerance and/or freezing tolerance, in a photosynthetic active organism, in particular in a plant, which are reflected alone or altogether in such increased abiotic stress adaptation and/or a process for an increased yield under conditions of abiotic stress, particularly low temperature stress.

[0120] Further, the present invention provides a plant cell and/or a plant with enhanced or improved yield. As mentioned, according to the present invention, increased or improved yield can be achieved by increasing or improving one or more yield-related traits, e.g. the nutrient use efficiency, water use efficiency, tolerance to abiotic environmental stress, particularly low temperature or drought, as compared to the corresponding, e.g. non-transformed, wild type or starting plant cell and/or plant.

[0121] In one embodiment of the present invention, these traits are achieved by a process for an enhanced tolerance to abiotic environmental stress in a photosynthetic active organism, preferably a plant, as compared to a corresponding (non-transformed) wild type or starting photosynthetic active organism.

[0122] “Improved adaptation” to environmental stress like e.g. freezing and/or chilling temperatures, refers to an improved plant performance under environmental stress conditions. Accordingly, for the purposes of the description of the present invention, the term “low temperature” with respect to low temperature stress on a photosynthetic active organism, preferably a plant, and most preferred a crop plant, refers to any of the low temperature conditions as described above, preferably chilling and/or freezing temperatures as defined above, as the context requires.

[0123] In a further embodiment, “enhanced tolerance to abiotic environmental stress” in a photosynthetic active organism means that the photosynthetic active organism, preferably the plant, when confronted with abiotic environmental stress conditions as mentioned herein, e.g. like low temperature conditions including chilling and freezing temperatures or e.g. drought, exhibits an enhanced yield, e.g. exhibits an increased yield as mentioned herein, e.g. a seed yield or biomass yield, as compared to a corresponding (non-transformed) wild type or starting photosynthetic active organism, e.g. a wild type or origin plant.

[0124] Accordingly, in an embodiment, the present invention provides a method for producing a transgenic plant cell with increased yield, e.g. tolerance to abiotic environmental stress and/or another increased yield-related trait, as compared to a corresponding, e.g. non-transformed, wild type plant cell by increasing or generating one or more activities selected from the group consisting of:

[0125] 3-phosphoglycerate dehydrogenase, Adenylate kinase, B2758-protein, Cyclic nucleotide phosphodiesterase, cysteine synthase, Exopolyphosphatase, geranylgeranyl reductase, Mating hormone A-factor precursor, mitochondrial succinate-fumarate transporter, modification methylase HemK family protein, Myo-inositol transporter, oxidoreductase subunit, peptidy-prolyl-cis-trans-isomerase, protein kinase, Ribose-5-phosphate isomerase, slr1293-protein, YDR049W-protein, YJL181W-protein, and YPL109C-protein-activity.

[0126] In one embodiment of the invention the proteins having an activity selected from the group consisting of 3-phosphoglycerate dehydrogenase, Adenylate kinase, B2758-protein, Cyclic nucleotide phosphodiesterase, cysteine synthase, Exopolyphosphatase, geranylgeranyl reductase, Mating hormone A-factor precursor, mitochondrial succinate-fumarate transporter, modification methylase HemK family protein, Myo-inositol transporter, oxidoreductase subunit, peptidy-prolyl-cis-trans-isomerase, protein kinase, Ribose-5-phosphate isomerase, slr1293-protein, YDR049W-protein, YJL181W-protein, and YPL109C-protein-activity as well as polypeptides depicted in table II, column 5 and 7 or comprising the sequence depicted in table IV, column 7 are referred to as “Yield-related proteins”.

[0127] In another embodiment, the photosynthetic active organism produced according the invention, especially the plant of the invention, shows increased yield under conditions of abiotic environmental stress and shows an enhanced tolerance to a further abiotic environmental stress or shows another improved yield-related trait.

[0128] In another embodiment this invention fulfills the need to identify new, unique genes capable of conferring increased yield, e.g. with an increased yield-related trait, for example enhanced tolerance to abiotic environmental stress, for example an increased drought tolerance and/or low temperature tolerance and/or an increased nutrient use efficiency, intrinsic yield and/or another increased yield-related trait, to photosynthetic active organism, preferably plants, upon expression or over-expression of endogenous and/or exogenous genes. Accordingly, the present invention provides YRP and YRP genes.

[0129] In another embodiment thereof this invention fulfills the need to identify new, unique genes capable of conferring increased yield, e.g. with an increased yield-related trait, for example enhanced tolerance to abiotic environmental stress, for example an increased drought tolerance and/or low temperature tolerance and/or an increased nutrient use efficiency, intrinsic yield and/or another increased yield-related trait, to photosynthetic active organism, preferably plants, upon expression or over-expression of endogenous genes. Accordingly, the present invention provides YRP and YRP genes derived from plants. In particular, gene from plants are described in column 5 as well as in column 7 of tables I or II.

[0130] In another embodiment thereof this invention fulfills the need to identify new, unique genes capable of conferring increased yield, e.g. with an increased yield-related trait, for example enhanced tolerance to abiotic environmental stress, for example an increased drought tolerance and/or low temperature tolerance and/or an increased nutrient use efficiency, intrinsic yield and/or another increased yield-related trait, to photosynthetic active organism, preferably plants, upon expression or over-expression of exogenous genes. Accordingly, the present invention provides YRP and YRP genes derived from plants and other organisms in column 5 as well as in column 7 of tables I or II.

[0131] In another embodiment this invention fulfills the need to identify new, unique genes capable of conferring an enhanced tolerance to abiotic environmental stress in combination with an increase of yield to photosynthetic active organism, preferably plants, upon expression or over-expression of endogenous and/or exogenous genes.

[0132] Accordingly, the present invention relates to a method for producing a, for example transgenic, photosynthetic active organism, or a part thereof, or a plant cell, a plant or a part thereof for the generation of such a plant, the organism showing an increased yield, e.g. the plant showing an increased yield-related trait, for example enhanced tolerance to abiotic environmental stress, like for example enhanced tolerance to drought and/or low temperature, and/or showing an increased nutrient use efficiency, an intrinsic yield and/or another increased yield-related trait, as compared to a corresponding, for example non-transformed, wild type photosynthetic active organism or a part thereof, or a plant cell, a plant or a part thereof, said method comprises: (a) increasing or generating one or more said activities, e.g. the activity of said YRP or the gene product of said YRP gene, e.g. an activity selected from the group consisting of 3-phosphoglycerate dehydrogenase, Adenylate kinase, B2758-protein, Cyclic nucleotide phosphodiesterase, cysteine synthase, Exopolyphosphatase, geranylgeranyl reductase, Mating hormone A-factor precursor, mitochondrial succinate-fumarate transporter, modification methylase HemK family protein, Myo-inositol transporter, oxidoreductase subunit, peptidy-prolyl-cis-trans-isomerase, protein kinase, Ribose-5-phosphate isomerase, slr1293-protein, YDR049W-protein, YJL181W-protein, and YPL109C-protein in a photosynthetic active organism or a part thereof, e.g. a plant cell, a plant or a part thereof, and, (b) optionally, regenerating a plant from said plant cell, plant cell nucleus or part thereof, growing the photosynthetic active organism or a part thereof, e.g. a plant cell, a plant or a part thereof under conditions which permit the development of a photosynthetic active organism or a part thereof, preferably a plant cell, a plant or a part thereof, with increased yield, e.g. with an increased yield-related trait, for example enhanced tolerance to abiotic environmental stress, for example an increased drought tolerance and/or low temperature tolerance and/or an increased nutrient use efficiency, intrinsic yield and/or another increased yield-related trait as compared to a corresponding, e.g. non-transformed, wild type photosynthetic active organism or a part thereof, preferably a plant cell, a plant or a part thereof.

[0133] In an further embodiment, the present invention relates to a method for producing a transgenic plant with an increased yield or a plant cell nucleus, a plant cell, or a part thereof for the generation of such a plant, the yield increased as compared to a corresponding non-transformed wild type plant, said method comprises: (a) increasing or generating, in said plant cell nucleus, plant cell, plant or part thereof, one or more said activities, e.g. the activity of said YRP or the gene product of said YRP gene; (b) optionally regenerating a plant from said plant cell nucleus, plant cell, or part thereof, growing the plant under conditions, preferably in presence or absence of nutrient deficiency and/or abiotic stress, which permits the development of a plant, showing increased yield as compared to a corresponding non-transformed wild type plant; and (c) selecting the plant showing increased yield, preferably improved nutrient use efficiency and/or abiotic stress resistance, as compared to a corresponding non-transformed wild type plant cell, a transgenic plant or a part thereof which shows visual symptoms of deficiency and/or death under said conditions.

[0134] In a further embodiment, the present invention relates to a method for producing a, e.g. transgenic, photosynthetic active organism or a part thereof, preferably a plant, or a plant cell, a plant cell nucleus, or a part thereof for the regeneration of said plant, the plant showing an increased yield, e.g. showing an increased yield-related trait, for example showing an enhanced tolerance to abiotic environmental stress, for example, showing an increased drought tolerance and/or low temperature tolerance and/or an increased nutrient use efficiency and/or intrinsic yield and/or another increased yield-related trait, as compared to a corresponding, e.g. non-transformed, wild type photosynthetic active organism or a part thereof, preferably a plant, said method comprises at least the following steps: (a) increasing or generating one or more said activities, e.g. the activity of said YRP or the gene product of said YRP gene, e.g. an activity selected from the group consisting of: 3-phosphoglycerate dehydrogenase, Adenylate kinase, B2758-protein, Cyclic nucleotide phosphodiesterase, cysteine synthase, Exopolyphosphatase, geranylgeranyl reductase, Mating hormone A-factor precursor, mitochondrial succinate-fumarate transporter, modification methylase HemK family protein, Myo-inositol transporter, oxidoreductase subunit, peptidy-prolyl-cis-trans-isomerase, protein kinase, Ribose-5-phosphate isomerase, slr1293-protein, YDR049W-protein, YJL181W-protein, and YPL109C-protein-activity in a photosynthetic active organism or a part thereof, preferably a plant cell, a plant or a part thereof, (b) growing the photosynthetic active organism together with a, e.g. non-transformed, wild type photosynthetic active organism under conditions of abiotic environmental stress or deficiency; (c) selecting the photosynthetic active organism with increased yield, e.g. with an increased yield-related trait, for example enhanced tolerance to abiotic environmental stress, for example an increased drought tolerance and/or low temperature tolerance and/or an increased nutrient use efficiency, intrinsic yield and/or another increased yield-related trait, or a part thereof, e.g. a plant cell, the yield being increased as compared to a corresponding, e.g. non-transformed, wild type photosynthetic active organism e.g. a plant, after the, e.g. non-transformed, wild type photosynthetic active organism or a part thereof show visual symptoms of deficiency and/or death.

[0135] In one embodiment throughout the description, abiotic environmental stress refers to low temperature stress. Further, in one embodiment, the yield-related trait is increased low temperature tolerance.

[0136] In one embodiment the present invention in said method for producing an, e.g. transgenic, photosynthetic active organism or a part thereof, the activity of said YRP is increased or generated by increasing or generating the activity of a protein as shown in table II, column 3 or encoded by the nucleic acid sequences as shown in table I, column 5 or 7 is increased in the part of a cell as indicated in table II or table I in column 6. In one embodiment, said activity, e.g. the activity of said protein as shown in table II, column 3 or encoded by the nucleic acid sequences as shown in table I, column 5, is increased in the part of a cell as indicated in table II or table I in column 6. Furthermore, the present invention relates to a method for producing a transgenic plant with increased yield as compared to a corresponding, e.g. non-transformed, wild type plant, transforming a plant cell or a plant cell nucleus or a plant tissue to produce such a plant, with a nucleic acid molecule comprising a nucleic acid molecule selected from the group consisting of: (a) a nucleic acid molecule encoding the polypeptide shown in column 5 or 7 of table II; (b) a nucleic acid molecule shown in column 5 or 7 of table I; (c) a nucleic acid molecule, which, as a result of the degeneracy of the genetic code, can be derived from a polypeptide sequence depicted in column 5 or 7 of table II and confers an increased yield as compared to a corresponding, e.g. non-transformed, wild type plant cell, a transgenic plant or a part thereof; (d) a nucleic acid molecule having at least 30, for example 50, 60, 70, 80, 85, 90, 95, 97, 98, or 99% identity with the nucleic acid molecule sequence of a polynucleotide comprising the nucleic acid molecule shown in column 5 or 7 of table I and confers an increased yield as compared to a corresponding, e.g. non-transformed, wild type plant cell, a transgenic plant or a part thereof; (e) a nucleic acid molecule encoding a polypeptide having at least 30, for example 50, 60, 70, 80, 85, 90, 95, 97, 98, or 99% identity with the amino acid sequence of the polypeptide encoded by the nucleic acid molecule of (a) to (c) and having the activity represented by a nucleic acid molecule comprising a polynucleotide as depicted in column 5 of table I and confers an increased yield as compared to a corresponding, e.g. non-transformed, wild type plant cell, a transgenic plant or a part thereof; (f) a nucleic acid molecule which hybridizes with a nucleic acid molecule of (a) to (c) under stringent hybridization conditions and confers an increased yield as compared to a corresponding, e.g. non-transformed, wild type plant cell, a transgenic plant or a part thereof; (g) a nucleic acid molecule encoding a polypeptide which can be isolated with the aid of monoclonal or polyclonal antibodies made against a polypeptide encoded by one of the nucleic acid molecules of (a) to (e) and having the activity represented by the nucleic acid molecule comprising a polynucleotide as depicted in column 5 of table I; (h) a nucleic acid molecule encoding a polypeptide comprising the consensus sequence or one or more polypeptide motifs as shown in column 7 of table IV and preferably having the activity represented by a nucleic acid molecule comprising a polynucleotide as depicted in column 5 of table II or IV; (i) a nucleic acid molecule encoding a polypeptide having the activity represented by a protein as depicted in column 5 of table II and conferring increased yield as compared to a corresponding, e.g. non-transformed, wild type plant cell, a transgenic plant or a part thereof; (j) nucleic acid molecule which comprises a polynucleotide, which is obtained by amplifying a cDNA library or a genomic library using the primers in column 7 of table III and preferably having the activity represented by a nucleic acid molecule comprising a polynucleotide as depicted in column 5 of table II or IV; and (k) a nucleic acid molecule which is obtainable by screening a suitable nucleic acid library under stringent hybridization conditions with a probe comprising a complementary sequence of a nucleic acid molecule of (a) or (b) or with a fragment thereof, having at least 20, 30, 50, 100, 200, 300, 500 or 1000 or more nt of a nucleic acid molecule complementary to a nucleic acid molecule sequence characterized in (a) to (e) and encoding a polypeptide having the activity represented by a protein comprising a polypeptide as depicted in column 5 of table II, and regenerating a transgenic plant from that transformed plant cell nucleus, plant cell or plant tissue with increased yield.

[0137] A modification, i.e. an increase, can be caused by endogenous or exogenous factors. For example, an increase in activity in an organism or a part thereof can be caused by adding a gene product or a precursor or an activator or an agonist to the media or nutrition or can be caused by introducing said subjects into a organism, transient or stable. Furthermore such an increase can be reached by the introduction of the inventive nucleic acid sequence or the encoded protein in the correct cell compartment for example into the nucleus or cytoplasmic respectively or into plastids either by transformation and/or targeting. For the purposes of the description of the present invention, the terms “cytoplasmic” and “non-targeted” shall indicate, that the nucleic acid of the invention is expressed without the addition of an non-natural transit peptide encoding sequence. A non-natural transit peptide encoding sequence is a sequence which is not a natural part of a nucleic acid of the invention, e.g. of the nucleic acids depicted in table I column 5 or 7, but is rather added by molecular manipulation steps as for example described in the example under “plastid targeted expression”. Therefore the terms “cytoplasmic” and “non-targeted” shall not exclude a targeted localisation to any cell compartment for the products of the inventive nucleic acid sequences by their naturally occurring sequence properties within the background of the transgenic organism. The sub-cellular location of the mature polypeptide derived from the enclosed sequences can be predicted by a skilled person for the organism (plant) by using software tools like TargetP (Emanuelsson et al., (2000), Predicting sub-cellular localization of proteins based on their N-terminal amino acid sequence., J. Mol. Biol. 300, 1005-1016), ChloroP (Emanuelsson et al. (1999), ChloroP, a neural network-based method for predicting chloroplast transit peptides and their cleavage sites., Protein Science, 8: 978-984.) or other predictive software tools (Emanuelsson et al. (2007), Locating proteins in the cell using TargetP, SignalP, and related tools., Nature Protocols 2, 953-971).

[0138] Accordingly, the present invention relates to a method for producing a, e.g. transgenic, plant with increased yield, e.g. with an increased yield-related trait, for example enhanced tolerance to abiotic environmental stress, for example an increased drought tolerance and/or low temperature tolerance and/or an increased nutrient use efficiency, intrinsic yield and/or another increased yield-related trait as compared to a corresponding, e.g. non-transformed, wild type plant which comprises (a) increasing or generating one or more said activities, e.g. the activity of said YRP or the gene product of said YRP gene, e.g. an activity selected from the group consisting of 3-phosphoglycerate dehydrogenase, Adenylate kinase, B2758-protein, Cyclic nucleotide phosphodiesterase, cysteine synthase, Exopolyphosphatase, geranylgeranyl reductase, Mating hormone A-factor precursor, mitochondrial succinate-fumarate transporter, modification methylase HemK family protein, Myo-inositol transporter, oxidoreductase subunit, peptidy-prolyl-cis-trans-isomerase, protein kinase, Ribose-5-phosphate isomerase, slr1293-protein, YDR049W-protein, YJL181W-protein, and YPL109C-protein in an organelle, e.g. in a plastid or a mitochondrion, of a plant cell, for example as indicated in column 6 of table I, and (b) growing the plant cell under conditions which permit the development of a plant with increased yield, e.g. with an increased yield-related trait, for example enhanced tolerance to abiotic environmental stress, for example an increased drought tolerance and/or low temperature tolerance and/or an increased nutrient use efficiency, intrinsic yield and/or another increased yield-related trait as compared to a corresponding, e.g. non-transformed, wild type plant.

[0139] The localization of the polypeptide as described herein can change the yield-related trait. For example, the localization may be under the control of a transit peptide as depicted in column 6 or non-targeted. “Non-targeted” localization means that the polypeptide increases yield, e.g. confers the indicated yield-related trait being expressed without artificial transit peptide linked to the coding sequence. The person skilled in the art knows that the localization of a polypeptide is conferred by one or more elements or regions within the polypeptide. Signals controlling the localization may be interchangeable, e.g. as shown below for the transit peptides. In one embodiment, an activity as disclosed herein as being conferred by a YPR; e.g. a polypeptide shown in table II, is increased or generated in the plastid, if in column 6 of each table I the term “plastidic” is listed for said polypeptide. In one embodiment, an activity as disclosed herein as being conferred by a YPR; e.g. a polypeptide shown in table II, is increased or generated in the mitochondria if in column 6 of each table I the term “mitochondria” is listed for said polypeptide.

[0140] In another embodiment the present invention relates to a method for producing an, e.g. transgenic, plant with increased yield, e.g. with an increased yield-related trait, for example enhanced tolerance to abiotic environmental stress, for example an increased drought tolerance and/or low temperature tolerance and/or an increased nutrient use efficiency, intrinsic yield and/or another increased yield-related trait as compared to a corresponding, e.g. non-transformed, wild type plant, which comprises (a) increasing or generating one or more said activities in the cytoplasm of a plant cell, and (b) growing the plant under conditions which permit the development of a plant with increased yield, e.g. with an increased yield-related trait, for example enhanced tolerance to abiotic environmental stress, for example an increased drought tolerance and/or low temperature tolerance and/or an increased nutrient use efficiency, intrinsic yield and/or another increased yield-related trait as compared to a corresponding, e.g. non-transformed, wild type plant.

[0141] In one embodiment, an activity as disclosed herein as being conferred by a polypeptide shown in table II is increase or generated in the cytoplasm, if in column 6 of each table I the term “cytoplasmic” is listed for said polypeptide.

[0142] In another embodiment the present invention is related to a method for producing an e.g. transgenic, plant with increased yield, or a part thereof, e.g. a plant with an increased yield-related trait, for example enhanced tolerance to abiotic environmental stress, for example an increased drought tolerance and/or low temperature tolerance and/or an increased nutrient use efficiency, intrinsic yield and/or another increased yield-related trait, as compared to a corresponding, e.g. non-transformed, wild type plant, which comprises (a1) increasing or generating one or more said activities, e.g. the activity of said YRP or the gene product of said YRP gene, e.g. an activity selected from the group consisting of 3-phosphoglycerate dehydrogenase, Adenylate kinase, B2758-protein, Cyclic nucleotide phosphodiesterase, cysteine synthase, Exopolyphosphatase, geranylgeranyl reductase, Mating hormone A-factor precursor, mitochondrial succinate-fumarate transporter, modification methylase HemK family protein, Myo-inositol transporter, oxidoreductase subunit, peptidy-prolyl-cis-trans-isomerase, protein kinase, Ribose-5-phosphate isomerase, slr1293-protein, YDR049W-protein, YJL181W-protein, and YPL109C-protein in an organelle of a plant cell, or (a2) increasing or generating the activity of a YRP, e.g. of a protein as shown in table II, column 3 or as encoded by the nucleic acid sequences as shown in table I, column 5 or 7, and which is joined to a nucleic acid sequence encoding a transit peptide in the plant cell; or (a3) increasing or generating the activity of a YRP, e.g. a protein as shown in table II, column 3 or as encoded by the nucleic acid sequences as shown in table I, column 5 or 7, and which is joined to a nucleic acid sequence encoding an organelle localization sequence, especially a chloroplast localization sequence, in a plant cell, (a4) increasing or generating the activity of a YRP, e.g. a protein as shown in table II, column 3 or as encoded by the nucleic acid sequences as shown in table I, column 5 or 7, and which is joined to a nucleic acid sequence encoding a mitrochondrion localization sequence in a plant cell, and (b) regenerating a plant from said plant cell; (c) growing the plant under conditions which permit the development of a plant with increased yield, e.g. with an increased yield-related trait, for example enhanced tolerance to abiotic environmental stress, for example an increased drought tolerance and/or low temperature tolerance and/or an increased nutrient use efficiency, intrinsic yield and/or another increased yield-related trait as compared to a corresponding, e.g. non-transformed, wild type plant.

[0143] Accordingly, in a further embodiment, in said method for producing a transgenic plant with increased yield said activity is increased or generating by (a1) increasing or generating the activity of a protein as shown in table II, column 3 encoded by the nucleic acid sequences as shown in table I, column 5 or 7, in an organelle of a plant through the transformation of the organelle, or (a2) increasing or generating the activity of a protein as shown in table II, column 3 encoded by the nucleic acid sequences as shown in table I, column 5 or 7 in the plastid of a plant, or in one or more parts thereof, through the transformation of the plastids; (a3) increasing or generating the activity of a YRP, e.g. a protein as shown in table II, column 3 or as encoded by the nucleic acid sequences as shown in table I, column 5 or 7, in the chloroplast of a plant, or in one or more parts thereof, through the transformation of the chloroplast, (a4) increasing or generating the activity of a YRP, e.g. a protein as shown in table II, column 3 or as encoded by the nucleic acid sequences as shown in table I, column 5 or 7, in the mitochondrion of a plant, or in one or more parts thereof, through the transformation of the mitochondrion.

[0144] Consequently, the present invention also refers to a method for producing a plant with increased yield, e.g. based on an increased or improved yield-related trait, as compared to a corresponding wild type plant comprising at least one of the steps selected from the group consisting of: (i) increasing or generating the activity of a polypeptide comprising a polypeptide, a consensus sequence or at least one polypeptide motif as depicted in column 5 or 7 of table II or of table IV, respectively; (ii) increasing or generating the activity of an expression product of a nucleic acid molecule comprising a polynucleotide as depicted in column 5 or 7 of table I, and (iii) increasing or generating the activity of a functional equivalent of (i) or (ii).

[0145] In principle the nucleic acid sequence encoding a transit peptide can be isolated from every organism such as microorganisms such as algae or plants containing plastids preferably chloroplasts. A “transit peptide” is an amino acid sequence, whose encoding nucleic acid sequence is translated together with the corresponding structural gene. That means the transit peptide is an integral part of the translated protein and forms an amino terminal extension of the protein. Both are translated as so called “pre-protein”. In general the transit peptide is cleaved off from the pre-protein during or just after import of the protein into the correct cell organelle such as a plastid to yield the mature protein. The transit peptide ensures correct localization of the mature protein by facilitating the transport of proteins through intracellular membranes.

[0146] Nucleic acid sequences encoding a transit peptide can be derived from a nucleic acid sequence encoding a protein finally resided in the plastid and stemming from an organism selected from the group consisting of the genera Acetabularia, Arabidopsis, Brassica, Capsicum, Chlamydomonas, Cururbita, Dunaliella, Euglena, Flaveria, Glycine, Helianthus, Hordeum, Lemna, Lolium, Lycopersion, Malus, Medicago, Mesembryanthemum, Nicotiana, Oenotherea, Oryza, Petunia, Phaseolus, Physcomitrella, Pinus, Pisum, Raphanus, Silene, Sinapis, Solanum, Spinacea, Stevia, Synechococcus, Triticum and Zea.

[0147] For example, such transit peptides, which are beneficially used in the inventive process, are derived from the nucleic acid sequence encoding a protein selected from the group consisting of ribulose bisphosphate carboxylase/oxygenase, 5-enolpyruvyl-shikimate-3-phosphate synthase, acetolactate synthase, chloroplast ribosomal protein CS17, Cs protein, ferredoxin, plastocyanin, ribulose bisphosphate carboxylase activase, tryptophan synthase, acyl carrier protein, plastid chaperonin-60, cytochrome c552, 22-kDA heat shock protein, 33-kDa Oxygen-evolving enhancer protein 1, ATP synthase γ subunit, ATP synthase δ subunit, chlorophyll-a/b-binding proteinII-1, Oxygen-evolving enhancer protein 2, Oxygen-evolving enhancer protein 3, photosystem I: P21, photosystem I: P28, photosystem I: P30, photosystem I: P35, photosystem I: P37, glycerol-3-phosphate acyltransferases, chlorophyll a/b binding protein, CAB2 protein, hydroxymethyl-bilane synthase, pyruvate-orthophosphate dikinase, CAB3 protein, plastid ferritin, ferritin, early light-inducible protein, glutamate-1-semialdehyde aminotransferase, protochlorophyllide reductase, starch-granule-bound amylase synthase, light-harvesting chlorophyll a/b-binding protein of photosystem II, major pollen allergen Lol p 5a, plastid CIpB ATP-dependent protease, superoxide dismutase, ferredoxin NADP oxidoreductase, 28-kDa ribonucleoprotein, 31-kDa ribonucleoprotein, 33-kDa ribonucleoprotein, acetolactate synthase, ATP synthase CF0 subunit 1, ATP synthase CF0 subunit 2, ATP synthase CF0 subunit 3, ATP synthase CF0 subunit 4, cytochrome f, ADP-glucose pyrophosphorylase, glutamine synthase, glutamine synthase 2, carbonic anhydrase, GapA protein, heat-shock-protein hsp21, phosphate translocator, plastid CIpA ATP-dependent protease, plastid ribosomal protein CL24, plastid ribosomal protein CL9, plastid ribosomal protein PsCL18, plastid ribosomal protein PsCL25, DAHP synthase, starch phosphorylase, root acyl carrier protein II, betaine-aldehyde dehydrogenase, GapB protein, glutamine synthetase 2, phosphoribulokinase, nitrite reductase, ribosomal protein L12, ribosomal protein L13, ribosomal protein L21, ribosomal protein L35, ribosomal protein L40, triose phosphate-3-phosphoglyerate-phosphate translocator, ferredoxin-dependent glutamate synthase, glyceraldehyde-3-phosphate dehydrogenase, NADP-dependent malic enzyme and NADP-malate dehydrogenase.

[0148] In one embodiment the nucleic acid sequence encoding a transit peptide is derived from a nucleic acid sequence encoding a protein finally resided in the plastid and stemming from an organism selected from the group consisting of the species Acetabularia mediterranea, Arabidopsis thaliana, Brassica campestris, Brassica napus, Capsicum annuum, Chlamydomonas reinhardtii, Cururbita moschata, Dunaliella saline, Dunaliella tertiolecta, Euglena gracilis, Flaveria trinervia, Glycine max, Helianthus annuus, Hordeum vulgare, Lemna gibba, Lolium perenne, Lycopersion esculentum, Malus domestica, Medicago falcate, Medicago sativa, Mesembryanthemum crystallinum, Nicotiana plumbaginifolia, Nicotiana sylvestris, Nicotiana tabacum, Oenotherea hookeri, Oryza sativa, Petunia hybrida, Phaseolus vulgaris, Physcomitrella patens, Pinus tunbergii, Pisum sativum, Raphanus sativus, Silene pratensis, Sinapis alba, Solanum tuberosum, Spinacea oleracea, Stevia rebaudiana, Synechococcus, Synechocystis, Triticum aestivum and Zea mays.

[0149] Nucleic acid sequences are encoding transit peptides are disclosed by von Heijne et al. (Plant Molecular Biology Reporter, 9 (2), 104, (1991)), which are hereby incorporated by reference. Table V shows some examples of the transit peptide sequences disclosed by von Heijne et al.

[0150] According to the disclosure of the invention, especially in the examples, the skilled worker is able to link other nucleic acid sequences disclosed by von Heijne et al. to the herein disclosed YRP genes or genes encoding a YRP, e.g. to a nucleic acid sequences shown in table I, columns 5 and 7, e.g. for the nucleic acid molecules for which in column 6 of table I the term “plastidic” is indicated.

[0151] Nucleic acid sequences encoding transit peptides are derived from the genus Spinacia such as chloroplast 30S ribosomal protein PSrp-1, root acyl carrier protein II, acyl carrier protein, ATP synthase: γ subunit, ATP synthase: δ subunit, cytochrom f, ferredoxin I, ferredoxin NADP oxidoreductase (=FNR), nitrite reductase, phosphoribulokinase, plastocyanin or carbonic anhydrase. The skilled worker will recognize that various other nucleic acid sequences encoding transit peptides can easily isolated from plastid-localized proteins, which are expressed from nuclear genes as precursors and are then targeted to plastids. Such transit peptides encoding sequences can be used for the construction of other expression constructs. The transit peptides advantageously used in the inventive process and which are part of the inventive nucleic acid sequences and proteins are typically 20 to 120 amino acids, preferably 25 to 110, 30 to 100 or 35 to 90 amino acids, more preferably 40 to 85 amino acids and most preferably 45 to 80 amino acids in length and functions post-translational to direct the protein to the plastid preferably to the chloroplast. The nucleic acid sequences encoding such transit peptides are localized upstream of nucleic acid sequence encoding the mature protein. For the correct molecular joining of the transit peptide encoding nucleic acid and the nucleic acid encoding the protein to be targeted it is sometimes necessary to introduce additional base pairs at the joining position, which forms restriction enzyme recognition sequences useful for the molecular joining of the different nucleic acid molecules. This procedure might lead to very few additional amino acids at the N-terminal of the mature imported protein, which usually and preferably do not interfere with the protein function. In any case, the additional base pairs at the joining position which forms restriction enzyme recognition sequences have to be chosen with care, in order to avoid the formation of stop codons or codons which encode amino acids with a strong influence on protein folding, like e.g. proline. It is preferred that such additional codons encode small structural flexible amino acids such as glycine or alanine.

[0152] As mentioned above the nucleic acid sequence coding for the YRP, e.g. for a protein as shown in table II, column 3 or 5, and its homologs as disclosed in table I, column 7 can be joined to a nucleic acid sequence encoding a transit peptide, e.g. if for the nucleic acid molecule in column 6 of table I the term “plastidic” is indicated. This nucleic acid sequence encoding a transit peptide ensures transport of the protein to the respective organelle, especially the plastid. The nucleic acid sequence of the gene to be expressed and the nucleic acid sequence encoding the transit peptide are operably linked. Therefore the transit peptide is fused in frame to the nucleic acid sequence coding for a YRP, e.g. a protein as shown in table II, column 3 or 5 and its homologs as disclosed in table I, column 7, e.g. if for the nucleic acid molecule in column 6 of table I the term “plastidic” is indicated.

[0153] The term “organelle” according to the invention shall mean for example “mitochondria” or “plastid”. The term “plastid” according to the invention are intended to include various forms of plastids including proplastids, chloroplasts, chromoplasts, gerontoplasts, leucoplasts, amyloplasts, elaioplasts and etioplasts, preferably chloroplasts. They all have as a common ancestor the aforementioned proplasts.

[0154] Other transit peptides are disclosed by Schmidt et al. (J. Biol. Chem. 268 (36), 27447 (1993)), Della-Cioppa et al. (Plant. Physiol. 84, 965 (1987)), de Castro Silva Filho et al. (Plant Mol. Biol. 30, 769 (1996)), Zhao et al. (J. Biol. Chem. 270 (11), 6081 (1995)), Römer et al. (Biochem. Biophys. Res. Commun. 196 (3), 1414 (1993)), Keegstra et al. (Annu. Rev. Plant Physiol. Plant Mol. Biol. 40, 471 (1989)), Lubben et al. (Photosynthesis Res. 17, 173 (1988)) and Lawrence et al. (J. Biol. Chem. 272 (33), 20357 (1997)). A general review about targeting is disclosed by Kermode Allison R. in Critical Reviews in Plant Science 15 (4), 285 (1996) under the title “Mechanisms of Intracellular Protein Transport and Targeting in Plant Cells.”.

[0155] Favored transit peptide sequences, which are used in the inventive process and which form part of the inventive nucleic acid sequences are generally enriched in hydroxylated amino acid residues (serine and threonine), with these two residues generally constituting 20 to 35% of the total. They often have an amino-terminal region empty of Gly, Pro, and charged residues. Furthermore they have a number of small hydrophobic amino acids such as valine and alanine and generally acidic amino acids are lacking. In addition they generally have a middle region rich in Ser, Thr, Lys and Arg. Overall they have very often a net positive charge.

[0156] Alternatively, nucleic acid sequences coding for the transit peptides may be chemically synthesized either in part or wholly according to structure of transit peptide sequences disclosed in the prior art. Said natural or chemically synthesized sequences can be directly linked to the sequences encoding the mature protein or via a linker nucleic acid sequence, which may be typically less than 500 base pairs, preferably less than 450, 400, 350, 300, 250 or 200 base pairs, more preferably less than 150, 100, 90, 80, 70, 60, 50, 40 or 30 base pairs and most preferably less than 25, 20, 15, 12, 9, 6 or 3 base pairs in length and are in frame to the coding sequence. Furthermore favorable nucleic acid sequences encoding transit peptides may comprise sequences derived from more than one biological and/or chemical source and may include a nucleic acid sequence derived from the amino-terminal region of the mature protein, which in its native state is linked to the transit peptide. In a preferred embodiment of the invention said amino-terminal region of the mature protein is typically less than 150 amino acids, preferably less than 140, 130, 120, 110, 100 or 90 amino acids, more preferably less than 80, 70, 60, 50, 40, 35, 30, 25 or 20 amino acids and most preferably less than 19, 18, 17, 16, 15, 14, 13, 12, 11 or 10 amino acids in length. But even shorter or longer stretches are also possible. In addition target sequences, which facilitate the transport of proteins to other cell compartments such as the vacuole, endoplasmic reticulum, Golgi complex, glyoxysomes, peroxisomes or mitochondria may be also part of the inventive nucleic acid sequence.

[0157] The proteins translated from said inventive nucleic acid sequences are a kind of fusion proteins that means the nucleic acid sequences encoding the transit peptide, for example the ones shown in table V, for example the last one of the table, are joint to a YRP-gene, e.g. the nucleic acid sequences shown in table I, columns 5 and 7, e.g. if for the nucleic acid molecule in column 6 of table I the term “plastidic” is indicated. The person skilled in the art is able to join said sequences in a functional manner. Advantageously the transit peptide part is cleaved off from the YRP, e.g. from the protein part shown in table II, columns 5 and 7, during the trans-port preferably into the plastids. All products of the cleavage of the preferred transit peptide shown in the last line of table V have preferably the N-terminal amino acid sequences QIA CSS or QIA EFQLTT in front of the start methionine of YRP, e.g. the protein mentioned in table II, columns 5 and 7. Other short amino acid sequences of an range of 1 to 20 amino acids preferable 2 to 15 amino acids, more preferable 3 to 10 amino acids most preferably 4 to 8 amino acids are also possible in front of the start methionine of the YRP, e.g. the protein mentioned in table II, columns 5 and 7. In case of the amino acid sequence QIA CSS the three amino acids in front of the start methionine are stemming from the LIC (=ligation independent cloning) cassette. Said short amino acid sequence is preferred in the case of the expression of Escherichia coli genes. In case of the amino acid sequence QIA EFQLTT the six amino acids in front of the start methionine are stemming from the LIC cassette. Said short amino acid sequence is preferred in the case of the expression of Saccharomyces cerevisiae genes. The skilled worker knows that other short sequences are also useful in the expression of the YRP genes, e.g. the genes mentioned in table I, columns 5 and 7. Furthermore the skilled worker is aware of the fact that there is not a need for such short sequences in the expression of the genes.

TABLE V
Examples of transit peptides disclosed by von Heijne et al.

| | | | SEQ | |
|---|---|---|---|---|
| Trans | | | ID | |
| Pep | Organism | Transit Peptide | NO: | Reference |
| 1 | Acetabularia | MASIMMNKSVVLSKECAKPLATPK | 10 | Mol. Gen. Genet. 218, |
| | mediterranea | VTLNKRGFATTIATKNREMMVWQP | | 445 (1989) |
| | | FNNKMFETFSFLPP | | |
| 2 | Arabidopsis | MAASLQSTATFLQSAKIATAPSRG | 11 | EMBO J. 8, 3187 |
| | thaliana | SSHLRSTQAVGKSFGLETSSARLT | | (1989) |
| | | CSFQSDFKDFTGKCSDAVKIAGFA | | |
| | | LATSALVVSGASAEGAPK | | |
| 3 | Arabidopsis | MAQVSRICNGVQNPSLICNLSKSS | 12 | Mol. Gen. Genet. 210, |
| | thaliana | QRKSPLSVSLKTQQHPRAYPISSS | | 437 (1987) |
| | | WGLKKSGMTLIGSELRPLKVMSSV | | |
| | | STAEKASEIVLQPIREISGLIKLP | | |
| 4 | Arabidopsis | MAAATTTTTTSSSISFSTKPSPSS | 13 | Plant Physiol. 85, 1110 |
| | thaliana | SKSPLPISRFSLPFSLNPNKSSSS | | (1987) |
| | | SRRRGIKSSSPSSISAVLNTTTNV | | |
| | | TTTPSPTKPTKPETFISRFAPDQP | | |
| | | RKGA | | |
| 5 | Arabidopsis | MITSSLTCSLQALKLSSPFAHGST | 14 | J. Biol. Chem. 265, |
| | thaliana | PLSSLSKPNSFPNHRMPALVPV | | 2763 (1990) |
| 6 | Arabidopsis | MASLLGTSSSAI- | 15 | EMBO J. 9, 1337 |
| | thaliana | WASPSLSSPSSKPSSSPICFRPGKL | | (1990) |
| | | FGSKLNAGIQI | | |
| | | RPKKNRSRYHVSVMNVATEINSTE | | |
| | | QVVGKFDSKKSARPVYPFAAI | | |
| 7 | Arabidopsis | MASTALSSAIVGTSFIRRSPAPISL | 16 | Plant Physiol. 93, 572 |
| | thaliana | RSLPSANTQSLFGLKSGTARGG | | (1990) |
| | | RVVAM | | |
| 8 | Arabidopsis | MAASTMALSSPAFAGKAVNLSPAA | 17 | Nucl. Acids Res. 14, |
| | thaliana | SEVLGSGRVTNRKTV | | 4051 (1986) |
| 9 | Arabidopsis | MAAITSATVTIPSFTGLKLAVSSK | 18 | Gene 65, 59 (1988) |
| | thaliana | PKTLSTISRSSSATRAPPKLALKS | | |
| | | SLKDFGVIAVATAASIVLAGNAMA | | |
| | | MEVLLGSDDGSLAFVPSEFT | | |
| 10 | Arabidopsis | MAAAVSTVGAINRAPLSLNGSGSG | 19 | Nucl. Acids Res. 17, |
| | thaliana | AVSAPASTFLGKKVVTVSRFAQSN | | 2871 (1989) |
| | | KKSNGSFKVLAVKEDKQTDGDRWR | | |
| | | GLAYDTSDDQIDI | | |
| 11 | Arabidopsis | MKSSMLSSTAWTSPAQATMVAPF | 20 | Plant Mol. Biol. 11, |
| | thaliana | TGLKSSASFPVTRKANNDITSITS | | 745 (1988) |
| | | NGGRVSC | | |
| 12 | Arabidopsis | MAASGTSATFRASVSSAPSSSSQL | 21 | Proc. Natl. Acad. Sci. |
| | thaliana | THLKSPFKAVKYTPLPSSRSKSSS | | USA, 86, 4604 (1989) |
| | | FSVSCTIAKDPPVLMAAGSDPALW | | |
| | | QRPDSFGRFGKFGGKYVPE | | |
| 13 | Brassica | MSTTFCSSVCMQATSLAATTRISF | 22 | Nucl. Acids Res. 15, |
| | campestris | QKPALVSTTNLSFNLRRSIPTRFS | | 7197 (1987) |
| | | ISCAAKPETVEKVSKIVKKQLSLK | | |
| | | DDQKVVAE | | |
| 14 | Brassica | MATTFSASVSMQATSLATTTRISF | 23 | Eur. J. Biochem. 174, |
| | napus | QKPVLVSNHGRTNLSFNLSRTRLSI | | 287 (1988) |
| | | SC | | |
| 15 | Chlamydo- | MQALSSRVNIAAKPQRAQRLVVRA | 24 | Plant Mol. Biol. 12, |
| | monas | EEVKAAPKKEVGPKRGSLVK | | 463 (1989) |
| | reinhardtii | | | |
| 16 | Cucurbita | MAELIQDKESAQSAATAAAAssGy | 25 | FEBS Lett. 238, 424 |
| | moschata | ERRNEPAHSRKFLEVRSEEELL- | | (1988) |
| | | ScIKK | | |
| 17 | Spinacea | MSTINGCLTSISPSRTQLKNTSTL | 26 | J. Biol. Chem. 265, |
| | oleracea | RPTFIANSRVNPSSSVPPSLIRNQ | | (10) 5414 (1990) |
| | | PVFAAPAPIITPTL | | |
| 18 | Spinacea | MTTAVTAAVSFPSTKTTSLSARCS | 27 | Curr. Genet. 13, 517 |
| | oleracea | SVISPDKISYKKVPLYYRNVSATG | | (1988) |
| | | KMGPIRAQIASDVEAPPPAPAK- | | |
| | | VEKMS | | |
| 19 | Spinacea | MTTAVTAAVSFPSTKTTSLSARSS | 28 | |
| | oleracea | SVISPDKISYKKVPLYYRNVSATG | | |
| | | KMGPIRA | | |

Alternatively to the targeting of the YRP, e.g. proteins having the sequences shown in table II, columns 5 and 7, preferably of sequences in general encoded in the nucleus with the aid of the targeting sequences mentioned for example in table V alone or in combination with other targeting sequences preferably into the plastids, the nucleic acids of the invention can directly be introduced into the plastidal genome, e.g. for which in column 6 of table II the term “plastidic” is indicated. Therefore in a preferred embodiment the YRP gene, e.g. the nucleic acid sequences shown in table I, columns 5 and 7 are directly introduced and expressed in plastids, particularly if in column 6 of table I the term “plastidic” is indicated.

[0158] The term “introduced” in the context of this specification shall mean the insertion of a nucleic acid sequence into the organism by means of a “transfection”, “transduction” or preferably by “transformation”.

[0159] A plastid, such as a chloroplast, has been “transformed” by an exogenous (preferably foreign) nucleic acid sequence if nucleic acid sequence has been introduced into the plastid that means that this sequence has crossed the membrane or the membranes of the plastid. The foreign DNA may be integrated (covalently linked) into plastid DNA making up the genome of the plastid, or it may remain not integrated (e.g., by including a chloroplast origin of replication). “Stably” integrated DNA sequences are those, which are inherited through plastid replication, thereby transferring new plastids, with the features of the integrated DNA sequence to the progeny.

[0160] For expression a person skilled in the art is familiar with different methods to introduce the nucleic acid sequences into different organelles such as the preferred plastids. Such methods are for example disclosed by Maiga P. (Annu. Rev. Plant Biol. 55, 289 (2004)), Evans T. (WO 2004/040973), McBride K. E. et al. (U.S. Pat. No. 5,455,818), Daniell H. et al. (U.S. Pat. No. 5,932,479 and U.S. Pat. No. 5,693,507) and Straub J. M. et al. (U.S. Pat. No. 6,781,033). A preferred method is the transformation of microspore-derived hypocotyl or cotyledonary tissue (which are green and thus contain numerous plastids) leaf tissue and afterwards the regeneration of shoots from said transformed plant material on selective medium. As methods for the transformation bombarding of the plant material or the use of independently replicating shuttle vectors are well known by the skilled worker. But also a PEG-mediated transformation of the plastids or Agrobacterium transformation with binary vectors is possible. Useful markers for the transformation of plastids are positive selection markers for example the chloramphenicol-, streptomycin-, kanamycin-, neomycin-, amikamycin-, spectinomycin-, triazine- and/or lincomycin-tolerance genes. As additional markers named in the literature often as secondary markers, genes coding for the tolerance against herbicides such as phosphinothricin (=glufosinate, BASTA™, Liberty™, encoded by the bar gene), glyphosate (═N-(phosphonomethyl)glycine, Roundup™, encoded by the 5-enolpyruvylshikimate-3-phosphate synthase gene=epsps), sulfonylureas (like Staple™, encoded by the acetolactate synthase (ALS) gene), imidazolinones [=IMI, like imazethapyr, imazamox, Clearfield™, encoded by the acetohydroxyacid synthase (AHAS) gene, also known as acetolactate synthase (ALS) gene] or bromoxynil (=Buctril™, encoded by the oxy gene) or genes coding for antibiotics such as hygromycin or G418 are useful for further selection. Such secondary markers are useful in the case when most genome copies are transformed. In addition negative selection markers such as the bacterial cytosine deaminase (encoded by the codA gene) are also useful for the transformation of plastids.

[0161] Thus, in one embodiment, an activity disclosed herein as being conferred by a polypeptide shown in table II is increase or generated by linking the polypeptide disclosed in table II or a polypeptide conferring the same said activity with an targeting signal as herein described, if in column 6 of table II the term “plastidic” is listed for said polypeptide. For example, the polypeptide described can be linked to the targeting signal shown in table VII.

[0162] Accordingly, in the method of the invention for producing a transgenic plant with increased yield as compared to a corresponding, e.g. non-transformed, wild type plant, comprising transforming a plant cell or a plant cell nucleus or a plant tissue with the mentioned nucleic acid molecule, said nucleic acid molecule selected from said mentioned group encodes for a polypeptide conferring said activity being linked to a targeting signal as mentioned herein, e.g. as mentioned in table VII, e.g. if in column 6 of table II the term “plastidic” is listed for the encoded polypeptide.

[0163] To increase the possibility of identification of transformants it is also desirable to use reporter genes other then the aforementioned tolerance genes or in addition to said genes. Reporter genes are for example β-galactosidase-, β-glucuronidase-(GUS), alkaline phosphatase- and/or green-fluorescent protein-genes (GFP).

[0164] By transforming the plastids the intraspecies specific transgene flow is blocked, because a lot of species such as corn, cotton and rice have a strict maternal inheritance of plastids. By placing the YRP gene, e.g. the genes specified in table I, columns 5 and 7, e.g. if for the nucleic acid molecule in column 6 of table I the term “plastidic” is indicated, or active fragments thereof in the plastids of plants, these genes will not be present in the pollen of said plants.

[0165] A further embodiment of the invention relates to the use of so called “chloroplast localization sequences”, in which a first RNA sequence or molecule is capable of transporting or “chaperoning” a second RNA sequence, such as a RNA sequence transcribed from the YRP gene, e.g. the sequences depicted in table I, columns 5 and 7 or a sequence encoding a YRP, e.g. the protein, as depicted in table II, columns 5 and 7, from an external environment inside a cell or outside a plastid into a chloroplast. In one embodiment the chloroplast localization signal is substantially similar or complementary to a complete or intact viroid sequence, e.g. if for the polypeptide in column 6 of table II the term “plastidic” is indicated. The chloroplast localization signal may be encoded by a DNA sequence, which is transcribed into the chloroplast localization RNA. The term “viroid” refers to a naturally occurring single stranded RNA molecule (Flores, C. R. Acad Sci III. 324 (10), 943 (2001)). Viroids usually contain about 200-500 nucleotides and generally exist as circular molecules. Examples of viroids that contain chloroplast localization signals include but are not limited to ASBVd, PLMVd, CChMVd and ELVd. The viroid sequence or a functional part of it can be fused to a YRP gene, e.g. the sequences depicted in table I, columns 5 and 7 or a sequence encoding a YRP, e.g. the protein as depicted in table II, columns 5 and 7, in such a manner that the viroid sequence transports a sequence transcribed from a YRP gene, e.g. the sequence as depicted in table I, columns 5 and 7 or a sequence encoding a YRP, e.g. the protein as depicted in table II, columns 5 and 7 into the chloroplasts, e.g. e.g. if for said nucleic acid molecule or polynucleotide in column 6 of table I or II the term “plastidic” is indicated. A preferred embodiment uses a modified ASBVd (Navarro et al., Virology. 268 (1), 218 (2000)).

[0166] In a further specific embodiment the protein to be expressed in the plastids such as the YRP, e.g. the proteins depicted in table II, columns 5 and 7, e.g. if for the polypeptide in column 6 of table II the term “plastidic” is indicated, are encoded by different nucleic acids. Such a method is disclosed in WO 2004/040973, which shall be incorporated by reference. WO 2004/040973 teaches a method, which relates to the translocation of an RNA corresponding to a gene or gene fragment into the chloroplast by means of a chloroplast localization sequence. The genes, which should be expressed in the plant or plants cells, are split into nucleic acid fragments, which are introduced into different compartments in the plant e.g. the nucleus, the plastids and/or mitochondria. Additionally plant cells are described in which the chloroplast contains a ribozyme fused at one end to an RNA encoding a fragment of a protein used in the inventive process such that the ribozyme can trans-splice the translocated fusion RNA to the RNA encoding the gene fragment to form and as the case may be reunite the nucleic acid fragments to an intact mRNA encoding a functional protein for example as disclosed in table II, columns 5 and 7.

[0167] In another embodiment of the invention the YRP gene, e.g. the nucleic acid molecules as shown in table I, columns 5 and 7, e.g. if in column 6 of table I the term “plastidic” is indicated, used in the inventive process are transformed into plastids, which are metabolic active. Those plastids should preferably maintain at a high copy number in the plant or plant tissue of interest, most preferably the chloroplasts found in green plant tissues, such as leaves or cotyledons or in seeds.

[0168] In another embodiment of the invention the YRP gene, e.g. the nucleic acid molecules as shown in table I, columns 5 and 7, e.g. if in column 6 of table I the term “mitochondric” is indicated, used in the inventive process are transformed into mitochondria, which are metabolic active.

[0169] For a good expression in the plastids the YRP gene, e.g. the nucleic acid sequences as shown in table I, columns 5 and 7, e.g. if in column 6 of table I the term “plastidic” is indicated, are introduced into an expression cassette using a preferably a promoter and terminator, which are active in plastids preferably a chloroplast promoter. Examples of such promoters include the psbA promoter from the gene from spinach or pea, the rbcL promoter, and the atpB promoter from corn.

[0170] In accordance with the invention, the term “plant cell” or the term “organism” as understood herein relates always to a plant cell or a organelle thereof, preferably a plastid, more preferably chloroplast.

[0171] As used herein, “plant” is meant to include not only a whole plant but also a part thereof i.e., one or more cells, and tissues, including for example, leaves, stems, shoots, roots, flowers, fruits and seeds.

[0172] Surprisingly it was found, that the transgenic expression of the Saccharomyces cerevisiae, E. coli, Synechocystis or A. thaliana YRP, e.g. as shown in table II, column 3 in a plant such as A. thaliana for example, conferred increased yield, e.g. an increased yield-related trait, for example enhanced tolerance to abiotic environmental stress, increased nutrient use efficiency, increased drought tolerance, low temperature tolerance and/or another increased yield-related trait to the transgenic plant cell, plant or a part thereof as compared to a corresponding, e.g. non-transformed, wild type plant.

[0173] Accordingly, in one embodiment, an increased yield as compared to a corresponding non-modified, e.g. a non-transformed, wild type plant is conferred in the method of the invention, if the activity of a polypeptide comprising the yield-related polypeptide shown in SEQ ID NO.: 1703, or encoded by the yield-related nucleic acid molecule (or gene) comprising the nucleic acid shown in SEQ ID NO.: 1702, or a homolog of said nucleic acid molecule or polypeptide, e.g. derived from Glycine max, is increased or generated. For example, the activity of a nucleic acid molecule or a polypeptide comprising the nucleic acid or polypeptide or the consensus sequence or the polypeptide motif, as depicted in table I, II or IV, column 7, in the respective same line as the nucleic acid molecule shown in SEQ ID NO.: 1702 or the polypeptide shown in SEQ ID NO.: 1703, respectively, is increased or generated, or the activity “peptidy-prolyl-cis-trans-isomerase” is increased or generated in a plant cell, plant or part thereof, especially the increase occurs cytoplasmic.

[0174] In a further embodiment, an increased tolerance to abiotic environmental stress, in particular increased low temperature tolerance, compared to a corresponding non-modified, e.g. a non-transformed, wild type plant is conferred if the activity of a polypeptide according to the polypeptide as depicted in SEQ ID NO. 1703, or encoded by a nucleic acid molecule comprising the nucleic acid molecule shown in SEQ ID NO. 1702, or a homolog of said nucleic acid molecule or polypeptide, e.g. in case the activity of the Glycine max nucleic acid molecule or a polypeptide comprising the nucleic acid molecule shown in SEQ ID NO. 1702 or polypeptide shown in SEQ ID NO. 1703, respectively, is increased or generated, e.g. if the activity of a nucleic acid molecule or a polypeptide comprising the nucleic acid or polypeptide or the consensus sequence or the polypeptide motif, as depicted in table I, II or IV, column 7 in the respective same line as the nucleic acid molecule shown in SEQ ID NO.: 1702 or polypeptide shown in SEQ ID NO.: 1703, respectively, is increased or generated or if the activity “peptidy-prolyl-cis-trans-isomerase” is increased or generated in a plant cell, plant or part thereof, especially, if the polypeptide is cytoplasmic localized.

[0175] Particularly, an increase of yield from 1.1-fold to 1.844-fold, for example plus at least 100% thereof, under conditions of low temperature is conferred compared to a corresponding non-modified, e.g. non-transformed, wild type plant.

[0176] Accordingly, in one embodiment, an increased yield as compared to a corresponding non-modified, e.g. a non-transformed, wild type plant is conferred in the method of the invention, if the activity of a polypeptide comprising the yield-related polypeptide shown in SEQ ID NO.: 1773, or encoded by the yield-related nucleic acid molecule (or gene) comprising the nucleic acid shown in SEQ ID NO.: 1772, or a homolog of said nucleic acid molecule or polypeptide, e.g. derived from Synechocystis sp., is increased or generated. For example, the activity of a nucleic acid molecule or a polypeptide comprising the nucleic acid or polypeptide or the consensus sequence or the polypeptide motif, as depicted in table I, II or IV, column 7, in the respective same line as the nucleic acid molecule shown in SEQ ID NO.: 1772 or the polypeptide shown in SEQ ID NO.: 1773, respectively, is increased or generated, or the activity “geranylgeranyl reductase” is increased or generated in a plant cell, plant or part thereof, especially the increase occurs plastidic.

[0177] In a further embodiment, an increased tolerance to abiotic environmental stress, in particular increased low temperature tolerance, compared to a corresponding non-modified, e.g. a non-transformed, wild type plant is conferred if the activity of a polypeptide according to the polypeptide as depicted in SEQ ID NO. 1773, or encoded by a nucleic acid molecule comprising the nucleic acid molecule shown in SEQ ID NO. 1772, or a homolog of said nucleic acid molecule or polypeptide, e.g. in case the activity of the Synechocystis sp. nucleic acid molecule or a polypeptide comprising the nucleic acid molecule shown in SEQ ID NO. 1772 or polypeptide shown in SEQ ID NO. 1773, respectively, is increased or generated, e.g. if the activity of a nucleic acid molecule or a polypeptide comprising the nucleic acid or polypeptide or the consensus sequence or the polypeptide motif, as depicted in table I, II or IV, column 7 in the respective same line as the nucleic acid molecule shown in SEQ ID NO.: 1772 or polypeptide shown in SEQ ID NO.: 1773, respectively, is increased or generated or if the activity “geranylgeranyl reductase” is increased or generated in a plant cell, plant or part thereof, especially, if the polypeptide is plastidic localized.

[0178] Particularly, an increase of yield from 1.1-fold to 1.480-fold, for example plus at least 100% thereof, under conditions of low temperature is conferred compared to a corresponding non-modified, e.g. non-transformed, wild type plant.

[0179] In a further embodiment, an increased nutrient use efficiency as compared to a corresponding non-modified, e.g. a non-transformed, wild type plant cell, a plant or a part thereof is conferred if the activity of a polypeptide according to the polypeptide shown in SEQ ID NO. 1773, or encoded by a nucleic acid molecule comprising the nucleic acid molecule shown in SEQ ID NO. 1772, or a homolog of said nucleic acid molecule or polypeptide, e.g. in case the activity of the Synechocystis sp. nucleic acid molecule or a polypeptide comprising the nucleic acid molecule shown in SEQ ID NO. 1772 or polypeptide shown in SEQ ID NO. 1773, respectively, is increased or generated, e.g. if the activity of a nucleic acid molecule or a polypeptide comprising the nucleic acid or polypeptide or the consensus sequence or the polypeptide motif, as depicted in table I, II or IV, column 7 in the respective same line as the nucleic acid molecule shown in SEQ ID NO. 1772 or polypeptide shown in SEQ ID NO. 1773, respectively, is increased or generated or if the activity “geranylgeranyl reductase” is increased or generated in a plant cell, plant or part thereof, especially if the polypeptide is plastidic localized. In one embodiment an increased nitrogen use efficiency is conferred.

[0180] Particularly, an increase of yield from 1.05-fold to 1.096-fold, for example plus at least 100% thereof, under conditions of nitrogen deficiency is conferred compared to a corresponding non-modified, e.g. non-transformed, wild type plant.

[0181] Accordingly, in one embodiment, an increased yield as compared to a corresponding non-modified, e.g. a non-transformed, wild type plant is conferred in the method of the invention, if the activity of a polypeptide comprising the yield-related polypeptide shown in SEQ ID NO.: 1939, or encoded by the yield-related nucleic acid molecule (or gene) comprising the nucleic acid shown in SEQ ID NO.: 1938, or a homolog of said nucleic acid molecule or polypeptide, e.g. derived from Synechocystis sp., is increased or generated. For example, the activity of a nucleic acid molecule or a polypeptide comprising the nucleic acid or polypeptide or the consensus sequence or the polypeptide motif, as depicted in table I, II or IV, column 7, in the respective same line as the nucleic acid molecule shown in SEQ ID NO.: 1938 or the polypeptide shown in SEQ ID NO.: 1939, respectively, is increased or generated, or the activity “slr1293-protein” is increased or generated in a plant cell, plant or part thereof, especially the increase occurs plastidic.

[0182] In a further embodiment, an increased tolerance to abiotic environmental stress, in particular increased low temperature tolerance, compared to a corresponding non-modified, e.g. a non-transformed, wild type plant is conferred if the activity of a polypeptide according to the polypeptide as depicted in SEQ ID NO. 1939, or encoded by a nucleic acid molecule comprising the nucleic acid molecule shown in SEQ ID NO. 1938, or a homolog of said nucleic acid molecule or polypeptide, e.g. in case the activity of the Synechocystis sp. nucleic acid molecule or a polypeptide comprising the nucleic acid molecule shown in SEQ ID NO. 1938 or polypeptide shown in SEQ ID NO. 1939, respectively, is increased or generated, e.g. if the activity of a nucleic acid molecule or a polypeptide comprising the nucleic acid or polypeptide or the consensus sequence or the polypeptide motif, as depicted in table I, II or IV, column 7 in the respective same line as the nucleic acid molecule shown in SEQ ID NO.: 1938 or polypeptide shown in SEQ ID NO.: 1939, respectively, is increased or generated or if the activity “slr1293-protein” is increased or generated in a plant cell, plant or part thereof, especially, if the polypeptide is plastidic localized.

[0183] Particularly, an increase of yield from 1.1-fold to 1.374-fold, for example plus at least 100% thereof, under conditions of low temperature is conferred compared to a corresponding non-modified, e.g. non-transformed, wild type plant.

[0184] In a further embodiment, an increased nutrient use efficiency as compared to a corresponding non-modified, e.g. a non-transformed, wild type plant cell, a plant or a part thereof is conferred if the activity of a polypeptide according to the polypeptide shown in SEQ ID NO. 1939, or encoded by a nucleic acid molecule comprising the nucleic acid molecule shown in SEQ ID NO. 1938, or a homolog of said nucleic acid molecule or polypeptide, e.g. in case the activity of the Synechocystis sp. nucleic acid molecule or a polypeptide comprising the nucleic acid molecule shown in SEQ ID NO. 1938 or polypeptide shown in SEQ ID NO. 1939, respectively, is increased or generated, e.g. if the activity of a nucleic acid molecule or a polypeptide comprising the nucleic acid or polypeptide or the consensus sequence or the polypeptide motif, as depicted in table I, II or IV, column 7 in the respective same line as the nucleic acid molecule shown in SEQ ID NO. 1938 or polypeptide shown in SEQ ID NO. 1939, respectively, is increased or generated or if the activity “slr1293-protein” is increased or generated in a plant cell, plant or part thereof, especially if the polypeptide is Plastidic localized. In one embodiment an increased nitrogen use efficiency is conferred.

[0185] Particularly, an increase of yield from 1.05-fold to 1.084-fold, for example plus at least 100% thereof, under conditions of nitrogen deficiency is conferred compared to a corresponding non-modified, e.g. non-transformed, wild type plant.

[0186] In a further embodiment, an increased intrinsic yield as compared to a corresponding non-modified, e.g. a non-transformed, wild type plant cell, a plant or a part thereof is conferred, if the activity of a polypeptide according to the polypeptide shown in SEQ ID NO. 1939, or encoded by a nucleic acid molecule comprising the nucleic acid molecule shown in SEQ ID NO. 1938, or a homolog of said nucleic acid molecule or polypeptide, e.g. in case the activity of the Synechocystis sp. nucleic acid molecule or a polypeptide comprising the nucleic acid molecule shown in SEQ ID NO. 1938 or polypeptide shown in SEQ ID NO. 1939, respectively, is increased or generated, e.g. if the activity of a nucleic acid molecule or a polypeptide comprising the nucleic acid or polypeptide or the consensus sequence or the polypeptide motif, as depicted in table I, II or IV, column 7 in the respective same line as the nucleic acid molecule shown in SEQ ID NO. 1938 or polypeptide shown in SEQ ID NO. 1939, respectively, is increased or generated or if the activity “slr1293-protein” is increased or generated in a plant cell, plant or part thereof, especially if the polypeptide is Plastidic localized. In one embodiment an increased yield under standard conditions, e.g. in the absence of nutrient deficiency as well as stress conditions, is conferred.

[0187] Particularly, an increase of yield from 1.05-fold to 1.088-fold, for example plus at least 100% thereof, under standard conditions, e.g. in the absence of nutrient deficiency as well as stress conditions is conferred compared to a corresponding on-modified, e.g. non-transformed, wild type plant.

[0188] Accordingly, in one embodiment, an increased yield as compared to a corresponding non-modified, e.g. a non-transformed, wild type plant is conferred in the method of the invention, if the activity of a polypeptide comprising the yield-related polypeptide shown in SEQ ID NO.: 2043, or encoded by the yield-related nucleic acid molecule (or gene) comprising the nucleic acid shown in SEQ ID NO.: 2042, or a homolog of said nucleic acid molecule or polypeptide, e.g. derived from Saccharomyces cerevisiae, is increased or generated. For example, the activity of a nucleic acid molecule or a polypeptide comprising the nucleic acid or polypeptide or the consensus sequence or the polypeptide motif, as depicted in table I, II or IV, column 7, in the respective same line as the nucleic acid molecule shown in SEQ ID NO.: 2042 or the polypeptide shown in SEQ ID NO.: 2043, respectively, is increased or generated, or the activity “Mating hormone A-factor precursor” is increased or generated in a plant cell, plant or part thereof, especially the increase occurs cytoplasmic.

[0189] In a further embodiment, an increased tolerance to abiotic environmental stress, in particular increased low temperature tolerance, compared to a corresponding non-modified, e.g. a non-transformed, wild type plant is conferred if the activity of a polypeptide according to the polypeptide as depicted in SEQ ID NO. 2043, or encoded by a nucleic acid molecule comprising the nucleic acid molecule shown in SEQ ID NO. 2042, or a homolog of said nucleic acid molecule or polypeptide, e.g. in case the activity of the Saccharomyces cerevisiae nucleic acid molecule or a polypeptide comprising the nucleic acid molecule shown in SEQ ID NO. 2042 or polypeptide shown in SEQ ID NO. 2043, respectively, is increased or generated, e.g. if the activity of a nucleic acid molecule or a polypeptide comprising the nucleic acid or polypeptide or the consensus sequence or the polypeptide motif, as depicted in table I, II or IV, column 7 in the respective same line as the nucleic acid molecule shown in SEQ ID NO.: 2042 or polypeptide shown in SEQ ID NO.: 2043, respectively, is increased or generated or if the activity “Mating hormone A-factor precursor” is increased or generated in a plant cell, plant or part thereof, especially, if the polypeptide is cytoplasmic localized.

[0190] Particularly, an increase of yield from 1.1-fold to 1.503-fold, for example plus at least 100% thereof, under conditions of low temperature is conferred compared to a corresponding non-modified, e.g. non-transformed, wild type plant.

[0191] In a further embodiment, an increased nutrient use efficiency as compared to a corresponding non-modified, e.g. a non-transformed, wild type plant cell, a plant or a part thereof is conferred if the activity of a polypeptide according to the polypeptide shown in SEQ ID NO. 2043, or encoded by a nucleic acid molecule comprising the nucleic acid molecule shown in SEQ ID NO. 2042, or a homolog of said nucleic acid molecule or polypeptide, e.g. in case the activity of the Saccharomyces cerevisiae nucleic acid molecule or a polypeptide comprising the nucleic acid molecule shown in SEQ ID NO. 2042 or polypeptide shown in SEQ ID NO. 2043, respectively, is increased or generated, e.g. if the activity of a nucleic acid molecule or a polypeptide comprising the nucleic acid or polypeptide or the consensus sequence or the polypeptide motif, as depicted in table I, II or IV, column 7 in the respective same line as the nucleic acid molecule shown in SEQ ID NO. 2042 or polypeptide shown in SEQ ID NO. 2043, respectively, is increased or generated or if the activity “Mating hormone A-factor precursor” is increased or generated in a plant cell, plant or part thereof, especially if the polypeptide is cytoplasmic localized.

[0192] In one embodiment an increased nitrogen use efficiency is conferred. Particularly, an increase of yield from 1.05-fold to 1.155-fold, for example plus at least 100% thereof, under conditions of nitrogen deficiency is conferred compared to a corresponding non-modified, e.g. non-transformed, wild type plant.

[0193] Accordingly, in one embodiment, an increased yield as compared to a corresponding non-modified, e.g. a non-transformed, wild type plant is conferred in the method of the invention, if the activity of a polypeptide comprising the yield-related polypeptide shown in SEQ ID NO.: 2057, or encoded by the yield-related nucleic acid molecule (or gene) comprising the nucleic acid shown in SEQ ID NO.: 2056, or a homolog of said nucleic acid molecule or polypeptide, e.g. derived from Saccharomyces cerevisiae, is increased or generated. For example, the activity of a nucleic acid molecule or a polypeptide comprising the nucleic acid or polypeptide or the consensus sequence or the polypeptide motif, as depicted in table I, II or IV, column 7, in the respective same line as the nucleic acid molecule shown in SEQ ID NO.: 2056 or the polypeptide shown in SEQ ID NO.: 2057, respectively, is increased or generated, or the activity “Adenylate kinase” is increased or generated in a plant cell, plant or part thereof, especially the increase occurs plastidic.

[0194] In a further embodiment, an increased tolerance to abiotic environmental stress, in particular increased low temperature tolerance, compared to a corresponding non-modified, e.g. a non-transformed, wild type plant is conferred if the activity of a polypeptide according to the polypeptide as depicted in SEQ ID NO. 2057, or encoded by a nucleic acid molecule comprising the nucleic acid molecule shown in SEQ ID NO. 2056, or a homolog of said nucleic acid molecule or polypeptide, e.g. in case the activity of the Saccharomyces cerevisiae nucleic acid molecule or a polypeptide comprising the nucleic acid molecule shown in SEQ ID NO. 2056 or polypeptide shown in SEQ ID NO. 2057, respectively, is increased or generated, e.g. if the activity of a nucleic acid molecule or a polypeptide comprising the nucleic acid or polypeptide or the consensus sequence or the polypeptide motif, as depicted in table I, II or IV, column 7 in the respective same line as the nucleic acid molecule shown in SEQ ID NO.: 2056 or polypeptide shown in SEQ ID NO.: 2057, respectively, is increased or generated or if the activity “Adenylate kinase” is increased or generated in a plant cell, plant or part thereof, especially, if the polypeptide is plastidic localized.

[0195] Particularly, an increase of yield from 1.1-fold to 1.370-fold, for example plus at least 100% thereof, under conditions of low temperature is conferred compared to a corresponding non-modified, e.g. non-transformed, wild type plant.

[0196] In a further embodiment, an increased nutrient use efficiency as compared to a corresponding non-modified, e.g. a non-transformed, wild type plant cell, a plant or a part thereof is conferred if the activity of a polypeptide according to the polypeptide shown in SEQ ID NO. 2057, or encoded by a nucleic acid molecule comprising the nucleic acid molecule shown in SEQ ID NO. 2056, or a homolog of said nucleic acid molecule or polypeptide, e.g. in case the activity of the Saccharomyces cerevisiae nucleic acid molecule or a polypeptide comprising the nucleic acid molecule shown in SEQ ID NO. 2056 or polypeptide shown in SEQ ID NO. 2057, respectively, is increased or generated, e.g. if the activity of a nucleic acid molecule or a polypeptide comprising the nucleic acid or polypeptide or the consensus sequence or the polypeptide motif, as depicted in table I, II or IV, column 7 in the respective same line as the nucleic acid molecule shown in SEQ ID NO. 2056 or polypeptide shown in SEQ ID NO. 2057, respectively, is increased or generated or if the activity “Adenylate kinase” is increased or generated in a plant cell, plant or part thereof, especially if the polypeptide is plastidic localized. In one embodiment an increased nitrogen use efficiency is conferred.

[0197] Particularly, an increase of yield from 1.05-fold to 1.142-fold, for example plus at least 100% thereof, under conditions of nitrogen deficiency is conferred compared to a corresponding non-modified, e.g. non-transformed, wild type plant.

[0198] Accordingly, in one embodiment, an increased yield as compared to a corresponding non-modified, e.g. a non-transformed, wild type plant is conferred in the method of the invention, if the activity of a polypeptide comprising the yield-related polypeptide shown in SEQ ID NO.: 2559, or encoded by the yield-related nucleic acid molecule (or gene) comprising the nucleic acid shown in SEQ ID NO.: 2558, or a homolog of said nucleic acid molecule or polypeptide, e.g. derived from Saccharomyces cerevisiae, is increased or generated. For example, the activity of a nucleic acid molecule or a polypeptide comprising the nucleic acid or polypeptide or the consensus sequence or the polypeptide motif, as depicted in table I, II or IV, column 7, in the respective same line as the nucleic acid molecule shown in SEQ ID NO.: 2558 or the polypeptide shown in SEQ ID NO.: 2559, respectively, is increased or generated, or the activity “Cyclic nucleotide phosphodiesterase” is increased or generated in a plant cell, plant or part thereof, especially the increase occurs plastidic.

[0199] In a further embodiment, an increased tolerance to abiotic environmental stress, in particular increased low temperature tolerance, compared to a corresponding non-modified, e.g. a non-transformed, wild type plant is conferred if the activity of a polypeptide according to the polypeptide as depicted in SEQ ID NO. 2559, or encoded by a nucleic acid molecule comprising the nucleic acid molecule shown in SEQ ID NO. 2558, or a homolog of said nucleic acid molecule or polypeptide, e.g. in case the activity of the Saccharomyces cerevisiae nucleic acid molecule or a polypeptide comprising the nucleic acid molecule shown in SEQ ID NO. 2558 or polypeptide shown in SEQ ID NO. 2559, respectively, is increased or generated, e.g. if the activity of a nucleic acid molecule or a polypeptide comprising the nucleic acid or polypeptide or the consensus sequence or the polypeptide motif, as depicted in table I, II or IV, column 7 in the respective same line as the nucleic acid molecule shown in SEQ ID NO.: 2558 or polypeptide shown in SEQ ID NO.: 2559, respectively, is increased or generated or if the activity “Cyclic nucleotide phosphodiesterase” is increased or generated in a plant cell, plant or part thereof, especially, if the polypeptide is plastidic localized.

[0200] Particularly, an increase of yield from 1.1-fold to 1.331-fold, for example plus at least 100% thereof, under conditions of low temperature is conferred compared to a corresponding non-modified, e.g. non-transformed, wild type plant.

[0201] In a further embodiment, an increased nutrient use efficiency as compared to a corresponding non-modified, e.g. a non-transformed, wild type plant cell, a plant or a part thereof is conferred if the activity of a polypeptide according to the polypeptide shown in SEQ ID NO. 2559, or encoded by a nucleic acid molecule comprising the nucleic acid molecule shown in SEQ ID NO. 2558, or a homolog of said nucleic acid molecule or polypeptide, e.g. in case the activity of the Saccharomyces cerevisiae nucleic acid molecule or a polypeptide comprising the nucleic acid molecule shown in SEQ ID NO. 2558 or polypeptide shown in SEQ ID NO. 2559, respectively, is increased or generated, e.g. if the activity of a nucleic acid molecule or a polypeptide comprising the nucleic acid or polypeptide or the consensus sequence or the polypeptide motif, as depicted in table I, II or IV, column 7 in the respective same line as the nucleic acid molecule shown in SEQ ID NO. 2558 or polypeptide shown in SEQ ID NO. 2559, respectively, is increased or generated or if the activity “Cyclic nucleotide phosphodiesterase” is increased or generated in a plant cell, plant or part thereof, especially if the polypeptide is plastidic localized. In one embodiment an increased nitrogen use efficiency is conferred.

[0202] Particularly, an increase of yield from 1.05-fold to 1.22-fold, for example plus at least 100% thereof, under conditions of nitrogen deficiency is conferred compared to a corresponding non-modified, e.g. non-transformed, wild type plant.

[0203] Accordingly, in one embodiment, an increased yield as compared to a corresponding non-modified, e.g. a non-transformed, wild type plant is conferred in the method of the invention, if the activity of a polypeptide comprising the yield-related polypeptide shown in SEQ ID NO.: 2578, or encoded by the yield-related nucleic acid molecule (or gene) comprising the nucleic acid shown in SEQ ID NO.: 2577, or a homolog of said nucleic acid molecule or polypeptide, e.g. derived from Saccharomyces cerevisiae, is increased or generated. For example, the activity of a nucleic acid molecule or a polypeptide comprising the nucleic acid or polypeptide or the consensus sequence or the polypeptide motif, as depicted in table I, II or IV, column 7, in the respective same line as the nucleic acid molecule shown in SEQ ID NO.: 2577 or the polypeptide shown in SEQ ID NO.: 2578, respectively, is increased or generated, or the activity “Exopolyphosphatase” is increased or generated in a plant cell, plant or part thereof, especially the increase occurs cytoplasmic.

[0204] In a further embodiment, an increased tolerance to abiotic environmental stress, in particular increased low temperature tolerance, compared to a corresponding non-modified, e.g. a non-transformed, wild type plant is conferred if the activity of a polypeptide according to the polypeptide as depicted in SEQ ID NO. 2578, or encoded by a nucleic acid molecule comprising the nucleic acid molecule shown in SEQ ID NO. 2577, or a homolog of said nucleic acid molecule or polypeptide, e.g. in case the activity of the Saccharomyces cerevisiae nucleic acid molecule or a polypeptide comprising the nucleic acid molecule shown in SEQ ID NO. 2577 or polypeptide shown in SEQ ID NO. 2578, respectively, is increased or generated, e.g. if the activity of a nucleic acid molecule or a polypeptide comprising the nucleic acid or polypeptide or the consensus sequence or the polypeptide motif, as depicted in table I, II or IV, column 7 in the respective same line as the nucleic acid molecule shown in SEQ ID NO.: 2577 or polypeptide shown in SEQ ID NO.: 2578, respectively, is increased or generated or if the activity “Exopolyphosphatase” is increased or generated in a plant cell, plant or part thereof, especially, if the polypeptide is cytoplasmic localized.

[0205] Particularly, an increase of yield from 1.1-fold to 1.460-fold, for example plus at least 100% thereof, under conditions of low temperature is conferred compared to a corresponding non-modified, e.g. non-transformed, wild type plant.

[0206] Accordingly, in one embodiment, an increased yield as compared to a corresponding non-modified, e.g. a non-transformed, wild type plant is conferred in the method of the invention, if the activity of a polypeptide comprising the yield-related polypeptide shown in SEQ ID NO.: 2610, or encoded by the yield-related nucleic acid molecule (or gene) comprising the nucleic acid shown in SEQ ID NO.: 2609, or a homolog of said nucleic acid molecule or polypeptide, e.g. derived from Saccharomyces cerevisiae, is increased or generated. For example, the activity of a nucleic acid molecule or a polypeptide comprising the nucleic acid or polypeptide or the consensus sequence or the polypeptide motif, as depicted in table I, II or IV, column 7, in the respective same line as the nucleic acid molecule shown in SEQ ID NO.: 2609 or the polypeptide shown in SEQ ID NO.: 2610, respectively, is increased or generated, or the activity “YJL181W-protein” is increased or generated in a plant cell, plant or part thereof, especially the increase occurs cytoplasmic.

[0207] In a further embodiment, an increased tolerance to abiotic environmental stress, in particular increased low temperature tolerance, compared to a corresponding non-modified, e.g. a non-transformed, wild type plant is conferred if the activity of a polypeptide according to the polypeptide as depicted in SEQ ID NO. 2610, or encoded by a nucleic acid molecule comprising the nucleic acid molecule shown in SEQ ID NO. 2609, or a homolog of said nucleic acid molecule or polypeptide, e.g. in case the activity of the Saccharomyces cerevisiae nucleic acid molecule or a polypeptide comprising the nucleic acid molecule shown in SEQ ID NO. 2609 or polypeptide shown in SEQ ID NO. 2610, respectively, is increased or generated, e.g. if the activity of a nucleic acid molecule or a polypeptide comprising the nucleic acid or polypeptide or the consensus sequence or the polypeptide motif, as depicted in table I, II or IV, column 7 in the respective same line as the nucleic acid molecule shown in SEQ ID NO.: 2609 or polypeptide shown in SEQ ID NO.: 2610, respectively, is increased or generated or if the activity “YJL181W-protein” is increased or generated in a plant cell, plant or part thereof, especially, if the polypeptide is cytoplasmic localized.

[0208] Particularly, an increase of yield from 1.1-fold to 1.462-fold, for example plus at least 100% thereof, under conditions of low temperature is conferred compared to a corresponding non-modified, e.g. non-transformed, wild type plant.

[0209] Accordingly, in one embodiment, an increased yield as compared to a corresponding non-modified, e.g. a non-transformed, wild type plant is conferred in the method of the invention, if the activity of a polypeptide comprising the yield-related polypeptide shown in SEQ ID NO.: 2629, or encoded by the yield-related nucleic acid molecule (or gene) comprising the nucleic acid shown in SEQ ID NO.: 2628, or a homolog of said nucleic acid molecule or polypeptide, e.g. derived from Saccharomyces cerevisiae, is increased or generated. For example, the activity of a nucleic acid molecule or a polypeptide comprising the nucleic acid or polypeptide or the consensus sequence or the polypeptide motif, as depicted in table I, II or IV, column 7, in the respective same line as the nucleic acid molecule shown in SEQ ID NO.: 2628 or the polypeptide shown in SEQ ID NO.: 2629, respectively, is increased or generated, or the activity “mitochondrial succinate-fumarate transporter” is increased or generated in a plant cell, plant or part thereof, especially the increase occurs cytoplasmic.

[0210] In a further embodiment, an increased tolerance to abiotic environmental stress, in particular increased low temperature tolerance, compared to a corresponding non-modified, e.g. a non-transformed, wild type plant is conferred if the activity of a polypeptide according to the polypeptide as depicted in SEQ ID NO. 2629, or encoded by a nucleic acid molecule comprising the nucleic acid molecule shown in SEQ ID NO. 2628, or a homolog of said nucleic acid molecule or polypeptide, e.g. in case the activity of the Saccharomyces cerevisiae nucleic acid molecule or a polypeptide comprising the nucleic acid molecule shown in SEQ ID NO. 2628 or polypeptide shown in SEQ ID NO. 2629, respectively, is increased or generated, e.g. if the activity of a nucleic acid molecule or a polypeptide comprising the nucleic acid or polypeptide or the consensus sequence or the polypeptide motif, as depicted in table I, II or IV, column 7 in the respective same line as the nucleic acid molecule shown in SEQ ID NO.: 2628 or polypeptide shown in SEQ ID NO.: 2629, respectively, is increased or generated or if the activity “mitochondrial succinate-fumarate transporter” is increased or generated in a plant cell, plant or part thereof, especially, if the polypeptide is cytoplasmic localized.

[0211] Particularly, an increase of yield from 1.1-fold to 1.764-fold, for example plus at least 100% thereof, under conditions of low temperature is conferred compared to a corresponding non-modified, e.g. non-transformed, wild type plant.

[0212] In a further embodiment, an increased nutrient use efficiency as compared to a corresponding non-modified, e.g. a non-transformed, wild type plant cell, a plant or a part thereof is conferred if the activity of a polypeptide according to the polypeptide shown in SEQ ID NO. 2629, or encoded by a nucleic acid molecule comprising the nucleic acid molecule shown in SEQ ID NO. 2628, or a homolog of said nucleic acid molecule or polypeptide, e.g. in case the activity of the Saccharomyces cerevisiae nucleic acid molecule or a polypeptide comprising the nucleic acid molecule shown in SEQ ID NO. 2628 or polypeptide shown in SEQ ID NO. 2629, respectively, is increased or generated, e.g. if the activity of a nucleic acid molecule or a polypeptide comprising the nucleic acid or polypeptide or the consensus sequence or the polypeptide motif, as depicted in table I, II or IV, column 7 in the respective same line as the nucleic acid molecule shown in SEQ ID NO. 2628 or polypeptide shown in SEQ ID NO. 2629, respectively, is increased or generated or if the activity “mitochondrial succinate-fumarate transporter” is increased or generated in a plant cell, plant or part thereof, especially if the polypeptide is cytoplasmic localized. In one embodiment an increased nitrogen use efficiency is conferred. Particularly, an increase of yield from 1.05-fold to 1.095-fold, for example plus at least 100% thereof, under conditions of nitrogen deficiency is conferred compared to a corresponding non-modified, e.g. non-transformed, wild type plant.

[0213] In a further embodiment, an increased intrinsic yield as compared to a corresponding non-modified, e.g. a non-transformed, wild type plant cell, a plant or a part thereof is conferred, if the activity of a polypeptide according to the polypeptide shown in SEQ ID NO. 2629, or encoded by a nucleic acid molecule comprising the nucleic acid molecule shown in SEQ ID NO. 2628, or a homolog of said nucleic acid molecule or polypeptide, e.g. in case the activity of the Saccharomyces cerevisiae nucleic acid molecule or a polypeptide comprising the nucleic acid molecule shown in SEQ ID NO. 2628 or polypeptide shown in SEQ ID NO. 2629, respectively, is increased or generated, e.g. if the activity of a nucleic acid molecule or a polypeptide comprising the nucleic acid or polypeptide or the consensus sequence or the polypeptide motif, as depicted in table I, II or IV, column 7 in the respective same line as the nucleic acid molecule shown in SEQ ID NO. 2628 or polypeptide shown in SEQ ID NO. 2629, respectively, is increased or generated or if the activity “mitochondrial succinate-fumarate transporter” is increased or generated in a plant cell, plant or part thereof, especially if the polypeptide is plastidic localized. In one embodiment an increased yield under standard conditions, e.g. in the absence of nutrient deficiency as well as stress conditions, is conferred.

[0214] Particularly, an increase of yield from 1.05-fold to 1.316-fold, for example plus at least 100% thereof, under standard conditions, e.g. in the absence of nutrient deficiency as well as stress conditions is conferred compared to a corresponding on-modified, e.g. non-transformed, wild type plant.

[0215] Accordingly, in one embodiment, an increased yield as compared to a corresponding non-modified, e.g. a non-transformed, wild type plant is conferred in the method of the invention, if the activity of a polypeptide comprising the yield-related polypeptide shown in SEQ ID NO.: 2712, or encoded by the yield-related nucleic acid molecule (or gene) comprising the nucleic acid shown in SEQ ID NO.: 2711, or a homolog of said nucleic acid molecule or polypeptide, e.g. derived from Saccharomyces cerevisiae, is increased or generated. For example, the activity of a nucleic acid molecule or a polypeptide comprising the nucleic acid or polypeptide or the consensus sequence or the polypeptide motif, as depicted in table I, II or IV, column 7, in the respective same line as the nucleic acid molecule shown in SEQ ID NO.: 2711 or the polypeptide shown in SEQ ID NO.: 2712, respectively, is increased or generated, or the activity “protein kinase” is increased or generated in a plant cell, plant or part thereof, especially the increase occurs cytoplasmic.

[0216] In a further embodiment, an increased tolerance to abiotic environmental stress, in particular increased low temperature tolerance, compared to a corresponding non-modified, e.g. a non-transformed, wild type plant is conferred if the activity of a polypeptide according to the polypeptide as depicted in SEQ ID NO. 2712, or encoded by a nucleic acid molecule comprising the nucleic acid molecule shown in SEQ ID NO. 2711, or a homolog of said nucleic acid molecule or polypeptide, e.g. in case the activity of the Saccharomyces cerevisiae nucleic acid molecule or a polypeptide comprising the nucleic acid molecule shown in SEQ ID NO. 2711 or polypeptide shown in SEQ ID NO. 2712, respectively, is increased or generated, e.g. if the activity of a nucleic acid molecule or a polypeptide comprising the nucleic acid or polypeptide or the consensus sequence or the polypeptide motif, as depicted in table I, II or IV, column 7 in the respective same line as the nucleic acid molecule shown in SEQ ID NO.: 2711 or polypeptide shown in SEQ ID NO.: 2712, respectively, is increased or generated or if the activity “protein kinase” is increased or generated in a plant cell, plant or part thereof, especially, if the polypeptide is cytoplasmic localized.

[0217] Particularly, an increase of yield from 1.1-fold to 1.575-fold, for example plus at least 100% thereof, under conditions of low temperature is conferred compared to a corresponding non-modified, e.g. non-transformed, wild type plant.

[0218] In a further embodiment, an increased nutrient use efficiency as compared to a corresponding non-modified, e.g. a non-transformed, wild type plant cell, a plant or a part thereof is conferred if the activity of a polypeptide according to the polypeptide shown in SEQ ID NO. 2712, or encoded by a nucleic acid molecule comprising the nucleic acid molecule shown in SEQ ID NO. 2711, or a homolog of said nucleic acid molecule or polypeptide, e.g. in case the activity of the Saccharomyces cerevisiae nucleic acid molecule or a polypeptide comprising the nucleic acid molecule shown in SEQ ID NO. 2711 or polypeptide shown in SEQ ID NO. 2712, respectively, is increased or generated, e.g. if the activity of a nucleic acid molecule or a polypeptide comprising the nucleic acid or polypeptide or the consensus sequence or the polypeptide motif, as depicted in table I, II or IV, column 7 in the respective same line as the nucleic acid molecule shown in SEQ ID NO. 2711 or polypeptide shown in SEQ ID NO. 2712, respectively, is increased or generated or if the activity “protein kinase” is increased or generated in a plant cell, plant or part thereof, especially if the polypeptide is cytoplasmic localized. In one embodiment an increased nitrogen use efficiency is conferred.

[0219] Particularly, an increase of yield from 1.05-fold to 1.1-fold, for example plus at least 100% thereof, under conditions of nitrogen deficiency is conferred compared to a corresponding non-modified, e.g. non-transformed, wild type plant.

[0220] In a further embodiment, an increased intrinsic yield as compared to a corresponding non-modified, e.g. a non-transformed, wild type plant cell, a plant or a part thereof is conferred, if the activity of a polypeptide according to the polypeptide shown in SEQ ID NO. 2712, or encoded by a nucleic acid molecule comprising the nucleic acid molecule shown in SEQ ID NO. 2711, or a homolog of said nucleic acid molecule or polypeptide, e.g. in case the activity of the Saccharomyces cerevisiae nucleic acid molecule or a polypeptide comprising the nucleic acid molecule shown in SEQ ID NO. 2711 or polypeptide shown in SEQ ID NO. 2712, respectively, is increased or generated, e.g. if the activity of a nucleic acid molecule or a polypeptide comprising the nucleic acid or polypeptide or the consensus sequence or the polypeptide motif, as depicted in table I, II or IV, column 7 in the respective same line as the nucleic acid molecule shown in SEQ ID NO. 2711 or polypeptide shown in SEQ ID NO. 2712, respectively, is increased or generated or if the activity “protein kinase” is increased or generated in a plant cell, plant or part thereof, especially if the polypeptide is cytoplasmic localized. In one embodiment an increased yield under standard conditions, e.g. in the absence of nutrient deficiency as well as stress conditions, is conferred.

[0221] Particularly, an increase of yield from 1.05-fold to 1.161-fold, for example plus at least 100% thereof, under standard conditions, e.g. in the absence of nutrient deficiency as well as stress conditions is conferred compared to a corresponding on-modified, e.g. non-transformed, wild type plant.

[0222] Accordingly, in one embodiment, an increased yield as compared to a corresponding non-modified, e.g. a non-transformed, wild type plant is conferred in the method of the invention, if the activity of a polypeptide comprising the yield-related polypeptide shown in SEQ ID NO.: 2739, or encoded by the yield-related nucleic acid molecule (or gene) comprising the nucleic acid shown in SEQ ID NO.: 2738, or a homolog of said nucleic acid molecule or polypeptide, e.g. derived from Saccharomyces cerevisiae, is increased or generated. For example, the activity of a nucleic acid molecule or a polypeptide comprising the nucleic acid or polypeptide or the consensus sequence or the polypeptide motif, as depicted in table I, II or IV, column 7, in the respective same line as the nucleic acid molecule shown in SEQ ID NO.: 2738 or the polypeptide shown in SEQ ID NO.: 2739, respectively, is increased or generated, or the activity “Myo-inositol transporter” is increased or generated in a plant cell, plant or part thereof, especially the increase occurs plastidic.

[0223] In a further embodiment, an increased tolerance to abiotic environmental stress, in particular increased low temperature tolerance, compared to a corresponding non-modified, e.g. a non-transformed, wild type plant is conferred if the activity of a polypeptide according to the polypeptide as depicted in SEQ ID NO. 2739, or encoded by a nucleic acid molecule comprising the nucleic acid molecule shown in SEQ ID NO. 2738, or a homolog of said nucleic acid molecule or polypeptide, e.g. in case the activity of the Saccharomyces cerevisiae nucleic acid molecule or a polypeptide comprising the nucleic acid molecule shown in SEQ ID NO. 2738 or polypeptide shown in SEQ ID NO. 2739, respectively, is increased or generated, e.g. if the activity of a nucleic acid molecule or a polypeptide comprising the nucleic acid or polypeptide or the consensus sequence or the polypeptide motif, as depicted in table I, II or IV, column 7 in the respective same line as the nucleic acid molecule shown in SEQ ID NO.: 2738 or polypeptide shown in SEQ ID NO.: 2739, respectively, is increased or generated or if the activity “Myoinositol transporter” is increased or generated in a plant cell, plant or part thereof, especially, if the polypeptide is plastidic localized.

[0224] Particularly, an increase of yield from 1.1-fold to 1.284-fold, for example plus at least 100% thereof, under conditions of low temperature is conferred compared to a corresponding non-modified, e.g. non-transformed, wild type plant.

[0225] In a further embodiment, an increased nutrient use efficiency as compared to a corresponding non-modified, e.g. a non-transformed, wild type plant cell, a plant or a part thereof is conferred if the activity of a polypeptide according to the polypeptide shown in SEQ ID NO. 2739, or encoded by a nucleic acid molecule comprising the nucleic acid molecule shown in SEQ ID NO. 2738, or a homolog of said nucleic acid molecule or polypeptide, e.g. in case the activity of the Saccharomyces cerevisiae nucleic acid molecule or a polypeptide comprising the nucleic acid molecule shown in SEQ ID NO. 2738 or polypeptide shown in SEQ ID NO. 2739, respectively, is increased or generated, e.g. if the activity of a nucleic acid molecule or a polypeptide comprising the nucleic acid or polypeptide or the consensus sequence or the polypeptide motif, as depicted in table I, II or IV, column 7 in the respective same line as the nucleic acid molecule shown in SEQ ID NO. 2738 or polypeptide shown in SEQ ID NO. 2739, respectively, is increased or generated or if the activity “Myo-inositol transporter” is increased or generated in a plant cell, plant or part thereof, especially if the polypeptide is plastidic localized. In one embodiment an increased nitrogen use efficiency is conferred.

[0226] Particularly, an increase of yield from 1.05-fold to 1.437-fold, for example plus at least 100% thereof, under conditions of nitrogen deficiency is conferred compared to a corresponding non-modified, e.g. non-transformed, wild type plant.

[0227] In a further embodiment, an increased intrinsic yield as compared to a corresponding non-modified, e.g. a non-transformed, wild type plant cell, a plant or a part thereof is conferred, if the activity of a polypeptide according to the polypeptide shown in SEQ ID NO. 2739, or encoded by a nucleic acid molecule comprising the nucleic acid molecule shown in SEQ ID NO. 2738, or a homolog of said nucleic acid molecule or polypeptide, e.g. in case the activity of the Saccharomyces cerevisiae nucleic acid molecule or a polypeptide comprising the nucleic acid molecule shown in SEQ ID NO. 2738 or polypeptide shown in SEQ ID NO. 2739, respectively, is increased or generated, e.g. if the activity of a nucleic acid molecule or a polypeptide comprising the nucleic acid or polypeptide or the consensus sequence or the polypeptide motif, as depicted in table I, II or IV, column 7 in the respective same line as the nucleic acid molecule shown in SEQ ID NO. 2738 or polypeptide shown in SEQ ID NO. 2739, respectively, is increased or generated or if the activity “Myo-inositol transporter” is increased or generated in a plant cell, plant or part thereof, especially if the polypeptide is plastidic localized. In one embodiment an increased yield under standard conditions, e.g. in the absence of nutrient deficiency as well as stress conditions, is conferred.

[0228] Particularly, an increase of yield from 1.05-fold to 1.313-fold, for example plus at least 100% thereof, under standard conditions, e.g. in the absence of nutrient deficiency as well as stress conditions is conferred compared to a corresponding on-modified, e.g. non-transformed, wild type plant.

[0229] In a further embodiment, an increased drought tolerance as compared to a corresponding non-modified, e.g. a non-transformed, wild type plant cell, a plant or a part thereof is conferred. In one embodiment an increased cycling drought tolerance is conferred if the activity of a polypeptide according to the polypeptide shown in SEQ ID NO. 2739, or encoded by a nucleic acid molecule comprising the nucleic acid molecule shown in SEQ ID NO. 2738, or a homolog of said nucleic acid molecule or polypeptide, e.g, in case the activity of the Saccharomyces cerevisiae nucleic acid molecule or a polypeptide comprising the nucleic acid molecule shown in SEQ ID NO. 2738 or polypeptide shown in SEQ ID NO. 2739, respectively, is increased or generated, e.g. if the activity of a nucleic acid molecule or a polypeptide comprising the nucleic acid or polypeptide or the consensus sequence or the polypeptide motif, as depicted in table I, II or IV, column 7 in the respective same line as the nucleic acid molecule shown in SEQ ID NO. 2738 or polypeptide shown in SEQ ID NO. 2739, respectively, is increased or generated or if the activity “Myo-inositol transporter” is increased or generated in a plant cell, plant or part thereof, especially if the polypeptide is cytoplasmic localized.

[0230] Particularly, an increase of yield from 1.05-fold to 1.772-fold, for example plus at least 100% thereof, under standard conditions, e.g. under abiotic stress conditions, e.g. under drought conditions, in particular cycling drought conditions is conferred compared to a corresponding non-modified, e.g. non-transformed, wild type plant.

[0231] Accordingly, in one embodiment, an increased yield as compared to a corresponding non-modified, e.g. a non-transformed, wild type plant is conferred in the method of the invention, if the activity of a polypeptide comprising the yield-related polypeptide shown in SEQ ID NO.: 2819, or encoded by the yield-related nucleic acid molecule (or gene) comprising the nucleic acid shown in SEQ ID NO.: 2818, or a homolog of said nucleic acid molecule or polypeptide, e.g. derived from Saccharomyces cerevisiae, is increased or generated. For example, the activity of a nucleic acid molecule or a polypeptide comprising the nucleic acid or polypeptide or the consensus sequence or the polypeptide motif, as depicted in table I, II or IV, column 7, in the respective same line as the nucleic acid molecule shown in SEQ ID NO.: 2818 or the polypeptide shown in SEQ ID NO.: 2819, respectively, is increased or generated, or the activity “Ribose-5-phosphate isomerase” is increased or generated in a plant cell, plant or part thereof, especially the increase occurs cytoplasmic.

[0232] In a further embodiment, an increased tolerance to abiotic environmental stress, in particular increased low temperature tolerance, compared to a corresponding non-modified, e.g. a non-transformed, wild type plant is conferred if the activity of a polypeptide according to the polypeptide as depicted in SEQ ID NO. 2819, or encoded by a nucleic acid molecule comprising the nucleic acid molecule shown in SEQ ID NO. 2818, or a homolog of said nucleic acid molecule or polypeptide, e.g. in case the activity of the Saccharomyces cerevisiae nucleic acid molecule or a polypeptide comprising the nucleic acid molecule shown in SEQ ID NO. 2818 or polypeptide shown in SEQ ID NO. 2819, respectively, is increased or generated, e.g. if the activity of a nucleic acid molecule or a polypeptide comprising the nucleic acid or polypeptide or the consensus sequence or the polypeptide motif, as depicted in table I, II or IV, column 7 in the respective same line as the nucleic acid molecule shown in SEQ ID NO.: 2818 or polypeptide shown in SEQ ID NO.: 2819, respectively, is increased or generated or if the activity “Ribose-5-phosphate isomerase” is increased or generated in a plant cell, plant or part thereof, especially, if the polypeptide is cytoplasmic localized.

[0233] Particularly, an increase of yield from 1.1-fold to 1.516-fold, for example plus at least 100% thereof, under conditions of low temperature is conferred compared to a corresponding non-modified, e.g. non-transformed, wild type plant.

[0234] In a further embodiment, an increased nutrient use efficiency as compared to a corresponding non-modified, e.g. a non-transformed, wild type plant cell, a plant or a part thereof is conferred if the activity of a polypeptide according to the polypeptide shown in SEQ ID NO. 2819, or encoded by a nucleic acid molecule comprising the nucleic acid molecule shown in SEQ ID NO. 2818, or a homolog of said nucleic acid molecule or polypeptide, e.g. in case the activity of the Saccharomyces cerevisiae nucleic acid molecule or a polypeptide comprising the nucleic acid molecule shown in SEQ ID NO. 2818 or polypeptide shown in SEQ ID NO. 2819, respectively, is increased or generated, e.g. if the activity of a nucleic acid molecule or a polypeptide comprising the nucleic acid or polypeptide or the consensus sequence or the polypeptide motif, as depicted in table I, II or IV, column 7 in the respective same line as the nucleic acid molecule shown in SEQ ID NO. 2818 or polypeptide shown in SEQ ID NO. 2819, respectively, is increased or generated or if the activity “Ribose-5-phosphate isomerase” is increased or generated in a plant cell, plant or part thereof, especially if the polypeptide is cytoplasmic localized. In one embodiment an increased nitrogen use efficiency is conferred.

[0235] Particularly, an increase of yield from 1.05-fold to 1.234-fold, for example plus at least 100% thereof, under conditions of nitrogen deficiency is conferred compared to a corresponding non-modified, e.g. non-transformed, wild type plant.

[0236] Accordingly, in one embodiment, an increased yield as compared to a corresponding non-modified, e.g. a non-transformed, wild type plant is conferred in the method of the invention, if the activity of a polypeptide comprising the yield-related polypeptide shown in SEQ ID NO.: 3362, or encoded by the yield-related nucleic acid molecule (or gene) comprising the nucleic acid shown in SEQ ID NO.: 3361, or a homolog of said nucleic acid molecule or polypeptide, e.g. derived from Saccharomyces cerevisiae, is increased or generated. For example, the activity of a nucleic acid molecule or a polypeptide comprising the nucleic acid or polypeptide or the consensus sequence or the polypeptide motif, as depicted in table I, II or IV, column 7, in the respective same line as the nucleic acid molecule shown in SEQ ID NO.: 3361 or the polypeptide shown in SEQ ID NO.: 3362, respectively, is increased or generated, or the activity “YPL109C-protein” is increased or generated in a plant cell, plant or part thereof, especially the increase occurs plastidic.

[0237] In a further embodiment, an increased tolerance to abiotic environmental stress, in particular increased low temperature tolerance, compared to a corresponding non-modified, e.g. a non-transformed, wild type plant is conferred if the activity of a polypeptide according to the polypeptide as depicted in SEQ ID NO. 3362, or encoded by a nucleic acid molecule comprising the nucleic acid molecule shown in SEQ ID NO. 3361, or a homolog of said nucleic acid molecule or polypeptide, e.g. in case the activity of the Saccharomyces cerevisiae nucleic acid molecule or a polypeptide comprising the nucleic acid molecule shown in SEQ ID NO. 3361 or polypeptide shown in SEQ ID NO. 3362, respectively, is increased or generated, e.g. if the activity of a nucleic acid molecule or a polypeptide comprising the nucleic acid or polypeptide or the consensus sequence or the polypeptide motif, as depicted in table I, II or IV, column 7 in the respective same line as the nucleic acid molecule shown in SEQ ID NO.: 3361 or polypeptide shown in SEQ ID NO.: 3362, respectively, is increased or generated or if the activity “YPL109C-protein” is increased or generated in a plant cell, plant or part thereof, especially, if the polypeptide is plastidic localized.

[0238] Particularly, an increase of yield from 1.1-fold to 1.310-fold, for example plus at least 100% thereof, under conditions of low temperature is conferred compared to a corresponding non-modified, e.g. non-transformed, wild type plant.

[0239] Accordingly, in one embodiment, an increased yield as compared to a corresponding non-modified, e.g. a non-transformed, wild type plant is conferred in the method of the invention, if the activity of a polypeptide comprising the yield-related polypeptide shown in SEQ ID NO.: 3438, or encoded by the yield-related nucleic acid molecule (or gene) comprising the nucleic acid shown in SEQ ID NO.: 3437, or a homolog of said nucleic acid molecule or polypeptide, e.g. derived from Escherichia coli, is increased or generated. For example, the activity of a nucleic acid molecule or a polypeptide comprising the nucleic acid or polypeptide or the consensus sequence or the polypeptide motif, as depicted in table I, II or IV, column 7, in the respective same line as the nucleic acid molecule shown in SEQ ID NO.: 3437 or the polypeptide shown in SEQ ID NO.: 3438, respectively, is increased or generated, or the activity “cysteine synthase” is increased or generated in a plant cell, plant or part thereof, especially the increase occurs plastidic.

[0240] In a further embodiment, an increased tolerance to abiotic environmental stress, in particular increased low temperature tolerance, compared to a corresponding non-modified, e.g. a non-transformed, wild type plant is conferred if the activity of a polypeptide according to the polypeptide as depicted in SEQ ID NO. 3438, or encoded by a nucleic acid molecule comprising the nucleic acid molecule shown in SEQ ID NO. 3437, or a homolog of said nucleic acid molecule or polypeptide, e.g. in case the activity of the Escherichia coli nucleic acid molecule or a polypeptide comprising the nucleic acid molecule shown in SEQ ID NO. 3437 or polypeptide shown in SEQ ID NO. 3438, respectively, is increased or generated, e.g. if the activity of a nucleic acid molecule or a polypeptide comprising the nucleic acid or polypeptide or the consensus sequence or the polypeptide motif, as depicted in table I, II or IV, column 7 in the respective same line as the nucleic acid molecule shown in SEQ ID NO.: 3437 or polypeptide shown in SEQ ID NO.: 3438, respectively, is increased or generated or if the activity “cysteine synthase” is increased or generated in a plant cell, plant or part thereof, especially, if the polypeptide is plastidic localized.

[0241] Particularly, an increase of yield from 1.1-fold to 1.421-fold, for example plus at least 100% thereof, under conditions of low temperature is conferred compared to a corresponding non-modified, e.g. non-transformed, wild type plant.

[0242] In a further embodiment, an increased nutrient use efficiency as compared to a corresponding non-modified, e.g. a non-transformed, wild type plant cell, a plant or a part thereof is conferred if the activity of a polypeptide according to the polypeptide shown in SEQ ID NO. 3438, or encoded by a nucleic acid molecule comprising the nucleic acid molecule shown in SEQ ID NO. 3437, or a homolog of said nucleic acid molecule or polypeptide, e.g. in case the activity of the Escherichia coli nucleic acid molecule or a polypeptide comprising the nucleic acid molecule shown in SEQ ID NO. 3437 or polypeptide shown in SEQ ID NO. 3438, respectively, is increased or generated, e.g. if the activity of a nucleic acid molecule or a polypeptide comprising the nucleic acid or polypeptide or the consensus sequence or the polypeptide motif, as depicted in table I, II or IV, column 7 in the respective same line as the nucleic acid molecule shown in SEQ ID NO. 3437 or polypeptide shown in SEQ ID NO. 3438, respectively, is increased or generated or if the activity “cysteine synthase” is increased or generated in a plant cell, plant or part thereof, especially if the polypeptide is plastidic localized. In one embodiment an increased nitrogen use efficiency is conferred.

[0243] Particularly, an increase of yield from 1.05-fold to 1.211-fold, for example plus at least 100% thereof, under conditions of nitrogen deficiency is conferred compared to a corresponding non-modified, e.g. non-transformed, wild type plant.

[0244] In a further embodiment, an increased intrinsic yield as compared to a corresponding non-modified, e.g. a non-transformed, wild type plant cell, a plant or a part thereof is conferred, if the activity of a polypeptide according to the polypeptide shown in SEQ ID NO. 3438, or encoded by a nucleic acid molecule comprising the nucleic acid molecule shown in SEQ ID NO. 3437, or a homolog of said nucleic acid molecule or polypeptide, e.g. in case the activity of the Escherichia coli nucleic acid molecule or a polypeptide comprising the nucleic acid molecule shown in SEQ ID NO. 3437 or polypeptide shown in SEQ ID NO. 3438, respectively, is increased or generated, e.g. if the activity of a nucleic acid molecule or a polypeptide comprising the nucleic acid or polypeptide or the consensus sequence or the polypeptide motif, as depicted in table I, II or IV, column 7 in the respective same line as the nucleic acid molecule shown in SEQ ID NO. 3437 or polypeptide shown in SEQ ID NO. 3438, respectively, is increased or generated or if the activity “cysteine synthase” is increased or generated in a plant cell, plant or part thereof, especially if the polypeptide is plastidic localized. In one embodiment an increased yield under standard conditions, e.g. in the absence of nutrient deficiency as well as stress conditions, is conferred.

[0245] Particularly, an increase of yield from 1.05-fold to 1.204-fold, for example plus at least 100% thereof, under standard conditions, e.g. in the absence of nutrient deficiency as well as stress conditions is conferred compared to a corresponding on-modified, e.g. non-transformed, wild type plant.

[0246] Accordingly, in one embodiment, an increased yield as compared to a corresponding non-modified, e.g. a non-transformed, wild type plant is conferred in the method of the invention, if the activity of a polypeptide comprising the yield-related polypeptide shown in SEQ ID NO.: 4404, or encoded by the yield-related nucleic acid molecule (or gene) comprising the nucleic acid shown in SEQ ID NO.: 4403, or a homolog of said nucleic acid molecule or polypeptide, e.g. derived from Glycine max, is increased or generated. For example, the activity of a nucleic acid molecule or a polypeptide comprising the nucleic acid or polypeptide or the consensus sequence or the polypeptide motif, as depicted in table I, II or IV, column 7, in the respective same line as the nucleic acid molecule shown in SEQ ID NO.: 4403 or the polypeptide shown in SEQ ID NO.: 4404, respectively, is increased or generated, or the activity “peptidy-prolyl-cis-trans-isomerase” is increased or generated in a plant cell, plant or part thereof, especially the increase occurs cytoplasmic.

[0247] In a further embodiment, an increased tolerance to abiotic environmental stress, in particular increased low temperature tolerance, compared to a corresponding non-modified, e.g. a non-transformed, wild type plant is conferred if the activity of a polypeptide according to the polypeptide as depicted in SEQ ID NO. 4404, or encoded by a nucleic acid molecule comprising the nucleic acid molecule shown in SEQ ID NO. 4403, or a homolog of said nucleic acid molecule or polypeptide, e.g. in case the activity of the Glycine max nucleic acid molecule or a polypeptide comprising the nucleic acid molecule shown in SEQ ID NO. 4403 or polypeptide shown in SEQ ID NO. 4404, respectively, is increased or generated, e.g. if the activity of a nucleic acid molecule or a polypeptide comprising the nucleic acid or polypeptide or the consensus sequence or the polypeptide motif, as depicted in table I, II or IV, column 7 in the respective same line as the nucleic acid molecule shown in SEQ ID NO.: 4403 or polypeptide shown in SEQ ID NO.: 4404, respectively, is increased or generated or if the activity “peptidy-prolyl-cis-trans-isomerase” is increased or generated in a plant cell, plant or part thereof, especially, if the polypeptide is cytoplasmic localized.

[0248] Particularly, an increase of yield from 1.1-fold to 1.844-fold, for example plus at least 100% thereof, under conditions of low temperature is conferred compared to a corresponding non-modified, e.g. non-transformed, wild type plant.

[0249] Accordingly, in one embodiment, an increased yield as compared to a corresponding non-modified, e.g. a non-transformed, wild type plant is conferred in the method of the invention, if the activity of a polypeptide comprising the yield-related polypeptide shown in SEQ ID NO.: 4474, or encoded by the yield-related nucleic acid molecule (or gene) comprising the nucleic acid shown in SEQ ID NO.: 4473, or a homolog of said nucleic acid molecule or polypeptide, e.g. derived from Synechocystis sp., is increased or generated. For example, the activity of a nucleic acid molecule or a polypeptide comprising the nucleic acid or polypeptide or the consensus sequence or the polypeptide motif, as depicted in table I, II or IV, column 7, in the respective same line as the nucleic acid molecule shown in SEQ ID NO.: 4473 or the polypeptide shown in SEQ ID NO.: 4474, respectively, is increased or generated, or the activity “geranylgeranyl reductase” is increased or generated in a plant cell, plant or part thereof, especially the increase occurs plastidic.

[0250] In a further embodiment, an increased tolerance to abiotic environmental stress, in particular increased low temperature tolerance, compared to a corresponding non-modified, e.g. a non-transformed, wild type plant is conferred if the activity of a polypeptide according to the polypeptide as depicted in SEQ ID NO. 4474, or encoded by a nucleic acid molecule comprising the nucleic acid molecule shown in SEQ ID NO. 4473, or a homolog of said nucleic acid molecule or polypeptide, e.g. in case the activity of the Synechocystis sp. nucleic acid molecule or a polypeptide comprising the nucleic acid molecule shown in SEQ ID NO. 4473 or polypeptide shown in SEQ ID NO. 4474, respectively, is increased or generated, e.g. if the activity of a nucleic acid molecule or a polypeptide comprising the nucleic acid or polypeptide or the consensus sequence or the polypeptide motif, as depicted in table I, II or IV, column 7 in the respective same line as the nucleic acid molecule shown in SEQ ID NO.: 4473 or polypeptide shown in SEQ ID NO.: 4474, respectively, is increased or generated or if the activity “geranylgeranyl reductase” is increased or generated in a plant cell, plant or part thereof, especially, if the polypeptide is plastidic localized.

[0251] Particularly, an increase of yield from 1.1-fold to 1.480-fold, for example plus at least 100% thereof, under conditions of low temperature is conferred compared to a corresponding non-modified, e.g. non-transformed, wild type plant.

[0252] In a further embodiment, an increased nutrient use efficiency as compared to a corresponding non-modified, e.g. a non-transformed, wild type plant cell, a plant or a part thereof is conferred if the activity of a polypeptide according to the polypeptide shown in SEQ ID NO. 4474, or encoded by a nucleic acid molecule comprising the nucleic acid molecule shown in SEQ ID NO. 4473, or a homolog of said nucleic acid molecule or polypeptide, e.g. in case the activity of the Synechocystis sp. nucleic acid molecule or a polypeptide comprising the nucleic acid molecule shown in SEQ ID NO. 4473 or polypeptide shown in SEQ ID NO. 4474, respectively, is increased or generated, e.g. if the activity of a nucleic acid molecule or a polypeptide comprising the nucleic acid or polypeptide or the consensus sequence or the polypeptide motif, as depicted in table I, II or IV, column 7 in the respective same line as the nucleic acid molecule shown in SEQ ID NO. 4473 or polypeptide shown in SEQ ID NO. 4474, respectively, is increased or generated or if the activity “geranylgeranyl reductase” is increased or generated in a plant cell, plant or part thereof, especially if the polypeptide is plastidic localized. In one embodiment an increased nitrogen use efficiency is conferred.

[0253] Particularly, an increase of yield from 1.05-fold to 1.096-fold, for example plus at least 100% thereof, under conditions of nitrogen deficiency is conferred compared to a corresponding non-modified, e.g. non-transformed, wild type plant.

[0254] Accordingly, in one embodiment, an increased yield as compared to a corresponding non-modified, e.g. a non-transformed, wild type plant is conferred in the method of the invention, if the activity of a polypeptide comprising the yield-related polypeptide shown in SEQ ID NO.: 4640, or encoded by the yield-related nucleic acid molecule (or gene) comprising the nucleic acid shown in SEQ ID NO.: 4639, or a homolog of said nucleic acid molecule or polypeptide, e.g. derived from Synechocystis sp., is increased or generated. For example, the activity of a nucleic acid molecule or a polypeptide comprising the nucleic acid or polypeptide or the consensus sequence or the polypeptide motif, as depicted in table I, II or IV, column 7, in the respective same line as the nucleic acid molecule shown in SEQ ID NO.: 4639 or the polypeptide shown in SEQ ID NO.: 4640, respectively, is increased or generated, or the activity “slr1293-protein” is increased or generated in a plant cell, plant or part thereof, especially the increase occurs plastidic.

[0255] In a further embodiment, an increased tolerance to abiotic environmental stress, in particular increased low temperature tolerance, compared to a corresponding non-modified, e.g. a non-transformed, wild type plant is conferred if the activity of a polypeptide according to the polypeptide as depicted in SEQ ID NO. 4640, or encoded by a nucleic acid molecule comprising the nucleic acid molecule shown in SEQ ID NO. 4639, or a homolog of said nucleic acid molecule or polypeptide, e.g. in case the activity of the Synechocystis sp. nucleic acid molecule or a polypeptide comprising the nucleic acid molecule shown in SEQ ID NO. 4639 or polypeptide shown in SEQ ID NO. 4640, respectively, is increased or generated, e.g. if the activity of a nucleic acid molecule or a polypeptide comprising the nucleic acid or polypeptide or the consensus sequence or the polypeptide motif, as depicted in table I, II or IV, column 7 in the respective same line as the nucleic acid molecule shown in SEQ ID NO.: 4639 or polypeptide shown in SEQ ID NO.: 4640, respectively, is increased or generated or if the activity “slr1293-protein” is increased or generated in a plant cell, plant or part thereof, especially, if the polypeptide is plastidic localized.

[0256] Particularly, an increase of yield from 1.1-fold to 1.374-fold, for example plus at least 100% thereof, under conditions of low temperature is conferred compared to a corresponding non-modified, e.g. non-transformed, wild type plant.

[0257] In a further embodiment, an increased nutrient use efficiency as compared to a corresponding non-modified, e.g. a non-transformed, wild type plant cell, a plant or a part thereof is conferred if the activity of a polypeptide according to the polypeptide shown in SEQ ID NO. 4640, or encoded by a nucleic acid molecule comprising the nucleic acid molecule shown in SEQ ID NO. 4639, or a homolog of said nucleic acid molecule or polypeptide, e.g. in case the activity of the Synechocystis sp. nucleic acid molecule or a polypeptide comprising the nucleic acid molecule shown in SEQ ID NO. 4639 or polypeptide shown in SEQ ID NO. 4640, respectively, is increased or generated, e.g. if the activity of a nucleic acid molecule or a polypeptide comprising the nucleic acid or polypeptide or the consensus sequence or the polypeptide motif, as depicted in table I, II or IV, column 7 in the respective same line as the nucleic acid molecule shown in SEQ ID NO. 4639 or polypeptide shown in SEQ ID NO. 4640, respectively, is increased or generated or if the activity “slr1293-protein” is increased or generated in a plant cell, plant or part thereof, especially if the polypeptide is plastidic localized. In one embodiment an increased nitrogen use efficiency is conferred.

[0258] Particularly, an increase of yield from 1.05-fold to 1.084-fold, for example plus at least 100% thereof, under conditions of nitrogen deficiency is conferred compared to a corresponding non-modified, e.g. non-transformed, wild type plant.

[0259] In a further embodiment, an increased intrinsic yield as compared to a corresponding non-modified, e.g. a non-transformed, wild type plant cell, a plant or a part thereof is conferred, if the activity of a polypeptide according to the polypeptide shown in SEQ ID NO. 4640, or encoded by a nucleic acid molecule comprising the nucleic acid molecule shown in SEQ ID NO. 4639, or a homolog of said nucleic acid molecule or polypeptide, e.g. in case the activity of the Synechocystis sp. nucleic acid molecule or a polypeptide comprising the nucleic acid molecule shown in SEQ ID NO. 4639 or polypeptide shown in SEQ ID NO. 4640, respectively, is increased or generated, e.g. if the activity of a nucleic acid molecule or a polypeptide comprising the nucleic acid or polypeptide or the consensus sequence or the polypeptide motif, as depicted in table I, II or IV, column 7 in the respective same line as the nucleic acid molecule shown in SEQ ID NO. 4639 or polypeptide shown in SEQ ID NO. 4640, respectively, is increased or generated or if the activity “slr1293-protein” is increased or generated in a plant cell, plant or part thereof, especially if the polypeptide is plastidic localized. In one embodiment an increased yield under standard conditions, e.g. in the absence of nutrient deficiency as well as stress conditions, is conferred.

[0260] Particularly, an increase of yield from 1.05-fold to 1.088-fold, for example plus at least 100% thereof, under standard conditions, e.g. in the absence of nutrient deficiency as well as stress conditions is conferred compared to a corresponding on-modified, e.g. non-transformed, wild type plant.

[0261] Accordingly, in one embodiment, an increased yield as compared to a corresponding non-modified, e.g. a non-transformed, wild type plant is conferred in the method of the invention, if the activity of a polypeptide comprising the yield-related polypeptide shown in SEQ ID NO.: 4744, or encoded by the yield-related nucleic acid molecule (or gene) comprising the nucleic acid shown in SEQ ID NO.: 4743, or a homolog of said nucleic acid molecule or polypeptide, e.g. derived from Saccharomyces cerevisiae, is increased or generated. For example, the activity of a nucleic acid molecule or a polypeptide comprising the nucleic acid or polypeptide or the consensus sequence or the polypeptide motif, as depicted in table I, II or IV, column 7, in the respective same line as the nucleic acid molecule shown in SEQ ID NO.: 4743 or the polypeptide shown in SEQ ID NO.: 4744, respectively, is increased or generated, or the activity “YDR049W-protein” is increased or generated in a plant cell, plant or part thereof, especially the increase occurs cytoplasmic.

[0262] In a further embodiment, an increased tolerance to abiotic environmental stress, in particular increased low temperature tolerance, compared to a corresponding non-modified, e.g. a non-transformed, wild type plant is conferred if the activity of a polypeptide according to the polypeptide as depicted in SEQ ID NO. 4744, or encoded by a nucleic acid molecule comprising the nucleic acid molecule shown in SEQ ID NO. 4743, or a homolog of said nucleic acid molecule or polypeptide, e.g. in case the activity of the Saccharomyces cerevisiae nucleic acid molecule or a polypeptide comprising the nucleic acid molecule shown in SEQ ID NO. 4743 or polypeptide shown in SEQ ID NO. 4744, respectively, is increased or generated, e.g. if the activity of a nucleic acid molecule or a polypeptide comprising the nucleic acid or polypeptide or the consensus sequence or the polypeptide motif, as depicted in table I, II or IV, column 7 in the respective same line as the nucleic acid molecule shown in SEQ ID NO.: 4743 or polypeptide shown in SEQ ID NO.: 4744, respectively, is increased or generated or if the activity “YDR049W-protein” is increased or generated in a plant cell, plant or part thereof, especially, if the polypeptide is cytoplasmic localized.

[0263] Particularly, an increase of yield from 1.1-fold to 1.669-fold, for example plus at least 100% thereof, under conditions of low temperature is conferred compared to a corresponding non-modified, e.g. non-transformed, wild type plant.

[0264] In a further embodiment, an increased nutrient use efficiency as compared to a corresponding non-modified, e.g. a non-transformed, wild type plant cell, a plant or a part thereof is conferred if the activity of a polypeptide according to the polypeptide shown in SEQ ID NO. 4744, or encoded by a nucleic acid molecule comprising the nucleic acid molecule shown in SEQ ID NO. 4743, or a homolog of said nucleic acid molecule or polypeptide, e.g. in case the activity of the Saccharomyces cerevisiae nucleic acid molecule or a polypeptide comprising the nucleic acid molecule shown in SEQ ID NO. 4743 or polypeptide shown in SEQ ID NO. 4744, respectively, is increased or generated, e.g. if the activity of a nucleic acid molecule or a polypeptide comprising the nucleic acid or polypeptide or the consensus sequence or the polypeptide motif, as depicted in table I, II or IV, column 7 in the respective same line as the nucleic acid molecule shown in SEQ ID NO. 4743 or polypeptide shown in SEQ ID NO. 4744, respectively, is increased or generated or if the activity “YDR049W-protein” is increased or generated in a plant cell, plant or part thereof, especially if the polypeptide is cytoplasmic localized. In one embodiment an increased nitrogen use efficiency is conferred.

[0265] Particularly, an increase of yield from 1.05-fold to 1.259-fold, for example plus at least 100% thereof, under conditions of nitrogen deficiency is conferred compared to a corresponding non-modified, e.g. non-transformed, wild type plant.

[0266] In a further embodiment, an increased intrinsic yield as compared to a corresponding non-modified, e.g. a non-transformed, wild type plant cell, a plant or a part thereof is conferred, if the activity of a polypeptide according to the polypeptide shown in SEQ ID NO. 4744, or encoded by a nucleic acid molecule comprising the nucleic acid molecule shown in SEQ ID NO. 4743, or a homolog of said nucleic acid molecule or polypeptide, e.g. in case the activity of the Saccharomyces cerevisiae nucleic acid molecule or a polypeptide comprising the nucleic acid molecule shown in SEQ ID NO. 4743 or polypeptide shown in SEQ ID NO. 4744, respectively, is increased or generated, e.g. if the activity of a nucleic acid molecule or a polypeptide comprising the nucleic acid or polypeptide or the consensus sequence or the polypeptide motif, as depicted in table I, II or IV, column 7 in the respective same line as the nucleic acid molecule shown in SEQ ID NO. 4743 or polypeptide shown in SEQ ID NO. 4744, respectively, is increased or generated or if the activity “YDR049W-protein” is increased or generated in a plant cell, plant or part thereof, especially if the polypeptide is cytoplasmic localized. In one embodiment an increased yield under standard conditions, e.g. in the absence of nutrient deficiency as well as stress conditions, is conferred.

[0267] Particularly, an increase of yield from 1.05-fold to 1.166-fold, for example plus at least 100% thereof, under standard conditions, e.g. in the absence of nutrient deficiency as well as stress conditions is conferred compared to a corresponding on-modified, e.g. non-transformed, wild type plant.

[0268] Accordingly, in one embodiment, an increased yield as compared to a corresponding non-modified, e.g. a non-transformed, wild type plant is conferred in the method of the invention, if the activity of a polypeptide comprising the yield-related polypeptide shown in SEQ ID NO.: 64, or encoded by the yield-related nucleic acid molecule (or gene) comprising the nucleic acid shown in SEQ ID NO.: 63, or a homolog of said nucleic acid molecule or polypeptide, e.g. derived from Escherichia coli, is increased or generated. For example, the activity of a nucleic acid molecule or a polypeptide comprising the nucleic acid or polypeptide or the consensus sequence or the polypeptide motif, as depicted in table I, II or IV, column 7, in the respective same line as the nucleic acid molecule shown in SEQ ID NO.: 63 or the polypeptide shown in SEQ ID NO.: 64, respectively, is increased or generated, or the activity “oxidoreductase subunit” is increased or generated in a plant cell, plant or part thereof, especially the increase occurs cytoplasmic.

[0269] In a further embodiment, an increased tolerance to abiotic environmental stress, in particular increased low temperature tolerance, compared to a corresponding non-modified, e.g. a non-transformed, wild type plant is conferred if the activity of a polypeptide according to the polypeptide as depicted in SEQ ID NO. 64, or encoded by a nucleic acid molecule comprising the nucleic acid molecule shown in SEQ ID NO. 63, or a homolog of said nucleic acid molecule or polypeptide, e.g. in case the activity of the Escherichia coli nucleic acid molecule or a polypeptide comprising the nucleic acid molecule shown in SEQ ID NO. 63 or polypeptide shown in SEQ ID NO. 64, respectively, is increased or generated, e.g. if the activity of a nucleic acid molecule or a polypeptide comprising the nucleic acid or polypeptide or the consensus sequence or the polypeptide motif, as depicted in table I, II or IV, column 7 in the respective same line as the nucleic acid molecule shown in SEQ ID NO.: 63 or polypeptide shown in SEQ ID NO.: 64, respectively, is increased or generated or if the activity “oxidoreductase subunit” is increased or generated in a plant cell, plant or part thereof, especially, if the polypeptide is cytoplasmic localized.

[0270] Particularly, an increase of yield from 1.1-fold to 1.360-fold, for example plus at least 100% thereof, under conditions of low temperature is conferred compared to a corresponding non-modified, e.g. non-transformed, wild type plant.

[0271] In a further embodiment, an increased nutrient use efficiency as compared to a corresponding non-modified, e.g. a non-transformed, wild type plant cell, a plant or a part thereof is conferred if the activity of a polypeptide according to the polypeptide shown in SEQ ID NO. 64, or encoded by a nucleic acid molecule comprising the nucleic acid molecule shown in SEQ ID NO. 63, or a homolog of said nucleic acid molecule or polypeptide, e.g. in case the activity of the Escherichia coli nucleic acid molecule or a polypeptide comprising the nucleic acid molecule shown in SEQ ID NO. 63 or polypeptide shown in SEQ ID NO. 64, respectively, is increased or generated, e.g. if the activity of a nucleic acid molecule or a polypeptide comprising the nucleic acid or polypeptide or the consensus sequence or the polypeptide motif, as depicted in table I, II or IV, column 7 in the respective same line as the nucleic acid molecule shown in SEQ ID NO. 63 or polypeptide shown in SEQ ID NO. 64, respectively, is increased or generated or if the activity “oxidoreductase subunit” is increased or generated in a plant cell, plant or part thereof, especially if the polypeptide is cytoplasmic localized. In one embodiment an increased nitrogen use efficiency is conferred.

[0272] Particularly, an increase of yield from 1.05-fold to 1.112-fold, for example plus at least 100% thereof, under conditions of nitrogen deficiency is conferred compared to a corresponding non-modified, e.g. non-transformed, wild type plant.

[0273] In a further embodiment, an increased intrinsic yield as compared to a corresponding non-modified, e.g. a non-transformed, wild type plant cell, a plant or a part thereof is conferred, if the activity of a polypeptide according to the polypeptide shown in SEQ ID NO. 64, or encoded by a nucleic acid molecule comprising the nucleic acid molecule shown in SEQ ID NO. 63, or a homolog of said nucleic acid molecule or polypeptide, e.g. in case the activity of the Escherichia coli nucleic acid molecule or a polypeptide comprising the nucleic acid molecule shown in SEQ ID NO. 63 or polypeptide shown in SEQ ID NO. 64, respectively, is increased or generated, e.g. if the activity of a nucleic acid molecule or a polypeptide comprising the nucleic acid or polypeptide or the consensus sequence or the polypeptide motif, as depicted in table I, II or IV, column 7 in the respective same line as the nucleic acid molecule shown in SEQ ID NO. 63 or polypeptide shown in SEQ ID NO. 64, respectively, is increased or generated or if the activity “oxidoreductase subunit” is increased or generated in a plant cell, plant or part thereof, especially if the polypeptide is cytoplasmic localized. In one embodiment an increased yield under standard conditions, e.g. in the absence of nutrient deficiency as well as stress conditions, is conferred. Particularly, an increase of yield from 1.05-fold to 1.117-fold, for example plus at least 100% thereof, under standard conditions, e.g. in the absence of nutrient deficiency as well as stress conditions is conferred compared to a corresponding on-modified, e.g. non-transformed, wild type plant.

[0274] Accordingly, in one embodiment, an increased yield as compared to a corresponding non-modified, e.g. a non-transformed, wild type plant is conferred in the method of the invention, if the activity of a polypeptide comprising the yield-related polypeptide shown in SEQ ID NO.: 81, or encoded by the yield-related nucleic acid molecule (or gene) comprising the nucleic acid shown in SEQ ID NO.: 80, or a homolog of said nucleic acid molecule or polypeptide, e.g. derived from Escherichia coli, is increased or generated. For example, the activity of a nucleic acid molecule or a polypeptide comprising the nucleic acid or polypeptide or the consensus sequence or the polypeptide motif, as depicted in table I, II or IV, column 7, in the respective same line as the nucleic acid molecule shown in SEQ ID NO.: 80 or the polypeptide shown in SEQ ID NO.: 81, respectively, is increased or generated, or the activity “cysteine synthase” is increased or generated in a plant cell, plant or part thereof, especially the increase occurs plastidic. In a further embodiment, an increased tolerance to abiotic environmental stress, in particular increased low temperature tolerance, compared to a corresponding non-modified, e.g. a non-transformed, wild type plant is conferred if the activity of a polypeptide according to the polypeptide as depicted in SEQ ID NO. 81, or encoded by a nucleic acid molecule comprising the nucleic acid molecule shown in SEQ ID NO. 80, or a homolog of said nucleic acid molecule or polypeptide, e.g. in case the activity of the Escherichia coli nucleic acid molecule or a polypeptide comprising the nucleic acid molecule shown in SEQ ID NO. 80 or polypeptide shown in SEQ ID NO. 81, respectively, is increased or generated, e.g. if the activity of a nucleic acid molecule or a polypeptide comprising the nucleic acid or polypeptide or the consensus sequence or the polypeptide motif, as depicted in table I, II or IV, column 7 in the respective same line as the nucleic acid molecule shown in SEQ ID NO.: 80 or polypeptide shown in SEQ ID NO.: 81, respectively, is increased or generated or if the activity “cysteine synthase” is increased or generated in a plant cell, plant or part thereof, especially, if the polypeptide is plastidic localized.

[0275] Particularly, an increase of yield from 1.1-fold to 1.421-fold, for example plus at least 100% thereof, under conditions of low temperature is conferred compared to a corresponding non-modified, e.g. non-transformed, wild type plant.

[0276] In a further embodiment, an increased nutrient use efficiency as compared to a corresponding non-modified, e.g. a non-transformed, wild type plant cell, a plant or a part thereof is conferred if the activity of a polypeptide according to the polypeptide shown in SEQ ID NO. 81, or encoded by a nucleic acid molecule comprising the nucleic acid molecule shown in SEQ ID NO. 80, or a homolog of said nucleic acid molecule or polypeptide, e.g. in case the activity of the Escherichia coli nucleic acid molecule or a polypeptide comprising the nucleic acid molecule shown in SEQ ID NO. 80 or polypeptide shown in SEQ ID NO. 81, respectively, is increased or generated, e.g. if the activity of a nucleic acid molecule or a polypeptide comprising the nucleic acid or polypeptide or the consensus sequence or the polypeptide motif, as depicted in table I, II or IV, column 7 in the respective same line as the nucleic acid molecule shown in SEQ ID NO. 80 or polypeptide shown in SEQ ID NO. 81, respectively, is increased or generated or if the activity “cysteine synthase” is increased or generated in a plant cell, plant or part thereof, especially if the polypeptide is plastidic localized. In one embodiment an increased nitrogen use efficiency is conferred.

[0277] Particularly, an increase of yield from 1.05-fold to 1.211-fold, for example plus at least 100% thereof, under conditions of nitrogen deficiency is conferred compared to a corresponding non-modified, e.g. non-transformed, wild type plant.

[0278] In a further embodiment, an increased intrinsic yield as compared to a corresponding non-modified, e.g. a non-transformed, wild type plant cell, a plant or a part thereof is conferred, if the activity of a polypeptide according to the polypeptide shown in SEQ ID NO. 81, or encoded by a nucleic acid molecule comprising the nucleic acid molecule shown in SEQ ID NO. 80, or a homolog of said nucleic acid molecule or polypeptide, e.g. in case the activity of the Escherichia coli nucleic acid molecule or a polypeptide comprising the nucleic acid molecule shown in SEQ ID NO. 80 or polypeptide shown in SEQ ID NO. 81, respectively, is increased or generated, e.g. if the activity of a nucleic acid molecule or a polypeptide comprising the nucleic acid or polypeptide or the consensus sequence or the polypeptide motif, as depicted in table I, II or IV, column 7 in the respective same line as the nucleic acid molecule shown in SEQ ID NO. 80 or polypeptide shown in SEQ ID NO. 81, respectively, is increased or generated or if the activity “cysteine synthase” is increased or generated in a plant cell, plant or part thereof, especially if the polypeptide is plastidic localized. In one embodiment an increased yield under standard conditions, e.g. in the absence of nutrient deficiency as well as stress conditions, is conferred. Particularly, an increase of yield from 1.05-fold to 1.204-fold, for example plus at least 100% thereof, under standard conditions, e.g. in the absence of nutrient deficiency as well as stress conditions is conferred compared to a corresponding on-modified, e.g. non-transformed, wild type plant.

[0279] Accordingly, in one embodiment, an increased yield as compared to a corresponding non-modified, e.g. a non-transformed, wild type plant is conferred in the method of the invention, if the activity of a polypeptide comprising the yield-related polypeptide shown in SEQ ID NO.: 1077, or encoded by the yield-related nucleic acid molecule (or gene) comprising the nucleic acid shown in SEQ ID NO.: 1076, or a homolog of said nucleic acid molecule or polypeptide, e.g. derived from Escherichia coli, is increased or generated. For example, the activity of a nucleic acid molecule or a polypeptide comprising the nucleic acid or polypeptide or the consensus sequence or the polypeptide motif, as depicted in table I, II or IV, column 7, in the respective same line as the nucleic acid molecule shown in SEQ ID NO.: 1076 or the polypeptide shown in SEQ ID NO.: 1077, respectively, is increased or generated, or the activity “B2758-protein” is increased or generated in a plant cell, plant or part thereof, especially the increase occurs cytoplasmic.

[0280] In a further embodiment, an increased tolerance to abiotic environmental stress, in particular increased low temperature tolerance, compared to a corresponding non-modified, e.g. a non-transformed, wild type plant is conferred if the activity of a polypeptide according to the polypeptide as depicted in SEQ ID NO. 1077, or encoded by a nucleic acid molecule comprising the nucleic acid molecule shown in SEQ ID NO. 1076, or a homolog of said nucleic acid molecule or polypeptide, e.g. in case the activity of the Escherichia coli nucleic acid molecule or a polypeptide comprising the nucleic acid molecule shown in SEQ ID NO. 1076 or polypeptide shown in SEQ ID NO. 1077, respectively, is increased or generated, e.g. if the activity of a nucleic acid molecule or a polypeptide comprising the nucleic acid or polypeptide or the consensus sequence or the polypeptide motif, as depicted in table I, II or IV, column 7 in the respective same line as the nucleic acid molecule shown in SEQ ID NO.: 1076 or polypeptide shown in SEQ ID NO.: 1077, respectively, is increased or generated or if the activity “B2758-protein” is increased or generated in a plant cell, plant or part thereof, especially, if the polypeptide is cytoplasmic localized.

[0281] Particularly, an increase of yield from 1.1-fold to 1.324-fold, for example plus at least 100% thereof, under conditions of low temperature is conferred compared to a corresponding non-modified, e.g. non-transformed, wild type plant.

[0282] In a further embodiment, an increased intrinsic yield as compared to a corresponding non-modified, e.g. a non-transformed, wild type plant cell, a plant or a part thereof is conferred, if the activity of a polypeptide according to the polypeptide shown in SEQ ID NO. 1077, or encoded by a nucleic acid molecule comprising the nucleic acid molecule shown in SEQ ID NO. 1076, or a homolog of said nucleic acid molecule or polypeptide, e.g. in case the activity of the Escherichia coli nucleic acid molecule or a polypeptide comprising the nucleic acid molecule shown in SEQ ID NO. 1076 or polypeptide shown in SEQ ID NO. 1077, respectively, is increased or generated, e.g. if the activity of a nucleic acid molecule or a polypeptide comprising the nucleic acid or polypeptide or the consensus sequence or the polypeptide motif, as depicted in table I, II or IV, column 7 in the respective same line as the nucleic acid molecule shown in SEQ ID NO. 1076 or polypeptide shown in SEQ ID NO. 1077, respectively, is increased or generated or if the activity “B2758-protein” is increased or generated in a plant cell, plant or part thereof, especially if the polypeptide is cytoplasmic localized. In one embodiment an increased yield under standard conditions, e.g. in the absence of nutrient deficiency as well as stress conditions, is conferred.

[0283] Particularly, an increase of yield from 1.05-fold to 1.071-fold, for example plus at least 100% thereof, under standard conditions, e.g. in the absence of nutrient deficiency as well as stress conditions is conferred compared to a corresponding on-modified, e.g. non-transformed, wild type plant.

[0284] Accordingly, in one embodiment, an increased yield as compared to a corresponding non-modified, e.g. a non-transformed, wild type plant is conferred in the method of the invention, if the activity of a polypeptide comprising the yield-related polypeptide shown in SEQ ID NO.: 1106, or encoded by the yield-related nucleic acid molecule (or gene) comprising the nucleic acid shown in SEQ ID NO.: 1105, or a homolog of said nucleic acid molecule or polypeptide, e.g. derived from Synechocystis sp., is increased or generated. For example, the activity of a nucleic acid molecule or a polypeptide comprising the nucleic acid or polypeptide or the consensus sequence or the polypeptide motif, as depicted in table I, II or IV, column 7, in the respective same line as the nucleic acid molecule shown in SEQ ID NO.: 1105 or the polypeptide shown in SEQ ID NO.: 1106, respectively, is increased or generated, or the activity “modification methylase HemK family protein” is increased or generated in a plant cell, plant or part thereof, especially the increase occurs cytoplasmic.

[0285] In a further embodiment, an increased tolerance to abiotic environmental stress, in particular increased low temperature tolerance, compared to a corresponding non-modified, e.g. a non-transformed, wild type plant is conferred if the activity of a polypeptide according to the polypeptide as depicted in SEQ ID NO. 1106, or encoded by a nucleic acid molecule comprising the nucleic acid molecule shown in SEQ ID NO. 1105, or a homolog of said nucleic acid molecule or polypeptide, e.g. in case the activity of the Synechocystis sp. nucleic acid molecule or a polypeptide comprising the nucleic acid molecule shown in SEQ ID NO. 1105 or polypeptide shown in SEQ ID NO. 1106, respectively, is increased or generated, e.g. if the activity of a nucleic acid molecule or a polypeptide comprising the nucleic acid or polypeptide or the consensus sequence or the polypeptide motif, as depicted in table I, II or IV, column 7 in the respective same line as the nucleic acid molecule shown in SEQ ID NO.: 1105 or polypeptide shown in SEQ ID NO.: 1106, respectively, is increased or generated or if the activity “modification methylase HemK family protein” is increased or generated in a plant cell, plant or part thereof, especially, if the polypeptide is cytoplasmic localized.

[0286] Particularly, an increase of yield from 1.1-fold to 1.384-fold, for example plus at least 100% thereof, under conditions of low temperature is conferred compared to a corresponding non-modified, e.g. non-transformed, wild type plant.

[0287] In a further embodiment, an increased nutrient use efficiency as compared to a corresponding non-modified, e.g. a non-transformed, wild type plant cell, a plant or a part thereof is conferred if the activity of a polypeptide according to the polypeptide shown in SEQ ID NO. 1106, or encoded by a nucleic acid molecule comprising the nucleic acid molecule shown in SEQ ID NO. 1105, or a homolog of said nucleic acid molecule or polypeptide, e.g. in case the activity of the Synechocystis sp. nucleic acid molecule or a polypeptide comprising the nucleic acid molecule shown in SEQ ID NO. 1105 or polypeptide shown in SEQ ID NO. 1106, respectively, is increased or generated, e.g. if the activity of a nucleic acid molecule or a polypeptide comprising the nucleic acid or polypeptide or the consensus sequence or the polypeptide motif, as depicted in table I, II or IV, column 7 in the respective same line as the nucleic acid molecule shown in SEQ ID NO. 1105 or polypeptide shown in SEQ ID NO. 1106, respectively, is increased or generated or if the activity “modification methylase HemK family protein” is increased or generated in a plant cell, plant or part thereof, especially if the polypeptide is cytoplasmic localized. In one embodiment an increased nitrogen use efficiency is conferred.

[0288] Particularly, an increase of yield from 1.05-fold to 1.259-fold, for example plus at least 100% thereof, under conditions of nitrogen deficiency is conferred compared to a corresponding non-modified, e.g. non-transformed, wild type plant.

[0289] In a further embodiment, an increased intrinsic yield as compared to a corresponding non-modified, e.g. a non-transformed, wild type plant cell, a plant or a part thereof is conferred, if the activity of a polypeptide according to the polypeptide shown in SEQ ID NO. 1106, or encoded by a nucleic acid molecule comprising the nucleic acid molecule shown in SEQ ID NO. 1105, or a homolog of said nucleic acid molecule or polypeptide, e.g. in case the activity of the Synechocystis sp. nucleic acid molecule or a polypeptide comprising the nucleic acid molecule shown in SEQ ID NO. 1105 or polypeptide shown in SEQ ID NO. 1106, respectively, is increased or generated, e.g. if the activity of a nucleic acid molecule or a polypeptide comprising the nucleic acid or polypeptide or the consensus sequence or the polypeptide motif, as depicted in table I, II or IV, column 7 in the respective same line as the nucleic acid molecule shown in SEQ ID NO. 1105 or polypeptide shown in SEQ ID NO. 1106, respectively, is increased or generated or if the activity “modification methylase HemK family protein” is increased or generated in a plant cell, plant or part thereof, especially if the polypeptide is cytoplasmic localized. In one embodiment an increased yield under standard conditions, e.g. in the absence of nutrient deficiency as well as stress conditions, is conferred.

[0290] Particularly, an increase of yield from 1.05-fold to 1.068-fold, for example plus at least 100% thereof, under standard conditions, e.g. in the absence of nutrient deficiency as well as stress conditions is conferred compared to a corresponding on-modified, e.g. non-transformed, wild type plant.

[0291] Accordingly, in one embodiment, an increased yield as compared to a corresponding non-modified, e.g. a non-transformed, wild type plant is conferred in the method of the invention, if the activity of a polypeptide comprising the yield-related polypeptide shown in SEQ ID NO.: 1207, or encoded by the yield-related nucleic acid molecule (or gene) comprising the nucleic acid shown in SEQ ID NO.: 1206, or a homolog of said nucleic acid molecule or polypeptide, e.g. derived from Saccharomyces cerevisiae, is increased or generated. For example, the activity of a nucleic acid molecule or a polypeptide comprising the nucleic acid or polypeptide or the consensus sequence or the polypeptide motif, as depicted in table I, II or IV, column 7, in the respective same line as the nucleic acid molecule shown in SEQ ID NO.: 1206 or the polypeptide shown in SEQ ID NO.: 1207, respectively, is increased or generated, or the activity “YDR049W-protein” is increased or generated in a plant cell, plant or part thereof, especially the increase occurs cytoplasmic.

[0292] In a further embodiment, an increased tolerance to abiotic environmental stress, in particular increased low temperature tolerance, compared to a corresponding non-modified, e.g. a non-transformed, wild type plant is conferred if the activity of a polypeptide according to the polypeptide as depicted in SEQ ID NO. 1207, or encoded by a nucleic acid molecule comprising the nucleic acid molecule shown in SEQ ID NO. 1206, or a homolog of said nucleic acid molecule or polypeptide, e.g. in case the activity of the Saccharomyces cerevisiae nucleic acid molecule or a polypeptide comprising the nucleic acid molecule shown in SEQ ID NO. 1206 or polypeptide shown in SEQ ID NO. 1207, respectively, is increased or generated, e.g. if the activity of a nucleic acid molecule or a polypeptide comprising the nucleic acid or polypeptide or the consensus sequence or the polypeptide motif, as depicted in table I, II or IV, column 7 in the respective same line as the nucleic acid molecule shown in SEQ ID NO.: 1206 or polypeptide shown in SEQ ID NO.: 1207, respectively, is increased or generated or if the activity “YDR049W-protein” is increased or generated in a plant cell, plant or part thereof, especially, if the polypeptide is cytoplasmic localized.

[0293] Particularly, an increase of yield from 1.1-fold to 1.669-fold, for example plus at least 100% thereof, under conditions of low temperature is conferred compared to a corresponding non-modified, e.g. non-transformed, wild type plant.

[0294] In a further embodiment, an increased nutrient use efficiency as compared to a corresponding non-modified, e.g. a non-transformed, wild type plant cell, a plant or a part thereof is conferred if the activity of a polypeptide according to the polypeptide shown in SEQ ID NO. 1207, or encoded by a nucleic acid molecule comprising the nucleic acid molecule shown in SEQ ID NO. 1206, or a homolog of said nucleic acid molecule or polypeptide, e.g. in case the activity of the Saccharomyces cerevisiae nucleic acid molecule or a polypeptide comprising the nucleic acid molecule shown in SEQ ID NO. 1206 or polypeptide shown in SEQ ID NO. 1207, respectively, is increased or generated, e.g. if the activity of a nucleic acid molecule or a polypeptide comprising the nucleic acid or polypeptide or the consensus sequence or the polypeptide motif, as depicted in table I, II or IV, column 7 in the respective same line as the nucleic acid molecule shown in SEQ ID NO. 1206 or polypeptide shown in SEQ ID NO. 1207, respectively, is increased or generated or if the activity “YDR049W-protein” is increased or generated in a plant cell, plant or part thereof, especially if the polypeptide is cytoplasmic localized. In one embodiment an increased nitrogen use efficiency is conferred.

[0295] Particularly, an increase of yield from 1.05-fold to 1.259-fold, for example plus at least 100% thereof, under conditions of nitrogen deficiency is conferred compared to a corresponding non-modified, e.g. non-transformed, wild type plant.

[0296] In a further embodiment, an increased intrinsic yield as compared to a corresponding non-modified, e.g. a non-transformed, wild type plant cell, a plant or a part thereof is conferred, if the activity of a polypeptide according to the polypeptide shown in SEQ ID NO. 1207, or encoded by a nucleic acid molecule comprising the nucleic acid molecule shown in SEQ ID NO. 1206, or a homolog of said nucleic acid molecule or polypeptide, e.g. in case the activity of the Saccharomyces cerevisiae nucleic acid molecule or a polypeptide comprising the nucleic acid molecule shown in SEQ ID NO. 1206 or polypeptide shown in SEQ ID NO. 1207, respectively, is increased or generated, e.g. if the activity of a nucleic acid molecule or a polypeptide comprising the nucleic acid or polypeptide or the consensus sequence or the polypeptide motif, as depicted in table I, II or IV, column 7 in the respective same line as the nucleic acid molecule shown in SEQ ID NO. 1206 or polypeptide shown in SEQ ID NO. 1207, respectively, is increased or generated or if the activity “YDR049W-protein” is increased or generated in a plant cell, plant or part thereof, especially if the polypeptide is cytoplasmic localized. In one embodiment an increased yield under standard conditions, e.g. in the absence of nutrient deficiency as well as stress conditions, is conferred.

[0297] Particularly, an increase of yield from 1.05-fold to 1.166-fold, for example plus at least 100% thereof, under standard conditions, e.g. in the absence of nutrient deficiency as well as stress conditions is conferred compared to a corresponding on-modified, e.g. non-transformed, wild type plant.

[0298] Accordingly, in one embodiment, an increased yield as compared to a corresponding non-modified, e.g. a non-transformed, wild type plant is conferred in the method of the invention, if the activity of a polypeptide comprising the yield-related polypeptide shown in SEQ ID NO.: 1246, or encoded by the yield-related nucleic acid molecule (or gene) comprising the nucleic acid shown in SEQ ID NO.: 1245, or a homolog of said nucleic acid molecule or polypeptide, e.g. derived from Saccharomyces cerevisiae, is increased or generated. For example, the activity of a nucleic acid molecule or a polypeptide comprising the nucleic acid or polypeptide or the consensus sequence or the polypeptide motif, as depicted in table I, II or IV, column 7, in the respective same line as the nucleic acid molecule shown in SEQ ID NO.: 1245 or the polypeptide shown in SEQ ID NO.: 1246, respectively, is increased or generated, or the activity “3-phosphoglycerate dehydrogenase” is increased or generated in a plant cell, plant or part thereof, especially the increase occurs plastidic.

[0299] In a further embodiment, an increased tolerance to abiotic environmental stress, in particular increased low temperature tolerance, compared to a corresponding non-modified, e.g. a non-transformed, wild type plant is conferred if the activity of a polypeptide according to the polypeptide as depicted in SEQ ID NO. 1246, or encoded by a nucleic acid molecule comprising the nucleic acid molecule shown in SEQ ID NO. 1245, or a homolog of said nucleic acid molecule or polypeptide, e.g. in case the activity of the Saccharomyces cerevisiae nucleic acid molecule or a polypeptide comprising the nucleic acid molecule shown in SEQ ID NO. 1245 or polypeptide shown in SEQ ID NO. 1246, respectively, is increased or generated, e.g. if the activity of a nucleic acid molecule or a polypeptide comprising the nucleic acid or polypeptide or the consensus sequence or the polypeptide motif, as depicted in table I, II or IV, column 7 in the respective same line as the nucleic acid molecule shown in SEQ ID NO.: 1245 or polypeptide shown in SEQ ID NO.: 1246, respectively, is increased or generated or if the activity “3-phosphoglycerate dehydrogenase” is increased or generated in a plant cell, plant or part thereof, especially, if the polypeptide is plastidic localized.

[0300] Particularly, an increase of yield from 1.1-fold to 1.213-fold, for example plus at least 100% thereof, under conditions of low temperature is conferred compared to a corresponding non-modified, e.g. non-transformed, wild type plant.

[0301] In a further embodiment, an increased intrinsic yield as compared to a corresponding non-modified, e.g. a non-transformed, wild type plant cell, a plant or a part thereof is conferred, if the activity of a polypeptide according to the polypeptide shown in SEQ ID NO. 1246, or encoded by a nucleic acid molecule comprising the nucleic acid molecule shown in SEQ ID NO. 1245, or a homolog of said nucleic acid molecule or polypeptide, e.g. in case the activity of the Saccharomyces cerevisiae nucleic acid molecule or a polypeptide comprising the nucleic acid molecule shown in SEQ ID NO. 1245 or polypeptide shown in SEQ ID NO. 1246, respectively, is increased or generated, e.g. if the activity of a nucleic acid molecule or a polypeptide comprising the nucleic acid or polypeptide or the consensus sequence or the polypeptide motif, as depicted in table I, II or IV, column 7 in the respective same line as the nucleic acid molecule shown in SEQ ID NO. 1245 or polypeptide shown in SEQ ID NO. 1246, respectively, is increased or generated or if the activity “3-phosphoglycerate dehydrogenase” is increased or generated in a plant cell, plant or part thereof, especially if the polypeptide is plastidic localized. In one embodiment an increased yield under standard conditions, e.g. in the absence of nutrient deficiency as well as stress conditions, is conferred.

[0302] Particularly, an increase of yield from 1.05-fold to 1.209-fold, for example plus at least 100% thereof, under standard conditions, e.g. in the absence of nutrient deficiency as well as stress conditions is conferred compared to a corresponding on-modified, e.g. non-transformed, wild type plant.

[0303] The ratios indicated above particularly refer to an increased yield actually measured as increase of biomass, especially as fresh weight biomass of aerial parts.

[0304] For the purposes of the invention, as a rule the plural is intended to encompass the singular and vice versa.

[0305] Unless otherwise specified, the terms “polynucleotides”, “nucleic acid” and “nucleic acid molecule” are interchangeably in the present context. Unless otherwise specified, the terms “peptide”, “polypeptide” and “protein” are interchangeably in the present context. The term “sequence” may relate to polynucleotides, nucleic acids, nucleic acid molecules, peptides, polypeptides and proteins, depending on the context in which the term “sequence” is used. The terms “gene(s)”, “polynucleotide”, “nucleic acid sequence”, “nucleotide sequence”, or “nucleic acid molecule(s)” as used herein refers to a polymeric form of nucleotides of any length, either ribonucleotides or deoxyribonucleotides. The terms refer only to the primary structure of the molecule.

[0306] Thus, the terms “gene(s)”, “polynucleotide”, “nucleic acid sequence”, “nucleotide sequence”, or “nucleic acid molecule(s)” as used herein include double- and single-stranded DNA and/or RNA. They also include known types of modifications, for example, methylation, “caps”, substitutions of one or more of the naturally occurring nucleotides with an analog. Preferably, the DNA or RNA sequence comprises a coding sequence encoding the herein defined polypeptide.

[0307] A “coding sequence” is a nucleotide sequence, which is transcribed into an RNA, e.g. a regulatory RNA, such as a miRNA, a ta-siRNA, cosuppression molecule, an RNAi, a ribozyme, etc. or into a mRNA which is translated into a polypeptide when placed under the control of appropriate regulatory sequences. The boundaries of the coding sequence are determined by a translation start codon at the 5′-terminus and a translation stop codon at the 3′-terminus. A coding sequence can include, but is not limited to mRNA, cDNA, recombinant nucleotide sequences or genomic DNA, while introns may be present as well under certain circumstances.

[0308] As used in the present context a nucleic acid molecule may also encompass the untranslated sequence located at the 3′ and at the 5′ end of the coding gene region, for example at least 500, preferably 200, especially preferably 100, nucleotides of the sequence upstream of the 5′ end of the coding region and at least 100, preferably 50, especially preferably 20, nucleotides of the sequence downstream of the 3′ end of the coding gene region. In the event for example the antisense, RNAi, snRNA, dsRNA, siRNA, miRNA, ta-siRNA, cosuppression molecule, ribozyme etc. technology is used coding regions as well as the 5′- and/or 3′-regions can advantageously be used.

[0309] However, it is often advantageous only to choose the coding region for cloning and expression purposes.

[0310] “Polypeptide” refers to a polymer of amino acid (amino acid sequence) and does not refer to a specific length of the molecule. Thus, peptides and oligopeptides are included within the definition of polypeptide. This term does also refer to or include post-translational modifications of the polypeptide, for example, glycosylations, acetylations, phosphorylations and the like. Included within the definition are, for example, polypeptides containing one or more analogs of an amino acid (including, for example, unnatural amino acids, etc.), polypeptides with substituted linkages, as well as other modifications known in the art, both naturally occurring and non-naturally occurring.

[0311] The term “table I” used in this specification is to be taken to specify the content of table I A and table I B. The term “table II” used in this specification is to be taken to specify the content of table II A and table II B. The term “table I A” used in this specification is to be taken to specify the content of table I A. The term “table I B” used in this specification is to be taken to specify the content of table I B. The term “table II A” used in this specification is to be taken to specify the content of table II A. The term “table II B” used in this specification is to be taken to specify the content of table II B. In one preferred embodiment, the term “table I” means table I B. In one preferred embodiment, the term “table II” means table II B.

[0312] The terms “comprise” or “comprising” and grammatical variations thereof when used in this specification are to be taken to specify the presence of stated features, integers, steps or components or groups thereof, but not to preclude the presence or addition of one or more other features, integers, steps, components or groups thereof.

[0313] In accordance with the invention, a protein or polypeptide has the “activity of an YRP, e.g. of a “protein as shown in table II, column 3” if its de novo activity, or its increased expression directly or indirectly leads to and confers increased yield, e.g. to an increased yield-related trait, for example enhanced tolerance to abiotic environmental stress, for example an increased drought tolerance and/or low temperature tolerance and/or an increased nutrient use efficiency, intrinsic yield and/or another increased yield-related trait as compared to a corresponding, e.g. non-transformed, wild type plant and the protein has the above mentioned activities of a protein as shown in table II, column 3. Throughout the specification the activity or preferably the biological activity of such a protein or polypeptide or an nucleic acid molecule or sequence encoding such protein or polypeptide is identical or similar if it still has the biological or enzymatic activity of a protein as shown in table II, column 3, or which has at least 10% of the original enzymatic activity, preferably 20%, 30%, 40%, 50%, particularly preferably 60%, 70%, 80% most particularly preferably 90%, 95%, 98%, 99% in comparison to a protein as shown in table II, column 3 of S. cerevisiae or E. coli or Synechocystis sp. or A. thaliana. In another embodiment the biological or enzymatic activity of a protein as shown in table II, column 3, has at least 101% of the original enzymatic activity, preferably 110%, 120%, %, 150%, particularly preferably 150%, 200%, 300% in comparison to a protein as shown in table II, column 3 of S. cerevisiae or E. coli or Synechocystis sp. or A. thaliana.

[0314] The terms “increased”, “raised”, “extended”, “enhanced”, “improved” or “amplified” relate to a corresponding change of a property in a plant, an organism, a part of an organism such as a tissue, seed, root, leave, flower etc. or in a cell and are interchangeable. Preferably, the overall activity in the volume is increased or enhanced in cases if the increase or enhancement is related to the increase or enhancement of an activity of a gene product, independent whether the amount of gene product or the specific activity of the gene product or both is increased or enhanced or whether the amount, stability or translation efficacy of the nucleic acid sequence or gene encoding for the gene product is increased or enhanced.

[0315] The terms “increase” relate to a corresponding change of a property an organism or in a part of a plant, an organism, such as a tissue, seed, root, leave, flower etc. or in a cell. Preferably, the overall activity in the volume is increased in cases the increase relates to the increase of an activity of a gene product, independent whether the amount of gene product or the specific activity of the gene product or both is increased or generated or whether the amount, stability or translation efficacy of the nucleic acid sequence or gene encoding for the gene product is increased.

[0316] Under “change of a property” it is understood that the activity, expression level or amount of a gene product or the metabolite content is changed in a specific volume relative to a corresponding volume of a control, reference or wild type, including the de novo creation of the activity or expression.

[0317] The terms “increase” include the change of said property in only parts of the subject of the present invention, for example, the modification can be found in compartment of a cell, like a organelle, or in a part of a plant, like tissue, seed, root, leave, flower etc. but is not detectable if the overall subject, i.e. complete cell or plant, is tested.

[0318] Accordingly, the term “increase” means that the specific activity of an enzyme as well as the amount of a compound or metabolite, e.g. of a polypeptide, a nucleic acid molecule of the invention or an encoding mRNA or DNA, can be increased in a volume.

[0319] The terms “wild type”, “control” or “reference” are exchangeable and can be a cell or a part of organisms such as an organelle like a chloroplast or a tissue, or an organism, in particular a plant, which was not modified or treated according to the herein described process according to the invention. Accordingly, the cell or a part of organisms such as an organelle like a chloroplast or a tissue, or an organism, in particular a plant used as wild type, control or reference corresponds to the cell, organism, plant or part thereof as much as possible and is in any other property but in the result of the process of the invention as identical to the subject matter of the invention as possible. Thus, the wild type, control or reference is treated identically or as identical as possible, saying that only conditions or properties might be different which do not influence the quality of the tested property.

[0320] Preferably, any comparison is carried out under analogous conditions. The term “analogous conditions” means that all conditions such as, for example, culture or growing conditions, soil, nutrient, water content of the soil, temperature, humidity or surrounding air or soil, assay conditions (such as buffer composition, temperature, substrates, pathogen strain, concentrations and the like) are kept identical between the experiments to be compared.

[0321] The “reference”, “control”, or “wild type” is preferably a subject, e.g. an organelle, a cell, a tissue, an organism, in particular a plant, which was not modified or treated according to the herein described process of the invention and is in any other property as similar to the subject matter of the invention as possible. The reference, control or wild type is in its genome, transcriptome, proteome or metabolome as similar as possible to the subject of the present invention. Preferably, the term “reference-” “control-” or “wild type-”-organelle, -cell, -tissue or -organism, in particular plant, relates to an organelle, cell, tissue or organism, in particular plant, which is nearly genetically identical to the organelle, cell, tissue or organism, in particular plant, of the present invention or a part thereof preferably 95%, more preferred are 98%, even more preferred are 99.00%, in particular 99.10%, 99.30%, 99.50%, 99.70%, 99.90%, 99.99%, 99.999% or more. Most preferable the “reference”, “control”, or “wild type” is a subject, e.g. an organelle, a cell, a tissue, an organism, in particular a plant, which is genetically identical to the organism, in particular plant, cell, a tissue or organelle used according to the process of the invention except that the responsible or activity conferring nucleic acid molecules or the gene product encoded by them are amended, manipulated, exchanged or introduced according to the inventive process.

[0322] In case, a control, reference or wild type differing from the subject of the present invention only by not being subject of the process of the invention can not be provided, a control, reference or wild type can be an organism in which the cause for the modulation of an activity conferring the enhanced tolerance to abiotic environmental stress and/or increased yield as compared to a corresponding, e.g. non-transformed, wild type plant cell, plant or part thereof or expression of the nucleic acid molecule of the invention as described herein has been switched back or off, e.g. by knocking out the expression of responsible gene product, e.g. by antisense inhibition, by inactivation of an activator or agonist, by activation of an inhibitor or antagonist, by inhibition through adding inhibitory antibodies, by adding active compounds as e.g. hormones, by introducing negative dominant mutants, etc. A gene production can for example be knocked out by introducing inactivating point mutations, which lead to an enzymatic activity inhibition or a destabilization or an inhibition of the ability to bind to cofactors etc.

[0323] Accordingly, preferred reference subject is the starting subject of the present process of the invention. Preferably, the reference and the subject matter of the invention are compared after standardization and normalization, e.g. to the amount of total RNA, DNA, or protein or activity or expression of reference genes, like housekeeping genes, such as ubiquitin, actin or ribosomal proteins.

[0324] The increase or modulation according to this invention can be constitutive, e.g. due to a stable permanent transgenic expression or to a stable mutation in the corresponding endogenous gene encoding the nucleic acid molecule of the invention or to a modulation of the expression or of the behavior of a gene conferring the expression of the polypeptide of the invention, or transient, e.g. due to an transient transformation or temporary addition of a modulator such as a agonist or antagonist or inducible, e.g. after transformation with a inducible construct carrying the nucleic acid molecule of the invention under control of a inducible promoter and adding the inducer, e.g. tetracycline or as described herein below.

[0325] The increase in activity of the polypeptide amounts in a cell, a tissue, an organelle, an organ or an organism, preferably a plant, or a part thereof preferably to at least 5%, preferably to at least 20% or at to least 50%, especially preferably to at least 70%, 80%, 90% or more, very especially preferably are to at least 100%, 150% or 200%, most preferably are to at least 250% or more in comparison to the control, reference or wild type. In one embodiment the term increase means the increase in amount in relation to the weight of the organism or part thereof (w/w).

[0326] In one embodiment the increase in activity of the polypeptide amounts in an organelle such as a plastid. In another embodiment the increase in activity of the polypeptide amounts in the cytoplasm.

[0327] The specific activity of a polypeptide encoded by a nucleic acid molecule of the present invention or of the polypeptide of the present invention can be tested as described in the examples. In particular, the expression of a protein in question in a cell, e.g. a plant cell in comparison to a control is an easy test and can be performed as described in the state of the art.

[0328] The term “increase” includes, that a compound or an activity, especially an activity, is introduced into a cell, the cytoplasm or a sub-cellular compartment or organelle de novo or that the compound or the activity, especially an activity, has not been detected before, in other words it is “generated”.

[0329] Accordingly, in the following, the term “increasing” also comprises the term “generating” or “stimulating”. The increased activity manifests itself in increased yield, e.g. an increased yield-related trait, for example enhanced tolerance to abiotic environmental stress, for example an increased drought tolerance and/or low temperature tolerance and/or an increased nutrient use efficiency, intrinsic yield and/or another increased yield-related trait as compared to a corresponding, e.g. non-transformed, wild type plant cell, plant or part thereof.

[0330] The sequence of GM02LC13512 from Glycine max, e.g. as shown in column 5 of table I, is published: sequences from S. cerevisiae have been published in Goffeau et al., Science 274 (5287), 546 (1996), sequences from E. coli have been published in Blattner et al., Science 277 (5331), 1453 (1997). Its activity is described as peptidy-prolyl-cis-trans-isomerase. Accordingly, in one embodiment, the process of the present invention for producing a plant with increased yield comprises increasing or generating the activity of a gene product conferring the activity “peptidy-prolyl-cis-trans-isomerase” from Glycine max or its functional equivalent or its homolog, e.g. the increase of

(a) a gene product of a gene comprising the nucleic acid molecule as shown in column 5 of table I, and being depicted in the same respective line as said GM02LC13512 or a functional equivalent or a homologue thereof as shown depicted in column 7 of table I, preferably a homologue or functional equivalent as shown depicted in column 7 of table I B, and being depicted in the same respective line as said GM02LC13512, e.g. cytoplasmic; or
(b) a polypeptide comprising a polypeptide, a consensus sequence or a polypeptide motif as shown depicted in column 5 of table II or column 7 of table IV, and being depicted in the same respective line as said GM02LC13512 or a functional equivalent or a homologue thereof as depicted in column 7 of table II, preferably a homologue or functional equivalent as depicted in column 7 of table II B, and being depicted in the same respective line as said GM02LC13512, e.g. cytoplasmic.

[0331] In one embodiment, said molecule, which activity is to be increased in the process of the invention and which is the gene product with an activity as described as a “peptidy-prolyl-cis-trans-isomerase”, is increased or generated cytoplasmic.

[0332] The sequence of SLL1091 from Synechocystis sp., e.g. as shown in column 5 of table I, is published: sequences from S. cerevisiae have been published in Goffeau et al., Science 274 (5287), 546 (1996), sequences from E. coli have been published in Blattner et al., Science 277 (5331), 1453 (1997). Its activity is described as geranylgeranyl reductase. Accordingly, in one embodiment, the process of the present invention for producing a plant with increased yield comprises increasing or generating the activity of a gene product conferring the activity “geranylgeranyl reductase” from Synechocystis sp. or its functional equivalent or its homolog, e.g. the increase of
[0333] (a) a gene product of a gene comprising the nucleic acid molecule as shown in column 5 of table I, and being depicted in the same respective line as said SLL1091 or a functional equivalent or a homologue thereof as shown depicted in column 7 of table I, preferably a homologue or functional equivalent as shown depicted in column 7 of table I B, and being depicted in the same respective line as said SLL1091, e.g. plastidic; or
[0334] (b) a polypeptide comprising a polypeptide, a consensus sequence or a polypeptide motif as shown depicted in column 5 of table II or column 7 of table IV, and being depicted in the same respective line as said SLL1091 or a functional equivalent or a homologue thereof as depicted in column 7 of table II, preferably a homologue or functional equivalent as depicted in column 7 of table II B, and being depicted in the same respective line as said SLL1091, e.g. plastidic.
   In one embodiment, said molecule, which activity is to be increased in the process of the invention and which is the gene product with an activity as described as a “geranylgeranyl reductase”, is increased or generated plastidic.

[0335] The sequence of SLR1293 from Synechocystis sp., e.g. as shown in column 5 of table I, is published: sequences from S. cerevisiae have been published in Goffeau et al., Science 274 (5287), 546 (1996), sequences from E. coli have been published in Blattner et al., Science 277 (5331), 1453 (1997). Its activity is described as slr1293-protein.

Accordingly, in one embodiment, the process of the present invention for producing a plant with increased yield comprises increasing or generating the activity of a gene product conferring the activity “slr1293-protein” from Synechocystis sp. or its functional equivalent or its homolog, e.g. the increase of
[0336] (a) a gene product of a gene comprising the nucleic acid molecule as shown in column 5 of table I, and being depicted in the same respective line as said SLR1293 or a functional equivalent or a homologue thereof as shown depicted in column 7 of table I, preferably a homologue or functional equivalent as shown depicted in column 7 of table I B, and being depicted in the same respective line as said SLR1293, e.g. Plastidic; or
[0337] (b) a polypeptide comprising a polypeptide, a consensus sequence or a polypeptide motif as shown depicted in column 5 of table II or column 7 of table IV, and being depicted in the same respective line as said SLR1293 or a functional equivalent or a homologue thereof as depicted in column 7 of table II, preferably a homologue or functional equivalent as depicted in column 7 of table II B, and being depicted in the same respective line as said SLR1293, e.g. plastidic.
   In one embodiment, said molecule, which activity is to be increased in the process of the invention and which is the gene product with an activity as described as a “slr1293-protein”, is increased or generated plastidic.

[0338] The sequence of YDR461W from Saccharomyces cerevisiae, e.g. as shown in column 5 of table I, is published: sequences from S. cerevisiae have been published in Goffeau et al., Science 274 (5287), 546 (1996), sequences from E. coli have been published in Blattner et al., Science 277 (5331), 1453 (1997). Its activity is described as Mating hormone A-factor precursor.

Accordingly, in one embodiment, the process of the present invention for producing a plant with increased yield comprises increasing or generating the activity of a gene product conferring the activity “Mating hormone A-factor precursor” from Saccharomyces cerevisiae or its functional equivalent or its homolog, e.g. the increase of
[0339] (a) a gene product of a gene comprising the nucleic acid molecule as shown in column 5 of table I, and being depicted in the same respective line as said YDR461W or a functional equivalent or a homologue thereof as shown depicted in column 7 of table I, preferably a homologue or functional equivalent as shown depicted in column 7 of table I B, and being depicted in the same respective line as said YDR461W, e.g. cytoplasmic; or
[0340] (b) a polypeptide comprising a polypeptide, a consensus sequence or a polypeptide motif as shown depicted in column 5 of table II or column 7 of table IV, and being depicted in the same respective line as said YDR461W or a functional equivalent or a homologue thereof as depicted in column 7 of table II, preferably a homologue or functional equivalent as depicted in column 7 of table II B, and being depicted in the same respective line as said YDR461W, e.g. cytoplasmic.
   In one embodiment, said molecule, which activity is to be increased in the process of the invention and which is the gene product with an activity as described as a “Mating hormone A-factor precursor”, is increased or generated cytoplasmic.

[0341] The sequence of YER170W from Saccharomyces cerevisiae, e.g. as shown in column 5 of table I, is published: sequences from S. cerevisiae have been published in Goffeau et al., Science 274 (5287), 546 (1996), sequences from E. coli have been published in Blattner et al., Science 277 (5331), 1453 (1997). Its activity is described as Adenylate kinase.

Accordingly, in one embodiment, the process of the present invention for producing a plant with increased yield comprises increasing or generating the activity of a gene product conferring the activity “Adenylate kinase” from Saccharomyces cerevisiae or its functional equivalent or its homolog, e.g. the increase of
[0342] (a) a gene product of a gene comprising the nucleic acid molecule as shown in column 5 of table I, and being depicted in the same respective line as said YER170W or a functional equivalent or a homologue thereof as shown depicted in column 7 of table I, preferably a homologue or functional equivalent as shown depicted in column 7 of table I B, and being depicted in the same respective line as said YER170W, e.g. plastidic; or
[0343] (b) a polypeptide comprising a polypeptide, a consensus sequence or a polypeptide motif as shown depicted in column 5 of table II or column 7 of table IV, and being depicted in the same respective line as said YER170W or a functional equivalent or a homologue thereof as depicted in column 7 of table II, preferably a homologue or functional equivalent as depicted in column 7 of table II B, and being depicted in the same respective line as said YER170W, e.g. plastidic.
   In one embodiment, said molecule, which activity is to be increased in the process of the invention and which is the gene product with an activity as described as a “Adenylate kinase”, is increased or generated plastidic.

[0344] The sequence of YGR247W from Saccharomyces cerevisiae, e.g. as shown in column 5 of table I, is published: sequences from S. cerevisiae have been published in Goffeau et al., Science 274 (5287), 546 (1996), sequences from E. coli have been published in Blattner et al., Science 277 (5331), 1453 (1997). Its activity is described as Cyclic nucleotide phosphodiesterase.

Accordingly, in one embodiment, the process of the present invention for producing a plant with increased yield comprises increasing or generating the activity of a gene product conferring the activity “Cyclic nucleotide phosphodiesterase” from Saccharomyces cerevisiae or its functional equivalent or its homolog, e.g. the increase of
[0345] (a) a gene product of a gene comprising the nucleic acid molecule as shown in column 5 of table I, and being depicted in the same respective line as said YGR247W or a functional equivalent or a homologue thereof as shown depicted in column 7 of table I, preferably a homologue or functional equivalent as shown depicted in column 7 of table I B, and being depicted in the same respective line as said YGR247W, e.g. plastidic; or
[0346] (b) a polypeptide comprising a polypeptide, a consensus sequence or a polypeptide motif as shown depicted in column 5 of table II or column 7 of table IV, and being depicted in the same respective line as said YGR247W or a functional equivalent or a homologue thereof as depicted in column 7 of table II, preferably a homologue or functional equivalent as depicted in column 7 of table II B, and being depicted in the same respective line as said YGR247W, e.g. plastidic.
   In one embodiment, said molecule, which activity is to be increased in the process of the invention and which is the gene product with an activity as described as a “Cyclic nucleotide phosphodiesterase”, is increased or generated plastidic.

[0347] The sequence of YHR201C from Saccharomyces cerevisiae, e.g. as shown in column 5 of table I, is published: sequences from S. cerevisiae have been published in Goffeau et al., Science 274 (5287), 546 (1996), sequences from E. coli have been published in Blattner et al., Science 277 (5331), 1453 (1997). Its activity is described as Exopolyphosphatase.

Accordingly, in one embodiment, the process of the present invention for producing a plant with increased yield comprises increasing or generating the activity of a gene product conferring the activity “Exopolyphosphatase” from Saccharomyces cerevisiae or its functional equivalent or its homolog, e.g. the increase of
[0348] (a) a gene product of a gene comprising the nucleic acid molecule as shown in column 5 of table I, and being depicted in the same respective line as said YHR201C or a functional equivalent or a homologue thereof as shown depicted in column 7 of table I, preferably a homologue or functional equivalent as shown depicted in column 7 of table I B, and being depicted in the same respective line as said YHR201C, e.g. cytoplasmic; or
[0349] (b) a polypeptide comprising a polypeptide, a consensus sequence or a polypeptide motif as shown depicted in column 5 of table II or column 7 of table IV, and being depicted in the same respective line as said YHR201C or a functional equivalent or a homologue thereof as depicted in column 7 of table II, preferably a homologue or functional equivalent as depicted in column 7 of table II B, and being depicted in the same respective line as said YHR201C, e.g. cytoplasmic.
   In one embodiment, said molecule, which activity is to be increased in the process of the invention and which is the gene product with an activity as described as a “Exopolyphosphatase”, is increased or generated cytoplasmic.

[0350] The sequence of YJL181W from Saccharomyces cerevisiae, e.g. as shown in column 5 of table I, is published: sequences from S. cerevisiae have been published in Goffeau et al., Science 274 (5287), 546 (1996), sequences from E. coli have been published in Blattner et al., Science 277 (5331), 1453 (1997). Its activity is described as YJL181W-protein.

Accordingly, in one embodiment, the process of the present invention for producing a plant with increased yield comprises increasing or generating the activity of a gene product conferring the activity “YJL181W-protein” from Saccharomyces cerevisiae or its functional equivalent or its homolog, e.g. the increase of
[0351] (a) a gene product of a gene comprising the nucleic acid molecule as shown in column 5 of table I, and being depicted in the same respective line as said YJL181W or a functional equivalent or a homologue thereof as shown depicted in column 7 of table I, preferably a homologue or functional equivalent as shown depicted in column 7 of table I B, and being depicted in the same respective line as said YJL181W, e.g. cytoplasmic; or
[0352] (b) a polypeptide comprising a polypeptide, a consensus sequence or a polypeptide motif as shown depicted in column 5 of table II or column 7 of table IV, and being depicted in the same respective line as said YJL181W or a functional equivalent or a homologue thereof as depicted in column 7 of table II, preferably a homologue or functional equivalent as depicted in column 7 of table II B, and being depicted in the same respective line as said YJL181W, e.g. cytoplasmic.
   In one embodiment, said molecule, which activity is to be increased in the process of the invention and which is the gene product with an activity as described as a “YJL181W-protein”, is increased or generated cytoplasmic.

[0353] The sequence of YJR095W from Saccharomyces cerevisiae, e.g. as shown in column 5 of table I, is published: sequences from S. cerevisiae have been published in Goffeau et al., Science 274 (5287), 546 (1996), sequences from E. coli have been published in Blattner et al., Science 277 (5331), 1453 (1997). Its activity is described as mitochondrial succinate-fumarate transporter.

Accordingly, in one embodiment, the process of the present invention for producing a plant with increased yield comprises increasing or generating the activity of a gene product conferring the activity “mitochondrial succinate-fumarate transporter” from Saccharomyces cerevisiae or its functional equivalent or its homolog, e.g. the increase of
[0354] (a) a gene product of a gene comprising the nucleic acid molecule as shown in column 5 of table I, and being depicted in the same respective line as said YJR095W or a functional equivalent or a homologue thereof as shown depicted in column 7 of table I, preferably a homologue or functional equivalent as shown depicted in column 7 of table I B, and being depicted in the same respective line as said YJR095W, e.g. cytoplasmic; or
[0355] (b) a polypeptide comprising a polypeptide, a consensus sequence or a polypeptide motif as shown depicted in column 5 of table II or column 7 of table IV, and being depicted in the same respective line as said YJR095W or a functional equivalent or a homologue thereof as depicted in column 7 of table II, preferably a homologue or functional equivalent as depicted in column 7 of table II B, and being depicted in the same respective line as said YJR095W, e.g. cytoplasmic.
   In one embodiment, said molecule, which activity is to be increased in the process of the invention and which is the gene product with an activity as described as a “mitochondrial succinate-fumarate transporter”, is increased or generated cytoplasmic.

[0356] The sequence of YNR047W from Saccharomyces cerevisiae, e.g. as shown in column 5 of table I, is published: sequences from S. cerevisiae have been published in Goffeau et al., Science 274 (5287), 546 (1996), sequences from E. coli have been published in Blattner et al., Science 277 (5331), 1453 (1997). Its activity is described as protein kinase.

Accordingly, in one embodiment, the process of the present invention for producing a plant with increased yield comprises increasing or generating the activity of a gene product conferring the activity “protein kinase” from Saccharomyces cerevisiae or its functional equivalent or its homolog, e.g. the increase of
[0357] (a) a gene product of a gene comprising the nucleic acid molecule as shown in column 5 of table I, and being depicted in the same respective line as said YNR047W or a functional equivalent or a homologue thereof as shown depicted in column 7 of table I, preferably a homologue or functional equivalent as shown depicted in column 7 of table I B, and being depicted in the same respective line as said YNR047W, e.g. cytoplasmic; or
[0358] (b) a polypeptide comprising a polypeptide, a consensus sequence or a polypeptide motif as shown depicted in column 5 of table II or column 7 of table IV, and being depicted in the same respective line as said YNR047W or a functional equivalent or a homologue thereof as depicted in column 7 of table II, preferably a homologue or functional equivalent as depicted in column 7 of table II B, and being depicted in the same respective line as said YNR047W, e.g. cytoplasmic.
   In one embodiment, said molecule, which activity is to be increased in the process of the invention and which is the gene product with an activity as described as a “protein kinase”, is increased or generated cytoplasmic.

[0359] The sequence of YOL103W from Saccharomyces cerevisiae, e.g. as shown in column 5 of table I, is published: sequences from S. cerevisiae have been published in Goffeau et al., Science 274 (5287), 546 (1996), sequences from E. coli have been published in Blattner et al., Science 277 (5331), 1453 (1997). Its activity is described as Myo-inositol transporter. Accordingly, in one embodiment, the process of the present invention for producing a plant with increased yield comprises increasing or generating the activity of a gene product conferring the activity “Myo-inositol transporter” from Saccharomyces cerevisiae or its functional equivalent or its homolog, e.g. the increase of
[0360] (a) a gene product of a gene comprising the nucleic acid molecule as shown in column 5 of table I, and being depicted in the same respective line as said YOL103W or a functional equivalent or a homologue thereof as shown depicted in column 7 of table I, preferably a homologue or functional equivalent as shown depicted in column 7 of table I B, and being depicted in the same respective line as said YOL103W, e.g. plastidic; or
[0361] (b) a polypeptide comprising a polypeptide, a consensus sequence or a polypeptide motif as shown depicted in column 5 of table II or column 7 of table IV, and being depicted in the same respective line as said YOL103W or a functional equivalent or a homologue thereof as depicted in column 7 of table II, preferably a homologue or functional equivalent as depicted in column 7 of table II B, and being depicted in the same respective line as said YOL103W, e.g. plastidic.
   In one embodiment, said molecule, which activity is to be increased in the process of the invention and which is the gene product with an activity as described as a “Myo-inositol transporter”, is increased or generated plastidic.

[0362] The sequence of YOR095C from Saccharomyces cerevisiae, e.g. as shown in column 5 of table I, is published: sequences from S. cerevisiae have been published in Goffeau et al., Science 274 (5287), 546 (1996), sequences from E. coli have been published in Blattner et al., Science 277 (5331), 1453 (1997). Its activity is described as Ribose-5-phosphate isomerase.

Accordingly, in one embodiment, the process of the present invention for producing a plant with increased yield comprises increasing or generating the activity of a gene product conferring the activity “Ribose-5-phosphate isomerase” from Saccharomyces cerevisiae or its functional equivalent or its homolog, e.g. the increase of
[0363] (a) a gene product of a gene comprising the nucleic acid molecule as shown in column 5 of table I, and being depicted in the same respective line as said YOR095C or a functional equivalent or a homologue thereof as shown depicted in column 7 of table I, preferably a homologue or functional equivalent as shown depicted in column 7 of table I B, and being depicted in the same respective line as said YOR095C, e.g. cytoplasmic; or
[0364] (b) a polypeptide comprising a polypeptide, a consensus sequence or a polypeptide motif as shown depicted in column 5 of table II or column 7 of table IV, and being depicted in the same respective line as said YOR095C or a functional equivalent or a homologue thereof as depicted in column 7 of table II, preferably a homologue or functional equivalent as depicted in column 7 of table II B, and being depicted in the same respective line as said YOR095C, e.g. cytoplasmic.
   In one embodiment, said molecule, which activity is to be increased in the process of the invention and which is the gene product with an activity as described as a “Ribose-5-phosphate isomerase”, is increased or generated cytoplasmic.

[0365] The sequence of YPL109C from Saccharomyces cerevisiae, e.g. as shown in column 5 of table I, is published: sequences from S. cerevisiae have been published in Goffeau et al., Science 274 (5287), 546 (1996), sequences from E. coli have been published in Blattner et al., Science 277 (5331), 1453 (1997). Its activity is described as YPL109C-protein.

Accordingly, in one embodiment, the process of the present invention for producing a plant with increased yield comprises increasing or generating the activity of a gene product conferring the activity “YPL109C-protein” from Saccharomyces cerevisiae or its functional equivalent or its homolog, e.g. the increase of
[0366] (a) a gene product of a gene comprising the nucleic acid molecule as shown in column 5 of table I, and being depicted in the same respective line as said YPL109C or a functional equivalent or a homologue thereof as shown depicted in column 7 of table I, preferably a homologue or functional equivalent as shown depicted in column 7 of table I B, and being depicted in the same respective line as said YPL109C, e.g. plastidic; or
[0367] (b) a polypeptide comprising a polypeptide, a consensus sequence or a polypeptide motif as shown depicted in column 5 of table II or column 7 of table IV, and being depicted in the same respective line as said YPL109C or a functional equivalent or a homologue thereof as depicted in column 7 of table II, preferably a homologue or functional equivalent as depicted in column 7 of table II B, and being depicted in the same respective line as said YPL109C, e.g. plastidic.
   In one embodiment, said molecule, which activity is to be increased in the process of the invention and which is the gene product with an activity as described as a “YPL109C-protein”, is increased or generated plastidic.

[0368] The sequence of B2414_{—}2 from Escherichia coli, e.g. as shown in column 5 of table I, is published: sequences from S. cerevisiae have been published in Goffeau et al., Science 274 (5287), 546 (1996), sequences from E. coli have been published in Blattner et al., Science 277 (5331), 1453 (1997). Its activity is described as cysteine synthase.

Accordingly, in one embodiment, the process of the present invention for producing a plant with increased yield comprises increasing or generating the activity of a gene product conferring the activity “cysteine synthase” from Escherichia coli or its functional equivalent or its homolog, e.g. the increase of
[0369] (a) a gene product of a gene comprising the nucleic acid molecule as shown in column 5 of table I, and being depicted in the same respective line as said B2414_{—}2 or a functional equivalent or a homologue thereof as shown depicted in column 7 of table I, preferably a homologue or functional equivalent as shown depicted in column 7 of table I B, and being depicted in the same respective line as said B2414_{—}2, e.g. plastidic; or
[0370] (b) a polypeptide comprising a polypeptide, a consensus sequence or a polypeptide motif as shown depicted in column 5 of table II or column 7 of table IV, and being depicted in the same respective line as said B2414_{—}2 or a functional equivalent or a homologue thereof as depicted in column 7 of table II, preferably a homologue or functional equivalent as depicted in column 7 of table II B, and being depicted in the same respective line as said B2414_{—}2, e.g. plastidic.
   In one embodiment, said molecule, which activity is to be increased in the process of the invention and which is the gene product with an activity as described as a “cysteine synthase”, is increased or generated plastidic.

[0371] The sequence of GM02LC13512_{—}2 from Glycine max, e.g. as shown in column 5 of table I, is published: sequences from S. cerevisiae have been published in Goffeau et al., Science 274 (5287), 546 (1996), sequences from E. coli have been published in Blattner et al., Science 277 (5331), 1453 (1997). Its activity is described as peptidy-prolyl-cis-trans-isomerase. Accordingly, in one embodiment, the process of the present invention for producing a plant with increased yield comprises increasing or generating the activity of a gene product conferring the activity “peptidy-prolyl-cis-trans-isomerase” from Glycine max or its functional equivalent or its homolog, e.g. the increase of
[0372] (a) a gene product of a gene comprising the nucleic acid molecule as shown in column 5 of table I, and being depicted in the same respective line as said GM02LC13512_{—}2 or a functional equivalent or a homologue thereof as shown depicted in column 7 of table I, preferably a homologue or functional equivalent as shown depicted in column 7 of table I B, and being depicted in the same respective line as said GM02LC13512_{—}2, e.g. cytoplasmic; or
[0373] (b) a polypeptide comprising a polypeptide, a consensus sequence or a polypeptide motif as shown depicted in column 5 of table II or column 7 of table IV, and being depicted in the same respective line as said GM02LC13512_{—}2 or a functional equivalent or a homologue thereof as depicted in column 7 of table II, preferably a homologue or functional equivalent as depicted in column 7 of table II B, and being depicted in the same respective line as said GM02LC13512_{—}2, e.g. Cytoplasmic.
   In one embodiment, said molecule, which activity is to be increased in the process of the invention and which is the gene product with an activity as described as a “peptidy-prolyl-cis-trans-isomerase”, is increased or generated cytoplasmic.

[0374] The sequence of SLL1091_{—}2 from Synechocystis sp., e.g. as shown in column 5 of table I, is published: sequences from S. cerevisiae have been published in Goffeau et al., Science 274 (5287), 546 (1996), sequences from E. coli have been published in Blattner et al., Science 277 (5331), 1453 (1997). Its activity is described as geranylgeranyl reductase. Accordingly, in one embodiment, the process of the present invention for producing a plant with increased yield comprises increasing or generating the activity of a gene product conferring the activity “geranylgeranyl reductase” from Synechocystis sp. or its functional equivalent or its homolog, e.g. the increase of
[0375] (a) a gene product of a gene comprising the nucleic acid molecule as shown in column 5 of table I, and being depicted in the same respective line as said SLL1091_{—}2 or a functional equivalent or a homologue thereof as shown depicted in column 7 of table I, preferably a homologue or functional equivalent as shown depicted in column 7 of table I B, and being depicted in the same respective line as said SLL1091_{—}2, e.g. plastidic; or
[0376] (b) a polypeptide comprising a polypeptide, a consensus sequence or a polypeptide motif as shown depicted in column 5 of table II or column 7 of table IV, and being depicted in the same respective line as said SLL1091_{—}2 or a functional equivalent or a homologue thereof as depicted in column 7 of table II, preferably a homologue or functional equivalent as depicted in column 7 of table II B, and being depicted in the same respective line as said SLL1091_{—}2, e.g. plastidic.
   In one embodiment, said molecule, which activity is to be increased in the process of the invention and which is the gene product with an activity as described as a “geranylgeranyl reductase”, is increased or generated Plastidic.

[0377] The sequence of SLR1293_{—}2 from Synechocystis sp., e.g. as shown in column 5 of table I, is published: sequences from S. cerevisiae have been published in Goffeau et al., Science 274 (5287), 546 (1996), sequences from E. coli have been published in Blattner et al., Science 277 (5331), 1453 (1997). Its activity is described as slr1293-protein.

Accordingly, in one embodiment, the process of the present invention for producing a plant with increased yield comprises increasing or generating the activity of a gene product conferring the activity “slr1293-protein” from Synechocystis sp. or its functional equivalent or its homolog, e.g. the increase of
[0378] (a) a gene product of a gene comprising the nucleic acid molecule as shown in column 5 of table I, and being depicted in the same respective line as said SLR1293_{—}2 or a functional equivalent or a homologue thereof as shown depicted in column 7 of table I, preferably a homologue or functional equivalent as shown depicted in column 7 of table I B, and being depicted in the same respective line as said SLR1293_{—}2, e.g. plastidic; or
[0379] (b) a polypeptide comprising a polypeptide, a consensus sequence or a polypeptide motif as shown depicted in column 5 of table II or column 7 of table IV, and being depicted in the same respective line as said SLR1293_{—}2 or a functional equivalent or a homologue thereof as depicted in column 7 of table II, preferably a homologue or functional equivalent as depicted in column 7 of table II B, and being depicted in the same respective line as said SLR1293_{—}2, e.g. plastidic.
   In one embodiment, said molecule, which activity is to be increased in the process of the invention and which is the gene product with an activity as described as a “slr1293-protein”, is increased or generated plastidic.

[0380] The sequence of YDR049W_{—}2 from Saccharomyces cerevisiae, e.g. as shown in column 5 of table I, is published: sequences from S. cerevisiae have been published in Goffeau et al., Science 274 (5287), 546 (1996), sequences from E. coli have been published in Blattner et al., Science 277 (5331), 1453 (1997). Its activity is described as YDR049W-protein. Accordingly, in one embodiment, the process of the present invention for producing a plant with increased yield comprises increasing or generating the activity of a gene product conferring the activity “YDR049W-protein” from Saccharomyces cerevisiae or its functional equivalent or its homolog, e.g. the increase of
[0381] (a) a gene product of a gene comprising the nucleic acid molecule as shown in column 5 of table I, and being depicted in the same respective line as said YDR049W_{—}2 or a functional equivalent or a homologue thereof as shown depicted in column 7 of table I, preferably a homologue or functional equivalent as shown depicted in column 7 of table I B, and being depicted in the same respective line as said YDR049W_{—}2, e.g. cytoplasmic; or
[0382] (b) a polypeptide comprising a polypeptide, a consensus sequence or a polypeptide motif as shown depicted in column 5 of table II or column 7 of table IV, and being depicted in the same respective line as said YDR049W_{—}2 or a functional equivalent or a homologue thereof as depicted in column 7 of table II, preferably a homologue or functional equivalent as depicted in column 7 of table II B, and being depicted in the same respective line as said YDR049W_{—}2, e.g. cytoplasmic.
   In one embodiment, said molecule, which activity is to be increased in the process of the invention and which is the gene product with an activity as described as a “YDR049W-protein”, is increased or generated cytoplasmic.

[0383] The sequence of B1670 from Escherichia coli, e.g. as shown in column 5 of table I, is published: sequences from S. cerevisiae have been published in Goffeau et al., Science 274 (5287), 546 (1996), sequences from E. coli have been published in Blattner et al., Science 277 (5331), 1453 (1997). Its activity is described as oxidoreductase subunit.

Accordingly, in one embodiment, the process of the present invention for producing a plant with increased yield comprises increasing or generating the activity of a gene product conferring the activity “oxidoreductase subunit” from Escherichia coli or its functional equivalent or its homolog, e.g. the increase of
[0384] (a) a gene product of a gene comprising the nucleic acid molecule as shown in column 5 of table I, and being depicted in the same respective line as said B1670 or a functional equivalent or a homologue thereof as shown depicted in column 7 of table I, preferably a homologue or functional equivalent as shown depicted in column 7 of table I B, and being depicted in the same respective line as said B1670, e.g. cytoplasmic; or
[0385] (b) a polypeptide comprising a polypeptide, a consensus sequence or a polypeptide motif as shown depicted in column 5 of table II or column 7 of table IV, and being depicted in the same respective line as said B1670 or a functional equivalent or a homologue thereof as depicted in column 7 of table II, preferably a homologue or functional equivalent as depicted in column 7 of table II B, and being depicted in the same respective line as said B1670, e.g. cytoplasmic.
   In one embodiment, said molecule, which activity is to be increased in the process of the invention and which is the gene product with an activity as described as a “oxidoreductase subunit”, is increased or generated cytoplasmic.

[0386] The sequence of B2414 from Escherichia coli, e.g. as shown in column 5 of table I, is published: sequences from S. cerevisiae have been published in Goffeau et al., Science 274 (5287), 546 (1996), sequences from E. coli have been published in Blattner et al., Science 277 (5331), 1453 (1997). Its activity is described as cysteine synthase.

Accordingly, in one embodiment, the process of the present invention for producing a plant with increased yield comprises increasing or generating the activity of a gene product conferring the activity “cysteine synthase” from Escherichia coli or its functional equivalent or its homolog, e.g. the increase of
[0387] (a) a gene product of a gene comprising the nucleic acid molecule as shown in column 5 of table I, and being depicted in the same respective line as said B2414 or a functional equivalent or a homologue thereof as shown depicted in column 7 of table I, preferably a homologue or functional equivalent as shown depicted in column 7 of table I B, and being depicted in the same respective line as said B2414, e.g. plastidic; or
[0388] (b) a polypeptide comprising a polypeptide, a consensus sequence or a polypeptide motif as shown depicted in column 5 of table II or column 7 of table IV, and being depicted in the same respective line as said B2414 or a functional equivalent or a homologue thereof as depicted in column 7 of table II, preferably a homologue or functional equivalent as depicted in column 7 of table II B, and being depicted in the same respective line as said B2414, e.g. plastidic.
   In one embodiment, said molecule, which activity is to be increased in the process of the invention and which is the gene product with an activity as described as a “cysteine synthase”, is increased or generated plastidic.

[0389] The sequence of B2758 from Escherichia coli, e.g. as shown in column 5 of table I, is published: sequences from S. cerevisiae have been published in Goffeau et al., Science 274 (5287), 546 (1996), sequences from E. coli have been published in Blattner et al., Science 277 (5331), 1453 (1997). Its activity is described as B2758-protein.

Accordingly, in one embodiment, the process of the present invention for producing a plant with increased yield comprises increasing or generating the activity of a gene product conferring the activity “B2758-protein” from Escherichia coli or its functional equivalent or its homolog, e.g. the increase of
[0390] (a) a gene product of a gene comprising the nucleic acid molecule as shown in column 5 of table I, and being depicted in the same respective line as said B2758 or a functional equivalent or a homologue thereof as shown depicted in column 7 of table I, preferably a homologue or functional equivalent as shown depicted in column 7 of table I B, and being depicted in the same respective line as said B2758, e.g. cytoplasmic; or
[0391] (b) a polypeptide comprising a polypeptide, a consensus sequence or a polypeptide motif as shown depicted in column 5 of table II or column 7 of table IV, and being depicted in the same respective line as said B2758 or a functional equivalent or a homologue thereof as depicted in column 7 of table II, preferably a homologue or functional equivalent as depicted in column 7 of table II B, and being depicted in the same respective line as said B2758, e.g. cytoplasmic.
   In one embodiment, said molecule, which activity is to be increased in the process of the invention and which is the gene product with an activity as described as a “B2758-protein”, is increased or generated cytoplasmic.

[0392] The sequence of SLL1237 from Synechocystis sp., e.g. as shown in column 5 of table I, is published: sequences from S. cerevisiae have been published in Goffeau et al., Science 274 (5287), 546 (1996), sequences from E. coli have been published in Blattner et al., Science 277 (5331), 1453 (1997). Its activity is described as modification methylase HemK family protein.

Accordingly, in one embodiment, the process of the present invention for producing a plant with increased yield comprises increasing or generating the activity of a gene product conferring the activity “modification methylase HemK family protein” from Synechocystis sp. or its functional equivalent or its homolog, e.g. the increase of
[0393] (a) a gene product of a gene comprising the nucleic acid molecule as shown in column 5 of table I, and being depicted in the same respective line as said SLL1237 or a functional equivalent or a homologue thereof as shown depicted in column 7 of table I, preferably a homologue or functional equivalent as shown depicted in column 7 of table I B, and being depicted in the same respective line as said SLL1237, e.g. cytoplasmic; or
[0394] (b) a polypeptide comprising a polypeptide, a consensus sequence or a polypeptide motif as shown depicted in column 5 of table II or column 7 of table IV, and being depicted in the same respective line as said SLL1237 or a functional equivalent or a homologue thereof as depicted in column 7 of table II, preferably a homologue or functional equivalent as depicted in column 7 of table II B, and being depicted in the same respective line as said SLL1237, e.g. cytoplasmic.
   In one embodiment, said molecule, which activity is to be increased in the process of the invention and which is the gene product with an activity as described as a “modification methylase HemK family protein”, is increased or generated Cytoplasmic.

[0395] The sequence of YDR049W from Saccharomyces cerevisiae, e.g. as shown in column 5 of table I, is published: sequences from S. cerevisiae have been published in Goffeau et al., Science 274 (5287), 546 (1996), sequences from E. coli have been published in Blattner et al., Science 277 (5331), 1453 (1997). Its activity is described as YDR049W-protein.

Accordingly, in one embodiment, the process of the present invention for producing a plant with increased yield comprises increasing or generating the activity of a gene product conferring the activity “YDR049W-protein” from Saccharomyces cerevisiae or its functional equivalent or its homolog, e.g. the increase of
[0396] (a) a gene product of a gene comprising the nucleic acid molecule as shown in column 5 of table I, and being depicted in the same respective line as said YDR049W or a functional equivalent or a homologue thereof as shown depicted in column 7 of table I, preferably a homologue or functional equivalent as shown depicted in column 7 of table I B, and being depicted in the same respective line as said YDR049W, e.g. cytoplasmic; or
[0397] (b) a polypeptide comprising a polypeptide, a consensus sequence or a polypeptide motif as shown depicted in column 5 of table II or column 7 of table IV, and being depicted in the same respective line as said YDR049W or a functional equivalent or a homologue thereof as depicted in column 7 of table II, preferably a homologue or functional equivalent as depicted in column 7 of table II B, and being depicted in the same respective line as said YDR049W, e.g. cytoplasmic.
   In one embodiment, said molecule, which activity is to be increased in the process of the invention and which is the gene product with an activity as described as a “YDR049W-protein”, is increased or generated cytoplasmic.

[0398] The sequence of YIL074C from Saccharomyces cerevisiae, e.g. as shown in column 5 of table I, is published: sequences from S. cerevisiae have been published in Goffeau et al., Science 274 (5287), 546 (1996), sequences from E. coli have been published in Blattner et al., Science 277 (5331), 1453 (1997). Its activity is described as 3-phosphoglycerate dehydrogenase.

Accordingly, in one embodiment, the process of the present invention for producing a plant with increased yield comprises increasing or generating the activity of a gene product conferring the activity “3-phosphoglycerate dehydrogenase” from Saccharomyces cerevisiae or its functional equivalent or its homolog, e.g. the increase of
[0399] (a) a gene product of a gene comprising the nucleic acid molecule as shown in column 5 of table I, and being depicted in the same respective line as said YIL074C or a functional equivalent or a homologue thereof as shown depicted in column 7 of table I, preferably a homologue or functional equivalent as shown depicted in column 7 of table I B, and being depicted in the same respective line as said YIL074C, e.g. plastidic; or
[0400] (b) a polypeptide comprising a polypeptide, a consensus sequence or a polypeptide motif as shown depicted in column 5 of table II or column 7 of table IV, and being depicted in the same respective line as said YIL074C or a functional equivalent or a homologue thereof as depicted in column 7 of table II, preferably a homologue or functional equivalent as depicted in column 7 of table II B, and being depicted in the same respective line as said YIL074C, e.g. Plastidic.
   In one embodiment, said molecule, which activity is to be increased in the process of the invention and which is the gene product with an activity as described as a “3-phosphoglycerate dehydrogenase”, is increased or generated plastidic.

[0401] In particular, it was observed that in A. thaliana, said increasing or generating of the activity of a gene product being encoded by a gene comprising the nucleic acid molecule as shown in SEQ ID NO.: 1702, for example with the activity of a “peptidy-prolyl-cis-trans-isomerase”, conferred an increased yield, e.g. an increased yield-related trait. It was further observed that increasing or generating the activity of a gene product with said activity of a “peptidy-prolyl-cis-trans-isomerase” and being encoded by a gene comprising the nucleic acid sequence SEQ ID NO.: 1702 in A. thaliana conferred an tolerance to abiotic environmental stress, e.g. increase low temperature tolerance compared with the wild type control. In particular, it was observed that increasing or generating the activity of a gene product being encoded by a gene comprising the nucleic acid sequence SEQ ID NO.: 1702 localized as indicated in table I, column 6, e.g. cytoplasmic in A. thaliana, for example with the activity of a “peptidy-prolyl-cis-trans-isomerase”, conferred a low temperature tolerance.

[0402] In particular, it was observed that in A. thaliana, said increasing or generating of the activity of a gene product being encoded by a gene comprising the nucleic acid molecule as shown in SEQ ID NO.: 1772, for example with the activity of a “geranylgeranyl reductase”, conferred an increased yield, e.g. an increased yield-related trait. It was further observed that increasing or generating the activity of a gene product with said activity of a “geranylgeranyl reductase” and being encoded by a gene comprising the nucleic acid sequence SEQ ID NO.: 1772 in A. thaliana conferred an tolerance to abiotic environmental stress, e.g. increase low temperature tolerance compared with the wild type control. In particular, it was observed that increasing or generating the activity of a gene product being encoded by a gene comprising the nucleic acid sequence SEQ ID NO.: 1772 localized as indicated in table I, column 6, e.g. plastidic in A. thaliana, for example with the activity of a “geranylgeranyl reductase”, conferred a low temperature tolerance.

[0403] In particular, it was observed that in A. thaliana, said increasing or generating of the activity of a gene product being encoded by a gene comprising the nucleic acid molecule as shown in SEQ ID NO.: 1938, for example with the activity of a “slr1293-protein”, conferred an increased yield, e.g. an increased yield-related trait. It was further observed that increasing or generating the activity of a gene product with said activity of a “slr1293-protein” and being encoded by a gene comprising the nucleic acid sequence SEQ ID NO.: 1938 in A. thaliana conferred an tolerance to abiotic environmental stress, e.g. increase low temperature tolerance compared with the wild type control. In particular, it was observed that increasing or generating the activity of a gene product being encoded by a gene comprising the nucleic acid sequence SEQ ID NO.: 1938 localized as indicated in table I, column 6, e.g. plastidic in A. thaliana, for example with the activity of a “slr1293-protein”, conferred a low temperature tolerance.

[0404] In particular, it was observed that in A. thaliana, said increasing or generating of the activity of a gene product being encoded by a gene comprising the nucleic acid molecule as shown in SEQ ID NO.: 2042, for example with the activity of a “Mating hormone A-factor precursor”, conferred an increased yield, e.g. an increased yield-related trait. It was further observed that increasing or generating the activity of a gene product with said activity of a “Mating hormone A-factor precursor” and being encoded by a gene comprising the nucleic acid sequence SEQ ID NO.: 2042 in A. thaliana conferred an tolerance to abiotic environmental stress, e.g. increase low temperature tolerance compared with the wild type control. In particular, it was observed that increasing or generating the activity of a gene product being encoded by a gene comprising the nucleic acid sequence SEQ ID NO.: 2042 localized as indicated in table I, column 6, e.g. cytoplasmic in A. thaliana, for example with the activity of a “Mating hormone A-factor precursor”, conferred a low temperature tolerance.

[0405] In particular, it was observed that in A. thaliana, said increasing or generating of the activity of a gene product being encoded by a gene comprising the nucleic acid molecule as shown in SEQ ID NO.: 2056, for example with the activity of a “Adenylate kinase”, conferred an increased yield, e.g. an increased yield-related trait. It was further observed that increasing or generating the activity of a gene product with said activity of a “Adenylate kinase” and being encoded by a gene comprising the nucleic acid sequence SEQ ID NO.: 2056 in A. thaliana conferred an tolerance to abiotic environmental stress, e.g. increase low temperature tolerance compared with the wild type control. In particular, it was observed that increasing or generating the activity of a gene product being encoded by a gene comprising the nucleic acid sequence SEQ ID NO.: 2056 localized as indicated in table I, column 6, e.g. plastidic in A. thaliana, for example with the activity of a “Adenylate kinase”, conferred a low temperature tolerance.

[0406] In particular, it was observed that in A. thaliana, said increasing or generating of the activity of a gene product being encoded by a gene comprising the nucleic acid molecule as shown in SEQ ID NO.: 2558, for example with the activity of a “Cyclic nucleotide phosphodiesterase”, conferred an increased yield, e.g. an increased yield-related trait. It was further observed that increasing or generating the activity of a gene product with said activity of a “Cyclic nucleotide phosphodiesterase” and being encoded by a gene comprising the nucleic acid sequence SEQ ID NO.: 2558 in A. thaliana conferred an tolerance to abiotic environmental stress, e.g. increase low temperature tolerance compared with the wild type control. In particular, it was observed that increasing or generating the activity of a gene product being encoded by a gene comprising the nucleic acid sequence SEQ ID NO.: 2558 localized as indicated in table I, column 6, e.g. plastidic in A. thaliana, for example with the activity of a “Cyclic nucleotide phosphodiesterase”, conferred a low temperature tolerance.

[0407] In particular, it was observed that in A. thaliana, said increasing or generating of the activity of a gene product being encoded by a gene comprising the nucleic acid molecule as shown in SEQ ID NO.: 2577, for example with the activity of a “Exopolyphosphatase”, conferred an increased yield, e.g. an increased yield-related trait. It was further observed that increasing or generating the activity of a gene product with said activity of a “Exopolyphosphatase” and being encoded by a gene comprising the nucleic acid sequence SEQ ID NO.: 2577 in A. thaliana conferred an tolerance to abiotic environmental stress, e.g. increase low temperature tolerance compared with the wild type control. In particular, it was observed that increasing or generating the activity of a gene product being encoded by a gene comprising the nucleic acid sequence SEQ ID NO.: 2577 localized as indicated in table I, column 6, e.g. cytoplasmic in A. thaliana, for example with the activity of a “Exopolyphosphatase”, conferred a low temperature tolerance.

[0408] In particular, it was observed that in A. thaliana, said increasing or generating of the activity of a gene product being encoded by a gene comprising the nucleic acid molecule as shown in SEQ ID NO.: 2609, for example with the activity of a “YJL181W-protein”, conferred an increased yield, e.g. an increased yield-related trait. It was further observed that increasing or generating the activity of a gene product with said activity of a “YJL181W-protein” and being encoded by a gene comprising the nucleic acid sequence SEQ ID NO.: 2609 in A. thaliana conferred an tolerance to abiotic environmental stress, e.g. increase low temperature tolerance compared with the wild type control. In particular, it was observed that increasing or generating the activity of a gene product being encoded by a gene comprising the nucleic acid sequence SEQ ID NO.: 2609 localized as indicated in table I, column 6, e.g. cytoplasmic in A. thaliana, for example with the activity of a “YJL181W-protein”, conferred a low temperature tolerance.

[0409] In particular, it was observed that in A. thaliana, said increasing or generating of the activity of a gene product being encoded by a gene comprising the nucleic acid molecule as shown in SEQ ID NO.: 2628, for example with the activity of a “mitochondrial succinate-fumarate transporter”, conferred an increased yield, e.g. an increased yield-related trait. It was further observed that increasing or generating the activity of a gene product with said activity of a “mitochondrial succinate-fumarate transporter” and being encoded by a gene comprising the nucleic acid sequence SEQ ID NO.: 2628 in A. thaliana conferred an tolerance to abiotic environmental stress, e.g. increase low temperature tolerance compared with the wild type control. In particular, it was observed that increasing or generating the activity of a gene product being encoded by a gene comprising the nucleic acid sequence SEQ ID NO.: 2628 localized as indicated in table I, column 6, e.g. cytoplasmic in A. thaliana, for example with the activity of a “mitochondrial succinate-fumarate transporter”, conferred a low temperature tolerance.

[0410] In particular, it was observed that in A. thaliana, said increasing or generating of the activity of a gene product being encoded by a gene comprising the nucleic acid molecule as shown in SEQ ID NO.: 2711, for example with the activity of a “protein kinase”, conferred an increased yield, e.g. an increased yield-related trait. It was further observed that increasing or generating the activity of a gene product with said activity of a “protein kinase” and being encoded by a gene comprising the nucleic acid sequence SEQ ID NO.: 2711 in A. thaliana conferred an tolerance to abiotic environmental stress, e.g. increase low temperature tolerance compared with the wild type control. In particular, it was observed that increasing or generating the activity of a gene product being encoded by a gene comprising the nucleic acid sequence SEQ ID NO.: 2711 localized as indicated in table I, column 6, e.g. cytoplasmic in A. thaliana, for example with the activity of a “protein kinase”, conferred a low temperature tolerance.

[0411] In particular, it was observed that in A. thaliana, said increasing or generating of the activity of a gene product being encoded by a gene comprising the nucleic acid molecule as shown in SEQ ID NO.: 2738, for example with the activity of a “Myo-inositol transporter”, conferred an increased yield, e.g. an increased yield-related trait. It was further observed that increasing or generating the activity of a gene product with said activity of a “Myo-inositol transporter” and being encoded by a gene comprising the nucleic acid sequence SEQ ID NO.: 2738 in A. thaliana conferred an tolerance to abiotic environmental stress, e.g. increase low temperature tolerance compared with the wild type control. In particular, it was observed that increasing or generating the activity of a gene product being encoded by a gene comprising the nucleic acid sequence SEQ ID NO.: 2738 localized as indicated in table I, column 6, e.g. plastidic in A. thaliana, for example with the activity of a “Myo-inositol transporter”, conferred a low temperature tolerance.

[0412] In particular, it was observed that in A. thaliana, said increasing or generating of the activity of a gene product being encoded by a gene comprising the nucleic acid molecule as shown in SEQ ID NO.: 2818, for example with the activity of a “Ribose-5-phosphate isomerase”, conferred an increased yield, e.g. an increased yield-related trait. It was further observed that increasing or generating the activity of a gene product with said activity of a “Ribose-5-phosphate isomerase” and being encoded by a gene comprising the nucleic acid sequence SEQ ID NO.: 2818 in A. thaliana conferred an tolerance to abiotic environmental stress, e.g. increase low temperature tolerance compared with the wild type control. In particular, it was observed that increasing or generating the activity of a gene product being encoded by a gene comprising the nucleic acid sequence SEQ ID NO.: 2818 localized as indicated in table I, column 6, e.g. cytoplasmic in A. thaliana, for example with the activity of a “Ribose-5-phosphate isomerase”, conferred a low temperature tolerance.

[0413] In particular, it was observed that in A. thaliana, said increasing or generating of the activity of a gene product being encoded by a gene comprising the nucleic acid molecule as shown in SEQ ID NO.: 3361, for example with the activity of a “YPL109C-protein”, conferred an increased yield, e.g. an increased yield-related trait. It was further observed that increasing or generating the activity of a gene product with said activity of a “YPL109C-protein” and being encoded by a gene comprising the nucleic acid sequence SEQ ID NO.: 3361 in A. thaliana conferred an tolerance to abiotic environmental stress, e.g. increase low temperature tolerance compared with the wild type control. In particular, it was observed that increasing or generating the activity of a gene product being encoded by a gene comprising the nucleic acid sequence SEQ ID NO.: 3361 localized as indicated in table I, column 6, e.g. plastidic in A. thaliana, for example with the activity of a “YPL109C-protein”, conferred a low temperature tolerance.

[0414] In particular, it was observed that in A. thaliana, said increasing or generating of the activity of a gene product being encoded by a gene comprising the nucleic acid molecule as shown in SEQ ID NO.: 3437, for example with the activity of a “cysteine synthase”, conferred an increased yield, e.g. an increased yield-related trait. It was further observed that increasing or generating the activity of a gene product with said activity of a “cysteine synthase” and being encoded by a gene comprising the nucleic acid sequence SEQ ID NO.: 3437 in A. thaliana conferred an tolerance to abiotic environmental stress, e.g. increase low temperature tolerance compared with the wild type control. In particular, it was observed that increasing or generating the activity of a gene product being encoded by a gene comprising the nucleic acid sequence SEQ ID NO.: 3437 localized as indicated in table I, column 6, e.g. plastidic in A. thaliana, for example with the activity of a “cysteine synthase”, conferred a low temperature tolerance.

[0415] In particular, it was observed that in A. thaliana, said increasing or generating of the activity of a gene product being encoded by a gene comprising the nucleic acid molecule as shown in SEQ ID NO.: 4403, for example with the activity of a “peptidy-prolyl-cis-trans-isomerase”, conferred an increased yield, e.g. an increased yield-related trait. It was further observed that increasing or generating the activity of a gene product with said activity of a “peptidy-prolyl-cis-trans-isomerase” and being encoded by a gene comprising the nucleic acid sequence SEQ ID NO.: 4403 in A. thaliana conferred an tolerance to abiotic environmental stress, e.g. increase low temperature tolerance compared with the wild type control. In particular, it was observed that increasing or generating the activity of a gene product being encoded by a gene comprising the nucleic acid sequence SEQ ID NO.: 4403 localized as indicated in table I, column 6, e.g. cytoplasmic in A. thaliana, for example with the activity of a “peptidy-prolyl-cis-trans-isomerase”, conferred a low temperature tolerance.

[0416] In particular, it was observed that in A. thaliana, said increasing or generating of the activity of a gene product being encoded by a gene comprising the nucleic acid molecule as shown in SEQ ID NO.: 4473, for example with the activity of a “geranylgeranyl reductase”, conferred an increased yield, e.g. an increased yield-related trait. It was further observed that increasing or generating the activity of a gene product with said activity of a “geranylgeranyl reductase” and being encoded by a gene comprising the nucleic acid sequence SEQ ID NO.: 4473 in A. thaliana conferred an tolerance to abiotic environmental stress, e.g. increase low temperature tolerance compared with the wild type control. In particular, it was observed that increasing or generating the activity of a gene product being encoded by a gene comprising the nucleic acid sequence SEQ ID NO.: 4473 localized as indicated in table I, column 6, e.g. plastidic in A. thaliana, for example with the activity of a “geranylgeranyl reductase”, conferred a low temperature tolerance.

[0417] In particular, it was observed that in A. thaliana, said increasing or generating of the activity of a gene product being encoded by a gene comprising the nucleic acid molecule as shown in SEQ ID NO.: 4639, for example with the activity of a “slr1293-protein”, conferred an increased yield, e.g. an increased yield-related trait. It was further observed that increasing or generating the activity of a gene product with said activity of a “slr1293-protein” and being encoded by a gene comprising the nucleic acid sequence SEQ ID NO.: 4639 in A. thaliana conferred an tolerance to abiotic environmental stress, e.g. increase low temperature tolerance compared with the wild type control. In particular, it was observed that increasing or generating the activity of a gene product being encoded by a gene comprising the nucleic acid sequence SEQ ID NO.: 4639 localized as indicated in table I, column 6, e.g. plastidic in A. thaliana, for example with the activity of a “slr1293-protein”, conferred a low temperature tolerance.

[0418] In particular, it was observed that in A. thaliana, said increasing or generating of the activity of a gene product being encoded by a gene comprising the nucleic acid molecule as shown in SEQ ID NO.: 4743, for example with the activity of a “YDR049W-protein”, conferred an increased yield, e.g. an increased yield-related trait. It was further observed that increasing or generating the activity of a gene product with said activity of a “YDR049W-protein” and being encoded by a gene comprising the nucleic acid sequence SEQ ID NO.: 4743 in A. thaliana conferred an tolerance to abiotic environmental stress, e.g. increase low temperature tolerance compared with the wild type control. In particular, it was observed that increasing or generating the activity of a gene product being encoded by a gene comprising the nucleic acid sequence SEQ ID NO.: 4743 localized as indicated in table I, column 6, e.g. cytoplasmic in A. thaliana, for example with the activity of a “YDR049W-protein”, conferred a low temperature tolerance.

[0419] In particular, it was observed that in A. thaliana, said increasing or generating of the activity of a gene product being encoded by a gene comprising the nucleic acid molecule as shown in SEQ ID NO.: 63, for example with the activity of a “oxidoreductase subunit”, conferred an increased yield, e.g. an increased yield-related trait. It was further observed that increasing or generating the activity of a gene product with said activity of a “oxidoreductase subunit” and being encoded by a gene comprising the nucleic acid sequence SEQ ID NO.: 63 in A. thaliana conferred an tolerance to abiotic environmental stress, e.g. increase low temperature tolerance compared with the wild type control. In particular, it was observed that increasing or generating the activity of a gene product being encoded by a gene comprising the nucleic acid sequence SEQ ID NO.: 63 localized as indicated in table I, column 6, e.g. cytoplasmic in A. thaliana, for example with the activity of a “oxidoreductase subunit”, conferred a low temperature tolerance.

[0420] In particular, it was observed that in A. thaliana, said increasing or generating of the activity of a gene product being encoded by a gene comprising the nucleic acid molecule as shown in SEQ ID NO.: 80, for example with the activity of a “cysteine synthase”, conferred an increased yield, e.g. an increased yield-related trait. It was further observed that increasing or generating the activity of a gene product with said activity of a “cysteine synthase” and being encoded by a gene comprising the nucleic acid sequence SEQ ID NO.: 80 in A. thaliana conferred an tolerance to abiotic environmental stress, e.g. increase low temperature tolerance compared with the wild type control. In particular, it was observed that increasing or generating the activity of a gene product being encoded by a gene comprising the nucleic acid sequence SEQ ID NO.: 80 localized as indicated in table I, column 6, e.g. plastidic in A. thaliana, for example with the activity of a “cysteine synthase”, conferred a low temperature tolerance.

[0421] In particular, it was observed that in A. thaliana, said increasing or generating of the activity of a gene product being encoded by a gene comprising the nucleic acid molecule as shown in SEQ ID NO.: 1076, for example with the activity of a “B2758-protein”, conferred an increased yield, e.g. an increased yield-related trait. It was further observed that increasing or generating the activity of a gene product with said activity of a “B2758-protein” and being encoded by a gene comprising the nucleic acid sequence SEQ ID NO.: 1076 in A. thaliana conferred an tolerance to abiotic environmental stress, e.g. increase low temperature tolerance compared with the wild type control. In particular, it was observed that increasing or generating the activity of a gene product being encoded by a gene comprising the nucleic acid sequence SEQ ID NO.: 1076 localized as indicated in table I, column 6, e.g. cytoplasmic in A. thaliana, for example with the activity of a “B2758-protein”, conferred a low temperature tolerance.

[0422] In particular, it was observed that in A. thaliana, said increasing or generating of the activity of a gene product being encoded by a gene comprising the nucleic acid molecule as shown in SEQ ID NO.: 1105, for example with the activity of a “modification methylase HemK family protein”, conferred an increased yield, e.g. an increased yield-related trait. It was further observed that increasing or generating the activity of a gene product with said activity of a “modification methylase HemK family protein” and being encoded by a gene comprising the nucleic acid sequence SEQ ID NO.: 1105 in A. thaliana conferred an tolerance to abiotic environmental stress, e.g. increase low temperature tolerance compared with the wild type control. In particular, it was observed that increasing or generating the activity of a gene product being encoded by a gene comprising the nucleic acid sequence SEQ ID NO.: 1105 localized as indicated in table I, column 6, e.g. cytoplasmic in A. thaliana, for example with the activity of a “modification methylase HemK family protein”, conferred a low temperature tolerance.

[0423] In particular, it was observed that in A. thaliana, said increasing or generating of the activity of a gene product being encoded by a gene comprising the nucleic acid molecule as shown in SEQ ID NO.: 1206, for example with the activity of a “YDR049W-protein”, conferred an increased yield, e.g. an increased yield-related trait. It was further observed that increasing or generating the activity of a gene product with said activity of a “YDR049W-protein” and being encoded by a gene comprising the nucleic acid sequence SEQ ID NO.: 1206 in A. thaliana conferred an tolerance to abiotic environmental stress, e.g. increase low temperature tolerance compared with the wild type control. In particular, it was observed that increasing or generating the activity of a gene product being encoded by a gene comprising the nucleic acid sequence SEQ ID NO.: 1206 localized as indicated in table I, column 6, e.g. cytoplasmic in A. thaliana, for example with the activity of a “YDR049W-protein”, conferred a low temperature tolerance.

[0424] In particular, it was observed that in A. thaliana, said increasing or generating of the activity of a gene product being encoded by a gene comprising the nucleic acid molecule as shown in SEQ ID NO.: 1245, for example with the activity of a “3-phosphoglycerate dehydrogenase”, conferred an increased yield, e.g. an increased yield-related trait. It was further observed that increasing or generating the activity of a gene product with said activity of a “3-phosphoglycerate dehydrogenase” and being encoded by a gene comprising the nucleic acid sequence SEQ ID NO.: 1245 in A. thaliana conferred an tolerance to abiotic environmental stress, e.g. increase low temperature tolerance compared with the wild type control. In particular, it was observed that increasing or generating the activity of a gene product being encoded by a gene comprising the nucleic acid sequence SEQ ID NO.: 1245 localized as indicated in table I, column 6, e.g. Plastidic in A. thaliana, for example with the activity of a “3-phosphoglycerate dehydrogenase”, conferred a low temperature tolerance.

[0425] It was further observed that increasing or generating the activity of a YRP gene shown in Table VIIIa, e.g. a nucleic acid molecule derived from the nucleic acid molecule shown in Table VIIIa in A. thaliana conferred increased nutrient use efficiency, e.g. an increased the nitrogen use efficiency, compared with the wild type control. Thus, in one embodiment, a nucleic acid molecule indicated in Table VIIIa or its homolog as indicated in Table I or the expression product is used in the method of the present invention to increased nutrient use efficiency, e.g. to increased the nitrogen use efficiency, of the a plant compared with the wild type control. It was further observed that increasing or generating the activity of a YRP gene shown in Table VIIIb, e.g. a nucleic acid molecule derived from the nucleic acid molecule shown in Table VIIIb in A. thaliana conferred increased stress tolerance, e.g. increased low temperature tolerance, compared with the wild type control. Thus, in one embodiment, a nucleic acid molecule indicated in Table VIIIb or its homolog as indicated in Table I or the expression product is used in the method of the present invention to increase stress tolerance, e.g. increase low temperature, of a plant compared with the wild type control.

[0426] It was further observed that increasing or generating the activity of a YRP gene shown in Table VIIIc, e.g. a nucleic acid molecule derived from the nucleic acid molecule shown in Table VIIIc in A. thaliana conferred increased stress tolerance, e.g. increased cycling drought tolerance, compared with the wild type control. Thus, in one embodiment, a nucleic acid molecule indicated in Table VIIIc or its homolog as indicated in Table I or the expression product is used in the method of the present invention to increase stress tolerance, e.g. increase cycling drought tolerance, of a plant compared with the wild type control.

[0427] It was further observed that increasing or generating the activity of a YRP gene shown in Table VIIId, e.g. a nucleic acid molecule derived from the nucleic acid molecule shown in Table VIIId in A. thaliana conferred increase in intrinsic yield, e.g. increased biomass under standard conditions, e.g. increased biomass under non-deficiency or non-stress conditions, compared with the wild type control. Thus, in one embodiment, a nucleic acid molecule indicated in Table VIIId or its homolog as indicated in Table I or the expression product is used in the method of the present invention to increase intrinsic yield, e.g. to increase yield under standard conditions, e.g. increase biomass under non-deficiency or non-stress conditions, of a plant compared with the wild type control.

[0428] The term “expression” refers to the transcription and/or translation of a codogenic gene segment or gene. As a rule, the resulting product is an mRNA or a protein. However, expression products can also include functional RNAs such as, for example, antisense, nucleic acids, tRNAs, snRNAs, rRNAs, RNAi, siRNA, ribozymes etc. Expression may be systemic, local or temporal, for example limited to certain cell types, tissues organs or organelles or time periods.

[0429] In one embodiment, the process of the present invention comprises one or more of the following steps: (a) stabilizing a protein conferring the increased expression of a YRP, e.g. a protein encoded by the nucleic acid molecule of the invention or of the polypeptide of the invention having the herein-mentioned activity selected from the group consisting of 3-phosphoglycerate dehydrogenase, Adenylate kinase, B2758-protein, Cyclic nucleotide phosphodiesterase, cysteine synthase, Exopolyphosphatase, geranylgeranyl reductase, Mating hormone A-factor precursor, mitochondrial succinate-fumarate transporter, modification methyllase HemK family protein, Myo-inositol transporter, oxidoreductase subunit, peptidy-prolyl-cis-trans-isomerase, protein kinase, Ribose-5-phosphate isomerase, slr1293-protein, YDR049W-protein, YJL181W-protein, and YPL109C-protein and conferring increased yield, e.g. with an increased yield-related trait, for example enhanced tolerance to abiotic environmental stress, for example an increased drought tolerance and/or low temperature tolerance and/or an increased nutrient use efficiency, intrinsic yield and/or another mentioned yield-related trait as compared to a corresponding, e.g. non-transformed, wild type plant cell, plant or part thereof; (b) stabilizing an mRNA conferring the increased expression of a YRP, e.g. a protein encoded by the nucleic acid molecule of the invention or its homologs or of a mRNA encoding the polypeptide of the present invention having the herein-mentioned activity selected from the group consisting of said activities mentioned in (a) and conferring increased yield, e.g. with an increased yield-related trait, for example enhanced tolerance to abiotic environmental stress, for example an increased drought tolerance and/or low temperature tolerance and/or an increased nutrient use efficiency, intrinsic yield and/or another mentioned yield-related trait as compared to a corresponding, e.g. non-transformed, wild type plant cell, plant or part thereof; (c) increasing the specific activity of a protein conferring the increased expression of a YRP, e.g. a protein encoded by the nucleic acid molecule of the invention or of the polypeptide of the present invention or decreasing the inhibitory regulation of the polypeptide of the invention; (d) generating or increasing the expression of an endogenous or artificial transcription factor mediating the expression of a protein conferring the increased expression of a YRP, e.g. a protein encoded by the nucleic acid molecule of the invention or of the polypeptide of the invention having the herein-mentioned activity selected from the group consisting of said activities mentioned in (a) and conferring increased yield, e.g. an increased yield-related trait, for example enhanced tolerance to abiotic environmental stress, for example an increased drought tolerance and/or low temperature tolerance and/or an increased nutrient use efficiency, intrinsic yield and/or another mentioned yield-related trait as compared to a corresponding, e.g. non-transformed, wild type plant cell, plant or part thereof; (e) stimulating activity of a protein conferring the increased expression of a YRP, e.g. a protein encoded by the nucleic acid molecule of the present invention or a polypeptide of the present invention having the herein-mentioned activity selected from the group consisting of said activities mentioned in (a) and conferring increased yield, e.g. an increased yield-related trait, for example enhanced tolerance to abiotic environmental stress, for example an increased drought tolerance and/or low temperature tolerance and/or an increased nutrient use efficiency, intrinsic yield and/or another mentioned yield-related trait as compared to a corresponding, e.g. non-transformed, wild type plant cell, plant or part thereof by adding one or more exogenous inducing factors to the organism or parts thereof; (f) expressing a transgenic gene encoding a protein conferring the increased expression of a YRP, e.g. a polypeptide encoded by the nucleic acid molecule of the present invention or a polypeptide of the present invention, having the herein-mentioned activity selected from the group consisting of said activities mentioned in (a) and conferring increased yield, e.g. an increased yield-related trait, for example enhanced tolerance to abiotic environmental stress, for example an increased drought tolerance and/or low temperature tolerance and/or an increased nutrient use efficiency, intrinsic yield and/or another mentioned yield-related trait as compared to a corresponding, e.g. non-transformed, wild type plant cell, plant or part thereof; and/or (g) increasing the copy number of a gene conferring the increased expression of a nucleic acid molecule encoding a YRP, e.g. a polypeptide encoded by the nucleic acid molecule of the invention or the polypeptide of the invention having the herein-mentioned activity selected from the group consisting of said activities mentioned in (a) and conferring increased yield, e.g. an increased yield-related trait, for example enhanced tolerance to abiotic environmental stress, for example an increased drought tolerance and/or low temperature tolerance and/or an increased nutrient use efficiency, intrinsic yield and/or another mentioned yield-related trait as compared to a corresponding, e.g. non-transformed, wild type plant cell, plant or part thereof; (h) increasing the expression of the endogenous gene encoding the YRP, e.g. a polypeptide of the invention or its homologs by adding positive expression or removing negative expression elements, e.g. homologous recombination can be used to either introduce positive regulatory elements like for plants the 35S enhancer into the promoter or to remove repressor elements form regulatory regions. Further gene conversion methods can be used to disrupt repressor elements or to enhance to activity of positive elements-positive elements can be randomly introduced in plants by T-DNA or transposon mutagenesis and lines can be identified in which the positive elements have been integrated near to a gene of the invention, the expression of which is thereby enhanced; and/or (i) modulating growth conditions of the plant in such a manner, that the expression or activity of the gene encoding the YRP, e.g. a protein of the invention or the protein itself is enhanced; (j) selecting of organisms with especially high activity of the proteins of the invention from natural or from mutagenized resources and breeding them into the target organisms, e.g. the elite crops.

[0430] Preferably, said mRNA is encoded by the nucleic acid molecule of the present invention and/or the protein conferring the increased expression of a protein encoded by the nucleic acid molecule of the present invention alone or linked to a transit nucleic acid sequence or transit peptide encoding nucleic acid sequence or the polypeptide having the herein mentioned activity, e.g. conferring with increased yield, e.g. with an increased yield-related trait, for example enhanced tolerance to abiotic environmental stress, for example an increased drought tolerance and/or low temperature tolerance and/or an increased nutrient use efficiency, intrinsic yield and/or another mentioned yield-related trait as compared to a corresponding, e.g. non-transformed, wild type plant cell, plant or part thereof after increasing the expression or activity of the encoded polypeptide or having the activity of a polypeptide having an activity as the protein as shown in table II column 3 or its homologs.

[0431] In general, the amount of mRNA or polypeptide in a cell or a compartment of an organism correlates with the amount of encoded protein and thus with the overall activity of the encoded protein in said volume. Said correlation is not always linear, the activity in the volume is dependent on the stability of the molecules or the presence of activating or inhibiting cofactors. Further, product and educt inhibitions of enzymes are well known and described in textbooks, e.g. Stryer, Biochemistry.

[0432] In general, the amount of mRNA, polynucleotide or nucleic acid molecule in a cell or a compartment of an organism correlates with the amount of encoded protein and thus with the overall activity of the encoded protein in said volume. Said correlation is not always linear, the activity in the volume is dependent on the stability of the molecules, the degradation of the molecules or the presence of activating or inhibiting co-factors. Further, product and educt inhibitions of enzymes are well known, e.g. Zinser et al. “Enzyminhibitoren”/Enzyme inhibitors”.

[0433] The activity of the abovementioned proteins and/or polypeptides encoded by the nucleic acid molecule of the present invention can be increased in various ways. For example, the activity in an organism or in a part thereof, like a cell, is increased via increasing the gene product number, e.g. by increasing the expression rate, like introducing a stronger promoter, or by increasing the stability of the mRNA expressed, thus increasing the translation rate, and/or increasing the stability of the gene product, thus reducing the proteins decayed. Further, the activity or turnover of enzymes can be influenced in such a way that a reduction or increase of the reaction rate or a modification (reduction or increase) of the affinity to the substrate results, is reached. A mutation in the catalytic centre of an polypeptide of the invention, e.g. as enzyme, can modulate the turn over rate of the enzyme, e.g. a knock out of an essential amino acid can lead to a reduced or completely knock out activity of the enzyme, or the deletion or mutation of regulator binding sites can reduce a negative regulation like a feedback inhibition (or a substrate inhibition, if the substrate level is also increased). The specific activity of an enzyme of the present invention can be increased such that the turn over rate is increased or the binding of a cofactor is improved. Improving the stability of the encoding mRNA or the protein can also increase the activity of a gene product. The stimulation of the activity is also under the scope of the term “increased activity”.

[0434] Moreover, the regulation of the abovementioned nucleic acid sequences may be modified so that gene expression is increased. This can be achieved advantageously by means of heterologous regulatory sequences or by modifying, for example mutating, the natural regulatory sequences which are present. The advantageous methods may also be combined with each other.

[0435] In general, an activity of a gene product in an organism or part thereof, in particular in a plant cell or organelle of a plant cell, a plant, or a plant tissue or a part thereof or in a microorganism can be increased by increasing the amount of the specific encoding mRNA or the corresponding protein in said organism or part thereof. “Amount of protein or mRNA” is understood as meaning the molecule number of polypeptides or mRNA molecules in an organism, especially a plant, a tissue, a cell or a cell compartment. “Increase” in the amount of a protein means the quantitative increase of the molecule number of said protein in an organism, especially a plant, a tissue, a cell or a cell compartment such as an organelle like a plastid or mitochondria or part thereof—for example by one of the methods described herein below—in comparison to a wild type, control or reference.

[0436] The increase in molecule number amounts preferably to at least 1%, preferably to more than 10%, more preferably to 30% or more, especially preferably to 50%, 70% or more, very especially preferably to 100%, most preferably to 500% or more. However, a de novo expression is also regarded as subject of the present invention.

[0437] A modification, i.e. an increase, can be caused by endogenous or exogenous factors. For example, an increase in activity in an organism or a part thereof can be caused by adding a gene product or a precursor or an activator or an agonist to the media or nutrition or can be caused by introducing said subjects into a organism, transient or stable. Furthermore such an increase can be reached by the introduction of the inventive nucleic acid sequence or the encoded protein in the correct cell compartment for example into the nucleus or cytoplasm respectively or into plastids either by transformation and/or targeting.

[0438] For the purposes of the description of the present invention, the term “cytoplasmic” shall indicate, that the nucleic acid of the invention is expressed without the addition of an non-natural transit peptide encoding sequence. A non-natural transient peptide encoding sequence is a sequence which is not a natural part of a nucleic acid of the invention but is rather added by molecular manipulation steps as for example described in the example under “plastid targeted expression”. Therefore the term “cytoplasmic” shall not exclude a targeted localisation to any cell compartment for the products of the inventive nucleic acid sequences by their naturally occurring sequence properties.

[0439] In one embodiment the increased yield, e.g. increased yield-related trait, for example enhanced tolerance to abiotic environmental stress, for example an increased drought tolerance and/or low temperature tolerance and/or an increased nutrient use efficiency, intrinsic yield and/or another mentioned yield-related trait as compared to a corresponding, e.g. non-transformed, wild type plant cell in the plant or a part thereof, e.g. in a cell, a tissue, a organ, an organelle, the cytoplasm etc., is achieved by increasing the endogenous level of the polypeptide of the invention. Accordingly, in an embodiment of the present invention, the present invention relates to a process wherein the gene copy number of a gene encoding the polynucleotide or nucleic acid molecule of the invention is increased. Further, the endogenous level of the polypeptide of the invention can for example be increased by modifying the transcriptional or translational regulation of the polypeptide.

[0440] In one embodiment the increased yield, e.g. increased yield-related trait, for example enhanced tolerance to abiotic environmental stress, for example an increased drought tolerance and/or low temperature tolerance and/or an increased nutrient use efficiency, intrinsic yield and/or another mentioned yield-related trait of the plant or part thereof can be altered by targeted or random mutagenesis of the endogenous genes of the invention. For example homologous recombination can be used to either introduce positive regulatory elements like for plants the 35S enhancer into the promoter or to remove repressor elements form regulatory regions. In addition gene conversion like methods described by Kochevenko and Willmitzer (Plant Physiol. 132 (1), 174 (2003)) and citations therein can be used to disrupt repressor elements or to enhance to activity of positive regulatory elements.

[0441] Furthermore positive elements can be randomly introduced in (plant) genomes by T-DNA or transposon mutagenesis and lines can be screened for, in which the positive elements have been integrated near to a gene of the invention, the expression of which is thereby enhanced. The activation of plant genes by random integrations of enhancer elements has been described by Hayashi et al. (Science 258, 1350 (1992)) or Weigel et al. (Plant Physiol. 122, 1003 (2000)) and others recited therein.

[0442] Reverse genetic strategies to identify insertions (which eventually carrying the activation elements) near in genes of interest have been described for various cases e.g. Krysan et al. (Plant Cell 11, 2283 (1999)); Sessions et al. (Plant Cell 14, 2985 (2002)); Young et al. (Plant Physiol. 125, 513 (2001)); Koprek et al. (Plant J. 24, 253 (2000)); Jeon et al. (Plant J. 22, 561 (2000)); Tissier et al. (Plant Cell 11, 1841 (1999)); Speulmann et al. (Plant Cell 11, 1853 (1999)). Briefly material from all plants of a large T-DNA or transposon mutagenized plant population is harvested and genomic DNA prepared. Then the genomic DNA is pooled following specific architectures as described for example in Krysan et al. (Plant Cell 11, 2283 (1999)). Pools of genomics DNAs are then screened by specific multiplex PCR reactions detecting the combination of the insertional mutagen (e.g. T-DNA or Transposon) and the gene of interest. Therefore PCR reactions are run on the DNA pools with specific combinations of T-DNA or transposon border primers and gene specific primers. General rules for primer design can again be taken from Krysan et al. (Plant Cell 11, 2283 (1999)). Rescreening of lower levels DNA pools lead to the identification of individual plants in which the gene of interest is activated by the insertional mutagen.

[0443] The enhancement of positive regulatory elements or the disruption or weakening of negative regulatory elements can also be achieved through common mutagenesis techniques: The production of chemically or radiation mutated populations is a common technique and known to the skilled worker. Methods for plants are described by Koorneef et al. (Mutat Res. Mar. 93 (1) (1982)) and the citations therein and by Lightner and Caspar in “Methods in Molecular Biology” Vol. 82. These techniques usually induce point mutations that can be identified in any known gene using methods such as TILLING (Colbert et al., Plant Physiol, 126, (2001)).

[0444] Accordingly, the expression level can be increased if the endogenous genes encoding a polypeptide conferring an increased expression of the polypeptide of the present invention, in particular genes comprising the nucleic acid molecule of the present invention, are modified via homologous recombination, Tilling approaches or gene conversion. It also possible to add as mentioned herein targeting sequences to the inventive nucleic acid sequences.

[0445] Regulatory sequences, if desired, in addition to a target sequence or part thereof can be operatively linked to the coding region of an endogenous protein and control its transcription and translation or the stability or decay of the encoding mRNA or the expressed protein. In order to modify and control the expression, promoter, UTRs, splicing sites, processing signals, polyadenylation sites, terminators, enhancers, repressors, post transcriptional or post-translational modification sites can be changed, added or amended. For example, the activation of plant genes by random integrations of enhancer elements has been described by Hayashi et al. (Science 258, 1350 (1992)) or Weigel et al. (Plant Physiol. 122, 1003 (2000)) and others recited therein. For example, the expression level of the endogenous protein can be modulated by replacing the endogenous promoter with a stronger transgenic promoter or by replacing the endogenous 3′UTR with a 3′UTR, which provides more stability without amending the coding region. Further, the transcriptional regulation can be modulated by introduction of an artificial transcription factor as described in the examples. Alternative promoters, terminators and UTR are described below.

[0446] The activation of an endogenous polypeptide having above-mentioned activity, e.g. having the activity of a protein as shown in table II, column 3 or of the polypeptide of the invention, e.g. conferring increased yield, e.g. increased yield-related trait, for example enhanced tolerance to abiotic environmental stress, for example an increased drought tolerance and/or low temperature tolerance and/or an increased nutrient use efficiency, intrinsic yield and/or another mentioned yield-related trait as compared to a corresponding, e.g. non-transformed, wild type plant cell, plant or part thereof after increase of expression or activity in the cytoplasm and/or in an organelle like a plastid, can also be increased by introducing a synthetic transcription factor, which binds close to the coding region of the gene encoding the protein as shown in table II, column 3 and activates its transcription. A chimeric zinc finger protein can be constructed, which comprises a specific DNA-binding domain and an activation domain as e.g. the VP16 domain of Herpes Simplex virus. The specific binding domain can bind to the regulatory region of the gene encoding the protein as shown in table II, column 3. The expression of the chimeric transcription factor in a organism, in particular in a plant, leads to a specific expression of the protein as shown in table II, column 3. The methods thereto are known to a skilled person and/or disclosed e.g. in WO01/52620, Oriz, Proc. Natl. Acad. Sci. USA, 99, 13290 (2002) or Guan, Proc. Natl. Acad. Sci. USA 99, 13296 (2002).

[0447] In one further embodiment of the process according to the invention, organisms are used in which one of the abovementioned genes, or one of the abovementioned nucleic acids, is mutated in a way that the activity of the encoded gene products is less influenced by cellular factors, or not at all, in comparison with the not mutated proteins. For example, well known regulation mechanism of enzyme activity are substrate inhibition or feed back regulation mechanisms. Ways and techniques for the introduction of substitution, deletions and additions of one or more bases, nucleotides or amino acids of a corresponding sequence are described herein below in the corresponding paragraphs and the references listed there, e.g. in Sambrook et al., Molecular Cloning, Cold Spring Harbour, NY, 1989. The person skilled in the art will be able to identify regulation domains and binding sites of regulators by comparing the sequence of the nucleic acid molecule of the present invention or the expression product thereof with the state of the art by computer software means which comprise algorithms for the identifying of binding sites and regulation domains or by introducing into a nucleic acid molecule or in a protein systematically mutations and assaying for those mutations which will lead to an increased specific activity or an increased activity per volume, in particular per cell.

[0448] It can therefore be advantageous to express in an organism a nucleic acid molecule of the invention or a polypeptide of the invention derived from a evolutionary distantly related organism, as e.g. using a prokaryotic gene in a eukaryotic host, as in these cases the regulation mechanism of the host cell may not weaken the activity (cellular or specific) of the gene or its expression product.

[0449] The mutation is introduced in such a way that increased yield, e.g. increased yield-related trait, for example enhanced tolerance to abiotic environmental stress, for example an increased drought tolerance and/or low temperature tolerance and/or an increased nutrient use efficiency, intrinsic yield and/or another mentioned yield-related trait are not adversely affected.

[0450] Less influence on the regulation of a gene or its gene product is understood as meaning a reduced regulation of the enzymatic activity leading to an increased specific or cellular activity of the gene or its product. An increase of the enzymatic activity is understood as meaning an enzymatic activity, which is increased by at least 10%, advantageously at least 20, or 40%, especially advantageously by at least 50, 60 or 70% in comparison with the starting organism. This leads to increased yield, e.g. an increased yield-related trait, for example enhanced tolerance to abiotic environmental stress, for example an increased drought tolerance and/or low temperature tolerance and/or an increased nutrient use efficiency, intrinsic yield and/or another mentioned yield-related trait as compared to a corresponding, e.g. non-transformed, wild type plant cell, plant or part thereof.

[0451] The invention provides that the above methods can be performed such that yield, e.g. a yield-related trait, for example enhanced tolerance to abiotic environmental stress, for example drought tolerance and/or low temperature tolerance and/or nutrient use efficiency, intrinsic yield and/or another mentioned yield-related traits increased, wherein particularly the tolerance to low temperature is increased. In a further embodiment the invention provides that the above methods can be performed such that the tolerance to abiotic stress, particularly the tolerance to low temperature and/or water use efficiency, and at the same time, the nutrient use efficiency, particularly the nitrogen use efficiency is increased. In another embodiment the invention provides that the above methods can be performed such that the yield is increased in the absence of nutrient deficiencies as well as the absence of stress conditions. In a further embodiment the invention provides that the above methods can be performed such that the nutrient use efficiency, particularly the nitrogen use efficiency, and the yield, in the absence of nutrient deficiencies as well as the absence of stress conditions, is increased. In a preferred embodiment the invention provides that the above methods can be performed such that the tolerance to abiotic stress, particularly the tolerance to low temperature and/or water use efficiency, and at the same time, the nutrient use efficiency, particularly the nitrogen use efficiency, and the intrinsic yield is increased. In one embodiment, the yield is in the absence of nutrient deficiencies as well as the absence of stress conditions, increased.

[0452] The invention is not limited to specific nucleic acids, specific polypeptides, specific cell types, specific host cells, specific conditions or specific methods etc. as such, but may vary and numerous modifications and variations therein will be apparent to those skilled in the art. It is also to be understood that the terminology used herein is for the purpose of describing specific embodiments only and is not intended to be limiting.

[0453] The present invention also relates to isolated nucleic acids comprising a nucleic acid molecule selected from the group consisting of: (a) a nucleic acid molecule encoding the polypeptide shown in column 7 of table II B, application no. 1; (b) a nucleic acid molecule shown in column 7 of table I B, application no. 1; (c) a nucleic acid molecule, which, as a result of the degeneracy of the genetic code, can be derived from a polypeptide sequence depicted in column 5 or 7 of table II, application no. 1, and confers increased yield, e.g. increased yield-related trait, for example enhanced tolerance to abiotic environmental stress, for example an increased drought tolerance and/or low temperature tolerance and/or an increased nutrient use efficiency, intrinsic yield and/or another mentioned yield-related trait as compared to a corresponding, e.g. non-transformed, wild type plant cell, a plant or a part thereof; (d) a nucleic acid molecule having at least 30% identity, preferably at least 40%, 50%, 60%, 70%, 75%, 80%, 85%, 90%, 95%, 96%, 97%, 98%, 99%, 99.5%, with the nucleic acid molecule sequence of a polynucleotide comprising the nucleic acid molecule shown in column 5 or 7 of table I, application no. 1, and confers increased yield, e.g. increased yield-related trait, for example enhanced tolerance to abiotic environmental stress, for example an increased drought tolerance and/or low temperature tolerance and/or an increased nutrient use efficiency, intrinsic yield and/or another mentioned yield-related trait as compared to a corresponding, e.g. non-transformed, wild type plant cell, a plant or a part thereof; (e) a nucleic acid molecule encoding a polypeptide having at least 30% identity, preferably at least 40%, 50%, 60%, 70%, 75%, 80%, 85%, 90%, 95%, 96%, 97%, 98%, 99%, 99.5%, with the amino acid sequence of the polypeptide encoded by the nucleic acid molecule of (a), (b), (c) or (d) and having the activity represented by a nucleic acid molecule comprising a polynucleotide as depicted in column 5 of table I, application no. 1, and confers increased yield, e.g. increased yield-related trait, for example enhanced tolerance to abiotic environmental stress, for example an increased drought tolerance and/or low temperature tolerance and/or an increased nutrient use efficiency, intrinsic yield and/or another mentioned yield-related trait as compared to a corresponding, e.g. non-transformed, wild type plant cell, a plant or a part thereof; (f) nucleic acid molecule which hybridizes with a nucleic acid molecule of (a), (b), (c), (d) or (e) under stringent hybridization conditions and confers increased yield, e.g. an increased yield-related trait, for example enhanced tolerance to abiotic environmental stress, for example an increased drought tolerance and/or low temperature tolerance and/or an increased nutrient use efficiency, intrinsic yield and/or another mentioned yield-related trait as compared to a corresponding, e.g. non-transformed, wild type plant cell, a plant or a part thereof; (g) a nucleic acid molecule encoding a polypeptide which can be isolated with the aid of monoclonal or polyclonal antibodies made against a polypeptide encoded by one of the nucleic acid molecules of (a), (b), (c), (d), (e) or (f) and having the activity represented by the nucleic acid molecule comprising a polynucleotide as depicted in column 5 of table I, application no. 1; (h) a nucleic acid molecule encoding a polypeptide comprising the consensus sequence or one or more polypeptide motifs as shown in column 7 of table IV, application no. 1, and preferably having the activity represented by a protein comprising a polypeptide as depicted in column 5 of table II or IV, application no. 1; (i) a nucleic acid molecule encoding a polypeptide having the activity represented by a protein as depicted in column 5 of table II, application no. 1, and confers increased yield, e.g. an increased yield-related trait, for example enhanced tolerance to abiotic environmental stress, for example an increased drought tolerance and/or low temperature tolerance and/or an increased nutrient use efficiency, intrinsic yield and/or another mentioned yield-related trait as compared to a corresponding, e.g. non-transformed, wild type plant cell, a plant or a part thereof; (j) nucleic acid molecule which comprises a polynucleotide, which is obtained by amplifying a cDNA library or a genomic library using the primers in column 7 of table III, application no. 1, and preferably having the activity represented by a protein comprising a polypeptide as depicted in column 5 of table II or IV, application no. 1; and (k) a nucleic acid molecule which is obtainable by screening a suitable nucleic acid library, especially a cDNA library and/or a genomic library, under stringent hybridization conditions with a probe comprising a complementary sequence of a nucleic acid molecule of (a) or (b) or with a fragment thereof, having at least 15 nt, preferably 20 nt, 30 nt, 50 nt, 100 nt, 200 nt, 500 nt, 750 nt or 1000 nt of a nucleic acid molecule complementary to a nucleic acid molecule sequence characterized in (a) to (e) and encoding a polypeptide having the activity represented by a protein comprising a polypeptide as depicted in column 5 of table II, application no. 1. In one embodiment, the nucleic acid molecule according to (a), (b), (c), (d), (e), (f), (g), (h), (i), (j) and (k) is at least in one or more nucleotides different from the sequence depicted in column 5 or 7 of table I A, application no. 1, and preferably which encodes a protein which differs at least in one or more amino acids from the protein sequences depicted in column 5 or 7 of table II A, application no. 1.

[0454] In one embodiment the invention relates to homologs of the aforementioned sequences, which can be isolated advantageously from yeast, fungi, viruses, algae, bacteria, such as Acetobacter (subgen. Acetobacter) aceti; Acidithiobacillus ferrooxidans; Acinetobacter sp.; Actinobacillus sp; Aeromonas salmonicida; Agrobacterium tumefaciens; Aquifex aeolicus; Arcanobacterium pyogenes; Aster yellows phytoplasma; Bacillus sp.; Bifidobacterium sp.; Borrelia burgdorferi; Brevibacterium linens; Brucella melitensis; Buchnera sp.; Butyrivibrio fibrisolvens; Campylobacter jejuni; Caulobacter crescentus; Chlamydia sp.; Chlamydophila sp.; Chlorobium limicola; Citrobacter rodentium; Clostridium sp.; Comamonas testosteroni; Corynebacterium sp.; Coxiella burnetii; Deinococcus radiodurans; Dichelobacter nodosus; Edwardsiella ictaluri; Enterobacter sp.; Erysipelothrix rhusiopathiae; E. coli; Flavobacterium sp.; Francisella tularensis; Frankia sp. Cpl1; Fusobacterium nucleatum; Geobacillus stearothermophilus; Gluconobacter oxydans; Haemophilus sp.; Helicobacter pylori; Klebsiella pneumoniae; Lactobacillus sp.; Lactococcus lactis; Listeria sp.; Mannheimia haemolytica; Mesorhizobium loti; Methylophaga thalassica; Microcystis aeruginosa; Microscilla sp. PRE1; Moraxella sp. TA144; Mycobacterium sp.; Mycoplasma sp.; Neisseria sp.; Nitrosomonas sp.; Nostoc sp. PCC 7120; Novosphingobium aromaticivorans; Oenococcus oeni; Pantoea citrea; Pasteurella multocida; Pediococcus pentosaceus; Phormidium foveolarum; Phytoplasma sp.; Plectonema boryanum; Prevotella ruminicola; Propionibacterium sp.; Proteus vulgaris; Pseudomonas sp.; Ralstonia sp.; Rhizobium sp.; Rhodococcus equi; Rhodothermus marinus; Rickettsia sp.; Riemerella anatipestifer; Ruminococcus flavefaciens; Salmonella sp.; Selenomonas ruminantium; Serratia entomophila; Shigella sp.; Sinorhizobium meliloti; Staphylococcus sp.; Streptococcus sp.; Streptomyces sp.; Synechococcus sp.; Synechocystis sp. PCC 6803; Thermotoga maritima; Treponema sp.; Ureaplasma urealyticum; Vibrio cholerae; Vibrio parahaemolyticus; Xylella fastidiosa; Yersinia sp.; Zymomonas mobilis, preferably Salmonella sp. or E. coli or plants, preferably from yeasts such as from the genera Saccharomyces, Pichia, Candida, Hansenula, Torulopsis or Schizosaccharomyces or plants such as A. thaliana, maize, wheat, rye, oat, triticale, rice, barley, soybean, peanut, cotton, borage, sunflower, linseed, primrose, rapeseed, canola and turnip rape, manihot, pepper, sunflower, tagetes, solanaceous plant such as potato, tobacco, eggplant and tomato, Vicia species, pea, alfalfa, bushy plants such as coffee, cacao, tea, Salix species, trees such as oil palm, coconut, perennial grass, such as ryegrass and fescue, and forage crops, such as alfalfa and clover and from spruce, pine or fir for example. More preferably homologs of aforementioned sequences can be isolated from S. cerevisiae, E. coli or Synechocystis sp. or plants, preferably Brassica napus, Glycine max, Zea mays, cotton or Oryza sativa.

[0455] The proteins of the present invention are preferably produced by recombinant DNA techniques. For example, a nucleic acid molecule encoding the protein is cloned into an expression vector, for example in to a binary vector, the expression vector is introduced into a host cell, for example the A. thaliana wild type NASC N906 or any other plant cell as described in the examples see below, and the protein is expressed in said host cell. Examples for binary vectors are pBIN19, pBI101, pBinAR, pGPTV, pCAMBIA, pBIB-HYG, pBecks, pGreen or pPZP (Hajukiewicz, P. et al., Plant Mol. Biol. 25, 989 (1994), and Hellens et al, Trends in Plant Science 5, 446 (2000)).

[0456] In one embodiment the protein of the present invention is preferably produced in a compartment of the cell, e.g. in the plastids. Ways of introducing nucleic acids into plastids and producing proteins in this compartment are known to the person skilled in the art have been also described in this application. In one embodiment, the polypeptide of the invention is a protein localized after expression as indicated in column 6 of table II, e.g. non-targeted, mitochondrial or plastidic, for example it is fused to a transit peptide as described above for plastidic localisation.

[0457] In another embodiment the protein of the present invention is produced without further targeting signal (e.g. as mentioned herein), e.g. in the cytoplasm of the cell. Ways of producing proteins in the cytoplasm are known to the person skilled in the art. Ways of producing proteins without artificial targeting are known to the person skilled in the art.

[0458] Advantageously, the nucleic acid sequences according to the invention or the gene construct together with at least one reporter gene are cloned into an expression cassette, which is introduced into the organism via a vector or directly into the genome. This reporter gene should allow easy detection via a growth, fluorescence, chemical, bioluminescence or tolerance assay or via a photometric measurement. Examples of reporter genes which may be mentioned are antibiotic- or herbicide-tolerance genes, hydrolase genes, fluorescence protein genes, bioluminescence genes, sugar or nucleotide metabolic genes or biosynthesis genes such as the Ura3 gene, the IIv2 gene, the luciferase gene, the β-galactosidase gene, the gfp gene, the 2-desoxyglucose-6-phosphate phosphatase gene, the β-glucuronidase gene, β-lactamase gene, the neomycin phosphotransferase gene, the hygromycin phosphotransferase gene, a mutated acetohydroxyacid synthase (AHAS) gene (also known as acetolactate synthase (ALS) gene), a gene for a D-amino acid metabolizing enzyme or the BASTA (=gluphosinate-tolerance) gene. These genes permit easy measurement and quantification of the transcription activity and hence of the expression of the genes. In this way genome positions may be identified which exhibit differing productivity.

[0459] In a preferred embodiment a nucleic acid construct, for example an expression cassette, comprises upstream, i.e. at the 5′ end of the encoding sequence, a promoter and downstream, i.e. at the 3′ end, a polyadenylation signal and optionally other regulatory elements which are operably linked to the intervening encoding sequence with one of the nucleic acids of SEQ ID NO as depicted in table I, column 5 and 7. By an operable linkage is meant the sequential arrangement of promoter, encoding sequence, terminator and optionally other regulatory elements in such a way that each of the regulatory elements can fulfill its function in the expression of the encoding sequence in due manner. In one embodiment the sequences preferred for operable linkage are targeting sequences for ensuring subcellular localization in plastids. However, targeting sequences for ensuring subcellular localization in the mitochondrium, in the endoplasmic reticulum (=ER), in the nucleus, in oil corpuscles or other compartments may also be employed as well as translation promoters such as the 5′ lead sequence in tobacco mosaic virus (Gallie et al., Nucl. Acids Res. 15 8693 (1987)).

[0460] A nucleic acid construct, for example an expression cassette may, for example, contain a constitutive promoter or a tissue-specific promoter (preferably the USP or napin promoter) the gene to be expressed and the ER retention signal. For the ER retention signal the KDEL amino acid sequence (lysine, aspartic acid, glutamic acid, leucine) or the KKX amino acid sequence (lysine-lysine-X-stop, wherein X means every other known amino acid) is preferably employed.

[0461] For expression in a host organism, for example a plant, the expression cassette is advantageously inserted into a vector such as by way of example a plasmid, a phage or other DNA which allows optimal expression of the genes in the host organism. Examples of suitable plasmids are: in E. coli pLG338, pACYC184, pBR series such as e.g. pBR322, pUC series such as pUC18 or pUC19, M113 mp series, pKC30, pRep4, pHS1, pHS2, pPLc236, pMBL24, pLG200, pUR290, pIN-III113-B1, λgt11 or pBdCI; in Streptomyces pIJ101, pIJ364, pIJ702 or pIJ361; in Bacillus pUB110, pC194 or pBD214; in Corynebacterium pSA77 or pAJ667; in fungi pALS1, pIL2 or pBB116; other advantageous fungal vectors are described by Romanos M. A. et al., Yeast 8, 423 (1992) and by van den Hondel, C. A. M. J. J. et al. [(1991) “Heterologous gene expression in filamentous fungi”] as well as in “More Gene Manipulations” in “Fungi” in Bennet J. W. & Lasure L. L., eds., pp. 396-428, Academic Press, San Diego, and in “Gene transfer systems and vector development for filamentous fungi” [van den Hondel, C. A. M. J. J. & Punt, P. J. (1991) in: Applied Molecular Genetics of Fungi, Peberdy, J. F. et al., eds., pp. 1-28, Cambridge University Press: Cambridge]. Examples of advantageous yeast promoters are 2 μM, pAG-1, YEp6, YEp13 or pEMBLYe23. Examples of algal or plant promoters are pLGV23, pGHlac+, pBIN19, pAK2004, pVKH or pDH51 (see Schmidt, R. and Willmitzer, L., Plant Cell Rep. 7, 583 (1988))). The vectors identified above or derivatives of the vectors identified above are a small selection of the possible plasmids. Further plasmids are well known to those skilled in the art and may be found, for example, in “Cloning Vectors” (Eds. Pouwels P. H. et al. Elsevier, Amsterdam-New York-Oxford, 1985, ISBN 0 444 904018). Suitable plant vectors are described inter alia in “Methods in Plant Molecular Biology and Biotechnology” (CRC Press, Ch. 6/7, pp. 71-119). Advantageous vectors are known as shuttle vectors or binary vectors which replicate in E. coli and Agrobacterium.

[0462] By vectors is meant with the exception of plasmids all other vectors known to those skilled in the art such as by way of example phages, viruses such as SV40, CMV, baculovirus, adenovirus, transposons, IS elements, phasmids, phagemids, cosmids, linear or circular DNA. These vectors can be replicated autonomously in the host organism or be chromosomally replicated, chromosomal replication being preferred.

[0463] In a further embodiment of the vector the expression cassette according to the invention may also advantageously be introduced into the organisms in the form of a linear DNA and be integrated into the genome of the host organism by way of heterologous or homologous recombination. This linear DNA may be composed of a linearized plasmid or only of the expression cassette as vector or the nucleic acid sequences according to the invention.

[0464] In a further advantageous embodiment the nucleic acid sequence according to the invention can also be introduced into an organism on its own.

[0465] If in addition to the nucleic acid sequence according to the invention further genes are to be introduced into the organism, all together with a reporter gene in a single vector or each single gene with a reporter gene in a vector in each case can be introduced into the organism, whereby the different vectors can be introduced simultaneously or successively.

[0466] The vector advantageously contains at least one copy of the nucleic acid sequences according to the invention and/or the expression cassette (=gene construct) according to the invention.

[0467] The invention further provides an isolated recombinant expression vector comprising a nucleic acid encoding a polypeptide as depicted in table II, column 5 or 7, wherein expression of the vector in a host cell results in increased yield, e.g. increased yield-related trait, for example enhanced tolerance to abiotic environmental stress, for example an increased drought tolerance and/or low temperature tolerance and/or an increased nutrient use efficiency, intrinsic yield and/or another mentioned yield-related trait as compared to a wild type variety of the host cell.

[0468] As used herein, the term “vector” refers to a nucleic acid molecule capable of trans-porting another nucleic acid to which it has been linked. One type of vector is a “plasmid”, which refers to a circular double stranded DNA loop into which additional DNA segments can be ligated. Another type of vector is a viral vector, wherein additional DNA segments can be ligated into the viral genome. Certain vectors are capable of autonomous replication in a host cell into which they are introduced (e.g. bacterial vectors having a bacterial origin of replication and episomal mammalian vectors). Other vectors (e.g. non-episomal mammalian vectors) are integrated into the genome of a host cell or a organelle upon introduction into the host cell, and thereby are replicated along with the host or organelle genome. Moreover, certain vectors are capable of directing the expression of genes to which they are operatively linked. Such vectors are referred to herein as “expression vectors.” In general, expression vectors of utility in recombinant DNA techniques are often in the form of plasmids. In the present specification, “plasmid” and “vector” can be used interchangeably as the plasmid is the most commonly used form of vector. However, the invention is intended to include such other forms of expression vectors, such as viral vectors (e.g., replication defective retroviruses, adenoviruses, and adeno-associated viruses), which serve equivalent functions.

[0469] The recombinant expression vectors of the invention comprise a nucleic acid of the invention in a form suitable for expression of the nucleic acid in a host cell, which means that the recombinant expression vectors include one or more regulatory sequences, selected on the basis of the host cells to be used for expression, which is operatively linked to the nucleic acid sequence to be expressed. As used herein with respect to a recombinant expression vector, “operatively linked” is intended to mean that the nucleotide sequence of interest is linked to the regulatory sequence(s) in a manner which allows for expression of the nucleotide sequence (e.g. in an in vitro transcription/translation system or in a host cell when the vector is introduced into the host cell). The term “regulatory sequence” is intended to include promoters, enhancers, and other expression control elements (e.g. polyadenylation signals). Such regulatory sequences are described, for example, in Goeddel, Gene Expression Technology: Methods in Enzymology 185, Academic Press, San Diego, Calif. (1990), and Gruber and Crosby, in: Methods in Plant Molecular Biology and Biotechnology, eds. Glick and Thompson, Chapter 7, 89-108, CRC Press; Boca Raton, Fla., including the references therein. Regulatory sequences include those that direct constitutive expression of a nucleotide sequence in many types of host cells and those that direct expression of the nucleotide sequence only in certain host cells or under certain conditions. It will be appreciated by those skilled in the art that the design of the expression vector can depend on such factors as the choice of the host cell to be transformed, the level of expression of polypeptide desired, etc. The expression vectors of the invention can be introduced into host cells to thereby produce polypeptides or peptides, including fusion polypeptides or peptides, encoded by nucleic acids as described herein (e.g., fusion polypeptides, “Yield Related Proteins” or “YRPs” etc.).

[0470] The recombinant expression vectors of the invention can be designed for expression of the polypeptide of the invention in plant cells. For example, YRP genes can be expressed in plant cells (see Schmidt R., and Willmitzer L., Plant Cell Rep. 7 (1988); Plant Molecular Biology and Biotechnology, C Press, Boca Raton, Fla., Chapter 6/7, p. 71-119 (1993); White F. F., Jenes B. et al., Techniques for Gene Transfer, in: Transgenic Plants, Vol. 1, Engineering and Utilization, eds. Kung and Wu R., 128-43, Academic Press: 1993; Potrykus, Annu. Rev. Plant Physiol. Plant Molec. Biol. 42, 205 (1991) and references cited therein). Suitable host cells are discussed further in Goeddel, Gene Expression Technology: Methods in Enzymology 185, Academic Press: San Diego, Calif. (1990). Alternatively, the recombinant expression vector can be transcribed and translated in vitro, for example using T7 promoter regulatory sequences and T7 polymerase.

[0471] Expression of polypeptides in prokaryotes is most often carried out with vectors containing constitutive or inducible promoters directing the expression of either fusion or non-fusion polypeptides. Fusion vectors add a number of amino acids to a polypeptide encoded therein, usually to the amino terminus of the recombinant polypeptide but also to the C-terminus or fused within suitable regions in the polypeptides. Such fusion vectors typically serve three purposes: 1) to increase expression of a recombinant polypeptide; 2) to increase the solubility of a recombinant polypeptide; and 3) to aid in the purification of a recombinant polypeptide by acting as a ligand in affinity purification. Often, in fusion expression vectors, a proteolytic cleavage site is introduced at the junction of the fusion moiety and the recombinant polypeptide to enable separation of the recombinant polypeptide from the fusion moiety subsequent to purification of the fusion polypeptide. Such enzymes, and their cognate recognition sequences, include Factor Xa, thrombin, and enterokinase.

[0472] By way of example the plant expression cassette can be installed in the pRT transformation vector ((a) Toepfer et al., Methods Enzymol. 217, 66 (1993), (b) Toepfer et al., Nucl. Acids. Res. 15, 5890 (1987)). Alternatively, a recombinant vector (=expression vector) can also be transcribed and translated in vitro, e.g. by using the T7 promoter and the T7 RNA polymerase.

[0473] Expression vectors employed in prokaryotes frequently make use of inducible systems with and without fusion proteins or fusion oligopeptides, wherein these fusions can ensue in both N-terminal and C-terminal manner or in other useful domains of a protein. Such fusion vectors usually have the following purposes: 1) to increase the RNA expression rate; 2) to increase the achievable protein synthesis rate; 3) to increase the solubility of the protein; 4) or to simplify purification by means of a binding sequence usable for affinity chromatography. Proteolytic cleavage points are also frequently introduced via fusion proteins, which allow cleavage of a portion of the fusion protein and purification. Such recognition sequences for proteases are recognized, e.g. factor Xa, thrombin and enterokinase.

[0474] Typical advantageous fusion and expression vectors are pGEX (Pharmacia Biotech Inc; Smith D. B. and Johnson K. S., Gene 67, 31 (1988)), pMAL (New England Biolabs, Beverly, Mass.) and pRIT5 (Pharmacia, Piscataway, N.J.) which contains glutathione S-transferase (GST), maltose binding protein or protein A.

[0475] In one embodiment, the coding sequence of the polypeptide of the invention is cloned into a pGEX expression vector to create a vector encoding a fusion polypeptide comprising, from the N-terminus to the C-terminus, GST-thrombin cleavage site-X polypeptide. The fusion polypeptide can be purified by affinity chromatography using glutathione-agarose resin. Recombinant PK YRP not being fused to GST can be recovered by cleavage of the fusion polypeptide with thrombin. Other examples of E. coli expression vectors are pTrc (Amann et al., Gene 69, 301 (1988)) and pET vectors (Studier et al., Gene Expression Technology: Methods in Enzymology 185, Academic Press, San Diego, Calif. (1990) 60-89; Stratagene, Amsterdam, The Netherlands).

[0476] Target gene expression from the pTrc vector relies on host RNA polymerase transcription from a hybrid trp-lac fusion promoter. Target gene expression from the pET 11d vector relies on transcription from a T7 gn10-lac fusion promoter mediated by a co-expressed viral RNA polymerase (T7 gn1). This viral polymerase is supplied by host strains BL21 (DE3) or HMS174 (DE3) from a resident I prophage harboring a T7 gn1 gene under the transcriptional control of the lacUV 5 promoter.

[0477] In an further embodiment of the present invention, the YRPs are expressed in plants and plants cells such as unicellular plant cells (e.g. algae) (see Falciatore et al., Marine Biotechnology 1 (3), 239 (1999) and references therein) and plant cells from higher plants (e.g., the spermatophytes, such as crop plants), for example to regenerate plants from the plant cells. A nucleic acid molecule coding for YRP as depicted in table II, column 5 or 7 may be “introduced” into a plant cell by any means, including transfection, transformation or transduction, electroporation, particle bombardment, agroinfection, and the like. One transformation method known to those of skill in the art is the dipping of a flowering plant into an Agrobacteria solution, wherein the Agrobacteria contains the nucleic acid of the invention, followed by breeding of the transformed gametes.

[0478] Other suitable methods for transforming or transfecting host cells including plant cells can be found in Sambrook et al., Molecular Cloning: A Laboratory Manual. 2nd, ed., Cold Spring Harbor Laboratory, Cold Spring Harbor Laboratory Press, Cold Spring Harbor, N.Y., 1989, and other laboratory manuals such as Methods in Molecular Biology, 1995, Vol. 44, Agrobacterium protocols, ed: Gartland and Davey, Humana Press, Totowa, N.J. As increased tolerance to abiotic environmental stress and/or yield is a general trait wished to be inherited into a wide variety of plants like maize, wheat, rye, oat, triticale, rice, barley, soybean, peanut, cotton, rapeseed and canola, manihot, pepper, sunflower and tagetes, solanaceous plants like potato, tobacco, eggplant, and tomato, Vicia species, pea, alfalfa, bushy plants (coffee, cacao, tea), Salix species, trees (oil palm, coconut), perennial grasses, and forage crops, these crop plants are also preferred target plants for a genetic engineering as one further embodiment of the present invention. Forage crops include, but are not limited to Wheatgrass, Canarygrass, Bromegrass, Wildrye Grass, Bluegrass, Orchardgrass, Alfalfa, Salfoin, Birdsfoot Trefoil, Alsike Clover, Red Clover and Sweet Clover.

[0479] In one embodiment of the present invention, transfection of a nucleic acid molecule coding for YRP as depicted in table II, column 5 or 7 into a plant is achieved by Agrobacterium mediated gene transfer. Agrobacterium mediated plant transformation can be performed using for example the GV3101 (pMP90) (Koncz and Schell, Mol. Gen. Genet. 204, 383 (1986)) or LBA4404 (Clontech) Agrobacterium tumefaciens strain. Transformation can be performed by standard transformation and regeneration techniques (Deblaere et al., Nucl. Acids Res. 13, 4777 (1994), Gelvin, Stanton B. and Schilperoort Robert A, Plant Molecular Biology Manual, 2nd Ed.—Dordrecht: Kluwer Academic Publ., 1995.—in Sect., Ringbuc Zentrale Signatur: BT11-P ISBN 0-7923-2731-4; Glick Bernard R., Thompson John E., Methods in Plant Molecular Biology and Biotechnology, Boca Raton: CRC Press, 1993 360 S., ISBN 0-8493-5164-2). For example, rapeseed can be transformed via cotyledon or hypocotyl transformation (Moloney et al., Plant Cell Report 8, 238 (1989); De Block et al., Plant Physiol. 91, 694 (1989)). Use of antibiotics for Agrobacterium and plant selection depends on the binary vector and the Agrobacterium strain used for transformation. Rapeseed selection is normally performed using kanamycin as selectable plant marker. Agrobacterium mediated gene transfer to flax can be performed using, for example, a technique described by Mlynarova et al., Plant Cell Report 13, 282 (1994). Additionally, transformation of soybean can be performed using for example a technique described in European Patent No. 424 047, U.S. Pat. No. 5,322,783, European Patent No. 397 687, U.S. Pat. No. 5,376,543 or U.S. Pat. No. 5,169,770. Transformation of maize can be achieved by particle bombardment, polyethylene glycol mediated DNA uptake or via the silicon carbide fiber technique. (See, for example, Freeling and Walbot “The maize handbook” Springer Verlag: New York (1993) ISBN 3-540-97826-7). A specific example of maize transformation is found in U.S. Pat. No. 5,990,387, and a specific example of wheat transformation can be found in PCT Application No. WO 93/07256.

[0480] According to the present invention, the introduced nucleic acid molecule coding for YRP as depicted in table II, column 5 or 7 may be maintained in the plant cell stably if it is incorporated into a non-chromosomal autonomous replicon or integrated into the plant chromosomes or organelle genome. Alternatively, the introduced YRP may be present on an extrachromosomal non-replicating vector and be transiently expressed or transiently active.

[0481] In one embodiment, a homologous recombinant microorganism can be created wherein the YRP is integrated into a chromosome, a vector is prepared which contains at least a portion of a nucleic acid molecule coding for YRP as depicted in table II, column 5 or 7 into which a deletion, addition, or substitution has been introduced to thereby alter, e.g., functionally disrupt, the YRP gene. For example, the YRP gene is a yeast gene, like a gene of S. cerevisiae, or a bacterial gene, like an E. coli gene, or of Synechocystis, but it can be a homolog from a related plant or even from a mammalian or insect source. The vector can be designed such that, upon homologous recombination, the endogenous nucleic acid molecule coding for YRP as depicted in table II, column 5 or 7 is mutated or otherwise altered but still encodes a functional polypeptide (e.g., the upstream regulatory region can be altered to thereby alter the expression of the endogenous YRP). In a preferred embodiment the biological activity of the protein of the invention is increased upon homologous recombination. To create a point mutation via homologous recombination, DNA-RNA hybrids can be used in a technique known as chimeraplasty (Cole-Strauss et al., Nucleic Acids Research 27 (5), 1323 (1999) and Kmiec, Gene Therapy American Scientist. 87 (3), 240 (1999)). Homologous recombination procedures in Physcomitrella patens are also well known in the art and are contemplated for use herein.

[0482] Whereas in the homologous recombination vector, the altered portion of the nucleic acid molecule coding for YRP as depicted in table II, column 5 or 7 is flanked at its 5′ and 3′ ends by an additional nucleic acid molecule of the YRP gene to allow for homologous recombination to occur between the exogenous YRP gene carried by the vector and an endogenous YRP gene, in a microorganism or plant. The additional flanking YRP nucleic acid molecule is of sufficient length for successful homologous recombination with the endogenous gene. Typically, several hundreds of base pairs up to kilobases of flanking DNA (both at the 5′ and 3′ ends) are included in the vector. See, e.g., Thomas K. R., and Capecchi M. R., Cell 51, 503 (1987) for a description of homologous recombination vectors or Strepp et al., PNAS, 95 (8), 4368 (1998) for cDNA based recombination in Physcomitrella patens. The vector is introduced into a microorganism or plant cell (e.g. via polyethylene glycol mediated DNA), and cells in which the introduced YRP gene has homologously recombined with the endogenous YRP gene are selected using art-known techniques.

[0483] Whether present in an extra-chromosomal non-replicating vector or a vector that is integrated into a chromosome, the nucleic acid molecule coding for YRP as depicted in table II, column 5 or 7 preferably resides in a plant expression cassette. A plant expression cassette preferably contains regulatory sequences capable of driving gene expression in plant cells that are operatively linked so that each sequence can fulfill its function, for example, termination of transcription by polyadenylation signals. Preferred polyadenylation signals are those originating from Agrobacterium tumefaciens t-DNA such as the gene 3 known as octopine synthase of the Ti-plasmid pTiACH5 (Gielen et al., EMBO J. 3, 835 (1984)) or functional equivalents thereof but also all other terminators functionally active in plants are suitable. As plant gene expression is very often not limited on transcriptional levels, a plant expression cassette preferably contains other operatively linked sequences like translational enhancers such as the overdrive-sequence containing the 5′-untranslated leader sequence from tobacco mosaic virus enhancing the polypeptide per RNA ratio (Gallie et al., Nucl. Acids Research 15, 8693 (1987)). Examples of plant expression vectors include those detailed in: Becker D. et al., Plant Mol. Biol. 20, 1195 (1992); and Bevan M. W., Nucl. Acid. Res. 12, 8711 (1984); and “Vectors for Gene Transfer in Higher Plants” in: Transgenic Plants, Vol. 1, Engineering and Utilization, eds. Kung and Wu R., Academic Press, 1993, S. 15-38.

[0484] “Transformation” is defined herein as a process for introducing heterologous DNA into a plant cell, plant tissue, or plant. It may occur under natural or artificial conditions using various methods well known in the art. Transformation may rely on any known method for the insertion of foreign nucleic acid sequences into a prokaryotic or eukaryotic host cell. The method is selected based on the host cell being transformed and may include, but is not limited to, viral infection, electroporation, lipofection, and particle bombardment. Such “transformed” cells include stably transformed cells in which the inserted DNA is capable of replication either as an autonomously replicating plasmid or as part of the host chromosome. They also include cells which transiently express the inserted DNA or RNA for limited periods of time. Trans-formed plant cells, plant tissue, or plants are understood to encompass not only the end product of a transformation process, but also transgenic progeny thereof.

[0485] The terms “transformed,” “transgenic,” and “recombinant” refer to a host organism such as a bacterium or a plant into which a heterologous nucleic acid molecule has been introduced. The nucleic acid molecule can be stably integrated into the genome of the host or the nucleic acid molecule can also be present as an extra-chromosomal molecule. Such an extrachromosomal molecule can be auto-replicating. Transformed cells, tissues, or plants are understood to encompass not only the end product of a transformation process, but also transgenic progeny thereof. A “non-transformed”, “non-transgenic” or “non-recombinant” host refers to a wild-type organism, e.g. a bacterium or plant, which does not contain the heterologous nucleic acid molecule.

[0486] A “transgenic plant”, as used herein, refers to a plant which contains a foreign nucleotide sequence inserted into either its nuclear genome or organelle genome. It encompasses further the offspring generations i.e. the T1-, T2- and consecutively generations or BC1-, BC2- and consecutively generation as well as crossbreeds thereof with non-transgenic or other transgenic plants.

[0487] The host organism (=transgenic organism) advantageously contains at least one copy of the nucleic acid according to the invention and/or of the nucleic acid construct according to the invention.

[0488] In principle all plants can be used as host organism. Preferred transgenic plants are, for example, selected from the families Aceraceae, Anacardiaceae, Apiaceae, Asteraceae, Brassicaceae, Cactaceae, Cucurbitaceae, Euphorbiaceae, Fabaceae, Malvaceae, Nymphaeaceae, Papaveraceae, Rosaceae, Salicaceae, Solanaceae, Arecaceae, Bromeliaceae, Cyperaceae, Iridaceae, Liliaceae, Orchidaceae, Gentianaceae, Labiaceae, Magnoliaceae, Ranunculaceae, Carifolaceae, Rubiaceae, Scrophulariaceae, Caryophyllaceae, Ericaceae, Polygonaceae, Violaceae, Juncaceae or Poaceae and preferably from a plant selected from the group of the families Apiaceae, Asteraceae, Brassicaceae, Cucurbitaceae, Fabaceae, Papaveraceae, Rosaceae, Solanaceae, Liliaceae or Poaceae. Preferred are crop plants such as plants advantageously selected from the group of the genus peanut, oilseed rape, canola, sunflower, safflower, olive, sesame, hazelnut, almond, avocado, bay, pumpkin/squash, linseed, soya, pistachio, borage, maize, wheat, rye, oats, sorghum and millet, triticale, rice, barley, cassava, potato, sugarbeet, egg plant, alfalfa, and perennial grasses and forage plants, oil palm, vegetables (brassicas, root vegetables, tuber vegetables, pod vegetables, fruiting vegetables, onion vegetables, leafy vegetables and stem vegetables), buckwheat, Jerusalem artichoke, broad bean, vetches, lentil, dwarf bean, lupin, clover and Lucerne for mentioning only some of them.

[0489] In one embodiment of the invention transgenic plants are selected from the group comprising cereals, soybean, rapeseed (including oil seed rape, especially canola and winter oil seed rape), cotton sugarcane and potato, especially corn, soy, rapeseed (including oil seed rape, especially canola and winter oil seed rape), cotton, wheat and rice.

[0490] In another embodiment of the invention the transgenic plant is a gymnosperm plant, especially a spruce, pine or fir.

[0491] In one embodiment, the host plant is selected from the families Aceraceae, Anacardiaceae, Apiaceae, Asteraceae, Brassicaceae, Cactaceae, Cucurbitaceae, Euphorbiaceae, Fabaceae, Malvaceae, Nymphaeaceae, Papaveraceae, Rosaceae, Salicaceae, Solanaceae, Arecaceae, Bromeliaceae, Cyperaceae, Iridaceae, Liliaceae, Orchidaceae, Gentianaceae, Labiaceae, Magnoliaceae, Ranunculaceae, Carifolaceae, Rubiaceae, Scrophulariaceae, Caryophyllaceae, Ericaceae, Polygonaceae, Violaceae, Juncaceae or Poaceae and preferably from a plant selected from the group of the families Apiaceae, Asteraceae, Brassicaceae, Cucurbitaceae, Fabaceae, Papaveraceae, Rosaceae, Solanaceae, Liliaceae or Poaceae. Preferred are crop plants and in particular plants mentioned herein above as host plants such as the families and genera mentioned above for example preferred the species Anacardium occidentale, Calendula officinalis, Carthamus tinctorius, Cichorium intybus, Cynara scolymus, Helianthus annus, Tagetes lucida, Tagetes erecta, Tagetes tenuifolia; Daucus carota; Corylus avellana, Corylus colurna, Borago officinalis; Brassica napus, Brassica rapa ssp., Sinapis arvensis Brassica juncea, Brassica juncea var. juncea, Brassica juncea var. crispifolia, Brassica juncea var. foliosa, Brassica nigra, Brassica sinapioides, Melanosinapis communis, Brassica oleracea, Arabidopsis thaliana, Anana comosus, Ananas ananas, Bromelia comosa, Carica papaya, Cannabis sative, Ipomoea batatus, Ipomoea pandurata, Convolvulus batatas, Convolvulus tiliaceus, Ipomoea fastigiata, Ipomoea tiliacea, Ipomoea triloba, Convolvulus panduratus, Beta vulgaris, Beta vulgaris var. altissima, Beta vulgaris var. vulgaris, Beta maritima, Beta vulgaris var. perennis, Beta vulgaris var. conditiva, Beta vulgaris var. esculenta, Cucurbita maxima, Cucurbita mixta, Cucurbita pepo, Cucurbita moschata, Olea europaea, Manihot utilissima, Janipha manihot, Jatropha manihot., Manihot aipil, Manihot dulcis, Manihot manihot, Manihot melanobasis, Manihot esculenta, Ricinus communis, Pisum sativum, Pisum arvense, Pisum humile, Medicago sativa, Medicago falcata, Medicago varia, Glycine max Dolichos soja, Glycine gracilis, Glycine hispida, Phaseolus max, Soja hispida, Soja max, Cocos nucifera, Pelargonium grossularioides, Oleum cocoas, Laurus nobilis, Persea americana, Arachis hypogaea, Linum usitatissimum, Linum humile, Linum austriacum, Linum bienne, Linum angustifolium, Linum catharticum, Linum flavum, Linum grandiflorum, Adenolinum grandiflorum, Linum lewisii, Linum narbonense, Linum perenne, Linum perenne var. lewisii, Linum pratense, Linum trigynum, Punica granatum, Gossypium hirsutum, Gossypium arboreum, Gossypium barbadense, Gossypium herbaceum, Gossypium thurberi, Musa nana, Musa acuminata, Musa paradisiaca, Musa spp., Elaeis guineensis, Papaver orientale, Papaver rhoeas, Papaver dubium, Sesamum indicum, Piper aduncum, Piper amalago, Piper angustifolium, Piper auritum, Piper betel, Piper cubeba, Piper longum, Piper nigrum, Piper retrofractum, Artanthe adunca, Artanthe elongata, Peperomia elongata, Piper elongatum, Steffensia elongata, Hordeum vulgare, Hordeum jubatum, Hordeum murinum, Hordeum secalinum, Hordeum distichon Hordeum aegiceras, Hordeum hexastichon., Hordeum hexastichum, Hordeum irregulare, Hordeum sativum, Hordeum secalinum, Avena sativa, Avena fatua, Avena byzantina, Avena fatua var. sativa, Avena hybrida, Sorghum bicolor, Sorghum halepense, Sorghum saccharatum, Sorghum vulgare, Andropogon drummondii, Holcus bicolor, Holcus sorghum, Sorghum aethiopicum, Sorghum arundinaceum, Sorghum caffrorum, Sorghum cernuum, Sorghum dochna, Sorghum drummondii, Sorghum durra, Sorghum guineense, Sorghum lanceolatum, Sorghum nervosum, Sorghum saccharatum, Sorghum subglabrescens, Sorghum verticilliflorum, Sorghum vulgare, Holcus halepensis, Sorghum miliaceum millet, Panicum militaceum, Zea mays, Triticum aestivum, Triticum durum, Triticum turgidum, Triticum hybernum, Triticum macha, Triticum sativum or Triticum vulgare, Cofea spp., Coffea arabica, Coffea canephora, Coffea liberica, Capsicum annuum, Capsicum annuum var. glabriusculum, Capsicum frutescens, Capsicum annuum, Nicotiana tabacum, Solanum tuberosum, Solanum melongena, Lycopersicon esculentum, Lycopersicon lycopersicum., Lycopersicon pyriforme, Solanum integrifolium, Solanum lycopersicum Theobroma cacao or Camellia sinensis.

[0492] Anacardiaceae such as the genera Pistacia, Mangifera, Anacardium e.g. the species Pistacia vera [pistachios, Pistazie], Mangifer indica [Mango] or Anacardium occidentale [Cashew]; Asteraceae such as the genera Calendula, Carthamus, Centaurea, Cichorium, Cynara, Helianthus, Lactuca, Locusta, Tagetes, Valeriana e.g. the species Calendula officinalis [Marigold], Carthamus tinctorius [safflower], Centaurea cyanus [cornflower], Cichorium intybus [blue daisy], Cynara scolymus [Artichoke], Helianthus annus [sunflower], Lactuca sativa, Lactuca crispa, Lactuca esculenta, Lactuca scariola L. ssp. sativa, Lactuca scariola L. var. integrata, Lactuca scariola L. var. integrifolia, Lactuca sativa subsp. romana, Locusta communis, Valeriana locusta [lettuce], Tagetes lucida, Tagetes erecta or Tagetes tenuifolia [Marigold]; Apiaceae such as the genera Daucus e.g. the species Daucus carota [carrot]; Betulaceae such as the genera Corylus e.g. the species Corylus avellana or Corylus colurna [hazelnut]; Boraginaceae such as the genera Borago e.g. the species Borago officinalis [borage]; Brassicaceae such as the genera Brassica, Melanosinapis, Sinapis, Arabadopsis e.g. the species Brassica napus, Brassica rapa ssp. [canola, oilseed rape, turnip rape], Sinapis arvensis Brassica juncea, Brassica juncea var. juncea, Brassica juncea var. crispifolia, Brassica juncea var. foliosa, Brassica nigra, Brassica sinapioides, Melanosinapis communis [mustard], Brassica oleracea [fodder beet] or Arabidopsis thaliana; Bromeliaceae such as the genera Anana, Bromelia e.g. the species Anana comosus, Ananas ananas or Bromelia comosa [pineapple]; Caricaceae such as the genera Carica e.g. the species Carica papaya [papaya]; Cannabaceae such as the genera Cannabis e.g. the species Cannabis sative [hemp], Convolvulaceae such as the genera Ipomea, Convolvulus e.g. the species Ipomoea batatus, Ipomoea pandurata, Convolvulus batatas, Convolvulus tiliaceus, Ipomoea fastigiata, Ipomoea tiliacea, Ipomoea triloba or Convolvulus panduratus [sweet potato, Man of the Earth, wild potato], Chenopodiaceae such as the genera Beta, i.e. the species Beta vulgaris, Beta vulgaris var. altissima, Beta vulgaris var. Vulgaris, Beta maritima, Beta vulgaris var. perennis, Beta vulgaris var. conditiva or Beta vulgaris var. esculenta [sugar beet]; Cucurbitaceae such as the genera Cucubita e.g. the species Cucurbita maxima, Cucurbita mixta, Cucurbita pepo or Cucurbita moschata [pumpkin, squash]; Elaeagnaceae such as the genera Elaeagnus e.g. the species Olea europaea [olive]; Ericaceae such as the genera Kalmia e.g. the species Kalmia latifolia, Kalmia angustifolia, Kalmia microphylla, Kalmia polifolia, Kalmia occidentalis, Cistus chamaerhodendros or Kalmia lucida [American laurel, broad-leafed laurel, calico bush, spoon wood, sheep laurel, alpine laurel, bog laurel, western bog-laurel, swamp-laurel]; Euphorbiaceae such as the genera Manihot, Janipha, Jatropha, Ricinus e.g. the species Manihot utilissima, Janipha manihot, Jatropha manihot., Manihot aipil, Manihot dulcis, Manihot manihot, Manihot melanobasis, Manihot esculenta [manihot, arrowroot, tapioca, cassava] or Ricinus communis [castor bean, Castor Oil Bush, Castor Oil Plant, Palma Christi, Wonder Tree]; Fabaceae such as the genera Pisum, Albizia, Cathormion, Feuillea, Inga, Pithecolobium, Acacia, Mimosa, Medicajo, Glycine, Dolichos, Phaseolus, Soja e.g. the species Pisum sativum, Pisum arvense, Pisum humile [pea], Albizia berteriana, Albizia julibrissin, Albizia lebbeck, Acacia berteriana, Acacia littoralis, Albizia berteriana, Albizzia berteriana, Cathormion berteriana, Feuillea berteriana, Inga fragrans, Pithecellobium berterianum, Pithecellobium fragrans, Pithecolobium berterianum, Pseudalbizzia berteriana, Acacia julibrissin, Acacia nemu, Albizia nemu, Feuilleea julibrissin, Mimosa julibrissin, Mimosa speciosa, Sericanrda julibrissin, Acacia lebbeck, Acacia macrophylla, Albizia lebbek, Feuilleea lebbeck, Mimosa lebbeck, Mimosa speciosa [bastard logwood, silk tree, East Indian Walnut], Medicago sativa, Medicago falcata, Medicago varia [alfalfa] Glycine max Dolichos soja, Glycine gracilis, Glycine hispida, Phaseolus max, Soja hispida or Soja max [soybean]; Geraniaceae such as the genera Pelargonium, Cocos, Oleum e.g. the species Cocos nucifera, Pelargonium grossularioides or Oleum cocois [coconut]; Gramineae such as the genera Saccharum e.g. the species Saccharum officinarum; Juglandaceae such as the genera Juglans, Wallia e.g. the species Juglans regia, Juglans ailanthifolia, Juglans sieboldiana, Juglans cinerea, Wallia cinerea, Juglans bixbyi, Juglans californica, Juglans hindsii, Juglans intermedia, Juglans jamaicensis, Juglans major, Juglans microcarpa, Juglans nigra or Wallia nigra [walnut, black walnut, common walnut, persian walnut, white walnut, butternut, black walnut]; Lauraceae such as the genera Persea, Laurus e.g. the species laurel Laurus nobilis [bay, laurel, bay laurel, sweet bay], Persea americana Persea americana, Persea gratissima or Persea persea [avocado]; Leguminosae such as the genera Arachis e.g. the species Arachis hypogaea [peanut]; Linaceae such as the genera Linum, Adenolinum e.g. the species Linum usitatissimum, Linum humile, Linum austriacum, Linum bienne, Linum angustifolium, Linum catharticum, Linum flavum, Linum grandiflorum, Adenolinum grandiflorum, Linum lewisii, Linum narbonense, Linum perenne, Linum perenne var. lewisii, Linum pratense or Linum trigynum [flax, linseed]; Lythrarieae such as the genera Punica e.g. the species Punica granatum [pomegranate]; Malvaceae such as the genera Gossypium e.g. the species Gossypium hirsutum, Gossypium arboreum, Gossypium barbadense, Gossypium herbaceum or Gossypium thurberi [cotton]; Musaceae such as the genera Musa e.g. the species Musa nana, Musa acuminata, Musa paradisiaca, Musa spp. [banana]; Onagraceae such as the genera Camissonia, Oenothera e.g. the species Oenothera biennis or Camissonia brevipes [primrose, evening primrose]; Palmae such as the genera Elacis e.g. the species Elaeis guineensis [oil plam]; Papaveraceae such as the genera Papaver e.g. the species Papaver orientale, Papaver rhoeas, Papaver dubium [poppy, oriental poppy, corn poppy, field poppy, shirley poppies, field poppy, long-headed poppy, long-pod poppy]; Pedaliaceae such as the genera Sesamum e.g. the species Sesamum indicum [sesame]; Piperaceae such as the genera Piper, Artanthe, Peperomia, Steffensia e.g. the species Piper aduncum, Piper amalago, Piper angustifolium, Piper auritum, Piper betel, Piper cubeba, Piper longum, Piper nigrum, Piper retrofractum, Artanthe adunca, Artanthe elongata, Peperomia elongata, Piper elongatum, Steffensia elongata. [Cayenne pepper, wild pepper]; Poaceae such as the genera Hordeum, Secale, Avena, Sorghum, Andropogon, Holcus, Panicum, Oryza, Zea, Triticum e.g. the species Hordeum vulgare, Hordeum jubatum, Hordeum murinum, Hordeum secalinum, Hordeum distichon Hordeum aegiceras, Hordeum hexastichon., Hordeum hexastichum, Hordeum irregulare, Hordeum sativum, Hordeum secalinum [barley, pearl barley, foxtail barley, wall barley, meadow barley], Secale cereale [rye], Avena sativa, Avena fatua, Avena byzantina, Avena fatua var. sativa, Avena hybrida [oat], Sorghum bicolor, Sorghum halepense, Sorghum saccharatum, Sorghum vulgare, Andropogon drummondii, Holcus bicolor, Holcus sorghum, Sorghum aethiopicum, Sorghum arundinaceum, Sorghum caffrorum, Sorghum cernuum, Sorghum dochna, Sorghum drummondii, Sorghum durra, Sorghum guineense, Sorghum lanceolatum, Sorghum nervosum, Sorghum saccharatum, Sorghum subglabrescens, Sorghum verticilliflorum, Sorghum vulgare, Holcus halepensis, Sorghum miliaceum millet, Panicum militaceum [Sorghum, millet], Oryza sativa, Oryza latifolia [rice], Zea mays [corn, maize] Triticum aestivum, Triticum durum, Triticum turgidum, Triticum hybernum, Triticum macha, Triticum sativum or Triticum vulgare [wheat, bread wheat, common wheat], Proteaceae such as the genera Macadamia e.g. the species Macadamia intergrifolia [macadamia]; Rubiaceae such as the genera Coffea e.g. the species Cofea spp., Coffea arabica, Coffea canephora or Coffea liberica [coffee]; Scrophulariaceae such as the genera Verbascum e.g. the species Verbascum blattaria, Verbascum chaixii, Verbascum densiflorum, Verbascum lagurus, Verbascum longifolium, Verbascum lychnitis, Verbascum nigrum, Verbascum olympicum, Verbascum phlomoides, Verbascum phoenicum, Verbascum pulverulentum or Verbascum thapsus [mullein, white moth mullein, nettle-leaved mullein, dense-flowered mullein, silver mullein, long-leaved mullein, white mullein, dark mullein, greek mullein, orange mullein, purple mullein, hoary mullein, great mullein]; Solanaceae such as the genera Capsicum, Nicotiana, Solanum, Lycopersicon e.g. the species Capsicum annuum, Capsicum annuum var. glabriusculum, Capsicum frutescens [pepper], Capsicum annuum [paprika], Nicotiana tabacum, Nicotiana alata, Nicotiana attenuata, Nicotiana glauca, Nicotiana langsdorffii, Nicotiana obtusifolia, Nicotiana quadrivalvis, Nicotiana repanda, Nicotiana rustica, Nicotiana sylvestris [tobacco], Solanum tuberosum [potato], Solanum melongena [egg-plant] (Lycopersicon esculentum, Lycopersicon lycopersicum., Lycopersicon pyriforme, Solanum integrifolium or Solanum lycopersicum [tomato]; Sterculiaceae such as the genera Theobroma e.g. the species Theobroma cacao [cacao]; Theaceae such as the genera Camellia e.g. the species Camellia sinensis) [tea].

[0493] The introduction of the nucleic acids according to the invention, the expression cassette or the vector into organisms, plants for example, can in principle be done by all of the methods known to those skilled in the art. The introduction of the nucleic acid sequences gives rise to recombinant or transgenic organisms.

[0494] Unless otherwise specified, the terms “polynucleotides”, “nucleic acid” and “nucleic acid molecule” as used herein are interchangeably. Unless otherwise specified, the terms “peptide”, “polypeptide” and “protein” are interchangeably in the present context. The term “sequence” may relate to polynucleotides, nucleic acids, nucleic acid molecules, peptides, polypeptides and proteins, depending on the context in which the term “sequence” is used. The terms “gene(s)”, “polynucleotide”, “nucleic acid sequence”, “nucleotide sequence”, or “nucleic acid molecule(s)” as used herein refers to a polymeric form of nucleotides of any length, either ribonucleotides or deoxyribonucleotides. The terms refer only to the primary structure of the molecule.

[0495] Thus, the terms “gene(s)”, “polynucleotide”, “nucleic acid sequence”, “nucleotide sequence”, or “nucleic acid molecule(s)” as used herein include double- and single-stranded DNA and RNA. They also include known types of modifications, for example, methylation, “caps”, substitutions of one or more of the naturally occurring nucleotides with an analog. Preferably, the DNA or RNA sequence of the invention comprises a coding sequence encoding the herein defined polypeptide.

[0496] A “coding sequence” is a nucleotide sequence, which is transcribed into mRNA and/or translated into a polypeptide when placed under the control of appropriate regulatory sequences. The boundaries of the coding sequence are determined by a translation start codon at the 5′-terminus and a translation stop codon at the 3′-terminus. The triplets taa, tga and tag represent the (usual) stop codons which are interchangeable. A coding sequence can include, but is not limited to mRNA, cDNA, recombinant nucleotide sequences or genomic DNA, while introns may be present as well under certain circumstances.

[0497] The transfer of foreign genes into the genome of a plant is called transformation. In doing this the methods described for the transformation and regeneration of plants from plant tissues or plant cells are utilized for transient or stable transformation. Suitable methods are protoplast transformation by poly(ethylene glycol)-induced DNA uptake, the “biolistic” method using the gene cannon—referred to as the particle bombardment method, electroporation, the incubation of dry embryos in DNA solution, microinjection and gene transfer mediated by Agrobacterium. Said methods are described by way of example in Jenes B. et al., Techniques for Gene Transfer, in: Transgenic Plants, Vol. 1, Engineering and Utilization, eds. Kung S. D and Wu R., Academic Press (1993) 128-143 and in Potrykus, Annu. Rev. Plant Physiol. Plant Molec. Biol. 42, 205 (1991). The nucleic acids or the construct to be expressed is preferably cloned into a vector which is suitable for transforming Agrobacterium tumefaciens, for example pBin19 (Bevan et al., Nucl. Acids Res. 12, 8711 (1984)). Agrobacteria transformed by such a vector can then be used in known manner for the transformation of plants, in particular of crop plants such as by way of example tobacco plants, for example by bathing bruised leaves or chopped leaves in an agrobacterial solution and then culturing them in suitable media. The transformation of plants by means of Agrobacterium tumefaciens is described, for example, by Höfgen and Willmitzer in Nucl. Acid Res. 16, 9877 (1988) or is known inter alia from White F. F., Vectors for Gene Transfer in Higher Plants; in Transgenic Plants, Vol. 1, Engineering and Utilization, eds. Kung S. D. and Wu R., Academic Press, 1993, pp. 15-38.

[0498] Agrobacteria transformed by an expression vector according to the invention may likewise be used in known manner for the transformation of plants such as test plants like Arabidopsis or crop plants such as cereal crops, corn, oats, rye, barley, wheat, soybean, rice, cotton, sugar beet, canola, sunflower, flax, hemp, potatoes, tobacco, tomatoes, carrots, paprika, oilseed rape, tapioca, cassava, arrowroot, tagetes, alfalfa, lettuce and the various tree, nut and vine species, in particular oil-containing crop plants such as soybean, peanut, castor oil plant, sunflower, corn, cotton, flax, oilseed rape, coconut, oil palm, safflower (Carthamus tinctorius) or cocoa bean, or in particular corn, wheat, soybean, rice, cotton and canola, e.g. by bathing bruised leaves or chopped leaves in an agrobacterial solution and then culturing them in suitable media.

[0499] The genetically modified plant cells may be regenerated by all of the methods known to those skilled in the art. Appropriate methods can be found in the publications referred to above by Kung S. D. and Wu R., Potrykus or Höfgen and Willmitzer.

[0500] Accordingly, a further aspect of the invention relates to transgenic organisms trans-formed by at least one nucleic acid sequence, expression cassette or vector according to the invention as well as cells, cell cultures, tissue, parts—such as, for example, leaves, roots, etc. in the case of plant organisms—or reproductive material derived from such organisms. The terms “host organism”, “host cell”, “recombinant (host) organism” and “transgenic (host) cell” are used here interchangeably. Of course these terms relate not only to the particular host organism or the particular target cell but also to the descendants or potential descendants of these organisms or cells. Since, due to mutation or environmental effects certain modifications may arise in successive generations, these descendants need not necessarily be identical with the parental cell but nevertheless are still encompassed by the term as used here.

[0501] For the purposes of the invention “transgenic” or “recombinant” means with regard for example to a nucleic acid sequence, an expression cassette (=gene construct, nucleic acid construct) or a vector containing the nucleic acid sequence according to the invention or an organism transformed by the nucleic acid sequences, expression cassette or vector according to the invention all those constructions produced by genetic engineering methods in which either (a) the nucleic acid sequence depicted in table I, application no. 1, column 5 or 7 or its derivatives or parts thereof; or (b) a genetic control sequence functionally linked to the nucleic acid sequence described under (a), for example a 3′- and/or 5′-genetic control sequence such as a promoter or terminator, or (c): (a) and (b); are not found in their natural, genetic environment or have been modified by genetic engineering methods, wherein the modification may by way of example be a substitution, addition, deletion, inversion or insertion of one or more nucleotide residues. Natural genetic environment means the natural genomic or chromosomal locus in the organism of origin or inside the host organism or presence in a genomic library. In the case of a genomic library the natural genetic environment of the nucleic acid sequence is preferably retained at least in part. The environment borders the nucleic acid sequence at least on one side and has a sequence length of at least 50 bp, preferably at least 500 bp, particularly preferably at least 1,000 bp, most particularly preferably at least 5,000 bp. A naturally occurring expression cassette—for example the naturally occurring combination of the natural promoter of the nucleic acid sequence according to the invention with the corresponding gene—turns into a transgenic expression cassette when the latter is modified by unnatural, synthetic (“artificial”) methods such as by way of example a mutagenation. Appropriate methods are described by way of example in U.S. Pat. No. 5,565,350 or WO 00/15815.

[0502] Suitable organisms or host organisms for the nucleic acid, expression cassette or vector according to the invention are advantageously in principle all organisms, which are suitable for the expression of recombinant genes as described above. Further examples which may be mentioned are plants such as Arabidopsis, Asteraceae such as Calendula or crop plants such as soybean, peanut, castor oil plant, sunflower, flax, corn, cotton, flax, oilseed rape, coconut, oil palm, safflower (Carthamus tinctorius) or cocoa bean.

[0503] In one embodiment of the invention host plants for the nucleic acid, expression cassette or vector according to the invention are selected from the group comprising corn, soy, oil seed rape (including canola and winter oil seed rape), cotton, wheat and rice.

[0504] A further object of the invention relates to the use of a nucleic acid construct, e.g. an expression cassette, containing one or more DNA sequences encoding one or more polypeptides shown in table II or comprising one or more nucleic acid molecules as depicted in table I or encoding or DNA sequences hybridizing therewith for the transformation of plant cells, tissues or parts of plants.

[0505] In doing so, depending on the choice of promoter, the nucleic acid molecules or sequences shown in table I or II can be expressed specifically in the leaves, in the seeds, the nodules, in roots, in the stem or other parts of the plant. Those transgenic plants overproducing sequences, e.g. as depicted in table I, the reproductive material thereof, together with the plant cells, tissues or parts thereof are a further object of the present invention.

[0506] The expression cassette or the nucleic acid sequences or construct according to the invention containing nucleic acid molecules or sequences according to table I can, moreover, also be employed for the transformation of the organisms identified by way of example above such as bacteria, yeasts, filamentous fungi and plants.

[0507] Within the framework of the present invention, increased yield, e.g. an increased yield-related trait, for example enhanced tolerance to abiotic environmental stress, for example an increased drought tolerance and/or low temperature tolerance and/or an increased nutrient use efficiency, intrinsic yield and/or another mentioned yield-related trait relates to, for example, the artificially acquired trait of increased yield, e.g. an increased yield-related trait, for example enhanced tolerance to abiotic environmental stress, for example an increased drought tolerance and/or low temperature tolerance and/or an increased nutrient use efficiency, intrinsic yield and/or another mentioned yield-related trait, by comparison with the non-genetically modified initial plants e.g. the trait acquired by genetic modification of the target organism, and due to functional over-expression of one or more polypeptide (sequences) of table II, e.g. encoded by the corresponding nucleic acid molecules as depicted in table I, column 5 or 7, and/or homologs, in the organisms according to the invention, advantageously in the transgenic plant according to the invention or produced according to the method of the invention, at least for the duration of at least one plant generation.

[0508] A constitutive expression of the polypeptide sequences of table II, encoded by the corresponding nucleic acid molecule as depicted in table I, column 5 or 7 and/or homologs is, moreover, advantageous. On the other hand, however, an inducible expression may also appear desirable. Expression of the polypeptide sequences of the invention can be either direct to the cytoplasm or the organelles, preferably the plastids of the host cells, preferably the plant cells.

[0509] The efficiency of the expression of the sequences of the of table II, encoded by the corresponding nucleic acid molecule as depicted in table I, column 5 or 7 and/or homologs can be determined, for example, in vitro by shoot meristem propagation. In addition, an expression of the sequences of table II, encoded by the corresponding nucleic acid molecule as depicted in table I, column 5 or 7 and/or homologs modified in nature and level and its effect on yield, e.g. on an increased yield-related trait, for example enhanced tolerance to abiotic environmental stress, for example an increased drought tolerance and/or low temperature tolerance and/or an increased nutrient use efficiency, but also on the metabolic pathways performance can be tested on test plants in greenhouse trials.

[0510] An additional object of the invention comprises transgenic organisms such as trans-genic plants transformed by an expression cassette containing sequences of as depicted in table I, column 5 or 7 according to the invention or DNA sequences hybridizing therewith, as well as transgenic cells, tissue, parts and reproduction material of such plants. Particular preference is given in this case to transgenic crop plants such as by way of example barley, wheat, rye, oats, corn, soybean, rice, cotton, sugar beet, oilseed rape and canola, sunflower, flax, hemp, thistle, potatoes, tobacco, tomatoes, tapioca, cassava, arrowroot, alfalfa, lettuce and the various tree, nut and vine species.

[0511] In one embodiment of the invention transgenic plants transformed by an expression cassette containing or comprising nucleic acid molecules or sequences as depicted in table I, column 5 or 7, in particular of table IIB, according to the invention or DNA sequences hybridizing therewith are selected from the group comprising corn, soy, oil seed rape (including canola and winter oil seed rape), cotton, wheat and rice.

[0512] For the purposes of the invention plants are mono- and dicotyledonous plants, mosses or algae, especially plants, for example in one embodiment monocotyledonous plants, or for example in another embodiment dicotyledonous plants. A further refinement according to the invention are transgenic plants as described above which contain a nucleic acid sequence or construct according to the invention or a expression cassette according to the invention.

[0513] However, transgenic also means that the nucleic acids according to the invention are located at their natural position in the genome of an organism, but that the sequence, e.g. the coding sequence or a regulatory sequence, for example the promoter sequence, has been modified in comparison with the natural sequence. Preferably, transgenic/recombinant is to be understood as meaning the transcription of one or more nucleic acids or molecules of the invention and being shown in table I, occurs at a non-natural position in the genome. In one embodiment, the expression of the nucleic acids or molecules is homologous. In another embodiment, the expression of the nucleic acids or molecules is heterologous. This expression can be transiently or of a sequence integrated stably into the genome.

[0514] The term “transgenic plants” used in accordance with the invention also refers to the progeny of a transgenic plant, for example the T1, T2, T3 and subsequent plant generations or the BC1, BC2, BC3 and subsequent plant generations. Thus, the transgenic plants according to the invention can be raised and selfed or crossed with other individuals in order to obtain further transgenic plants according to the invention. Transgenic plants may also be obtained by propagating transgenic plant cells vegetatively. The present invention also relates to transgenic plant material, which can be derived from a transgenic plant population according to the invention. Such material includes plant cells and certain tissues, organs and parts of plants in all their manifestations, such as seeds, leaves, anthers, fibers, tubers, roots, root hairs, stems, embryo, calli, cotelydons, petioles, harvested material, plant tissue, reproductive tissue and cell cultures, which are derived from the actual transgenic plant and/or can be used for bringing about the transgenic plant. Any transformed plant obtained according to the invention can be used in a conventional breeding scheme or in in vitro plant propagation to produce more transformed plants with the same characteristics and/or can be used to introduce the same characteristic in other varieties of the same or related species. Such plants are also part of the invention. Seeds obtained from the transformed plants genetically also contain the same characteristic and are part of the invention. As mentioned before, the present invention is in principle applicable to any plant and crop that can be transformed with any of the transformation method known to those skilled in the art.

[0515] Advantageous inducible plant promoters are by way of example the PRP1 promoter (Ward et al., Plant. Mol. Biol. 22361 (1993)), a promoter inducible by benzenesulfonamide (EP 388 186), a promoter inducible by tetracycline (Gatz et al., Plant J. 2, 397 (1992)), a promoter inducible by salicylic acid (WO 95/19443), a promoter inducible by abscisic acid (EP 335 528) and a promoter inducible by ethanol or cyclohexanone (WO 93/21334). Other examples of plant promoters which can advantageously be used are the promoter of cytoplasmic FBPase from potato, the ST-LSI promoter from potato (Stockhaus et al., EMBO J. 8, 2445 (1989)), the promoter of phosphoribosyl pyrophosphate amidotransferase from Glycine max (see also gene bank accession number U87999) or a nodiene-specific promoter as described in EP 249 676.

[0516] Particular advantageous are those promoters which ensure expression upon onset of abiotic stress conditions. Particular advantageous are those promoters which ensure expression upon onset of low temperature conditions, e.g. at the onset of chilling and/or freezing temperatures as defined hereinabove, e.g. for the expression of nucleic acid molecules as shown in table VIIIb. Advantageous are those promoters which ensure expression upon conditions of limited nutrient availability, e.g. the onset of limited nitrogen sources in case the nitrogen of the soil or nutrient is exhausted, e.g. for the expression of the nucleic acid molecules or their gene products as shown in table VIIIa. Particular advantageous are those promoters which ensure expression upon onset of water deficiency, as defined hereinabove, e.g. for the expression of the nucleic acid molecules or their gene products as shown in table VIIIc. Particular advantageous are those promoters which ensure expression upon onset of standard growth conditions, e.g. under condition without stress and deficient nutrient provision, e.g. for the expression of the nucleic acid molecules or their gene products as shown in table VIIId.

[0517] Such promoters are known to the person skilled in the art or can be isolated from genes which are induced under the conditions mentioned above. In one embodiment, seed-specific promoters may be used for monocotylodonous or dicotylodonous plants.

[0518] In principle all natural promoters with their regulation sequences can be used like those named above for the expression cassette according to the invention and the method according to the invention. Over and above this, synthetic promoters may also advantageously be used. In the preparation of an expression cassette various DNA fragments can be manipulated in order to obtain a nucleotide sequence, which usefully reads in the correct direction and is equipped with a correct reading frame. To connect the DNA fragments (=nucleic acids according to the invention) to one another adaptors or linkers may be attached to the fragments. The promoter and the terminator regions can usefully be provided in the transcription direction with a linker or polylinker containing one or more restriction points for the insertion of this sequence. Generally, the linker has 1 to 10, mostly 1 to 8, preferably 2 to 6, restriction points. In general the size of the linker inside the regulatory region is less than 100 bp, frequently less than 60 bp, but at least 5 bp. The promoter may be both native or homologous as well as foreign or heterologous to the host organism, for example to the host plant. In the 5′-3′ transcription direction the expression cassette contains the promoter, a DNA sequence which shown in table I and a region for transcription termination. Different termination regions can be exchanged for one another in any desired fashion.

[0519] As also used herein, the terms “nucleic acid” and “nucleic acid molecule” are intended to include DNA molecules (e.g. cDNA or genomic DNA) and RNA molecules (e.g. mRNA) and analogs of the DNA or RNA generated using nucleotide analogs. This term also encompasses untranslated sequence located at both the 3′ and 5′ ends of the coding region of the gene—at least about 1000 nucleotides of sequence upstream from the 5′ end of the coding region and at least about 200 nucleotides of sequence downstream from the 3′ end of the coding region of the gene. The nucleic acid molecule can be single-stranded or double-stranded, but preferably is double-stranded DNA.

[0520] An “isolated” nucleic acid molecule is one that is substantially separated from other nucleic acid molecules, which are present in the natural source of the nucleic acid. That means other nucleic acid molecules are present in an amount less than 5% based on weight of the amount of the desired nucleic acid, preferably less than 2% by weight, more preferably less than 1% by weight, most preferably less than 0.5% by weight. Preferably, an “isolated” nucleic acid is free of some of the sequences that naturally flank the nucleic acid (i.e., sequences located at the 5′ and 3′ ends of the nucleic acid) in the genomic DNA of the organism from which the nucleic acid is derived. For example, in various embodiments, the isolated yield increasing, for example, low temperature resistance and/or tolerance related protein (YRP) encoding nucleic acid molecule can contain less than about 5 kb, 4 kb, 3 kb, 2 kb, 1 kb, 0.5 kb or 0.1 kb of nucleotide sequences which naturally flank the nucleic acid molecule in genomic DNA of the cell from which the nucleic acid is derived. Moreover, an “isolated” nucleic acid molecule, such as a cDNA molecule, can be free from some of the other cellular material with which it is naturally associated, or culture medium when produced by recombinant techniques, or chemical precursors or other chemicals when chemically synthesized.

[0521] A nucleic acid molecule of the present invention, e.g., a nucleic acid molecule encoding an YRP or a portion thereof which confers increased yield, e.g. an increased yield-related trait, e.g. an enhanced tolerance to abiotic environmental stress and/or increased nutrient use efficiency and/or enhanced cycling drought tolerance in plants, can be isolated using standard molecular biological techniques and the sequence information provided herein. For example, an A. thaliana YRP encoding cDNA can be isolated from a A. thaliana c-DNA library or a Synechocystis sp., Brassica napus, Glycine max, Zea mays or Oryza sativa YRP encoding cDNA can be isolated from a Synechocystis sp., Brassica napus, Glycine max, Zea mays or Oryza sativa c-DNA library respectively using all or portion of one of the sequences shown in table I. Moreover, a nucleic acid molecule encompassing all or a portion of one of the sequences of table I can be isolated by the polymerase chain reaction using oligonucleotide primers designed based upon this sequence. For example, mRNA can be isolated from plant cells (e.g., by the guanidinium-thiocyanate extraction procedure of Chirgwin et al., Biochemistry 18, 5294 (1979)) and cDNA can be prepared using reverse transcriptase (e.g., Moloney MLV reverse transcriptase, available from Gibco/BRL, Bethesda, Md.; or AMV reverse transcriptase, available from Seikagaku America, Inc., St. Petersburg, Fla.). Synthetic oligonucleotide primers for polymerase chain reaction amplification can be designed based upon one of the nucleotide sequences shown in table I. A nucleic acid molecule of the invention can be amplified using cDNA or, alternatively, genomic DNA, as a template and appropriate oligonucleotide primers according to standard PCR amplification techniques. The nucleic acid molecule so amplified can be cloned into an appropriate vector and characterized by DNA sequence analysis. Furthermore, oligonucleotides corresponding to a YRP encoding nucleotide sequence can be prepared by standard synthetic techniques, e.g., using an automated DNA synthesizer.

[0522] In a embodiment, an isolated nucleic acid molecule of the invention comprises one of the nucleotide sequences or molecules as shown in table I encoding the YRP (i.e., the “coding region”), as well as a 5′ untranslated sequence and 3′ untranslated sequence.

[0523] Moreover, the nucleic acid molecule of the invention can comprise only a portion of the coding region of one of the sequences or molecules of a nucleic acid of table I, for example, a fragment which can be used as a probe or primer or a fragment encoding a biologically active portion of a YRP.

[0524] Portions of proteins encoded by the YRP encoding nucleic acid molecules of the invention are preferably biologically active portions described herein. As used herein, the term “biologically active portion of” a YRP is intended to include a portion, e.g. a domain/motif, that confers an increased yield, e.g. an increased or enhanced an yield-related trait, e.g. an increased low temperature resistance and/or tolerance in a plant. To determine whether a YRP, or a biologically active portion thereof, results in an increased yield, e.g. increased or enhanced an yield related trait, e.g. increased the low temperature resistance and/or tolerance an analysis of a plant comprising the YRP may be performed. Such analysis methods are well known to those skilled in the art, as detailed in the Examples. More specifically, nucleic acid fragments encoding biologically active portions of a YRP can be prepared by isolating a portion of one of the sequences of the nucleic acid of table I expressing the encoded portion of the YRP or peptide (e.g., by recombinant expression in vitro) and assessing the activity of the encoded portion of the YRP or peptide.

[0525] Biologically active portions of a YRP are encompassed by the present invention and include peptides comprising amino acid sequences derived from the amino acid sequence of a YRP encoding gene, or the amino acid sequence of a protein homologous to a YRP, which include fewer amino acids than a full length YRP or the full length protein which is homologous to a YRP, and exhibits at least some enzymatic or biological activity of a YRP. Typically, biologically active portions (e.g., peptides which are, for example, 5, 10, 15, 20, 30, 35, 36, 37, 38, 39, 40, 50, 100 or more amino acids in length) comprise a domain or motif with at least one activity of a YRP. Moreover, other biologically active portions in which other regions of the protein are deleted, can be prepared by recombinant techniques and evaluated for one or more of the activities described herein. Preferably, the biologically active portions of a YRP include one or more selected domains/motifs or portions thereof having biological activity.

[0526] The term “biological active portion” or “biological activity” means a polypeptide as depicted in table II, column 3 or a portion of said polypeptide which still has at least 10% or 20%, preferably 30%, 40%, 50% or 60%, especially preferably 70%, 75%, 80%, 90% or 95% of the enzymatic or biological activity of the natural or starting enzyme or protein.

[0527] In the process according to the invention nucleic acid sequences or molecules can be used, which, if appropriate, contain synthetic, non-natural or modified nucleotide bases, which can be incorporated into DNA or RNA. Said synthetic, non-natural or modified bases can for example increase the stability of the nucleic acid molecule outside or inside a cell. The nucleic acid molecules of the invention can contain the same modifications as aforementioned.

[0528] As used in the present context the term “nucleic acid molecule” may also encompass the untranslated sequence or molecule located at the 3′ and at the 5′ end of the coding gene region, for example at least 500, preferably 200, especially preferably 100, nucleotides of the sequence upstream of the 5′ end of the coding region and at least 100, preferably 50, especially preferably 20, nucleotides of the sequence downstream of the 3′ end of the coding gene region. It is often advantageous only to choose the coding region for cloning and expression purposes.

[0529] Preferably, the nucleic acid molecule used in the process according to the invention or the nucleic acid molecule of the invention is an isolated nucleic acid molecule. In one embodiment, the nucleic acid molecule of the invention is the nucleic acid molecule used in the process of the invention.

[0530] An “isolated” polynucleotide or nucleic acid molecule is separated from other polynucleotides or nucleic acid molecules, which are present in the natural source of the nucleic acid molecule. An isolated nucleic acid molecule may be a chromosomal fragment of several kb, or preferably, a molecule only comprising the coding region of the gene. Accordingly, an isolated nucleic acid molecule of the invention may comprise chromosomal regions, which are adjacent 5′ and 3′ or further adjacent chromosomal regions, but preferably comprises no such sequences which naturally flank the nucleic acid molecule sequence in the genomic or chromosomal context in the organism from which the nucleic acid molecule originates (for example sequences which are adjacent to the regions encoding the 5′- and 3′-UTRs of the nucleic acid molecule). In various embodiments, the isolated nucleic acid molecule used in the process according to the invention may, for example comprise less than approximately 5 kb, 4 kb, 3 kb, 2 kb, 1 kb, 0.5 kb or 0.1 kb nucleotide sequences which naturally flank the nucleic acid molecule in the genomic DNA of the cell from which the nucleic acid molecule originates.

[0531] The nucleic acid molecules used in the process, for example the polynucleotide of the invention or of a part thereof can be isolated using molecular-biological standard techniques and the sequence information provided herein. Also, for example a homologous sequence or homologous, conserved sequence regions at the DNA or amino acid level can be identified with the aid of comparison algorithms. The former can be used as hybridization probes under standard hybridization techniques (for example those described in Sambrook et al., Molecular Cloning: A Laboratory Manual. 2nd Ed., Cold Spring Harbor Laboratory, Cold Spring Harbor Laboratory Press, Cold Spring Harbor, N.Y., 1989) for isolating further nucleic acid sequences useful in this process.

[0532] A nucleic acid molecule encompassing a complete sequence of the nucleic acid molecules used in the process, for example the polynucleotide of the invention, or a part thereof may additionally be isolated by polymerase chain reaction, oligonucleotide primers based on this sequence or on parts thereof being used. For example, a nucleic acid molecule comprising the complete sequence or part thereof can be isolated by polymerase chain reaction using oligonucleotide primers which have been generated on the basis of this very sequence. For example, mRNA can be isolated from cells (for example by means of the guanidinium thiocyanate extraction method of Chirgwin et al., Biochemistry 18, 5294 (1979)) and cDNA can be generated by means of reverse transcriptase (for example Moloney, MLV reverse transcriptase, available from Gibco/BRL, Bethesda, Md., or AMV reverse transcriptase, obtainable from Seikagaku America, Inc., St. Petersburg, Fla.).

[0533] Synthetic oligonucleotide primers for the amplification, e.g. as shown in table III, column 7, by means of polymerase chain reaction can be generated on the basis of a sequence shown herein, for example the sequence shown in table I, columns 5 and 7 or the sequences derived from table II, columns 5 and 7.

[0534] Moreover, it is possible to identify a conserved protein by carrying out protein sequence alignments with the polypeptide encoded by the nucleic acid molecules of the present invention, in particular with the sequences encoded by the nucleic acid molecule shown in column 5 or 7 of table I, from which conserved regions, and in turn, degenerate primers can be derived. Conserved regions are those, which show a very little variation in the amino acid in one particular position of several homologs from different origin. The consensus sequence and polypeptide motifs shown in column 7 of table IV, are derived from said alignments. Moreover, it is possible to identify conserved regions from various organisms by carrying out protein sequence alignments with the polypeptide encoded by the nucleic acid of the present invention, in particular with the sequences encoded by the polypeptide molecule shown in column 5 or 7 of table II, from which conserved regions, and in turn, degenerate primers can be derived.

[0535] In one advantageous embodiment, in the method of the present invention the activity of a polypeptide comprising or consisting of a consensus sequence or a polypeptide motif shown in table IV, column 7 is increased and in one another embodiment, the present invention relates to a polypeptide comprising or consisting of a consensus sequence or a polypeptide motif shown in table IV, column 7 whereby less than 20, preferably less than 15 or 10, preferably less than 9, 8, 7, or 6, more preferred less than 5 or 4, even more preferred less then 3, even more preferred less then 2, even more preferred 0 of the amino acids positions indicated can be replaced by any amino acid. In one embodiment not more than 15%, preferably 10%, even more preferred 5%, 4%, 3%, or 2%, most preferred 1% or 0% of the amino acid position indicated by a letter are/is replaced another amino acid. In one embodiment less than 20, preferably less than 15 or 10, preferably less than 9, 8, 7, or 6, more preferred less than 5 or 4, even more preferred less than 3, even more preferred less than 2, even more preferred 0 amino acids are inserted into a consensus sequence or protein motif.

[0536] The consensus sequence was derived from a multiple alignment of the sequences as listed in table II. The letters represent the one letter amino acid code and indicate that the amino acids are conserved in at least 80% of the aligned proteins, whereas the letter X stands for amino acids, which are not conserved in at least 80% of the aligned sequences. The consensus sequence starts with the first conserved amino acid in the alignment, and ends with the last conserved amino acid in the alignment of the investigated sequences. The number of given X indicates the distances between conserved amino acid residues, e.g. Y-x(21,23)-F means that conserved tyrosine and phenylalanine residues in the alignment are separated from each other by minimum 21 and maximum 23 amino acid residues in the alignment of all investigated sequences.

[0537] Conserved domains were identified from all sequences and are described using a subset of the standard Prosite notation, e.g. the pattern Y-x(21,23)-[FW] means that a conserved tyrosine is separated by minimum 21 and maximum 23 amino acid residues from either a phenylalanine or tryptophane. Patterns had to match at least 80% of the investigated proteins. Conserved patterns were identified with the software tool MEME version 3.5.1 or manually. MEME was developed by Timothy L. Bailey and Charles Elkan, Dept. of Computer Science and Engeneering, University of California, San Diego, USA and is described by Timothy L. Bailey and Charles Elkan (Fitting a mixture model by expectation maximization to discover motifs in biopolymers, Proceedings of the Second International Conference on Intelligent Systems for Molecular Biology, pp. 28-36, AAAI Press, Menlo Park, Calif., 1994). The source code for the stand-alone program is public available from the San Diego Supercomputer centre (http://meme.sdsc.edu). For identifying common motifs in all sequences with the software tool MEME, the following settings were used: -maxsize 500000, -nmotifs 15, -evt 0.001, -maxw 60, -distance 1e-3, -minsites number of sequences used for the analysis. Input sequences for MEME were non-aligned sequences in Fasta format. Other parameters were used in the default settings in this software version. Prosite patterns for conserved domains were generated with the software tool Pratt version 2.1 or manually. Pratt was developed by Inge Jonassen, Dept. of Informatics, University of Bergen, Norway and is described by Jonassen et al. (I. Jonassen, J. F. Collins and D. G. Higgins, Finding flexible patterns in unaligned protein sequences, Protein Science 4 (1995), pp. 1587-1595; I. Jonassen, Efficient discovery of conserved patterns using a pattern graph, Submitted to CABIOS Febr. 1997]. The source code (ANSI C) for the stand-alone program is public available, e.g. at established Bioinformatic centers like EBI (European Bioinformatics Institute). For generating patterns with the software tool Pratt, following settings were used: PL (max Pattern Length): 100, PN (max Nr of Pattern Symbols): 100, PX (max Nr of consecutive x's): 30, FN (max Nr of flexible spacers): 5, FL (max Flexibility): 30, FP (max Flex.Product): 10, ON (max number patterns): 50. Input sequences for Pratt were distinct regions of the protein sequences exhibiting high similarity as identified from software tool MEME. The minimum number of sequences, which have to match the generated patterns (CM, min Nr of Seqs to Match) was set to at least 80% of the provided sequences. Parameters not mentioned here were used in their default settings. The Prosite patterns of the conserved domains can be used to search for protein sequences matching this pattern. Various established Bioinformatic centres provide public internet portals for using those patterns in database searches (e.g. PIR (Protein Information Resource, located at Georgetown University Medical Center) or ExPASy (Expert Protein Analysis System)). Alternatively, stand-alone software is available, like the program Fuzzpro, which is part of the EMBOSS software package. For example, the program Fuzzpro not only allows to search for an exact pattern-protein match but also allows to set various ambiguities in the performed search.

[0538] The alignment was performed with the software ClustalW (version 1.83) and is described by Thompson et al. (Nucleic Acids Research 22, 4673 (1994)). The source code for the stand-alone program is public available from the European Molecular Biology Laboratory; Heidelberg, Germany. The analysis was performed using the default parameters of ClustalW v1.83 (gap open penalty: 10.0; gap extension penalty: 0.2; protein matrix: Gonnet; protein/DNA endgap: −1; protein/DNA gapdist: 4).

[0539] Degenerated primers can then be utilized by PCR for the amplification of fragments of novel proteins having above-mentioned activity, e.g. conferring increased yield, e.g. the increased yield-related trait, in particular, the enhanced tolerance to abiotic environmental stress, e.g. low temperature tolerance, cycling drought tolerance, water use efficiency, nutrient (e.g. nitrogen) use efficiency and/or increased intrinsic yield as compared to a corresponding, e.g. non-transformed, wild type plant cell, plant or part thereof after increasing the expression or activity or having the activity of a protein as shown in table II, column 3 or further functional homologs of the polypeptide of the invention from other organisms.

[0540] These fragments can then be utilized as hybridization probe for isolating the complete gene sequence. As an alternative, the missing 5′ and 3′ sequences can be isolated by means of RACE-PCR. A nucleic acid molecule according to the invention can be amplified using cDNA or, as an alternative, genomic DNA as template and suitable oligonucleotide primers, following standard PCR amplification techniques. The nucleic acid molecule amplified thus can be cloned into a suitable vector and characterized by means of DNA sequence analysis. Oligonucleotides, which correspond to one of the nucleic acid molecules used in the process can be generated by standard synthesis methods, for example using an automatic DNA synthesizer.

[0541] Nucleic acid molecules which are advantageously for the process according to the invention can be isolated based on their homology to the nucleic acid molecules disclosed herein using the sequences or part thereof as or for the generation of a hybridization probe and following standard hybridization techniques under stringent hybridization conditions. In this context, it is possible to use, for example, isolated one or more nucleic acid molecules of at least 15, 20, 25, 30, 35, 40, 50, 60 or more nucleotides, preferably of at least 15, 20 or 25 nucleotides in length which hybridize under stringent conditions with the above-described nucleic acid molecules, in particular with those which encompass a nucleotide sequence of the nucleic acid molecule used in the process of the invention or encoding a protein used in the invention or of the nucleic acid molecule of the invention. Nucleic acid molecules with 30, 50, 100, 250 or more nucleotides may also be used.

[0542] The term “homology” means that the respective nucleic acid molecules or encoded proteins are functionally and/or structurally equivalent. The nucleic acid molecules that are homologous to the nucleic acid molecules described above and that are derivatives of said nucleic acid molecules are, for example, variations of said nucleic acid molecules which represent modifications having the same biological function, in particular encoding proteins with the same or substantially the same biological function. They may be naturally occurring variations, such as sequences from other plant varieties or species, or mutations. These mutations may occur naturally or may be obtained by mutagenesis techniques. The allelic variations may be naturally occurring allelic variants as well as synthetically produced or genetically engineered variants. Structurally equivalents can, for example, be identified by testing the binding of said polypeptide to antibodies or computer based predictions. Structurally equivalent have the similar immunological characteristic, e.g. comprise similar epitopes.

[0543] By “hybridizing” it is meant that such nucleic acid molecules hybridize under conventional hybridization conditions, preferably under stringent conditions such as described by, e.g., Sambrook (Molecular Cloning; A Laboratory Manual, 2nd Edition, Cold Spring Harbor Laboratory Press, Cold Spring Harbor, N.Y. (1989)) or in Current Protocols in Molecular Biology, John Wiley & Sons, N.Y. (1989), 6.3.1-6.3.6.

[0544] According to the invention, DNA as well as RNA molecules of the nucleic acid of the invention can be used as probes. Further, as template for the identification of functional homologues Northern blot assays as well as Southern blot assays can be performed. The Northern blot assay advantageously provides further information about the expressed gene product: e.g. expression pattern, occurrence of processing steps, like splicing and capping, etc. The Southern blot assay provides additional information about the chromosomal localization and organization of the gene encoding the nucleic acid molecule of the invention.

[0545] A preferred, non-limiting example of stringent hybridization conditions are hybridizations in 6× sodium chloride/sodium citrate (=SSC) at approximately 45° C., followed by one or more wash steps in 0.2×SSC, 0.1% SDS at 50 to 65° C., for example at 50° C., 55° C. or 60° C. The skilled worker knows that these hybridization conditions differ as a function of the type of the nucleic acid and, for example when organic solvents are present, with regard to the temperature and concentration of the buffer. The temperature under “standard hybridization conditions” differs for example as a function of the type of the nucleic acid between 42° C. and 58° C., preferably between 45° C. and 50° C. in an aqueous buffer with a concentration of 0.1×, 0.5×, 1×, 2×, 3×, 4× or 5×SSC (pH 7.2). If organic solvent(s) is/are present in the above-mentioned buffer, for example 50% formamide, the temperature under standard conditions is approximately 40° C., 42° C. or 45° C. The hybridization conditions for DNA:DNA hybrids are preferably for example 0.1×SSC and 20° C., 25° C., 30° C., 35° C., 40° C. or 45° C., preferably between 30° C. and 45° C. The hybridization conditions for DNA:RNA hybrids are preferably for example 0.1×SSC and 30° C., 35° C., 40° C., 45° C., 50° C. or 55° C., preferably between 45° C. and 55° C. The above-mentioned hybridization temperatures are determined for example for a nucleic acid approximately 100 bp (=base pairs) in length and a G+C content of 50% in the absence of form amide. The skilled worker knows to determine the hybridization conditions required with the aid of textbooks, for example the ones mentioned above, or from the following textbooks: Sambrook et al., “Molecular Cloning”, Cold Spring Harbor Laboratory, 1989; Hames and Higgins (Ed.) 1985, “Nucleic Acids Hybridization: A Practical Approach”, IRL Press at Oxford University Press, Oxford; Brown (Ed.) 1991, “Essential Molecular Biology: A Practical Approach”, IRL Press at Oxford University Press, Oxford.

[0546] A further example of one such stringent hybridization condition is hybridization at 4×SSC at 65° C., followed by a washing in 0.1×SSC at 65° C. for one hour. Alternatively, an exemplary stringent hybridization condition is in 50% formamide, 4×SSC at 42° C. Further, the conditions during the wash step can be selected from the range of conditions delimited by low-stringency conditions (approximately 2×SSC at 50° C.) and high-stringency conditions (approximately 0.2×SSC at 50° C., preferably at 65° C.) (20×SSC: 0.3 M sodium citrate, 3 M NaCl, pH 7.0). In addition, the temperature during the wash step can be raised from low-stringency conditions at room temperature, approximately 22° C., to higher-stringency conditions at approximately 65° C. Both of the parameters salt concentration and temperature can be varied simultaneously, or else one of the two parameters can be kept constant while only the other is varied. Denaturants, for example formamide or SDS, may also be employed during the hybridization. In the presence of 50% formamide, hybridization is preferably effected at 42° C. Relevant factors like 1) length of treatment, 2) salt conditions, 3) detergent conditions, 4) competitor DNAs, 5) temperature and 6) probe selection can be combined case by case so that not all possibilities can be mentioned herein.

[0547] Thus, in a preferred embodiment, Northern blots are prehybridized with Rothi-Hybri-Quick buffer (Roth, Karlsruhe) at 68° C. for 2 h. Hybridization with radioactive labelled probe is done overnight at 68° C. Subsequent washing steps are performed at 68° C. with 1×SSC. For Southern blot assays the membrane is prehybridized with Rothi-Hybri-Quick buffer (Roth, Karlsruhe) at 68° C. for 2 h. The hybridization with radioactive labelled probe is conducted over night at 68° C. Subsequently the hybridization buffer is discarded and the filter shortly washed using 2×SSC; 0.1% SDS. After discarding the washing buffer new 2×SSC; 0.1% SDS buffer is added and incubated at 68° C. for 15 minutes. This washing step is performed twice followed by an additional washing step using 1×SSC; 0.1% SDS at 68° C. for 10 min.

[0548] Some examples of conditions for DNA hybridization (Southern blot assays) and wash step are shown herein below:

(1) Hybridization conditions can be selected, for example, from the following conditions:

### (a) 4×SSC at 65° C.,

### (b) 6×SSC at 45° C.,

[0549] (c) 6×SSC, 100 mg/ml denatured fragmented fish sperm DNA at 68° C.,
(d) 6×SSC, 0.5% SDS, 100 mg/ml denatured salmon sperm DNA at 68° C.,
(e) 6×SSC, 0.5% SDS, 100 mg/ml denatured fragmented salmon sperm DNA, 50% form amide at 42° C.,
(f) 50% formamide, 4×SSC at 42° C.,
(g) 50% (v/v) formamide, 0.1% bovine serum albumin, 0.1% Ficoll, 0.1% polyvinylpyrrolidone, 50 mM sodium phosphate buffer pH 6.5, 750 mM NaCl, 75 mM sodium citrate at 42° C.,
(h) 2× or 4×SSC at 50° C. (low-stringency condition), or
(i) 30 to 40% formamide, 2× or 4×SSC at 42° C. (low-stringency condition).
(2) Wash steps can be selected, for example, from the following conditions:
(a) 0.015 M NaCl/0.0015 M sodium citrate/0.1% SDS at 50° C.

### (b) 0.1×SSC at 65° C.

### (c) 0.1×SSC, 0.5% SDS at 68° C.

[0550] (d) 0.1×SSC, 0.5% SDS, 50% formamide at 42° C.

### (e) 0.2×SSC, 0.1% SDS at 42° C.

[0551] (f) 2×SSC at 65° C. (low-stringency condition).

[0552] Polypeptides having above-mentioned activity, i.e. conferring increased yield, e.g. an increased yield-related trait as mentioned herein, e.g. increased abiotic stress tolerance, e.g. low temperature tolerance, e.g. with increased nutrient use efficiency, and/or water use efficiency and/or increased intrinsic yield as compared to a corresponding, e.g. non-transformed, wild type plant cell, plant or part thereof, derived from other organisms, can be encoded by other DNA sequences which hybridize to the sequences shown in table I, columns 5 and 7 under relaxed hybridization conditions and which code on expression for peptides conferring the increased yield, e.g. an increased yield-related trait as mentioned herein, e.g. increased abiotic stress tolerance, e.g. low temperature tolerance or enhanced cold tolerance, e.g. with increased nutrient use efficiency, and/or water use efficiency and/or increased intrinsic yield, as compared to a corresponding, e.g. non-transformed, wild type plant cell, plant or part thereof.

[0553] Further, some applications have to be performed at low stringency hybridization conditions, without any consequences for the specificity of the hybridization. For example, a Southern blot analysis of total DNA could be probed with a nucleic acid molecule of the present invention and washed at low stringency (55° C. in 2×SSPE, 0.1% SDS). The hybridization analysis could reveal a simple pattern of only genes encoding polypeptides of the present invention or used in the process of the invention, e.g. having the herein-mentioned activity of enhancing the increased yield, e.g. an increased yield-related trait as mentioned herein, e.g. increased abiotic stress tolerance, e.g. increased low temperature tolerance or enhanced cold tolerance, e.g. with increased nutrient use efficiency, and/or water use efficiency and/or increased intrinsic yield, as compared to a corresponding, e.g. non-transformed, wild type plant cell, plant or part thereof. A further example of such low-stringent hybridization conditions is 4×SSC at 50° C. or hybridization with 30 to 40% formamide at 42° C. Such molecules comprise those which are fragments, analogues or derivatives of the polypeptide of the invention or used in the process of the invention and differ, for example, by way of amino acid and/or nucleotide deletion(s), insertion(s), substitution (s), addition(s) and/or recombination (s) or any other modification(s) known in the art either alone or in combination from the above-described amino acid sequences or their underlying nucleotide sequence(s). However, it is preferred to use high stringency hybridization conditions.

[0554] Hybridization should advantageously be carried out with fragments of at least 5, 10, 15, 20, 25, 30, 35 or 40 bp, advantageously at least 50, 60, 70 or 80 bp, preferably at least 90, 100 or 110 bp. Most preferably are fragments of at least 15, 20, 25 or 30 bp. Preferably are also hybridizations with at least 100 bp or 200, very especially preferably at least 400 bp in length. In an especially preferred embodiment, the hybridization should be carried out with the entire nucleic acid sequence with conditions described above.

[0555] The terms “fragment”, “fragment of a sequence” or “part of a sequence” mean a truncated sequence of the original sequence referred to. The truncated sequence (nucleic acid or protein sequence) can vary widely in length; the minimum size being a sequence of sufficient size to provide a sequence with at least a comparable function and/or activity of the original sequence or molecule referred to or hybridizing with the nucleic acid molecule of the invention or used in the process of the invention under stringent conditions, while the maximum size is not critical. In some applications, the maximum size usually is not substantially greater than that required to provide the desired activity and/or function(s) of the original sequence.

[0556] Typically, the truncated amino acid sequence or molecule will range from about 5 to about 310 amino acids in length. More typically, however, the sequence will be a maximum of about 250 amino acids in length, preferably a maximum of about 200 or 100 amino acids. It is usually desirable to select sequences of at least about 10, 12 or 15 amino acids, up to a maximum of about 20 or 25 amino acids.

[0557] The term “epitope” relates to specific immunoreactive sites within an antigen, also known as antigenic determinates. These epitopes can be a linear array of monomers in a polymeric composition—such as amino acids in a protein—or consist of or comprise a more complex secondary or tertiary structure. Those of skill will recognize that immunogens (i.e., substances capable of eliciting an immune response) are antigens; however, some antigen, such as haptens, are not immunogens but may be made immunogenic by coupling to a carrier molecule. The term “antigen” includes references to a substance to which an antibody can be generated and/or to which the antibody is specifically immunoreactive.

[0558] In one embodiment the present invention relates to a epitope of the polypeptide of the present invention or used in the process of the present invention and confers an increased yield, e.g. an increased yield-related trait as mentioned herein, e.g. increased abiotic stress tolerance, e.g. low temperature tolerance or enhanced cold tolerance, e.g. with increased nutrient use efficiency, and/or water use efficiency and/or increased intrinsic yield etc., as compared to a corresponding, e.g. non-transformed, wild type plant cell, plant or part thereof.

[0559] The term “one or several amino acids” relates to at least one amino acid but not more than that number of amino acids, which would result in a homology of below 50% identity. Preferably, the identity is more than 70% or 80%, more preferred are 85%, 90%, 91%, 92%, 93%, 94% or 95%, even more preferred are 96%, 97%, 98%, or 99% identity.

[0560] Further, the nucleic acid molecule of the invention comprises a nucleic acid molecule, which is a complement of one of the nucleotide sequences of above mentioned nucleic acid molecules or a portion thereof. A nucleic acid molecule or its sequence which is complementary to one of the nucleotide molecules or sequences shown in table I, columns 5 and 7 is one which is sufficiently complementary to one of the nucleotide molecules or sequences shown in table I, columns 5 and 7 such that it can hybridize to one of the nucleotide sequences shown in table I, columns 5 and 7, thereby forming a stable duplex. Preferably, the hybridization is performed under stringent hybridization conditions. However, a complement of one of the herein disclosed sequences is preferably a sequence complement thereto according to the base pairing of nucleic acid molecules well known to the skilled person. For example, the bases A and G undergo base pairing with the bases T and U or C, resp. and visa versa. Modifications of the bases can influence the base-pairing partner.

[0561] The nucleic acid molecule of the invention comprises a nucleotide sequence which is at least about 30%, 35%, 40% or 45%, preferably at least about 50%, 55%, 60% or 65%, more preferably at least about 70%, 80%, or 90%, and even more preferably at least about 95%, 97%, 98%, 99% or more homologous to a nucleotide sequence shown in table I, columns 5 and 7, or a portion thereof and preferably has above mentioned activity, in particular having a increasing-yield activity, e.g. increasing an yield-related trait, for example enhancing tolerance to abiotic environmental stress, for example increasing drought tolerance and/or low temperature tolerance and/or increasing nutrient use efficiency, increased intrinsic yield and/or another mentioned yield-related trait after increasing the activity or an activity of a gene as shown in table I or of a gene product, e.g. as shown in table II, column 3, by for example expression either in the cytsol or cytoplasm or in an organelle such as a plastid or mitochondria or both, preferably in plastids.

[0562] In one embodiment, the nucleic acid molecules marked in table I, column 6 with “plastidic” or gene products encoded by said nucleic acid molecules are expressed in combination with a targeting signal as described herein.

[0563] The nucleic acid molecule of the invention comprises a nucleotide sequence or molecule which hybridizes, preferably hybridizes under stringent conditions as defined herein, to one of the nucleotide sequences or molecule shown in table I, columns 5 and 7, or a portion thereof and encodes a protein having above-mentioned activity, e.g. conferring an increased yield, e.g. an increased yield-related trait, for example enhanced tolerance to abiotic environmental stress, for example an increased drought tolerance and/or low temperature tolerance and/or an increased nutrient use efficiency, increased intrinsic yield and/or another mentioned yield-related trait as compared to a corresponding, e.g. non-transformed, wild type plant cell, plant or part thereof by for example expression either in the cytsol or in an organelle such as a plastid or mitochondria or both, preferably in plastids, and optionally, the activity selected from the group consisting of said activites, i.e. 3-phosphoglycerate dehydrogenase, Adenylate kinase, B2758-protein, Cyclic nucleotide phosphodiesterase, cysteine synthase, Exopolyphosphatase, geranylgeranyl reductase, Mating hormone A-factor precursor, mitochondrial succinate-fumarate transporter, modification methylase HemK family protein, Myo-inositol transporter, oxidoreductase subunit, peptidy-prolyl-cis-trans-isomerase, protein kinase, Ribose-5-phosphate isomerase, slr1293-protein, YDR049W-protein, YJL181W-protein, and YPL109C-protein.

[0564] Moreover, the nucleic acid molecule of the invention can comprise only a portion of the coding region of one of the sequences shown in table I, columns 5 and 7, for example a fragment which can be used as a probe or primer or a fragment encoding a biologically active portion of the polypeptide of the present invention or of a polypeptide used in the process of the present invention, i.e. having above-mentioned activity, e.g. conferring an increased yield, e.g. with an increased yield-related trait, for example enhanced tolerance to abiotic environmental stress, for example an increased drought tolerance and/or low temperature tolerance and/or an increased nutrient use efficiency, increased intrinsic yield and/or another mentioned yield-related trait as compared to a corresponding, e.g. non-transformed, wild type plant cell, plant or part thereof f its activity is increased by for example expression either in the cytsol or in an organelle such as a plastid or mitochondria or both, preferably in plastids. The nucleotide sequences determined from the cloning of the present protein-according-to-the-invention-encoding gene allows for the generation of probes and primers designed for use in identifying and/or cloning its homologues in other cell types and organisms. The probe/primer typically comprises substantially purified oligonucleotide. The oligonucleotide typically comprises a region of nucleotide sequence that hybridizes under stringent conditions to at least about 12, 15 preferably about 20 or 25, more preferably about 40, 50 or 75 consecutive nucleotides of a sense strand of one of the sequences set forth, e.g., in table I, columns 5 and 7, an anti-sense sequence of one of the sequences, e.g., set forth in table I, columns 5 and 7, or naturally occurring mutants thereof. Primers based on a nucleotide of invention can be used in PCR reactions to clone homologues of the polypeptide of the invention or of the polypeptide used in the process of the invention, e.g. as the primers described in the examples of the present invention, e.g. as shown in the examples. A PCR with the primers shown in table III, column 7 will result in a fragment of the gene product as shown in table II, column 3.

[0565] Primer sets are interchangeable. The person skilled in the art knows to combine said primers to result in the desired product, e.g. in a full length clone or a partial sequence. Probes based on the sequences of the nucleic acid molecule of the invention or used in the process of the present invention can be used to detect transcripts or genomic sequences encoding the same or homologous proteins. The probe can further comprise a label group attached thereto, e.g. the label group can be a radioisotope, a fluorescent compound, an enzyme, or an enzyme co-factor. Such probes can be used as a part of a genomic marker test kit for identifying cells which express an polypeptide of the invention or used in the process of the present invention, such as by measuring a level of an encoding nucleic acid molecule in a sample of cells, e.g., detecting mRNA levels or determining, whether a genomic gene comprising the sequence of the polynucleotide of the invention or used in the processes of the present invention has been mutated or deleted.

[0566] The nucleic acid molecule of the invention encodes a polypeptide or portion thereof which includes an amino acid sequence which is sufficiently homologous to the amino acid sequence shown in table II, columns 5 and 7 such that the protein or portion thereof maintains the ability to participate in increasing yield, e.g. increasing a yield-related trait, for example enhancing tolerance to abiotic environmental stress, for example increasing drought tolerance and/or low temperature tolerance and/or increasing nutrient use efficiency, increasing intrinsic yield and/or another mentioned yield-related trait as compared to a corresponding, e.g. non-transformed, wild type plant cell, plant or part thereof, in particular increasing the activity as mentioned above or as described in the examples in plants is comprised.

[0567] As used herein, the language “sufficiently homologous” refers to proteins or portions thereof which have amino acid sequences which include a minimum number of identical or equivalent amino acid residues (e.g., an amino acid residue which has a similar side chain as an amino acid residue in one of the sequences of the polypeptide of the present invention) to an amino acid sequence shown in table II, columns 5 and 7 such that the protein or portion thereof is able to participate in increasing yield, e.g. increasing a yield-related trait, for example enhancing tolerance to abiotic environmental stress, for example increasing drought tolerance and/or low temperature tolerance and/or increasing nutrient use efficiency, increasing intrinsic yield and/or another mentioned yield-related trait as compared to a corresponding, e.g. non-transformed, wild type plant cell, plant or part thereof. For examples having the activity of a protein as shown in table II, column 3 and as described herein.

[0568] In one embodiment, the nucleic acid molecule of the present invention comprises a nucleic acid that encodes a portion of the protein of the present invention. The protein is at least about 30%, 35%, 40%, 45% or 50%, preferably at least about 55%, 60%, 65% or 70%, and more preferably at least about 75%, 80%, 85%, 90%, 91%, 92%, 93% or 94% and most preferably at least about 95%, 97%, 98%, 99% or more homologous to an entire amino acid sequence of table II, columns 5 and 7 and having above-mentioned activity, e.g. conferring an increased yield, e.g. an increased yield-related trait, for example enhanced tolerance to abiotic environmental stress, for example an increased drought tolerance and/or low temperature tolerance and/or an increased nutrient use efficiency, intrinsic yield and/or another mentioned yield-related trait as compared to a corresponding, e.g. non-transformed, wild type plant cell, plant or part thereof by for example expression either in the cytsol or in an organelle such as a plastid or mitochondria or both, preferably in plastids.

[0569] Portions of proteins encoded by the nucleic acid molecule of the invention are preferably biologically active, preferably having above-mentioned annotated activity, e.g. conferring an increased yield, e.g. an increased yield-related trait, for example enhanced tolerance to abiotic environmental stress, for example an increased drought tolerance and/or low temperature tolerance and/or an increased nutrient use efficiency, intrinsic yield and/or another mentioned yield-related trait as compared to a corresponding, e.g. non-transformed, wild type plant cell, plant or part thereof after increase of activity.

[0570] As mentioned herein, the term “biologically active portion” is intended to include a portion, e.g., a domain/motif, that confers an increased yield, e.g. an increased yield-related trait, for example enhanced tolerance to abiotic environmental stress, for example an increased drought tolerance and/or low temperature tolerance and/or an increased nutrient use efficiency, intrinsic yield and/or another mentioned yield-related trait as compared to a corresponding, e.g. non-transformed, wild type plant cell, plant or part thereof or has an immunological activity such that it is binds to an antibody binding specifically to the polypeptide of the present invention or a polypeptide used in the process of the present invention for increasing yield, e.g. increasing a yield-related trait, for example enhancing tolerance to abiotic environmental stress, for example increasing drought tolerance and/or low temperature tolerance and/or increasing nutrient use efficiency, increasing intrinsic yield and/or another mentioned yield-related trait as compared to a corresponding, e.g. non-transformed, wild type plant cell, plant or part thereof.

[0571] The invention further relates to nucleic acid molecules that differ from one of the nucleotide sequences shown in table I A, columns 5 and 7 (and portions thereof) due to degeneracy of the genetic code and thus encode a polypeptide of the present invention, in particular a polypeptide having above mentioned activity, e.g. as that polypeptides depicted by the sequence shown in table II, columns 5 and 7 or the functional homologues. Advantageously, the nucleic acid molecule of the invention comprises, or in an other embodiment has, a nucleotide sequence encoding a protein comprising, or in an other embodiment having, an amino acid sequence shown in table II, columns 5 and 7 or the functional homologues. In a still further embodiment, the nucleic acid molecule of the invention encodes a full length protein which is substantially homologous to an amino acid sequence shown in table II, columns 5 and 7 or the functional homologues. However, in one embodiment, the nucleic acid molecule of the present invention does not consist of the sequence shown in table I, preferably table IA, columns 5 and 7.

[0572] In addition, it will be appreciated by those skilled in the art that DNA sequence polymorphisms that lead to changes in the amino acid sequences may exist within a population. Such genetic polymorphism in the gene encoding the polypeptide of the invention or comprising the nucleic acid molecule of the invention may exist among individuals within a population due to natural variation.

[0573] As used herein, the terms “gene” and “recombinant gene” refer to nucleic acid molecules comprising an open reading frame encoding the polypeptide of the invention or comprising the nucleic acid molecule of the invention or encoding the polypeptide used in the process of the present invention, preferably from a crop plant or from a microorganism useful for the method of the invention. Such natural variations can typically result in 1 to 5% variance in the nucleotide sequence of the gene. Any and all such nucleotide variations and resulting amino acid polymorphisms in genes encoding a polypeptide of the invention or comprising a the nucleic acid molecule of the invention that are the result of natural variation and that do not alter the functional activity as described are intended to be within the scope of the invention.

[0574] Nucleic acid molecules corresponding to natural variants homologues of a nucleic acid molecule of the invention, which can also be a cDNA, can be isolated based on their homology to the nucleic acid molecules disclosed herein using the nucleic acid molecule of the invention, or a portion thereof, as a hybridization probe according to standard hybridization techniques under stringent hybridization conditions.

[0575] Accordingly, in another embodiment, a nucleic acid molecule of the invention is at least 15, 20, 25 or 30 nucleotides in length. Preferably, it hybridizes under stringent conditions to a nucleic acid molecule comprising a nucleotide sequence of the nucleic acid molecule of the present invention or used in the process of the present invention, e.g. comprising the sequence shown in table I, columns 5 and 7. The nucleic acid molecule is preferably at least 20, 30, 50, 100, 250 or more nucleotides in length.

[0576] The term “hybridizes under stringent conditions” is defined above. In one embodiment, the term “hybridizes under stringent conditions” is intended to describe conditions for hybridization and washing under which nucleotide sequences at least 30%, 40%, 50% or 65% identical to each other typically remain hybridized to each other. Preferably, the conditions are such that sequences at least about 70%, more preferably at least about 75% or 80%, and even more preferably at least about 85%, 90% or 95% or more identical to each other typically remain hybridized to each other.

[0577] Preferably, nucleic acid molecule of the invention that hybridizes under stringent conditions to a sequence shown in table I, columns 5 and 7 corresponds to a naturally-occurring nucleic acid molecule of the invention. As used herein, a “naturally-occurring” nucleic acid molecule refers to an RNA or DNA molecule having a nucleotide sequence that occurs in nature (e.g., encodes a natural protein). Preferably, the nucleic acid molecule encodes a natural protein having above-mentioned activity, e.g. conferring increasing yield, e.g. increasing a yield-related trait, for example enhancing tolerance to abiotic environmental stress, for example increasing drought tolerance and/or low temperature tolerance and/or increasing nutrient use efficiency, increasing intrinsic yield and/or another mentioned yield-related trait after increasing the expression or activity thereof or the activity of a protein of the invention or used in the process of the invention by for example expression the nucleic acid sequence of the gene product in the cytsol and/or in an organelle such as a plastid or mitochondria, preferably in plastids.

[0578] In addition to naturally-occurring variants of the sequences of the polypeptide or nucleic acid molecule of the invention as well as of the polypeptide or nucleic acid molecule used in the process of the invention that may exist in the population, the skilled artisan will further appreciate that changes can be introduced by mutation into a nucleotide sequence of the nucleic acid molecule encoding the polypeptide of the invention or used in the process of the present invention, thereby leading to changes in the amino acid sequence of the encoded said polypeptide, without altering the functional ability of the polypeptide, preferably not decreasing said activity.

[0579] For example, nucleotide substitutions leading to amino acid substitutions at “non-essential” amino acid residues can be made in a sequence of the nucleic acid molecule of the invention or used in the process of the invention, e.g. shown in table I, columns 5 and 7.

[0580] A “non-essential” amino acid residue is a residue that can be altered from the wild-type sequence of one without altering the activity of said polypeptide, whereas an “essential” amino acid residue is required for an activity as mentioned above, e.g. leading to increasing yield, e.g. increasing a yield-related trait, for example enhancing tolerance to abiotic environmental stress, for example increasing drought tolerance and/or low temperature tolerance and/or increasing nutrient use efficiency, increasing intrinsic yield and/or another mentioned yield-related trait as compared to a corresponding, e.g. non-transformed, wild type plant cell, plant or part thereof in an organism after an increase of activity of the polypeptide. Other amino acid residues, however, (e.g., those that are not conserved or only semi-conserved in the domain having said activity) may not be essential for activity and thus are likely to be amenable to alteration without altering said activity.

[0581] Further, a person skilled in the art knows that the codon usage between organisms can differ. Therefore, he may adapt the codon usage in the nucleic acid molecule of the present invention to the usage of the organism or the cell compartment for example of the plastid or mitochondria in which the polynucleotide or polypeptide is expressed.

[0582] Accordingly, the invention relates to nucleic acid molecules encoding a polypeptide having above-mentioned activity, in an organisms or parts thereof by for example expression either in the cytsol or in an organelle such as a plastid or mitochondria or both, preferably in plastids that contain changes in amino acid residues that are not essential for said activity. Such polypeptides differ in amino acid sequence from a sequence contained in the sequences shown in table II, columns 5 and 7 yet retain said activity described herein. The nucleic acid molecule can comprise a nucleotide sequence encoding a polypeptide, wherein the polypeptide comprises an amino acid sequence at least about 50% identical to an amino acid sequence shown in table II, columns 5 and 7 and is capable of participation in increasing yield, e.g. increasing a yield-related trait, for example enhancing tolerance to abiotic environmental stress, for example increasing drought tolerance and/or low temperature tolerance and/or increasing nutrient use efficiency, increasing intrinsic yield and/or another mentioned yield-related trait as compared to a corresponding, e.g. non-transformed, wild type plant cell, plant or part thereof after increasing its activity, e.g. its expression by for example expression either in the cytsol or in an organelle such as a plastid or mitochondria or both, preferably in plastids. Preferably, the protein encoded by the nucleic acid molecule is at least about 60% identical to the sequence shown in table II, columns 5 and 7, more preferably at least about 70% identical to one of the sequences shown in table II, columns 5 and 7, even more preferably at least about 80%, 90%, 95% homologous to the sequence shown in table II, columns 5 and 7, and most preferably at least about 96%, 97%, 98%, or 99% identical to the sequence shown in table II, columns 5 and 7.

[0583] To determine the percentage homology (=identity, herein used interchangeably) of two amino acid sequences or of two nucleic acid molecules, the sequences are written one underneath the other for an optimal comparison (for example gaps may be inserted into the sequence of a protein or of a nucleic acid in order to generate an optimal alignment with the other protein or the other nucleic acid).

[0584] The amino acid residues or nucleic acid molecules at the corresponding amino acid positions or nucleotide positions are then compared. If a position in one sequence is occupied by the same amino acid residue or the same nucleic acid molecule as the corresponding position in the other sequence, the molecules are homologous at this position (i.e. amino acid or nucleic acid “homology” as used in the present context corresponds to amino acid or nucleic acid “identity”. The percentage homology between the two sequences is a function of the number of identical positions shared by the sequences (i.e. % homology=number of identical positions/total number of positions×100). The terms “homology” and “identity” are thus to be considered as synonyms.

[0585] For the determination of the percentage homology (=identity) of two or more amino acids or of two or more nucleotide sequences several computer software programs have been developed. The homology of two or more sequences can be calculated with for example the software fasta, which presently has been used in the version fasta 3 (W. R. Pearson and D. J. Lipman, PNAS 85, 2444 (1988); W. R. Pearson, Methods in Enzymology 183, 63 (1990); W. R. Pearson and D. J. Lipman, PNAS 85, 2444 (1988); W. R. Pearson, Enzymology 183, 63 (1990)). Another useful program for the calculation of homologies of different sequences is the standard blast program, which is included in the Biomax pedant software (Biomax, Munich, Federal Republic of Germany). This leads unfortunately sometimes to suboptimal results since blast does not always include complete sequences of the subject and the querry. Nevertheless as this program is very efficient it can be used for the comparison of a huge number of sequences. The following settings are typically used for such a comparisons of sequences: —p Program Name [String]; —d Database [String]; default=nr; —i Query File [File In]; default=stdin; —e Expectation value (E) [Real]; default=10.0; —m alignment view options: 0=pairwise; 1=query-anchored showing identities; 2=query-anchored no identities; 3=flat query-anchored, show identities; 4=flat query-anchored, no identities; 5=query-anchored no identities and blunt ends; 6=flat query-anchored, no identities and blunt ends; 7=XML Blast output; 8=tabular; 9 tabular with comment lines [Integer]; default=0; —o BLAST report Output File [File Out] Optional; default=stdout; —F Filter query sequence (DUST with blastn, SEG with others) [String]; default=T; —G Cost to open a gap (zero invokes default behavior) [Integer]; default=0; —E Cost to extend a gap (zero invokes default behavior) [Integer]; default=0; —X X dropoff value for gapped alignment (in bits) (zero invokes default behavior); blastn 30, megablast 20, tblastx 0, all others 15 [Integer]; default=0; —I Show GI's in deflines [T/F]; default=F; —q Penalty for a nucleotide mismatch (blastn only) [Integer]; default=−3; —r Reward for a nucleotide match (blastn only) [Integer]; default=1; —v Number of database sequences to show one-line descriptions for (V) [Integer]; default=500; —b Number of database sequence to show alignments for (B) [Integer]; default=250; —f Threshold for extending hits, default if zero; blastp 11, blastn 0, blastx 12, tblastn 13; tblastx 13, megablast 0 [Integer]; default=0; —g Perform gapped alignment (not available with tblastx) [T/F]; default=T; —Q Query Genetic code to use [Integer]; default=1; —D DB Genetic code (for tblast[nx] only) [Integer]; default=1; —a Number of processors to use [Integer]; default=1; —O SeqAlign file [File Out] Optional; —J Believe the query defline [T/F]; default=F; —M Matrix [String]; default=BLOSUM62; —W Word size, default if zero (blastn 11, megablast 28, all others 3) [Integer]; default=0; —z Effective length of the database (use zero for the real size) [Real]; default=0; —K Number of best hits from a region to keep (off by default, if used a value of 100 is recommended) [Integer]; default=0; —P 0 for multiple hit, 1 for single hit [Integer]; default=0; —Y Effective length of the search space (use zero for the real size) [Real]; default=0; —S Query strands to search against database (for blast[nx], and tblastx); 3 is both, 1 is top, 2 is bottom [Integer]; default=3; —T Produce HTML output [T/F]; default=F; —I Restrict search of database to list of GI's [String] Optional; —U Use lower case filtering of FASTA sequence [T/F] Optional; default=F; —y X dropoff value for ungapped extensions in bits (0.0 invokes default behavior); blastn 20, megablast 10, all others 7 [Real]; default=0.0; —Z X dropoff value for final gapped alignment in bits (0.0 invokes default behavior); blastn/megablast 50, tblastx 0, all others 25 [Integer]; default=0; —R PSI-TBLASTN checkpoint file [File In] Optional; —n MegaBlast search [T/F]; default=F; —L Location on query sequence [String] Optional; —A Multiple Hits window size, default if zero (blastn/megablast 0, all others 40 [Integer]; default=0; —w Frame shift penalty (OOF algorithm for blastx) [Integer]; default=0; —t Length of the largest intron allowed in tblastn for linking HSPs (0 disables linking) [Integer]; default=0.

[0586] Results of high quality are reached by using the algorithm of Needleman and Wunsch or Smith and Waterman. Therefore programs based on said algorithms are preferred. Advantageously the comparisons of sequences can be done with the program PileUp (J. Mol. Evolution., 25, 351 (1987), Higgins et al., CABIOS 5, 151 (1989)) or preferably with the programs “Gap” and “Needle”, which are both based on the algorithms of Needleman and Wunsch (J. Mol. Biol. 48; 443 (1970)), and “BestFit”, which is based on the algorithm of Smith and Waterman (Adv. Appl. Math. 2; 482 (1981)). “Gap” and “BestFit” are part of the GCG software-package (Genetics Computer Group, 575 Science Drive, Madison, Wis., USA 53711 (1991); Altschul et al., (Nucleic Acids Res. 25, 3389 (1997)), “Needle” is part of The European Molecular Biology Open Software Suite (EMBOSS) (Trends in Genetics 16 (6), 276 (2000)). Therefore preferably the calculations to determine the percentages of sequence homology are done with the programs “Gap” or “Needle” over the whole range of the sequences. The following standard adjustments for the comparison of nucleic acid sequences were used for “Needle”: matrix: EDNAFULL, Gap_penalty: 10.0, Extend_penalty: 0.5. The following standard adjustments for the comparison of nucleic acid sequences were used for “Gap”: gap weight: 50, length weight: 3, average match: 10.000, average mismatch: 0.000.

[0587] For example a sequence, which has 80% homology with sequence SEQ ID NO: 63 at the nucleic acid level is understood as meaning a sequence which, upon comparison with the sequence SEQ ID NO: 63 by the above program “Needle” with the above parameter set, has a 80% homology.

[0588] Homology between two polypeptides is understood as meaning the identity of the amino acid sequence over in each case the entire sequence length which is calculated by comparison with the aid of the above program “Needle” using Matrix: EBLOSUM62, Gap_penalty: 8.0, Extend_penalty: 2.0.

[0589] For example a sequence which has a 80% homology with sequence SEQ ID NO: 64 at the protein level is understood as meaning a sequence which, upon comparison with the sequence SEQ ID NO: 64 by the above program “Needle” with the above parameter set, has a 80% homology.

[0590] Functional equivalents derived from the nucleic acid sequence as shown in table I, columns 5 and 7 according to the invention by substitution, insertion or deletion have at least 30%, 35%, 40%, 45% or 50%, preferably at least 55%, 60%, 65% or 70% by preference at least 80%, especially preferably at least 85% or 90%, 91%, 92%, 93% or 94%, very especially preferably at least 95%, 97%, 98% or 99% homology with one of the polypeptides as shown in table II, columns 5 and 7 according to the invention and encode polypeptides having essentially the same properties as the polypeptide as shown in table II, columns 5 and 7. Functional equivalents derived from one of the polypeptides as shown in table II, columns 5 and 7 according to the invention by substitution, insertion or deletion have at least 30%, 35%, 40%, 45% or 50%, preferably at least 55%, 60%, 65% or 70% by preference at least 80%, especially preferably at least 85% or 90%, 91%, 92%, 93% or 94%, very especially preferably at least 95%, 97%, 98% or 99% homology with one of the polypeptides as shown in table II, columns 5 and 7 according to the invention and having essentially the same properties as the polypeptide as shown in table II, columns 5 and 7.

[0591] “Essentially the same properties” of a functional equivalent is above all understood as meaning that the functional equivalent has above mentioned activity, by for example expression either in the cytsol or in an organelle such as a plastid or mitochondria or both, preferably in plastids while increasing the amount of protein, activity or function of said functional equivalent in an organism, e.g. a microorgansim, a plant or plant tissue or animal tissue, plant or animal cells or a part of the same.

[0592] A nucleic acid molecule encoding an homologous to a protein sequence of table II, columns 5 and 7 can be created by introducing one or more nucleotide substitutions, additions or deletions into a nucleotide sequence of the nucleic acid molecule of the present invention, in particular of table I, columns 5 and 7 such that one or more amino acid substitutions, additions or deletions are introduced into the encoded protein. Mutations can be introduced into the encoding sequences of table I, columns 5 and 7 by standard techniques, such as site-directed mutagenesis and PCR-mediated mutagenesis.

[0593] Preferably, conservative amino acid substitutions are made at one or more predicted non-essential amino acid residues. A “conservative amino acid substitution” is one in which the amino acid residue is replaced with an amino acid residue having a similar side chain. Families of amino acid residues having similar side chains have been defined in the art. These families include amino acids with basic side chains (e.g., lysine, arginine, histidine), acidic side chains (e.g., aspartic acid, glutamic acid), uncharged polar side chains (e.g., glycine, asparagine, glutamine, serine, threonine, tyrosine, cysteine), nonpolar side chains (e.g., alanine, valine, leucine, isoleucine, proline, phenylalanine, methionine, tryptophane), beta-branched side chains (e.g., threonine, valine, isoleucine) and aromatic side chains (e.g., tyrosine, phenylalanine, tryptophane, histidine).

[0594] Thus, a predicted nonessential amino acid residue in a polypeptide of the invention or a polypeptide used in the process of the invention is preferably replaced with another amino acid residue from the same family. Alternatively, in another embodiment, mutations can be introduced randomly along all or part of a coding sequence of a nucleic acid molecule of the invention or used in the process of the invention, such as by saturation mutagenesis, and the resultant mutants can be screened for activity described herein to identify mutants that retain or even have increased above mentioned activity, e.g. conferring increased yield, e.g. an increased yield-related trait, for example enhanced tolerance to abiotic environmental stress, for example an increased drought tolerance and/or low temperature tolerance and/or an increased nutrient use efficiency, intrinsic yield and/or another mentioned yield-related trait as compared to a corresponding, e.g. non-transformed, wild type plant cell, plant or part thereof.

[0595] Following mutagenesis of one of the sequences as shown herein, the encoded protein can be expressed recombinantly and the activity of the protein can be determined using, for example, assays described herein (see Examples).

[0596] The highest homology of the nucleic acid molecule used in the process according to the invention was found for the following database entries by Gap search.

[0597] Homologues of the nucleic acid sequences used, with the sequence shown in table I, columns 5 and 7, comprise also allelic variants with at least approximately 30%, 35%, 40% or 45% homology, by preference at least approximately 50%, 60% or 70%, more preferably at least approximately 90%, 91%, 92%, 93%, 94% or 95% and even more preferably at least approximately 96%, 97%, 98%, 99% or more homology with one of the nucleotide sequences shown or the abovementioned derived nucleic acid sequences or their homologues, derivatives or analogues or parts of these. Allelic variants encompass in particular functional variants which can be obtained by deletion, insertion or substitution of nucleotides from the sequences shown, preferably from table I, columns 5 and 7, or from the derived nucleic acid sequences, the intention being, however, that the enzyme activity or the biological activity of the resulting proteins synthesized is advantageously retained or increased.

[0598] In one embodiment of the present invention, the nucleic acid molecule of the invention or used in the process of the invention comprises the sequences shown in any of the table I, columns 5 and 7. It is preferred that the nucleic acid molecule comprises as little as possible other nucleotides not shown in any one of table I, columns 5 and 7. In one embodiment, the nucleic acid molecule comprises less than 500, 400, 300, 200, 100, 90, 80, 70, 60, 50 or 40 further nucleotides. In a further embodiment, the nucleic acid molecule comprises less than 30, or 10 further nucleotides. In one embodiment, the nucleic acid molecule use in the process of the invention is identical to the sequences shown in table I, columns 5 and 7.

[0599] Also preferred is that the nucleic acid molecule used in the process of the invention encodes a polypeptide comprising the sequence shown in table II, columns 5 and 7. In one embodiment, the nucleic acid molecule encodes less than 150, 130, 100, 80, 60, 50, 40 or 30 further amino acids. In a further embodiment, the encoded polypeptide comprises less than 20, 15, 10, 9, 8, 7, 6 or 5 further amino acids. In one embodiment used in the inventive process, the encoded polypeptide is identical to the sequences shown in table II, columns 5 and 7.

[0600] In one embodiment, the nucleic acid molecule of the invention or used in the process encodes a polypeptide comprising the sequence shown in table II, columns 5 and 7 comprises less than 100 further nucleotides. In a further embodiment, said nucleic acid molecule comprises less than 30 further nucleotides. In one embodiment, the nucleic acid molecule used in the process is identical to a coding sequence of the sequences shown in table I, columns 5 and 7.

[0601] Polypeptides (=proteins), which still have the essential biological or enzymatic activity of the polypeptide of the present invention conferring increased yield, e.g. an increased yield-related trait, for example enhanced tolerance to abiotic environmental stress, for example an increased drought tolerance and/or low temperature tolerance and/or an increased nutrient use efficiency, intrinsic yield and/or another mentioned yield-related trait as compared to a corresponding, e.g. non-transformed, wild type plant cell, plant or part thereof i.e. whose activity is essentially not reduced, are polypeptides with at least 10% or 20%, by preference 30% or 40%, especially preferably 50% or 60%, very especially preferably 80% or 90 or more of the wild type biological activity or enzyme activity, advantageously, the activity is essentially not reduced in comparison with the activity of a polypeptide shown in table II, columns 5 and 7 expressed under identical conditions.

[0602] Homologues of table I, columns 5 and 7 or of the derived sequences of table II, columns 5 and 7 also mean truncated sequences, cDNA, single-stranded DNA or RNA of the coding and noncoding DNA sequence. Homologues of said sequences are also understood as meaning derivatives, which comprise noncoding regions such as, for example, UTRs, terminators, enhancers or promoter variants. The promoters upstream of the nucleotide sequences stated can be modified by one or more nucleotide substitution(s), insertion(s) and/or deletion(s) without, however, interfering with the functionality or activity either of the promoters, the open reading frame (=ORF) or with the 3′-regulatory region such as terminators or other 3′-regulatory regions, which are far away from the ORF. It is furthermore possible that the activity of the promoters is increased by modification of their sequence, or that they are replaced completely by more active promoters, even promoters from heterologous organisms. Appropriate promoters are known to the person skilled in the art and are mentioned herein below.

[0603] In addition to the nucleic acid molecules encoding the YRPs described above, another aspect of the invention pertains to negative regulators of the activity of a nucleic acid molecules selected from the group according to table I, column 5 and/or 7, preferably column 7. Antisense polynucleotides thereto are thought to inhibit the down regulating activity of those negative regulators by specifically binding the target polynucleotide and interfering with transcription, splicing, transport, translation, and/or stability of the target polynucleotide. Methods are described in the prior art for targeting the antisense polynucleotide to the chromosomal DNA, to a primary RNA transcript, or to a processed mRNA. Preferably, the target regions include splice sites, translation initiation codons, translation termination codons, and other sequences within the open reading frame.

[0604] The term “antisense,” for the purposes of the invention, refers to a nucleic acid comprising a polynucleotide that is sufficiently complementary to all or a portion of a gene, primary transcript, or processed mRNA, so as to interfere with expression of the endogenous gene. “Complementary” polynucleotides are those that are capable of base pairing according to the standard Watson-Crick complementarity rules. Specifically, purines will base pair with pyrimidines to form a combination of guanine paired with cytosine (G:C) and adenine paired with either thymine (A:T) in the case of DNA, or adenine paired with uracil (A:U) in the case of RNA. It is understood that two polynucleotides may hybridize to each other even if they are not completely complementary to each other, provided that each has at least one region that is substantially complementary to the other. The term “antisense nucleic acid” includes single stranded RNA as well as double-stranded DNA expression cassettes that can be transcribed to produce an antisense RNA. “Active” antisense nucleic acids are antisense RNA molecules that are capable of selectively hybridizing with a negative regulator of the activity of a nucleic acid molecules encoding a polypeptide having at least 80% sequence identity with the polypeptide selected from the group according to table II, column 5 and/or 7, preferably column 7.

[0605] The antisense nucleic acid can be complementary to an entire negative regulator strand, or to only a portion thereof. In an embodiment, the antisense nucleic acid molecule is antisense to a “non-coding region” of the coding strand of a nucleotide sequence encoding a YRP. The term “non-coding region” refers to 5′ and 3′ sequences that flank the coding region that are not translated into amino acids (i.e., also referred to as 5′ and 3′ untranslated regions). The antisense nucleic acid molecule can be complementary to only a portion of the non-coding region of YRP mRNA. For example, the antisense oligonucleotide can be complementary to the region surrounding the translation start site of YRP mRNA. An antisense oligonucleotide can be, for example, about 5, 10, 15, 20, 25, 30, 35, 40, 45 or 50 nucleotides in length. Typically, the antisense molecules of the present invention comprise an RNA having 60-100% sequence identity with at least 14 consecutive nucleotides of a non-coding region of one of the nucleic acid of table I. Preferably, the sequence identity will be at least 70%, more preferably at least 75%, 80%, 85%, 90%, 95%, 98% and most preferably 99%.

[0606] An antisense nucleic acid of the invention can be constructed using chemical synthesis and enzymatic ligation reactions using procedures known in the art. For example, an antisense nucleic acid (e.g., an antisense oligonucleotide) can be chemically synthesized using naturally occurring nucleotides or variously modified nucleotides designed to increase the biological stability of the molecules or to increase the physical stability of the duplex formed between the antisense and sense nucleic acids, e.g., phosphorothioate derivatives and acridine substituted nucleotides can be used. Examples of modified nucleotides which can be used to generate the antisense nucleic acid include 5-fluorouracil, 5-bromouracil, 5-chlorouracil, 5-iodouracil, hypoxanthine, xanthine, 4-acetylcytosine, 5-(carboxyhydroxylmethyl)-uracil, 5-carboxymethylaminomethyl-2-thiouridine, 5-carboxymethylaminomethyluracil, dihydrouracil, beta-D-galactosylqueosine, inosine, N6-isopentenyladenine, 1-methylguanine, 1-methylinosine, 2,2-dimethylguanine, 2-methyladenine, 2-methylguanine, 3-methylcytosine, 5-methylcytosine, N6-adenine, 7-methylguanine, 5-methylaminomethyluracil, 5-methoxyaminomethyl-2-thiouracil, beta-D-mannosylqueosine, 5′-methoxycarboxymethyluracil, 5-methoxyuracil, 2-methylthio-N-6-isopentenyladenine, uracil-5-oxyacetic acid (v), wybutoxosine, pseudouracil, queosine, 2-thiocytosine, 5-methyl-2-thiouracil, 2-thiouracil, 4-thiouracil, 5-methyluracil, uracil-5-oxyacetic acid methylester, 5-methyl-2-thiouracil, 3-(3-amino-3-N-2-carboxypropyl)-uracil, acp3 and 2,6-diaminopurine. Alternatively, the antisense nucleic acid can be produced biologically using an expression vector into which a nucleic acid has been subcloned in an antisense orientation (i.e., RNA transcribed from the inserted nucleic acid will be of an antisense orientation to a target nucleic acid of interest, described further in the following subsection).

[0607] In yet another embodiment, the antisense nucleic acid molecule of the invention is an alpha-anomeric nucleic acid molecule. An alpha-anomeric nucleic acid molecule forms specific double-stranded hybrids with complementary RNA in which, contrary to the usual b-units, the strands run parallel to each other (Gaultier et al., Nucleic Acids. Res. 15, 6625 (1987)). The antisense nucleic acid molecule can also comprise a 2′-o-methylribonucleotide (Inoue et al., Nucleic Acids Res. 15, 6131 (1987)) or a chimeric RNA-DNA analogue (Inoue et al., FEBS Lett. 215, 327 (1987)).

[0608] The antisense nucleic acid molecules of the invention are typically administered to a cell or generated in situ such that they hybridize with or bind to cellular mRNA and/or genomic DNA. The hybridization can be by conventional nucleotide complementarity to form a stable duplex, or, for example, in the case of an antisense nucleic acid molecule which binds to DNA duplexes, through specific interactions in the major groove of the double helix. The antisense molecule can be modified such that it specifically binds to a receptor or an antigen expressed on a selected cell surface, e.g., by linking the antisense nucleic acid molecule to a peptide or an antibody which binds to a cell surface receptor or antigen. The antisense nucleic acid molecule can also be delivered to cells using the vectors described herein. To achieve sufficient intracellular concentrations of the antisense molecules, vector constructs in which the antisense nucleic acid molecule is placed under the control of a strong prokaryotic, viral, or eukaryotic (including plant) promoter are preferred.

[0609] As an alternative to antisense polynucleotides, ribozymes, sense polynucleotides, or double stranded RNA (dsRNA) can be used to reduce expression of a YRP polypeptide. By “ribozyme” is meant a catalytic RNA-based enzyme with ribonuclease activity which is capable of cleaving a single-stranded nucleic acid, such as an mRNA, to which it has a complementary region. Ribozymes (e.g., hammerhead ribozymes described in Haselhoff and Gerlach, Nature 334, 585 (1988)) can be used to catalytically cleave YRP mRNA transcripts to thereby inhibit translation of YRP mRNA. A ribozyme having specificity for a YRP-encoding nucleic acid can be designed based upon the nucleotide sequence of a YRP cDNA, as disclosed herein or on the basis of a heterologous sequence to be isolated according to methods taught in this invention. For example, a derivative of a Tetrahymena L-19 IVS RNA can be constructed in which the nucleotide sequence of the active site is complementary to the nucleotide sequence to be cleaved in a YRP-encoding mRNA. See, e.g. U.S. Pat. Nos. 4,987,071 and 5,116,742 to Cech et al. Alternatively, YRP mRNA can be used to select a catalytic RNA having a specific ribonuclease activity from a pool of RNA molecules. See, e.g. Bartel D., and Szostak J. W., Science 261, 1411 (1993). In preferred embodiments, the ribozyme will contain a portion having at least 7, 8, 9, 10, 12, 14, 16, 18 or 20 nucleotides, and more preferably 7 or 8 nucleotides, that have 100% complementarity to a portion of the target RNA. Methods for making ribozymes are known to those skilled in the art. See, e.g. U.S. Pat. Nos. 6,025,167, 5,773,260 and 5,496,698.

[0610] The term “dsRNA,” as used herein, refers to RNA hybrids comprising two strands of RNA. The dsRNAs can be linear or circular in structure. In a preferred embodiment, dsRNA is specific for a polynucleotide encoding either the polypeptide according to table II or a polypeptide having at least 70% sequence identity with a polypeptide according to table II. The hybridizing RNAs may be substantially or completely complementary. By “substantially complementary,” is meant that when the two hybridizing RNAs are optimally aligned using the BLAST program as described above, the hybridizing portions are at least 95% complementary. Preferably, the dsRNA will be at least 100 base pairs in length. Typically, the hybridizing RNAs will be of identical length with no over hanging 5′ or 3′ ends and no gaps. However, dsRNAs having 5′ or 3′ overhangs of up to 100 nucleotides may be used in the methods of the invention.

[0611] The dsRNA may comprise ribonucleotides or ribonucleotide analogs, such as 2′-O-methyl ribosyl residues, or combinations thereof. See, e.g. U.S. Pat. Nos. 4,130,641 and 4,024,222. A dsRNA polyriboinosinic acid: polyribocytidylic acid is described in U.S. Pat. No. 4,283,393. Methods for making and using dsRNA are known in the art. One method comprises the simultaneous transcription of two complementary DNA strands, either in vivo, or in a single in vitro reaction mixture. See, e.g. U.S. Pat. No. 5,795,715. In one embodiment, dsRNA can be introduced into a plant or plant cell directly by standard transformation procedures. Alternatively, dsRNA can be expressed in a plant cell by transcribing two complementary RNAs.

[0612] Other methods for the inhibition of endogenous gene expression, such as triple helix formation (Moser et al., Science 238, 645 (1987), and Cooney et al., Science 241, 456 (1988)) and co-suppression (Napoli et al., The Plant Cell 2,279, 1990), are known in the art. Partial and full-length cDNAs have been used for the cosuppression of endogenous plant genes. See, e.g. U.S. Pat. Nos. 4,801,340, 5,034,323, 5,231,020, and 5,283,184; Van der Kroll et al., The Plant Cell 2, 291, (1990); Smith et al., Mol. Gen. Genetics 224, 477 (1990), and Napoli et al., The Plant Cell 2, 279 (1990).

[0613] For sense suppression, it is believed that introduction of a sense polynucleotide blocks transcription of the corresponding target gene. The sense polynucleotide will have at least 65% sequence identity with the target plant gene or RNA. Preferably, the percent identity is at least 80%, 90%, 95% or more. The introduced sense polynucleotide need not be full length relative to the target gene or transcript. Preferably, the sense polynucleotide will have at least 65% sequence identity with at least 100 consecutive nucleotides of one of the nucleic acids as depicted in table I, application no. 1. The regions of identity can comprise introns and/or exons and untranslated regions. The introduced sense polynucleotide may be present in the plant cell transiently, or may be stably integrated into a plant chromosome or extrachromosomal replicon.

[0614] Further, object of the invention is an expression vector comprising a nucleic acid molecule comprising a nucleic acid molecule selected from the group consisting of: (a) a nucleic acid molecule encoding the polypeptide shown in column 5 or 7 of table II, application no. 1; (b) a nucleic acid molecule shown in column 5 or 7 of table I, application no. 1; (c) a nucleic acid molecule, which, as a result of the degeneracy of the genetic code, can be derived from a polypeptide sequence depicted in column 5 or 7 of table II, and confers an increased yield, e.g. an increased yield-related trait, for example enhanced tolerance to abiotic environmental stress, for example an increased drought tolerance and/or low temperature tolerance and/or an increased nutrient use efficiency, intrinsic yield and/or another mentioned yield-related trait as compared to a corresponding, e.g. non-transformed, wild type plant cell, a plant or a part thereof; (d) a nucleic acid molecule having at least 30% identity, preferably at least 40%, 50%, 60%, 70%, 75%, 80%, 85%, 90%, 95%, 96%, 97%, 98%, 99%, 99.5% with the nucleic acid molecule sequence of a polynucleotide comprising the nucleic acid molecule shown in column 5 or 7 of table I, and confers increased yield, e.g. an increased yield-related trait, for example enhanced tolerance to abiotic environmental stress, for example an increased drought tolerance and/or low temperature tolerance and/or an increased nutrient use efficiency, intrinsic yield and/or another mentioned yield-related trait as compared to a corresponding, e.g. non-transformed, wild type plant cell, a plant or a part thereof; (e) a nucleic acid molecule encoding a polypeptide having at least 30% identity, preferably at least 40%, 50%, 60%, 70%, 75%, 80%, 85%, 90%, 95%, 96%, 97%, 98%, 99%, 99.5%, with the amino acid sequence of the polypeptide encoded by the nucleic acid molecule of (a), (b), (c) or (d) and having the activity represented by a nucleic acid molecule comprising a polynucleotide as depicted in column 5 of table I, and confers increased yield, e.g. an increased yield-related trait, for example enhanced tolerance to abiotic environmental stress, for example an increased drought tolerance and/or low temperature tolerance and/or an increased nutrient use efficiency, intrinsic yield and/or another mentioned yield-related trait as compared to a corresponding, e.g. non-transformed, wild type plant cell, a plant or a part thereof; (f) nucleic acid molecule which hybridizes with a nucleic acid molecule of (a), (b), (c), (d) or (e) under stringent hybridization conditions and confers increased yield, e.g. an increased yield-related trait, for example enhanced tolerance to abiotic environmental stress, for example an increased drought tolerance and/or low temperature tolerance and/or an increased nutrient use efficiency, intrinsic yield and/or another mentioned yield-related trait as compared to a corresponding, e.g. non-transformed, wild type plant cell, a plant or a part thereof; (g) a nucleic acid molecule encoding a polypeptide which can be isolated with the aid of monoclonal or polyclonal antibodies made against a polypeptide encoded by one of the nucleic acid molecules of (a), (b), (c), (d), (e) or (f) and having the activity represented by the nucleic acid molecule comprising a polynucleotide as depicted in column 5 of table I, application no. 1; (h) a nucleic acid molecule encoding a polypeptide comprising the consensus sequence or one or more polypeptide motifs as shown in column 7 of table IV, and preferably having the activity represented by a protein comprising a polypeptide as depicted in column 5 of table II or IV, application no. 1; (i) a nucleic acid molecule encoding a polypeptide having the activity represented by a protein as depicted in column 5 of table II, and confers increased yield, e.g. an increased yield-related trait, for example enhanced tolerance to abiotic environmental stress, for example an increased drought tolerance and/or low temperature tolerance and/or an increased nutrient use efficiency, intrinsic yield and/or another mentioned yield-related trait as compared to a corresponding, e.g. non-transformed, wild type plant cell, a plant or a part thereof; (j) nucleic acid molecule which comprises a polynucleotide, which is obtained by amplifying a cDNA library or a genomic library using the primers in column 7 of table III, and preferably having the activity represented by a protein comprising a polypeptide as depicted in column 5 of table II or IV, application no. 1; and (k) a nucleic acid molecule which is obtainable by screening a suitable nucleic acid library, especially a cDNA library and/or a genomic library, under stringent hybridization conditions with a probe comprising a complementary sequence of a nucleic acid molecule of (a) or (b) or with a fragment thereof, having at least 15 nt, preferably 20 nt, 30 nt, 50 nt, 100 nt, 200 nt, 500 nt, 750 or 1000 nt of a nucleic acid molecule complementary to a nucleic acid molecule sequence characterized in (a) to (e) and encoding a polypeptide having the activity represented by a protein comprising a polypeptide as depicted in column 5 of table II, application no. 1.

[0615] The invention further provides an isolated recombinant expression vector comprising a YRP encoding nucleic acid as described above, wherein expression of the vector or YRP encoding nucleic acid, respectively in a host cell results in an increased yield, e.g. an increased yield-related trait, for example enhanced tolerance to abiotic environmental stress, for example an increased drought tolerance and/or low temperature tolerance and/or an increased nutrient use efficiency, intrinsic yield and/or another mentioned yield-related trait as compared to the corresponding, e.g. non-transformed, wild type of the host cell. As used herein, the term “vector” refers to a nucleic acid molecule capable of transporting another nucleic acid to which it has been linked. One type of vector is a “plasmid”, which refers to a circular double stranded DNA loop into which additional DNA segments can be ligated. Another type of vector is a viral vector, wherein additional DNA segments can be ligated into the viral genome. Further types of vectors can be linearized nucleic acid sequences, such as transposons, which are pieces of DNA which can copy and insert themselves. There have been 2 types of transposons found: simple transposons, known as Insertion Sequences and composite transposons, which can have several genes as well as the genes that are required for transposition. Certain vectors are capable of autonomous replication in a host cell into which they are introduced (e.g., bacterial vectors having a bacterial origin of replication and episomal mammalian vectors). Other vectors (e.g., non-episomal mammalian vectors) are integrated into the genome of a host cell upon introduction into the host cell, and thereby are replicated along with the host genome. Moreover, certain vectors are capable of directing the expression of genes to which they are operatively linked. Such vectors are referred to herein as “expression vectors”. In general, expression vectors of utility in recombinant DNA techniques are often in the form of plasmids. In the present specification, “plasmid” and “vector” can be used interchangeably as the plasmid is the most commonly used form of vector. However, the invention is intended to include such other forms of expression vectors, such as viral vectors (e.g., replication defective retroviruses, adenoviruses and adeno-associated viruses), which serve equivalent functions.

[0616] A plant expression cassette preferably contains regulatory sequences capable of driving gene expression in plant cells and operably linked so that each sequence can fulfill its function, for example, termination of transcription by polyadenylation signals. Preferred polyadenylation signals are those originating from Agrobacterium tumefaciens T-DNA such as the gene 3 known as octopine synthase of the Ti-plasmid pTiACH5 (Gielen et al., EMBO J. 3, 835 1 (984)) or functional equivalents thereof but also all other terminators functionally active in plants are suitable. As plant gene expression is very often not limited on transcriptional levels, a plant expression cassette preferably contains other operably linked sequences like translational enhancers such as the overdrive-sequence containing the 5″-untranslated leader sequence from tobacco mosaic virus enhancing the protein per RNA ratio (Gallie et al., Nucl. Acids Research 15, 8693 (1987)).

[0617] Plant gene expression has to be operably linked to an appropriate promoter conferring gene expression in a timely, cell or tissue specific manner. Preferred are promoters driving constitutive expression (Benfey et al., EMBO J. 8, 2195 (1989)) like those derived from plant viruses like the 35S CaMV (Franck et al., Cell 21, 285 (1980)), the 19S CaMV (see also U.S. Pat. No. 5,352,605 and PCT Application No. WO 84/02913) or plant promoters like those from Rubisco small subunit described in U.S. Pat. No. 4,962,028.

[0618] Additional advantageous regulatory sequences are, for example, included in the plant promoters such as CaMV/35S (Franck et al., Cell 21 285 (1980)), PRP1 (Ward et al., Plant. Mol. Biol. 22, 361 (1993)), SSU, OCS, lib4, usp, STLS1, B33, LEB4, nos, ubiquitin, napin or phaseolin promoter. Also advantageous in this connection are inducible promoters such as the promoters described in EP 388 186 (benzyl sulfonamide inducible), Gatz et al., Plant J. 2, 397 (1992) (tetracyclin inducible), EP-A-0 335 528 (abscisic acid inducible) or WO 93/21334 (ethanol or cyclohexenol inducible). Additional useful plant promoters are the cytoplasmic FBPase promotor or ST-LSI promoter of potato (Stockhaus et al., EMBO J. 8, 2445 (1989)), the phosphorybosyl phyrophoshate amido transferase promoter of Glycine max (gene bank accession No. U87999) or the noden specific promoter described in EP-A-0 249 676. Additional particularly advantageous promoters are seed specific promoters which can be used for monocotyledones or dicotyledones and are described in U.S. Pat. No. 5,608,152 (napin promoter from rapeseed), WO 98/45461 (phaseolin promoter from Arabidopsis), U.S. Pat. No. 5,504,200 (phaseolin promoter from Phaseolus vulgaris), WO 91/13980 (Bce4 promoter from Brassica) and Baeumlein et al., Plant J., 2 (2), 233 (1992) (LEB4 promoter from leguminosa). Said promoters are useful in dicotyledones. The following promoters are useful for example in monocotyledones Ipt-2- or Ipt-1-promoter from barley (WO 95/15389 and WO 95/23230) or hordein promoter from barley. Other useful promoters are described in WO 99/16890. It is possible in principle to use all natural promoters with their regulatory sequences like those mentioned above for the novel process. It is also possible and advantageous in addition to use synthetic promoters.

[0619] The gene construct may also comprise further genes which are to be inserted into the organisms and which are for example involved in stress tolerance and yield increase. It is possible and advantageous to insert and express in host organisms regulatory genes such as genes for inducers, repressors or enzymes which intervene by their enzymatic activity in the regulation, or one or more or all genes of a biosynthetic pathway. These genes can be heterologous or homologous in origin. The inserted genes may have their own promoter or else be under the control of same promoter as the sequences of the nucleic acid of table I or their homologs.

[0620] The gene construct advantageously comprises, for expression of the other genes present, additionally 3′ and/or 5′ terminal regulatory sequences to enhance expression, which are selected for optimal expression depending on the selected host organism and gene or genes.

[0621] These regulatory sequences are intended to make specific expression of the genes and protein expression possible as mentioned above. This may mean, depending on the host organism, for example that the gene is expressed or over-expressed only after induction, or that it is immediately expressed and/or over-expressed.

[0622] The regulatory sequences or factors may moreover preferably have a beneficial effect on expression of the introduced genes, and thus increase it. It is possible in this way for the regulatory elements to be enhanced advantageously at the transcription level by using strong transcription signals such as promoters and/or enhancers. However, in addition, it is also possible to enhance translation by, for example, improving the stability of the mRNA.

[0623] Other preferred sequences for use in plant gene expression cassettes are targeting-sequences necessary to direct the gene product in its appropriate cell compartment (for review see Kermode, Crit. Rev. Plant Sci. 15 (4), 285 (1996) and references cited therein) such as the vacuole, the nucleus, all types of plastids like amyloplasts, chloroplasts, chromoplasts, the extracellular space, mitochondria, the endoplasmic reticulum, oil bodies, peroxisomes and other compartments of plant cells.

[0624] Plant gene expression can also be facilitated via an inducible promoter (for review see Gatz, Annu. Rev. Plant Physiol. Plant Mol. Biol. 48, 89 (1997)). Chemically inducible promoters are especially suitable if gene expression is wanted to occur in a time specific manner.

[0625] Table VI lists several examples of promoters that may be used to regulate transcription of the nucleic acid coding sequences of the present invention.

TABLE VI
Examples of tissue-specific and inducible promoters in plants

| Expression | Reference |
|---|---|
| Cor78 - Cold, drought, salt, | Ishitani, et al., Plant Cell 9, 1935 (1997), |
| ABA, wounding-inducible | Yamaguchi-Shinozaki and Shinozaki, Plant Cell 6, |
| | 251 (1994) |
| Rci2A - Cold, dehydration- | Capel et al., Plant Physiol 115, 569 (1997) |
| inducible | |
| Rd22 - Drought, salt | Yamaguchi-Shinozaki and Shinozaki, Mol. Gen. |
| | Genet. 238, 17 (1993) |
| Cor15A - Cold, dehydration, | Baker et al., Plant Mol. Biol. 24, 701 (1994) |
| ABA | |
| GH3- Auxin inducible | Liu et al., Plant Cell 6, 645 (1994) |
| ARSK1-Root, salt inducible | Hwang and Goodman, Plant J. 8, 37 (1995) |
| PtxA - Root, salt inducible | GenBank accession X67427 |
| SbHRGP3 - Root specific | Ahn et al., Plant Cell 8, 1477 (1998). |
| KST1 - Guard cell specific | Plesch et al., Plant Journal. 28(4), 455- (2001) |
| KAT1 - Guard cell specific | Plesch et al., Gene 249, 83 (2000), |
| | Nakamura et al., Plant Physiol. 109, 371 (1995) |
| salicylic acid inducible | PCT Application No. WO 95/19443 |
| tetracycline inducible | Gatz et al., Plant J. 2, 397 (1992) |
| Ethanol inducible | PCT Application No. WO 93/21334 |
| Pathogen inducible PRP1 | Ward et al., Plant. Mol. Biol. 22, 361 -(1993) |
| Heat inducible hsp80 | U.S. Pat. No. 5,187,267 |
| Cold inducible alpha- | PCT Application No. WO 96/12814 |
| amylase | |
| Wound-inducible pinII | European Patent No. 375 091 |
| RD29A - salt-inducible | Yamaguchi-Shinozalei et al. Mol. Gen. Genet. |
| | 236, 331 (1993) |
| Plastid-specific viral | PCT Application No. WO 95/16783, PCT Application |
| RNA-polymerase | WO 97/06250 |

[0626] Other promoters, e.g. super-promoter (Ni et al., Plant Journal 7, 661 (1995)), Ubiquitin promoter (Callis et al., J. Biol. Chem., 265, 12486 (1990); U.S. Pat. No. 5,510,474; U.S. Pat. No. 6,020,190; Kawalleck et al., Plant. Molecular Biology, 21, 673 (1993)) or 34S promoter (GenBank Accession numbers M59930 and X16673) were similar useful for the present invention and are known to a person skilled in the art. Developmental stage-preferred promoters are preferentially expressed at certain stages of development. Tissue and organ preferred promoters include those that are preferentially expressed in certain tissues or organs, such as leaves, roots, seeds, or xylem. Examples of tissue preferred and organ preferred promoters include, but are not limited to fruit-preferred, ovule-preferred, male tissue-preferred, seed-preferred, integument-preferred, tuber-preferred, stalk-preferred, pericarp-preferred, and leaf-preferred, stigma-preferred, pollen-preferred, anther-preferred, a petal-preferred, sepal-preferred, pedicel-preferred, silique-preferred, stem-preferred, root-preferred promoters, and the like. Seed preferred promoters are preferentially expressed during seed development and/or germination. For example, seed preferred promoters can be embryo-preferred, endosperm preferred, and seed coat-preferred. See Thompson et al., BioEssays 10, 108 (1989). Examples of seed preferred promoters include, but are not limited to, cellulose synthase (celA), Cim1, gamma-zein, globulin-1, maize 19 kD zein (cZ19B1), and the like.

[0627] Other promoters useful in the expression cassettes of the invention include, but are not limited to, the major chlorophyll a/b binding protein promoter, histone promoters, the Ap3 promoter, the β-conglycin promoter, the napin promoter, the soybean lectin promoter, the maize 15 kD zein promoter, the 22 kD zein promoter, the 27 kD zein promoter, the g-zein promoter, the waxy, shrunken 1, shrunken 2 and bronze promoters, the Zm13 promoter (U.S. Pat. No. 5,086,169), the maize polygalacturonase promoters (PG) (U.S. Pat. Nos. 5,412,085 and 5,545,546), and the SGB6 promoter (U.S. Pat. No. 5,470,359), as well as synthetic or other natural promoters.

[0628] Additional flexibility in controlling heterologous gene expression in plants may be obtained by using DNA binding domains and response elements from heterologous sources (i.e., DNA binding domains from non-plant sources). An example of such a heterologous DNA binding domain is the LexA DNA binding domain (Brent and Ptashne, Cell 43, 729 (1985)).

[0629] The invention further provides a recombinant expression vector comprising a YRP DNA molecule of the invention cloned into the expression vector in an antisense orientation. That is, the DNA molecule is operatively linked to a regulatory sequence in a manner that allows for expression (by transcription of the DNA molecule) of an RNA molecule that is antisense to a YRP mRNA. Regulatory sequences operatively linked to a nucleic acid molecule cloned in the antisense orientation can be chosen which direct the continuous expression of the antisense RNA molecule in a variety of cell types. For instance, viral promoters and/or enhancers, or regulatory sequences can be chosen which direct constitutive, tissue specific, or cell type specific expression of antisense RNA. The antisense expression vector can be in the form of a recombinant plasmid, phagemid, or attenuated virus wherein antisense nucleic acids are produced under the control of a high efficiency regulatory region. The activity of the regulatory region can be determined by the cell type into which the vector is introduced. For a discussion of the regulation of gene expression using antisense genes, see Weintraub H. et al., Reviews—Trends in Genetics, Vol. 1 (1), 23 (1986) and Mol et al., FEBS Letters 268, 427 (1990).

[0630] Another aspect of the invention pertains to isolated YRPs, and biologically active portions thereof. An “isolated” or “purified” polypeptide or biologically active portion thereof is free of some of the cellular material when produced by recombinant DNA techniques, or chemical precursors or other chemicals when chemically synthesized. The language “substantially free of cellular material” includes preparations of YRP in which the polypeptide is separated from some of the cellular components of the cells in which it is naturally or recombinantly produced. In one embodiment, the language “substantially free of cellular material” includes preparations of a YRP having less than about 30% (by dry weight) of non-YRP material (also referred to herein as a “contaminating polypeptide”), more preferably less than about 20% of non-YRP material, still more preferably less than about 10% of non-YRP material, and most preferably less than about 5% non-YRP material.

[0631] When the YRP or biologically active portion thereof is recombinantly produced, it is also preferably substantially free of culture medium, i.e., culture medium represents less than about 20%, more preferably less than about 10%, and most preferably less than about 5% of the volume of the polypeptide preparation. The language “substantially free of chemical precursors or other chemicals” includes preparations of YRP in which the polypeptide is separated from chemical precursors or other chemicals that are involved in the synthesis of the polypeptide. In one embodiment, the language “substantially free of chemical precursors or other chemicals” includes preparations of a YRP having less than about 30% (by dry weight) of chemical precursors or non-YRP chemicals, more preferably less than about 20% chemical precursors or non-YRP chemicals, still more preferably less than about 10% chemical precursors or non-YRP chemicals, and most preferably less than about 5% chemical precursors or non-YRP chemicals. In preferred embodiments, isolated polypeptides, or biologically active portions thereof, lack contaminating polypeptides from the same organism from which the YRP is derived. Typically, such polypeptides are produced by recombinant expression of, for example, a S. cerevisiae, E. coli or Brassica napus, Glycine max, Zea mays or Oryza sativa YRP, in an microorganism like S. cerevisiae, E. coli, C. glutamicum, ciliates, algae, fungi or plants, provided that the polypeptide is recombinant expressed in an organism being different to the original organism.

[0632] The nucleic acid molecules, polypeptides, polypeptide homologs, fusion polypeptides, primers, vectors, and host cells described herein can be used in one or more of the following methods: identification of S. cerevisiae, E. coli or Brassica napus, Glycine max, Zea mays or Oryza sativa and related organisms; mapping of genomes of organisms related to S. cerevisiae, E. coli; identification and localization of S. cerevisiae, E. coli or Brassica napus, Glycine max, Zea mays or Oryza sativa sequences of interest; evolutionary studies; determination of YRP regions required for function; modulation of a YRP activity; modulation of the metabolism of one or more cell functions; modulation of the transmembrane transport of one or more compounds; modulation of yield, e.g. of a yield-related trait, e.g. of tolerance to abiotic environmental stress, e.g. to low temperature tolerance, drought tolerance, water use efficiency, nutrient use efficiency and/or intrinsic yield; and modulation of expression of YRP nucleic acids.

[0633] The YRP nucleic acid molecules of the invention are also useful for evolutionary and polypeptide structural studies. The metabolic and transport processes in which the molecules of the invention participate are utilized by a wide variety of prokaryotic and eukaryotic cells; by comparing the sequences of the nucleic acid molecules of the present invention to those encoding similar enzymes from other organisms, the evolutionary relatedness of the organisms can be assessed. Similarly, such a comparison permits an assessment of which regions of the sequence are conserved and which are not, which may aid in determining those regions of the polypeptide that are essential for the functioning of the enzyme. This type of determination is of value for polypeptide engineering studies and may give an indication of what the polypeptide can tolerate in terms of mutagenesis without losing function.

[0634] Manipulation of the YRP nucleic acid molecules of the invention may result in the production of SRPs having functional differences from the wild-type YRPs. These polypeptides may be improved in efficiency or activity, may be present in greater numbers in the cell than is usual, or may be decreased in efficiency or activity.

[0635] There are a number of mechanisms by which the alteration of a YRP of the invention may directly affect yield, e.g. yield-related trait, for example tolerance to abiotic environmental stress, for example drought tolerance and/or low temperature tolerance, and/or nutrient use efficiency, intrinsic yield and/or another mentioned yield-related trait.

[0636] The effect of the genetic modification in plants regarding yield, e.g. yield-related trait, for example tolerance to abiotic environmental stress, for example drought tolerance and/or low temperature tolerance, and/or nutrient use efficiency, intrinsic yield and/or another mentioned yield-related trait can be assessed by growing the modified plant under less than suitable conditions and then analyzing the growth characteristics and/or metabolism of the plant. Such analysis techniques are well known to one skilled in the art, and include dry weight, fresh weight, polypeptide synthesis, carbohydrate synthesis, lipid synthesis, evapotranspiration rates, general plant and/or crop yield, flowering, reproduction, seed setting, root growth, respiration rates, photosynthesis rates, etc. (Applications of HPLC in Biochemistry in: Laboratory Techniques in Biochemistry and Molecular Biology, Vol. 17; Rehm et al., 1993 Biotechnology, Vol. 3, Chapter III: Product recovery and purification, page 469-714, VCH: Weinheim; Better P. A. et al., 1988, Bioseparations: downstream processing for biotechnology, John Wiley and Sons; Kennedy J. F., and Cabral J. M. S., 1992, Recovery processes for biological materials, John Wiley and Sons; Shaeiwitz J. A. and Henry J. D., 1988, Biochemical separations, in Ulmann's Encyclopedia of Industrial Chemistry, Vol. B3, Chapter 11, page 1-27, VCH: Weinheim; and Dechow F. J., 1989, Separation and purification techniques in biotechnology, Noyes Publications).

[0637] For example, yeast expression vectors comprising the nucleic acids disclosed herein, or fragments thereof, can be constructed and transformed into S. cerevisiae using standard protocols. The resulting transgenic cells can then be assayed for generation or alteration of their yield, e.g. their yield-related traits, for example tolerance to abiotic environmental stress, for example drought tolerance and/or low temperature tolerance, and/or nutrient use efficiency, intrinsic yield and/or another mentioned yield-related trait. Similarly, plant expression vectors comprising the nucleic acids disclosed herein, or fragments thereof, can be constructed and transformed into an appropriate plant cell such as Arabidopsis, soy, rape, maize, cotton, rice, wheat, Medicago truncatula, etc., using standard protocols. The resulting transgenic cells and/or plants derived therefrom can then be assayed for generation or alteration of their yield, e.g. their yield-related traits, for example tolerance to abiotic environmental stress, for example drought tolerance and/or low temperature tolerance, and/or nutrient use efficiency, intrinsic yield and/or another mentioned yield-related trait.

[0638] The engineering of one or more genes according to table I and coding for the YRP of table II of the invention may also result in YRPs having altered activities which indirectly and/or directly impact the tolerance to abiotic environmental stress of algae, plants, ciliates, fungi, or other microorganisms like C. glutamicum.

[0639] Additionally, the sequences disclosed herein, or fragments thereof, can be used to generate knockout mutations in the genomes of various organisms, such as bacteria, mammalian cells, yeast cells, and plant cells (Girke, T., The Plant Journal 15, 39 (1998)). The resultant knockout cells can then be evaluated for their ability or capacity for increasing yield, e.g. increasing a yield-related trait, for example enhancing tolerance to abiotic environmental stress, for example increasing drought tolerance and/or low temperature tolerance and/or increasing nutrient use efficiency, increasing intrinsic yield and/or another mentioned yield-related trait, their response to various abiotic environmental stress conditions, and the effect on the phenotype and/or genotype of the mutation. For other methods of gene inactivation, see U.S. Pat. No. 6,004,804 and Puttaraju et al., Nature Biotechnology 17, 246 (1999).

[0640] The aforementioned mutagenesis strategies for YRPs resulting in increasing yield, e.g. increasing a yield-related trait, for example enhancing tolerance to abiotic environmental stress, for example increasing drought tolerance and/or low temperature tolerance and/or increasing nutrient use efficiency, increasing intrinsic yield and/or another mentioned yield-related trait are not meant to be limiting; variations on these strategies will be readily apparent to one skilled in the art. Using such strategies, and incorporating the mechanisms disclosed herein, the nucleic acid and polypeptide molecules of the invention may be utilized to generate algae, ciliates, plants, fungi, or other microorganisms like C. glutamicum expressing mutated YRP nucleic acid and polypeptide molecules such that the tolerance to abiotic environmental stress and/or yield is improved.

[0641] The present invention also provides antibodies that specifically bind to a YRP, or a portion thereof, as encoded by a nucleic acid described herein. Antibodies can be made by many well-known methods (see, e.g. Harlow and Lane, “Antibodies; A Laboratory Manual”, Cold Spring Harbor Laboratory, Cold Spring Harbor, N.Y., (1988)). Briefly, purified antigen can be injected into an animal in an amount and in intervals sufficient to elicit an immune response. Antibodies can either be purified directly, or spleen cells can be obtained from the animal. The cells can then fused with an immortal cell line and screened for antibody secretion. The antibodies can be used to screen nucleic acid clone libraries for cells secreting the antigen. Those positive clones can then be sequenced. See, for example, Kelly et al., Bio/Technology 10, 163 (1992); Bebbington et al., Bio/Technology 10, 169 (1992).

[0642] The phrases “selectively binds” and “specifically binds” with the polypeptide refer to a binding reaction that is determinative of the presence of the polypeptide in a heterogeneous population of polypeptides and other biologics. Thus, under designated immunoassay conditions, the specified antibodies bound to a particular polypeptide do not bind in a significant amount to other polypeptides present in the sample. Selective binding of an antibody under such conditions may require an antibody that is selected for its specificity for a particular polypeptide. A variety of immunoassay formats may be used to select antibodies that selectively bind with a particular polypeptide. For example, solid-phase ELISA immunoassays are routinely used to select antibodies selectively immunoreactive with a polypeptide. See Harlow and Lane, “Antibodies, A Laboratory Manual,” Cold Spring Harbor Publications, New York, (1988), for a description of immunoassay formats and conditions that could be used to determine selective binding.

[0643] In some instances, it is desirable to prepare monoclonal antibodies from various hosts. A description of techniques for preparing such monoclonal antibodies may be found in Stites et al., eds., “Basic and Clinical Immunology,” (Lange Medical Publications, Los Altos, Calif., Fourth Edition) and references cited therein, and in Harlow and Lane, “Antibodies, A Laboratory Manual,” Cold Spring Harbor Publications, New York, (1988).

[0644] Gene expression in plants is regulated by the interaction of protein transcription factors with specific nucleotide sequences within the regulatory region of a gene. One example of transcription factors are polypeptides that contain zinc finger (ZF) motifs. Each ZF module is approximately 30 amino acids long folded around a zinc ion. The DNA recognition domain of a ZF protein is a α-helical structure that inserts into the major grove of the DNA double helix. The module contains three amino acids that bind to the DNA with each amino acid contacting a single base pair in the target DNA sequence. ZF motifs are arranged in a modular repeating fashion to form a set of fingers that recognize a contiguous DNA sequence. For example, a three-fingered ZF motif will recognize 9 bp of DNA. Hundreds of proteins have been shown to contain ZF motifs with between 2 and 37 ZF modules in each protein (Isalan M. et al., Biochemistry 37 (35), 12026 (1998); Moore M. et al., Proc. Natl. Acad. Sci. USA 98 (4), 1432 (2001) and Moore M. et al., Proc. Natl. Acad. Sci. USA 98 (4), 1437 (2001); U.S. Pat. No. 6,007,988 and U.S. Pat. No. 6,013,453).

[0645] The regulatory region of a plant gene contains many short DNA sequences (cis-acting elements) that serve as recognition domains for transcription factors, including ZF proteins. Similar recognition domains in different genes allow the coordinate expression of several genes encoding enzymes in a metabolic pathway by common transcription factors. Variation in the recognition domains among members of a gene family facilitates differences in gene expression within the same gene family, for example, among tissues and stages of development and in response to environmental conditions.

[0646] Typical ZF proteins contain not only a DNA recognition domain but also a functional domain that enables the ZF protein to activate or repress transcription of a specific gene. Experimentally, an activation domain has been used to activate transcription of the target gene (U.S. Pat. No. 5,789,538 and patent application WO 95/19431), but it is also possible to link a transcription repressor domain to the ZF and thereby inhibit transcription (patent applications WO 00/47754 and WO 01/002019). It has been reported that an enzymatic function such as nucleic acid cleavage can be linked to the ZF (patent application WO 00/20622).

[0647] The invention provides a method that allows one skilled in the art to isolate the regulatory region of one or more YRP encoding genes from the genome of a plant cell and to design zinc finger transcription factors linked to a functional domain that will interact with the regulatory region of the gene. The interaction of the zinc finger protein with the plant gene can be designed in such a manner as to alter expression of the gene and preferably thereby to confer increasing yield, e.g. increasing a yield-related trait, for example enhancing tolerance to abiotic environmental stress, for example increasing drought tolerance and/or low temperature tolerance and/or increasing nutrient use efficiency, increasing intrinsic yield and/or another mentioned yield-related trait.

[0648] In particular, the invention provides a method of producing a transgenic plant with a YRP coding nucleic acid, wherein expression of the nucleic acid(s) in the plant results in increasing yield, e.g. increasing a yield-related trait, for example enhancing tolerance to abiotic environmental stress, for example increasing drought tolerance and/or low temperature tolerance and/or increasing nutrient use efficiency, increasing intrinsic yield and/or another mentioned yield-related trait as compared to a wild type plant comprising: (a) transforming a plant cell with an expression vector comprising a YRP encoding nucleic acid, and (b) generating from the plant cell a transgenic plant with enhanced tolerance to abiotic environmental stress and/or increased yield as compared to a wild type plant. For such plant transformation, binary vectors such as pBinAR can be used (Höfgen and Willmitzer, Plant Science 66, 221 (1990)). Moreover suitable binary vectors are for example pBIN19, pBI101, pGPTV or pPZP (Hajukiewicz P. et al., Plant Mol. Biol., 25, 989 (1994)).

[0649] Construction of the binary vectors can be performed by ligation of the cDNA into the T-DNA. 5′ to the cDNA a plant promoter activates transcription of the cDNA. A polyadenylation sequence is located 3′ to the cDNA. Tissue-specific expression can be achieved by using a tissue specific promoter as listed above. Also, any other promoter element can be used. For constitutive expression within the whole plant, the CaMV 35S promoter can be used. The expressed protein can be targeted to a cellular compartment using a signal peptide, for example for plastids, mitochondria or endoplasmic reticulum (Kermode, Crit. Rev. Plant Sci. 4 (15), 285 (1996)). The signal peptide is cloned 5′ in frame to the cDNA to archive subcellular localization of the fusion protein. One skilled in the art will recognize that the promoter used should be operatively linked to the nucleic acid such that the promoter causes transcription of the nucleic acid which results in the synthesis of a mRNA which encodes a polypeptide.

[0650] Alternate methods of transfection include the direct transfer of DNA into developing flowers via electroporation or Agrobacterium mediated gene transfer. Agrobacterium mediated plant transformation can be performed using for example the GV3101 (pMP90) (Koncz and Schell, Mol. Gen. Genet. 204, 383 (1986)) or LBA4404 (Ooms et al., Plasmid, 7, 15 (1982); Hoekema et al., Nature, 303, 179 (1983)) Agrobacterium tumefaciens strain. Transformation can be performed by standard transformation and regeneration techniques (Deblaere et al., Nucl. Acids. Res. 13, 4777 (1994); Gelvin and Schilperoort, Plant Molecular Biology Manual, 2nd Ed.—Dordrecht: Kluwer Academic Publ., 1995.—in Sect., Ringbuc Zentrale Signatur: BT11-P ISBN 0-7923-2731-4; Glick B. R. and Thompson J. E., Methods in Plant Molecular Biology and Biotechnology, Boca Raton: CRC Press, 1993.-360 S., ISBN 0-8493-5164-2). For example, rapeseed can be transformed via cotyledon or hypocotyl transformation (Moloney et al., Plant Cell Reports 8, 238 (1989); De Block et al., Plant Physiol. 91, 694 (1989)). Use of antibiotics for Agrobacterium and plant selection depends on the binary vector and the Agrobacterium strain used for transformation. Rapeseed selection is normally performed using kanamycin as selectable plant marker. Agrobacterium mediated gene transfer to flax can be performed using, for example, a technique described by Mlynarova et al., Plant Cell Report 13, 282 (1994)). Additionally, transformation of soybean can be performed using for example a technique described in European Patent No. 424 047, U.S. Pat. No. 5,322,783, European Patent No. 397 687, U.S. Pat. No. 5,376,543 or U.S. Pat. No. 5,169,770. Transformation of maize can be achieved by particle bombardment, polyethylene glycol mediated DNA uptake or via the silicon carbide fiber technique (see, for example, Freeling and Walbot “The maize handbook” Springer Verlag: New York (1993) ISBN 3-540-97826-7). A specific example of maize transformation is found in U.S. Pat. No. 5,990,387 and a specific example of wheat transformation can be found in PCT Application No. WO 93/07256.

[0651] Growing the modified plants under defined N-conditions, in an especial embodiment under abiotic environmental stress conditions, and then screening and analyzing the growth characteristics and/or metabolic activity assess the effect of the genetic modification in plants on increasing yield, e.g. increasing a yield-related trait, for example enhancing tolerance to abiotic environmental stress, for example increasing drought tolerance and/or low temperature tolerance and/or increasing nutrient use efficiency, increasing intrinsic yield and/or another mentioned yield-related trait. Such analysis techniques are well known to one skilled in the art. They include beneath to screening (Römpp Lexikon Biotechnologie, Stuttgart/New York: Georg Thieme Verlag 1992, “screening” p. 701) dry weight, fresh weight, protein synthesis, carbohydrate synthesis, lipid synthesis, evapotranspiration rates, general plant and/or crop yield, flowering, reproduction, seed setting, root growth, respiration rates, photosynthesis rates, etc. (Applications of HPLC in Biochemistry in: Laboratory Techniques in Biochemistry and Molecular Biology, Vol. 17; Rehm et al., 1993 Biotechnology, Vol. 3, Chapter III: Product recovery and purification, page 469-714, VCH: Weinheim; Better, P. A. et al., 1988 Bioseparations: downstream processing for biotechnology, John Wiley and Sons; Kennedy J. F. and Cabral J. M. S., 1992 Recovery processes for biological materials, John Wiley and Sons; Shaeiwitz J. A. and Henry J. D., 1988 Biochemical separations, in: Ullmann's Encyclopedia of Industrial Chemistry, Vol. B3, Chapter 11, page 1-27, VCH: Weinheim; and Dechow F. J. (1989) Separation and purification techniques in biotechnology, Noyes Publications).

[0652] In one embodiment, the present invention relates to a method for the identification of a gene product conferring in increasing yield, e.g. increasing a yield-related trait, for example enhancing tolerance to abiotic environmental stress, for example increasing drought tolerance and/or low temperature tolerance and/or increasing nutrient use efficiency, increasing intrinsic yield and/or another mentioned yield-related trait as compared to a corresponding, e.g. non-transformed, wild type cell in a cell of an organism for example plant, comprising the following steps: (a) contacting, e.g. hybridizing, some or all nucleic acid molecules of a sample, e.g. cells, tissues, plants or microorganisms or a nucleic acid library, which can contain a candidate gene encoding a gene product conferring increasing yield, e.g. increasing a yield-related trait, for example enhancing tolerance to abiotic environmental stress, for example increasing drought tolerance and/or low temperature tolerance and/or increasing nutrient use efficiency, increasing i, with a nucleic acid molecule as shown in column 5 or 7 of table I A or B, or a functional homologue thereof; (b) identifying the nucleic acid molecules, which hybridize under relaxed stringent conditions with said nucleic acid molecule, in particular to the nucleic acid molecule sequence shown in column 5 or 7 of table I, and, optionally, isolating the full length cDNA clone or complete genomic clone; (c) identifying the candidate nucleic acid molecules or a fragment thereof in host cells, preferably in a plant cell; (d) increasing the expressing of the identified nucleic acid molecules in the host cells for which enhanced tolerance to abiotic environmental stress and/or increased yield are desired; (e) assaying the level of enhanced tolerance to abiotic environmental stress and/or increased yield of the host cells; and (f) identifying the nucleic acid molecule and its gene product which confers increasing yield, e.g. increasing a yield-related trait, for example enhancing tolerance to abiotic environmental stress, for example increasing drought tolerance and/or low temperature tolerance and/or increasing nutrient use efficiency, increasing intrinsic yield and/or another mentioned yield-related trait in the host cell compared to the wild type.

[0653] Relaxed hybridization conditions are: After standard hybridization procedures washing steps can be performed at low to medium stringency conditions usually with washing conditions of 40°-55° C. and salt conditions between 2×SSC and 0.2×SSC with 0.1% SDS in comparison to stringent washing conditions as e.g. 60° to 68° C. with 0.1% SDS. Further examples can be found in the references listed above for the stringend hybridization conditions. Usually washing steps are repeated with increasing stringency and length until a useful signal to noise ratio is detected and depend on many factors as the target, e.g. its purity, GC-content, size etc, the probe, e.g. its length, is it a RNA or a DNA probe, salt conditions, washing or hybridization temperature, washing or hybridization time etc.

[0654] In another embodiment, the present invention relates to a method for the identification of a gene product the expression of which confers increased yield, e.g. an increased yield-related trait, for example enhanced tolerance to abiotic environmental stress, for example an increased drought tolerance and/or low temperature tolerance and/or an increased nutrient use efficiency, intrinsic yield and/or another mentioned yield-related trait in a cell, comprising the following steps: (a) identifying a nucleic acid molecule in an organism, which is at least 20%, preferably 25%, more preferably 30%, even more preferred are 35%. 40% or 50%, even more preferred are 60%, 70% or 80%, most preferred are 90% or 95% or more homolog to the nucleic acid molecule encoding a protein comprising the polypeptide molecule as shown in column 5 or 7 of table II, or comprising a consensus sequence or a polypeptide motif as shown in column 7 of table IV, or being encoded by a nucleic acid molecule comprising a polynucleotide as shown in column 5 or 7 of table I application no. 1, or a homologue thereof as described herein, for example via homology search in a data bank; (b) enhancing the expression of the identified nucleic acid molecules in the host cells; (c) assaying the level of enhancement of in increasing yield, e.g. increasing a yield-related trait, for example enhancing tolerance to abiotic environmental stress, for example increasing drought tolerance and/or low temperature tolerance and/or increasing nutrient use efficiency, increasing intrinsic yield and/or another mentioned yield-related trait in the host cells; and (d) identifying the host cell, in which the enhanced expression confers in increasing yield, e.g. increasing a yield-related trait, for example enhancing tolerance to abiotic environmental stress, for example increasing drought tolerance and/or low temperature tolerance and/or increasing nutrient use efficiency, increasing intrinsic yield and/or another mentioned yield-related trait in the host cell compared to a wild type.

[0655] Further, the nucleic acid molecule disclosed herein, in particular the nucleic acid molecule shown column 5 or 7 of table I A or B, may be sufficiently homologous to the sequences of related species such that these nucleic acid molecules may serve as markers for the construction of a genomic map in related organism or for association mapping. Furthermore natural variation in the genomic regions corresponding to nucleic acids disclosed herein, in particular the nucleic acid molecule shown column 5 or 7 of table I A or B, or homologous thereof may lead to variation in the activity of the proteins disclosed herein, in particular the proteins comprising polypeptides as shown in column 5 or 7 of table II A or B, or comprising the consensus sequence or the polypeptide motif as shown in column 7 of table IV, and their homolgous and in consequence in a natural variation of an increased yield, e.g. an increased yield-related trait, for example enhanced tolerance to abiotic environmental stress, for example an increased drought tolerance and/or low temperature tolerance and/or an increased nutrient use efficiency, and/or another mentioned yield-related trait.

[0656] In consequence natural variation eventually also exists in form of more active allelic variants leading already to a relative increase in yield, e.g. an increase in an yield-related trait, for example enhanced tolerance to abiotic environmental stress, for example drought tolerance and/or low temperature tolerance and/or nutrient use efficiency, and/or another mentioned yield-related trait. Different variants of the nucleic acids molecule disclosed herein, in particular the nucleic acid comprising the nucleic acid molecule as shown column 5 or 7 of table I A or B, which corresponds to different levels of increased yield, e.g. different levels of increased yield-related trait, for example different enhancing tolerance to abiotic environmental stress, for example increased drought tolerance and/or low temperature tolerance and/or increasing nutrient use efficiency, increasing intrinsic yield and/or another mentioned yield-related trait, can be identified and used for marker assisted breeding for an increased yield, e.g. an increased yield-related trait, for example enhanced tolerance to abiotic environmental stress, for example an increased drought tolerance and/or low temperature tolerance and/or an increased nutrient use efficiency, and/or another mentioned yield-related trait.

[0657] Accordingly, the present invention relates to a method for breeding plants with an increased yield, e.g. an increased yield-related trait, for example enhanced tolerance to abiotic environmental stress, for example an increased drought tolerance and/or low temperature tolerance and/or an increased nutrient use efficiency, and/or anot, comprising (a) selecting a first plant variety with an increased yield, e.g. an increased yield-related trait, for example enhanced tolerance to abiotic environmental stress, for example an increased drought tolerance and/or low temperature tolerance and/or an increased nutrient use efficiency, and/or anot based on increased expression of a nucleic acid of the invention as disclosed herein, in particular of a nucleic acid molecule comprising a nucleic acid molecule as shown in column 5 or 7 of table I A or B, or a polypeptide comprising a polypeptide as shown in column 5 or 7 of table II A or B, or comprising a consensus sequence or a polypeptide motif as shown in column 7 of table IV, or a homologue thereof as described herein; (b) associating the level of increased yield, e.g. increased yield-related trait, for example enhanced tolerance to abiotic environmental stress, for example increased drought tolerance and/or low temperature tolerance and/or an increased nutrient use efficiency, and/or another mentioned yield-related trait with the expression level or the genomic structure of a gene encoding said polypeptide or said nucleic acid molecule; (c) crossing the first plant variety with a second plant variety, which significantly differs in its level of increased yield, e.g. increased yield-related trait, for example enhanced tolerance to abiotic environmental stress, for example an increased drought tolerance and/or low temperature tolerance and/or an increased nutrient use efficiency, and/or another mentioned yield-related trait; and (d) identifying, which of the offspring varieties has got increased levels of an increased yield, e.g. an increased yield-related trait, for example enhanced tolerance to abiotic environmental stress, for example an increased drought tolerance and/or low temperature tolerance and/or an increased nutrient use efficiency, and/or another mentioned yield-related trait by the expression level of said polypeptide or nucleic acid molecule or the genomic structure of the genes encoding said polypeptide or nucleic acid molecule of the invention.

[0658] In one embodiment, the expression level of the gene according to step (b) is increased.

[0659] Yet another embodiment of the invention relates to a process for the identification of a compound conferring an increased yield, e.g. an increased yield-related trait, for example enhanced tolerance to abiotic environmental stress, for example an increased drought tolerance and/or low temperature tolerance and/or an increased nutrient use efficiency, and/or another mentioned yield-related trait as compared to a corresponding, e.g. non-transformed, wild type plant cell, a plant or a part thereof in a plant cell, a plant or a part thereof, a plant or a part thereof, comprising the steps: (a) culturing a plant cell; a plant or a part thereof maintaining a plant expressing the polypeptide as shown in column 5 or 7 of table II, or being encoded by a nucleic acid molecule comprising a polynucleotide as shown in column 5 or 7 of table I, or a homologue thereof as described herein or a polynucleotide encoding said polypeptide and conferring with increased yield, e.g. with an increased yield-related trait, for example enhanced tolerance to abiotic environmental stress, for example an increased drought tolerance and/or low temperature tolerance and/or an increased nutrient use efficiency, intrinsic yield and/or another mentioned yield-related trait as compared to a corresponding, e.g. non-transformed, wild type plant cell, a plant or a part thereof; a non-transformed wild type plant or a part thereof and providing a readout system capable of interacting with the polypeptide under suitable conditions which permit the interaction of the polypeptide with this readout system in the presence of a chemical compound or a sample comprising a plurality of chemical compounds and capable of providing a detectable signal in response to the binding of a chemical compound to said polypeptide under conditions which permit the expression of said readout system and of the protein as shown in column 5 or 7 of table II, or being encoded by a nucleic acid molecule comprising a polynucleotide as shown in column 5 or 7 of table I application no. 1, or a homologue thereof as described herein; and (b) identifying if the chemical compound is an effective agonist by detecting the presence or absence or decrease or increase of a signal produced by said readout system.

[0660] Said compound may be chemically synthesized or microbiologically produced and/or comprised in, for example, samples, e.g., cell extracts from, e.g., plants, animals or microorganisms, e.g. pathogens. Furthermore, said compound(s) may be known in the art but hitherto not known to be capable of suppressing the polypeptide of the present invention. The reaction mixture may be a cell free extract or may comprise a cell or tissue culture. Suitable set ups for the process for identification of a compound of the invention are known to the person skilled in the art and are, for example, generally described in Alberts et al., Molecular Biology of the Cell, third edition (1994), in particular Chapter 17. The compounds may be, e.g., added to the reaction mixture, culture medium, injected into the cell or sprayed onto the plant.

[0661] If a sample containing a compound is identified in the process, then it is either possible to isolate the compound from the original sample identified as containing the compound capable of activating or enhancing or increasing the yield, e.g. yield-related trait, for example tolerance to abiotic environmental stress, for example drought tolerance and/or low temperature tolerance and/or increased nutrient use efficiency, and/or another mentioned yield-related trait as compared to a corresponding, e.g. non-transformed, wild type, or one can further subdivide the original sample, for example, if it consists of a plurality of different compounds, so as to reduce the number of different substances per sample and repeat the method with the subdivisions of the original sample. Depending on the complexity of the samples, the steps described above can be performed several times, preferably until the sample identified according to the said process only comprises a limited number of or only one substance(s). Preferably said sample comprises substances of similar chemical and/or physical properties, and most preferably said substances are identical. Preferably, the compound identified according to the described method above or its derivative is further formulated in a form suitable for the application in plant breeding or plant cell and tissue culture.

[0662] The compounds which can be tested and identified according to said process may be expression libraries, e.g., cDNA expression libraries, peptides, proteins, nucleic acids, antibodies, small organic compounds, hormones, peptidomimetics, PNAs or the like (Milner, Nature Medicine 1, 879 (1995); Hupp, Cell 83, 237 (1995); Gibbs, Cell 79, 193 (1994), and references cited supra). Said compounds can also be functional derivatives or analogues of known inhibitors or activators. Methods for the preparation of chemical derivatives and analogues are well known to those skilled in the art and are described in, for example, Beilstein, Handbook of Organic Chemistry, Springer, New York Inc., 175 Fifth Avenue, New York, N.Y. 10010 U.S.A. and Organic Synthesis, Wiley, New York, USA. Furthermore, said derivatives and analogues can be tested for their effects according to methods known in the art. Furthermore, peptidomimetics and/or computer aided design of appropriate derivatives and analogues can be used, for example, according to the methods described above. The cell or tissue that may be employed in the process preferably is a host cell, plant cell or plant tissue of the invention described in the embodiments hereinbefore.

[0663] Thus, in a further embodiment the invention relates to a compound obtained or identified according to the method for identifying an agonist of the invention said compound being an antagonist of the polypeptide of the present invention.

[0664] Accordingly, in one embodiment, the present invention further relates to a compound identified by the method for identifying a compound of the present invention.

[0665] In one embodiment, the invention relates to an antibody specifically recognizing the compound or agonist of the present invention.

[0666] The invention also relates to a diagnostic composition comprising at least one of the aforementioned nucleic acid molecules, antisense nucleic acid molecule, RNAi, snRNA, dsRNA, siRNA, miRNA, ta-siRNA, cosuppression molecule, ribozyme, vectors, proteins, antibodies or compounds of the invention and optionally suitable means for detection.

[0667] The diagnostic composition of the present invention is suitable for the isolation of mRNA from a cell and contacting the mRNA so obtained with a probe comprising a nucleic acid probe as described above under hybridizing conditions, detecting the presence of mRNA hybridized to the probe, and thereby detecting the expression of the protein in the cell. Further methods of detecting the presence of a protein according to the present invention comprise immunotechniques well known in the art, for example enzyme linked immunoadsorbent assay. Furthermore, it is possible to use the nucleic acid molecules according to the invention as molecular markers or primers in plant breeding. Suitable means for detection are well known to a person skilled in the art, e.g. buffers and solutions for hydridization assays, e.g. the aforementioned solutions and buffers, further and means for Southern-, Western-, Northern-etc.—blots, as e.g. described in Sambrook et al. are known. In one embodiment diagnostic composition contain PCR primers designed to specifically detect the presense or the expression level of the nucleic acid molecule to be reduced in the process of the invention, e.g. of the nucleic acid molecule of the invention, or to descriminate between different variants or alleles of the nucleic acid molecule of the invention or which activity is to be reduced in the process of the invention.

[0668] In another embodiment, the present invention relates to a kit comprising the nucleic acid molecule, the vector, the host cell, the polypeptide, or the antisense, RNAi, snRNA, dsRNA, siRNA, miRNA, ta-siRNA, cosuppression molecule, or ribozyme molecule, or the viral nucleic acid molecule, the antibody, plant cell, the plant or plant tissue, the harvestable part, the propagation material and/or the compound and/or agonist identified according to the method of the invention.

[0669] The compounds of the kit of the present invention may be packaged in containers such as vials, optionally with/in buffers and/or solution. If appropriate, one or more of said components might be packaged in one and the same container. Additionally or alternatively, one or more of said components might be adsorbed to a solid support as, e.g. a nitrocellulose filter, a glas plate, a chip, or a nylon membrane or to the well of a micro titerplate. The kit can be used for any of the herein described methods and embodiments, e.g. for the production of the host cells, transgenic plants, pharmaceutical compositions, detection of homologous sequences, identification of antagonists or agonists, as food or feed or as a supplement thereof or as supplement for the treating of plants, etc. Further, the kit can comprise instructions for the use of the kit for any of said embodiments. In one embodiment said kit comprises further a nucleic acid molecule encoding one or more of the aforementioned protein, and/or an antibody, a vector, a host cell, an antisense nucleic acid, a plant cell or plant tissue or a plant. In another embodiment said kit comprises PCR primers to detect and discriminate the nucleic acid molecule to be reduced in the process of the invention, e.g. of the nucleic acid molecule of the invention.

[0670] In a further embodiment, the present invention relates to a method for the production of an agricultural composition providing the nucleic acid molecule for the use according to the process of the invention, the nucleic acid molecule of the invention, the vector of the invention, the antisense, RNAi, snRNA, dsRNA, siRNA, miRNA, ta-siRNA, cosuppression molecule, ribozyme, or antibody of the invention, the viral nucleic acid molecule of the invention, or the polypeptide of the invention or comprising the steps of the method according to the invention for the identification of said compound or agonist; and formulating the nucleic acid molecule, the vector or the polypeptide of the invention or the agonist, or compound identified according to the methods or processes of the present invention or with use of the subject matters of the present invention in a form applicable as plant agricultural composition.

[0671] In another embodiment, the present invention relates to a method for the production of the plant culture composition comprising the steps of the method of the present invention; and formulating the compound identified in a form acceptable as agricultural composition.

[0672] Under “acceptable as agricultural composition” is understood, that such a composition is in agreement with the laws regulating the content of fungicides, plant nutrients, herbizides, etc. Preferably such a composition is without any harm for the protected plants and the animals (humans included) fed therewith.

[0673] Throughout this application, various publications are referenced. The disclosures of all of these publications and those references cited within those publications in their entireties are hereby incorporated by reference into this application in order to more fully describe the state of the art to which this invention pertains.

[0674] It should also be understood that the foregoing relates to preferred embodiments of the present invention and that numerous changes and variations may be made therein without departing from the scope of the invention. The invention is further illustrated by the following examples, which are not to be construed in any way as limiting. On the contrary, it is to be clearly understood that various other embodiments, modifications and equivalents thereof, which, after reading the description herein, may suggest themselves to those skilled in the art without departing from the spirit of the present invention and/or the scope of the claims.

[0675] In one embodiment, the increased yield results in an increase of the production of a specific ingredient including, without limitation, an enhanced and/or improved sugar content or sugar composition, an enhanced or improved starch content and/or starch composition, an enhanced and/or improved oil content and/or oil composition (such as enhanced seed oil content), an enhanced or improved protein content and/or protein composition (such as enhanced seed protein content), an enhanced and/or improved vitamin content and/or vitamin composition, or the like.

[0676] Further, in one embodiment, the method of the present invention comprises harvesting the plant or a part of the plant produced or planted and producing fuel with or from the harvested plant or part thereof. Further, in one embodiment, the method of the present invention comprises harvesting a plant part useful for starch isolation and isolating starch from this plant part, wherein the plant is plant useful for starch production, e.g. potato. Further, in one embodiment, the method of the present invention comprises harvesting a plant part useful for oil isolation and isolating oil from this plant part, wherein the plant is plant useful for oil production, e.g. oil seed rape or Canola, cotton, soy, or sunflower.

[0677] For example, in one embodiment, the oil content in the corn seed is increased. Thus, the present invention relates to the production of plants with increased oil content per acre (harvestable oil).

[0678] For example, in one embodiment, the oil content in the soy seed is increased. Thus, the present invention relates to the production of soy plants with increased oil content per acre (harvestable oil).

[0679] For example, in one embodiment, the oil content in the OSR seed is increased. Thus, the present invention relates to the production of OSR plants with increased oil content per acre (harvestable oil).

[0680] For example, the present invention relates to the production of cotton plants with increased oil content per acre (harvestable oil).

Incorporated by reference are further the following applications of which the present applications: EP Patent application EP 08164899.0 filed Sep. 23, 2008, EP patent application EP 08169680.9 filed Nov. 21, 2008 and EP patent application EP 08169875.5 filed Nov. 25, 2008.

[0681] The present invention is exemplified by the following examples without meant to be limited by the example's disclosure.

### EXAMPLE 1

[0682] Engineering Arabidopsis plants with an increased yield, e.g. an increased yield-related trait, for example enhanced tolerance to abiotic environmental stress, for example an increased drought tolerance and/or low temperature tolerance and/or an increased nutrient use efficiency, and/or another mentioned yield-related trait by over-expressing YLR protein genes, e.g. expressing genes of the present invention.

[0683] Cloning of the sequences of the present invention as shown in table I, column 5 and 7, for the expression in plants.

[0684] Unless otherwise specified, standard methods as described in Sambrook et al., Molecular Cloning: A laboratory manual, Cold Spring Harbor 1989, Cold Spring Harbor Laboratory Press are used.

[0685] The inventive sequences as shown in table I, column 5 and 7, were amplified by PCR as described in the protocol of the Pfu Ultra, Pfu Turbo or Herculase DNA polymerase (Stratagene). The composition for the protocol of the Pfu Ultra, Pfu Turbo or Herculase DNA polymerase was as follows: 1×PCR buffer (Stratagene), 0.2 mM of each dNTP, 100 ng genomic DNA of Saccharomyces cerevisiae (strain S288C; Research Genetics, Inc., now Invitrogen), Escherichia coli (strain MG1655; E. coli Genetic Stock Center), Synechocystis sp. (strain PCC6803), Azotobacter vinelandii (strain N. R. Smith, 16), Thermus thermophilus (HB8) or 50 ng cDNA from various tissues and development stages of Arabidopsis thaliana (ecotype Columbia), Physcomitrella patens, Glycine max (variety Resnick), or Zea mays (variety B73, Mo17, A188), 50 pmol forward primer, 50 pmol reverse primer, with or without 1 M Betaine, 2.5 u Pfu Ultra, Pfu Turbo or Herculase DNA polymerase.

[0686] The amplification cycles were as follows:

1 cycle of 2-3 minutes at 94-95° C., then 25-36 cycles with 30-60 seconds at 94-95° C., 30-45 seconds at 50-60° C. and 210-480 seconds at 72° C., followed by 1 cycle of 5-10 minutes at 72° C., then 4-16° C.—preferably for Saccharomyces cerevisiae, Escherichia coli, Synechocystis sp., Azotobacter vinelandii, Thermus thermophilus.

[0687] In case of Arabidopsis thaliana, Brassica napus, Glycine max, Oryza sativa, Physcomitrella patens, Zea mays the amplification cycles were as follows:

1 cycle with 30 seconds at 94° C., 30 seconds at 61° C., 15 minutes at 72° C.,
then 2 cycles with 30 seconds at 94° C., 30 seconds at 60° C., 15 minutes at 72° C.,
then 3 cycles with 30 seconds at 94° C., 30 seconds at 59° C., 15 minutes at 72° C.,
then 4 cycles with 30 seconds at 94° C., 30 seconds at 58° C., 15 minutes at 72° C.,
then 25 cycles with 30 seconds at 94° C., 30 seconds at 57° C., 15 minutes at 72° C.,
then 1 cycle with 10 minutes at 72° C.,
then finally 4-16° C.

[0688] RNA were generated with the RNeasy Plant Kit according to the standard protocol (Qiagen) and Superscript II Reverse Transkriptase was used to produce double stranded cDNA according to the standard protocol (Invitrogen).

[0689] specific primer pairs for the genes to be expressed are shown in table III, column 7. The following adapter sequences were added to Saccharomyces cerevisiae ORF specific primers (see table III) for cloning purposes:

| i) foward primer: | |
|---|---|
| 5′-GGAATTCCAGCTGACCACC-3′ | SEQ ID NO: 1 |
| ii) reverse primer: | |
| 5′-GATCCCCGGGAATTGCCATG-3′ | SEQ ID NO: 2 |

These adaptor sequences allow cloning of the ORF into the various vectors containing the Resgen adaptors, see table column E of table VII.

[0690] The following adapter sequences were added to Saccharomyces cerevisiae, Escherichia coli, Synechocystis sp., Azotobacter vinelandii, Thermus thermophilus, Arabidopsis thaliana, Brassica napus, Glycine max, Oryza sativa, Physcomitrella patens, or Zea mays ORF specific primers for cloning purposes:

| iii) forward primer: | |
|---|---|
| 5′-TTGCTCTTCC-3′ | SEQ ID NO: 3 |
| iiii) reverse primer: | |
| 5′-TTGCTCTTCG-3′ | SEQ ID NO: 4 |

[0691] The adaptor sequences allow cloning of the ORF into the various vectors containing the Colic adaptors, see table column E of table VII.

[0692] Therefore for amplification and cloning of Saccharomyces cerevisiae SEQ ID NO: 1206, a primer consisting of the adaptor sequence i) and the ORF specific sequence SEQ ID NO: 1238 and a second primer consisting of the adaptor sequence ii) and the ORF specific sequence SEQ ID NO: 1239 were used.

[0693] For amplification and cloning of Escherichia coli SEQ ID NO: 63, a primer consisting of the adaptor sequence iii) and the ORF specific sequence SEQ ID NO: 73 and a second primer consisting of the adaptor sequence iiii) and the ORF specific sequence SEQ ID NO: 74 were used.

[0694] For amplification and cloning of Synechocystis sp. SEQ ID NO: 1105, a primer consisting of the adaptor sequence iii) and the ORF specific sequence SEQ ID NO: 1199 and a second primer consisting of the adaptor sequence iiii) and the ORF specific sequence SEQ ID NO: 1200 were used.

[0695] For amplification and cloning of Glycine max SEQ ID NO: 1702, a primer consisting of the adaptor sequence iii) and the ORF specific sequence SEQ ID NO: 1762 and a second primer consisting of the adaptor sequence iiii) and the ORF specific sequence SEQ ID NO: 1763 were used.

[0696] Following these examples every sequence disclosed in table I, preferably column 5, can be cloned by fusing the adaptor sequences to the respective specific primers sequences as disclosed in table III, column 7 using the respective vectors shown in Table VII.

TABLE VII
Overview of the different vectors used for cloning the ORFs and shows
their SEQIDs (column A), their vector names (column B), the promotors they contain for expression
of the ORFs (column C), the additional artificial targeting sequence column D), the
adapter sequence (column E), the expression type conferred by the promoter mentioned in column
B (column F) and the figure number (column G).

| A | B | | D | E | | |
|---|---|---|---|---|---|---|
| Seq | Vector | C | Target | Adapter | F | G |
| ID | Name | Promoter | Seq. | Seq. | Expression Type | FIG. |
| 9 | pMTX0270p | Super | | Colic | non targeted constitutive expression | 6 |
| | | | | | preferentially in green tissues | |
| 31 | pMTX155 | Big35S | | Resgen | non targeted constitutive expression | 7 |
| | | | | | preferentially in green tissues | |
| 32 | VC- | Super | FNR | Resgen | plastidic targeted constitutive expression | 3 |
| | MME354- | | | | preferentially in green | |
| | 1QCZ | | | | tissues | |
| 34 | VC- | Super | IVD | Resgen | mitochondric targeted constitutive | 8 |
| | MME356- | | | | expression preferentially in green | |
| | 1QCZ | | | | tissues | |
| 36 | VC- | USP | | Resgen | non targeted expression preferentially | 9 |
| | MME301- | | | | in seeds | |
| | 1QCZ | | | | | |
| 37 | pMTX461korrp | USP | FNR | Resgen | plastidic targeted expression preferentially | 10 |
| | | | | | in seeds | |
| 39 | VC- | USP | IVD | Resgen | mitochondric targeted expression | 11 |
| | MME462- | | | | preferentially in seeds | |
| | 1QCZ | | | | | |
| 41 | VC- | Super | | Colic | non targeted constitutive expression | 1 |
| | MME220- | | | | preferentially in green tissues | |
| | 1qcz | | | | | |
| 42 | VC- | Super | FNR | Colic | plastidic targeted constitutive expression | 4 |
| | MME432- | | | | preferentially in green | |
| | 1qcz | | | | tissues | |
| 44 | VC- | Super | IVD | Colic | mitochondric targeted constitutive | 12 |
| | MME431- | | | | expression preferentially in green | |
| | 1qcz | | | | tissues | |
| 46 | VC- | PcUbi | | Colic | non targeted constitutive expression | 2 |
| | MME221- | | | | preferentially in green tissues | |
| | 1qcz | | | | | |
| 47 | pMTX447korr | PcUbi | FNR | Colic | plastidic targeted constitutive expression | 13 |
| | | | | | preferentially in green | |
| | | | | | tissues | |
| 49 | VC- | PcUbi | IVD | Colic | mitochondric targeted constitutive | 14 |
| | MME445- | | | | expression preferentially in green | |
| | 1qcz | | | | tissues | |
| 51 | VC- | USP | | Colic | non targeted expression preferentially | 15 |
| | MME289- | | | | in seeds | |
| | 1qcz | | | | | |
| 52 | VC- | USP | FNR | Colic | plastidic targeted expression preferentially | 16 |
| | MME464- | | | | in seeds | |
| | 1qcz | | | | | |
| 54 | VC- | USP | IVD | Colic | mitochondric targeted expression | 17 |
| | MME465- | | | | in preferentially seeds | |
| | 1qcz | | | | | |
| 56 | VC- | Super | | Resgen | non targeted constitutive expression | 5 |
| | MME489- | | | | preferentially in green tissues | |
| | 1QCZ | | | | | |

### EXAMPLE 1B

### Construction of Binary Vectors for Non-Targeted Expression of Proteins

[0697] “Non-targeted” expression in this context means, that no additional targeting sequence were added to the ORF to be expressed.

[0698] For non-targeted expression the binary vectors used for cloning were VC-MME220-1qcz SEQ ID NO 41 (FIG. 1), VC-MME221-1qcz SEQ ID NO 46 (FIG. 2), VC-MME489-1QCZ SEQ ID NO: 56 (FIG. 5), respectively. The binary vectors used for cloning the targeting sequence were VC-MME489-1QCZ SEQ ID NO: 56 (FIG. 5), and pMTX0270p SEQ ID NO 9 (FIG. 6), respectively. Other useful binary vectors are known to the skilled worker; an overview of binary vectors and their use can be found in Hellens R., Mullineaux P. and Klee H., (Trends in Plant Science, 5 (10), 446 (2000)). Such vectors have to be equally equipped with appropriate promoters and targeting sequences.

### EXAMPLE 1C

[0699] Amplification of the plastidic targeting sequence of the gene FNR from Spinacia oleracea and construction of vector for plastid-targeted expression in preferential green tissues or preferential in seeds.

[0700] In order to amplify the targeting sequence of the FNR gene from S. oleracea, genomic DNA was extracted from leaves of 4 weeks old S. oleracea plants (DNeasy Plant Mini Kit, Qiagen, Hilden). The gDNA was used as the template for a PCR.

[0701] To enable cloning of the transit sequence into the vector VC-MME489-1 QCZ and VC-MME301-1QCZ an EcoRI restriction enzyme recognition sequence was added to both the forward and reverse primers, whereas for cloning in the vectors pMTX0270p, VC-MME220-1qcz, VC-MME221-1qcz and VC-MME289-1qcz a PmeI restriction enzyme recognition sequence was added to the forward primer and a NcoI site was added to the reverse primer.

FNR5EcoResgen
SEQ ID NO: 5
ATA gAA TTC gCA TAA ACT TAT CTT CAT AgT TgC C
FNR3EcoResgen
SEQ ID NO: 6
ATA gAA TTC AgA ggC gAT CTg ggC CCT
FNR5PmeColic
SEQ ID NO: 7
ATA gTT TAA ACg CAT AAA CTT ATC TTC ATA gTT gCC
FNR3NcoColic
SEQ ID NO: 8
ATA CCA Tgg AAg AgC AAg Agg CgA TCT ggg CCC T

[0702] The resulting sequence SEQ ID NO: 29 amplified from genomic spinach DNA, comprised a 5′UTR (bp 1-165), and the coding region (bp 166-273 and 351-419). The coding sequence is interrupted by an intronic sequence from bp 274 to bp 350:

(SEQ ID NO: 29)
gcataaacttatcttcatagttgccactccaatttgctccttgaatct
cctccacccaatacataatccactcctccatcacccacttcactacta
aatcaaacttaactctgtttttctctctcctcctttcatttcttattc
ttccaatcatcgtactccgccatgaccaccgctgtcaccgccgctgtt
tctttcccctctaccaaaaccacctctctctccgcccgaagctcctcc
gtcatttcccctgacaaaatcagctacaaaaaggtgattcccaatttc
actgtgttttttattaataatttgttattttgatgatgagatgattaa
tttgggtgctgcaggttcctttgtactacaggaatgtatctgcaactg
ggaaaatgggacccatcagggcccagatcgcctct

[0703] The PCR fragment derived with the primers FNR5EcoResgen and FNR3EcoResgen was digested with EcoRI and ligated in the vectors VC-MME489-1QCZ and VC-MME301-1QCZ, that had also been digested with EcoRI. The correct orientation of the FNR targeting sequence was tested by sequencing. The vector generated in this ligation step were VC-MME354-1QCZ and pMTX461korrp, respectively.

[0704] The PCR fragment derived with the primers FNR5PmeColic and FNR3NcoColic was digested with PmeI and NcoI and ligated in the vectors pMTX0270p, VC-MME220-1qcz, VC-MME221-1qcz and VC-MME289-1qcz that had been digested with SmaI and NcoI. The vectors generated in this ligation step were VC-MME432-1 qcz, VC-MME464-1 qcz and pMTX447korr, respectively.

[0705] For plastidic-targeted constitutive expression in preferentially green tissues an artificial promoter A(ocs)3AmasPmas promoter (Super promotor)) (Ni et al., Plant Journal 7, 661 (1995), WO 95/14098) was used in context of the vector VC-MME354-1QCZ for ORFs from Saccharomyces cerevisiae and in context of the vector VC-MME432-1 qcz for ORFs from Escherichia coli, resulting in each case in an “in-frame” fusion of the FNR targeting sequence with the ORFs.

[0706] For plastidic-targeted expression in preferentially seeds the USP promoter (Bäumlein et al., Mol Gen Genet. 225(3):459-67 (1991)) was used in context of either the vector

[0707] pMTX461 korrp for ORFs from Saccharomyces cerevisiae or in context of the vector VC-MME464-1qcz for ORFs from Escherichia coli, resulting in each case in an “in-frame” fusion of the FNR targeting sequence with the ORFs.

[0708] For plastidic-targeted constitutive expression in preferentially green tissues and seeds the PcUbi promoter was used in context of the vector pMTX447korr for ORFs from Saccharomyces cerevisiae, Escherichia coli, Synechocystis sp., Azotobacter vinelandii, Thermus thermophilus, Arabidopsis thaliana, Brassica napus, Glycine max, Oryza sativa, Physcomitrella patens, or Zea mays, resulting in each case in an “in-frame” fusion of the FNR targeting sequence with the ORFs.

### EXAMPLE 1D

[0709] Construction of binary vectors for mitochondric-targeted expression of proteins: Amplification of the mitochondrial targeting sequence of the gene IVD from Arabidopsis thaliana and construction of vector for mitochondrial-targeted expression in preferential green tissues or preferential in seeds.

[0710] In order to amplify the targeting sequence of the IVD gene from A. thaliana, genomic DNA was extracted from leaves of A. thaliana plants (DNeasy Plant Mini Kit, Qiagen, Hilden). The gDNA was used as the template for a PCR.

[0711] To enable cloning of the transit sequence into the vectors VC-MME489-1 QCZ and VC-MME301-1QCZ an EcoRI restriction enzyme recognition sequence was added to both the forward and reverse primers, whereas for cloning in the vectors VC-MME220-1 qcz, VC-MME221-1qcz and VC-MME289-1qcz a PmeI restriction enzyme recognition sequence was added to the forward primer and a NcoI site was added to the reverse primer.

IVD5EcoResgen
SEQ ID NO: 57
ATA gAA TTC ATg CAg Agg TTT TTC TCC gC
IVD3EcoResgen
SEQ ID NO: 58
ATAg AAT TCC gAA gAA CgA gAA gAg AAA g
IVD5PmeColic
SEQ ID NO: 59
ATA gTT TAA ACA TgC AgA ggT TTT TCT CCg C
IVD3NcoColic
SEQ ID NO: 60
ATA CCA Tgg AAg AgC AAA ggA gAg ACg AAg AAC gAg

[0712] The resulting sequence (SEQ ID NO: 61) amplified from genomic A. thaliana DNA with IVD5EcoResgen and IVD3EcoResgen comprised 81 bp:

SEQ ID NO: 61
Atgcagaggtttttctccgccagatcgattctcggttacgccgtcaag
acgcggaggaggtctttctcttctcgttcttcg

[0713] The resulting sequence (SEQ ID NO: 62) amplified from genomic A. thaliana DNA with IVD5PmeColic and IVD3NcoColic comprised 89 bp:

SEQ ID NO: 62
Atgcagaggtttttctccgccagatcgattctcggttacgccgtcaag
acgcggaggaggtctttctcttctcgttcttcgtctctcct

[0714] The PCR fragment derived with the primers IVD5EcoResgen and IVD3EcoResgen was digested with EcoRI and ligated in the vectors VC-MME489-1QCZ and VC-MME301-1QCZ that had also been digested with EcoRI. The correct orientation of the IVD targeting sequence was tested by sequencing. The vectors generated in this ligation step were VC-MME356-1QCZ and VC-MME462-1QCZ, respectively.

[0715] The PCR fragment derived with the primers IVD5PmeColic and IVD3NcoColic was digested with PmeI and NcoI and ligated in the vectors VC-MME220-1qcz, VC-MME221-1qcz and VC-MME289-1qcz that had been digested with SmaI and NcoI. The vectors generated in this ligation step were VC-MME431-1qcz, VC-MME465-1qcz and VC-MME445-1qcz, respectively.

[0716] For mitochondrial-targeted constitutive expression in preferentially green tissues an artifical promoter A(ocs)3AmasPmas promoter (Super promotor) (Ni et al., Plant Journal 7, 661 (1995), WO 95/14098) was used in context of the vector VC-MME356-1QCZ for ORFs from Saccharomyces cerevisiae and in context of the vector VC-MME431-1qcz for ORFs from Escherichia coli, resulting in each case in an “in-frame” fusion between the IVD sequence and the respective ORFs.

[0717] For mitochondrial-targeted constitutive expression in preferentially seeds the USP promoter (Bäumlein et al., Mol Gen Genet. 225 (3):459-67 (1991)) was used in context of the vector VC-MME462-1 QCZ for ORFs from Saccharomyces cerevisiae and in context of the vector VC-MME465-1 qcz for ORFs from Escherichia coli, resulting in each case in an “in-frame” fusion between the IVD sequence and the respective ORFs.

[0718] For mitochondrial-targeted constitutive expression in preferentially green tissues and seeds the PcUbi promoter was used in context of the vector VC-MME445-1 qcz for ORFs from Saccharomyces cerevisiae, Escherichia coli, Synechocystis sp., Azotobacter vinelandii, Thermus thermophilus, Arabidopsis thaliana, Brassica napus, Glycine max, Oryza sativa, Physcomitrella patens, or Zea mays, resulting in each case in an “in-frame” fusion between the IVD sequence and the respective ORFs.

[0719] Other useful binary vectors are known to the skilled worker; an overview of binary vectors and their use can be found in Hellens R., Mullineaux P. and Klee H., (Trends in Plant Science, 5 (10), 446 (2000)). Such vectors have to be equally equipped with appropriate promoters and targeting sequences.

### EXAMPLE 1E

[0720] Cloning of Inventive Sequences as Shown in Table I, Column 5 and 7 in the Different Expression Vectors.

[0721] For cloning the ORFs of SEQ ID NO: 1206, from S. cerevisiae into vectors containing the Resgen adaptor sequence the respective vector DNA was treated with the restriction enzyme NcoI. For cloning of ORFs from Saccharomyces cerevisiae into vectors containing the Colic adaptor sequence, the respective vector DNA was treated with the restriction enzymes PacI and NcoI following the standard protocol (MBI Fermentas). For cloning of ORFs from Escherichia coli, Synechocystis sp., Azotobacter vinelandii, Thermus thermophilus, Arabidopsis thaliana, Brassica napus, Glycine max, Oryza sativa, Physcomitrella patens, or Zea mays the vector DNA was treated with the restriction enzymes PacI and NcoI following the standard protocol (MBI Fermentas). In all cases the reaction was stopped by inactivation at 70° C. for 20 minutes and purified over QIAquick or NucleoSpin Extract II columns following the standard protocol (Qiagen or Macherey-Nagel).

[0722] Then the PCR-product representing the amplified ORF with the respective adapter sequences and the vector DNA were treated with T4 DNA polymerase according to the standard protocol (MBI Fermentas) to produce single stranded overhangs with the parameters 1 unit T4 DNA polymerase at 37° C. for 2-10 minutes for the vector and 1-2 u T4 DNA polymerase at 15-17° C. for 10-60 minutes for the PCR product representing SEQ ID NO: 1206.

[0723] The reaction was stopped by addition of high-salt buffer and purified over QIAquick or NucleoSpin Extract II columns following the standard protocol (Qiagen or Macherey-Nagel).

[0724] According to this example the skilled person is able to clone all sequences disclosed in table I, preferably column 5.

[0725] Approximately 30-60 ng of prepared vector and a defined amount of prepared amplificate were mixed and hybridized at 65° C. for 15 minutes followed by 37° C. 0.1° C./1 seconds, followed by 37° C. 10 minutes, followed by 0.1° C./1 seconds, then 4-10° C.

[0726] The ligated constructs were transformed in the same reaction vessel by addition of competent E. coli cells (strain DHSalpha) and incubation for 20 minutes at 1° C. followed by a heat shock for 90 seconds at 42° C. and cooling to 1-4° C. Then, complete medium (SOC) was added and the mixture was incubated for 45 minutes at 37° C. The entire mixture was subsequently plated onto an agar plate with 0.05 mg/ml kanamycin and incubated overnight at 37° C.

[0727] The outcome of the cloning step was verified by amplification with the aid of primers which bind upstream and downstream of the integration site, thus allowing the amplification of the insertion. The amplifications were carried out as described in the protocol of Taq DNA polymerase (Gibco-BRL).

[0728] The amplification cycles were as follows:

[0729] 1 cycle of 1-5 minutes at 94° C., followed by 35 cycles of in each case 15-60 seconds at 94° C., 15-60 seconds at 50-66° C. and 5-15 minutes at 72° C., followed by 1 cycle of 10 minutes at 72° C., then 4-16° C.

[0730] Several colonies were checked, but only one colony for which a PCR product of the expected size was detected was used in the following steps.

[0731] A portion of this positive colony was transferred into a reaction vessel filled with complete medium (LB) supplemented with kanamycin and incubated overnight at 37° C.

[0732] The plasmid preparation was carried out as specified in the Qiaprep or NucleoSpin Multi-96 Plus standard protocol (Qiagen or Macherey-Nagel).

### EXAMPLE 1F

### Generation of Transgenic Plants which Express SEQ ID NO: 1206 or Any Other Sequence Disclosed in Table I, Preferably Column 5

[0733] 1-5 ng of the plasmid DNA isolated was transformed by electroporation or transformation into competent cells of Agrobacterium tumefaciens, of strain GV 3101 pMP90 (Koncz and Schell, Mol. Gen. Gent. 204, 383 (1986)). Thereafter, complete medium (YEP) was added and the mixture was transferred into a fresh reaction vessel for 3 hours at 28° C. Thereafter, all of the reaction mixture was plated onto YEP agar plates supplemented with the respective antibiotics, e.g. rifampicine (0.1 mg/ml), gentamycine (0.025 mg/ml and kanamycin (0.05 mg/ml) and incubated for 48 hours at 28° C.

[0734] The agrobacteria that contains the plasmid construct were then used for the trans-formation of plants.

[0735] A colony was picked from the agar plate with the aid of a pipette tip and taken up in 3 ml of liquid TB medium, which also contained suitable antibiotics as described above. The preculture was grown for 48 hours at 28° C. and 120 rpm.

[0736] 400 ml of LB medium containing the same antibiotics as above were used for the main culture. The preculture was transferred into the main culture. It was grown for 18 hours at 28° C. and 120 rpm. After centrifugation at 4 000 rpm, the pellet was resuspended in infiltration medium (MS medium, 10% sucrose).

[0737] In order to grow the plants for the transformation, dishes (Piki Saat 80, green, provided with a screen bottom, 30×20×4.5 cm, from Wiesauplast, Kunststofftechnik, Germany) were half-filled with a GS 90 substrate (standard soil, Werkverband E.V., Germany). The dishes were watered overnight with 0.05% Proplant solution (Chimac-Apriphar, Belgium). A. thaliana C24 seeds (Nottingham Arabidopsis Stock Centre, UK; NASC Stock N906) were scattered over the dish, approximately 1 000 seeds per dish. The dishes were covered with a hood and placed in the stratification facility (8 h, 110 μmol/m2s1, 22° C.; 16 h, dark, 6° C.). After 5 days, the dishes were placed into the short-day controlled environment chamber (8 h, 130 μmol/m2s1, 22° C.; 16 h, dark, 20° C.), where they remained for approximately 10 days until the first true leaves had formed.

[0738] The seedlings were transferred into pots containing the same substrate (Teku pots, 7 cm, LC series, manufactured by Poppelmann GmbH & Co, Germany). Five plants were pricked out into each pot. The pots were then returned into the short-day controlled environment chamber for the plant to continue growing.

[0739] After 10 days, the plants were transferred into the greenhouse cabinet (supplementary illumination, 16 h, 340 μE/m2s, 22° C.; 8 h, dark, 20° C.), where they were allowed to grow for further 17 days.

[0740] For the transformation, 6-week-old Arabidopsis plants, which had just started flowering were immersed for 10 seconds into the above-described agrobacterial suspension which had previously been treated with 10 μl Silwett L77 (Crompton S. A., Osi Specialties, Switzerland). The method in question is described by Clough J. C. and Bent A. F. (Plant J. 16, 735 (1998)).

[0741] The plants were subsequently placed for 18 hours into a humid chamber. Thereafter, the pots were returned to the greenhouse for the plants to continue growing. The plants remained in the greenhouse for another 10 weeks until the seeds were ready for harvesting.

[0742] Depending on the tolerance marker used for the selection of the transformed plants the harvested seeds were planted in the greenhouse and subjected to a spray selection or else first sterilized and then grown on agar plates supplemented with the respective selection agent. Since the vector contained the bar gene as the tolerance marker, plantlets were sprayed four times at an interval of 2 to 3 days with 0.02% BASTA® and transformed plants were allowed to set seeds.

[0743] The seeds of the transgenic A. thaliana plants were stored in the freezer (at −20° C.).

### EXAMPLE 1G

### Plant Screening (Arabidopsis) for Growth Under Limited Nitrogen Supply

[0744] Per transgenic construct 4 independent transgenic lines (=events) were tested (25-28 plants per construct).

[0745] Arabidopsis thaliana seeds are sown in pots containing a 1:1 (v:v) mixture of nutrient depleted soil (“Einheitserde Typ 0”, 30% clay, Tantau, Wansdorf Germany) and sand. Germination is induced by a four day period at 4° C., in the dark. Subsequently the plants are grown under standard growth conditions (photoperiod of 16 h light and 8 h dark, 20° C., 60% relative humidity, and a photon flux density of 150-200 μE). The plants are grown and cultured, inter alia they are watered every second day with a N-depleted nutrient solution. The N-depleted nutrient solution e.g. contains beneath water

| | final | |
|---|---|---|
| mineral nutrient | concentration | |
| KCl | 3.00 | mM |
| MgSO4 × 7 H2O | 0.5 | mM |
| CaCl2 × 6 H2O | 1.5 | mM |
| K2SO4 | 1.5 | mM |
| NaH2PO4 | 1.5 | mM |
| Fe-EDTA | 40 | μM |
| H3BO3 | 25 | μM |
| MnSO4 × H2O | 1 | μM |
| ZnSO4 × 7 H2O | 0.5 | μM |
| Cu2SO4 × 5 H2O | 0.3 | μM |
| Na2MoO4 × 2 H2O | 0.05 | μM |

[0746] After 9 to 10 days the plants are individualized. After a total time of 28 to 31 days the plants are harvested and rated by the fresh weight of the aerial parts of the plants. The biomass increase has been measured as ratio of the fresh weight of the aerial parts of the respective transgenic plant and the non-transgenic wild type plant.

[0747] Biomass production of transgenic Arabidopsis thaliana grown under limited nitrogen supply is shown in Table VIII-A: Biomass production was measured by weighing plant rosettes. Biomass increase was calculated as ratio of average weight for transgenic plants compared to average weight of wild type control plants from the same experiment. The mean biomass increase of transgenic constructs is given (significance value <0.3 and biomass increase >5% (ratio>1.05)).

TABLE VIII-A
Biomass production of transgenic Arabidopsis thaliana
grown under limited nitrogen supply (increased NUE)

| | | | Biomass |
|---|---|---|---|
| SeqID | Target | Locus | Increase |
| 1772 | Plastidic | SLL1091 | 1.096 |
| 1938 | Plastidic | SLR1293 | 1.084 |
| 2042 | Cytoplasmic | YDR461W | 1.155 |
| 2056 | Plastidic | YER170W | 1.142 |
| 2558 | Plastidic | YGR247W | 1.22 |
| 2628 | Cytoplasmic | YJR095W | 1.095 |
| 2711 | Cytoplasmic | YNR047W | 1.1 |
| 2738 | Plastidic | YOL103W | 1.437 |
| 2818 | Cytoplasmic | YOR095C | 1.234 |
| 3437 | Plastidic | B2414_2 | 1.211 |
| 4473 | Plastidic | SLL1091_2 | 1.096 |
| 4639 | Plastidic | SLR1293_2 | 1.084 |
| 4743 | Cytoplasmic | YDR049W_2 | 1.259 |
| 63 | Cytoplasmic | B1670 | 1.112 |
| 80 | Plastidic | B2414 | 1.211 |
| 1105 | Cytoplasmic | SLL1237 | 1.259 |
| 1206 | Cytoplasmic | YDR049W | 1.259 |

### EXAMPLE 1H

### Plant Screening for Growth Under Low Temperature Conditions

[0748] In a standard experiment soil was prepared as 3.5:1 (v/v) mixture of nutrient rich soil (GS90, Tantau, Wansdorf, Germany) and sand. Pots were filled with soil mixture and placed into trays. Water was added to the trays to let the soil mixture take up appropriate amount of water for the sowing procedure. The seeds for transgenic A. thaliana plants were sown in pots (6 cm diameter). Pots were collected until they filled a tray for the growth chamber. Then the filled tray was covered with a transparent lid and transferred into the shelf system of the precooled (4° C.-5° C.) growth chamber. Stratification was established for a period of 2-3 days in the dark at 4° C.-5° C. Germination of seeds and growth was initiated at a growth condition of 20° C., 60% relative humidity, 16 h photoperiod and illumination with fluorescent light at approximately 200 μmol/m2s. Covers were removed 7 days after sowing. BASTA selection was done at day 9 after sowing by spraying pots with plantlets from the top. Therefore, a 0.07% (v/v) solution of BASTA concentrate (183 g/l glufosinate-ammonium) in tap water was sprayed. Transgenic events and wildtype control plants were distributed randomly over the chamber. The location of the trays inside the chambers was changed on working days from day 7 after sowing. Watering was carried out every two days after covers were removed from the trays. Plants were individualized 12-13 days after sowing by removing the surplus of seedlings leaving one seedling in a pot. Cold (chilling to 11° C.-12° C.) was applied 14 days after sowing until the end of the experiment. For measuring biomass performance, plant fresh weight was determined at harvest time (e.g. 29-37 days after sowing, for example 29-30 days after sowing, or, preferably, 35-36 days after sowing) by cutting shoots and weighing them. Beside weighing, phenotypic information was added in case of plants that differ from the wild type control. Plants were in the stage prior to flowering and prior to growth of inflorescence when harvested. Significance values for the statistical significance of the biomass changes were calculated by applying the ‘student's’ t test (parameters: two-sided, unequal variance).

[0749] Three successive experiments were conducted. In the first experiment, one individual of each transformed line was tested.

[0750] In the second experiment, constructs that had been determined as chilling tolerant or resistant in the first experiment, i.e. showed increased yield, in this case increased biomass production, in comparison to wild type, were put through a confirmation screen according to the same experimental procedures. In this experiment, 3 or more lines per construct (26-45 plants per construct) were grown, treated and measured as before.

[0751] In the first two experiments, chilling tolerance or tolerance and biomass production was compared to wild type plants.

[0752] In the third experiment, constructs that had been determined as tolerant or resistant in the second experiment were grown, treated and scored as before. In this experiment, 2 or more lines per construct (24-60 plants per construct) were tested. The results thereof are summarized in table VIII.

[0753] Biomass production was measured by weighing plant rosettes. Biomass increase was calculated as ratio of average weight for trangenic plants compared to average weight of wild type control plants harvested at the same day. The minimum and maximum biomass increase seen within the group of transgenic events is given for a locus with all events showing a significance value <0.1 and a biomass increase >1.1.

TABLE VIII
Biomass production of transgenic A. thaliana after
imposition of chilling stress. (LT with min/max values)

| | | | Biomass In- | Biomass In- |
|---|---|---|---|---|
| SeqID | Target | Locus | crease min | crease max |
| 1702 | Cytoplasmic | GM02LC13512 | 1.756 | 1.844 |
| 1772 | Plastidic | SLL1091 | 1.313 | 1.480 |
| 1938 | Plastidic | SLR1293 | 1.368 | 1.374 |
| 2042 | Cytoplasmic | YDR461W | 1.325 | 1.503 |
| 2056 | Plastidic | YER170W | 1.233 | 1.370 |
| 2558 | Plastidic | YGR247W | 1.331 | 1.331 |
| 2577 | Cytoplasmic | YHR201C | 1.232 | 1.460 |
| 2609 | Cytoplasmic | YJL181W | 1.425 | 1.462 |
| 2628 | Cytoplasmic | YJR095W | 1.764 | 1.764 |
| 2711 | Cytoplasmic | YNR047W | 1.177 | 1.575 |
| 2738 | Plastidic | YOL103W | 1.260 | 1.284 |
| 2818 | Cytoplasmic | YOR095C | 1.485 | 1.516 |
| 3361 | Plastidic | YPL109C | 1.192 | 1.310 |
| 3437 | Plastidic | B2414_2 | 1.219 | 1.421 |
| 4403 | Cytoplasmic | GM02LC13512_2 | 1.756 | 1.844 |
| 4473 | Plastidic | SLL1091_2 | 1.313 | 1.480 |
| 4639 | Plastidic | SLR1293_2 | 1.368 | 1.374 |
| 4743 | Cytoplasmic | YDR049W_2 | 1.403 | 1.669 |
| 63 | Cytoplasmic | B1670 | 1.231 | 1.360 |
| 80 | Plastidic | B2414 | 1.219 | 1.421 |
| 1076 | Cytoplasmic | B2758 | 1.252 | 1.324 |
| 1105 | Cytoplasmic | SLL1237 | 1.166 | 1.384 |
| 1206 | Cytoplasmic | YDR049W | 1.403 | 1.669 |
| 1245 | Plastidic | YIL074C | 1.169 | 1.213 |

### EXAMPLE 1I

### Plant Screening for Growth Under Cycling Drought Conditions

[0754] In the cycling drought assay repetitive stress is applied to plants without leading to desiccation. In a standard experiment soil is prepared as 1:1 (v/v) mixture of nutrient rich soil (GS90, Tantau, Wansdorf, Germany) and quarz sand. Pots (6 cm diameter) were filled with this mixture and placed into trays. Water was added to the trays to let the soil mixture take up appropriate amount of water for the sowing procedure (day 1) and subsequently seeds of trans-genic A. thaliana plants and their wild-type controls were sown in pots. Then the filled tray was covered with a transparent lid and transferred into a precooled (4° C.-5° C.) and darkened growth chamber. Stratification was established for a period of 3-4 days in the dark at 4° C.-5° C. Germination of seeds and growth was initiated at a growth condition of 20° C., 60% relative humidity, 16 h photoperiod and illumination with fluorescent light at approximately 200 μmol/m2s. Covers were removed 7-8 days after sowing. BASTA selection was done at day 10 or day 11 (9 or 10 days after sowing) by spraying pots with plantlets from the top. In the standard experiment, a 0.07% (v/v) solution of BASTA concentrate (183 g/l glufosinate-ammonium) in tap water was sprayed once or, alternatively, a 0.02% (v/v) solution of BASTA was sprayed three times. The wild-type control plants were sprayed with tap water only (instead of spraying with BASTA dissolved in tap water) but were otherwise treated identically. Plants were individualized 13-14 days after sowing by removing the surplus of seedlings and leaving one seedling in soil. Transgenic events and wild-type control plants were evenly distributed over the chamber.

[0755] The water supply throughout the experiment was limited and plants were subjected to cycles of drought and re-watering. Watering was carried out at day 1 (before sowing), day 14 or day 15, day 21 or day 22, and, finally, day 27 or day 28. For measuring biomass production, plant fresh weight was determined one day after the final watering (day 28 or day 29) by cutting shoots and weighing them. Besides weighing, phenotypic information was added in case of plants that differ from the wild type control. Plants were in the stage prior to flowering and prior to growth of inflorescence when harvested. Significance values for the statistical significance of the biomass changes were calculated by applying the ‘student's’ t test (parameters: two-sided, unequal variance).

[0756] For YOL103W four lines (events) per transgenic construct were tested in two successive experimental levels. In the first level one plant per line was tested (4 plants per construct) and in the subsequent level 8-10 plants per line (38 plants per construct) were tested. Biomass performance was evaluated as described above. Data are shown for constructs that displayed increased biomass performance in at least two successive experimental levels.

[0757] Biomass production of transgenic A. thaliana developed under cycling drought growth conditions is shown in Table VIIIc: Biomass production was measured by weighing plant rosettes. Biomass increase was calculated as ratio of average weight for transgenic plants compared to average weight of wild type control plants from the same experiment. The mean biomass increase of transgenic constructs is given (significance value <0.05).

TABLE VIII-C
Biomass production of transgenic A. thaliana developed under
cycling drought growth conditions (increased CD tolerance)

| | | | Biomass |
|---|---|---|---|
| SeqID | Target | Locus | Increase |
| 2738 | Cytoplasmic | YOL103W | 1.772 |

### EXAMPLE 1J

### Plant Screening for Yield Increase Under Standardised Growth Conditions

[0758] In this experiment, a plant screening for yield increase (in this case: biomass yield increase) under standardised growth conditions in the absence of substantial abiotic stress has been performed. In a standard experiment soil is prepared as 3.5:1 (v/v) mixture of nutrient rich soil (GS90, Tantau, Wansdorf, Germany) and quarz sand. Alternatively, plants were sown on nutrient rich soil (GS90, Tantau, Germany). Pots were filled with soil mixture and placed into trays. Water was added to the trays to let the soil mixture take up appropriate amount of water for the sowing procedure. The seeds for transgenic A. thaliana plants and their non-trangenic wild-type controls were sown in pots (6 cm diameter). Then the filled tray was covered with a transparent lid and transferred into a precooled (4° C.-5° C.) and darkened growth chamber. Stratification was established for a period of 3-4 days in the dark at 4° C.-5° C. Germination of seeds and growth was initiated at a growth condition of 20° C., 60% relative humidity, 16 h photoperiod and illumination with fluorescent light at 150-200 μmol/m2s. Covers were removed 7-8 days after sowing. BASTA selection was done at day 10 or day 11 (9 or 10 days after sowing) by spraying pots with plantlets from the top. In the standard experiment, a 0.07% (v/v) solution of BASTA concentrate (183 g/l glufosinate-ammonium) in tap water was sprayed once or, alternatively, a 0.02% (v/v) solution of BASTA was sprayed three times. The wild-type control plants were sprayed with tap water only (instead of spraying with BASTA dissolved in tap water) but were otherwise treated identically. Plants were individualized 13-14 days after sowing by removing the surplus of seedlings and leaving one seedling in soil. Transgenic events and wild-type control plants were evenly distributed over the chamber.

[0759] Watering was carried out every two days after removing the covers in a standard experiment or, alternatively, every day. For measuring biomass performance, plant fresh weight was determined at harvest time (24-29 days after sowing) by cutting shoots and weighing them. Plants were in the stage prior to flowering and prior to growth of inflorescence when harvested. Transgenic plants were compared to the non-transgenic wild-type control plants harvested at the same day. Significance values for the statistical significance of the biomass changes were calculated by applying the ‘student's’ t test (parameters: two-sided, unequal variance).

[0760] Two Different Types of Experimental Procedures were Performed:

[0761] Procedure 1): Per transgenic construct 3-4 independent transgenic lines (=events) were tested (22-30 plants per construct) and biomass performance was evaluated as described above.

[0762] Procedure 2): Four lines per transgenic construct were tested in two successive experimental levels. Only constructs that displayed positive performance were subjected to the next experimental level. In the first level one plant per line was tested (4 plants per construct) and in the subsequent level 10 plants per line (40 plants per construct) were tested. Biomass performance was evaluated as described above. Data from this type of experiment (Procedure 2) are shown for constructs that displayed increased biomass performance in at least two successive experimental levels.

[0763] Biomass production of transgenic A. thaliana grown under standardised growth conditions is shown in TableVIII-D: Biomass production was measured by weighing plant rosettes. Biomass increase was calculated as ratio of average weight of transgenic plants compared to average weight of wild-type control plants from the same experiment. The mean biomass increase of transgenic constructs is given (significance value <0.3 and biomass increase >5% (ratio>1.05)).

TABLE VIII-D
Biomass production of transgenic A. thaliana grown under standardised
growth conditions (increased BM; intrinsic yield)

| | | | Biomass |
|---|---|---|---|
| SeqID | Target | Locus | Increase |
| 1938 | Plastidic | SLR1293 | 1.088 |
| 2628 | Plastidic | YJR095W | 1.316 |
| 2711 | Cytoplasmic | YNR047W | 1.161 |
| 2738 | Plastidic | YOL103W | 1.313 |
| 3437 | Plastidic | B2414_2 | 1.204 |
| 4639 | Plastidic | SLR1293_2 | 1.088 |
| 4743 | Cytoplasmic | YDR049W_2 | 1.166 |
| 63 | Cytoplasmic | B1670 | 1.117 |
| 80 | Plastidic | B2414 | 1.204 |
| 1076 | Cytoplasmic | B2758 | 1.071 |
| 1105 | Cytoplasmic | SLL1237 | 1.068 |
| 1206 | Cytoplasmic | YDR049W | 1.166 |
| 1245 | Plastidic | YIL074C | 1.209 |

### EXAMPLE 2

[0764] Engineering Arabidopsis plants with an increased yield, e.g. an increased yield-related trait, for example enhanced tolerance to abiotic environmental stress, for example an increased drought tolerance and/or low temperature tolerance and/or an increased nutrient use efficiency, and/or another mentioned yield-related trait by over-expressing, the yield-increasing, e.g. YRP-protein, e.g. low temperature resistance and/or tolerance related protein encoding genes from Saccharomyces cereviesae or Synechocystis or E. coli using tissue-specific and/or stress inducible promoters.

[0765] Transgenic Arabidopsis plants are created as in example 1 to express the YRP, e.g. yield increasing, e.g. low temperature resistance and/or tolerance related protein encoding transgenes under the control of a tissue-specific and/or stress inducible promoter.

[0766] T2 generation plants are produced and are grown under stress conditions, preferably conditions of low temperature. Biomass production is determined after a total time of 29 to 30 days starting with the sowing. The transgenic Arabidopsis plant produces more biomass than non-transgenic control plants.

### EXAMPLE 3

[0767] Over-expression of the yield-increasing, e.g. YRP-protein, e.g. low temperature resistance and/or tolerance related protein, e.g. stress related genes from Saccharomyces cereviesae or Synechocystis or E. coli provides tolerance of multiple abiotic stresses

[0768] Plants that exhibit tolerance of one abiotic stress often exhibit tolerance of another environmental stress. This phenomenon of cross-tolerance is not understood at a mechanistic level (McKersie and Leshem, 1994). Nonetheless, it is reasonable to expect that plants exhibiting enhanced tolerance to low temperature, e.g. chilling temperatures and/or freezing temperatures, due to the expression of a transgene might also exhibit tolerance to drought and/or salt and/or other abiotic stresses. In support of this hypothesis, the expression of several genes are up or down-regulated by multiple abiotic stress factors including low temperature, drought, salt, osmoticum, ABA, etc. (e.g. Hong et al., Plant Mol Biol 18, 663 (1992); Jagendorf and Takabe, Plant Physiol 127, 1827 (2001)); Mizoguchi et al., Proc Natl Acad Sci USA 93, 765 (1996); Zhu, Curr Opin Plant Biol 4, 401 (2001)).

[0769] To determine salt tolerance, seeds of A. thaliana are sterilized (100% bleach, 0.1% TritonX for five minutes two times and rinsed five times with ddH2O). Seeds were plated on non-selection media (½ MS, 0.6% phytagar, 0.5 g/L MES, 1% sucrose, 2 μg/ml benamyl). Seeds are allowed to germinate for approximately ten days. At the 4-5 leaf stage, transgenic plants were potted into 5.5 cm diameter pots and allowed to grow (22° C., continuous light) for approximately seven days, watering as needed. To begin the assay, two liters of 100 mM NaCl and ⅛ MS are added to the tray under the pots. To the tray containing the control plants, three liters of ⅛ MS are added. The concentrations of NaCl supplementation are increased stepwise by 50 mM every 4 days up to 200 mM. After the salt treatment with 200 mM, fresh and survival and biomass production of the plants is determined.

[0770] To determine drought tolerance, seeds of the transgenic and low temperature lines are germinated and grown for approximately 10 days to the 4-5 leaf stage as above. The plants are then transferred to drought conditions and can be grown through the flowering and seed set stages of development. Photosynthesis can be measured using chlorophyll fluorescence as an indicator of photosynthetic fitness and integrity of the photosystems. Survival and plant biomass production as an indicators for seed yield is determined.

[0771] Plants that have tolerance to salinity or low temperature have higher survival rates and biomass production including seed yield and dry matter production than susceptible plants.

### EXAMPLE 4

[0772] Engineering alfalfa plants with an increased yield, e.g. an increased yield-related trait, for example enhanced tolerance to abiotic environmental stress, for example an increased drought tolerance and/or low temperature tolerance and/or an increased nutrient use efficiency, and/or another mentioned yield-related trait, e.g. enhanced abiotic environmental stress tolerance and/or increased biomass production by over-expressing yield-increasing, e.g. YRP-protein-coding, e.g. low temperature resistance and/or tolerance related genes from Saccharomyces cereviesae or Synechocystis or E. coli

[0773] A regenerating clone of alfalfa (Medicago sativa) is transformed using state of the art methods (e.g. McKersie et al., Plant Physiol 119, 839 (1999)). Regeneration and transformation of alfalfa is genotype dependent and therefore a regenerating plant is required. Methods to obtain regenerating plants have been described. For example, these can be selected from the cultivar Rangelander (Agriculture Canada) or any other commercial alfalfa variety as described by Brown D. C. W. and Atanassov A. (Plant Cell Tissue Organ Culture 4, 111 (1985)). Alternatively, the RA3 variety (University of Wisconsin) is selected for use in tissue culture (Walker et al., Am. J. Bot. 65, 654 (1978)).

[0774] Petiole explants are cocultivated with an overnight culture of Agrobacterium tumefaciens C58C1 pMP90 (McKersie et al., Plant Physiol 119, 839 (1999)) or LBA4404 containing a binary vector. Many different binary vector systems have been described for plant transformation (e.g. An G., in Agrobacterium Protocols, Methods in Molecular Biology, Vol 44, pp 47-62, Gartland K. M. A. and Davey M. R. eds. Humana Press, Totowa, N.J.). Many are based on the vector pBIN19 described by Bevan (Nucleic Acid Research. 12, 8711 (1984)) that includes a plant gene expression cassette flanked by the left and right border sequences from the Ti plasmid of Agrobacterium tumefaciens. A plant gene expression cassette consists of at least two genes—a selection marker gene and a plant promoter regulating the transcription of the cDNA or genomic DNA of the trait gene. Various selection marker genes can be used including the Arabidopsis gene encoding a mutated acetohydroxy acid synthase (AHAS) enzyme (U.S. Pat. Nos. 5,7673,666 and 6,225,105). Similarly, various promoters can be used to regulate the trait gene that provides constitutive, developmental, tissue or environmental regulation of gene transcription. In this example, the 34S promoter (GenBank Accession numbers M59930 and X16673) is used to provide constitutive expression of the trait gene.

[0775] The explants are cocultivated for 3 days in the dark on SH induction medium containing 288 mg/L Pro, 53 mg/L thioproline, 4.35 g/L K2SO4, and 100 μm acetosyringinone. The explants are washed in half-strength Murashige-Skoog medium (Murashige and Skoog, 1962) and plated on the same SH induction medium without acetosyringinone but with a suitable selection agent and suitable antibiotic to inhibit Agrobacterium growth. After several weeks, somatic embryos are transferred to BOi2Y development medium containing no growth regulators, no antibiotics, and 50 g/L sucrose. Somatic embryos are subsequently germinated on half-strength Murashige-Skoog medium. Rooted seedlings are transplanted into pots and grown in a greenhouse.

[0776] T1 or T2 generation plants are produced and subjected to low temperature experiments, e.g. as described above in example 1. For the assessment of yield increase, e.g. tolerance to low temperature, biomass production, intrinsic yield and/or dry matter production and/or seed yield is compared to plants lacking the transgene, e.g. corresponding non-transgenic wild type plants.

### EXAMPLE 5

[0777] Engineering ryegrass plants with an increased yield, e.g. an increased yield-related trait, for example enhanced tolerance to abiotic environmental stress, for example an increased drought tolerance and/or low temperature tolerance and/or an increased nutrient use efficiency, and/or another mentioned yield-related trait e.g. enhanced stress tolerance, preferably tolerance to low temperature, and/or increased biomass production by overexpressing yield-increasing, e.g. YRP-protein-coding, e.g. tolerance to low temperature related genes from Saccharomyces cereviesae or Synechocystis or E. coli

[0778] Seeds of several different ryegrass varieties may be used as explant sources for transformation, including the commercial variety Gunne available from Svalöf Weibull seed company or the variety Affinity. Seeds are surface-sterilized sequentially with 1% Tween-20 for 1 minute, 100% bleach for 60 minutes, 3 rinses with 5 minutes each with deionized and distilled H2O, and then germinated for 3-4 days on moist, sterile filter paper in the dark. Seedlings are further sterilized for 1 minute with 1% Tween-20, 5 minutes with 75% bleach, and rinsed 3 times with dd H2O, 5 min each.

[0779] Surface-sterilized seeds are placed on the callus induction medium containing Murashige and Skoog basal salts and vitamins, 20 g/L sucrose, 150 mg/L asparagine, 500 mg/L casein hydrolysate, 3 g/L Phytagel, 10 mg/L BAP, and 5 mg/L dicamba. Plates are incubated in the dark at 25° C. for 4 weeks for seed germination and embryogenic callus induction.

[0780] After 4 weeks on the callus induction medium, the shoots and roots of the seedlings are trimmed away, the callus is transferred to fresh media, maintained in culture for another 4 weeks, and then transferred to MSO medium in light for 2 weeks. Several pieces of callus (11-17 weeks old) are either strained through a 10 mesh sieve and put onto callus induction medium, or cultured in 100 ml of liquid ryegrass callus induction media (same medium as for callus induction with agar) in a 250 ml flask. The flask is wrapped in foil and shaken at 175 rpm in the dark at 23° C. for 1 week. Sieving the liquid culture with a 40-mesh sieve collected the cells. The fraction collected on the sieve is plated and cultured on solid ryegrass callus induction medium for 1 week in the dark at 25° C. The callus is then transferred to and cultured on MS medium containing 1% sucrose for 2 weeks.

[0781] Transformation can be accomplished with either Agrobacterium of with particle bombardment methods. An expression vector is created containing a constitutive plant promoter and the cDNA of the gene in a pUC vector. The plasmid DNA is prepared from E. coli cells using with Qiagen kit according to manufacturer's instruction. Approximately 2 g of embryogenic callus is spread in the center of a sterile filter paper in a Petri dish. An aliquot of liquid MSO with 10 g/L sucrose is added to the filter paper. Gold particles (1.0 μm in size) are coated with plasmid DNA according to method of Sanford et al., 1993 and delivered to the embryogenic callus with the following parameters: 500 μg particles and 2 μg DNA per shot, 1300 psi and a target distance of 8.5 cm from stopping plate to plate of callus and 1 shot per plate of callus.

[0782] After the bombardment, calli are transferred back to the fresh callus development medium and maintained in the dark at room temperature for a 1-week period. The callus is then transferred to growth conditions in the light at 25° C. to initiate embryo differentiation with the appropriate selection agent, e.g. 250 nM Arsenal, 5 mg/L PPT or 50 mg/L kanamycin. Shoots resistant to the selection agent are appearing and once rotted are transferred to soil.

[0783] Samples of the primary transgenic plants (TO) are analyzed by PCR to confirm the presence of T-DNA. These results are confirmed by Southern hybridization in which DNA is electrophoresed on a 1% agarose gel and transferred to a positively charged nylon membrane (Roche Diagnostics). The PCR DIG Probe Synthesis Kit (Roche Diagnostics) is used to prepare a digoxigenin-labelled probe by PCR, and used as recommended by the manufacturer.

[0784] Transgenic T0 ryegrass plants are propagated vegetatively by excising tillers. The transplanted tillers are maintained in the greenhouse for 2 months until well established. The shoots are defoliated and allowed to grow for 2 weeks.

[0785] T1 or T2 generation plants are produced and subjected to low temperature experiments, e.g. as described above in example 1. For the assessment of t yield increase, e.g. tolerance to low temperature, biomass production, intrinsic yield and/or dry matter production and/or seed yield is compared to plants lacking the transgene, e.g. corresponding non-transgenic wild type plants.

### EXAMPLE 6

[0786] Engineering soybean plants with an increased yield, e.g. an increased yield-related trait, for example enhanced tolerance to abiotic environmental stress, for example an increased drought tolerance and/or low temperature tolerance and/or an increased nutrient use efficiency, and/or another mentioned yield-related trait e.g. enhanced stress tolerance, preferably tolerance to low temperature, and/or increased biomass production by overexpressing yield-increasing, e.g. YRP-protein coding, e.g. tolerance to low temperature related genes from Saccharomyces cereviesae or Synechocystis or E. coli

[0787] Soybean is transformed according to the following modification of the method described in the Texas A&M patent U.S. Pat. No. 5,164,310. Several commercial soybean varieties are amenable to transformation by this method. The cultivar Jack (available from the Illinois Seed Foundation) is a commonly used for transformation. Seeds are sterilized by immersion in 70% (v/v) ethanol for 6 min and in 25% commercial bleach (NaOCl) supplemented with 0.1% (v/v) Tween for 20 min, followed by rinsing 4 times with sterile double distilled water. Seven-day seedlings are propagated by removing the radical, hypocotyl and one cotyledon from each seedling. Then, the epicotyl with one cotyledon is transferred to fresh germination media in petri dishes and incubated at 25° C. under a 16-h photoperiod (approx. 100 μmol/m2s) for three weeks. Axillary nodes (approx. 4 mm in length) were cut from 3-4 week-old plants. Axillary nodes are excised and incubated in Agrobacterium LBA4404 culture.

[0788] Many different binary vector systems have been described for plant transformation (e.g. An G., in Agrobacterium Protocols. Methods in Molecular Biology Vol. 44, p. 47-62, Gartland K. M. A. and Davey M. R. eds. Humana Press, Totowa, N.J.). Many are based on the vector pBIN19 described by Bevan (Nucleic Acid Research. 12, 8711 (1984)) that includes a plant gene expression cassette flanked by the left and right border sequences from the Ti plasmid of Agrobacterium tumefaciens. A plant gene expression cassette consists of at least two genes—a selection marker gene and a plant promoter regulating the transcription of the cDNA or genomic DNA of the trait gene. Various selection marker genes can be used including the Arabidopsis gene encoding a mutated acetohydroxy acid synthase (AHAS) enzyme (U.S. Pat. Nos. 5,7673,666 and 6,225,105). Similarly, various promoters can be used to regulate the trait gene to provide constitutive, developmental, tissue or environmental regulation of gene transcription. In this example, the 34S promoter (GenBank Accession numbers M59930 and X16673) can be used to provide constitutive expression of the trait gene.

[0789] After the co-cultivation treatment, the explants are washed and transferred to selection media supplemented with 500 mg/L timentin. Shoots are excised and placed on a shoot elongation medium. Shoots longer than 1 cm are placed on rooting medium for two to four weeks prior to transplanting to soil.

[0790] The primary transgenic plants (T0) are analyzed by PCR to confirm the presence of T-DNA. These results are confirmed by Southern hybridization in which DNA is electrophoresed on a 1 agarose gel and transferred to a positively charged nylon membrane (Roche Diagnostics). The PCR DIG Probe Synthesis Kit (Roche Diagnostics) is used to prepare a digoxigenin-labelled probe by PCR, and used as recommended by the manufacturer.

[0791] T1 or T2 generation plants are produced and subjected to low temperature experiments, e.g. as described above in example 1. For the assessment of yield increase, e.g. tolerance to low temperature, biomass production, intrinsic yield and/or dry matter production and/or seed yield is compared to plants lacking the transgene, e.g. corresponding non-transgenic wild type plants.

### EXAMPLE 7

[0792] Engineering Rapeseed/Canola plants with an increased yield, e.g. an increased yield-related trait, for example enhanced tolerance to abiotic environmental stress, for example an increased drought tolerance and/or low temperature tolerance and/or an increased nutrient use efficiency, and/or another mentioned yield-related trait, e.g. enhanced stress tolerance, preferably tolerance to low temperature, and/or increased biomass production by overexpressing yield-increasing, e.g. YRP-protein coding, e.g. tolerance to low temperature related genes from Saccharomyces cereviesae or Synechocystis or E. coli

[0793] Cotyledonary petioles and hypocotyls of 5-6 day-old young seedlings are used as explants for tissue culture and transformed according to Babic et al. (Plant Cell Rep 17, 183 (1998)). The commercial cultivar Westar (Agriculture Canada) is the standard variety used for transformation, but other varieties can be used.

[0794] Agrobacterium tumefaciens LBA4404 containing a binary vector can be used for canola transformation. Many different binary vector systems have been described for plant transformation (e.g. An G., in Agrobacterium Protocols. Methods in Molecular Biology Vol. 44, p. 47-62, Gartland K. M. A. and Davey M. R. eds. Humana Press, Totowa, N.J.). Many are based on the vector pBIN19 described by Bevan (Nucleic Acid Research. 12, 8711 (1984)) that includes a plant gene expression cassette flanked by the left and right border sequences from the Ti plasmid of Agrobacterium tumefaciens. A plant gene expression cassette consists of at least two genes—a selection marker gene and a plant promoter regulating the transcription of the cDNA or genomic DNA of the trait gene. Various selection marker genes can be used including the Arabidopsis gene encoding a mutated acetohydroxy acid synthase (AHAS) enzyme (U.S. Pat. Nos. 5,7673,666 and 6,225,105). Similarly, various promoters can be used to regulate the trait gene to provide constitutive, developmental, tissue or environmental regulation of gene transcription. In this example, the 34S promoter (GenBank Accession numbers M59930 and X16673) can be used to provide constitutive expression of the trait gene.

[0795] Canola seeds are surface-sterilized in 70% ethanol for 2 min., and then in 30% Clorox with a drop of Tween-20 for 10 min, followed by three rinses with sterilized distilled water. Seeds are then germinated in vitro 5 days on half strength MS medium without hormones, 1% sucrose, 0.7% Phytagar at 23° C., 16 h light. The cotyledon petiole explants with the cotyledon attached are excised from the in vitro seedlings, and inoculated with Agrobacterium by dipping the cut end of the petiole explant into the bacterial suspension. The explants are then cultured for 2 days on MSBAP-3 medium containing 3 mg/L BAP, 3% sucrose, 0.7% Phytagar at 23° C., 16 h light. After two days of co-cultivation with Agrobacterium, the petiole explants are transferred to MSBAP-3 medium containing 3 mg/L BAP, cefotaxime, carbenicillin, or timentin (300 mg/L) for 7 days, and then cultured on MSBAP-3 medium with cefotaxime, carbenicillin, or timentin and selection agent until shoot regeneration. When the shoots were 5-10 mm in length, they are cut and transferred to shoot elongation medium (MSBAP-0.5, containing 0.5 mg/L BAP). Shoots of about 2 cm in length are transferred to the rooting medium (MSO) for root induction.

[0796] Samples of the primary transgenic plants (T0) are analyzed by PCR to confirm the presence of T-DNA. These results are confirmed by Southern hybridization in which DNA is electrophoresed on a 1 agarose gel and transferred to a positively charged nylon membrane (Roche Diagnostics). The PCR DIG Probe Synthesis Kit (Roche Diagnostics) is used to prepare a digoxigenin-labelled probe by PCR, and used as recommended by the manufacturer.

[0797] T1 or T2 generation plants are produced and subjected to low temperature experiments, e.g. as described above in example 1. For the assessment of yield increase, e.g. tolerance to low temperature, biomass production, intrinsic yield and/or dry matter production and/or seed yield is compared to plants lacking the transgene, e.g. corresponding non-transgenic wild type plants.

### EXAMPLE 8

[0798] Engineering corn plants with an increased yield, e.g. an increased yield-related trait, for example enhanced tolerance to abiotic environmental stress, for example an increased drought tolerance and/or low temperature tolerance and/or an increased nutrient use efficiency, and/or another mentioned yield-related trait, e.g. enhanced stress tolerance, preferably tolerance to low temperature, and/or increased biomass production by over-expressing yield-increasing, e.g. YRP-protein coding, e.g. low temperature resistance and/or tolerance related genes from Saccharomyces cereviesae or Synechocystis or E. coli

[0799] Transformation of maize (Zea Mays L.) is performed with a modification of the method described by Ishida et al. (Nature Biotech 14745 (1996)). Transformation is genotype-dependent in corn and only specific genotypes are amenable to transformation and regeneration. The inbred line A188 (University of Minnesota) or hybrids with A188 as a parent are good sources of donor material for transformation (Fromm et al. Biotech 8, 833 (1990)), but other genotypes can be used successfully as well. Ears are harvested from corn plants at approximately 11 days after pollination (DAP) when the length of immature embryos is about 1 to 1.2 mm. Immature embryos are co-cultivated with Agrobacterium tumefaciens that carry “super binary” vectors and transgenic plants are recovered through organogenesis. The super binary vector system of Japan Tobacco is described in WO patents WO 94/00977 and WO 95/06722. Vectors were constructed as described. Various selection marker genes can be used including the maize gene encoding a mutated acetohydroxy acid synthase (AHAS) enzyme (U.S. Pat. No. 6,025,541). Similarly, various promoters can be used to regulate the trait gene to provide constitutive, developmental, tissue or environmental regulation of gene transcription. In this example, the 34S promoter (GenBank Accession numbers M59930 and X16673) was used to provide constitutive expression of the trait gene.

[0800] Excised embryos are grown on callus induction medium, then maize regeneration medium, containing imidazolinone as a selection agent. The Petri plates are incubated in the light at 25° C. for 2-3 weeks, or until shoots develop. The green shoots are transferred from each embryo to maize rooting medium and incubated at 25° C. for 2-3 weeks, until roots develop. The rooted shoots are transplanted to soil in the greenhouse. T1 seeds are produced from plants that exhibit tolerance to the imidazolinone herbicides and which are PCR positive for the transgenes.

[0801] The T1 transgenic plants are then evaluated for their enhanced stress tolerance, like tolerance to low temperature, and/or increased biomass production according to the method described in Example 1. The T1 generation of single locus insertions of the T-DNA will segregate for the transgene in a 3:1 ratio. Those progeny containing one or two copies of the transgene are tolerant regarding the imidazolinone herbicide, and exhibit an increased yield, e.g. an increased yield-related trait, for example an enhancement of stress tolerance, like tolerance to low temperature, and/or increased biomass production than those progeny lacking the transgenes.

[0802] T1 or T2 generation plants are produced and subjected to low temperature experiments, e.g. as described above in example 2. For the assessment of yield increase, e.g. tolerance to low temperature, biomass production, intrinsic yield and/or dry matter production and/or seed yield is compared to e.g. corresponding non-transgenic wild type plants.

[0803] Homozygous T2 plants exhibited similar phenotypes. Hybrid plants (F1 progeny) of homozygous transgenic plants and non-transgenic plants also exhibited increased yield, e.g. an increased yield-related trait, for example enhanced tolerance to abiotic environmental stress, for example an increased drought tolerance and/or an increased nutrient use efficiency, and/or another mentioned yield-related trait, e.g. enhanced tolerance to low temperature.

### EXAMPLE 9

[0804] Engineering wheat plants with an increased yield, e.g. an increased yield-related trait, for example enhanced tolerance to abiotic environmental stress, for example an increased drought tolerance and/or low temperature tolerance and/or an increased nutrient use efficiency, and/or another mentioned yield-related trait, e.g. enhanced stress tolerance, preferably tolerance to low temperature, and/or increased biomass production by over-expressing yield-increasing, e.g. YRP-protein coding, e.g. low temperature resistance and/or tolerance related genes from Saccharomyces cereviesae or Synechocystis or E. coli

[0805] Transformation of wheat is performed with the method described by Ishida et al. (Nature Biotech. 14745 (1996)). The cultivar Bobwhite (available from CYMMIT, Mexico) is commonly used in transformation. Immature embryos are co-cultivated with Agrobacterium tumefaciens that carry “super binary” vectors, and transgenic plants are recovered through or ganogenesis. The super binary vector system of Japan Tobacco is described in WO patents WO 94/00977 and WO 95/06722. Vectors were constructed as described. Various selection marker genes can be used including the maize gene encoding a mutated acetohydroxy acid synthase (AHAS) enzyme (U.S. Pat. No. 6,025,541). Similarly, various promoters can be used to regulate the trait gene to provide constitutive, developmental, tissue or environmental regulation of gene transcription. In this example, the 34S promoter (GenBank Accession numbers M59930 and X16673) was used to provide constitutive expression of the trait gene.

[0806] After incubation with Agrobacterium, the embryos are grown on callus induction medium, then regeneration medium, containing imidazolinone as a selection agent. The Petri plates are incubated in the light at 25° C. for 2-3 weeks, or until shoots develop. The green shoots are transferred from each embryo to rooting medium and incubated at 25° C. for 2-3 weeks, until roots develop. The rooted shoots are transplanted to soil in the greenhouse. T1 seeds are produced from plants that exhibit tolerance to the imidazolinone herbicides and which are PCR positive for the transgenes.

[0807] The T1 transgenic plants are then evaluated for their enhanced tolerance to low temperature and/or increased biomass production according to the method described in example 2. The T1 generation of single locus insertions of the T-DNA will segregate for the transgene in a 3:1 ratio. Those progeny containing one or two copies of the transgene are tolerant regarding the imidazolinone herbicide, and exhibit an increased yield, e.g. an increased yield-related trait, for example an enhanced tolerance to low temperature and/or increased biomass production compared to the progeny lacking the transgenes. Homozygous T2 plants exhibit similar phenotypes.

[0808] For the assessment of yield increase, e.g. tolerance to low temperature, biomass production, intrinsic yield and/or dry matter production and/or seed yield is compared to e.g. corresponding non-transgenic wild type plants. For example, plants with an increased yield, e.g. an increased yield-related trait, e.g. higher tolerance to stress, e.g. with an increased nutrient use efficiency or an increased intrinsic yield, and e.g. with higher tolerance to low temperature may show increased biomass production and/or dry matter production and/or seed yield under low temperature when compared to plants lacking the transgene, e.g. to corresponding non-transgenic wild type plants.

### EXAMPLE 10

### Identification of Identical and Heterologous Genes

[0809] Gene sequences can be used to identify identical or heterologous genes from cDNA or genomic libraries. Identical genes (e.g. full-length cDNA clones) can be isolated via nucleic acid hybridization using for example cDNA libraries. Depending on the abundance of the gene of interest, 100,000 up to 1,000,000 recombinant bacteriophages are plated and transferred to nylon membranes. After denaturation with alkali, DNA is immobilized on the membrane by e.g. UV cross linking. Hybridization is carried out at high stringency conditions. In aqueous solution, hybridization and washing is performed at an ionic strength of 1 M NaCl and a temperature of 68° C. Hybridization probes are generated by e.g. radioactive (32P) nick transcription labeling (High Prime, Roche, Mannheim, Germany). Signals are detected by autoradiography.

[0810] Partially identical or heterologous genes that are related but not identical can be identified in a manner analogous to the above-described procedure using low stringency hybridization and washing conditions. For aqueous hybridization, the ionic strength is normally kept at 1 M NaCl while the temperature is progressively lowered from 68 to 42° C.

[0811] Isolation of gene sequences with homology (or sequence identity/similarity) only in a distinct domain of (for example 10-20 amino acids) can be carried out by using synthetic radio labeled oligonucleotide probes. Radiolabeled oligonucleotides are prepared by phosphorylation of the 5-prime end of two complementary oligonucleotides with T4 polynucleotide kinase. The complementary oligonucleotides are annealed and ligated to form concatemers. The double stranded concatemers are than radiolabeled by, for example, nick transcription. Hybridization is normally performed at low stringency conditions using high oligonucleotide concentrations.

### Oligonucleotide Hybridization Solution:

### 6×SSC

[0812] 0.01 M sodium phosphate

### 1 mM EDTA (pH 8)

### 0.5% SDS

[0813] 100 μg/ml denatured salmon sperm DNA
0.1% nonfat dried milk

[0814] During hybridization, temperature is lowered stepwise to 5-10° C. below the estimated oligonucleotide Tm or down to room temperature followed by washing steps and autoradiography. Washing is performed with low stringency such as 3 washing steps using 4×SSC. Further details are described by Sambrook J. et al., 1989, “Molecular Cloning: A Laboratory Manual,” Cold Spring Harbor Laboratory Press or Ausubel F. M. et al., 1994, “Current Protocols in Molecular Biology,” John Wiley & Sons.

### EXAMPLE 11

### Identification of Identical Genes by Screening Expression Libraries with Antibodies

[0815] c-DNA clones can be used to produce recombinant polypeptide for example in E. coli (e.g. Qiagen QIAexpress pQE system). Recombinant polypeptides are then normally affinity purified via Ni-NTA affinity chromatography (Qiagen). Recombinant polypeptides are then used to produce specific antibodies for example by using standard techniques for rabbit immunization. Antibodies are affinity purified using a Ni-NTA column saturated with the recombinant antigen as described by Gu et al., BioTechniques 17, 257 (1994). The antibody can than be used to screen expression cDNA libraries to identify identical or heterologous genes via an immunological screening (Sambrook, J. et al., 1989, “Molecular Cloning: A Laboratory Manual,” Cold Spring Harbor Laboratory Press or Ausubel, F. M. et al., 1994, “Current Protocols in Molecular Biology”, John Wiley & Sons).

### EXAMPLE 12

### In vivo Mutagenesis

[0816] In vivo mutagenesis of microorganisms can be performed by passage of plasmid (or other vector) DNA through E. coli or other microorganisms (e.g. Bacillus spp. or yeasts such as S. cerevisiae) which are impaired in their capabilities to maintain the integrity of their genetic information. Typical mutator strains have mutations in the genes for the DNA repair system (e.g., mutHLS, mutD, mutT, etc.; for reference, see Rupp W. D., DNA repair mechanisms, in: E. coli and Salmonella, p. 2277-2294, ASM, 1996, Washington.) Such strains are well known to those skilled in the art. The use of such strains is illustrated, for example, in Greener A. and Callahan M., Strategies 7, 32 (1994). Transfer of mutated DNA molecules into plants is preferably done after selection and testing in microorganisms. Transgenic plants are generated according to various examples within the exemplification of this document.

### EXAMPLE 13

[0817] Engineering Arabidopsis plants with increased yield, e.g. an increased yield-related trait, for example an enhanced stress tolerance, preferably tolerance to low temperature, and/or increased biomass production by over-expressing YRP encoding genes for example from A. thaliana, Brassica napus, Glycine max, Zea mays or Oryza sativa using tissue-specific or stress-inducible promoters.

[0818] Transgenic Arabidopsis plants over-expressing YRP genes, e.g. low temperature resistance and/or tolerance related protein encoding genes, from for example Brassica napus, Glycine max, Zea mays and Oryza sativa are created as described in example 1 to express the YRP encoding transgenes under the control of a tissue-specific or stress-inducible promoter. T2 generation plants are produced and grown under stress or non-stress conditions, e.g. low temperature conditions. Plants with an increased yield, e.g. an increased yield-related trait, e.g. higher tolerance to stress, e.g. low temperature, or with an increased nutrient use efficiency or an increased intrinsic yield, show increased biomass production and/or dry matter production and/or seed yield under low temperature conditions when compared to plants lacking the transgene, e.g. to corresponding non-transgenic wild type plants.

### EXAMPLE 14

[0819] Engineering alfalfa plants with increased yield, e.g. an increased yield-related trait, for example an enhanced stress tolerance, preferably tolerance to low temperature, and/or increased biomass production by over-expressing YRP genes, e.g. low temperature resistance and/or tolerance related genes for example from A. thaliana, Brassica napus, Glycine max, Zea mays or Oryza sativa for example

[0820] A regenerating clone of alfalfa (Medicago sativa) is transformed using the method of McKersie et al., (Plant Physiol. 119, 839 (1999)). Regeneration and transformation of alfalfa is genotype dependent and therefore a regenerating plant is required. Methods to obtain regenerating plants have been described. For example, these can be selected from the cultivar Rangelander (Agriculture Canada) or any other commercial alfalfa variety as described by Brown and Atanassov (Plant Cell Tissue Organ Culture 4, 111 (1985)). Alternatively, the RA3 variety (University of Wisconsin) has been selected for use in tissue culture (Walker et al., Am. J. Bot. 65, 54 (1978)).

[0821] Petiole explants are cocultivated with an overnight culture of Agrobacterium tumefaciens C58C1 pMP90 (McKersie et al., Plant Physiol 119, 839 (1999)) or LBA4404 containing a binary vector. Many different binary vector systems have been described for plant transformation (e.g. An G., in Agrobacterium Protocols. Methods in Molecular Biology Vol. 44, p. 47-62, Gartland K. M. A. and Davey M. R. eds. Humana Press, Totowa, N.J.). Many are based on the vector pBIN19 described by Bevan (Nucleic Acid Research. 12, 8711 (1984)) that includes a plant gene expression cassette flanked by the left and right border sequences from the Ti plasmid of Agrobacterium tumefaciens. A plant gene expression cassette consists of at least two genes—a selection marker gene and a plant promoter regulating the transcription of the cDNA or genomic DNA of the trait gene. Various selection marker genes can be used including the Arabidopsis gene encoding a mutated acetohydroxy acid synthase (AHAS) enzyme (U.S. Pat. Nos. 5,7673,666 and 6,225,105). Similarly, various promoters can be used to regulate the trait gene that provides constitutive, developmental, tissue or environmental regulation of gene transcription. In this example, the 34S promoter (GenBank Accession numbers M59930 and X16673) was used to provide constitutive expression of the trait gene.

[0822] The explants are cocultivated for 3 days in the dark on SH induction medium containing 288 mg/L Pro, 53 mg/L thioproline, 4.35 g/L K2SO4, and 100 μm acetosyringinone. The explants were washed in half-strength Murashige-Skoog medium (Murashige and Skoog, 1962) and plated on the same SH induction medium without acetosyringinone but with a suitable selection agent and suitable antibiotic to inhibit Agrobacterium growth. After several weeks, somatic embryos are transferred to BOi2Y development medium containing no growth regulators, no antibiotics, and 50 g/L sucrose. Somatic embryos are subsequently germinated on half-strength Murashige-Skoog medium. Rooted seedlings are transplanted into pots and grown in a greenhouse.

[0823] The T0 transgenic plants are propagated by node cuttings and rooted in Turface growth medium. T1 or T2 generation plants are produced and subjected to experiments comprising stress or non-stress conditions, e.g. low temperature conditions as described in previous examples.

[0824] For the assessment of yield increase, e.g. tolerance to low temperature, biomass production, intrinsic yield and/or dry matter production and/or seed yield is compared to e.g. corresponding non-transgenic wild type plants.

[0825] For example, plants with an increased yield, e.g. an increased yield-related trait, e.g. higher tolerance to stress, e.g. with an increased nutrient use efficiency or an increased intrinsic yield, and e.g. with higher tolerance to low temperature may show increased biomass production and/or dry matter production and/or seed yield under low temperature when compared to plants lacking the transgene, e.g. to corresponding non-transgenic wild type plants.

### EXAMPLE 15

[0826] Engineering ryegrass plants with increased yield, e.g. an increased yield-related trait, for example an enhanced stress tolerance, preferably tolerance to low temperature, and/or increased biomass production by over-expressing YRP genes, e.g. low temperature resistance and/or tolerance related genes for example from A. thaliana, Brassica napus, Glycine max, Zea mays or Oryza sativa

[0827] Seeds of several different ryegrass varieties may be used as explant sources for transformation, including the commercial variety Gunne available from Svalöf Weibull seed company or the variety Affinity. Seeds are surface-sterilized sequentially with 1% Tween-20 for 1 minute, 100% bleach for 60 minutes, 3 rinses of 5 minutes each with deionized and distilled H2O, and then germinated for 3-4 days on moist, sterile filter paper in the dark. Seedlings are further sterilized for 1 minute with 1% Tween-20, 5 minutes with 75% bleach, and rinsed 3 times with double distilled H2O, 5 min each.

[0828] Surface-sterilized seeds are placed on the callus induction medium containing Murashige and Skoog basal salts and vitamins, 20 g/L sucrose, 150 mg/L asparagine, 500 mg/L casein hydrolysate, 3 g/L Phytagel, 10 mg/L BAP, and 5 mg/L dicamba. Plates are incubated in the dark at 25° C. for 4 weeks for seed germination and embryogenic callus induction.

[0829] After 4 weeks on the callus induction medium, the shoots and roots of the seedlings are trimmed away, the callus is transferred to fresh media, maintained in culture for another 4 weeks, and then transferred to MSO medium in light for 2 weeks. Several pieces of callus (11-17 weeks old) are either strained through a 10 mesh sieve and put onto callus induction medium, or cultured in 100 ml of liquid ryegrass callus induction media (same medium as for callus induction with agar) in a 250 ml flask. The flask is wrapped in foil and shaken at 175 rpm in the dark at 23° C. for 1 week. Sieving the liquid culture with a 40-mesh sieve collect the cells. The fraction collected on the sieve is plated and cultured on solid ryegrass callus induction medium for 1 week in the dark at 25° C. The callus is then transferred to and cultured on MS medium containing 1% sucrose for 2 weeks.

[0830] Transformation can be accomplished with either Agrobacterium of with particle bombardment methods. An expression vector is created containing a constitutive plant promoter and the cDNA of the gene in a pUC vector. The plasmid DNA is prepared from E. coli cells using with Qiagen kit according to manufacturer's instruction. Approximately 2 g of embryogenic callus is spread in the center of a sterile filter paper in a Petri dish. An aliquot of liquid MSO with 10 g/l sucrose is added to the filter paper. Gold particles (1.0 μm in size) are coated with plasmid DNA according to method of Sanford et al., 1993 and delivered to the embryogenic callus with the following parameters: 500 μg particles and 2 μg DNA per shot, 1300 psi and a target distance of 8.5 cm from stopping plate to plate of callus and 1 shot per plate of callus.

[0831] After the bombardment, calli are transferred back to the fresh callus development medium and maintained in the dark at room temperature for a 1-week period. The callus is then transferred to growth conditions in the light at 25° C. to initiate embryo differentiation with the appropriate selection agent, e.g. 250 nM Arsenal, 5 mg/L PPT or 50 mg/L kanamycin. Shoots resistant to the selection agent appeared and once rooted are transferred to soil.

[0832] Samples of the primary transgenic plants (T0) are analyzed by PCR to confirm the presence of T-DNA. These results are confirmed by Southern hybridization in which DNA is electrophoresed on a 1% agarose gel and transferred to a positively charged nylon membrane (Roche Diagnostics). The PCR DIG Probe Synthesis Kit (Roche Diagnostics) is used to prepare a digoxigenin-labelled probe by PCR, and used as recommended by the manufacturer.

[0833] Transgenic T0 ryegrass plants are propagated vegetatively by excising tillers. The transplanted tillers are maintained in the greenhouse for 2 months until well established. T1 or T2 generation plants are produced and subjected to stress or non-stress conditions, e.g. low temperature experiments, e.g. as described above in example 1.

[0834] For the assessment of yield increase, e.g. tolerance to low temperature, biomass production, intrinsic yield and/or dry matter production and/or seed yield is compared to e.g. corresponding non-transgenic wild type plants. For example, plants with an increased yield, e.g. an increased yield-related trait, e.g. higher tolerance to stress, e.g. with an increased nutrient use efficiency or an increased intrinsic yield, and e.g. with higher tolerance to low temperature may show increased biomass production and/or dry matter production and/or seed yield under low temperature when compared to plants lacking the transgene, e.g. to corresponding non-transgenic wild type plants.

### EXAMPLE 16

[0835] Engineering soybean plants with increased yield, e.g. an increased yield-related trait, for example an enhanced stress tolerance, preferably tolerance to low temperature, and/or increased biomass production by over-expressing YRP genes, e.g. low temperature resistance and/or tolerance related genes, for example from A. thaliana, Brassica napus, Glycine max, Zea mays or Oryza sativa

[0836] Soybean is transformed according to the following modification of the method described in the Texas A&M patent U.S. Pat. No. 5,164,310. Several commercial soybean varieties are amenable to transformation by this method. The cultivar Jack (available from the Illinois Seed Foundation) is a commonly used for transformation. Seeds are sterilized by immersion in 70% (v/v) ethanol for 6 min and in 25% commercial bleach (NaOCl) supplemented with 0.1% (v/v) Tween for 20 min, followed by rinsing 4 times with sterile double distilled water. Seven-day old seedlings are propagated by removing the radical, hypocotyl and one cotyledon from each seedling. Then, the epicotyl with one cotyledon is transferred to fresh germination media in petri dishes and incubated at 25° C. under a 16 h photoperiod (approx. 100 μmol/ms) for three weeks. Axillary nodes (approx. 4 mm in length) are cut from 3-4 week-old plants. Axillary nodes are excised and incubated in Agrobacterium LBA4404 culture.

[0837] Many different binary vector systems have been described for plant transformation (e.g. An G., in Agrobacterium Protocols. Methods in Molecular Biology Vol 44, p. 47-62, Gartland K. M. A. and Davey M. R. eds. Humana Press, Totowa, N.J.). Many are based on the vector pBIN19 described by Bevan (Nucleic Acid Research. 12, 8711 (1984)) that includes a plant gene expression cassette flanked by the left and right border sequences from the Ti plasmid of Agrobacterium tumefaciens. A plant gene expression cassette consists of at least two genes—a selection marker gene and a plant promoter regulating the transcription of the cDNA or genomic DNA of the trait gene. Various selection marker genes can be used including the Arabidopsis gene encoding a mutated acetohydroxy acid synthase (AHAS) enzyme (U.S. Pat. Nos. 5,7673,666 and 6,225,105). Similarly, various promoters can be used to regulate the trait gene to provide constitutive, developmental, tissue or environmental regulation of gene transcription. In this example, the 34S promoter (GenBank Accession numbers M59930 and X16673) is used to provide constitutive expression of the trait gene.

[0838] After the co-cultivation treatment, the explants are washed and transferred to selection media supplemented with 500 mg/L timentin. Shoots are excised and placed on a shoot elongation medium. Shoots longer than 1 cm are placed on rooting medium for two to four weeks prior to transplanting to soil.

[0839] The primary transgenic plants (T0) are analyzed by PCR to confirm the presence of T-DNA. These results are confirmed by Southern hybridization in which DNA is electrophoresed on a 1 agarose gel and transferred to a positively charged nylon membrane (Roche Diagnostics). The PCR DIG Probe Synthesis Kit (Roche Diagnostics) is used to prepare a digoxigenin-labelled probe by PCR, and used as recommended by the manufacturer.

[0840] Soybean plants over-expressing YRP genes, e.g. low temperature resistance and/or tolerance related genes from A. thaliana, Brassica napus, Glycine max, Zea mays or Oryza sativa, show increased yield, for example, have higher seed yields.

[0841] T1 or T2 generation plants are produced and subjected to stress and non-stress conditions, e.g. low temperature experiments, e.g. as described above in example 1.

[0842] For the assessment of yield increase, e.g. tolerance to low temperature, biomass production, intrinsic yield and/or dry matter production and/or seed yield is compared to e.g. corresponding non-transgenic wild type plants. For example, plants with an increased yield, e.g. an increased yield-related trait, e.g. higher tolerance to stress, e.g. with an increased nutrient use efficiency or an increased intrinsic yield, and e.g. with higher tolerance to low temperature may show increased biomass production and/or dry matter production and/or seed yield under low temperature when compared to plants lacking the transgene, e.g. to corresponding non-transgenic wild type plants.

### EXAMPLE 17

[0843] Engineering rapeseed/canola plants with increased yield, e.g. an increased yield-related trait, for example an enhanced stress tolerance, preferably tolerance to low temperature, and/or increased biomass production by over-expressing YRP genes, e.g. low temperature resistance and/or tolerance related genes for example from A. thaliana, Brassica napus, Glycine max, Zea mays or Oryza sativa

[0844] Cotyledonary petioles and hypocotyls of 5-6 day-old young seedlings are used as explants for tissue culture and transformed according to Babic et al. (Plant Cell Rep 17, 183 (1998)). The commercial cultivar Westar (Agriculture Canada) is the standard variety used for transformation, but other varieties can be used.

[0845] Agrobacterium tumefaciens LBA4404 containing a binary vector is used for canola transformation. Many different binary vector systems have been described for plant transformation (e.g. An G., in Agrobacterium Protocols. Methods in Molecular Biology Vol. 44, p. 47-62, Gartland K. M. A. and Davey M. R. eds. Humana Press, Totowa, N.J.). Many are based on the vector pBIN19 described by Bevan (Nucleic Acid Research. 12, 8711 (1984)) that includes a plant gene expression cassette flanked by the left and right border sequences from the Ti plasmid of Agrobacterium tumefaciens. A plant gene expression cassette consists of at least two genes—a selection marker gene and a plant promoter regulating the transcription of the cDNA or genomic DNA of the trait gene. Various selection marker genes can be used including the Arabidopsis gene encoding a mutated acetohydroxy acid synthase (AHAS) enzyme (U.S. Pat. Nos. 5,7673,666 and 6,225,105). Similarly, various promoters can be used to regulate the trait gene to provide constitutive, developmental, tissue or environmental regulation of gene transcription. In this example, the 34S promoter (GenBank Accession numbers M59930 and X16673) is used to provide constitutive expression of the trait gene.

[0846] Canola seeds are surface-sterilized in 70% ethanol for 2 min., and then in 30% Clorox with a drop of Tween-20 for 10 min, followed by three rinses with sterilized distilled water. Seeds are then germinated in vitro 5 days on half strength MS medium without hormones, 1% sucrose, 0.7% Phytagar at 23° C., 16 h light. The cotyledon petiole explants with the cotyledon attached are excised from the in vitro seedlings, and inoculated with Agrobacterium by dipping the cut end of the petiole explant into the bacterial suspension. The explants are then cultured for 2 days on MSBAP-3 medium containing 3 mg/L BAP, 3% sucrose, 0.7% Phytagar at 23° C., 16 h light. After two days of co-cultivation with Agrobacterium, the petiole explants are transferred to MSBAP-3 medium containing 3 mg/l BAP, cefotaxime, carbenicillin, or timentin (300 mg/L) for 7 days, and then cultured on MSBAP-3 medium with cefotaxime, carbenicillin, or timentin and selection agent until shoot regeneration. When the shoots are 5-10 mm in length, they are cut and transferred to shoot elongation medium (MSBAP-0.5, containing 0.5 mg/L BAP). Shoots of about 2 cm in length are transferred to the rooting medium (MSO) for root induction.

[0847] Samples of the primary transgenic plants (TO) are analyzed by PCR to confirm the presence of T-DNA. These results are confirmed by Southern hybridization in which DNA is electrophoresed on a 1 agarose gel and transferred to a positively charged nylon membrane (Roche Diagnostics). The PCR DIG Probe Synthesis Kit (Roche Diagnostics) is used to prepare a digoxigenin-labelled probe by PCR, and used as recommended by the manufacturer.

[0848] The transgenic plants are then evaluated for their increased yield, e.g. an increased yield-related trait, e.g. higher tolerance to stress, e.g. enhanced tolerance to low temperature and/or increased biomass production according to the method described in Example 2. It is found that transgenic rapeseed/canola over-expressing YRP genes, e.g. low temperature resistance and/or tolerance related genes, from A. thaliana, Brassica napus, Glycine max, Zea mays or Oryza sativa show increased yield, for example show an increased yield, e.g. an increased yield-related trait, e.g. higher tolerance to stress, e.g. with enhanced tolerance to low temperature and/or increased biomass production compared to plants without the transgene, e.g. corresponding non-transgenic control plants.

### EXAMPLE 18

[0849] Engineering corn plants with increased yield, e.g. an increased yield-related trait, for example an enhanced stress tolerance, preferably tolerance to low temperature, and/or increased biomass production by over-expressing YRP genes, e.g. tolerance to low temperature related genes for example from A. thaliana, Brassica napus, Glycine max, Zea mays or Oryza sativa

[0850] Transformation of corn (Zea mays L.) is performed with a modification of the method described by Ishida et al. (Nature Biotech 14745 (1996)). Transformation is genotype-dependent in corn and only specific genotypes are amenable to transformation and regeneration. The inbred line A188 (University of Minnesota) or hybrids with A188 as a parent are good sources of donor material for transformation (Fromm et al. Biotech 8, 833 (1990), but other genotypes can be used successfully as well. Ears are harvested from corn plants at approximately 11 days after pollination (DAP) when the length of immature embryos is about 1 to 1.2 mm. Immature embryos are co-cultivated with Agrobacterium tumefaciens that carry “super binary” vectors and transgenic plants are recovered through organogenesis. The super binary vector system of Japan Tobacco is described in WO patents WO 94/00977 and WO 95/06722. Vectors are constructed as described. Various selection marker genes can be used including the corn gene encoding a mutated acetohydroxy acid synthase (AHAS) enzyme (U.S. Pat. No. 6,025,541). Similarly, various promoters can be used to regulate the trait gene to provide constitutive, developmental, tissue or environmental regulation of gene transcription. In this example, the 34S promoter (GenBank Accession numbers M59930 and X16673) is used to provide constitutive expression of the trait gene.

[0851] Excised embryos are grown on callus induction medium, then corn regeneration medium, containing imidazolinone as a selection agent. The Petri plates were incubated in the light at 25° C. for 2-3 weeks, or until shoots develop. The green shoots from each embryo are transferred to corn rooting medium and incubated at 25° C. for 2-3 weeks, until roots develop. The rooted shoots are transplanted to soil in the greenhouse. T1 seeds are produced from plants that exhibit tolerance to the imidazolinone herbicides and are PCR positive for the transgenes.

[0852] The T1 transgenic plants are then evaluated for increased yield, e.g. an increased yield-related trait, e.g. higher tolerance to stress, e.g. with enhanced tolerance to low temperature and/or increased biomass production according to the methods described in Example 2. The T1 generation of single locus insertions of the T-DNA will segregate for the transgene in a 1:2:1 ratio. Those progeny containing one or two copies of the transgene (¾ of the progeny) are tolerant regarding the imidazolinone herbicide, and exhibit an increased yield, e.g. an increased yield-related trait, e.g. higher tolerance to stress, e.g. with enhanced tolerance to low temperature and/or increased biomass production compared to those progeny lacking the transgenes. Tolerant plants have higher seed yields. Homozygous T2 plants exhibited similar phenotypes. Hybrid plants (F1 progeny) of homozygous transgenic plants and non-transgenic plants also exhibited an increased yield, e.g. an increased yield-related trait, e.g. higher tolerance to stress, e.g. with enhanced tolerance to low temperature and/or increased biomass production.

### EXAMPLE 19

[0853] Engineering wheat plants with increased yield, e.g. an increased yield-related trait, for example an enhanced stress tolerance, preferably tolerance to low temperature, and/or increased biomass production by over-expressing YRP genes, e.g. low temperature resistance and/or tolerance related genes, for example from A. thaliana, Brassica napus, Glycine max, Zea mays or Oryza sativa

[0854] Transformation of wheat is performed with the method described by Ishida et al. (Nature Biotech. 14745 (1996)). The cultivar Bobwhite (available from CYMMIT, Mexico) is commonly used in transformation. Immature embryos are co-cultivated with Agrobacterium tumefaciens that carry “super binary” vectors, and transgenic plants are recovered through or ganogenesis. The super binary vector system of Japan Tobacco is described in WO patents WO 94/00977 and WO 95/06722. Vectors are constructed as described. Various selection marker genes can be used including the maize gene encoding a mutated acetohydroxy acid synthase (AHAS) enzyme (U.S. Pat. No. 6,025,541). Similarly, various promoters can be used to regulate the trait gene to provide constitutive, developmental, tissue or environmental regulation of gene transcription. In this example, the 34S promoter (GenBank Accession numbers M59930 and X16673) is used to provide constitutive expression of the trait gene.

[0855] After incubation with Agrobacterium, the embryos are grown on callus induction medium, then regeneration medium, containing imidazolinone as a selection agent. The Petri plates are incubated in the light at 25° C. for 2-3 weeks, or until shoots develop. The green shoots are transferred from each embryo to rooting medium and incubated at 25° C. for 2-3 weeks, until roots develop. The rooted shoots are transplanted to soil in the greenhouse. T1 seeds are produced from plants that exhibit tolerance to the imidazolinone herbicides and which are PCR positive for the transgenes.

[0856] The T1 transgenic plants are then evaluated for their increased yield, e.g. an increased yield-related trait, e.g. higher tolerance to stress, e.g. with enhanced tolerance to low temperature and/or increased biomass production according to the method described in example 2. The T1 generation of single locus insertions of the T-DNA will segregate for the transgene in a 1:2:1 ratio. Those progeny containing one or two copies of the transgene (¾ of the progeny) are tolerant regarding the imidazolinone herbicide, and exhibit an increased yield, e.g. an increased yield-related trait, e.g. higher tolerance to stress, e.g. with enhanced tolerance to low temperature and/or increased biomass production compared to those progeny lacking the transgenes.

[0857] For the assessment of yield increase, e.g. tolerance to low temperature, biomass production, intrinsic yield and/or dry matter production and/or seed yield is compared to e.g. corresponding non-transgenic wild type plants. For example, plants with an increased yield, e.g. an increased yield-related trait, e.g. higher tolerance to stress, e.g. with an increased nutrient use efficiency or an increased intrinsic yield, and e.g. with higher tolerance to low temperature may show increased biomass production and/or dry matter production and/or seed yield under low temperature when compared plants lacking the transgene, e.g. to corresponding non-transgenic wild type plants.

### EXAMPLE 20

[0858] Engineering rice plants with increased yield under condition of transient and repetitive abiotic stress by over-expressing stress related genes from Saccharomyces cerevisiae or E. coli or Synechocystis

[0859] Rice Transformation

[0860] The Agrobacterium containing the expression vector of the invention is used to transform Oryza sativa plants. Mature dry seeds of the rice japonica cultivar Nipponbare are dehusked. Sterilization is carried out by incubating for one minute in 70% ethanol, followed by 30 minutes in 0.2% HgCl2, followed by a 6 times 15 minutes wash with sterile distilled water. The sterile seeds are then germinated on a medium containing 2,4-D (callus induction medium). After incubation in the dark for four weeks, embryogenic, scutellum-derived calli are excised and propagated on the same medium. After two weeks, the calli are multiplied or propagated by subculture on the same medium for another 2 weeks. Embryogenic callus pieces are subcultured on fresh medium 3 days before co-cultivation (to boost cell division activity).

[0861] Agrobacterium strain LBA4404 containing the expression vector of the invention is used for co-cultivation. Agrobacterium is inoculated on AB medium with the appropriate antibiotics and cultured for 3 days at 28° C. The bacteria are then collected and suspended in liquid co-cultivation medium to a density (OD600) of about 1. The suspension is then transferred to a Petri dish and the calli immersed in the suspension for 15 minutes. The callus tissues are then blotted dry on a filter paper and transferred to solidified, co-cultivation medium and incubated for 3 days in the dark at 25° C. Co-cultivated calli are grown on 2,4-D-containing medium for 4 weeks in the dark at 28° C. in the presence of a selection agent. During this period, rapidly growing resistant callus islands developed. After transfer of this material to a regeneration medium and incubation in the light, the embryogenic potential is released and shoots developed in the next four to five weeks. Shoots are excised from the calli and incubated for 2 to 3 weeks on an auxin-containing medium from which they are transferred to soil. Hardened shoots are grown under high humidity and short days in a greenhouse.

[0862] Approximately 35 independent T0 rice transformants are generated for one construct. The primary transformants are transferred from a tissue culture chamber to a greenhouse. After a quantitative PCR analysis to verify copy number of the T-DNA insert, only single copy transgenic plants that exhibit tolerance to the selection agent are kept for harvest of T1 seed. Seeds are then harvested three to five months after transplanting. The method yielded single locus transformants at a rate of over 50% (Aldemita and Hodges 1996, Chan et al. 1993, Hiei et al. 1994).

[0863] For the cycling drought assay repetitive stress is applied to plants without leading to desiccation. The water supply throughout the experiment is limited and plants are subjected to cycles of drought and re-watering. For measuring biomass production, plant fresh weight is determined one day after the final watering by cutting shoots and weighing them.

### EXAMPLE 21

[0864] Engineering rice plants with increased yield under condition of transient and repetitive abiotic stress by over-expressing yield and stress related genes for example from A. thaliana, Brassica napus, Glycine max, Zea mays or Oryza sativa for example

[0865] Rice Transformation

[0866] The Agrobacterium containing the expression vector of the invention is used to transform Oryza sativa plants. Mature dry seeds of the rice japonica cultivar Nipponbare are dehusked. Sterilization is carried out by incubating for one minute in 70% ethanol, followed by 30 minutes in 0.2% HgCl2, followed by a 6 times 15 minutes wash with sterile distilled water. The sterile seeds are then germinated on a medium containing 2,4-D (callus induction medium). After incubation in the dark for four weeks, embryogenic, scutellum-derived calli are excised and propagated on the same medium. After two weeks, the calli are multiplied or propagated by subculture on the same medium for another 2 weeks. Embryogenic callus pieces are subcultured on fresh medium 3 days before co-cultivation (to boost cell division activity).

[0867] Agrobacterium strain LBA4404 containing the expression vector of the invention is used for co-cultivation. Agrobacterium is inoculated on AB medium with the appropriate antibiotics and cultured for 3 days at 28° C. The bacteria are then collected and suspended in liquid co-cultivation medium to a density (OD600) of about 1. The suspension is then transferred to a Petri dish and the calli immersed in the suspension for 15 minutes. The callus tissues are then blotted dry on a filter paper and transferred to solidified, co-cultivation medium and incubated for 3 days in the dark at 25° C. Co-cultivated calli are grown on 2,4-D-containing medium for 4 weeks in the dark at 28° C. in the presence of a selection agent. During this period, rapidly growing resistant callus islands developed. After transfer of this material to a regeneration medium and incubation in the light, the embryogenic potential is released and shoots developed in the next four to five weeks. Shoots are excised from the calli and incubated for 2 to 3 weeks on an auxin-containing medium from which they are transferred to soil. Hardened shoots are grown under high humidity and short days in a greenhouse.

[0868] Approximately 35 independent T0 rice transformants are generated for one construct. The primary transformants are transferred from a tissue culture chamber to a greenhouse. After a quantitative PCR analysis to verify copy number of the T-DNA insert, only single copy transgenic plants that exhibit tolerance to the selection agent are kept for harvest of T1 seed. Seeds are then harvested three to five months after transplanting. The method yielded single locus transformants at a rate of over 50% (Aldemita and Hodges 1996, Chan et al. 1993, Hiei et al. 1994).

[0869] For the cycling drought assay repetitive stress is applied to plants without leading to desiccation. The water supply throughout the experiment is limited and plants are subjected to cycles of drought and re-watering. For measuring biomass production, plant fresh weight is determined one day after the final watering by cutting shoots and weighing them. At an equivalent degree of drought stress, tolerant plants are able to resume normal growth whereas susceptible plants have died or suffer significant injury resulting in shorter leaves and less dry matter.

### FIGURES

[0870] FIG. 1 Vector VC-MME220-1qcz (SEQ ID NO: 41) used for cloning gene of interest for non-targeted expression.

[0871] FIG. 2 Vector VC-MME221-1qcz (SEQ ID NO: 46) used for cloning gene of interest for non-targeted expression.

[0872] FIG. 3 Vector VC-MME354-1QCZ (SEQ ID NO: 32) used for cloning gene of interest for plastidic targeted expression.

[0873] FIG. 4 Vector VC-MME432-1qcz (SEQ ID NO: 42) used for cloning gene of interest for plastidic targeted expression.

[0874] FIG. 5 VC-MME489-1QCZ (SEQ ID NO: 56) used for cloning gene of interest for non-targeted expression and cloning of a targeting sequence.

[0875] FIG. 6. Vector pMTX0270p (SEQ ID NO: 9) used for cloning of a targeting sequence.

[0876] FIG. 7. Vector pMTX155 (SEQ ID NO: 31) used for used for cloning gene of interest for non-targeted expression.

[0877] FIG. 8. Vector VC-MME356-1QCZ (SEQ ID NO: 34) used for mitochondric targeted expression.

[0878] FIG. 9. Vector VC-MME301-1QCZ (SEQ ID NO: 36) used for non-targeted expression in preferentially seeds.

[0879] FIG. 10. Vector pMTX461korrp (SEQ ID NO: 37) used for plastidic targeted expression in preferentially seeds.

[0880] FIG. 11. Vector VC-MME462-1QCZ (SEQ ID NO: 39) used for mitochondric targeted expression in preferentially seeds.

[0881] FIG. 12. Vector VC-MME431-1qcz (SEQ ID NO: 44) used for mitochondric targeted expression.

[0882] FIG. 13. Vector pMTX447korr (SEQ ID NO: 47) used for plastidic targeted expression

[0883] FIG. 14. Vector VC-MME445-1qcz (SEQ ID NO: 49) used for mitochondric targeted expression.

[0884] FIG. 15. Vector VC-MME289-1qcz (SEQ ID NO: 51) used for non targeted expression in preferentially seeds.

[0885] FIG. 16. Vector VC-MME464-1qcz (SEQ ID NO: 52) used for plastidic targeted expression in preferentially seeds.

[0886] FIG. 17. Vector VC-MME465-1qcz (SEQ ID NO: 54) used for mitochondric targeted expression in preferentially seeds.

TABLE IA
Nucleic acid sequence ID numbers

| Ap- | | | | | 5. | | |
|---|---|---|---|---|---|---|---|
| pli- | | | | | Lead | | |
| ca- | 1. | 2. | 3. | 4. | SEQ | 6. | 7. |
| tion | Hit | Project | Locus | Organism | ID | Target | SEQ IDs of Nucleic Acid Homologs |
| 1 | 1 | LT_OEX2 | B1670 | E. coli | 63 | Cyto- | 65, 67, 69, 71 |
| | | | | | | plasmic | |
| 1 | 2 | LT_OEX2 | B2414 | E. coli | 80 | Plastidic | 82, 84, 86, 88, 90, 92, 94, 96, 98, 100, 102, 104, 106, 108, 110, |
| | | | | | | | 112, 114, 116, 118, 120, 122, 124, 126, 128, 130, 132, 134, 136, |
| | | | | | | | 138, 140, 142, 144, 146, 148, 150, 152, 154, 156, 158, 160, 162, |
| | | | | | | | 164, 166, 168, 170, 172, 174, 176, 178, 180, 182, 184, 186, 188, |
| | | | | | | | 190, 192, 194, 196, 198, 200, 202, 204, 206, 208, 210, 212, 214, |
| | | | | | | | 216, 218, 220, 222, 224, 226, 228, 230, 232, 234, 236, 238, 240, |
| | | | | | | | 242, 244, 246, 248, 250, 252, 254, 256, 258, 260, 262, 264, 266, |
| | | | | | | | 268, 270, 272, 274, 276, 278, 280, 282, 284, 286, 288, 290, 292, |
| | | | | | | | 294, 296, 298, 300, 302, 304, 306, 308, 310, 312, 314, 316, 318, |
| | | | | | | | 320, 322, 324, 326, 328, 330, 332, 334, 336, 338, 340, 342, 344, |
| | | | | | | | 346, 348, 350, 352, 354, 356, 358, 360, 362, 364, 366, 368, 370, |
| | | | | | | | 372, 374, 376, 378, 380, 382, 384, 386, 388, 390, 392, 394, 396, |
| | | | | | | | 398, 400, 402, 404, 406, 408, 410, 412, 414, 416, 418, 420, 422, |
| | | | | | | | 424, 426, 428, 430, 432, 434, 436, 438, 440, 442, 444, 446, 448, |
| | | | | | | | 450, 452, 454, 456, 458, 460, 462, 464, 466, 468, 470, 472, 474, |
| | | | | | | | 476, 478, 480, 482, 484, 486, 488, 490, 492, 494, 496, 498, 500, |
| | | | | | | | 502, 504, 506, 508, 510, 512, 514, 516, 518, 520, 522, 524, 526, |
| | | | | | | | 528, 530, 532, 534, 536, 538, 540, 542, 544, 546, 548, 550, 552, |
| | | | | | | | 554, 556, 558, 560, 562, 564, 566, 568, 570, 572, 574, 576, 578, |
| | | | | | | | 580, 582, 584, 586, 588, 590, 592, 594, 596, 598, 600, 602, 604, |
| | | | | | | | 606, 608, 610, 612, 614, 616, 618, 620, 622, 624, 626, 628, 630, |
| | | | | | | | 632, 634, 636, 638, 640, 642, 644, 646, 648, 650, 652, 654, 656, |
| | | | | | | | 658, 660, 662, 664, 666, 668, 670, 672, 674, 676, 678, 680, 682, |
| | | | | | | | 684, 686, 688, 690, 692, 694, 696, 698, 700, 702, 704, 706, 708, |
| | | | | | | | 710, 712, 714, 716, 718, 720, 722, 724, 726, 728, 730, 732, 734, |
| | | | | | | | 736, 738, 740, 742, 744, 746, 748, 750, 752, 754, 756, 758, 760, |
| | | | | | | | 762, 764, 766, 768, 770, 772, 774, 776, 778, 780, 782, 784, 786, |
| | | | | | | | 788, 790, 792, 794, 796, 798, 800, 802, 804, 806, 808, 810, 812, |
| | | | | | | | 814, 816, 818, 820, 822, 824, 826, 828, 830, 832, 834, 836, 838, |
| | | | | | | | 840, 842, 844, 846, 848, 850, 852, 854, 856, 858, 860, 862, 864, |
| | | | | | | | 866, 868, 870, 872, 874, 876, 878, 880, 882, 884, 886, 888, 890, |
| | | | | | | | 892, 894, 896, 898, 900, 902, 904, 906, 908, 910, 912, 914, 916, |
| | | | | | | | 918, 920, 922, 924, 926, 928, 930, 932, 934, 936, 938, 940, 942, |
| | | | | | | | 944, 946, 948, 950, 952, 954, 956, 958, 960, 962, 964, 966, 968, |
| | | | | | | | 970, 972, 974, 976, 978, 980, 982, 984, 986, 988, 990, 992, 994, |
| | | | | | | | 996, 998, 1000 |
| 1 | 3 | LT_OEX2 | B2758 | E. coli | 1076 | Cyto- | 1078, 1080, 1082, 1084, 1086, 1088, 1090, 1092, 1094, 1096 |
| | | | | | | plasmic | |
| 1 | 4 | LT_OEX2 | SLL1237 | Synechocystis | 1105 | Cyto- | 1107, 1109, 1111, 1113, 1115, 1117, 1119, 1121, 1123, 1125, |
| | | | | | | plasmic | 1127, 1129, 1131, 1133, 1135, 1137, 1139, 1141, 1143, 1145, |
| | | | | | | | 1147, 1149, 1151, 1153, 1155, 1157, 1159, 1161, 1163, 1165, |
| | | | | | | | 1167, 1169, 1171, 1173, 1175, 1177, 1179, 1181, 1183, 1185, |
| | | | | | | | 1187, 1189, 1191, 1193, 1195, 1197 |
| 1 | 5 | LT_OEX2 | YDR049W | S. cerevisiae | 1206 | Cyto- | 1208, 1210, 1212, 1214, 1216, 1218, 1220, 1222, 1224, 1226, |
| | | | | | | plasmic | 1228, 1230, 1232, 1234 |
| 1 | 6 | LT_OEX2 | YIL074C | S. cerevisiae | 1245 | Plastidic | 1247, 1249, 1251, 1253, 1255, 1257, 1259, 1261, 1263, 1265, |
| | | | | | | | 1267, 1269, 1271, 1273, 1275, 1277, 1279, 1281, 1283, 1285, |
| | | | | | | | 1287, 1289, 1291, 1293, 1295, 1297, 1299, 1301, 1303, 1305, |
| | | | | | | | 1307, 1309, 1311, 1313, 1315, 1317, 1319, 1321, 1323, 1325, |
| | | | | | | | 1327, 1329, 1331, 1333, 1335, 1337, 1339, 1341, 1343, 1345, |
| | | | | | | | 1347, 1349, 1351, 1353, 1355, 1357, 1359, 1361, 1363, 1365, |
| | | | | | | | 1367, 1369, 1371, 1373, 1375, 1377, 1379, 1381, 1383, 1385, |
| | | | | | | | 1387, 1389, 1391, 1393, 1395, 1397, 1399, 1401, 1403, 1405, |
| | | | | | | | 1407, 1409, 1411, 1413, 1415, 1417, 1419, 1421, 1423, 1425, |
| | | | | | | | 1427, 1429, 1431, 1433, 1435, 1437, 1439, 1441, 1443, 1445, |
| | | | | | | | 1447, 1449, 1451, 1453, 1455, 1457, 1459, 1461, 1463, 1465, |
| | | | | | | | 1467, 1469, 1471, 1473, 1475, 1477, 1479, 1481, 1483, 1485, |
| | | | | | | | 1487, 1489, 1491, 1493, 1495, 1497, 1499, 1501, 1503, 1505, |
| | | | | | | | 1507, 1509, 1511 |
| 1 | 9 | LT_OEX2 | GM02LC13512 | G. max | 1702 | Cyto- | 1704, 1706, 1708, 1710, 1712, 1714, 1716, 1718, 1720, 1722, |
| | | | | | | plasmic | 1724, 1726, 1728, 1730, 1732, 1734 |
| 1 | 10 | LT_OEX2 | SLL1091 | Synechocystis | 1772 | Plastidic | 1774, 1776, 1778, 1780, 1782, 1784, 1786, 1788, 1790, 1792, |
| | | | | | | | 1794, 1796, 1798, 1800, 1802, 1804, 1806, 1808, 1810, 1812, |
| | | | | | | | 1814, 1816, 1818, 1820, 1822, 1824, 1826, 1828, 1830, 1832, |
| | | | | | | | 1834, 1836, 1838, 1840, 1842, 1844, 1846, 1848, 1850, 1852, |
| | | | | | | | 1854, 1856, 1858, 1860, 1862, 1864, 1866, 1868, 1870, 1872, |
| | | | | | | | 1874, 1876, 1878, 1880, 1882, 1884, 1886, 1888, 1890, 1892, |
| | | | | | | | 1894, 1896, 1898, 1900, 1902, 1904, 1906, 1908, 1910, 1912, |
| | | | | | | | 1914, 1916 |
| 1 | 11 | LT_OEX2 | SLR1293 | Synechocystis | 1938 | Plastidic | 1940, 1942, 1944, 1946, 1948, 1950, 1952, 1954, 1956, 1958, |
| | | | | | | | 1960, 1962, 1964, 1966, 1968, 1970, 1972, 1974, 1976, 1978, |
| | | | | | | | 1980, 1982, 1984, 1986, 1988, 1990, 1992, 1994, 1996, 1998, |
| | | | | | | | 2000, 2002, 2004, 2006, 2008, 2010, 2012, 2014, 2016, 2018, |
| | | | | | | | 2020, 2022, 2024, 2026, 2028 |
| 1 | 12 | LT_OEX2 | YDR461W | S. cerevisiae | 2042 | Cyto- | 2044, 2046, 2048, 2050 |
| 1 | 13 | LT_OEX2 | YER170W | S. cerevisiae | 2056 | Plastidic | 2058, 2060, 2062, 2064, 2066, 2068, 2070, 2072, 2074, 2076, |
| | | | | | | | 2078, 2080, 2082, 2084, 2086, 2088, 2090, 2092, 2094, 2096, |
| | | | | | | | 2098, 2100, 2102, 2104, 2106, 2108, 2110, 2112, 2114, 2116, |
| | | | | | | | 2118, 2120, 2122, 2124, 2126, 2128, 2130, 2132, 2134, 2136, |
| | | | | | | | 2138, 2140, 2142, 2144, 2146, 2148, 2150, 2152, 2154, 2156, |
| | | | | | | | 2158, 2160, 2162, 2164, 2166, 2168, 2170, 2172, 2174, 2176, |
| | | | | | | | 2178, 2180, 2182, 2184, 2186, 2188, 2190, 2192, 2194, 2196, |
| | | | | | | | 2198, 2200, 2202, 2204, 2206, 2208, 2210, 2212, 2214, 2216, |
| | | | | | | | 2218, 2220, 2222, 2224, 2226, 2228, 2230, 2232, 2234, 2236, |
| | | | | | | | 2238, 2240, 2242, 2244, 2246, 2248, 2250, 2252, 2254, 2256, |
| | | | | | | | 2258, 2260, 2262, 2264, 2266, 2268, 2270, 2272, 2274, 2276, |
| | | | | | | | 2278, 2280, 2282, 2284, 2286, 2288, 2290, 2292, 2294, 2296, |
| | | | | | | | 2298, 2300, 2302, 2304, 2306, 2308, 2310, 2312, 2314, 2316, |
| | | | | | | | 2318, 2320, 2322, 2324, 2326, 2328, 2330, 2332, 2334, 2336, |
| | | | | | | | 2338, 2340, 2342, 2344, 2346, 2348, 2350, 2352, 2354, 2356, |
| | | | | | | | 2358, 2360, 2362, 2364, 2366, 2368, 2370, 2372, 2374, 2376, |
| | | | | | | | 2378, 2380, 2382, 2384, 2386, 2388, 2390, 2392, 2394, 2396, |
| | | | | | | | 2398, 2400, 2402, 2404, 2406, 2408, 2410, 2412, 2414, 2416, |
| | | | | | | | 2418, 2420, 2422, 2424, 2426, 2428, 2430, 2432, 2434, 2436, |
| | | | | | | | 2438, 2440, 2442, 2444, 2446, 2448, 2450, 2452, 2454, 2456, |
| | | | | | | | 2458, 2460, 2462, 2464, 2466, 2468, 2470, 2472, 2474, 2476, |
| | | | | | | | 2478, 2480, 2482, 2484, 2486, 2488, 2490, 2492, 2494, 2496, |
| | | | | | | | 2498, 2500, 2502, 2504, 2506, 2508, 2510, 2512, 2514, 2516, |
| | | | | | | | 2518, 2520, 2522, 2524, 2526 |
| 1 | 14 | LT_OEX2 | YGR247W | S. cerevisiae | 2558 | Plastidic | 2560, 2562, 2564, 2566, 2568 |
| 1 | 15 | LT_OEX2 | YHR201C | S. cerevisiae | 2577 | Cyto- | 2579, 2581, 2583, 2585, 2587, 2589, 2591, 2593, 2595, 2597, |
| | | | | | | | 2599, 2601 |
| 1 | 16 | LT_OEX2 | YJL181W | S. cerevisiae | 2609 | Cyto- | 2611, 2613 |
| | | | | | | plasmic | |
| 1 | 17 | LT_OEX2 | YJR095W | S. cerevisiae | 2628 | Cyto- | 2630, 2632, 2634, 2636, 2638, 2640, 2642, 2644, 2646, 2648, |
| | | | | | | plasmic | 2650, 2652, 2654, 2656, 2658, 2660, 2662, 2664, 2666, 2668, |
| | | | | | | | 2670, 2672, 2674, 2676, 2678 |
| 1 | 18 | LT_OEX2 | YNR047W | S. cerevisiae | 2711 | Cyto- | 2713, 2715, 2717, 2719, 2721, 2723 |
| | | | | | | plasmic | |
| 1 | 19 | LT_OEX2 | YOL103W | S. cerevisiae | 2738 | Plastidic | 2740, 2742, 2744, 2746, 2748, 2750, 2752, 2754, 2756, 2758, |
| | | | | | | | 2760, 2762, 2764, 2766, 2768, 2770, 2772, 2774, 2776, 2778, |
| | | | | | | | 2780, 2782, 2784, 2786 |
| 1 | 20 | LT_OEX2 | YOR095C | S. cerevisiae | 2818 | Cyto- | 2820, 2822, 2824, 2826, 2828, 2830, 2832, 2834, 2836, 2838, |
| | | | | | | plasmic | 2840, 2842, 2844, 2846, 2848, 2850, 2852, 2854, 2856, 2858, |
| | | | | | | | 2860, 2862, 2864, 2866, 2868, 2870, 2872, 2874, 2876, 2878, |
| | | | | | | | 2880, 2882, 2884, 2886, 2888, 2890, 2892, 2894, 2896, 2898, |
| | | | | | | | 2900, 2902, 2904, 2906, 2908, 2910, 2912, 2914, 2916, 2918, |
| | | | | | | | 2920, 2922, 2924, 2926, 2928, 2930, 2932, 2934, 2936, 2938, |
| | | | | | | | 2940, 2942, 2944, 2946, 2948, 2950, 2952, 2954, 2956, 2958, |
| | | | | | | | 2960, 2962, 2964, 2966, 2968, 2970, 2972, 2974, 2976, 2978, |
| | | | | | | | 2980, 2982, 2984, 2986, 2988, 2990, 2992, 2994, 2996, 2998, |
| | | | | | | | 3000, 3002, 3004, 3006, 3008, 3010, 3012, 3014, 3016, 3018, |
| | | | | | | | 3020, 3022, 3024, 3026, 3028, 3030, 3032, 3034, 3036, 3038, |
| | | | | | | | 3040, 3042, 3044, 3046, 3048, 3050, 3052, 3054, 3056, 3058, |
| | | | | | | | 3060, 3062, 3064, 3066, 3068, 3070, 3072, 3074, 3076, 3078, |
| | | | | | | | 3080, 3082, 3084, 3086, 3088, 3090, 3092, 3094, 3096, 3098, |
| | | | | | | | 3100, 3102, 3104, 3106, 3108, 3110, 3112, 3114, 3116, 3118, |
| | | | | | | | 3120, 3122, 3124, 3126, 3128, 3130, 3132, 3134, 3136, 3138, |
| | | | | | | | 3140, 3142, 3144, 3146, 3148, 3150, 3152, 3154, 3156, 3158, |
| | | | | | | | 3160, 3162, 3164, 3166, 3168, 3170, 3172, 3174, 3176, 3178, |
| | | | | | | | 3180, 3182, 3184, 3186, 3188, 3190, 3192, 3194, 3196, 3198, |
| | | | | | | | 3200, 3202, 3204, 3206, 3208, 3210, 3212, 3214, 3216, 3218, |
| | | | | | | | 3220, 3222, 3224, 3226, 3228, 3230, 3232, 3234, 3236, 3238, |
| | | | | | | | 3240, 3242, 3244, 3246, 3248, 3250, 3252, 3254, 3256, 3258, |
| | | | | | | | 3260, 3262, 3264, 3266, 3268, 3270, 3272, 3274, 3276, 3278, |
| | | | | | | | 3280, 3282, 3284, 3286, 3288, 3290, 3292, 3294, 3296, 3298, |
| | | | | | | | 3300, 3302, 3304, 3306, 3308, 3310, 3312, 3314, 3316, 3318, |
| | | | | | | | 3320, 3322, 3324, 3326, 3328, 3330, 3332, 3334, 3336, 3338, |
| | | | | | | | 3340, 3342, 3344, 3346 |
| 1 | 21 | LT_OEX2 | YPL109C | S. cerevisiae | 3361 | Plastidic | 3363, 3365, 3367, 3369, 3371, 3373, 3375, 3377, 3379, 3381, |
| | | | | | | | 3383, 3385, 3387, 3389, 3391, 3393, 3395, 3397, 3399, 3401, |
| | | | | | | | 3403, 3405, 3407, 3409, 3411, 3413, 3415, 3417, 3419 |
| 1 | 22 | LT_OEX2 | B2414_2 | E. coli | 3437 | Plastidic | 3439, 3441, 3443, 3445, 3447, 3449, 3451, 3453, 3455, 3457, |
| | | | | | | | 3459, 3461, 3463, 3465, 3467, 3469, 3471, 3473, 3475, 3477, |
| | | | | | | | 3479, 3481, 3483, 3485, 3487, 3489, 3491, 3493, 3495, 3497, |
| | | | | | | | 3499, 3501, 3503, 3505, 3507, 3509, 3511, 3513, 3515, 3517, |
| | | | | | | | 3519, 3521, 3523, 3525, 3527, 3529, 3531, 3533, 3535, 3537, |
| | | | | | | | 3539, 3541, 3543, 3545, 3547, 3549, 3551, 3553, 3555, 3557, |
| | | | | | | | 3559, 3561, 3563, 3565, 3567, 3569, 3571, 3573, 3575, 3577, |
| | | | | | | | 3579, 3581, 3583, 3585, 3587, 3589, 3591, 3593, 3595, 3597, |
| | | | | | | | 3599, 3601, 3603, 3605, 3607, 3609, 3611, 3613, 3615, 3617, |
| | | | | | | | 3619, 3621, 3623, 3625, 3627, 3629, 3631, 3633, 3635, 3637, |
| | | | | | | | 3639, 3641, 3643, 3645, 3647, 3649, 3651, 3653, 3655, 3657, |
| | | | | | | | 3659, 3661, 3663, 3665, 3667, 3669, 3671, 3673, 3675, 3677, |
| | | | | | | | 3679, 3681, 3683, 3685, 3687, 3689, 3691, 3693, 3695, 3697, |
| | | | | | | | 3699, 3701, 3703, 3705, 3707, 3709, 3711, 3713, 3715, 3717, |
| | | | | | | | 3719, 3721, 3723, 3725, 3727, 3729, 3731, 3733, 3735, 3737, |
| | | | | | | | 3739, 3741, 3743, 3745, 3747, 3749, 3751, 3753, 3755, 3757, |
| | | | | | | | 3759, 3761, 3763, 3765, 3767, 3769, 3771, 3773, 3775, 3777, |
| | | | | | | | 3779, 3781, 3783, 3785, 3787, 3789, 3791, 3793, 3795, 3797, |
| | | | | | | | 3799, 3801, 3803, 3805, 3807, 3809, 3811, 3813, 3815, 3817, |
| | | | | | | | 3819, 3821, 3823, 3825, 3827, 3829, 3831, 3833, 3835, 3837, |
| | | | | | | | 3839, 3841, 3843, 3845, 3847, 3849, 3851, 3853, 3855, 3857, |
| | | | | | | | 3859, 3861, 3863, 3865, 3867, 3869, 3871, 3873, 3875, 3877, |
| | | | | | | | 3879, 3881, 3883, 3885, 3887, 3889, 3891, 3893, 3895, 3897, |
| | | | | | | | 3899, 3901, 3903, 3905, 3907, 3909, 3911, 3913, 3915, 3917, |
| | | | | | | | 3919, 3921, 3923, 3925, 3927, 3929, 3931, 3933, 3935, 3937, |
| | | | | | | | 3939, 3941, 3943, 3945, 3947, 3949, 3951, 3953, 3955, 3957, |
| | | | | | | | 3959, 3961, 3963, 3965, 3967, 3969, 3971, 3973, 3975, 3977, |
| | | | | | | | 3979, 3981, 3983, 3985, 3987, 3989, 3991, 3993, 3995, 3997, |
| | | | | | | | 3999, 4001, 4003, 4005, 4007, 4009, 4011, 4013, 4015, 4017, |
| | | | | | | | 4019, 4021, 4023, 4025, 4027, 4029, 4031, 4033, 4035, 4037, |
| | | | | | | | 4039, 4041, 4043, 4045, 4047, 4049, 4051, 4053, 4055, 4057, |
| | | | | | | | 4059, 4061, 4063, 4065, 4067, 4069, 4071, 4073, 4075, 4077, |
| | | | | | | | 4079, 4081, 4083, 4085, 4087, 4089, 4091, 4093, 4095, 4097, |
| | | | | | | | 4099, 4101, 4103, 4105, 4107, 4109, 4111, 4113, 4115, 4117, |
| | | | | | | | 4119, 4121, 4123, 4125, 4127, 4129, 4131, 4133, 4135, 4137, |
| | | | | | | | 4139, 4141, 4143, 4145, 4147, 4149, 4151, 4153, 4155, 4157, |
| | | | | | | | 4159, 4161, 4163, 4165, 4167, 4169, 4171, 4173, 4175, 4177, |
| | | | | | | | 4179, 4181, 4183, 4185, 4187, 4189, 4191, 4193, 4195, 4197, |
| | | | | | | | 4199, 4201, 4203, 4205, 4207, 4209, 4211, 4213, 4215, 4217, |
| | | | | | | | 4219, 4221, 4223, 4225, 4227, 4229, 4231, 4233, 4235, 4237, |
| | | | | | | | 4239, 4241, 4243, 4245, 4247, 4249, 4251, 4253, 4255, 4257, |
| | | | | | | | 4259, 4261, 4263, 4265, 4267, 4269, 4271, 4273, 4275, 4277, |
| | | | | | | | 4279, 4281, 4283, 4285, 4287, 4289, 4291, 4293, 4295, 4297, |
| | | | | | | | 4299, 4301, 4303, 4305, 4307, 4309, 4311, 4313, 4315, 4317, |
| | | | | | | | 4319, 4321, 4323, 4325, 4327 |
| 1 | 23 | LT_OEX2 | GM02LC13512_2 | G. max | 4403 | Cyto- | 4405, 4407, 4409, 4411, 4413, 4415, 4417, 4419, 4421, 4423, |
| | | | | | | plasmic | 4425, 4427, 4429, 4431, 4433, 4435 |
| 1 | 24 | LT_OEX2 | SLL1091_ | Synechocystis | 4473 | Plastidic | 4475, 4477, 4479, 4481, 4483, 4485, 4487, 4489, 4491, 4493, |
| | | | | | | | 4495, 4497, 4499, 4501, 4503, 4505, 4507, 4509, 4511, 4513, |
| | | | | | | | 4515, 4517, 4519, 4521, 4523, 4525, 4527, 4529, 4531, 4533, |
| | | | | | | | 4535, 4537, 4539, 4541, 4543, 4545, 4547, 4549, 4551, 4553, |
| | | | | | | | 4555, 4557, 4559, 4561, 4563, 4565, 4567, 4569, 4571, 4573, |
| | | | | | | | 4575, 4577, 4579, 4581, 4583, 4585, 4587, 4589, 4591, 4593, |
| | | | | | | | 4595, 4597, 4599, 4601, 4603, 4605, 4607, 4609, 4611, 4613, |
| | | | | | | | 4615, 4617 |
| 1 | 25 | LT_OEX2 | SLR1293_ | Synechocystis | 4639 | Plastidic | 4641, 4643, 4645, 4647, 4649, 4651, 4653, 4655, 4657, 4659, |
| | | | | | | | 4661, 4663, 4665, 4667, 4669, 4671, 4673, 4675, 4677, 4679, |
| | | | | | | | 4681, 4683, 4685, 4687, 4689, 4691, 4693, 4695, 4697, 4699, |
| | | | | | | | 4701, 4703, 4705, 4707, 4709, 4711, 4713, 4715, 4717, 4719, |
| | | | | | | | 4721, 4723, 4725, 4727, 4729 |
| 1 | 26 | LT_OEX2 | YDR049W_2 | S. cerevisiae. | 4743 | Cyto- | 4745, 4747, 4749, 4751, 4753, 4755, 4757, 4759, 4761, 4763, |
| | | | | | | plasmic | 4765, 4767, 4769, 4771 |

TABLE IB
Nucleic acid sequence ID numbers

| | | | | | 5. | | |
|---|---|---|---|---|---|---|---|
| | | | | | Lead | | |
| Appli- | 1. | 2. | 3. | 4. | SEQ | 6. | 7. |
| cation | Hit | Project | Locus | Organism | ID | Target | SEQ IDs of Nucleic Acid Homologs |
| 1 | 1 | LT_OEX2 | B1670 | E. coli | 63 | Cytoplasmic | — |
| 1 | 2 | LT_OEX2 | B2414 | E. coli | 80 | Plastidic | 1002, 1004, 1006, 1008, 1010, 1012, 1014, 1016, 1018, 1020 |
| | | | | | | | 1022, 1024, 1026, 1028, 1030, 1032, 1034, 1036, 1038, 1040 |
| | | | | | | | 1042, 1044, 1046, 1048, 1050, 1052, 1054, 1056, 1058, 1060, |
| | | | | | | | 1062, 1064, 1066, 1068 |
| 1 | 3 | LT_OEX2 | B2758 | E. coli | 1076 | Cytoplasmic | — |
| 1 | 4 | LT_OEX2 | SLL1237 | Synechocystis | 1105 | Cytoplasmic | — |
| 1 | 5 | LT_OEX2 | YDR049W | S. cerevisiae | 1206 | Cytoplasmic | 1236 |
| 1 | 6 | LT_OEX2 | YIL074C | S. cerevisiae | 1245 | Plastidic | 1513, 1515, 1517, 1519, 1521 |
| 1 | 9 | LT_OEX2 | GM02LC13512 | G. max | 1702 | Cytoplasmic | 1736, 1738, 1740, 1742, 1744, 1746, 1748, 1750, 1752, 1754, |
| | | | | | | | 1756, 1758, 1760 |
| 1 | 10 | LT_OEX2 | SLL1091 | Synechocystis | 1772 | Plastidic | 1918, 1920, 1922 |
| 1 | 11 | LT_OEX2 | SLR1293 | Synechocystis | 1938 | Plastidic | 2030, 2032 |
| 1 | 12 | LT_OEX2 | YDR461W | S. cerevisiae | 2042 | Cytoplasmic | — |
| 1 | 13 | LT_OEX2 | YER170W | S. cerevisiae | 2056 | Plastidic | 2528, 2530, 2532, 2534, 2536, 2538, 2540, 2542, 2544, 2546, |
| | | | | | | | 2548, 2550, 2552 |
| 1 | 14 | LT_OEX2 | YGR247W | S. cerevisiae | 2558 | Plastidic | — |
| 1 | 15 | LT_OEX2 | YHR201C | S. cerevisiae | 2577 | Cytoplasmic | — |
| 1 | 16 | LT_OEX2 | YJL181W | S. cerevisiae | 2609 | Cytoplasmic | — |
| 1 | 17 | LT_OEX2 | YJR095W | S. cerevisiae | 2628 | Cytoplasmic | 2680, 2682, 2684, 2686, 2688, 2690, 2692, 2694, 2696, 2698, |
| | | | | | | | 2700 |
| 1 | 18 | LT_OEX2 | YNR047W | S. cerevisiae | 2711 | Cytoplasmic | — |
| 1 | 19 | LT_OEX2 | YOL103W | S. cerevisiae | 2738 | Plastidic | 2788, 2790, 2792, 2794, 2796, 2798, 2800, 2802, 2804, 2806, |
| | | | | | | | 2808 |
| 1 | 20 | LT_OEX2 | YOR095C | S. cerevisiae | 2818 | Cytoplasmic | 3348, 3350, 3352, 3354 |
| 1 | 21 | LT_OEX2 | YPL109C | S. cerevisiae | 3361 | Plastidic | 3421, 3423, 3425, 3427 |
| 1 | 22 | LT_OEX2 | B2414_2 | E. coli | 3437 | Plastidic | 4329, 4331, 4333, 4335, 4337, 4339, 4341, 4343, 4345, 4347, |
| | | | | | | | 4349, 4351, 4353, 4355, 4357, 4359, 4361, 4363, 4365, 4367, |
| | | | | | | | 4369, 4371, 4373, 4375, 4377, 4379, 4381, 4383, 4385, 4387, |
| | | | | | | | 4389, 4391, 4393, 4395 |
| 1 | 23 | LT_OEX2 | GM02LC13512_2 | G. max | 4403 | Cytoplasmic | 4437, 4439, 4441, 4443, 4445, 4447, 4449, 4451, 4453, 4455, |
| | | | | | | | 4457, 4459, 4461 |
| 1 | 24 | LT_OEX2 | SLL1091_2 | Synechocystis | 4473 | Plastidic | 4619, 4621, 4623 |
| 1 | 25 | LT_OEX2 | SLR1293_2 | Synechocystis | 4639 | Plastidic | 4731, 4733 |
| 1 | 26 | LT_OEX2 | YDR049W_2 | S. cerevisiae | 4743 | Cytoplasmic | 4773 |

TABLE IIA
Amino acid sequence ID numbers

| | | | | | 5. | | |
|---|---|---|---|---|---|---|---|
| | | | | | Lead | | |
| Appli- | 1. | 2. | 3. | 4. | SEQ | 6. | 7. |
| cation | Hit | Project | Locus | Organism | ID | Target | SEQ IDs of Polypeptide Homologs |
| 1 | 1 | LT_OEX2 | B1670 | E. coli | 64 | Cytoplasmic | 66, 68, 70, 72 |
| 1 | 2 | LT_OEX2 | B2414 | E. coli | 81 | Plastidic | 83, 85, 87, 89, 91, 93, 95, 97, 99, 101, 103, 105, 107, 109, |
| | | | | | | | 111, 113, 115, 117, 119, 121, 123, 125, 127, 129, 131, 133, |
| | | | | | | | 135, 137, 139, 141, 143, 145, 147, 149, 151, 153, 155, 157, |
| | | | | | | | 159, 161, 163, 165, 167, 169, 171, 173, 175, 177, 179, 181, |
| | | | | | | | 183, 185, 187, 189, 191, 193, 195, 197, 199, 201, 203, 205, |
| | | | | | | | 207, 209, 211, 213, 215, 217, 219, 221, 223, 225, 227, 229, |
| | | | | | | | 231, 233, 235, 237, 239, 241, 243, 245, 247, 249, 251, 253, |
| | | | | | | | 255, 257, 259, 261, 263, 265, 267, 269, 271, 273, 275, 277, |
| | | | | | | | 279, 281, 283, 285, 287, 289, 291, 293, 295, 297, 299, 301, |
| | | | | | | | 303, 305, 307, 309, 311, 313, 315, 317, 319, 321, 323, 325, |
| | | | | | | | 327, 329, 331, 333, 335, 337, 339, 341, 343, 345, 347, 349, |
| | | | | | | | 351, 353, 355, 357, 359, 361, 363, 365, 367, 369, 371, 373, |
| | | | | | | | 375, 377, 379, 381, 383, 385, 387, 389, 391, 393, 395, 397, |
| | | | | | | | 399, 401, 403, 405, 407, 409, 411, 413, 415, 417, 419, 421, |
| | | | | | | | 423, 425, 427, 429, 431, 433, 435, 437, 439, 441, 443, 445, |
| | | | | | | | 447, 449, 451, 453, 455, 457, 459, 461, 463, 465, 467, 469, |
| | | | | | | | 471, 473, 475, 477, 479, 481, 483, 485, 487, 489, 491, 493, |
| | | | | | | | 495, 497, 499, 501, 503, 505, 507, 509, 511, 513, 515, 517, |
| | | | | | | | 519, 521, 523, 525, 527, 529, 531, 533, 535, 537, 539, 541, |
| | | | | | | | 543, 545, 547, 549, 551, 553, 555, 557, 559, 561, 563, 565, |
| | | | | | | | 567, 569, 571, 573, 575, 577, 579, 581, 583, 585, 587, 589, |
| | | | | | | | 591, 593, 595, 597, 599, 601, 603, 605, 607, 609, 611, 613, |
| | | | | | | | 615, 617, 619, 621, 623, 625, 627, 629, 631, 633, 635, 637, |
| | | | | | | | 639, 641, 643, 645, 647, 649, 651, 653, 655, 657, 659, 661, |
| | | | | | | | 663, 665, 667, 669, 671, 673, 675, 677, 679, 681, 683, 685, |
| | | | | | | | 687, 689, 691, 693, 695, 697, 699, 701, 703, 705, 707, 709, |
| | | | | | | | 711, 713, 715, 717, 719, 721, 723, 725, 727, 729, 731, 733, |
| | | | | | | | 735, 737, 739, 741, 743, 745, 747, 749, 751, 753, 755, 757, |
| | | | | | | | 759, 761, 763, 765, 767, 769, 771, 773, 775, 777, 779, 781, |
| | | | | | | | 783, 785, 787, 789, 791, 793, 795, 797, 799, 801, 803, 805, |
| | | | | | | | 807, 809, 811, 813, 815, 817, 819, 821, 823, 825, 827, 829, |
| | | | | | | | 831, 833, 835, 837, 839, 841, 843, 845, 847, 849, 851, 853, |
| | | | | | | | 855, 857, 859, 861, 863, 865, 867, 869, 871, 873, 875, 877, |
| | | | | | | | 879, 881, 883, 885, 887, 889, 891, 893, 895, 897, 899, 901, |
| | | | | | | | 903, 905, 907, 909, 911, 913, 915, 917, 919, 921, 923, 925, |
| | | | | | | | 927, 929, 931, 933, 935, 937, 939, 941, 943, 945, 947, 949, |
| | | | | | | | 951, 953, 955, 957, 959, 961, 963, 965, 967, 969, 971, 973, |
| | | | | | | | 975, 977, 979, 981, 983, 985, 987, 989, 991, 993, 995, |
| | | | | | | | 997, 999, 1001 |
| 1 | 3 | LT_OEX2 | B2758 | E. coli | 1077 | Cytoplasmic | 1079, 1081, 1083, 1085, 1087, 1089, 1091, 1093, 1095, 1097 |
| 1 | 4 | LT_OEX2 | SLL1237 | Synechocystis | 1106 | Cytoplasmic | 1108, 1110, 1112, 1114, 1116, 1118, 1120, 1122, 1124, 1126, |
| | | | | | | | 1128, 1130, 1132, 1134, 1136, 1138, 1140, 1142, 1144, 1146, |
| | | | | | | | 1148, 1150, 1152, 1154, 1156, 1158, 1160, 1162, 1164, 1166, |
| | | | | | | | 1168, 1170, 1172, 1174, 1176, 1178, 1180, 1182, 1184, 1186, |
| | | | | | | | 1188, 1190, 1192, 1194, 1196, 1198 |
| 1 | 5 | LT_OEX2 | YDR049W | S. cerevisiae | 1207 | Cytoplasmic | 1209, 1211, 1213, 1215, 1217, 1219, 1221, 1223, 1225, 1227, |
| | | | | | | | 1229, 1231, 1233, 1235 |
| 1 | 6 | LT_OEX2 | YIL074C | S. cerevisiae | 1246 | Plastidic | 1248, 1250, 1252, 1254, 1256, 1258, 1260, 1262, 1264, 1266, |
| | | | | | | | 1268, 1270, 1272, 1274, 1276, 1278, 1280, 1282, 1284, 1286, |
| | | | | | | | 1288, 1290, 1292, 1294, 1296, 1298, 1300, 1302, 1304, 1306, |
| | | | | | | | 1308, 1310, 1312, 1314, 1316, 1318, 1320, 1322, 1324, 1326, |
| | | | | | | | 1328, 1330, 1332, 1334, 1336, 1338, 1340, 1342, 1344, 1346, |
| | | | | | | | 1348, 1350, 1352, 1354, 1356, 1358, 1360, 1362, 1364, 1366, |
| | | | | | | | 1368, 1370, 1372, 1374, 1376, 1378, 1380, 1382, 1384, 1386, |
| | | | | | | | 1388, 1390, 1392, 1394, 1396, 1398, 1400, 1402, 1404, 1406, |
| | | | | | | | 1408, 1410, 1412, 1414, 1416, 1418, 1420, 1422, 1424, 1426, |
| | | | | | | | 1428, 1430, 1432, 1434, 1436, 1438, 1440, 1442, 1444, 1446, |
| | | | | | | | 1448, 1450, 1452, 1454, 1456, 1458, 1460, 1462, 1464, 1466, |
| | | | | | | | 1468, 1470, 1472, 1474, 1476, 1478, 1480, 1482, 1484, 1486, |
| | | | | | | | 1488, 1490, 1492, 1494, 1496, 1498, 1500, 1502, 1504, 1506, |
| | | | | | | | 1508, 1510, 1512 |
| 1 | 9 | LT_OEX2 | GM02LC13512 | G. max | 1703 | Cytoplasmic | 1705, 1707, 1709, 1711, 1713, 1715, 1717, 1719, 1721, 1723, |
| | | | | | | | 1725, 1727, 1729, 1731, 1733, 1735 |
| 1 | 10 | LT_OEX2 | SLL1091 | Synechocystis | 1773 | Plastidic | 1775, 1777, 1779, 1781, 1783, 1785, 1787, 1789, 1791, 1793, |
| | | | | | | | 1795, 1797, 1799, 1801, 1803, 1805, 1807, 1809, 1811, 1813, |
| | | | | | | | 1815, 1817, 1819, 1821, 1823, 1825, 1827, 1829, 1831, 1833, |
| | | | | | | | 1835, 1837, 1839, 1841, 1843, 1845, 1847, 1849, 1851, 1853, |
| | | | | | | | 1855, 1857, 1859, 1861, 1863, 1865, 1867, 1869, 1871, 1873, |
| | | | | | | | 1875, 1877, 1879, 1881, 1883, 1885, 1887, 1889, 1891, 1893, |
| | | | | | | | 1895, 1897, 1899, 1901, 1903, 1905, 1907, 1909, 1911, 1913, |
| | | | | | | | 1915, 1917 |
| 1 | 11 | LT_OEX2 | SLR1293 | Synechocystis | 1939 | Plastidic | 1941, 1943, 1945, 1947, 1949, 1951, 1953, 1955, 1957, 1959, |
| | | | | | | | 1961, 1963, 1965, 1967, 1969, 1971, 1973, 1975, 1977, 1979, |
| | | | | | | | 1981, 1983, 1985, 1987, 1989, 1991, 1993, 1995, 1997, 1999, |
| | | | | | | | 2001, 2003, 2005, 2007, 2009, 2011, 2013, 2015, 2017, 2019, |
| | | | | | | | 2021, 2023, 2025, 2027, 2029 |
| 1 | 12 | LT_OEX2 | YDR461W | S. cerevisiae | 2043 | Cytoplasmic | 2045, 2047, 2049, 2051 |
| 1 | 13 | LT_OEX2 | YER170W | S. cerevisiae | 2057 | Plastidic | 2059, 2061, 2063, 2065, 2067, 2069, 2071, 2073, 2075, 2077, |
| | | | | | | | 2079, 2081, 2083, 2085, 2087, 2089, 2091, 2093, 2095, 2097, |
| | | | | | | | 2099, 2101, 2103, 2105, 2107, 2109, 2111, 2113, 2115, 2117, |
| | | | | | | | 2119, 2121, 2123, 2125, 2127, 2129, 2131, 2133, 2135, 2137, |
| | | | | | | | 2139, 2141, 2143, 2145, 2147, 2149, 2151, 2153, 2155, 2157, |
| | | | | | | | 2159, 2161, 2163, 2165, 2167, 2169, 2171, 2173, 2175, 2177, |
| | | | | | | | 2179, 2181, 2183, 2185, 2187, 2189, 2191, 2193, 2195, 2197, |
| | | | | | | | 2199, 2201, 2203, 2205, 2207, 2209, 2211, 2213, 2215, 2217, |
| | | | | | | | 2219, 2221, 2223, 2225, 2227, 2229, 2231, 2233, 2235, 2237, |
| | | | | | | | 2239, 2241, 2243, 2245, 2247, 2249, 2251, 2253, 2255, 2257, |
| | | | | | | | 2259, 2261, 2263, 2265, 2267, 2269, 2271, 2273, 2275, 2277, |
| | | | | | | | 2279, 2281, 2283, 2285, 2287, 2289, 2291, 2293, 2295, 2297, |
| | | | | | | | 2299, 2301, 2303, 2305, 2307, 2309, 2311, 2313, 2315, 2317, |
| | | | | | | | 2319, 2321, 2323, 2325, 2327, 2329, 2331, 2333, 2335, 2337, |
| | | | | | | | 2339, 2341, 2343, 2345, 2347, 2349, 2351, 2353, 2355, 2357, |
| | | | | | | | 2359, 2361, 2363, 2365, 2367, 2369, 2371, 2373, 2375, 2377, |
| | | | | | | | 2379, 2381, 2383, 2385, 2387, 2389, 2391, 2393, 2395, 2397, |
| | | | | | | | 2399, 2401, 2403, 2405, 2407, 2409, 2411, 2413, 2415, 2417, |
| | | | | | | | 2419, 2421, 2423, 2425, 2427, 2429, 2431, 2433, 2435, 2437, |
| | | | | | | | 2439, 2441, 2443, 2445, 2447, 2449, 2451, 2453, 2455, 2457, |
| | | | | | | | 2459, 2461, 2463, 2465, 2467, 2469, 2471, 2473, 2475, 2477, |
| | | | | | | | 2479, 2481, 2483, 2485, 2487, 2489, 2491, 2493, 2495, 2497, |
| | | | | | | | 2499, 2501, 2503, 2505, 2507, 2509, 2511, 2513, 2515, 2517, |
| | | | | | | | 2519, 2521, 2523, 2525, 2527 |
| 1 | 14 | LT_OEX2 | YGR247W | S. cerevisiae | 2559 | Plastidic | 2561, 2563, 2565, 2567, 2569 |
| 1 | 15 | LT_OEX2 | YHR201C | S. cerevisiae | 2578 | Cytoplasmic | 2580, 2582, 2584, 2586, 2588, 2590, 2592, 2594, 2596, 2598, |
| | | | | | | | 2600, 2602 |
| 1 | 16 | LT_OEX2 | YJL181W | S. cerevisiae | 2610 | Cytoplasmic | 2612, 2614 |
| 1 | 17 | LT_OEX2 | YJR095W | S. cerevisiae | 2629 | Cytoplasmic | 2631, 2633, 2635, 2637, 2639, 2641, 2643, 2645, 2647, 2649, |
| | | | | | | | 2651, 2653, 2655, 2657, 2659, 2661, 2663, 2665, 2667, 2669, |
| | | | | | | | 2671, 2673, 2675, 2677, 2679 |
| 1 | 18 | LT_OEX2 | YNR047W | S. cerevisiae | 2712 | Cytoplasmic | 2714, 2716, 2718, 2720, 2722, 2724 |
| 1 | 19 | LT_OEX2 | YOL103W | S. cerevisiae | 2739 | Plastidic | 2741, 2743, 2745, 2747, 2749, 2751, 2753, 2755, 2757, 2759, |
| | | | | | | | 2761, 2763, 2765, 2767, 2769, 2771, 2773, 2775, 2777, 2779, |
| | | | | | | | 2781, 2783, 2785, 2787 |
| 1 | 20 | LT_OEX2 | YOR095C | S. cerevisiae | 2819 | Cytoplasmic | 2821, 2823, 2825, 2827, 2829, 2831, 2833, 2835, 2837, 2839, |
| | | | | | | | 2841, 2843, 2845, 2847, 2849, 2851, 2853, 2855, 2857, 2859, |
| | | | | | | | 2861, 2863, 2865, 2867, 2869, 2871, 2873, 2875, 2877, 2879, |
| | | | | | | | 2881, 2883, 2885, 2887, 2889, 2891, 2893, 2895, 2897, 2899, |
| | | | | | | | 2901, 2903, 2905, 2907, 2909, 2911, 2913, 2915, 2917, 2919, |
| | | | | | | | 2921, 2923, 2925, 2927, 2929, 2931, 2933, 2935, 2937, 2939, |
| | | | | | | | 2941, 2943, 2945, 2947, 2949, 2951, 2953, 2955, 2957, 2959, |
| | | | | | | | 2961, 2963, 2965, 2967, 2969, 2971, 2973, 2975, 2977, 2979, |
| | | | | | | | 2981, 2983, 2985, 2987, 2989, 2991, 2993, 2995, 2997, 2999, |
| | | | | | | | 3001, 3003, 3005, 3007, 3009, 3011, 3013, 3015, 3017, 3019, |
| | | | | | | | 3021, 3023, 3025, 3027, 3029, 3031, 3033, 3035, 3037, 3039, |
| | | | | | | | 3041, 3043, 3045, 3047, 3049, 3051, 3053, 3055, 3057, 3059, |
| | | | | | | | 3061, 3063, 3065, 3067, 3069, 3071, 3073, 3075, 3077, 3079, |
| | | | | | | | 3081, 3083, 3085, 3087, 3089, 3091, 3093, 3095, 3097, 3099, |
| | | | | | | | 3101, 3103, 3105, 3107, 3109, 3111, 3113, 3115, 3117, 3119, |
| | | | | | | | 3121, 3123, 3125, 3127, 3129, 3131, 3133, 3135, 3137, 3139, |
| | | | | | | | 3141, 3143, 3145, 3147, 3149, 3151, 3153, 3155, 3157, 3159, |
| | | | | | | | 3161, 3163, 3165, 3167, 3169, 3171, 3173, 3175, 3177, 3179, |
| | | | | | | | 3181, 3183, 3185, 3187, 3189, 3191, 3193, 3195, 3197, 3199, |
| | | | | | | | 3201, 3203, 3205, 3207, 3209, 3211, 3213, 3215, 3217, 3219, |
| | | | | | | | 3221, 3223, 3225, 3227, 3229, 3231, 3233, 3235, 3237, 3239, |
| | | | | | | | 3241, 3243, 3245, 3247, 3249, 3251, 3253, 3255, 3257, 3259, |
| | | | | | | | 3261, 3263, 3265, 3267, 3269, 3271, 3273, 3275, 3277, 3279, |
| | | | | | | | 3281, 3283, 3285, 3287, 3289, 3291, 3293, 3295, 3297, 3299, |
| | | | | | | | 3301, 3303, 3305, 3307, 3309, 3311, 3313, 3315, 3317, 3319, |
| | | | | | | | 3321, 3323, 3325, 3327, 3329, 3331, 3333, 3335, 3337, 3339, |
| | | | | | | | 3341, 3343, 3345, 3347 |
| 1 | 21 | LT_OEX2 | YPL109C | S. cerevisiae | 3362 | Plastidic | 3364, 3366, 3368, 3370, 3372, 3374, 3376, 3378, 3380, 3382, |
| | | | | | | | 3384, 3386, 3388, 3390, 3392, 3394, 3396, 3398, 3400, 3402, |
| | | | | | | | 3404, 3406, 3408, 3410, 3412, 3414, 3416, 3418, 3420 |
| 1 | 22 | LT_OEX2 | B2414_2 | E. coli | 3438 | Plastidic | 3440, 3442, 3444, 3446, 3448, 3450, 3452, 3454, 3456, 3458, |
| | | | | | | | 3460, 3462, 3464, 3466, 3468, 3470, 3472, 3474, 3476, 3478, |
| | | | | | | | 3480, 3482, 3484, 3486, 3488, 3490, 3492, 3494, 3496, 3498, |
| | | | | | | | 3500, 3502, 3504, 3506, 3508, 3510, 3512, 3514, 3516, 3518, |
| | | | | | | | 3520, 3522, 3524, 3526, 3528, 3530, 3532, 3534, 3536, 3538, |
| | | | | | | | 3540, 3542, 3544, 3546, 3548, 3550, 3552, 3554, 3556, 3558, |
| | | | | | | | 3560, 3562, 3564, 3566, 3568, 3570, 3572, 3574, 3576, 3578, |
| | | | | | | | 3580, 3582, 3584, 3586, 3588, 3590, 3592, 3594, 3596, 3598, |
| | | | | | | | 3600, 3602, 3604, 3606, 3608, 3610, 3612, 3614, 3616, 3618, |
| | | | | | | | 3620, 3622, 3624, 3626, 3628, 3630, 3632, 3634, 3636, 3638, |
| | | | | | | | 3640, 3642, 3644, 3646, 3648, 3650, 3652, 3654, 3656, 3658, |
| | | | | | | | 3660, 3662, 3664, 3666, 3668, 3670, 3672, 3674, 3676, 3678, |
| | | | | | | | 3680, 3682, 3684, 3686, 3688, 3690, 3692, 3694, 3696, 3698, |
| | | | | | | | 3700, 3702, 3704, 3706, 3708, 3710, 3712, 3714, 3716, 3718, |
| | | | | | | | 3720, 3722, 3724, 3726, 3728, 3730, 3732, 3734, 3736, 3738, |
| | | | | | | | 3740, 3742, 3744, 3746, 3748, 3750, 3752, 3754, 3756, 3758, |
| | | | | | | | 3760, 3762, 3764, 3766, 3768, 3770, 3772, 3774, 3776, 3778, |
| | | | | | | | 3780, 3782, 3784, 3786, 3788, 3790, 3792, 3794, 3796, 3798, |
| | | | | | | | 3800, 3802, 3804, 3806, 3808, 3810, 3812, 3814, 3816, 3818, |
| | | | | | | | 3820, 3822, 3824, 3826, 3828, 3830, 3832, 3834, 3836, 3838, |
| | | | | | | | 3840, 3842, 3844, 3846, 3848, 3850, 3852, 3854, 3856, 3858, |
| | | | | | | | 3860, 3862, 3864, 3866, 3868, 3870, 3872, 3874, 3876, 3878, |
| | | | | | | | 3880, 3882, 3884, 3886, 3888, 3890, 3892, 3894, 3896, 3898, |
| | | | | | | | 3900, 3902, 3904, 3906, 3908, 3910, 3912, 3914, 3916, 3918, |
| | | | | | | | 3920, 3922, 3924, 3926, 3928, 3930, 3932, 3934, 3936, 3938, |
| | | | | | | | 3940, 3942, 3944, 3946, 3948, 3950, 3952, 3954, 3956, 3958, |
| | | | | | | | 3960, 3962, 3964, 3966, 3968, 3970, 3972, 3974, 3976, 3978, |
| | | | | | | | 3980, 3982, 3984, 3986, 3988, 3990, 3992, 3994, 3996, 3998, |
| | | | | | | | 4000, 4002, 4004, 4006, 4008, 4010, 4012, 4014, 4016, 4018, |
| | | | | | | | 4020, 4022, 4024, 4026, 4028, 4030, 4032, 4034, 4036, 4038, |
| | | | | | | | 4040, 4042, 4044, 4046, 4048, 4050, 4052, 4054, 4056, 4058, |
| | | | | | | | 4060, 4062, 4064, 4066, 4068, 4070, 4072, 4074, 4076, 4078, |
| | | | | | | | 4080, 4082, 4084, 4086, 4088, 4090, 4092, 4094, 4096, 4098, |
| | | | | | | | 4100, 4102, 4104, 4106, 4108, 4110, 4112, 4114, 4116, 4118, |
| | | | | | | | 4120, 4122, 4124, 4126, 4128, 4130, 4132, 4134, 4136, 4138, |
| | | | | | | | 4140, 4142, 4144, 4146, 4148, 4150, 4152, 4154, 4156, 4158, |
| | | | | | | | 4160, 4162, 4164, 4166, 4168, 4170, 4172, 4174, 4176, 4178, |
| | | | | | | | 4180, 4182, 4184, 4186, 4188, 4190, 4192, 4194, 4196, 4198, |
| | | | | | | | 4200, 4202, 4204, 4206, 4208, 4210, 4212, 4214, 4216, 4218, |
| | | | | | | | 4220, 4222, 4224, 4226, 4228, 4230, 4232, 4234, 4236, 4238, |
| | | | | | | | 4240, 4242, 4244, 4246, 4248, 4250, 4252, 4254, 4256, 4258, |
| | | | | | | | 4260, 4262, 4264, 4266, 4268, 4270, 4272, 4274, 4276, 4278, |
| | | | | | | | 4280, 4282, 4284, 4286, 4288, 4290, 4292, 4294, 4296, 4298, |
| | | | | | | | 4300, 4302, 4304, 4306, 4308, 4310, 4312, 4314, 4316, 4318, |
| | | | | | | | 4320, 4322, 4324, 4326, 4328 |
| 1 | 23 | LT_OEX2 | GM02LC13512_2 | G. max | 4404 | Cytoplasmic | 4406, 4408, 4410, 4412, 4414, 4416, 4418, 4420, 4422, 4424, |
| | | | | | | | 4426, 4428, 4430, 4432, 4434, 4436 |
| 1 | 24 | LT_OEX2 | SLL1091_2 | Synechocystis | 4474 | Plastidic | 4476, 4478, 4480, 4482, 4484, 4486, 4488, 4490, 4492, 4494, |
| | | | | | | | 4496, 4498, 4500, 4502, 4504, 4506, 4508, 4510, 4512, 4514, |
| | | | | | | | 4516, 4518, 4520, 4522, 4524, 4526, 4528, 4530, 4532, 4534, |
| | | | | | | | 4536, 4538, 4540, 4542, 4544, 4546, 4548, 4550, 4552, 4554, |
| | | | | | | | 4556, 4558, 4560, 4562, 4564, 4566, 4568, 4570, 4572, 4574, |
| | | | | | | | 4576, 4578, 4580, 4582, 4584, 4586, 4588, 4590, 4592, 4594, |
| | | | | | | | 4596, 4598, 4600, 4602, 4604, 4606, 4608, 4610, 4612, 4614, |
| | | | | | | | 4616, 4618 |
| 1 | 25 | LT_OEX2 | SLR1293_2 | Synechocystis | 4640 | Plastidic | 4642, 4644, 4646, 4648, 4650, 4652, 4654, 4656, 4658, 4660, |
| | | | | | | | 4662, 4664, 4666, 4668, 4670, 4672, 4674, 4676, 4678, 4680, |
| | | | | | | | 4682, 4684, 4686, 4688, 4690, 4692, 4694, 4696, 4698, 4700, |
| | | | | | | | 4702, 4704, 4706, 4708, 4710, 4712, 4714, 4716, 4718, 4720, |
| | | | | | | | 4722, 4724, 4726, 4728, 4730 |
| 1 | 26 | LT_OEX2 | YDR049W_2 | S. cerevisiae. | 4744 | Cytoplasmic | 4746, 4748, 4750, 4752, 4754, 4756, 4758, 4760, 4762, 4764, |
| | | | | | | | 4766, 4768, 4770, 4772 |

TABLE IIB
Amino acid sequence ID numbers

| | | | | | 5. | | |
|---|---|---|---|---|---|---|---|
| | | | | | Lead | | |
| Appli- | 1. | 2. | 3. | 4. | SEQ | 6. | 7. |
| cation | Hit | Project | Locus | Organism | ID | Target | SEQ IDs of Polypeptide Homologs |
| 1 | 1 | LT_OEX2 | B1670 | E. coli | 64 | Cytoplasmic | — |
| 1 | 2 | LT_OEX2 | B2414 | E. coli | 81 | Plastidic | 1003, 1005, 1007, 1009, 1011, 1013, 1015, 1017, 1019, 1021, |
| | | | | | | | 1023, 1025, 1027, 1029, 1031, 1033, 1035, 1037, 1039, 1041, |
| | | | | | | | 1043, 1045, 1047, 1049, 1051, 1053, 1055, 1057, 1059, 1061, |
| | | | | | | | 1063, 1065, 1067, 1069 |
| 1 | 3 | LT_OEX2 | B2758 | E. coli | 1077 | Cytoplasmic | — |
| 1 | 4 | LT_OEX2 | SLL1237 | Synechocystis | 1106 | Cytoplasmic | — |
| 1 | 5 | LT_OEX2 | YDR049W | S. cerevisiae | 1207 | Cytoplasmic | 1237 |
| 1 | 6 | LT_OEX2 | YIL074C | S. cerevisiae | 1246 | Plastidic | 1514, 1516, 1518, 1520, 1522 |
| 1 | 9 | LT_OEX2 | GM02LC13512 | G. max | 1703 | Cytoplasmic | 1737, 1739, 1741, 1743, 1745, 1747, 1749, 1751, 1753, 1755, |
| | | | | | | | 1757, 1759, 1761 |
| 1 | 10 | LT_OEX2 | SLL1091 | Synechocystis | 1773 | Plastidic | 1919, 1921, 1923 |
| 1 | 11 | LT_OEX2 | SLR1293 | Synechocystis | 1939 | Plastidic | 2031, 2033 |
| 1 | 12 | LT_OEX2 | YDR461W | S. cerevisiae | 2043 | Cytoplasmic | — |
| 1 | 13 | LT_OEX2 | YER170W | S. cerevisiae | 2057 | Plastidic | 2529, 2531, 2533, 2535, 2537, 2539, 2541, 2543, 2545, 2547, |
| | | | | | | | 2549, 2551, 2553 |
| 1 | 14 | LT_OEX2 | YGR247W | S. cerevisiae | 2559 | Plastidic | — |
| 1 | 15 | LT_OEX2 | YHR201C | S. cerevisiae | 2578 | Cytoplasmic | — |
| 1 | 16 | LT_OEX2 | YJL181W | S. cerevisiae | 2610 | Cytoplasmic | — |
| 1 | 17 | LT_OEX2 | YJR095W | S. cerevisiae | 2629 | Cytoplasmic | 2681, 2683, 2685, 2687, 2689, 2691, 2693, 2695, 2697, 2699, |
| | | | | | | | 2701 |
| 1 | 18 | LT_OEX2 | YNR047W | S. cerevisiae | 2712 | Cytoplasmic | — |
| 1 | 19 | LT_OEX2 | YOL103W | S. cerevisiae | 2739 | Plastidic | 2789, 2791, 2793, 2795, 2797, 2799, 2801, 2803, 2805, 2807, |
| | | | | | | | 2809 |
| 1 | 20 | LT_OEX2 | YOR095C | S. cerevisiae | 2819 | Cytoplasmic | 3349, 3351, 3353, 3355 |
| 1 | 21 | LT_OEX2 | YPL109C | S. cerevisiae | 3362 | Plastidic | 3422, 3424, 3426, 3428 |
| 1 | 22 | LT_OEX2 | B2414_2 | E. coli | 3438 | Plastidic | 4330, 4332, 4334, 4336, 4338, 4340, 4342, 4344, 4346, 4348, |
| | | | | | | | 4350, 4352, 4354, 4356, 4358, 4360, 4362, 4364, 4366, 4368, |
| | | | | | | | 4370, 4372, 4374, 4376, 4378, 4380, 4382, 4384, 4386, 4388, |
| | | | | | | | 4390, 4392, 4394, 4396 |
| 1 | 23 | LT_OEX2 | GM02LC13512_2 | G. max | 4404 | Cytoplasmic | 4438, 4440, 4442, 4444, 4446, 4448, 4450, 4452, 4454, 4456, |
| | | | | | | | 4458, 4460, 4462 |
| 1 | 24 | LT_OEX2 | SLL1091_2 | Synechocystis | 4474 | Plastidic | 4620, 4622, 4624 |
| 1 | 25 | LT_OEX2 | SLR1293_2 | Synechocystis | 4640 | Plastidic | 4732, 4734 |
| 1 | 26 | LT_OEX2 | YDR049W_2 | S. cerevisiae. | 4744 | Cytoplasmic | 4774 |

TABLE III
Primer nucleic acid sequence ID numbers

| | | | | | 5. | | |
|---|---|---|---|---|---|---|---|
| | 1. | 2. | 3. | 4. | Lead | 6. | 7. |
| Application | Hit | Project | Locus | Organism | SEQ ID | Target | SEQ IDs of Primers |
| 1 | 1 | LT_OEX2 | B1670 | E. coli | 63 | Cytoplasmic | 73, 74 |
| 1 | 2 | LT_OEX2 | B2414 | E. coli | 80 | Plastidic | 1070, 1071 |
| 1 | 3 | LT_OEX2 | B2758 | E. coli | 1076 | Cytoplasmic | 1098, 1099 |
| 1 | 4 | LT_OEX2 | SLL1237 | Synechocystis | 1105 | Cytoplasmic | 1199, 1200 |
| 1 | 5 | LT_OEX2 | YDR049W | S. cerevisiae | 1206 | Cytoplasmic | 1238, 1239 |
| 1 | 6 | LT_OEX2 | YIL074C | S. cerevisiae | 1245 | Plastidic | 1523, 1524 |
| 1 | 9 | LT_OEX2 | GM02LC13512 | G. max | 1702 | Cytoplasmic | 1762, 1763 |
| 1 | 10 | LT_OEX2 | SLL1091 | Synechocystis | 1772 | Plastidic | 1924, 1925 |
| 1 | 11 | LT_OEX2 | SLR1293 | Synechocystis | 1938 | Plastidic | 2034, 2035 |
| 1 | 12 | LT_OEX2 | YDR461W | S. cerevisiae | 2042 | Cytoplasmic | 2052, 2053 |
| 1 | 13 | LT_OEX2 | YER170W | S. cerevisiae | 2056 | Plastidic | 2554, 2555 |
| 1 | 14 | LT_OEX2 | YGR247W | S. cerevisiae | 2558 | Plastidic | 2570, 2571 |
| 1 | 15 | LT_OEX2 | YHR201C | S. cerevisiae | 2577 | Cytoplasmic | 2603, 2604 |
| 1 | 16 | LT_OEX2 | YJL181W | S. cerevisiae | 2609 | Cytoplasmic | 2615, 2616 |
| 1 | 17 | LT_OEX2 | YJR095W | S. cerevisiae | 2628 | Cytoplasmic | 2702, 2703 |
| 1 | 18 | LT_OEX2 | YNR047W | S. cerevisiae | 2711 | Cytoplasmic | 2725, 2726 |
| 1 | 19 | LT_OEX2 | YOL103W | S. cerevisiae | 2738 | Plastidic | 2810, 2811 |
| 1 | 20 | LT_OEX2 | YOR095C | S. cerevisiae | 2818 | Cytoplasmic | 3356, 3357 |
| 1 | 21 | LT_OEX2 | YPL109C | S. cerevisiae | 3361 | Plastidic | 3429, 3430 |
| 1 | 22 | LT_OEX2 | B2414_2 | E. coli | 3437 | Plastidic | 4397, 4398 |
| 1 | 23 | LT_OEX2 | GM02LC13512_2 | G. max | 4403 | Cytoplasmic | 4463, 4464 |
| 1 | 24 | LT_OEX2 | SLL1091_2 | Synechocystis | 4473 | Plastidic | 4625, 4626 |
| 1 | 25 | LT_OEX2 | SLR1293_2 | Synechocystis | 4639 | Plastidic | 4735, 4736 |
| 1 | 26 | LT_OEX2 | YDR049W_2 | S. cerevisiae. | 4743 | Cytoplasmic | 4775, 4776 |

TABLE IV
Consensus amino acid sequence ID numbers

| | | | | | 5. | | |
|---|---|---|---|---|---|---|---|
| | | | | | Lead | | |
| Appli- | 1. | 2. | 3. | 4. | SEQ | 6. | 7. |
| cation | Hit | Project | Locus | Organism | ID | Target | SEQ IDs of Consensus/Pattern Sequences |
| 1 | 1 | LT_OEX2 | B1670 | E. coli | 64 | Cytoplasmic | 75, 76, 77, 78, 79 |
| 1 | 2 | LT_OEX2 | B2414 | E. coli | 81 | Plastidic | 1072, 1073, 1074, 1075 |
| 1 | 3 | LT_OEX2 | B2758 | E. coli | 1077 | Cytoplasmic | 1100, 1101, 1102, 1103, 1104 |
| 1 | 4 | LT_OEX2 | SLL1237 | Synechocystis | 1106 | Cytoplasmic | 1201, 1202, 1203, 1204, 1205 |
| 1 | 5 | LT_OEX2 | YDR049W | S. cerevisiae | 1207 | Cytoplasmic | 1240, 1241, 1242, 1243, 1244 |
| 1 | 6 | LT_OEX2 | YIL074C | S. cerevisiae | 1246 | Plastidic | 1525, 1526, 1527, 1528 |
| 1 | 9 | LT_OEX2 | GM02LC13512 | G. max | 1703 | Cytoplasmic | 1764, 1765, 1766, 1767, 1768, 1769, 1770, 1771 |
| 1 | 10 | LT_OEX2 | SLL1091 | Synechocystis | 1773 | Plastidic | 1926, 1927, 1928, 1929, 1930, 1931, 1932, 1933, 1934, 1935, |
| | | | | | | | 1936, 1937 |
| 1 | 11 | LT_OEX2 | SLR1293 | Synechocystis | 1939 | Plastidic | 2036, 2037, 2038, 2039, 2040, 2041 |
| 1 | 12 | LT_OEX2 | YDR461W | S. cerevisiae | 2043 | Cytoplasmic | 2054, 2055 |
| 1 | 13 | LT_OEX2 | YER170W | S. cerevisiae | 2057 | Plastidic | 2556, 2557 |
| 1 | 14 | LT_OEX2 | YGR247W | S. cerevisiae | 2559 | Plastidic | 2572, 2573, 2574, 2575, 2576 |
| 1 | 15 | LT_OEX2 | YHR201C | S. cerevisiae | 2578 | Cytoplasmic | 2605, 2606, 2607, 2608 |
| 1 | 16 | LT_OEX2 | YJL181W | S. cerevisiae | 2610 | Cytoplasmic | 2617, 2618, 2619, 2620, 2621, 2622, 2623, 2624, 2625, 2626, |
| | | | | | | | 2627 |
| 1 | 17 | LT_OEX2 | YJR095W | S. cerevisiae | 2629 | Cytoplasmic | 2704, 2705, 2706, 2707, 2708, 2709, 2710 |
| 1 | 18 | LT_OEX2 | YNR047W | S. cerevisiae | 2712 | Cytoplasmic | 2727, 2728, 2729, 2730, 2731, 2732, 2733, 2734, 2735, 2736, |
| | | | | | | | 2737 |
| 1 | 19 | LT_OEX2 | YOL103W | S. cerevisiae | 2739 | Plastidic | 2812, 2813, 2814, 2815, 2816, 2817 |
| 1 | 20 | LT_OEX2 | YOR095C | S. cerevisiae | 2819 | Cytoplasmic | 3358, 3359, 3360 |
| 1 | 21 | LT_OEX2 | YPL109C | S. cerevisiae | 3362 | Plastidic | 3431, 3432, 3433, 3434, 3435, 3436 |
| 1 | 22 | LT_OEX2 | B2414_2 | E. coli | 3438 | Plastidic | 4399, 4400, 4401, 4402 |
| 1 | 23 | LT_OEX2 | GM02LC13512_2 | G. max | 4404 | Cytoplasmic | 4465, 4466, 4467, 4468, 4469, 4470, 4471, 4472 |
| 1 | 24 | LT_OEX2 | SLL1091_2 | Synechocystis | 4474 | Plastidic | 4627, 4628, 4629, 4630, 4631, 4632, 4633, 4634, 4635, 4636, |
| | | | | | | | 4637, 4638 |
| 1 | 25 | LT_OEX2 | SLR1293_2 | Synechocystis | 4640 | Plastidic | 4737, 4738, 4739, 4740, 4741, 4742 |
| 1 | 26 | LT_OEX2 | YDR049W_2 | S. cerevisiae | 4744 | Cytoplasmic | 4777, 4778, 4779, 4780, 4781 |

The application's sequence listing, which the Patent Office published only in electronic form, follows.

SEQUENCE LISTING (4781 sequences)

SEQ ID NO: 1 - DNA, 19 bp, Artificial Sequence
  adapter sequence added to gene specific primers for cloning purposes
ggaattccagctgaccacc

SEQ ID NO: 2 - DNA, 20 bp, Artificial Sequence
  adapter sequence added to gene specific primers for cloning purposes
gatccccgggaattgccatg

SEQ ID NO: 3 - DNA, 10 bp, Artificial Sequence
  adapter sequence added to gene specific primers for cloning purposes
ttgctcttcc

SEQ ID NO: 4 - DNA, 10 bp, Artificial Sequence
  adapter sequence added to gene specific primers for cloning purposes
ttgctcttcg

SEQ ID NO: 5 - DNA, 34 bp, Artificial Sequence
  Amplification of the targeting sequence of the gene FNR from Spinacia oleracea to generate the S.cerevisiae plastidic targeting vector VC-MME354-1
atagaattcgcataaacttatcttcatagttgcc

SEQ ID NO: 6 - DNA, 27 bp, Artificial Sequence
  Amplification of the targeting sequence of the gene FNR from Spinacia oleracea to generate the S.cerevisiae plastidic targeting vector VC-MME354-1
atagaattcagaggcgatctgggccct

SEQ ID NO: 7 - DNA, 36 bp, Artificial Sequence
  Amplification of the targeting sequence of the gene FNR from Spinacia oleracea to generate the E.coli plastidic targeting vector VC-MME432-1
atagtttaaacgcataaacttatcttcatagttgcc

SEQ ID NO: 8 - DNA, 34 bp, Artificial Sequence
  Amplification of the targeting sequence of the gene FNR from Spinacia oleracea to generate the E.coli plastidic targeting vector VC-MME432-1
ataccatggaagagcaagaggcgatctgggccct

SEQ ID NO: 9 - DNA, 9041 bp, Artificial Sequence
  pMTX0270p
gctttgggcggatccggacaatcagtaaattgaacggagaatattattcataaaaatacgatagtaacgggtgatatattcattagaatgaaccgaaaccggcggtaaggatctgagctacacatgctcaggttttttacaacgtgcacaacagaattgaaagcaaatatcatgcgatcataggcgtctcgcatatctcattaaagcagggcatgccggtcgagtcaaatctcggtgacgggcaggaccggacggggcggtaccggcaggctgaagtccagctgccagaaacccacgtcatgccagttcccgtgcttgaagccggccgcccgcagcatgccgcggggggcatatccgagcgcctcgtgcatgcgcacgctcgggtcgttgggcagcccgatgacagcgaccacgctcttgaagccctgtgcctccagggacttcagcaggtgggtgtagagcgtggagcccagtcccgtccgctggtggcggggggagacgtacacggtcgactcggccgtccagtcgtaggcgttgcgtgccttccaggggcccgcgtaggcgatgccggcgacctcgccgtccacctcggcgacgagccagggatagcgctcccgcagacggacgaggtcgtccgtccactcctgcggttcctgcggctcggtacggaagttgaccgtgcttgtctcgatgtagtggttgacgatggtgcagaccgccggcatgtccgcctcggtggcacggcggatgtcggccgggcgtcgttctgggctcatggtagactcgacggatccacgtgtggaagatatgaatttttttgagaaactagataagattaatgaatatcggtgttttggttttttcttgtggccgtctttgtttatattgagatttttcaaatcagtgcgcaagacgtgacgtaagtatccgagtcagtttttatttttctactaatttggtcgaatctagattcgacggtatcgataagctcgcggatccctgaaagcgacgttggatgttaacatctacaaattgccttttcttatcgaccatgtacgtaagcgcttacgtttttggtggacccttgaggaaactggtagctgttgtgggcctgtggtctcaagatggatcattaatttccaccttcacctacgatggggggcatcgcaccggtgagtaatattgtacggctaagagcgaatttggcctgtaggatccctgaaagcgacgttggatgttaacatctacaaattgccttttcttatcgaccatgtacgtaagcgcttacgtttttggtggacccttgaggaaactggtagctgttgtgggcctgtggtctcaagatggatcattaatttccaccttcacctacgatggggggcatcgcaccggtgagtaatattgtacggctaagagcgaatttggcctgtaggatccctgaaagcgacgttggatgttaacatctacaaattgccttttcttatcgaccatgtacgtaagcgcttacgtttttggtggacccttgaggaaactggtagctgttgtgggcctgtggtctcaagatggatcattaatttccaccttcacctacgatggggggcatcgcaccggtgagtaatattgtacggctaagagcgaatttggcctgtaggatccgcgagctggtcaatcccattgcttttgaagcagctcaacattgatctctttctcgatcgagggagatttttcaaatcagtgcgcaagacgtgacgtaagtatccgagtcagtttttatttttctactaatttggtcgtttatttcggcgtgtaggacatggcaaccgggcctgaatttcgcgggtattctgtttctattccaactttttcttgatccgcagccattaacgacttttgaatagatacgctgacacgccaagcctcgctagtcaaaagtgtaccaaacaacgctttacagcaagaacggaatgcgcgtgacgctcgcggtgacgccatttcgccttttcagaaatggataaatagccttgcttcctattatatcttcccaaattaccaatacattacactagcatctgaatttcataaccaatctcgatacaccaaatcgaagatctcccgggttgctcttccatggcaatgattaattaacgaagagcaagagctcgaatttccccgatcgttcaaacatttggcaataaagtttcttaagattgaatcctgttgccggtcttgcgatgattatcatataatttctgttgaattacgttaagcatgtaataattaacatgtaatgcatgacgttatttatgagatgggtttttatgattagagtcccgcaattatacatttaatacgcgatagaaaacaaaatatagcgcgcaaactaggataaattatcgcgcgcggtgtcatctatgttactagatcgggaattggcatgcaagcttggcactggccgtcgttttacaacgtcgtgactgggaaaaccctggcgttacccaacttaatcgccttgcagcacatccccctttcgccagctggcgtaatagcgaagaggcccgcaccgatcgcccttcccaacagttgcgcagcctgaatggcgaatgctagagcagcttgagcttggatcagattgtcgtttcccgccttcagtttaaactatcagtgtttgacaggatatattggcgggtaaacctaagagaaaagagcgtttattagaataatcggatatttaaaagggcgtgaaaaggtttatccgttcgtccatttgtatgtgcatgccaaccacagggttcccctcgggatcaaagtactttgatccaacccctccgctgctatagtgcagtcggcttctgacgttcagtgcagccgtcttctgaaaacgacatgtcgcacaagtcctaagttacgcgacaggctgccgccctgcccttttcctggcgttttcttgtcgcgtgttttagtcgcataaagtagaatacttgcgactagaaccggagacattacgccatgaacaagagcgccgccgctggcctgctgggctatgcccgcgtcagcaccgacgaccaggacttgaccaaccaacgggccgaactgcacgcggccggctgcaccaagctgttttccgagaagatcaccggcaccaggcgcgaccgcccggagctggccaggatgcttgaccacctacgccctggcgacgttgtgacagtgaccaggctagaccgcctggcccgcagcacccgcgacctactggacattgccgagcgcatccaggaggccggcgcgggcctgcgtagcctggcagagccgtgggccgacaccaccacgccggccggccgcatggtgttgaccgtgttcgccggcattgccgagttcgagcgttccctaatcatcgaccgcacccggagcgggcgcgaggccgccaaggcccgaggcgtgaagtttggcccccgccctaccctcaccccggcacagatcgcgcacgcccgcgagctgatcgaccaggaaggccgcaccgtgaaagaggcggctgcactgcttggcgtgcatcgctcgaccctgtaccgcgcacttgagcgcagcgaggaagtgacgcccaccgaggccaggcggcgcggtgccttccgtgaggacgcattgaccgaggccgacgccctggcggccgccgagaatgaacgccaagaggaacaagcatgaaaccgcaccaggacggccaggacgaaccgtttttcattaccgaagagatcgaggcggagatgatcgcggccgggtacgtgttcgagccgcccgcgcacgtctcaaccgtgcggctgcatgaaatcctggccggtttgtctgatgccaagctggcggcctggccggccagcttggccgctgaagaaaccgagcgccgccgtctaaaaaggtgatgtgtatttgagtaaaacagcttgcgtcatgcggtcgctgcgtatatgatgcgatgagtaaataaacaaatacgcaaggggaacgcatgaaggttatcgctgtacttaaccagaaaggcgggtcaggcaagacgaccatcgcaacccatctagcccgcgccctgcaactcgccggggccgatgttctgttagtcgattccgatccccagggcagtgcccgcgattgggcggccgtgcgggaagatcaaccgctaaccgttgtcggcatcgaccgcccgacgattgaccgcgacgtgaaggccatcggccggcgcgacttcgtagtgatcgacggagcgccccaggcggcggacttggctgtgtccgcgatcaaggcagccgacttcgtgctgattccggtgcagccaagcccttacgacatatgggccaccgccgacctggtggagctggttaagcagcgcattgaggtcacggatggaaggctacaagcggcctttgtcgtgtcgcgggcgatcaaaggcacgcgcatcggcggtgaggttgccgaggcgctggccgggtacgagctgcccattcttgagtcccgtatcacgcagcgcgtgagctacccaggcactgccgccgccggcacaaccgttcttgaatcagaacccgagggcgacgctgcccgcgaggtccaggcgctggccgctgaaattaaatcaaaactcatttgagttaatgaggtaaagagaaaatgagcaaaagcacaaacacgctaagtgccggccgtccgagcgcacgcagcagcaaggctgcaacgttggccagcctggcagacacgccagccatgaagcgggtcaactttcagttgccggcggaggatcacaccaagctgaagatgtacgcggtacgccaaggcaagaccattaccgagctgctatctgaatacatcgcgcagctaccagagtaaatgagcaaatgaataaatgagtagatgaattttagcggctaaaggaggcggcatggaaaatcaagaacaaccaggcaccgacgccgtggaatgccccatgtgtggaggaacgggcggttggccaggcgtaagcggctgggttgcctgccggccctgcaatggcactggaacccccaagcccgaggaatcggcgtgagcggtcgcaaaccatccggcccggtacaaatcggcgcggcgctgggtgatgacctggtggagaagttgaaggccgcgcaggccgcccagcggcaacgcatcgaggcagaagcacgccccggtgaatcgtggcaagcggccgctgatcgaatccgcaaagaatcccggcaaccgccggcagccggtgcgccgtcgattaggaagccgcccaagggcgacgagcaaccagattttttcgttccgatgctctatgacgtgggcacccgcgatagtcgcagcatcatggacgtggccgttttccgtctgtcgaagcgtgaccgacgagctggcgaggtgatccgctacgagcttccagacgggcacgtagaggtttccgcagggccggccggcatggccagtgtgtgggattacgacctggtactgatggcggtttcccatctaaccgaatccatgaaccgataccgggaagggaagggagacaagcccggccgcgtgttccgtccacacgttgcggacgtactcaagttctgccggcgagccgatggcggaaagcagaaagacgacctggtagaaacctgcattcggttaaacaccacgcacgttgccatgcagcgtacgaagaaggccaagaacggccgcctggtgacggtatccgagggtgaagccttgattagccgctacaagatcgtaaagagcgaaaccgggcggccggagtacatcgagatcgagctagctgattggatgtaccgcgagatcacagaaggcaagaacccggacgtgctgacggttcaccccgattactttttgatcgatcccggcatcggccgttttctctaccgcctggcacgccgcgccgcaggcaaggcagaagccagatggttgttcaagacgatctacgaacgcagtggcagcgccggagagttcaagaagttctgtttcaccgtgcgcaagctgatcgggtcaaatgacctgccggagtacgatttgaaggaggaggcggggcaggctggcccgatcctagtcatgcgctaccgcaacctgatcgagggcgaagcatccgccggttcctaatgtacggagcagatgctagggcaaattgccctagcaggggaaaaaggtcgaaaaggtctctttcctgtggatagcacgtacattgggaacccaaagccgtacattgggaaccggaacccgtacattgggaacccaaagccgtacattgggaaccggtcacacatgtaagtgactgatataaaagagaaaaaaggcgatttttccgcctaaaactctttaaaacttattaaaactcttaaaacccgcctggcctgtgcataactgtctggccagcgcacagccgaagagctgcaaaaagcgcctacccttcggtcgctgcgctccctacgccccgccgcttcgcgtcggcctatcgcggccgctggccgctcaaaaatggctggcctacggccaggcaatctaccagggcgcggacaagccgcgccgtcgccactcgaccgccggcgcccacatcaaggcaccctgcctcgcgcgtttcggtgatgacggtgaaaacctctgacacatgcagctcccggagacggtcacagcttgtctgtaagcggatgccgggagcagacaagcccgtcagggcgcgtcagcgggtgttggcgggtgtcggggcgcagccatgacccagtcacgtagcgatagcggagtgtatactggcttaactatgcggcatcagagcagattgtactgagagtgcaccatatgcggtgtgaaataccgcacagatgcgtaaggagaaaataccgcatcaggcgctcttccgcttcctcgctcactgactcgctgcgctcggtcgttcggctgcggcgagcggtatcagctcactcaaaggcggtaatacggttatccacagaatcaggggataacgcaggaaagaacatgtgagcaaaaggccagcaaaaggccaggaaccgtaaaaaggccgcgttgctggcgtttttccataggctccgcccccctgacgagcatcacaaaaatcgacgctcaagtcagaggtggcgaaacccgacaggactataaagataccaggcgtttccccctggaagctccctcgtgcgctctcctgttccgaccctgccgcttaccggatacctgtccgcctttctcccttcgggaagcgtggcgctttctcatagctcacgctgtaggtatctcagttcggtgtaggtcgttcgctccaagctgggctgtgtgcacgaaccccccgttcagcccgaccgctgcgccttatccggtaactatcgtcttgagtccaacccggtaagacacgacttatcgccactggcagcagccactggtaacaggattagcagagcgaggtatgtaggcggtgctacagagttcttgaagtggtggcctaactacggctacactagaaggacagtatttggtatctgcgctctgctgaagccagttaccttcggaaaaagagttggtagctcttgatccggcaaacaaaccaccgctggtagcggtggtttttttgtttgcaagcagcagattacgcgcagaaaaaaaggatctcaagaagatcctttgatcttttctacggggtctgacgctcagtggaacgaaaactcacgttaagggattttggtcatgcattctaggtactaaaacaattcatccagtaaaatataatattttattttctcccaatcaggcttgatccccagtaagtcaaaaaatagctcgacatactgttcttccccgatatcctccctgatcgaccggacgcagaaggcaatgtcataccacttgtccgccctgccgcttctcccaagatcaataaagccacttactttgccatctttcacaaagatgttgctgtctcccaggtcgccgtgggaaaagacaagttcctcttcgggcttttccgtctttaaaaaatcatacagctcgcgcggatctttaaatggagtgtcttcttcccagttttcgcaatccacatcggccagatcgttattcagtaagtaatccaattcggctaagcggctgtctaagctattcgtatagggacaatccgatatgtcgatggagtgaaagagcctgatgcactccgcatacagctcgataatcttttcagggctttgttcatcttcatactcttccgagcaaaggacgccatcggcctcactcatgagcagattgctccagccatcatgccgttcaaagtgcaggacctttggaacaggcagctttccttccagccatagcatcatgtccttttcccgttccacatcataggtggtccctttataccggctgtccgtcatttttaaatataggttttcattttctcccaccagcttatataccttagcaggagacattccttccgtatcttttacgcagcggtatttttcgatcagttttttcaattccggtgatattctcattttagccatttattatttccttcctcttttctacagtatttaaagataccccaagaagctaattataacaagacgaactccaattcactgttccttgcattctaaaaccttaaataccagaaaacagctttttcaaagttgttttcaaagttggcgtataacatagtatcgacggagccgattttgaaaccgcggtgatcacaggcagcaacgctctgtcatcgttacaatcaacatgctaccctccgcgagatcatccgtgtttcaaacccggcagcttagttgccgttcttccgaatagcatcggtaacatgagcaaagtctgccgccttacaacggctctcccgctgacgccgtcccggactgatgggctgcctgtatcgagtggtgattttgtgccgagctgccggtcggggagctgttggctggctggtggcaggatatattgtggtgtaaacaaattgacgcttagacaacttaataacacattgcggacgtttttaatgtactgaattaacgccgaattaa

SEQ ID NO: 10 - protein, 62 aa, Acetabularia mediterranea
MASIMMNKSVVLSKECAKPLATPKVTLNKRGFATTIATKNREMMVWQPFNNKMFETFSFLPP

SEQ ID NO: 11 - protein, 90 aa, Arabidopsis thaliana
MAASLQSTATFLQSAKIATAPSRGSSHLRSTQAVGKSFGLETSSARLTCSFQSDFKDFTGKCSDAVKIAGFALATSALVVSGASAEGAPK

SEQ ID NO: 12 - protein, 96 aa, Arabidopsis thaliana
MAQVSRICNGVQNPSLICNLSKSSQRKSPLSVSLKTQQHPRAYPISSSWGLKKSGMTLIGSELRPLKVMSSVSTAEKASEIVLQPIREISGLIKLP

SEQ ID NO: 13 - protein, 100 aa, Arabidopsis thaliana
MAAATTTTTTSSSISFSTKPSPSSSKSPLPISRFSLPFSLNPNKSSSSSRRRGIKSSSPSSISAVLNTTTNVTTTPSPTKPTKPETFISRFAPDQPRKGA

SEQ ID NO: 14 - protein, 46 aa, Arabidopsis thaliana
MITSSLTCSLQALKLSSPFAHGSTPLSSLSKPNSFPNHRMPALVPV

SEQ ID NO: 15 - protein, 93 aa, Arabidopsis thaliana
MASLLGTSSSAIWASPSLSSPSSKPSSSPICFRPGKLFGSKLNAGIQIRPKKNRSRYHVSVMNVATEINSTEQVVGKFDSKKSARPVYPFAAI

SEQ ID NO: 16 - protein, 52 aa, Arabidopsis thaliana
MASTALSSAIVGTSFIRRSPAPISLRSLPSANTQSLFGLKSGTARGGRVVAM

SEQ ID NO: 17 - protein, 39 aa, Arabidopsis thaliana
MAASTMALSSPAFAGKAVNLSPAASEVLGSGRVTNRKTV

SEQ ID NO: 18 - protein, 92 aa, Arabidopsis thaliana
MAAITSATVTIPSFTGLKLAVSSKPKTLSTISRSSSATRAPPKLALKSSLKDFGVIAVATAASIVLAGNAMAMEVLLGSDDGSLAFVPSEFT

SEQ ID NO: 19 - protein, 85 aa, Arabidopsis thaliana
MAAAVSTVGAINRAPLSLNGSGSGAVSAPASTFLGKKVVTVSRFAQSNKKSNGSFKVLAVKEDKQTDGDRWRGLAYDTSDDQIDI

SEQ ID NO: 20 - protein, 54 aa, Arabidopsis thaliana
MKSSMLSSTAWTSPAQATMVAPFTGLKSSASFPVTRKANNDITSITSNGGRVSC

SEQ ID NO: 21 - protein, 91 aa, Arabidopsis thaliana
MAASGTSATFRASVSSAPSSSSQLTHLKSPFKAVKYTPLPSSRSKSSSFSVSCTIAKDPPVLMAAGSDPALWQRPDSFGRFGKFGGKYVPE

SEQ ID NO: 22 - protein, 80 aa, Brassica campestris
MSTTFCSSVCMQATSLAATTRISFQKPALVSTTNLSFNLRRSIPTRFSISCAAKPETVEKVSKIVKKQLSLKDDQKVVAE

SEQ ID NO: 23 - protein, 51 aa, Brassica napus
MATTFSASVSMQATSLATTTRISFQKPVLVSNHGRTNLSFNLSRTRLSISC

SEQ ID NO: 24 - protein, 44 aa, Chlamydomonas reinhardtii
MQALSSRVNIAAKPQRAQRLVVRAEEVKAAPKKEVGPKRGSLVK

SEQ ID NO: 25 - protein, 51 aa, Cucurbita moschata
MAELIQDKESAQSAATAAAASSGYERRNEPAHSRKFLEVRSEEELLSCIKK

SEQ ID NO: 26 - protein, 62 aa, Spinacea oleracea
MSTINGCLTSISPSRTQLKNTSTLRPTFIANSRVNPSSSVPPSLIRNQPVFAAPAPIITPTL

SEQ ID NO: 27 - protein, 75 aa, Spinacea oleracea
MTTAVTAAVSFPSTKTTSLSARCSSVISPDKISYKKVPLYYRNVSATGKMGPIRAQIASDVEAPPPAPAKVEKMS

SEQ ID NO: 28 - protein, 55 aa, Spinacea oleracea
MTTAVTAAVSFPSTKTTSLSARSSSVISPDKISYKKVPLYYRNVSATGKMGPIRA

SEQ ID NO: 29 - DNA, 419 bp, Spinacia oleracea
  5'UTR (1)..(168)
  CDS (166)..(273)
  CDS (351)..(419)
gcataaacttatcttcatagttgccactccaatttgctccttgaatctcctccacccaatacataatccactcctccatcacccacttcactactaaatcaaacttaactctgtttttctctctcctcctttcatttcttattcttccaatcatcgtactccgccatgaccaccgctgtcaccgccgctgtttctttcccctctaccaaaaccacctctctctccgcccgaagctcctccgtcatttcccctgacaaaatcagctacaaaaaggtgattcccaatttcactgtgttttttattaataatttgttattttgatgatgagatgattaatttgggtgctgcaggttcctttgtactacaggaatgtatctgcaactgggaaaatgggacccatcagggcccagatcgcctct

SEQ ID NO: 30 - protein, 59 aa, Spinacia oleracea
MTTAVTAAVSFPSTKTTSLSARSSSVISPDKISYKKVPLYYRNVSATGKMGPIRAQIAS

SEQ ID NO: 31 - DNA, 8659 bp, Artificial Sequence
  plasmid pMTX155
agcttggacaatcagtaaattgaacggagaatattattcataaaaatacgatagtaacgggtgatatattcattagaatgaaccgaaaccggcggtaaggatctgagctacacatgctcaggttttttacaacgtgcacaacagaattgaaagcaaatatcatgcgatcataggcgtctcgcatatctcattaaagcagggcatgccggtcgagtcaaatctcggtgacgggcaggaccggacggggcggtaccggcaggctgaagtccagctgccagaaacccacgtcatgccagttcccgtgcttgaagccggccgcccgcagcatgccgcggggggcatatccgagcgcctcgtgcatgcgcacgctcgggtcgttgggcagcccgatgacagcgaccacgctcttgaagccctgtgcctccagggacttcagcaggtgggtgtagagcgtggagcccagtcccgtccgctggtggcggggggagacgtacacggtcgactcggccgtccagtcgtaggcgttgcgtgccttccaggggcccgcgtaggcgatgccggcgacctcgccgtccacctcggcgacgagccagggatagcgctcccgcagacggacgaggtcgtccgtccactcctgcggttcctgcggctcggtacggaagttgaccgtgcttgtctcgatgtagtggttgacgatggtgcagaccgccggcatgtccgcctcggtggcacggcggatgtcggccgggcgtcgttctgggctcatggtagactcgacggatccacgtgtggaagatatgaatttttttgagaaactagataagattaatgaatatcggtgttttggttttttcttgtggccgtctttgtttatattgagatttttcaaatcagtgcgcaagacgtgacgtaagtatccgagtcagtttttatttttctactaatttggtcgaagctttgggcggatcctctagagcagcttgccaacatggtggagcacgacactctcgtctactccaagaatatcaaagatacagtctcagaagaccaaagggctattgagacttttcaacaaagggtaatatcgggaaacctcctcggattccattgcccagctatctgtcacttcatcaaaaggacagtagaaaaggaaggtggcacctacaaatgccatcattgcgataaaggaaaggctatcgttcaagatgcctctgccgacagtggtcccaaagatggacccccacccacgaggagcatcgtggaaaaagaagacgttccaaccacgtcttcaaagcaagtggattgatgtgaacatggtggagcacgacactctcgtctactccaagaatatcaaagatacagtctcagaagaccaaagggctattgagacttttcaacaaagggtaatatcgggaaacctcctcggattccattgcccagctatctgtcacttcatcaaaaggacagtagaaaaggaaggtggcacctacaaatgccatcattgcgataaaggaaaggctatcgttcaagatgcctctgccgacagtggtcccaaagatggacccccacccacgaggagcatcgtggaaaaagaagacgttccaaccacgtcttcaaagcaagtggattgatgtgatatctccactgacgtaagggatgacgcacaatcccactatccttcgcaagacccttcctctatataaggaagttcatttcatttggagaggacagggtaccctggaattccagctgaccaccatggcaattcccggggatcagctcgaatttccccgatcgttcaaacatttggcaataaagtttcttaagattgaatcctgttgccggtcttgcgatgattatcatataatttctgttgaattacgttaagcatgtaataattaacatgtaatgcatgacgttatttatgagatgggtttttatgattagagtcccgcaattatacatttaatacgcgatagaaaacaaaatatagcgcgcaaactaggataaattatcgcgcgcggtgtcatctatgttactagatcgggaattggcatgcaagcttggcactggccgtcgttttacaacgtcgtgactgggaaaaccctggcgttacccaacttaatcgccttgcagcacatccccctttcgccagctggcgtaatagcgaagaggcccgcaccgatcgcccttcccaacagttgcgcagcctgaatggcgaatgctagagcagcttgagcttggatcagattgtcgtttcccgccttcagtttaaactatcagtgtttgacaggatatattggcgggtaaacctaagagaaaagagcgtttattagaataacggatatttaaaagggcgtgaaaaggtttatccgttcgtccatttgtatgtgcatgccaaccacagggttcccctcgggatcaaagtactttgatccaacccctccgctgctatagtgcagtcggcttctgacgttcagtgcagccgtcttctgaaaacgacatgtcgcacaagtcctaagttacgcgacaggctgccgccctgcccttttcctggcgttttcttgtcgcgtgttttagtcgcataaagtagaatacttgcgactagaaccggagacattacgccatgaacaagagcgccgccgctggcctgctgggctatgcccgcgtcagcaccgacgaccaggacttgaccaaccaacgggccgaactgcacgcggccggctgcaccaagctgttttccgagaagatcaccggcaccaggcgcgaccgcccggagctggccaggatgcttgaccacctacgccctggcgacgttgtgacagtgaccaggctagaccgcctggcccgcagcacccgcgacctactggacattgccgagcgcatccaggaggccggcgcgggcctgcgtagcctggcagagccgtgggccgacaccaccacgccggccggccgcatggtgttgaccgtgttcgccggcattgccgagttcgagcgttccctaatcatcgaccgcacccggagcgggcgcgaggccgccaaggcccgaggcgtgaagtttggcccccgccctaccctcaccccggcacagatcgcgcacgcccgcgagctgatcgaccaggaaggccgcaccgtgaaagaggcggctgcactgcttggcgtgcatcgctcgaccctgtaccgcgcacttgagcgcagcgaggaagtgacgcccaccgaggccaggcggcgcggtgccttccgtgaggacgcattgaccgaggccgacgccctggcggccgccgagaatgaacgccaagaggaacaagcatgaaaccgcaccaggacggccaggacgaaccgtttttcattaccgaagagatcgaggcggagatgatcgcggccgggtacgtgttcgagccgcccgcgcacgtctcaaccgtgcggctgcatgaaatcctggccggtttgtctgatgccaagctggcggcctggccggccagcttggccgctgaagaaaccgagcgccgccgtctaaaaaggtgatgtgtatttgagtaaaacagcttgcgtcatgcggtcgctgcgtatatgatgcgatgagtaaataaacaaatacgcaaggggaacgcatgaaggttatcgctgtacttaaccagaaaggcgggtcaggcaagacgaccatcgcaacccatctagcccgcgccctgcaactcgccggggccgatgttctgttagtcgattccgatccccagggcagtgcccgcgattgggcggccgtgcgggaagatcaaccgctaaccgttgtcggcatcgaccgcccgacgattgaccgcgacgtgaaggccatcggccggcgcgacttcgtagtgatcgacggagcgccccaggcggcggacttggctgtgtccgcgatcaaggcagccgacttcgtgctgattccggtgcagccaagcccttacgacatatgggccaccgccgacctggtggagctggttaagcagcgcattgaggtcacggatggaaggctacaagcggcctttgtcgtgtcgcgggcgatcaaaggcacgcgcatcggcggtgaggttgccgaggcgctggccgggtacgagctgcccattcttgagtcccgtatcacgcagcgcgtgagctacccaggcactgccgccgccggcacaaccgttcttgaatcagaacccgagggcgacgctgcccgcgaggtccaggcgctggccgctgaaattaaatcaaaactcatttgagttaatgaggtaaagagaaaatgagcaaaagcacaaacacgctaagtgccggccgtccgagcgcacgcagcagcaaggctgcaacgttggccagcctggcagacacgccagccatgaagcgggtcaactttcagttgccggcggaggatcacaccaagctgaagatgtacgcggtacgccaaggcaagaccattaccgagctgctatctgaatacatcgcgcagctaccagagtaaatgagcaaatgaataaatgagtagatgaattttagcggctaaaggaggcggcatggaaaatcaagaacaaccaggcaccgacgccgtggaatgccccatgtgtggaggaacgggcggttggccaggcgtaagcggctgggttgtctgccggccctgcaatggcactggaacccccaagcccgaggaatcggcgtgacggtcgcaaaccatccggcccggtacaaatcggcgcggcgctgggtgatgacctggtggagaagttgaaggccgcgcaggccgcccagcggcaacgcatcgaggcagaagcacgccccggtgaatcgtggcaagcggccgctgatcgaatccgcaaagaatcccggcaaccgccggcagccggtgcgccgtcgattaggaagccgcccaagggcgacgagcaaccagattttttcgttccgatgctctatgacgtgggcacccgcgatagtcgcagcatcatggacgtggccgttttccgtctgtcgaagcgtgaccgacgagctggcgaggtgatccgctacgagcttccagacgggcacgtagaggtttccgcagggccggccggcatggccagtgtgtgggattacgacctggtactgatggcggtttcccatctaaccgaatccatgaaccgataccgggaagggaagggagacaagcccggccgcgtgttccgtccacacgttgcggacgtactcaagttctgccggcgagccgatggcggaaagcagaaagacgacctggtagaaacctgcattcggttaaacaccacgcacgttgccatgcagcgtacgaagaaggccaagaacggccgcctggtgacggtatccgagggtgaagccttgattagccgctacaagatcgtaaagagcgaaaccgggcggccggagtacatcgagatcgagctagctgattggatgtaccgcgagatcacagaaggcaagaacccggacgtgctgacggttcaccccgattactttttgatcgatcccggcatcggccgttttctctaccgcctggcacgccgcgccgcaggcaaggcagaagccagatggttgttcaagacgatctacgaacgcagtggcagcgccggagagttcaagaagttctgtttcaccgtgcgcaagctgatcgggtcaaatgacctgccggagtacgatttgaaggaggaggcggggcaggctggcccgatcctagtcatgcgctaccgcaacctgatcgagggcgaagcatccgccggttcctaatgtacggagcagatgctagggcaaattgccctagcaggggaaaaaggtcgaaaaggtctctttcctgtggatagcacgtacattgggaacccaaagccgtacattgggaaccggaacccgtacattgggaacccaaagccgtacattgggaaccggtcacacatgtaagtgactgatataaaagagaaaaaaggcgatttttccgcctaaaactctttaaaacttattaaaactcttaaaacccgcctggcctgtgcataactgtctggccagcgcacagccgaagagctgcaaaaagcgcctacccttcggtcgctgcgctccctacgccccgccgcttcgcgtcggcctatcgcggccgctggccgctcaaaaatggctggcctacggccaggcaatctaccagggcgcggacaagccgcgccgtcgccactcgaccgccggcgcccacatcaaggcaccctgcctcgcgcgtttcggtgatgacggtgaaaacctctgacacatgcagctcccggagacggtcacagcttgtctgtaagcggatgccgggagcagacaagcccgtcagggcgcgtcagcgggtgttggcgggtgtcggggcgcagccatgacccagtcacgtagcgatagcggagtgtatactggcttaactatgcggcatcagagcagattgtactgagagtgcaccatatgcggtgtgaaataccgcacagatgcgtaaggagaaaataccgcatcaggcgctcttccgcttcctcgctcactgactcgctgcgctcggtcgttcggctgcggcgagcggtatcagctcactcaaaggcggtaatacggttatccacagaatcaggggataacgcaggaaagaacatgtgagcaaaaggccagcaaaaggccaggaaccgtaaaaaggccgcgttgctggcgtttttccataggctccgcccccctgacgagcatcacaaaaatcgacgctcaagtcagaggtggcgaaacccgacaggactataaagataccaggcgtttccccctggaagctccctcgtgcgctctcctgttccgaccctgccgcttaccggatacctgtccgcctttctcccttcgggaagcgtggcgctttctcatagctcacgctgtaggtatctcagttcggtgtaggtcgttcgctccaagctgggctgtgtgcacgaaccccccgttcagcccgaccgctgcgccttatccggtaactatcgtcttgagtccaacccggtaagacacgacttatcgccactggcagcagccactggtaacaggattagcagagcgaggtatgtaggcggtgctacagagttcttgaagtggtggcctaactacggctacactagaaggacagtatttggtatctgcgctctgctgaagccagttaccttcggaaaaagagttggtagctcttgatccggcaaacaaaccaccgctggtagcggtggtttttttgtttgcaagcagcagattacgcgcagaaaaaaaggatctcaagaagatcctttgatcttttctacggggtctgacgctcagtggaacgaaaactcacgttaagggattttggtcatgcattctaggtactaaaacaattcatccagtaaaatataatattttattttctcccaatcaggcttgatccccagtaagtcaaaaaatagctcgacatactgttcttccccgatatcctccctgatcgaccggacgcagaaggcaatgtcataccacttgtccgccctgccgcttctcccaagatcaataaagccacttactttgccatctttcacaaagatgttgctgtctcccaggtcgccgtgggaaaagacaagttcctcttcgggcttttccgtctttaaaaaatcatacagctcgcgcggatctttaaatggagtgtcttcttcccagttttcgcaatccacatcggccagatcgttattcagtaagtaatccaattcggctaagcggctgtctaagctattcgtatagggacaatccgatatgtcgatggagtgaaagagcctgatgcactccgcatacagctcgataatcttttcagggctttgttcatcttcatactcttccgagcaaaggacgccatcggcctcactcatgagcagattgctccagccatcatgccgttcaaagtgcaggacctttggaacaggcagctttccttccagccatagcatcatgtccttttcccgttccacatcataggtggtccctttataccggctgtccgtcatttttaaatataggttttcattttctcccaccagcttatataccttagcaggagacattccttccgtatcttttacgcagcggtatttttcgatcagttttttcaattccggtgatattctcattttagccatttattatttccttcctcttttctacagtatttaaagataccccaagaagctaattataacaagacgaactccaattcactgttccttgcattctaaaaccttaaataccagaaaacagctttttcaaagttgttttcaaagttggcgtataacatagtatcgacggagccgattttgaaaccgcggtgatcacaggcagcaacgctctgtcatcgttacaatcaacatgctaccctccgcgagatcatccgtgtttcaaacccggcagcttagttgccgttcttccgaatagcatcggtaacatgagcaaagtctgccgccttacaacggctctcccgctgacgccgtcccggactgatgggctgcctgtatcgagtggtgattttgtgccgagctgccggtcggggagctgttggctggctggtggcaggatatattgtggtgtaaacaaattgacgcttagacaacttaataacacattgcggacgtttttaatgtactgaattaacgccgaatta

SEQ ID NO: 32 - DNA, 9469 bp, Artificial Sequence
  plasmid VC-MME354-1QCZ
  5'UTR (2130)..(2294)
  transit_peptide (2295)..(2402)
  CDS (2295)..(2402)
  transit_peptide (2480)..(2548)
  CDS (2480)..(2548)
  CDS (2549)..(2566): adapter
agctttgggcggatcctctagaggacaatcagtaaattgaacggagaatattattcataaaaatacgatagtaacgggtgatatattcattagaatgaaccgaaaccggcggtaaggatctgagctacacatgctcaggttttttacaacgtgcacaacagaattgaaagcaaatatcatgcgatcataggcgtctcgcatatctcattaaagcagggcatgccggtcgagtcaaatctcggtgacgggcaggaccggacggggcggtaccggcaggctgaagtccagctgccagaaacccacgtcatgccagttcccgtgcttgaagccggccgcccgcagcatgccgcggggggcatatccgagcgcctcgtgcatgcgcacgctcgggtcgttgggcagcccgatgacagcgaccacgctcttgaagccctgtgcctccagggacttcagcaggtgggtgtagagcgtggagcccagtcccgtccgctggtggcggggggagacgtacacggtcgactcggccgtccagtcgtaggcgttgcgtgccttccaggggcccgcgtaggcgatgccggcgacctcgccgtccacctcggcgacgagccagggatagcgctcccgcagacggacgaggtcgtccgtccactcctgcggttcctgcggctcggtacggaagttgaccgtgcttgtctcgatgtagtggttgacgatggtgcagaccgccggcatgtccgcctcggtggcacggcggatgtcggccgggcgtcgttctgggctcatggtagactcgacggatccacgtgtggaagatatgaatttttttgagaaactagataagattaatgaatatcggtgttttggttttttcttgtggccgtctttgtttatattgagatttttcaaatcagtgcgcaagacgtgacgtaagtatccgagtcagtttttatttttctactaatttggtcgaatctagattcgacggtatcgataagctcgcggatccctgaaagcgacgttggatgttaacatctacaaattgccttttcttatcgaccatgtacgtaagcgcttacgtttttggtggacccttgaggaaactggtagctgttgtgggcctgtggtctcaagatggatcattaatttccaccttcacctacgatggggggcatcgcaccggtgagtaatattgtacggctaagagcgaatttggcctgtaggatccctgaaagcgacgttggatgttaacatctacaaattgccttttcttatcgaccatgtacgtaagcgcttacgtttttggtggacccttgaggaaactggtagctgttgtgggcctgtggtctcaagatggatcattaatttccaccttcacctacgatggggggcatcgcaccggtgagtaatattgtacggctaagagcgaatttggcctgtaggatccctgaaagcgacgttggatgttaacatctacaaattgccttttcttatcgaccatgtacgtaagcgcttacgtttttggtggacccttgaggaaactggtagctgttgtgggcctgtggtctcaagatggatcattaatttccaccttcacctacgatggggggcatcgcaccggtgagtaatattgtacggctaagagcgaatttggcctgtaggatccgcgagctggtcaatcccattgcttttgaagcagctcaacattgatctctttctcgatcgagggagatttttcaaatcagtgcgcaagacgtgacgtaagtatccgagtcagtttttatttttctactaatttggtcgtttatttcggcgtgtaggacatggcaaccgggcctgaatttcgcgggtattctgtttctattccaactttttcttgatccgcagccattaacgacttttgaatagatacgctgacacgccaagcctcgctagtcaaaagtgtaccaaacaacgctttacagcaagaacggaatgcgcgtgacgctcgcggtgacgccatttcgccttttcagaaatggataaatagccttgcttcctattatatcttcccaaattaccaatacattacactagcatctgaatttcataaccaatctcgatacaccaaatcgaagatctccctggaattcgcataaacttatcttcatagttgccactccaatttgctccttgaatctcctccacccaatacataatccactcctccatcacccacttcactactaaatcaaacttaactctgtttttctctctcctcctttcatttcttattcttccaatcatcgtactccgccatgaccaccgctgtcaccgccgctgtttctttcccctctaccaaaaccacctctctctccgcccgaagctcctccgtcatttcccctgacaaaatcagctacaaaaaggtgattcccaatttcactgtgttttttattaataatttgttattttgatgatgagatgattaatttgggtgctgcaggttcctttgtactacaggaatgtatctgcaactgggaaaatgggacccatcagggcccagatcgcctctgaattccagctgaccaccatggcaattcccggggatcagctcgaatttccccgatcgttcaaacatttggcaataaagtttcttaagattgaatcctgttgccggtcttgcgatgattatcatataatttctgttgaattacgttaagcatgtaataattaacatgtaatgcatgacgttatttatgagatgggtttttatgattagagtcccgcaattatacatttaatacgcgatagaaaacaaaatatagcgcgcaaactaggataaattatcgcgcgcggtgtcatctatgttactagatcgggaattggcatgcaagcttggcactggccgtcgttttacaacgtcgtgactgggaaaaccctggcgttacccaacttaatcgccttgcagcacatccccctttcgccagctggcgtaatagcgaagaggcccgcaccgatcgcccttcccaacagttgcgcagcctgaatggcgaatgctagagcagcttgagcttggatcagattgtcgtttcccgccttcagtttaaactatcagtgtttgacaggatatattggcgggtaaacctaagagaaaagagcgtttattagaataatcggatatttaaaagggcgtgaaaaggtttatccgttcgtccatttgtatgtgcatgccaaccacagggttcccctcgggatcaaagtactttgatccaacccctccgctgctatagtgcagtcggcttctgacgttcagtgcagccgtcttctgaaaacgacatgtcgcacaagtcctaagttacgcgacaggctgccgccctgcccttttcctggcgttttcttgtcgcgtgttttagtcgcataaagtagaatacttgcgactagaaccggagacattacgccatgaacaagagcgccgccgctggcctgctgggctatgcccgcgtcagcaccgacgaccaggacttgaccaaccaacgggccgaactgcacgcggccggctgcaccaagctgttttccgagaagatcaccggcaccaggcgcgaccgcccggagctggccaggatgcttgaccacctacgccctggcgacgttgtgacagtgaccaggctagaccgcctggcccgcagcacccgcgacctactggacattgccgagcgcatccaggaggccggcgcgggcctgcgtagcctggcagagccgtgggccgacaccaccacgccggccggccgcatggtgttgaccgtgttcgccggcattgccgagttcgagcgttccctaatcatcgaccgcacccggagcgggcgcgaggccgccaaggcccgaggcgtgaagtttggcccccgccctaccctcaccccggcacagatcgcgcacgcccgcgagctgatcgaccaggaaggccgcaccgtgaaagaggcggctgcactgcttggcgtgcatcgctcgaccctgtaccgcgcacttgagcgcagcgaggaagtgacgcccaccgaggccaggcggcgcggtgccttccgtgaggacgcattgaccgaggccgacgccctggcggccgccgagaatgaacgccaagaggaacaagcatgaaaccgcaccaggacggccaggacgaaccgtttttcattaccgaagagatcgaggcggagatgatcgcggccgggtacgtgttcgagccgcccgcgcacgtctcaaccgtgcggctgcatgaaatcctggccggtttgtctgatgccaagctggcggcctggccggccagcttggccgctgaagaaaccgagcgccgccgtctaaaaaggtgatgtgtatttgagtaaaacagcttgcgtcatgcggtcgctgcgtatatgatgcgatgagtaaataaacaaatacgcaaggggaacgcatgaaggttatcgctgtacttaaccagaaaggcgggtcaggcaagacgaccatcgcaacccatctagcccgcgccctgcaactcgccggggccgatgttctgttagtcgattccgatccccagggcagtgcccgcgattgggcggccgtgcgggaagatcaaccgctaaccgttgtcggcatcgaccgcccgacgattgaccgcgacgtgaaggccatcggccggcgcgacttcgtagtgatcgacggagcgccccaggcggcggacttggctgtgtccgcgatcaaggcagccgacttcgtgctgattccggtgcagccaagcccttacgacatatgggccaccgccgacctggtggagctggttaagcagcgcattgaggtcacggatggaaggctacaagcggcctttgtcgtgtcgcgggcgatcaaaggcacgcgcatcggcggtgaggttgccgaggcgctggccgggtacgagctgcccattcttgagtcccgtatcacgcagcgcgtgagctacccaggcactgccgccgccggcacaaccgttcttgaatcagaacccgagggcgacgctgcccgcgaggtccaggcgctggccgctgaaattaaatcaaaactcatttgagttaatgaggtaaagagaaaatgagcaaaagcacaaacacgctaagtgccggccgtccgagcgcacgcagcagcaaggctgcaacgttggccagcctggcagacacgccagccatgaagcgggtcaactttcagttgccggcggaggatcacaccaagctgaagatgtacgcggtacgccaaggcaagaccattaccgagctgctatctgaatacatcgcgcagctaccagagtaaatgagcaaatgaataaatgagtagatgaattttagcggctaaaggaggcggcatggaaaatcaagaacaaccaggcaccgacgccgtggaatgccccatgtgtggaggaacgggcggttggccaggcgtaagcggctgggttgcctgccggccctgcaatggcactggaacccccaagcccgaggaatcggcgtgagcggtcgcaaaccatccggcccggtacaaatcggcgcggcgctgggtgatgacctggtggagaagttgaaggccgcgcaggccgcccagcggcaacgcatcgaggcagaagcacgccccggtgaatcgtggcaagcggccgctgatcgaatccgcaaagaatcccggcaaccgccggcagccggtgcgccgtcgattaggaagccgcccaagggcgacgagcaaccagattttttcgttccgatgctctatgacgtgggcacccgcgatagtcgcagcatcatggacgtggccgttttccgtctgtcgaagcgtgaccgacgagctggcgaggtgatccgctacgagcttccagacgggcacgtagaggtttccgcagggccggccggcatggccagtgtgtgggattacgacctggtactgatggcggtttcccatctaaccgaatccatgaaccgataccgggaagggaagggagacaagcccggccgcgtgttccgtccacacgttgcggacgtactcaagttctgccggcgagccgatggcggaaagcagaaagacgacctggtagaaacctgcattcggttaaacaccacgcacgttgccatgcagcgtacgaagaaggccaagaacggccgcctggtgacggtatccgagggtgaagccttgattagccgctacaagatcgtaaagagcgaaaccgggcggccggagtacatcgagatcgagctagctgattggatgtaccgcgagatcacagaaggcaagaacccggacgtgctgacggttcaccccgattactttttgatcgatcccggcatcggccgttttctctaccgcctggcacgccgcgccgcaggcaaggcagaagccagatggttgttcaagacgatctacgaacgcagtggcagcgccggagagttcaagaagttctgtttcaccgtgcgcaagctgatcgggtcaaatgacctgccggagtacgatttgaaggaggaggcggggcaggctggcccgatcctagtcatgcgctaccgcaacctgatcgagggcgaagcatccgccggttcctaatgtacggagcagatgctagggcaaattgccctagcaggggaaaaaggtcgaaaaggtctctttcctgtggatagcacgtacattgggaacccaaagccgtacattgggaaccggaacccgtacattgggaacccaaagccgtacattgggaaccggtcacacatgtaagtgactgatataaaagagaaaaaaggcgatttttccgcctaaaactctttaaaacttattaaaactcttaaaacccgcctggcctgtgcataactgtctggccagcgcacagccgaagagctgcaaaaagcgcctacccttcggtcgctgcgctccctacgccccgccgcttcgcgtcggcctatcgcggccgctggccgctcaaaaatggctggcctacggccaggcaatctaccagggcgcggacaagccgcgccgtcgccactcgaccgccggcgcccacatcaaggcaccctgcctcgcgcgtttcggtgatgacggtgaaaacctctgacacatgcagctcccggagacggtcacagcttgtctgtaagcggatgccgggagcagacaagcccgtcagggcgcgtcagcgggtgttggcgggtgtcggggcgcagccatgacccagtcacgtagcgatagcggagtgtatactggcttaactatgcggcatcagagcagattgtactgagagtgcaccatatgcggtgtgaaataccgcacagatgcgtaaggagaaaataccgcatcaggcgctcttccgcttcctcgctcactgactcgctgcgctcggtcgttcggctgcggcgagcggtatcagctcactcaaaggcggtaatacggttatccacagaatcaggggataacgcaggaaagaacatgtgagcaaaaggccagcaaaaggccaggaaccgtaaaaaggccgcgttgctggcgtttttccataggctccgcccccctgacgagcatcacaaaaatcgacgctcaagtcagaggtggcgaaacccgacaggactataaagataccaggcgtttccccctggaagctccctcgtgcgctctcctgttccgaccctgccgcttaccggatacctgtccgcctttctcccttcgggaagcgtggcgctttctcatagctcacgctgtaggtatctcagttcggtgtaggtcgttcgctccaagctgggctgtgtgcacgaaccccccgttcagcccgaccgctgcgccttatccggtaactatcgtcttgagtccaacccggtaagacacgacttatcgccactggcagcagccactggtaacaggattagcagagcgaggtatgtaggcggtgctacagagttcttgaagtggtggcctaactacggctacactagaaggacagtatttggtatctgcgctctgctgaagccagttaccttcggaaaaagagttggtagctcttgatccggcaaacaaaccaccgctggtagcggtggtttttttgtttgcaagcagcagattacgcgcagaaaaaaaggatctcaagaagatcctttgatcttttctacggggtctgacgctcagtggaacgaaaactcacgttaagggattttggtcatgcattctaggtactaaaacaattcatccagtaaaatataatattttattttctcccaatcaggcttgatccccagtaagtcaaaaaatagctcgacatactgttcttccccgatatcctccctgatcgaccggacgcagaaggcaatgtcataccacttgtccgccctgccgcttctcccaagatcaataaagccacttactttgccatctttcacaaagatgttgctgtctcccaggtcgccgtgggaaaagacaagttcctcttcgggcttttccgtctttaaaaaatcatacagctcgcgcggatctttaaatggagtgtcttcttcccagttttcgcaatccacatcggccagatcgttattcagtaagtaatccaattcggctaagcggctgtctaagctattcgtatagggacaatccgatatgtcgatggagtgaaagagcctgatgcactccgcatacagctcgataatcttttcagggctttgttcatcttcatactcttccgagcaaaggacgccatcggcctcactcatgagcagattgctccagccatcatgccgttcaaagtgcaggacctttggaacaggcagctttccttccagccatagcatcatgtccttttcccgttccacatcataggtggtccctttataccggctgtccgtcatttttaaatataggttttcattttctcccaccagcttatataccttagcaggagacattccttccgtatcttttacgcagcggtatttttcgatcagttttttcaattccggtgatattctcattttagccatttattatttccttcctcttttctacagtatttaaagataccccaagaagctaattataacaagacgaactccaattcactgttccttgcattctaaaaccttaaataccagaaaacagctttttcaaagttgttttcaaagttggcgtataacatagtatcgacggagccgattttgaaaccgcggtgatcacaggcagcaacgctctgtcatcgttacaatcaacatgctaccctccgcgagatcatccgtgtttcaaacccggcagcttagttgccgttcttccgaatagcatcggtaacatgagcaaagtctgccgccttacaacggctctcccgctgacgccgtcccggactgatgggctgcctgtatcgagtggtgattttgtgccgagctgccggtcggggagctgttggctggctggtggcaggatatattgtggtgtaaacaaattgacgcttagacaacttaataacacattgcggacgtttttaatgtactgaattaacgccgaatta

SEQ ID NO: 33 - protein, 65 aa, Artificial Sequence
  Synthetic Construct
MTTAVTAAVSFPSTKTTSLSARSSSVISPDKISYKKVPLYYRNVSATGKMGPIRAQIASEFQLTT

SEQ ID NO: 34 - DNA, 9129 bp, Artificial Sequence
  plasmid VC-MME356-1QCZ
  transit_peptide (2128)..(2208)
  CDS (2128)..(2208)
  CDS (2209)..(2226): adapter
agcttggacaatcagtaaattgaacggagaatattattcataaaaatacgatagtaacgggtgatatattcattagaatgaaccgaaaccggcggtaaggatctgagctacacatgctcaggttttttacaacgtgcacaacagaattgaaagcaaatatcatgcgatcataggcgtctcgcatatctcattaaagcagggcatgccggtcgagtcaaatctcggtgacgggcaggaccggacggggcggtaccggcaggctgaagtccagctgccagaaacccacgtcatgccagttcccgtgcttgaagccggccgcccgcagcatgccgcggggggcatatccgagcgcctcgtgcatgcgcacgctcgggtcgttgggcagcccgatgacagcgaccacgctcttgaagccctgtgcctccagggacttcagcaggtgggtgtagagcgtggagcccagtcccgtccgctggtggcggggggagacgtacacggtcgactcggccgtccagtcgtaggcgttgcgtgccttccaggggcccgcgtaggcgatgccggcgacctcgccgtccacctcggcgacgagccagggatagcgctcccgcagacggacgaggtcgtccgtccactcctgcggttcctgcggctcggtacggaagttgaccgtgcttgtctcgatgtagtggttgacgatggtgcagaccgccggcatgtccgcctcggtggcacggcggatgtcggccgggcgtcgttctgggctcatggtagactcgacggatccacgtgtggaagatatgaatttttttgagaaactagataagattaatgaatatcggtgttttggttttttcttgtggccgtctttgtttatattgagatttttcaaatcagtgcgcaagacgtgacgtaagtatccgagtcagtttttatttttctactaatttggtcgaagctttgggcggatcctctagattcgacggtatcgataagctcgcggatccctgaaagcgacgttggatgttaacatctacaaattgccttttcttatcgaccatgtacgtaagcgcttacgtttttggtggacccttgaggaaactggtagctgttgtgggcctgtggtctcaagatggatcattaatttccaccttcacctacgatggggggcatcgcaccggtgagtaatattgtacggctaagagcgaatttggcctgtaggatccctgaaagcgacgttggatgttaacatctacaaattgccttttcttatcgaccatgtacgtaagcgcttacgtttttggtggacccttgaggaaactggtagctgttgtgggcctgtggtctcaagatggatcattaatttccaccttcacctacgatggggggcatcgcaccggtgagtaatattgtacggctaagagcgaatttggcctgtaggatccctgaaagcgacgttggatgttaacatctacaaattgccttttcttatcgaccatgtacgtaagcgcttacgtttttggtggacccttgaggaaactggtagctgttgtgggcctgtggtctcaagatggatcattaatttccaccttcacctacgatggggggcatcgcaccggtgagtaatattgtacggctaagagcgaatttggcctgtaggatccgcgagctggtcaatcccattgcttttgaagcagctcaacattgatctctttctcgatcgagggagatttttcaaatcagtgcgcaagacgtgacgtaagtatccgagtcagtttttatttttctactaatttggtcgtttatttcggcgtgtaggacatggcaaccgggcctgaatttcgcgggtattctgtttctattccaactttttcttgatccgcagccattaacgacttttgaatagatacgctgacacgccaagcctcgctagtcaaaagtgtaccaaacaacgctttacagcaagaacggaatgcgcgtgacgctcgcggtgacgccatttcgccttttcagaaatggataaatagccttgcttcctattatatcttcccaaattaccaatacattacactagcatctgaatttcataaccaatctcgatacaccaaatcgaagatctccctggaattcatgcagaggtttttctccgccagatcgattctcggttacgccgtcaagacgcggaggaggtctttctcttctcgttcttcggaattccagctgaccaccatggcaattcccggggatcagctcgaatttccccgatcgttcaaacatttggcaataaagtttcttaagattgaatcctgttgccggtcttgcgatgattatcatataatttctgttgaattacgttaagcatgtaataattaacatgtaatgcatgacgttatttatgagatgggtttttatgattagagtcccgcaattatacatttaatacgcgatagaaaacaaaatatagcgcgcaaactaggataaattatcgcgcgcggtgtcatctatgttactagatcgggaattggcatgcaagcttggcactggccgtcgttttacaacgtcgtgactgggaaaaccctggcgttacccaacttaatcgccttgcagcacatccccctttcgccagctggcgtaatagcgaagaggcccgcaccgatcgcccttcccaacagttgcgcagcctgaatggcgaatgctagagcagcttgagcttggatcagattgtcgtttcccgccttcagtttaaactatcagtgtttgacaggatatattggcgggtaaacctaagagaaaagagcgtttattagaataatcggatatttaaaagggcgtgaaaaggtttatccgttcgtccatttgtatgtgcatgccaaccacagggttcccctcgggatcaaagtactttgatccaacccctccgctgctatagtgcagtcggcttctgacgttcagtgcagccgtcttctgaaaacgacatgtcgcacaagtcctaagttacgcgacaggctgccgccctgcccttttcctggcgttttcttgtcgcgtgttttagtcgcataaagtagaatacttgcgactagaaccggagacattacgccatgaacaagagcgccgccgctggcctgctgggctatgcccgcgtcagcaccgacgaccaggacttgaccaaccaacgggccgaactgcacgcggccggctgcaccaagctgttttccgagaagatcaccggcaccaggcgcgaccgcccggagctggccaggatgcttgaccacctacgccctggcgacgttgtgacagtgaccaggctagaccgcctggcccgcagcacccgcgacctactggacattgccgagcgcatccaggaggccggcgcgggcctgcgtagcctggcagagccgtgggccgacaccaccacgccggccggccgcatggtgttgaccgtgttcgccggcattgccgagttcgagcgttccctaatcatcgaccgcacccggagcgggcgcgaggccgccaaggcccgaggcgtgaagtttggcccccgccctaccctcaccccggcacagatcgcgcacgcccgcgagctgatcgaccaggaaggccgcaccgtgaaagaggcggctgcactgcttggcgtgcatcgctcgaccctgtaccgcgcacttgagcgcagcgaggaagtgacgcccaccgaggccaggcggcgcggtgccttccgtgaggacgcattgaccgaggccgacgccctggcggccgccgagaatgaacgccaagaggaacaagcatgaaaccgcaccaggacggccaggacgaaccgtttttcattaccgaagagatcgaggcggagatgatcgcggccgggtacgtgttcgagccgcccgcgcacgtctcaaccgtgcggctgcatgaaatcctggccggtttgtctgatgccaagctggcggcctggccggccagcttggccgctgaagaaaccgagcgccgccgtctaaaaaggtgatgtgtatttgagtaaaacagcttgcgtcatgcggtcgctgcgtatatgatgcgatgagtaaataaacaaatacgcaaggggaacgcatgaaggttatcgctgtacttaaccagaaaggcgggtcaggcaagacgaccatcgcaacccatctagcccgcgccctgcaactcgccggggccgatgttctgttagtcgattccgatccccagggcagtgcccgcgattgggcggccgtgcgggaagatcaaccgctaaccgttgtcggcatcgaccgcccgacgattgaccgcgacgtgaaggccatcggccggcgcgacttcgtagtgatcgacggagcgccccaggcggcggacttggctgtgtccgcgatcaaggcagccgacttcgtgctgattccggtgcagccaagcccttacgacatatgggccaccgccgacctggtggagctggttaagcagcgcattgaggtcacggatggaaggctacaagcggcctttgtcgtgtcgcgggcgatcaaaggcacgcgcatcggcggtgaggttgccgaggcgctggccgggtacgagctgcccattcttgagtcccgtatcacgcagcgcgtgagctacccaggcactgccgccgccggcacaaccgttcttgaatcagaacccgagggcgacgctgcccgcgaggtccaggcgctggccgctgaaattaaatcaaaactcatttgagttaatgaggtaaagagaaaatgagcaaaagcacaaacacgctaagtgccggccgtccgagcgcacgcagcagcaaggctgcaacgttggccagcctggcagacacgccagccatgaagcgggtcaactttcagttgccggcggaggatcacaccaagctgaagatgtacgcggtacgccaaggcaagaccattaccgagctgctatctgaatacatcgcgcagctaccagagtaaatgagcaaatgaataaatgagtagatgaattttagcggctaaaggaggcggcatggaaaatcaagaacaaccaggcaccgacgccgtggaatgccccatgtgtggaggaacgggcggttggccaggcgtaagcggctgggttgcctgccggccctgcaatggcactggaacccccaagcccgaggaatcggcgtgagcggtcgcaaaccatccggcccggtacaaatcggcgcggcgctgggtgatgacctggtggagaagttgaaggccgcgcaggccgcccagcggcaacgcatcgaggcagaagcacgccccggtgaatcgtggcaagcggccgctgatcgaatccgcaaagaatcccggcaaccgccggcagccggtgcgccgtcgattaggaagccgcccaagggcgacgagcaaccagattttttcgttccgatgctctatgacgtgggcacccgcgatagtcgcagcatcatggacgtggccgttttccgtctgtcgaagcgtgaccgacgagctggcgaggtgatccgctacgagcttccagacgggcacgtagaggtttccgcagggccggccggcatggccagtgtgtgggattacgacctggtactgatggcggtttcccatctaaccgaatccatgaaccgataccgggaagggaagggagacaagcccggccgcgtgttccgtccacacgttgcggacgtactcaagttctgccggcgagccgatggcggaaagcagaaagacgacctggtagaaacctgcattcggttaaacaccacgcacgttgccatgcagcgtacgaagaaggccaagaacggccgcctggtgacggtatccgagggtgaagccttgattagccgctacaagatcgtaaagagcgaaaccgggcggccggagtacatcgagatcgagctagctgattggatgtaccgcgagatcacagaaggcaagaacccggacgtgctgacggttcaccccgattactttttgatcgatcccggcatcggccgttttctctaccgcctggcacgccgcgccgcaggcaaggcagaagccagatggttgttcaagacgatctacgaacgcagtggcagcgccggagagttcaagaagttctgtttcaccgtgcgcaagctgatcgggtcaaatgacctgccggagtacgatttgaaggaggaggcggggcaggctggcccgatcctagtcatgcgctaccgcaacctgatcgagggcgaagcatccgccggttcctaatgtacggagcagatgctagggcaaattgccctagcaggggaaaaaggtcgaaaaggtctctttcctgtggatagcacgtacattgggaacccaaagccgtacattgggaaccggaacccgtacattgggaacccaaagccgtacattgggaaccggtcacacatgtaagtgactgatataaaagagaaaaaaggcgatttttccgcctaaaactctttaaaacttattaaaactcttaaaacccgcctggcctgtgcataactgtctggccagcgcacagccgaagagctgcaaaaagcgcctacccttcggtcgctgcgctccctacgccccgccgcttcgcgtcggcctatcgcggccgctggccgctcaaaaatggctggcctacggccaggcaatctaccagggcgcggacaagccgcgccgtcgccactcgaccgccggcgcccacatcaaggcaccctgcctcgcgcgtttcggtgatgacggtgaaaacctctgacacatgcagctcccggagacggtcacagcttgtctgtaagcggatgccgggagcagacaagcccgtcagggcgcgtcagcgggtgttggcgggtgtcggggcgcagccatgacccagtcacgtagcgatagcggagtgtatactggcttaactatgcggcatcagagcagattgtactgagagtgcaccatatgcggtgtgaaataccgcacagatgcgtaaggagaaaataccgcatcaggcgctcttccgcttcctcgctcactgactcgctgcgctcggtcgttcggctgcggcgagcggtatcagctcactcaaaggcggtaatacggttatccacagaatcaggggataacgcaggaaagaacatgtgagcaaaaggccagcaaaaggccaggaaccgtaaaaaggccgcgttgctggcgtttttccataggctccgcccccctgacgagcatcacaaaaatcgacgctcaagtcagaggtggcgaaacccgacaggactataaagataccaggcgtttccccctggaagctccctcgtgcgctctcctgttccgaccctgccgcttaccggatacctgtccgcctttctcccttcgggaagcgtggcgctttctcatagctcacgctgtaggtatctcagttcggtgtaggtcgttcgctccaagctgggctgtgtgcacgaaccccccgttcagcccgaccgctgcgccttatccggtaactatcgtcttgagtccaacccggtaagacacgacttatcgccactggcagcagccactggtaacaggattagcagagcgaggtatgtaggcggtgctacagagttcttgaagtggtggcctaactacggctacactagaaggacagtatttggtatctgcgctctgctgaagccagttaccttcggaaaaagagttggtagctcttgatccggcaaacaaaccaccgctggtagcggtggtttttttgtttgcaagcagcagattacgcgcagaaaaaaaggatctcaagaagatcctttgatcttttctacggggtctgacgctcagtggaacgaaaactcacgttaagggattttggtcatgcattctaggtactaaaacaattcatccagtaaaatataatattttattttctcccaatcaggcttgatccccagtaagtcaaaaaatagctcgacatactgttcttccccgatatcctccctgatcgaccggacgcagaaggcaatgtcataccacttgtccgccctgccgcttctcccaagatcaataaagccacttactttgccatctttcacaaagatgttgctgtctcccaggtcgccgtgggaaaagacaagttcctcttcgggcttttccgtctttaaaaaatcatacagctcgcgcggatctttaaatggagtgtcttcttcccagttttcgcaatccacatcggccagatcgttattcagtaagtaatccaattcggctaagcggctgtctaagctattcgtatagggacaatccgatatgtcgatggagtgaaagagcctgatgcactccgcatacagctcgataatcttttcagggctttgttcatcttcatactcttccgagcaaaggacgccatcggcctcactcatgagcagattgctccagccatcatgccgttcaaagtgcaggacctttggaacaggcagctttccttccagccatagcatcatgtccttttcccgttccacatcataggtggtccctttataccggctgtccgtcatttttaaatataggttttcattttctcccaccagcttatataccttagcaggagacattccttccgtatcttttacgcagcggtatttttcgatcagttttttcaattccggtgatattctcattttagccatttattatttccttcctcttttctacagtatttaaagataccccaagaagctaattataacaagacgaactccaattcactgttccttgcattctaaaaccttaaataccagaaaacagctttttcaaagttgttttcaaagttggcgtataacatagtatcgacggagccgattttgaaaccgcggtgatcacaggcagcaacgctctgtcatcgttacaatcaacatgctaccctccgcgagatcatccgtgtttcaaacccggcagcttagttgccgttcttccgaatagcatcggtaacatgagcaaagtctgccgccttacaacggctctcccgctgacgccgtcccggactgatgggctgcctgtatcgagtggtgattttgtgccgagctgccggtcggggagctgttggctggctggtggcaggatatattgtggtgtaaacaaattgacgcttagacaacttaataacacattgcggacgtttttaatgtactgaattaacgccgaatta

SEQ ID NO: 35 - protein, 33 aa, Artificial Sequence
  Synthetic Construct
MQRFFSARSILGYAVKTRRRSFSSRSSEFQLTT

SEQ ID NO: 36 - DNA, 8585 bp, Artificial Sequence
  plasmid VC-MME301-1QCZ
agcttggacaatcagtaaattgaacggagaatattattcataaaaatacgatagtaacgggtgatatattcattagaatgaaccgaaaccggcggtaaggatctgagctacacatgctcaggttttttacaacgtgcacaacagaattgaaagcaaatatcatgcgatcataggcgtctcgcatatctcattaaagcagggcatgccggtcgagtcaaatctcggtgacgggcaggaccggacggggcggtaccggcaggctgaagtccagctgccagaaacccacgtcatgccagttcccgtgcttgaagccggccgcccgcagcatgccgcggggggcatatccgagcgcctcgtgcatgcgcacgctcgggtcgttgggcagcccgatgacagcgaccacgctcttgaagccctgtgcctccagggacttcagcaggtgggtgtagagcgtggagcccagtcccgtccgctggtggcggggggagacgtacacggtcgactcggccgtccagtcgtaggcgttgcgtgccttccaggggcccgcgtaggcgatgccggcgacctcgccgtccacctcggcgacgagccagggatagcgctcccgcagacggacgaggtcgtccgtccactcctgcggttcctgcggctcggtacggaagttgaccgtgcttgtctcgatgtagtggttgacgatggtgcagaccgccggcatgtccgcctcggtggcacggcggatgtcggccgggcgtcgttctgggctcatggtagactcgacggatccacgtgtggaagatatgaatttttttgagaaactagataagattaatgaatatcggtgttttggttttttcttgtggccgtctttgtttatattgagatttttcaaatcagtgcgcaagacgtgacgtaagtatccgagtcagtttttatttttctactaatttggtcgaagctttgggcggatcctctagactgcagcaaatttacacattgccactaaacgtctaaacccttgtaatttgtttttgttttactatgtgtgttatgtatttgatttgcgataaatttttatatttggtactaaatttataacaccttttatgctaacgtttgccaacacttagcaatttgcaagttgattaattgattctaaattatttttgtcttctaaatacatatactaatcaactggaaatgtaaatatttgctaatatttctactataggagaattaaagtgagtgaatatggtaccacaaggtttggagatttaattgttgcaatgctgcatggatggcatatacaccaaacattcaataattcttgaggataataatggtaccacacaagatttgaggtgcatgaacgtcacgtggacaaaaggtttagtaatttttcaagacaacaatgttaccacacacaagttttgaggtgcatgcatggatgccctgtggaaagtttaaaaatattttggaaatgatttgcatggaagccatgtgtaaaaccatgacatccacttggaggatgcaataatgaagaaaactacaaatttacatgcaactagttatgcatgtagtctatataatgaggattttgcaatactttcattcatacacactcactaagttttacacgattataatttcttcataccattaattaagaattccagctgaccaccatggcaattcccggggatcagctcgaatttccccgatcgttcaaacatttggcaataaagtttcttaagattgaatcctgttgccggtcttgcgatgattatcatataatttctgttgaattacgttaagcatgtaataattaacatgtaatgcatgacgttatttatgagatgggtttttatgattagagtcccgcaattatacatttaatacgcgatagaaaacaaaatatagcgcgcaaactaggataaattatcgcgcgcggtgtcatctatgttactagatcgggaattggcatgcaagcttggcactggccgtcgttttacaacgtcgtgactgggaaaaccctggcgttacccaacttaatcgccttgcagcacatccccctttcgccagctggcgtaatagcgaagaggcccgcaccgatcgcccttcccaacagttgcgcagcctgaatggcgaatgctagagcagcttgagcttggatcagattgtcgtttcccgccttcagtttaaactatcagtgtttgacaggatatattggcgggtaaacctaagagaaaagagcgtttattagaataatcggatatttaaaagggcgtgaaaaggtttatccgttcgtccatttgtatgtgcatgccaaccacagggttcccctcgggatcaaagtactttgatccaacccctccgctgctatagtgcagtcggcttctgacgttcagtgcagccgtcttctgaaaacgacatgtcgcacaagtcctaagttacgcgacaggctgccgccctgcccttttcctggcgttttcttgtcgcgtgttttagtcgcataaagtagaatacttgcgactagaaccggagacattacgccatgaacaagagcgccgccgctggcctgctgggctatgcccgcgtcagcaccgacgaccaggacttgaccaaccaacgggccgaactgcacgcggccggctgcaccaagctgttttccgagaagatcaccggcaccaggcgcgaccgcccggagctggccaggatgcttgaccacctacgccctggcgacgttgtgacagtgaccaggctagaccgcctggcccgcagcacccgcgacctactggacattgccgagcgcatccaggaggccggcgcgggcctgcgtagcctggcagagccgtgggccgacaccaccacgccggccggccgcatggtgttgaccgtgttcgccggcattgccgagttcgagcgttccctaatcatcgaccgcacccggagcgggcgcgaggccgccaaggcccgaggcgtgaagtttggcccccgccctaccctcaccccggcacagatcgcgcacgcccgcgagctgatcgaccaggaaggccgcaccgtgaaagaggcggctgcactgcttggcgtgcatcgctcgaccctgtaccgcgcacttgagcgcagcgaggaagtgacgcccaccgaggccaggcggcgcggtgccttccgtgaggacgcattgaccgaggccgacgccctggcggccgccgagaatgaacgccaagaggaacaagcatgaaaccgcaccaggacggccaggacgaaccgtttttcattaccgaagagatcgaggcggagatgatcgcggccgggtacgtgttcgagccgcccgcgcacgtctcaaccgtgcggctgcatgaaatcctggccggtttgtctgatgccaagctggcggcctggccggccagcttggccgctgaagaaaccgagcgccgccgtctaaaaaggtgatgtgtatttgagtaaaacagcttgcgtcatgcggtcgctgcgtatatgatgcgatgagtaaataaacaaatacgcaaggggaacgcatgaaggttatcgctgtacttaaccagaaaggcgggtcaggcaagacgaccatcgcaacccatctagcccgcgccctgcaactcgccggggccgatgttctgttagtcgattccgatccccagggcagtgcccgcgattgggcggccgtgcgggaagatcaaccgctaaccgttgtcggcatcgaccgcccgacgattgaccgcgacgtgaaggccatcggccggcgcgacttcgtagtgatcgacggagcgccccaggcggcggacttggctgtgtccgcgatcaaggcagccgacttcgtgctgattccggtgcagccaagcccttacgacatatgggccaccgccgacctggtggagctggttaagcagcgcattgaggtcacggatggaaggctacaagcggcctttgtcgtgtcgcgggcgatcaaaggcacgcgcatcggcggtgaggttgccgaggcgctggccgggtacgagctgcccattcttgagtcccgtatcacgcagcgcgtgagctacccaggcactgccgccgccggcacaaccgttcttgaatcagaacccgagggcgacgctgcccgcgaggtccaggcgctggccgctgaaattaaatcaaaactcatttgagttaatgaggtaaagagaaaatgagcaaaagcacaaacacgctaagtgccggccgtccgagcgcacgcagcagcaaggctgcaacgttggccagcctggcagacacgccagccatgaagcgggtcaactttcagttgccggcggaggatcacaccaagctgaagatgtacgcggtacgccaaggcaagaccattaccgagctgctatctgaatacatcgcgcagctaccagagtaaatgagcaaatgaataaatgagtagatgaattttagcggctaaaggaggcggcatggaaaatcaagaacaaccaggcaccgacgccgtggaatgccccatgtgtggaggaacgggcggttggccaggcgtaagcggctgggttgcctgccggccctgcaatggcactggaacccccaagcccgaggaatcggcgtgagcggtcgcaaaccatccggcccggtacaaatcggcgcggcgctgggtgatgacctggtggagaagttgaaggccgcgcaggccgcccagcggcaacgcatcgaggcagaagcacgccccggtgaatcgtggcaagcggccgctgatcgaatccgcaaagaatcccggcaaccgccggcagccggtgcgccgtcgattaggaagccgcccaagggcgacgagcaaccagattttttcgttccgatgctctatgacgtgggcacccgcgatagtcgcagcatcatggacgtggccgttttccgtctgtcgaagcgtgaccgacgagctggcgaggtgatccgctacgagcttccagacgggcacgtagaggtttccgcagggccggccggcatggccagtgtgtgggattacgacctggtactgatggcggtttcccatctaaccgaatccatgaaccgataccgggaagggaagggagacaagcccggccgcgtgttccgtccacacgttgcggacgtactcaagttctgccggcgagccgatggcggaaagcagaaagacgacctggtagaaacctgcattcggttaaacaccacgcacgttgccatgcagcgtacgaagaaggccaagaacggccgcctggtgacggtatccgagggtgaagccttgattagccgctacaagatcgtaaagagcgaaaccgggcggccggagtacatcgagatcgagctagctgattggatgtaccgcgagatcacagaaggcaagaacccggacgtgctgacggttcaccccgattactttttgatcgatcccggcatcggccgttttctctaccgcctggcacgccgcgccgcaggcaaggcagaagccagatggttgttcaagacgatctacgaacgcagtggcagcgccggagagttcaagaagttctgtttcaccgtgcgcaagctgatcgggtcaaatgacctgccggagtacgatttgaaggaggaggcggggcaggctggcccgatcctagtcatgcgctaccgcaacctgatcgagggcgaagcatccgccggttcctaatgtacggagcagatgctagggcaaattgccctagcaggggaaaaaggtcgaaaaggtctctttcctgtggatagcacgtacattgggaacccaaagccgtacattgggaaccggaacccgtacattgggaacccaaagccgtacattgggaaccggtcacacatgtaagtgactgatataaaagagaaaaaaggcgatttttccgcctaaaactctttaaaacttattaaaactcttaaaacccgcctggcctgtgcataactgtctggccagcgcacagccgaagagctgcaaaaagcgcctacccttcggtcgctgcgctccctacgccccgccgcttcgcgtcggcctatcgcggccgctggccgctcaaaaatggctggcctacggccaggcaatctaccagggcgcggacaagccgcgccgtcgccactcgaccgccggcgcccacatcaaggcaccctgcctcgcgcgtttcggtgatgacggtgaaaacctctgacacatgcagctcccggagacggtcacagcttgtctgtaagcggatgccgggagcagacaagcccgtcagggcgcgtcagcgggtgttggcgggtgtcggggcgcagccatgacccagtcacgtagcgatagcggagtgtatactggcttaactatgcggcatcagagcagattgtactgagagtgcaccatatgcggtgtgaaataccgcacagatgcgtaaggagaaaataccgcatcaggcgctcttccgcttcctcgctcactgactcgctgcgctcggtcgttcggctgcggcgagcggtatcagctcactcaaaggcggtaatacggttatccacagaatcaggggataacgcaggaaagaacatgtgagcaaaaggccagcaaaaggccaggaaccgtaaaaaggccgcgttgctggcgtttttccataggctccgcccccctgacgagcatcacaaaaatcgacgctcaagtcagaggtggcgaaacccgacaggactataaagataccaggcgtttccccctggaagctccctcgtgcgctctcctgttccgaccctgccgcttaccggatacctgtccgcctttctcccttcgggaagcgtggcgctttctcatagctcacgctgtaggtatctcagttcggtgtaggtcgttcgctccaagctgggctgtgtgcacgaaccccccgttcagcccgaccgctgcgccttatccggtaactatcgtcttgagtccaacccggtaagacacgacttatcgccactggcagcagccactggtaacaggattagcagagcgaggtatgtaggcggtgctacagagttcttgaagtggtggcctaactacggctacactagaaggacagtatttggtatctgcgctctgctgaagccagttaccttcggaaaaagagttggtagctcttgatccggcaaacaaaccaccgctggtagcggtggtttttttgtttgcaagcagcagattacgcgcagaaaaaaaggatctcaagaagatcctttgatcttttctacggggtctgacgctcagtggaacgaaaactcacgttaagggattttggtcatgcattctaggtactaaaacaattcatccagtaaaatataatattttattttctcccaatcaggcttgatccccagtaagtcaaaaaatagctcgacatactgttcttccccgatatcctccctgatcgaccggacgcagaaggcaatgtcataccacttgtccgccctgccgcttctcccaagatcaataaagccacttactttgccatctttcacaaagatgttgctgtctcccaggtcgccgtgggaaaagacaagttcctcttcgggcttttccgtctttaaaaaatcatacagctcgcgcggatctttaaatggagtgtcttcttcccagttttcgcaatccacatcggccagatcgttattcagtaagtaatccaattcggctaagcggctgtctaagctattcgtatagggacaatccgatatgtcgatggagtgaaagagcctgatgcactccgcatacagctcgataatcttttcagggctttgttcatcttcatactcttccgagcaaaggacgccatcggcctcactcatgagcagattgctccagccatcatgccgttcaaagtgcaggacctttggaacaggcagctttccttccagccatagcatcatgtccttttcccgttccacatcataggtggtccctttataccggctgtccgtcatttttaaatataggttttcattttctcccaccagcttatataccttagcaggagacattccttccgtatcttttacgcagcggtatttttcgatcagttttttcaattccggtgatattctcattttagccatttattatttccttcctcttttctacagtatttaaagataccccaagaagctaattataacaagacgaactccaattcactgttccttgcattctaaaaccttaaataccagaaaacagctttttcaaagttgttttcaaagttggcgtataacatagtatcgacggagccgattttgaaaccgcggtgatcacaggcagcaacgctctgtcatcgttacaatcaacatgctaccctccgcgagatcatccgtgtttcaaacccggcagcttagttgccgttcttccgaatagcatcggtaacatgagcaaagtctgccgccttacaacggctctcccgctgacgccgtcccggactgatgggctgcctgtatcgagtggtgattttgtgccgagctgccggtcggggagctgttggctggctggtggcaggatatattgtggtgtaaacaaattgacgcttagacaacttaataacacattgcggacgtttttaatgtactgaattaacgccgaatta

SEQ ID NO: 37 - DNA, 9010 bp, Artificial Sequence
  plasmid pMTX461korrp
  5'UTR (1673)..(1837)
  transit_peptide (1838)..(1945)
  CDS (1838)..(1945)
  transit_peptide (2023)..(2091)
  CDS (2023)..(2091)
  CDS (2092)..(2109): adapter
agctttgggcggatcctctagaggacaatcagtaaattgaacggagaatattattcataaaaatacgatagtaacgggtgatatattcattagaatgaaccgaaaccggcggtaaggatctgagctacacatgctcaggttttttacaacgtgcacaacagaattgaaagcaaatatcatgcgatcataggcgtctcgcatatctcattaaagcagggcatgccggtcgagtcaaatctcggtgacgggcaggaccggacggggcggtaccggcaggctgaagtccagctgccagaaacccacgtcatgccagttcccgtgcttgaagccggccgcccgcagcatgccgcggggggcatatccgagcgcctcgtgcatgcgcacgctcgggtcgttgggcagcccgatgacagcgaccacgctcttgaagccctgtgcctccagggacttcagcaggtgggtgtagagcgtggagcccagtcccgtccgctggtggcggggggagacgtacacggtcgactcggccgtccagtcgtaggcgttgcgtgccttccaggggcccgcgtaggcgatgccggcgacctcgccgtccacctcggcgacgagccagggatagcgctcccgcagacggacgaggtcgtccgtccactcctgcggttcctgcggctcggtacggaagttgaccgtgcttgtctcgatgtagtggttgacgatggtgcagaccgccggcatgtccgcctcggtggcacggcggatgtcggccgggcgtcgttctgggctcatggtagactcgacggatccacgtgtggaagatatgaatttttttgagaaactagataagattaatgaatatcggtgttttggttttttcttgtggccgtctttgtttatattgagatttttcaaatcagtgcgcaagacgtgacgtaagtatccgagtcagtttttatttttctactaatttggtcgaatctagactgcagcaaatttacacattgccactaaacgtctaaacccttgtaatttgtttttgttttactatgtgtgttatgtatttgatttgcgataaatttttatatttggtactaaatttataacaccttttatgctaacgtttgccaacacttagcaatttgcaagttgattaattgattctaaattatttttgtcttctaaatacatatactaatcaactggaaatgtaaatatttgctaatatttctactataggagaattaaagtgagtgaatatggtaccacaaggtttggagatttaattgttgcaatgctgcatggatggcatatacaccaaacattcaataattcttgaggataataatggtaccacacaagatttgaggtgcatgaacgtcacgtggacaaaaggtttagtaatttttcaagacaacaatgttaccacacacaagttttgaggtgcatgcatggatgccctgtggaaagtttaaaaatattttggaaatgatttgcatggaagccatgtgtaaaaccatgacatccacttggaggatgcaataatgaagaaaactacaaatttacatgcaactagttatgcatgtagtctatataatgaggattttgcaatactttcattcatacacactcactaagttttacacgattataatttcttcataccattaattaagaattcgcataaacttatcttcatagttgccactccaatttgctccttgaatctcctccacccaatacataatccactcctccatcacccacttcactactaaatcaaacttaactctgtttttctctctcctcctttcatttcttattcttccaatcatcgtactccgccatgaccaccgctgtcaccgccgctgtttctttcccctctaccaaaaccacctctctctccgcccgaagctcctccgtcatttcccctgacaaaatcagctacaaaaaggtgattcccaatttcactgtgttttttattaataatttgttattttgatgatgagatgattaatttgggtgctgcaggttcctttgtactacaggaatgtatctgcaactgggaaaatgggacccatcagggcccagatcgcctctgaattccagctgaccaccatggcaattcccggggatcagctcgaatttccccgatcgttcaaacatttggcaataaagtttcttaagattgaatcctgttgccggtcttgcgatgattatcatataatttctgttgaattacgttaagcatgtaataattaacatgtaatgcatgacgttatttatgagatgggtttttatgattagagtcccgcaattatacatttaatacgcgatagaaaacaaaatatagcgcgcaaactaggataaattatcgcgcgcggtgtcatctatgttactagatcgggaattggcatgcaagcttggcactggccgtcgttttacaacgtcgtgactgggaaaaccctggcgttacccaacttaatcgccttgcagcacatccccctttcgccagctggcgtaatagcgaagaggcccgcaccgatcgcccttcccaacagttgcgcagcctgaatggcgaatgctagagcagcttgagcttggatcagattgtcgtttcccgccttcagtttaaactatcagtgtttgacaggatatattggcgggtaaacctaagagaaaagagcgtttattagaataacggatatttaaaagggcgtgaaaaggtttatccgttcgtccatttgtatgtgcatgccaaccacagggttcccctcgggatcaaagtactttgatccaacccctccgctgctatagtgcagtcggcttctgacgttcagtgcagccgtcttctgaaaacgacatgtcgcacaagtcctaagttacgcgacaggctgccgccctgcccttttcctggcgttttcttgtcgcgtgttttagtcgcataaagtagaatacttgcgactagaaccggagacattacgccatgaacaagagcgccgccgctggcctgctgggctatgcccgcgtcagcaccgacgaccaggacttgaccaaccaacgggccgaactgcacgcggccggctgcaccaagctgttttccgagaagatcaccggcaccaggcgcgaccgcccggagctggccaggatgcttgaccacctacgccctggcgacgttgtgacagtgaccaggctagaccgcctggcccgcagcacccgcgacctactggacattgccgagcgcatccaggaggccggcgcgggcctgcgtagcctggcagagccgtgggccgacaccaccacgccggccggccgcatggtgttgaccgtgttcgccggcattgccgagttcgagcgttccctaatcatcgaccgcacccggagcgggcgcgaggccgccaaggcccgaggcgtgaagtttggcccccgccctaccctcaccccggcacagatcgcgcacgcccgcgagctgatcgaccaggaaggccgcaccgtgaaagaggcggctgcactgcttggcgtgcatcgctcgaccctgtaccgcgcacttgagcgcagcgaggaagtgacgcccaccgaggccaggcggcgcggtgccttccgtgaggacgcattgaccgaggccgacgccctggcggccgccgagaatgaacgccaagaggaacaagcatgaaaccgcaccaggacggccaggacgaaccgtttttcattaccgaagagatcgaggcggagatgatcgcggccgggtacgtgttcgagccgcccgcgcacgtctcaaccgtgcggctgcatgaaatcctggccggtttgtctgatgccaagctggcggcctggccggccagcttggccgctgaagaaaccgagcgccgccgtctaaaaaggtgatgtgtatttgagtaaaacagcttgcgtcatgcggtcgctgcgtatatgatgcgatgagtaaataaacaaatacgcaaggggaacgcatgaaggttatcgctgtacttaaccagaaaggcgggtcaggcaagacgaccatcgcaacccatctagcccgcgccctgcaactcgccggggccgatgttctgttagtcgattccgatccccagggcagtgcccgcgattgggcggccgtgcgggaagatcaaccgctaaccgttgtcggcatcgaccgcccgacgattgaccgcgacgtgaaggccatcggccggcgcgacttcgtagtgatcgacggagcgccccaggcggcggacttggctgtgtccgcgatcaaggcagccgacttcgtgctgattccggtgcagccaagcccttacgacatatgggccaccgccgacctggtggagctggttaagcagcgcattgaggtcacggatggaaggctacaagcggcctttgtcgtgtcgcgggcgatcaaaggcacgcgcatcggcggtgaggttgccgaggcgctggccgggtacgagctgcccattcttgagtcccgtatcacgcagcgcgtgagctacccaggcactgccgccgccggcacaaccgttcttgaatcagaacccgagggcgacgctgcccgcgaggtccaggcgctggccgctgaaattaaatcaaaactcatttgagttaatgaggtaaagagaaaatgagcaaaagcacaaacacgctaagtgccggccgtccgagcgcacgcagcagcaaggctgcaacgttggccagcctggcagacacgccagccatgaagcgggtcaactttcagttgccggcggaggatcacaccaagctgaagatgtacgcggtacgccaaggcaagaccattaccgagctgctatctgaatacatcgcgcagctaccagagtaaatgagcaaatgaataaatgagtagatgaattttagcggctaaaggaggcggcatggaaaatcaagaacaaccaggcaccgacgccgtggaatgccccatgtgtggaggaacgggcggttggccaggcgtaagcggctgggttgtctgccggccctgcaatggcactggaacccccaagcccgaggaatcggcgtgacggtcgcaaaccatccggcccggtacaaatcggcgcggcgctgggtgatgacctggtggagaagttgaaggccgcgcaggccgcccagcggcaacgcatcgaggcagaagcacgccccggtgaatcgtggcaagcggccgctgatcgaatccgcaaagaatcccggcaaccgccggcagccggtgcgccgtcgattaggaagccgcccaagggcgacgagcaaccagattttttcgttccgatgctctatgacgtgggcacccgcgatagtcgcagcatcatggacgtggccgttttccgtctgtcgaagcgtgaccgacgagctggcgaggtgatccgctacgagcttccagacgggcacgtagaggtttccgcagggccggccggcatggccagtgtgtgggattacgacctggtactgatggcggtttcccatctaaccgaatccatgaaccgataccgggaagggaagggagacaagcccggccgcgtgttccgtccacacgttgcggacgtactcaagttctgccggcgagccgatggcggaaagcagaaagacgacctggtagaaacctgcattcggttaaacaccacgcacgttgccatgcagcgtacgaagaaggccaagaacggccgcctggtgacggtatccgagggtgaagccttgattagccgctacaagatcgtaaagagcgaaaccgggcggccggagtacatcgagatcgagctagctgattggatgtaccgcgagatcacagaaggcaagaacccggacgtgctgacggttcaccccgattactttttgatcgatcccggcatcggccgttttctctaccgcctggcacgccgcgccgcaggcaaggcagaagccagatggttgttcaagacgatctacgaacgcagtggcagcgccggagagttcaagaagttctgtttcaccgtgcgcaagctgatcgggtcaaatgacctgccggagtacgatttgaaggaggaggcggggcaggctggcccgatcctagtcatgcgctaccgcaacctgatcgagggcgaagcatccgccggttcctaatgtacggagcagatgctagggcaaattgccctagcaggggaaaaaggtcgaaaaggtctctttcctgtggatagcacgtacattgggaacccaaagccgtacattgggaaccggaacccgtacattgggaacccaaagccgtacattgggaaccggtcacacatgtaagtgactgatataaaagagaaaaaaggcgatttttccgcctaaaactctttaaaacttattaaaactcttaaaacccgcctggcctgtgcataactgtctggccagcgcacagccgaagagctgcaaaaagcgcctacccttcggtcgctgcgctccctacgccccgccgcttcgcgtcggcctatcgcggccgctggccgctcaaaaatggctggcctacggccaggcaatctaccagggcgcggacaagccgcgccgtcgccactcgaccgccggcgcccacatcaaggcaccctgcctcgcgcgtttcggtgatgacggtgaaaacctctgacacatgcagctcccggagacggtcacagcttgtctgtaagcggatgccgggagcagacaagcccgtcagggcgcgtcagcgggtgttggcgggtgtcggggcgcagccatgacccagtcacgtagcgatagcggagtgtatactggcttaactatgcggcatcagagcagattgtactgagagtgcaccatatgcggtgtgaaataccgcacagatgcgtaaggagaaaataccgcatcaggcgctcttccgcttcctcgctcactgactcgctgcgctcggtcgttcggctgcggcgagcggtatcagctcactcaaaggcggtaatacggttatccacagaatcaggggataacgcaggaaagaacatgtgagcaaaaggccagcaaaaggccaggaaccgtaaaaaggccgcgttgctggcgtttttccataggctccgcccccctgacgagcatcacaaaaatcgacgctcaagtcagaggtggcgaaacccgacaggactataaagataccaggcgtttccccctggaagctccctcgtgcgctctcctgttccgaccctgccgcttaccggatacctgtccgcctttctcccttcgggaagcgtggcgctttctcatagctcacgctgtaggtatctcagttcggtgtaggtcgttcgctccaagctgggctgtgtgcacgaaccccccgttcagcccgaccgctgcgccttatccggtaactatcgtcttgagtccaacccggtaagacacgacttatcgccactggcagcagccactggtaacaggattagcagagcgaggtatgtaggcggtgctacagagttcttgaagtggtggcctaactacggctacactagaaggacagtatttggtatctgcgctctgctgaagccagttaccttcggaaaaagagttggtagctcttgatccggcaaacaaaccaccgctggtagcggtggtttttttgtttgcaagcagcagattacgcgcagaaaaaaaggatctcaagaagatcctttgatcttttctacggggtctgacgctcagtggaacgaaaactcacgttaagggattttggtcatgcattctaggtactaaaacaattcatccagtaaaatataatattttattttctcccaatcaggcttgatccccagtaagtcaaaaaatagctcgacatactgttcttccccgatatcctccctgatcgaccggacgcagaaggcaatgtcataccacttgtccgccctgccgcttctcccaagatcaataaagccacttactttgccatctttcacaaagatgttgctgtctcccaggtcgccgtgggaaaagacaagttcctcttcgggcttttccgtctttaaaaaatcatacagctcgcgcggatctttaaatggagtgtcttcttcccagttttcgcaatccacatcggccagatcgttattcagtaagtaatccaattcggctaagcggctgtctaagctattcgtatagggacaatccgatatgtcgatggagtgaaagagcctgatgcactccgcatacagctcgataatcttttcagggctttgttcatcttcatactcttccgagcaaaggacgccatcggcctcactcatgagcagattgctccagccatcatgccgttcaaagtgcaggacctttggaacaggcagctttccttccagccatagcatcatgtccttttcccgttccacatcataggtggtccctttataccggctgtccgtcatttttaaatataggttttcattttctcccaccagcttatataccttagcaggagacattccttccgtatcttttacgcagcggtatttttcgatcagttttttcaattccggtgatattctcattttagccatttattatttccttcctcttttctacagtatttaaagataccccaagaagctaattataacaagacgaactccaattcactgttccttgcattctaaaaccttaaataccagaaaacagctttttcaaagttgttttcaaagttggcgtataacatagtatcgacggagccgattttgaaaccgcggtgatcacaggcagcaacgctctgtcatcgttacaatcaacatgctaccctccgcgagatcatccgtgtttcaaacccggcagcttagttgccgttcttccgaatagcatcggtaacatgagcaaagtctgccgccttacaacggctctcccgctgacgccgtcccggactgatgggctgcctgtatcgagtggtgattttgtgccgagctgccggtcggggagctgttggctggctggtggcaggatatattgtggtgtaaacaaattgacgcttagacaacttaataacacattgcggacgtttttaatgtactgaattaacgccgaatta

SEQ ID NO: 38 - protein, 65 aa, Artificial Sequence; identical to SEQ ID NO: 33
  Synthetic Construct

SEQ ID NO: 39 - DNA, 8674 bp, Artificial Sequence
  plasmid VC-MME462-1QCZ
  transit_peptide (1673)..(1753)
  CDS (1673)..(1753)
  CDS (1754)..(1771): adapter
agctttgggcggatcctctagaggacaatcagtaaattgaacggagaatattattcataaaaatacgatagtaacgggtgatatattcattagaatgaaccgaaaccggcggtaaggatctgagctacacatgctcaggttttttacaacgtgcacaacagaattgaaagcaaatatcatgcgatcataggcgtctcgcatatctcattaaagcagggcatgccggtcgagtcaaatctcggtgacgggcaggaccggacggggcggtaccggcaggctgaagtccagctgccagaaacccacgtcatgccagttcccgtgcttgaagccggccgcccgcagcatgccgcggggggcatatccgagcgcctcgtgcatgcgcacgctcgggtcgttgggcagcccgatgacagcgaccacgctcttgaagccctgtgcctccagggacttcagcaggtgggtgtagagcgtggagcccagtcccgtccgctggtggcggggggagacgtacacggtcgactcggccgtccagtcgtaggcgttgcgtgccttccaggggcccgcgtaggcgatgccggcgacctcgccgtccacctcggcgacgagccagggatagcgctcccgcagacggacgaggtcgtccgtccactcctgcggttcctgcggctcggtacggaagttgaccgtgcttgtctcgatgtagtggttgacgatggtgcagaccgccggcatgtccgcctcggtggcacggcggatgtcggccgggcgtcgttctgggctcatggtagactcgacggatccacgtgtggaagatatgaatttttttgagaaactagataagattaatgaatatcggtgttttggttttttcttgtggccgtctttgtttatattgagatttttcaaatcagtgcgcaagacgtgacgtaagtatccgagtcagtttttatttttctactaatttggtcgaatctagactgcagcaaatttacacattgccactaaacgtctaaacccttgtaatttgtttttgttttactatgtgtgttatgtatttgatttgcgataaatttttatatttggtactaaatttataacaccttttatgctaacgtttgccaacacttagcaatttgcaagttgattaattgattctaaattatttttgtcttctaaatacatatactaatcaactggaaatgtaaatatttgctaatatttctactataggagaattaaagtgagtgaatatggtaccacaaggtttggagatttaattgttgcaatgctgcatggatggcatatacaccaaacattcaataattcttgaggataataatggtaccacacaagatttgaggtgcatgaacgtcacgtggacaaaaggtttagtaatttttcaagacaacaatgttaccacacacaagttttgaggtgcatgcatggatgccctgtggaaagtttaaaaatattttggaaatgatttgcatggaagccatgtgtaaaaccatgacatccacttggaggatgcaataatgaagaaaactacaaatttacatgcaactagttatgcatgtagtctatataatgaggattttgcaatactttcattcatacacactcactaagttttacacgattataatttcttcataccattaattaagaattcatgcagaggtttttctccgccagatcgattctcggttacgccgtcaagacgcggaggaggtctttctcttctcgttcttcggaattccagctgaccaccatggcaattcccggggatcagctcgaatttccccgatcgttcaaacatttggcaataaagtttcttaagattgaatcctgttgccggtcttgcgatgattatcatataatttctgttgaattacgttaagcatgtaataattaacatgtaatgcatgacgttatttatgagatgggtttttatgattagagtcccgcaattatacatttaatacgcgatagaaaacaaaatatagcgcgcaaactaggataaattatcgcgcgcggtgtcatctatgttactagatcgggaattggcatgcaagcttggcactggccgtcgttttacaacgtcgtgactgggaaaaccctggcgttacccaacttaatcgccttgcagcacatccccctttcgccagctggcgtaatagcgaagaggcccgcaccgatcgcccttcccaacagttgcgcagcctgaatggcgaatgctagagcagcttgagcttggatcagattgtcgtttcccgccttcagtttaaactatcagtgtttgacaggatatattggcgggtaaacctaagagaaaagagcgtttattagaataatcggatatttaaaagggcgtgaaaaggtttatccgttcgtccatttgtatgtgcatgccaaccacagggttcccctcgggatcaaagtactttgatccaacccctccgctgctatagtgcagtcggcttctgacgttcagtgcagccgtcttctgaaaacgacatgtcgcacaagtcctaagttacgcgacaggctgccgccctgcccttttcctggcgttttcttgtcgcgtgttttagtcgcataaagtagaatacttgcgactagaaccggagacattacgccatgaacaagagcgccgccgctggcctgctgggctatgcccgcgtcagcaccgacgaccaggacttgaccaaccaacgggccgaactgcacgcggccggctgcaccaagctgttttccgagaagatcaccggcaccaggcgcgaccgcccggagctggccaggatgcttgaccacctacgccctggcgacgttgtgacagtgaccaggctagaccgcctggcccgcagcacccgcgacctactggacattgccgagcgcatccaggaggccggcgcgggcctgcgtagcctggcagagccgtgggccgacaccaccacgccggccggccgcatggtgttgaccgtgttcgccggcattgccgagttcgagcgttccctaatcatcgaccgcacccggagcgggcgcgaggccgccaaggcccgaggcgtgaagtttggcccccgccctaccctcaccccggcacagatcgcgcacgcccgcgagctgatcgaccaggaaggccgcaccgtgaaagaggcggctgcactgcttggcgtgcatcgctcgaccctgtaccgcgcacttgagcgcagcgaggaagtgacgcccaccgaggccaggcggcgcggtgccttccgtgaggacgcattgaccgaggccgacgccctggcggccgccgagaatgaacgccaagaggaacaagcatgaaaccgcaccaggacggccaggacgaaccgtttttcattaccgaagagatcgaggcggagatgatcgcggccgggtacgtgttcgagccgcccgcgcacgtctcaaccgtgcggctgcatgaaatcctggccggtttgtctgatgccaagctggcggcctggccggccagcttggccgctgaagaaaccgagcgccgccgtctaaaaaggtgatgtgtatttgagtaaaacagcttgcgtcatgcggtcgctgcgtatatgatgcgatgagtaaataaacaaatacgcaaggggaacgcatgaaggttatcgctgtacttaaccagaaaggcgggtcaggcaagacgaccatcgcaacccatctagcccgcgccctgcaactcgccggggccgatgttctgttagtcgattccgatccccagggcagtgcccgcgattgggcggccgtgcgggaagatcaaccgctaaccgttgtcggcatcgaccgcccgacgattgaccgcgacgtgaaggccatcggccggcgcgacttcgtagtgatcgacggagcgccccaggcggcggacttggctgtgtccgcgatcaaggcagccgacttcgtgctgattccggtgcagccaagcccttacgacatatgggccaccgccgacctggtggagctggttaagcagcgcattgaggtcacggatggaaggctacaagcggcctttgtcgtgtcgcgggcgatcaaaggcacgcgcatcggcggtgaggttgccgaggcgctggccgggtacgagctgcccattcttgagtcccgtatcacgcagcgcgtgagctacccaggcactgccgccgccggcacaaccgttcttgaatcagaacccgagggcgacgctgcccgcgaggtccaggcgctggccgctgaaattaaatcaaaactcatttgagttaatgaggtaaagagaaaatgagcaaaagcacaaacacgctaagtgccggccgtccgagcgcacgcagcagcaaggctgcaacgttggccagcctggcagacacgccagccatgaagcgggtcaactttcagttgccggcggaggatcacaccaagctgaagatgtacgcggtacgccaaggcaagaccattaccgagctgctatctgaatacatcgcgcagctaccagagtaaatgagcaaatgaataaatgagtagatgaattttagcggctaaaggaggcggcatggaaaatcaagaacaaccaggcaccgacgccgtggaatgccccatgtgtggaggaacgggcggttggccaggcgtaagcggctgggttgcctgccggccctgcaatggcactggaacccccaagcccgaggaatcggcgtgagcggtcgcaaaccatccggcccggtacaaatcggcgcggcgctgggtgatgacctggtggagaagttgaaggccgcgcaggccgcccagcggcaacgcatcgaggcagaagcacgccccggtgaatcgtggcaagcggccgctgatcgaatccgcaaagaatcccggcaaccgccggcagccggtgcgccgtcgattaggaagccgcccaagggcgacgagcaaccagattttttcgttccgatgctctatgacgtgggcacccgcgatagtcgcagcatcatggacgtggccgttttccgtctgtcgaagcgtgaccgacgagctggcgaggtgatccgctacgagcttccagacgggcacgtagaggtttccgcagggccggccggcatggccagtgtgtgggattacgacctggtactgatggcggtttcccatctaaccgaatccatgaaccgataccgggaagggaagggagacaagcccggccgcgtgttccgtccacacgttgcggacgtactcaagttctgccggcgagccgatggcggaaagcagaaagacgacctggtagaaacctgcattcggttaaacaccacgcacgttgccatgcagcgtacgaagaaggccaagaacggccgcctggtgacggtatccgagggtgaagccttgattagccgctacaagatcgtaaagagcgaaaccgggcggccggagtacatcgagatcgagctagctgattggatgtaccgcgagatcacagaaggcaagaacccggacgtgctgacggttcaccccgattactttttgatcgatcccggcatcggccgttttctctaccgcctggcacgccgcgccgcaggcaaggcagaagccagatggttgttcaagacgatctacgaacgcagtggcagcgccggagagttcaagaagttctgtttcaccgtgcgcaagctgatcgggtcaaatgacctgccggagtacgatttgaaggaggaggcggggcaggctggcccgatcctagtcatgcgctaccgcaacctgatcgagggcgaagcatccgccggttcctaatgtacggagcagatgctagggcaaattgccctagcaggggaaaaaggtcgaaaaggtctctttcctgtggatagcacgtacattgggaacccaaagccgtacattgggaaccggaacccgtacattgggaacccaaagccgtacattgggaaccggtcacacatgtaagtgactgatataaaagagaaaaaaggcgatttttccgcctaaaactctttaaaacttattaaaactcttaaaacccgcctggcctgtgcataactgtctggccagcgcacagccgaagagctgcaaaaagcgcctacccttcggtcgctgcgctccctacgccccgccgcttcgcgtcggcctatcgcggccgctggccgctcaaaaatggctggcctacggccaggcaatctaccagggcgcggacaagccgcgccgtcgccactcgaccgccggcgcccacatcaaggcaccctgcctcgcgcgtttcggtgatgacggtgaaaacctctgacacatgcagctcccggagacggtcacagcttgtctgtaagcggatgccgggagcagacaagcccgtcagggcgcgtcagcgggtgttggcgggtgtcggggcgcagccatgacccagtcacgtagcgatagcggagtgtatactggcttaactatgcggcatcagagcagattgtactgagagtgcaccatatgcggtgtgaaataccgcacagatgcgtaaggagaaaataccgcatcaggcgctcttccgcttcctcgctcactgactcgctgcgctcggtcgttcggctgcggcgagcggtatcagctcactcaaaggcggtaatacggttatccacagaatcaggggataacgcaggaaagaacatgtgagcaaaaggccagcaaaaggccaggaaccgtaaaaaggccgcgttgctggcgtttttccataggctccgcccccctgacgagcatcacaaaaatcgacgctcaagtcagaggtggcgaaacccgacaggactataaagataccaggcgtttccccctggaagctccctcgtgcgctctcctgttccgaccctgccgcttaccggatacctgtccgcctttctcccttcgggaagcgtggcgctttctcatagctcacgctgtaggtatctcagttcggtgtaggtcgttcgctccaagctgggctgtgtgcacgaaccccccgttcagcccgaccgctgcgccttatccggtaactatcgtcttgagtccaacccggtaagacacgacttatcgccactggcagcagccactggtaacaggattagcagagcgaggtatgtaggcggtgctacagagttcttgaagtggtggcctaactacggctacactagaaggacagtatttggtatctgcgctctgctgaagccagttaccttcggaaaaagagttggtagctcttgatccggcaaacaaaccaccgctggtagcggtggtttttttgtttgcaagcagcagattacgcgcagaaaaaaaggatctcaagaagatcctttgatcttttctacggggtctgacgctcagtggaacgaaaactcacgttaagggattttggtcatgcattctaggtactaaaacaattcatccagtaaaatataatattttattttctcccaatcaggcttgatccccagtaagtcaaaaaatagctcgacatactgttcttccccgatatcctccctgatcgaccggacgcagaaggcaatgtcataccacttgtccgccctgccgcttctcccaagatcaataaagccacttactttgccatctttcacaaagatgttgctgtctcccaggtcgccgtgggaaaagacaagttcctcttcgggcttttccgtctttaaaaaatcatacagctcgcgcggatctttaaatggagtgtcttcttcccagttttcgcaatccacatcggccagatcgttattcagtaagtaatccaattcggctaagcggctgtctaagctattcgtatagggacaatccgatatgtcgatggagtgaaagagcctgatgcactccgcatacagctcgataatcttttcagggctttgttcatcttcatactcttccgagcaaaggacgccatcggcctcactcatgagcagattgctccagccatcatgccgttcaaagtgcaggacctttggaacaggcagctttccttccagccatagcatcatgtccttttcccgttccacatcataggtggtccctttataccggctgtccgtcatttttaaatataggttttcattttctcccaccagcttatataccttagcaggagacattccttccgtatcttttacgcagcggtatttttcgatcagttttttcaattccggtgatattctcattttagccatttattatttccttcctcttttctacagtatttaaagataccccaagaagctaattataacaagacgaactccaattcactgttccttgcattctaaaaccttaaataccagaaaacagctttttcaaagttgttttcaaagttggcgtataacatagtatcgacggagccgattttgaaaccgcggtgatcacaggcagcaacgctctgtcatcgttacaatcaacatgctaccctccgcgagatcatccgtgtttcaaacccggcagcttagttgccgttcttccgaatagcatcggtaacatgagcaaagtctgccgccttacaacggctctcccgctgacgccgtcccggactgatgggctgcctgtatcgagtggtgattttgtgccgagctgccggtcggggagctgttggctggctggtggcaggatatattgtggtgtaaacaaattgacgcttagacaacttaataacacattgcggacgtttttaatgtactgaattaacgccgaatta

SEQ ID NO: 40 - protein, 33 aa, Artificial Sequence; identical to SEQ ID NO: 35
  Synthetic Construct

SEQ ID NO: 41 - DNA, 9045 bp, Artificial Sequence
  plasmid VC-MME220-1qcz
agcttggacaatcagtaaattgaacggagaatattattcataaaaatacgatagtaacgggtgatatattcattagaatgaaccgaaaccggcggtaaggatctgagctacacatgctcaggttttttacaacgtgcacaacagaattgaaagcaaatatcatgcgatcataggcgtctcgcatatctcattaaagcagggcatgccggtcgagtcaaatctcggtgacgggcaggaccggacggggcggtaccggcaggctgaagtccagctgccagaaacccacgtcatgccagttcccgtgcttgaagccggccgcccgcagcatgccgcggggggcatatccgagcgcctcgtgcatgcgcacgctcgggtcgttgggcagcccgatgacagcgaccacgctcttgaagccctgtgcctccagggacttcagcaggtgggtgtagagcgtggagcccagtcccgtccgctggtggcggggggagacgtacacggtcgactcggccgtccagtcgtaggcgttgcgtgccttccaggggcccgcgtaggcgatgccggcgacctcgccgtccacctcggcgacgagccagggatagcgctcccgcagacggacgaggtcgtccgtccactcctgcggttcctgcggctcggtacggaagttgaccgtgcttgtctcgatgtagtggttgacgatggtgcagaccgccggcatgtccgcctcggtggcacggcggatgtcggccgggcgtcgttctgggctcatggtagactcgacggatccacgtgtggaagatatgaatttttttgagaaactagataagattaatgaatatcggtgttttggttttttcttgtggccgtctttgtttatattgagatttttcaaatcagtgcgcaagacgtgacgtaagtatccgagtcagtttttatttttctactaatttggtcgaagctttgggcggatcctctagattcgacggtatcgataagctcgcggatccctgaaagcgacgttggatgttaacatctacaaattgccttttcttatcgaccatgtacgtaagcgcttacgtttttggtggacccttgaggaaactggtagctgttgtgggcctgtggtctcaagatggatcattaatttccaccttcacctacgatggggggcatcgcaccggtgagtaatattgtacggctaagagcgaatttggcctgtaggatccctgaaagcgacgttggatgttaacatctacaaattgccttttcttatcgaccatgtacgtaagcgcttacgtttttggtggacccttgaggaaactggtagctgttgtgggcctgtggtctcaagatggatcattaatttccaccttcacctacgatggggggcatcgcaccggtgagtaatattgtacggctaagagcgaatttggcctgtaggatccctgaaagcgacgttggatgttaacatctacaaattgccttttcttatcgaccatgtacgtaagcgcttacgtttttggtggacccttgaggaaactggtagctgttgtgggcctgtggtctcaagatggatcattaatttccaccttcacctacgatggggggcatcgcaccggtgagtaatattgtacggctaagagcgaatttggcctgtaggatccgcgagctggtcaatcccattgcttttgaagcagctcaacattgatctctttctcgatcgagggagatttttcaaatcagtgcgcaagacgtgacgtaagtatccgagtcagtttttatttttctactaatttggtcgtttatttcggcgtgtaggacatggcaaccgggcctgaatttcgcgggtattctgtttctattccaactttttcttgatccgcagccattaacgacttttgaatagatacgctgacacgccaagcctcgctagtcaaaagtgtaccaaacaacgctttacagcaagaacggaatgcgcgtgacgctcgcggtgacgccatttcgccttttcagaaatggataaatagccttgcttcctattatatcttcccaaattaccaatacattacactagcatctgaatttcataaccaatctcgatacaccaaatcgaagatctcccgggttgctcttccatggcaatgattaattaacgaagagcaagagctcgaatttccccgatcgttcaaacatttggcaataaagtttcttaagattgaatcctgttgccggtcttgcgatgattatcatataatttctgttgaattacgttaagcatgtaataattaacatgtaatgcatgacgttatttatgagatgggtttttatgattagagtcccgcaattatacatttaatacgcgatagaaaacaaaatatagcgcgcaaactaggataaattatcgcgcgcggtgtcatctatgttactagatcgggaattggcatgcaagcttggcactggccgtcgttttacaacgtcgtgactgggaaaaccctggcgttacccaacttaatcgccttgcagcacatccccctttcgccagctggcgtaatagcgaagaggcccgcaccgatcgcccttcccaacagttgcgcagcctgaatggcgaatgctagagcagcttgagcttggatcagattgtcgtttcccgccttcagtttaaactatcagtgtttgacaggatatattggcgggtaaacctaagagaaaagagcgtttattagaataatcggatatttaaaagggcgtgaaaaggtttatccgttcgtccatttgtatgtgcatgccaaccacagggttcccctcgggatcaaagtactttgatccaacccctccgctgctatagtgcagtcggcttctgacgttcagtgcagccgtcttctgaaaacgacatgtcgcacaagtcctaagttacgcgacaggctgccgccctgcccttttcctggcgttttcttgtcgcgtgttttagtcgcataaagtagaatacttgcgactagaaccggagacattacgccatgaacaagagcgccgccgctggcctgctgggctatgcccgcgtcagcaccgacgaccaggacttgaccaaccaacgggccgaactgcacgcggccggctgcaccaagctgttttccgagaagatcaccggcaccaggcgcgaccgcccggagctggccaggatgcttgaccacctacgccctggcgacgttgtgacagtgaccaggctagaccgcctggcccgcagcacccgcgacctactggacattgccgagcgcatccaggaggccggcgcgggcctgcgtagcctggcagagccgtgggccgacaccaccacgccggccggccgcatggtgttgaccgtgttcgccggcattgccgagttcgagcgttccctaatcatcgaccgcacccggagcgggcgcgaggccgccaaggcccgaggcgtgaagtttggcccccgccctaccctcaccccggcacagatcgcgcacgcccgcgagctgatcgaccaggaaggccgcaccgtgaaagaggcggctgcactgcttggcgtgcatcgctcgaccctgtaccgcgcacttgagcgcagcgaggaagtgacgcccaccgaggccaggcggcgcggtgccttccgtgaggacgcattgaccgaggccgacgccctggcggccgccgagaatgaacgccaagaggaacaagcatgaaaccgcaccaggacggccaggacgaaccgtttttcattaccgaagagatcgaggcggagatgatcgcggccgggtacgtgttcgagccgcccgcgcacgtctcaaccgtgcggctgcatgaaatcctggccggtttgtctgatgccaagctggcggcctggccggccagcttggccgctgaagaaaccgagcgccgccgtctaaaaaggtgatgtgtatttgagtaaaacagcttgcgtcatgcggtcgctgcgtatatgatgcgatgagtaaataaacaaatacgcaaggggaacgcatgaaggttatcgctgtacttaaccagaaaggcgggtcaggcaagacgaccatcgcaacccatctagcccgcgccctgcaactcgccggggccgatgttctgttagtcgattccgatccccagggcagtgcccgcgattgggcggccgtgcgggaagatcaaccgctaaccgttgtcggcatcgaccgcccgacgattgaccgcgacgtgaaggccatcggccggcgcgacttcgtagtgatcgacggagcgccccaggcggcggacttggctgtgtccgcgatcaaggcagccgacttcgtgctgattccggtgcagccaagcccttacgacatatgggccaccgccgacctggtggagctggttaagcagcgcattgaggtcacggatggaaggctacaagcggcctttgtcgtgtcgcgggcgatcaaaggcacgcgcatcggcggtgaggttgccgaggcgctggccgggtacgagctgcccattcttgagtcccgtatcacgcagcgcgtgagctacccaggcactgccgccgccggcacaaccgttcttgaatcagaacccgagggcgacgctgcccgcgaggtccaggcgctggccgctgaaattaaatcaaaactcatttgagttaatgaggtaaagagaaaatgagcaaaagcacaaacacgctaagtgccggccgtccgagcgcacgcagcagcaaggctgcaacgttggccagcctggcagacacgccagccatgaagcgggtcaactttcagttgccggcggaggatcacaccaagctgaagatgtacgcggtacgccaaggcaagaccattaccgagctgctatctgaatacatcgcgcagctaccagagtaaatgagcaaatgaataaatgagtagatgaattttagcggctaaaggaggcggcatggaaaatcaagaacaaccaggcaccgacgccgtggaatgccccatgtgtggaggaacgggcggttggccaggcgtaagcggctgggttgcctgccggccctgcaatggcactggaacccccaagcccgaggaatcggcgtgagcggtcgcaaaccatccggcccggtacaaatcggcgcggcgctgggtgatgacctggtggagaagttgaaggccgcgcaggccgcccagcggcaacgcatcgaggcagaagcacgccccggtgaatcgtggcaagcggccgctgatcgaatccgcaaagaatcccggcaaccgccggcagccggtgcgccgtcgattaggaagccgcccaagggcgacgagcaaccagattttttcgttccgatgctctatgacgtgggcacccgcgatagtcgcagcatcatggacgtggccgttttccgtctgtcgaagcgtgaccgacgagctggcgaggtgatccgctacgagcttccagacgggcacgtagaggtttccgcagggccggccggcatggccagtgtgtgggattacgacctggtactgatggcggtttcccatctaaccgaatccatgaaccgataccgggaagggaagggagacaagcccggccgcgtgttccgtccacacgttgcggacgtactcaagttctgccggcgagccgatggcggaaagcagaaagacgacctggtagaaacctgcattcggttaaacaccacgcacgttgccatgcagcgtacgaagaaggccaagaacggccgcctggtgacggtatccgagggtgaagccttgattagccgctacaagatcgtaaagagcgaaaccgggcggccggagtacatcgagatcgagctagctgattggatgtaccgcgagatcacagaaggcaagaacccggacgtgctgacggttcaccccgattactttttgatcgatcccggcatcggccgttttctctaccgcctggcacgccgcgccgcaggcaaggcagaagccagatggttgttcaagacgatctacgaacgcagtggcagcgccggagagttcaagaagttctgtttcaccgtgcgcaagctgatcgggtcaaatgacctgccggagtacgatttgaaggaggaggcggggcaggctggcccgatcctagtcatgcgctaccgcaacctgatcgagggcgaagcatccgccggttcctaatgtacggagcagatgctagggcaaattgccctagcaggggaaaaaggtcgaaaaggtctctttcctgtggatagcacgtacattgggaacccaaagccgtacattgggaaccggaacccgtacattgggaacccaaagccgtacattgggaaccggtcacacatgtaagtgactgatataaaagagaaaaaaggcgatttttccgcctaaaactctttaaaacttattaaaactcttaaaacccgcctggcctgtgcataactgtctggccagcgcacagccgaagagctgcaaaaagcgcctacccttcggtcgctgcgctccctacgccccgccgcttcgcgtcggcctatcgcggccgctggccgctcaaaaatggctggcctacggccaggcaatctaccagggcgcggacaagccgcgccgtcgccactcgaccgccggcgcccacatcaaggcaccctgcctcgcgcgtttcggtgatgacggtgaaaacctctgacacatgcagctcccggagacggtcacagcttgtctgtaagcggatgccgggagcagacaagcccgtcagggcgcgtcagcgggtgttggcgggtgtcggggcgcagccatgacccagtcacgtagcgatagcggagtgtatactggcttaactatgcggcatcagagcagattgtactgagagtgcaccatatgcggtgtgaaataccgcacagatgcgtaaggagaaaataccgcatcaggcgctcttccgcttcctcgctcactgactcgctgcgctcggtcgttcggctgcggcgagcggtatcagctcactcaaaggcggtaatacggttatccacagaatcaggggataacgcaggaaagaacatgtgagcaaaaggccagcaaaaggccaggaaccgtaaaaaggccgcgttgctggcgtttttccataggctccgcccccctgacgagcatcacaaaaatcgacgctcaagtcagaggtggcgaaacccgacaggactataaagataccaggcgtttccccctggaagctccctcgtgcgctctcctgttccgaccctgccgcttaccggatacctgtccgcctttctcccttcgggaagcgtggcgctttctcatagctcacgctgtaggtatctcagttcggtgtaggtcgttcgctccaagctgggctgtgtgcacgaaccccccgttcagcccgaccgctgcgccttatccggtaactatcgtcttgagtccaacccggtaagacacgacttatcgccactggcagcagccactggtaacaggattagcagagcgaggtatgtaggcggtgctacagagttcttgaagtggtggcctaactacggctacactagaaggacagtatttggtatctgcgctctgctgaagccagttaccttcggaaaaagagttggtagctcttgatccggcaaacaaaccaccgctggtagcggtggtttttttgtttgcaagcagcagattacgcgcagaaaaaaaggatctcaagaagatcctttgatcttttctacggggtctgacgctcagtggaacgaaaactcacgttaagggattttggtcatgcattctaggtactaaaacaattcatccagtaaaatataatattttattttctcccaatcaggcttgatccccagtaagtcaaaaaatagctcgacatactgttcttccccgatatcctccctgatcgaccggacgcagaaggcaatgtcataccacttgtccgccctgccgcttctcccaagatcaataaagccacttactttgccatctttcacaaagatgttgctgtctcccaggtcgccgtgggaaaagacaagttcctcttcgggcttttccgtctttaaaaaatcatacagctcgcgcggatctttaaatggagtgtcttcttcccagttttcgcaatccacatcggccagatcgttattcagtaagtaatccaattcggctaagcggctgtctaagctattcgtatagggacaatccgatatgtcgatggagtgaaagagcctgatgcactccgcatacagctcgataatcttttcagggctttgttcatcttcatactcttccgagcaaaggacgccatcggcctcactcatgagcagattgctccagccatcatgccgttcaaagtgcaggacctttggaacaggcagctttccttccagccatagcatcatgtccttttcccgttccacatcataggtggtccctttataccggctgtccgtcatttttaaatataggttttcattttctcccaccagcttatataccttagcaggagacattccttccgtatcttttacgcagcggtatttttcgatcagttttttcaattccggtgatattctcattttagccatttattatttccttcctcttttctacagtatttaaagataccccaagaagctaattataacaagacgaactccaattcactgttccttgcattctaaaaccttaaataccagaaaacagctttttcaaagttgttttcaaagttggcgtataacatagtatcgacggagccgattttgaaaccgcggtgatcacaggcagcaacgctctgtcatcgttacaatcaacatgctaccctccgcgagatcatccgtgtttcaaacccggcagcttagttgccgttcttccgaatagcatcggtaacatgagcaaagtctgccgccttacaacggctctcccgctgacgccgtcccggactgatgggctgcctgtatcgagtggtgattttgtgccgagctgccggtcggggagctgttggctggctggtggcaggatatattgtggtgtaaacaaattgacgcttagacaacttaataacacattgcggacgtttttaatgtactgaattaacgccgaatta

SEQ ID NO: 42 - DNA, 9466 bp, Artificial Sequence
  plasmid VC-MME432-1qcz
  5'UTR (2125)..(2289)
  transit_peptide (2290)..(2397)
  CDS (2290)..(2397)
  transit_peptide (2475)..(2543)
  CDS (2475)..(2543)
  CDS (2544)..(2552): adapter
gctttgggcggatcctctagaggacaatcagtaaattgaacggagaatattattcataaaaatacgatagtaacgggtgatatattcattagaatgaaccgaaaccggcggtaaggatctgagctacacatgctcaggttttttacaacgtgcacaacagaattgaaagcaaatatcatgcgatcataggcgtctcgcatatctcattaaagcagggcatgccggtcgagtcaaatctcggtgacgggcaggaccggacggggcggtaccggcaggctgaagtccagctgccagaaacccacgtcatgccagttcccgtgcttgaagccggccgcccgcagcatgccgcggggggcatatccgagcgcctcgtgcatgcgcacgctcgggtcgttgggcagcccgatgacagcgaccacgctcttgaagccctgtgcctccagggacttcagcaggtgggtgtagagcgtggagcccagtcccgtccgctggtggcggggggagacgtacacggtcgactcggccgtccagtcgtaggcgttgcgtgccttccaggggcccgcgtaggcgatgccggcgacctcgccgtccacctcggcgacgagccagggatagcgctcccgcagacggacgaggtcgtccgtccactcctgcggttcctgcggctcggtacggaagttgaccgtgcttgtctcgatgtagtggttgacgatggtgcagaccgccggcatgtccgcctcggtggcacggcggatgtcggccgggcgtcgttctgggctcatggtagactcgacggatccacgtgtggaagatatgaatttttttgagaaactagataagattaatgaatatcggtgttttggttttttcttgtggccgtctttgtttatattgagatttttcaaatcagtgcgcaagacgtgacgtaagtatccgagtcagtttttatttttctactaatttggtcgaatctagattcgacggtatcgataagctcgcggatccctgaaagcgacgttggatgttaacatctacaaattgccttttcttatcgaccatgtacgtaagcgcttacgtttttggtggacccttgaggaaactggtagctgttgtgggcctgtggtctcaagatggatcattaatttccaccttcacctacgatggggggcatcgcaccggtgagtaatattgtacggctaagagcgaatttggcctgtaggatccctgaaagcgacgttggatgttaacatctacaaattgccttttcttatcgaccatgtacgtaagcgcttacgtttttggtggacccttgaggaaactggtagctgttgtgggcctgtggtctcaagatggatcattaatttccaccttcacctacgatggggggcatcgcaccggtgagtaatattgtacggctaagagcgaatttggcctgtaggatccctgaaagcgacgttggatgttaacatctacaaattgccttttcttatcgaccatgtacgtaagcgcttacgtttttggtggacccttgaggaaactggtagctgttgtgggcctgtggtctcaagatggatcattaatttccaccttcacctacgatggggggcatcgcaccggtgagtaatattgtacggctaagagcgaatttggcctgtaggatccgcgagctggtcaatcccattgcttttgaagcagctcaacattgatctctttctcgatcgagggagatttttcaaatcagtgcgcaagacgtgacgtaagtatccgagtcagtttttatttttctactaatttggtcgtttatttcggcgtgtaggacatggcaaccgggcctgaatttcgcgggtattctgtttctattccaactttttcttgatccgcagccattaacgacttttgaatagatacgctgacacgccaagcctcgctagtcaaaagtgtaccaaacaacgctttacagcaagaacggaatgcgcgtgacgctcgcggtgacgccatttcgccttttcagaaatggataaatagccttgcttcctattatatcttcccaaattaccaatacattacactagcatctgaatttcataaccaatctcgatacaccaaatcgaagatctcccaaacgcataaacttatcttcatagttgccactccaatttgctccttgaatctcctccacccaatacataatccactcctccatcacccacttcactactaaatcaaacttaactctgtttttctctctcctcctttcatttcttattcttccaatcatcgtactccgccatgaccaccgctgtcaccgccgctgtttctttcccctctaccaaaaccacctctctctccgcccgaagctcctccgtcatttcccctgacaaaatcagctacaaaaaggtgattcccaatttcactgtgttttttattaataatttgttattttgatgatgagatgattaatttgggtgctgcaggttcctttgtactacaggaatgtatctgcaactgggaaaatgggacccatcagggcccagatcgcctcttgctcttccatggcaatgattaattaacgaagagcaagagctcgaatttccccgatcgttcaaacatttggcaataaagtttcttaagattgaatcctgttgccggtcttgcgatgattatcatataatttctgttgaattacgttaagcatgtaataattaacatgtaatgcatgacgttatttatgagatgggtttttatgattagagtcccgcaattatacatttaatacgcgatagaaaacaaaatatagcgcgcaaactaggataaattatcgcgcgcggtgtcatctatgttactagatcgggaattggcatgcaagcttggcactggccgtcgttttacaacgtcgtgactgggaaaaccctggcgttacccaacttaatcgccttgcagcacatccccctttcgccagctggcgtaatagcgaagaggcccgcaccgatcgcccttcccaacagttgcgcagcctgaatggcgaatgctagagcagcttgagcttggatcagattgtcgtttcccgccttcagtttaaactatcagtgtttgacaggatatattggcgggtaaacctaagagaaaagagcgtttattagaataatcggatatttaaaagggcgtgaaaaggtttatccgttcgtccatttgtatgtgcatgccaaccacagggttcccctcgggatcaaagtactttgatccaacccctccgctgctatagtgcagtcggcttctgacgttcagtgcagccgtcttctgaaaacgacatgtcgcacaagtcctaagttacgcgacaggctgccgccctgcccttttcctggcgttttcttgtcgcgtgttttagtcgcataaagtagaatacttgcgactagaaccggagacattacgccatgaacaagagcgccgccgctggcctgctgggctatgcccgcgtcagcaccgacgaccaggacttgaccaaccaacgggccgaactgcacgcggccggctgcaccaagctgttttccgagaagatcaccggcaccaggcgcgaccgcccggagctggccaggatgcttgaccacctacgccctggcgacgttgtgacagtgaccaggctagaccgcctggcccgcagcacccgcgacctactggacattgccgagcgcatccaggaggccggcgcgggcctgcgtagcctggcagagccgtgggccgacaccaccacgccggccggccgcatggtgttgaccgtgttcgccggcattgccgagttcgagcgttccctaatcatcgaccgcacccggagcgggcgcgaggccgccaaggcccgaggcgtgaagtttggcccccgccctaccctcaccccggcacagatcgcgcacgcccgcgagctgatcgaccaggaaggccgcaccgtgaaagaggcggctgcactgcttggcgtgcatcgctcgaccctgtaccgcgcacttgagcgcagcgaggaagtgacgcccaccgaggccaggcggcgcggtgccttccgtgaggacgcattgaccgaggccgacgccctggcggccgccgagaatgaacgccaagaggaacaagcatgaaaccgcaccaggacggccaggacgaaccgtttttcattaccgaagagatcgaggcggagatgatcgcggccgggtacgtgttcgagccgcccgcgcacgtctcaaccgtgcggctgcatgaaatcctggccggtttgtctgatgccaagctggcggcctggccggccagcttggccgctgaagaaaccgagcgccgccgtctaaaaaggtgatgtgtatttgagtaaaacagcttgcgtcatgcggtcgctgcgtatatgatgcgatgagtaaataaacaaatacgcaaggggaacgcatgaaggttatcgctgtacttaaccagaaaggcgggtcaggcaagacgaccatcgcaacccatctagcccgcgccctgcaactcgccggggccgatgttctgttagtcgattccgatccccagggcagtgcccgcgattgggcggccgtgcgggaagatcaaccgctaaccgttgtcggcatcgaccgcccgacgattgaccgcgacgtgaaggccatcggccggcgcgacttcgtagtgatcgacggagcgccccaggcggcggacttggctgtgtccgcgatcaaggcagccgacttcgtgctgattccggtgcagccaagcccttacgacatatgggccaccgccgacctggtggagctggttaagcagcgcattgaggtcacggatggaaggctacaagcggcctttgtcgtgtcgcgggcgatcaaaggcacgcgcatcggcggtgaggttgccgaggcgctggccgggtacgagctgcccattcttgagtcccgtatcacgcagcgcgtgagctacccaggcactgccgccgccggcacaaccgttcttgaatcagaacccgagggcgacgctgcccgcgaggtccaggcgctggccgctgaaattaaatcaaaactcatttgagttaatgaggtaaagagaaaatgagcaaaagcacaaacacgctaagtgccggccgtccgagcgcacgcagcagcaaggctgcaacgttggccagcctggcagacacgccagccatgaagcgggtcaactttcagttgccggcggaggatcacaccaagctgaagatgtacgcggtacgccaaggcaagaccattaccgagctgctatctgaatacatcgcgcagctaccagagtaaatgagcaaatgaataaatgagtagatgaattttagcggctaaaggaggcggcatggaaaatcaagaacaaccaggcaccgacgccgtggaatgccccatgtgtggaggaacgggcggttggccaggcgtaagcggctgggttgcctgccggccctgcaatggcactggaacccccaagcccgaggaatcggcgtgagcggtcgcaaaccatccggcccggtacaaatcggcgcggcgctgggtgatgacctggtggagaagttgaaggccgcgcaggccgcccagcggcaacgcatcgaggcagaagcacgccccggtgaatcgtggcaagcggccgctgatcgaatccgcaaagaatcccggcaaccgccggcagccggtgcgccgtcgattaggaagccgcccaagggcgacgagcaaccagattttttcgttccgatgctctatgacgtgggcacccgcgatagtcgcagcatcatggacgtggccgttttccgtctgtcgaagcgtgaccgacgagctggcgaggtgatccgctacgagcttccagacgggcacgtagaggtttccgcagggccggccggcatggccagtgtgtgggattacgacctggtactgatggcggtttcccatctaaccgaatccatgaaccgataccgggaagggaagggagacaagcccggccgcgtgttccgtccacacgttgcggacgtactcaagttctgccggcgagccgatggcggaaagcagaaagacgacctggtagaaacctgcattcggttaaacaccacgcacgttgccatgcagcgtacgaagaaggccaagaacggccgcctggtgacggtatccgagggtgaagccttgattagccgctacaagatcgtaaagagcgaaaccgggcggccggagtacatcgagatcgagctagctgattggatgtaccgcgagatcacagaaggcaagaacccggacgtgctgacggttcaccccgattactttttgatcgatcccggcatcggccgttttctctaccgcctggcacgccgcgccgcaggcaaggcagaagccagatggttgttcaagacgatctacgaacgcagtggcagcgccggagagttcaagaagttctgtttcaccgtgcgcaagctgatcgggtcaaatgacctgccggagtacgatttgaaggaggaggcggggcaggctggcccgatcctagtcatgcgctaccgcaacctgatcgagggcgaagcatccgccggttcctaatgtacggagcagatgctagggcaaattgccctagcaggggaaaaaggtcgaaaaggtctctttcctgtggatagcacgtacattgggaacccaaagccgtacattgggaaccggaacccgtacattgggaacccaaagccgtacattgggaaccggtcacacatgtaagtgactgatataaaagagaaaaaaggcgatttttccgcctaaaactctttaaaacttattaaaactcttaaaacccgcctggcctgtgcataactgtctggccagcgcacagccgaagagctgcaaaaagcgcctacccttcggtcgctgcgctccctacgccccgccgcttcgcgtcggcctatcgcggccgctggccgctcaaaaatggctggcctacggccaggcaatctaccagggcgcggacaagccgcgccgtcgccactcgaccgccggcgcccacatcaaggcaccctgcctcgcgcgtttcggtgatgacggtgaaaacctctgacacatgcagctcccggagacggtcacagcttgtctgtaagcggatgccgggagcagacaagcccgtcagggcgcgtcagcgggtgttggcgggtgtcggggcgcagccatgacccagtcacgtagcgatagcggagtgtatactggcttaactatgcggcatcagagcagattgtactgagagtgcaccatatgcggtgtgaaataccgcacagatgcgtaaggagaaaataccgcatcaggcgctcttccgcttcctcgctcactgactcgctgcgctcggtcgttcggctgcggcgagcggtatcagctcactcaaaggcggtaatacggttatccacagaatcaggggataacgcaggaaagaacatgtgagcaaaaggccagcaaaaggccaggaaccgtaaaaaggccgcgttgctggcgtttttccataggctccgcccccctgacgagcatcacaaaaatcgacgctcaagtcagaggtggcgaaacccgacaggactataaagataccaggcgtttccccctggaagctccctcgtgcgctctcctgttccgaccctgccgcttaccggatacctgtccgcctttctcccttcgggaagcgtggcgctttctcatagctcacgctgtaggtatctcagttcggtgtaggtcgttcgctccaagctgggctgtgtgcacgaaccccccgttcagcccgaccgctgcgccttatccggtaactatcgtcttgagtccaacccggtaagacacgacttatcgccactggcagcagccactggtaacaggattagcagagcgaggtatgtaggcggtgctacagagttcttgaagtggtggcctaactacggctacactagaaggacagtatttggtatctgcgctctgctgaagccagttaccttcggaaaaagagttggtagctcttgatccggcaaacaaaccaccgctggtagcggtggtttttttgtttgcaagcagcagattacgcgcagaaaaaaaggatctcaagaagatcctttgatcttttctacggggtctgacgctcagtggaacgaaaactcacgttaagggattttggtcatgcattctaggtactaaaacaattcatccagtaaaatataatattttattttctcccaatcaggcttgatccccagtaagtcaaaaaatagctcgacatactgttcttccccgatatcctccctgatcgaccggacgcagaaggcaatgtcataccacttgtccgccctgccgcttctcccaagatcaataaagccacttactttgccatctttcacaaagatgttgctgtctcccaggtcgccgtgggaaaagacaagttcctcttcgggcttttccgtctttaaaaaatcatacagctcgcgcggatctttaaatggagtgtcttcttcccagttttcgcaatccacatcggccagatcgttattcagtaagtaatccaattcggctaagcggctgtctaagctattcgtatagggacaatccgatatgtcgatggagtgaaagagcctgatgcactccgcatacagctcgataatcttttcagggctttgttcatcttcatactcttccgagcaaaggacgccatcggcctcactcatgagcagattgctccagccatcatgccgttcaaagtgcaggacctttggaacaggcagctttccttccagccatagcatcatgtccttttcccgttccacatcataggtggtccctttataccggctgtccgtcatttttaaatataggttttcattttctcccaccagcttatataccttagcaggagacattccttccgtatcttttacgcagcggtatttttcgatcagttttttcaattccggtgatattctcattttagccatttattatttccttcctcttttctacagtatttaaagataccccaagaagctaattataacaagacgaactccaattcactgttccttgcattctaaaaccttaaataccagaaaacagctttttcaaagttgttttcaaagttggcgtataacatagtatcgacggagccgattttgaaaccgcggtgatcacaggcagcaacgctctgtcatcgttacaatcaacatgctaccctccgcgagatcatccgtgtttcaaacccggcagcttagttgccgttcttccgaatagcatcggtaacatgagcaaagtctgccgccttacaacggctctcccgctgacgccgtcccggactgatgggctgcctgtatcgagtggtgattttgtgccgagctgccggtcggggagctgttggctggctggtggcaggatatattgtggtgtaaacaaattgacgcttagacaacttaataacacattgcggacgtttttaatgtactgaattaacgccgaattaa

SEQ ID NO: 43 - protein, 62 aa, Artificial Sequence
  Synthetic Construct
MTTAVTAAVSFPSTKTTSLSARSSSVISPDKISYKKVPLYYRNVSATGKMGPIRAQIASCSS

SEQ ID NO: 44 - DNA, 9137 bp, Artificial Sequence
  plasmid VC-MME431-1qcz
  transit_peptide (2125)..(2214)
  CDS (2125)..(2214)
  CDS (2215)..(2223): adapter
gctttgggcggatcctctagaggacaatcagtaaattgaacggagaatattattcataaaaatacgatagtaacgggtgatatattcattagaatgaaccgaaaccggcggtaaggatctgagctacacatgctcaggttttttacaacgtgcacaacagaattgaaagcaaatatcatgcgatcataggcgtctcgcatatctcattaaagcagggcatgccggtcgagtcaaatctcggtgacgggcaggaccggacggggcggtaccggcaggctgaagtccagctgccagaaacccacgtcatgccagttcccgtgcttgaagccggccgcccgcagcatgccgcggggggcatatccgagcgcctcgtgcatgcgcacgctcgggtcgttgggcagcccgatgacagcgaccacgctcttgaagccctgtgcctccagggacttcagcaggtgggtgtagagcgtggagcccagtcccgtccgctggtggcggggggagacgtacacggtcgactcggccgtccagtcgtaggcgttgcgtgccttccaggggcccgcgtaggcgatgccggcgacctcgccgtccacctcggcgacgagccagggatagcgctcccgcagacggacgaggtcgtccgtccactcctgcggttcctgcggctcggtacggaagttgaccgtgcttgtctcgatgtagtggttgacgatggtgcagaccgccggcatgtccgcctcggtggcacggcggatgtcggccgggcgtcgttctgggctcatggtagactcgacggatccacgtgtggaagatatgaatttttttgagaaactagataagattaatgaatatcggtgttttggttttttcttgtggccgtctttgtttatattgagatttttcaaatcagtgcgcaagacgtgacgtaagtatccgagtcagtttttatttttctactaatttggtcgaatctagattcgacggtatcgataagctcgcggatccctgaaagcgacgttggatgttaacatctacaaattgccttttcttatcgaccatgtacgtaagcgcttacgtttttggtggacccttgaggaaactggtagctgttgtgggcctgtggtctcaagatggatcattaatttccaccttcacctacgatggggggcatcgcaccggtgagtaatattgtacggctaagagcgaatttggcctgtaggatccctgaaagcgacgttggatgttaacatctacaaattgccttttcttatcgaccatgtacgtaagcgcttacgtttttggtggacccttgaggaaactggtagctgttgtgggcctgtggtctcaagatggatcattaatttccaccttcacctacgatggggggcatcgcaccggtgagtaatattgtacggctaagagcgaatttggcctgtaggatccctgaaagcgacgttggatgttaacatctacaaattgccttttcttatcgaccatgtacgtaagcgcttacgtttttggtggacccttgaggaaactggtagctgttgtgggcctgtggtctcaagatggatcattaatttccaccttcacctacgatggggggcatcgcaccggtgagtaatattgtacggctaagagcgaatttggcctgtaggatccgcgagctggtcaatcccattgcttttgaagcagctcaacattgatctctttctcgatcgagggagatttttcaaatcagtgcgcaagacgtgacgtaagtatccgagtcagtttttatttttctactaatttggtcgtttatttcggcgtgtaggacatggcaaccgggcctgaatttcgcgggtattctgtttctattccaactttttcttgatccgcagccattaacgacttttgaatagatacgctgacacgccaagcctcgctagtcaaaagtgtaccaaacaacgctttacagcaagaacggaatgcgcgtgacgctcgcggtgacgccatttcgccttttcagaaatggataaatagccttgcttcctattatatcttcccaaattaccaatacattacactagcatctgaatttcataaccaatctcgatacaccaaatcgaagatctcccaaacatgcagaggtttttctccgccagatcgattctcggttacgccgtcaagacgcggaggaggtctttctcttctcgttcttcgtctctcctttgctcttccatggcaatgattaattaacgaagagcaagagctcgaatttccccgatcgttcaaacatttggcaataaagtttcttaagattgaatcctgttgccggtcttgcgatgattatcatataatttctgttgaattacgttaagcatgtaataattaacatgtaatgcatgacgttatttatgagatgggtttttatgattagagtcccgcaattatacatttaatacgcgatagaaaacaaaatatagcgcgcaaactaggataaattatcgcgcgcggtgtcatctatgttactagatcgggaattggcatgcaagcttggcactggccgtcgttttacaacgtcgtgactgggaaaaccctggcgttacccaacttaatcgccttgcagcacatccccctttcgccagctggcgtaatagcgaagaggcccgcaccgatcgcccttcccaacagttgcgcagcctgaatggcgaatgctagagcagcttgagcttggatcagattgtcgtttcccgccttcagtttaaactatcagtgtttgacaggatatattggcgggtaaacctaagagaaaagagcgtttattagaataatcggatatttaaaagggcgtgaaaaggtttatccgttcgtccatttgtatgtgcatgccaaccacagggttcccctcgggatcaaagtactttgatccaacccctccgctgctatagtgcagtcggcttctgacgttcagtgcagccgtcttctgaaaacgacatgtcgcacaagtcctaagttacgcgacaggctgccgccctgcccttttcctggcgttttcttgtcgcgtgttttagtcgcataaagtagaatacttgcgactagaaccggagacattacgccatgaacaagagcgccgccgctggcctgctgggctatgcccgcgtcagcaccgacgaccaggacttgaccaaccaacgggccgaactgcacgcggccggctgcaccaagctgttttccgagaagatcaccggcaccaggcgcgaccgcccggagctggccaggatgcttgaccacctacgccctggcgacgttgtgacagtgaccaggctagaccgcctggcccgcagcacccgcgacctactggacattgccgagcgcatccaggaggccggcgcgggcctgcgtagcctggcagagccgtgggccgacaccaccacgccggccggccgcatggtgttgaccgtgttcgccggcattgccgagttcgagcgttccctaatcatcgaccgcacccggagcgggcgcgaggccgccaaggcccgaggcgtgaagtttggcccccgccctaccctcaccccggcacagatcgcgcacgcccgcgagctgatcgaccaggaaggccgcaccgtgaaagaggcggctgcactgcttggcgtgcatcgctcgaccctgtaccgcgcacttgagcgcagcgaggaagtgacgcccaccgaggccaggcggcgcggtgccttccgtgaggacgcattgaccgaggccgacgccctggcggccgccgagaatgaacgccaagaggaacaagcatgaaaccgcaccaggacggccaggacgaaccgtttttcattaccgaagagatcgaggcggagatgatcgcggccgggtacgtgttcgagccgcccgcgcacgtctcaaccgtgcggctgcatgaaatcctggccggtttgtctgatgccaagctggcggcctggccggccagcttggccgctgaagaaaccgagcgccgccgtctaaaaaggtgatgtgtatttgagtaaaacagcttgcgtcatgcggtcgctgcgtatatgatgcgatgagtaaataaacaaatacgcaaggggaacgcatgaaggttatcgctgtacttaaccagaaaggcgggtcaggcaagacgaccatcgcaacccatctagcccgcgccctgcaactcgccggggccgatgttctgttagtcgattccgatccccagggcagtgcccgcgattgggcggccgtgcgggaagatcaaccgctaaccgttgtcggcatcgaccgcccgacgattgaccgcgacgtgaaggccatcggccggcgcgacttcgtagtgatcgacggagcgccccaggcggcggacttggctgtgtccgcgatcaaggcagccgacttcgtgctgattccggtgcagccaagcccttacgacatatgggccaccgccgacctggtggagctggttaagcagcgcattgaggtcacggatggaaggctacaagcggcctttgtcgtgtcgcgggcgatcaaaggcacgcgcatcggcggtgaggttgccgaggcgctggccgggtacgagctgcccattcttgagtcccgtatcacgcagcgcgtgagctacccaggcactgccgccgccggcacaaccgttcttgaatcagaacccgagggcgacgctgcccgcgaggtccaggcgctggccgctgaaattaaatcaaaactcatttgagttaatgaggtaaagagaaaatgagcaaaagcacaaacacgctaagtgccggccgtccgagcgcacgcagcagcaaggctgcaacgttggccagcctggcagacacgccagccatgaagcgggtcaactttcagttgccggcggaggatcacaccaagctgaagatgtacgcggtacgccaaggcaagaccattaccgagctgctatctgaatacatcgcgcagctaccagagtaaatgagcaaatgaataaatgagtagatgaattttagcggctaaaggaggcggcatggaaaatcaagaacaaccaggcaccgacgccgtggaatgccccatgtgtggaggaacgggcggttggccaggcgtaagcggctgggttgcctgccggccctgcaatggcactggaacccccaagcccgaggaatcggcgtgagcggtcgcaaaccatccggcccggtacaaatcggcgcggcgctgggtgatgacctggtggagaagttgaaggccgcgcaggccgcccagcggcaacgcatcgaggcagaagcacgccccggtgaatcgtggcaagcggccgctgatcgaatccgcaaagaatcccggcaaccgccggcagccggtgcgccgtcgattaggaagccgcccaagggcgacgagcaaccagattttttcgttccgatgctctatgacgtgggcacccgcgatagtcgcagcatcatggacgtggccgttttccgtctgtcgaagcgtgaccgacgagctggcgaggtgatccgctacgagcttccagacgggcacgtagaggtttccgcagggccggccggcatggccagtgtgtgggattacgacctggtactgatggcggtttcccatctaaccgaatccatgaaccgataccgggaagggaagggagacaagcccggccgcgtgttccgtccacacgttgcggacgtactcaagttctgccggcgagccgatggcggaaagcagaaagacgacctggtagaaacctgcattcggttaaacaccacgcacgttgccatgcagcgtacgaagaaggccaagaacggccgcctggtgacggtatccgagggtgaagccttgattagccgctacaagatcgtaaagagcgaaaccgggcggccggagtacatcgagatcgagctagctgattggatgtaccgcgagatcacagaaggcaagaacccggacgtgctgacggttcaccccgattactttttgatcgatcccggcatcggccgttttctctaccgcctggcacgccgcgccgcaggcaaggcagaagccagatggttgttcaagacgatctacgaacgcagtggcagcgccggagagttcaagaagttctgtttcaccgtgcgcaagctgatcgggtcaaatgacctgccggagtacgatttgaaggaggaggcggggcaggctggcccgatcctagtcatgcgctaccgcaacctgatcgagggcgaagcatccgccggttcctaatgtacggagcagatgctagggcaaattgccctagcaggggaaaaaggtcgaaaaggtctctttcctgtggatagcacgtacattgggaacccaaagccgtacattgggaaccggaacccgtacattgggaacccaaagccgtacattgggaaccggtcacacatgtaagtgactgatataaaagagaaaaaaggcgatttttccgcctaaaactctttaaaacttattaaaactcttaaaacccgcctggcctgtgcataactgtctggccagcgcacagccgaagagctgcaaaaagcgcctacccttcggtcgctgcgctccctacgccccgccgcttcgcgtcggcctatcgcggccgctggccgctcaaaaatggctggcctacggccaggcaatctaccagggcgcggacaagccgcgccgtcgccactcgaccgccggcgcccacatcaaggcaccctgcctcgcgcgtttcggtgatgacggtgaaaacctctgacacatgcagctcccggagacggtcacagcttgtctgtaagcggatgccgggagcagacaagcccgtcagggcgcgtcagcgggtgttggcgggtgtcggggcgcagccatgacccagtcacgtagcgatagcggagtgtatactggcttaactatgcggcatcagagcagattgtactgagagtgcaccatatgcggtgtgaaataccgcacagatgcgtaaggagaaaataccgcatcaggcgctcttccgcttcctcgctcactgactcgctgcgctcggtcgttcggctgcggcgagcggtatcagctcactcaaaggcggtaatacggttatccacagaatcaggggataacgcaggaaagaacatgtgagcaaaaggccagcaaaaggccaggaaccgtaaaaaggccgcgttgctggcgtttttccataggctccgcccccctgacgagcatcacaaaaatcgacgctcaagtcagaggtggcgaaacccgacaggactataaagataccaggcgtttccccctggaagctccctcgtgcgctctcctgttccgaccctgccgcttaccggatacctgtccgcctttctcccttcgggaagcgtggcgctttctcatagctcacgctgtaggtatctcagttcggtgtaggtcgttcgctccaagctgggctgtgtgcacgaaccccccgttcagcccgaccgctgcgccttatccggtaactatcgtcttgagtccaacccggtaagacacgacttatcgccactggcagcagccactggtaacaggattagcagagcgaggtatgtaggcggtgctacagagttcttgaagtggtggcctaactacggctacactagaaggacagtatttggtatctgcgctctgctgaagccagttaccttcggaaaaagagttggtagctcttgatccggcaaacaaaccaccgctggtagcggtggtttttttgtttgcaagcagcagattacgcgcagaaaaaaaggatctcaagaagatcctttgatcttttctacggggtctgacgctcagtggaacgaaaactcacgttaagggattttggtcatgcattctaggtactaaaacaattcatccagtaaaatataatattttattttctcccaatcaggcttgatccccagtaagtcaaaaaatagctcgacatactgttcttccccgatatcctccctgatcgaccggacgcagaaggcaatgtcataccacttgtccgccctgccgcttctcccaagatcaataaagccacttactttgccatctttcacaaagatgttgctgtctcccaggtcgccgtgggaaaagacaagttcctcttcgggcttttccgtctttaaaaaatcatacagctcgcgcggatctttaaatggagtgtcttcttcccagttttcgcaatccacatcggccagatcgttattcagtaagtaatccaattcggctaagcggctgtctaagctattcgtatagggacaatccgatatgtcgatggagtgaaagagcctgatgcactccgcatacagctcgataatcttttcagggctttgttcatcttcatactcttccgagcaaaggacgccatcggcctcactcatgagcagattgctccagccatcatgccgttcaaagtgcaggacctttggaacaggcagctttccttccagccatagcatcatgtccttttcccgttccacatcataggtggtccctttataccggctgtccgtcatttttaaatataggttttcattttctcccaccagcttatataccttagcaggagacattccttccgtatcttttacgcagcggtatttttcgatcagttttttcaattccggtgatattctcattttagccatttattatttccttcctcttttctacagtatttaaagataccccaagaagctaattataacaagacgaactccaattcactgttccttgcattctaaaaccttaaataccagaaaacagctttttcaaagttgttttcaaagttggcgtataacatagtatcgacggagccgattttgaaaccgcggtgatcacaggcagcaacgctctgtcatcgttacaatcaacatgctaccctccgcgagatcatccgtgtttcaaacccggcagcttagttgccgttcttccgaatagcatcggtaacatgagcaaagtctgccgccttacaacggctctcccgctgacgccgtcccggactgatgggctgcctgtatcgagtggtgattttgtgccgagctgccggtcggggagctgttggctggctggtggcaggatatattgtggtgtaaacaaattgacgcttagacaacttaataacacattgcggacgtttttaatgtactgaattaacgccgaattaa

SEQ ID NO: 45 - protein, 33 aa, Artificial Sequence
  Synthetic Construct
MQRFFSARSILGYAVKTRRRSFSSRSSSLLCSS

SEQ ID NO: 46 - DNA, 8885 bp, Artificial Sequence
  plasmid VC-MME221-1qcz
agcttggacaatcagtaaattgaacggagaatattattcataaaaatacgatagtaacgggtgatatattcattagaatgaaccgaaaccggcggtaaggatctgagctacacatgctcaggttttttacaacgtgcacaacagaattgaaagcaaatatcatgcgatcataggcgtctcgcatatctcattaaagcagggcatgccggtcgagtcaaatctcggtgacgggcaggaccggacggggcggtaccggcaggctgaagtccagctgccagaaacccacgtcatgccagttcccgtgcttgaagccggccgcccgcagcatgccgcggggggcatatccgagcgcctcgtgcatgcgcacgctcgggtcgttgggcagcccgatgacagcgaccacgctcttgaagccctgtgcctccagggacttcagcaggtgggtgtagagcgtggagcccagtcccgtccgctggtggcggggggagacgtacacggtcgactcggccgtccagtcgtaggcgttgcgtgccttccaggggcccgcgtaggcgatgccggcgacctcgccgtccacctcggcgacgagccagggatagcgctcccgcagacggacgaggtcgtccgtccactcctgcggttcctgcggctcggtacggaagttgaccgtgcttgtctcgatgtagtggttgacgatggtgcagaccgccggcatgtccgcctcggtggcacggcggatgtcggccgggcgtcgttctgggctcatggtagactcgacggatccacgtgtggaagatatgaatttttttgagaaactagataagattaatgaatatcggtgttttggttttttcttgtggccgtctttgtttatattgagatttttcaaatcagtgcgcaagacgtgacgtaagtatccgagtcagtttttatttttctactaatttggtcgaagctttgggcggatcctctagaattcgaatccaaaaattacggatatgaatataggcatatccgtatccgaattatccgtttgacagctagcaacgattgtacaattgcttctttaaaaaaggaagaaagaaagaaagaaaagaatcaacatcagcgttaacaaacggccccgttacggcccaaacggtcatatagagtaacggcgttaagcgttgaaagactcctatcgaaatacgtaaccgcaaacgtgtcatagtcagatcccctcttccttcaccgcctcaaacacaaaaataatcttctacagcctatatatacaacccccccttctatctctcctttctcacaattcatcatctttctttctctacccccaattttaagaaatcctctcttctcctcttcattttcaaggtaaatctctctctctctctctctctctgttattccttgttttaattaggtatgtattattgctagtttgttaatctgcttatcttatgtatgccttatgtgaatatctttatcttgttcatctcatccgtttagaagctataaatttgttgatttgactgtgtatctacacgtggttatgtttatatctaatcagatatgaatttcttcatattgttgcgtttgtgtgtaccaatccgaaatcgttgatttttttcatttaatcgtgtagctaattgtacgtatacatatggatctacgtatcaattgttcatctgtttgtgtttgtatgtatacagatctgaaaacatcacttctctcatctgattgtgttgttacatacatagatatagatctgttatatcattttttttattaattgtgtatatatatatgtgcatagatctggattacatgattgtgattatttacatgattttgttatttacgtatgtatatatgtagatctggactttttggagttgttgacttgattgtatttgtgtgtgtatatgtgtgttctgatcttgatatgttatgtatgtgcagcccgggttgctcttccatggcaatgattaattaacgaagagcaagagctcgaatttccccgatcgttcaaacatttggcaataaagtttcttaagattgaatcctgttgccggtcttgcgatgattatcatataatttctgttgaattacgttaagcatgtaataattaacatgtaatgcatgacgttatttatgagatgggtttttatgattagagtcccgcaattatacatttaatacgcgatagaaaacaaaatatagcgcgcaaactaggataaattatcgcgcgcggtgtcatctatgttactagatcgggaattggcatgcaagcttggcactggccgtcgttttacaacgtcgtgactgggaaaaccctggcgttacccaacttaatcgccttgcagcacatccccctttcgccagctggcgtaatagcgaagaggcccgcaccgatcgcccttcccaacagttgcgcagcctgaatggcgaatgctagagcagcttgagcttggatcagattgtcgtttcccgccttcagtttaaactatcagtgtttgacaggatatattggcgggtaaacctaagagaaaagagcgtttattagaataatcggatatttaaaagggcgtgaaaaggtttatccgttcgtccatttgtatgtgcatgccaaccacagggttcccctcgggatcaaagtactttgatccaacccctccgctgctatagtgcagtcggcttctgacgttcagtgcagccgtcttctgaaaacgacatgtcgcacaagtcctaagttacgcgacaggctgccgccctgcccttttcctggcgttttcttgtcgcgtgttttagtcgcataaagtagaatacttgcgactagaaccggagacattacgccatgaacaagagcgccgccgctggcctgctgggctatgcccgcgtcagcaccgacgaccaggacttgaccaaccaacgggccgaactgcacgcggccggctgcaccaagctgttttccgagaagatcaccggcaccaggcgcgaccgcccggagctggccaggatgcttgaccacctacgccctggcgacgttgtgacagtgaccaggctagaccgcctggcccgcagcacccgcgacctactggacattgccgagcgcatccaggaggccggcgcgggcctgcgtagcctggcagagccgtgggccgacaccaccacgccggccggccgcatggtgttgaccgtgttcgccggcattgccgagttcgagcgttccctaatcatcgaccgcacccggagcgggcgcgaggccgccaaggcccgaggcgtgaagtttggcccccgccctaccctcaccccggcacagatcgcgcacgcccgcgagctgatcgaccaggaaggccgcaccgtgaaagaggcggctgcactgcttggcgtgcatcgctcgaccctgtaccgcgcacttgagcgcagcgaggaagtgacgcccaccgaggccaggcggcgcggtgccttccgtgaggacgcattgaccgaggccgacgccctggcggccgccgagaatgaacgccaagaggaacaagcatgaaaccgcaccaggacggccaggacgaaccgtttttcattaccgaagagatcgaggcggagatgatcgcggccgggtacgtgttcgagccgcccgcgcacgtctcaaccgtgcggctgcatgaaatcctggccggtttgtctgatgccaagctggcggcctggccggccagcttggccgctgaagaaaccgagcgccgccgtctaaaaaggtgatgtgtatttgagtaaaacagcttgcgtcatgcggtcgctgcgtatatgatgcgatgagtaaataaacaaatacgcaaggggaacgcatgaaggttatcgctgtacttaaccagaaaggcgggtcaggcaagacgaccatcgcaacccatctagcccgcgccctgcaactcgccggggccgatgttctgttagtcgattccgatccccagggcagtgcccgcgattgggcggccgtgcgggaagatcaaccgctaaccgttgtcggcatcgaccgcccgacgattgaccgcgacgtgaaggccatcggccggcgcgacttcgtagtgatcgacggagcgccccaggcggcggacttggctgtgtccgcgatcaaggcagccgacttcgtgctgattccggtgcagccaagcccttacgacatatgggccaccgccgacctggtggagctggttaagcagcgcattgaggtcacggatggaaggctacaagcggcctttgtcgtgtcgcgggcgatcaaaggcacgcgcatcggcggtgaggttgccgaggcgctggccgggtacgagctgcccattcttgagtcccgtatcacgcagcgcgtgagctacccaggcactgccgccgccggcacaaccgttcttgaatcagaacccgagggcgacgctgcccgcgaggtccaggcgctggccgctgaaattaaatcaaaactcatttgagttaatgaggtaaagagaaaatgagcaaaagcacaaacacgctaagtgccggccgtccgagcgcacgcagcagcaaggctgcaacgttggccagcctggcagacacgccagccatgaagcgggtcaactttcagttgccggcggaggatcacaccaagctgaagatgtacgcggtacgccaaggcaagaccattaccgagctgctatctgaatacatcgcgcagctaccagagtaaatgagcaaatgaataaatgagtagatgaattttagcggctaaaggaggcggcatggaaaatcaagaacaaccaggcaccgacgccgtggaatgccccatgtgtggaggaacgggcggttggccaggcgtaagcggctgggttgcctgccggccctgcaatggcactggaacccccaagcccgaggaatcggcgtgagcggtcgcaaaccatccggcccggtacaaatcggcgcggcgctgggtgatgacctggtggagaagttgaaggccgcgcaggccgcccagcggcaacgcatcgaggcagaagcacgccccggtgaatcgtggcaagcggccgctgatcgaatccgcaaagaatcccggcaaccgccggcagccggtgcgccgtcgattaggaagccgcccaagggcgacgagcaaccagattttttcgttccgatgctctatgacgtgggcacccgcgatagtcgcagcatcatggacgtggccgttttccgtctgtcgaagcgtgaccgacgagctggcgaggtgatccgctacgagcttccagacgggcacgtagaggtttccgcagggccggccggcatggccagtgtgtgggattacgacctggtactgatggcggtttcccatctaaccgaatccatgaaccgataccgggaagggaagggagacaagcccggccgcgtgttccgtccacacgttgcggacgtactcaagttctgccggcgagccgatggcggaaagcagaaagacgacctggtagaaacctgcattcggttaaacaccacgcacgttgccatgcagcgtacgaagaaggccaagaacggccgcctggtgacggtatccgagggtgaagccttgattagccgctacaagatcgtaaagagcgaaaccgggcggccggagtacatcgagatcgagctagctgattggatgtaccgcgagatcacagaaggcaagaacccggacgtgctgacggttcaccccgattactttttgatcgatcccggcatcggccgttttctctaccgcctggcacgccgcgccgcaggcaaggcagaagccagatggttgttcaagacgatctacgaacgcagtggcagcgccggagagttcaagaagttctgtttcaccgtgcgcaagctgatcgggtcaaatgacctgccggagtacgatttgaaggaggaggcggggcaggctggcccgatcctagtcatgcgctaccgcaacctgatcgagggcgaagcatccgccggttcctaatgtacggagcagatgctagggcaaattgccctagcaggggaaaaaggtcgaaaaggtctctttcctgtggatagcacgtacattgggaacccaaagccgtacattgggaaccggaacccgtacattgggaacccaaagccgtacattgggaaccggtcacacatgtaagtgactgatataaaagagaaaaaaggcgatttttccgcctaaaactctttaaaacttattaaaactcttaaaacccgcctggcctgtgcataactgtctggccagcgcacagccgaagagctgcaaaaagcgcctacccttcggtcgctgcgctccctacgccccgccgcttcgcgtcggcctatcgcggccgctggccgctcaaaaatggctggcctacggccaggcaatctaccagggcgcggacaagccgcgccgtcgccactcgaccgccggcgcccacatcaaggcaccctgcctcgcgcgtttcggtgatgacggtgaaaacctctgacacatgcagctcccggagacggtcacagcttgtctgtaagcggatgccgggagcagacaagcccgtcagggcgcgtcagcgggtgttggcgggtgtcggggcgcagccatgacccagtcacgtagcgatagcggagtgtatactggcttaactatgcggcatcagagcagattgtactgagagtgcaccatatgcggtgtgaaataccgcacagatgcgtaaggagaaaataccgcatcaggcgctcttccgcttcctcgctcactgactcgctgcgctcggtcgttcggctgcggcgagcggtatcagctcactcaaaggcggtaatacggttatccacagaatcaggggataacgcaggaaagaacatgtgagcaaaaggccagcaaaaggccaggaaccgtaaaaaggccgcgttgctggcgtttttccataggctccgcccccctgacgagcatcacaaaaatcgacgctcaagtcagaggtggcgaaacccgacaggactataaagataccaggcgtttccccctggaagctccctcgtgcgctctcctgttccgaccctgccgcttaccggatacctgtccgcctttctcccttcgggaagcgtggcgctttctcatagctcacgctgtaggtatctcagttcggtgtaggtcgttcgctccaagctgggctgtgtgcacgaaccccccgttcagcccgaccgctgcgccttatccggtaactatcgtcttgagtccaacccggtaagacacgacttatcgccactggcagcagccactggtaacaggattagcagagcgaggtatgtaggcggtgctacagagttcttgaagtggtggcctaactacggctacactagaaggacagtatttggtatctgcgctctgctgaagccagttaccttcggaaaaagagttggtagctcttgatccggcaaacaaaccaccgctggtagcggtggtttttttgtttgcaagcagcagattacgcgcagaaaaaaaggatctcaagaagatcctttgatcttttctacggggtctgacgctcagtggaacgaaaactcacgttaagggattttggtcatgcattctaggtactaaaacaattcatccagtaaaatataatattttattttctcccaatcaggcttgatccccagtaagtcaaaaaatagctcgacatactgttcttccccgatatcctccctgatcgaccggacgcagaaggcaatgtcataccacttgtccgccctgccgcttctcccaagatcaataaagccacttactttgccatctttcacaaagatgttgctgtctcccaggtcgccgtgggaaaagacaagttcctcttcgggcttttccgtctttaaaaaatcatacagctcgcgcggatctttaaatggagtgtcttcttcccagttttcgcaatccacatcggccagatcgttattcagtaagtaatccaattcggctaagcggctgtctaagctattcgtatagggacaatccgatatgtcgatggagtgaaagagcctgatgcactccgcatacagctcgataatcttttcagggctttgttcatcttcatactcttccgagcaaaggacgccatcggcctcactcatgagcagattgctccagccatcatgccgttcaaagtgcaggacctttggaacaggcagctttccttccagccatagcatcatgtccttttcccgttccacatcataggtggtccctttataccggctgtccgtcatttttaaatataggttttcattttctcccaccagcttatataccttagcaggagacattccttccgtatcttttacgcagcggtatttttcgatcagttttttcaattccggtgatattctcattttagccatttattatttccttcctcttttctacagtatttaaagataccccaagaagctaattataacaagacgaactccaattcactgttccttgcattctaaaaccttaaataccagaaaacagctttttcaaagttgttttcaaagttggcgtataacatagtatcgacggagccgattttgaaaccgcggtgatcacaggcagcaacgctctgtcatcgttacaatcaacatgctaccctccgcgagatcatccgtgtttcaaacccggcagcttagttgccgttcttccgaatagcatcggtaacatgagcaaagtctgccgccttacaacggctctcccgctgacgccgtcccggactgatgggctgcctgtatcgagtggtgattttgtgccgagctgccggtcggggagctgttggctggctggtggcaggatatattgtggtgtaaacaaattgacgcttagacaacttaataacacattgcggacgtttttaatgtactgaattaacgccgaatta

SEQ ID NO: 47 - DNA, 9303 bp, Artificial Sequence
  plasmid pMTX447korr
  5'UTR (1964)..(2128)
  transit_peptide (2129)..(2236)
  CDS (2129)..(2236)
  transit_peptide (2314)..(2382)
  CDS (2314)..(2382)
  CDS (2383)..(2391): adapter
agcttggacaatcagtaaattgaacggagaatattattcataaaaatacgatagtaacgggtgatatattcattagaatgaaccgaaaccggcggtaaggatctgagctacacatgctcaggttttttacaacgtgcacaacagaattgaaagcaaatatcatgcgatcataggcgtctcgcatatctcattaaagcagggcatgccggtcgagtcaaatctcggtgacgggcaggaccggacggggcggtaccggcaggctgaagtccagctgccagaaacccacgtcatgccagttcccgtgcttgaagccggccgcccgcagcatgccgcggggggcatatccgagcgcctcgtgcatgcgcacgctcgggtcgttgggcagcccgatgacagcgaccacgctcttgaagccctgtgcctccagggacttcagcaggtgggtgtagagcgtggagcccagtcccgtccgctggtggcggggggagacgtacacggtcgactcggccgtccagtcgtaggcgttgcgtgccttccaggggcccgcgtaggcgatgccggcgacctcgccgtccacctcggcgacgagccagggatagcgctcccgcagacggacgaggtcgtccgtccactcctgcggttcctgcggctcggtacggaagttgaccgtgcttgtctcgatgtagtggttgacgatggtgcagaccgccggcatgtccgcctcggtggcacggcggatgtcggccgggcgtcgttctgggctcatggtagactcgacggatccacgtgtggaagatatgaatttttttgagaaactagataagattaatgaatatcggtgttttggttttttcttgtggccgtctttgtttatattgagatttttcaaatcagtgcgcaagacgtgacgtaagtatccgagtcagtttttatttttctactaatttggtcgaagctttgggcggatcctctagaattcgaatccaaaaattacggatatgaatataggcatatccgtatccgaattatccgtttgacagctagcaacgattgtacaattgcttctttaaaaaaggaagaaagaaagaaagaaaagaatcaacatcagcgttaacaaacggccccgttacggcccaaacggtcatatagagtaacggcgttaagcgttgaaagactcctatcgaaatacgtaaccgcaaacgtgtcatagtcagatcccctcttccttcaccgcctcaaacacaaaaataatcttctacagcctatatatacaacccccccttctatctctcctttctcacaattcatcatctttctttctctacccccaattttaagaaatcctctcttctcctcttcattttcaaggtaaatctctctctctctctctctctctgttattccttgttttaattaggtatgtattattgctagtttgttaatctgcttatcttatgtatgccttatgtgaatatctttatcttgttcatctcatccgtttagaagctataaatttgttgatttgactgtgtatctacacgtggttatgtttatatctaatcagatatgaatttcttcatattgttgcgtttgtgtgtaccaatccgaaatcgttgatttttttcatttaatcgtgtagctaattgtacgtatacatatggatctacgtatcaattgttcatctgtttgtgtttgtatgtatacagatctgaaaacatcacttctctcatctgattgtgttgttacatacatagatatagatctgttatatcattttttttattaattgtgtatatatatatgtgcatagatctggattacatgattgtgattatttacatgattttgttatttacgtatgtatatatgtagatctggactttttggagttgttgacttgattgtatttgtgtgtgtatatgtgtgttctgatcttgatatgttatgtatgtgcagcccaaacgcataaacttatcttcatagttgccactccaatttgctccttgaatctcctccacccaatacataatccactcctccatcacccacttcactactaaatcaaacttaactctgtttttctctctcctcctttcatttcttattcttccaatcatcgtactccgccatgaccaccgctgtcaccgccgctgtttctttcccctctaccaaaaccacctctctctccgcccgaagctcctccgtcatttcccctgacaaaatcagctacaaaaaggtgattcccaatttcactgtgttttttattaataatttgttattttgatgatgagatgattaatttgggtgctgcaggttcctttgtactacaggaatgtatctgcaactgggaaaatgggacccatcagggcccagatcgcctcttgctcttccatggcaatgattaattaacgaagagcaagagctcgaatttccccgatcgttcaaacatttggcaataaagtttcttaagattgaatcctgttgccggtcttgcgatgattatcatataatttctgttgaattacgttaagcatgtaataattaacatgtaatgcatgacgttatttatgagatgggtttttatgattagagtcccgcaattatacatttaatacgcgatagaaaacaaaatatagcgcgcaaactaggataaattatcgcgcgcggtgtcatctatgttactagatcgggaattggcatgcaagcttggcactggccgtcgttttacaacgtcgtgactgggaaaaccctggcgttacccaacttaatcgccttgcagcacatccccctttcgccagctggcgtaatagcgaagaggcccgcaccgatcgcccttcccaacagttgcgcagcctgaatggcgaatgctagagcagcttgagcttggatcagattgtcgtttcccgccttcagtttaaactatcagtgtttgacaggatatattggcgggtaaacctaagagaaaagagcgtttattagaataatcggatatttaaaagggcgtgaaaaggtttatccgttcgtccatttgtatgtgcatgccaaccacagggttcccctcgggatcaaagtactttgatccaacccctccgctgctatagtgcagtcggcttctgacgttcagtgcagccgtcttctgaaaacgacatgtcgcacaagtcctaagttacgcgacaggctgccgccctgcccttttcctggcgttttcttgtcgcgtgttttagtcgcataaagtagaatacttgcgactagaaccggagacattacgccatgaacaagagcgccgccgctggcctgctgggctatgcccgcgtcagcaccgacgaccaggacttgaccaaccaacgggccgaactgcacgcggccggctgcaccaagctgttttccgagaagatcaccggcaccaggcgcgaccgcccggagctggccaggatgcttgaccacctacgccctggcgacgttgtgacagtgaccaggctagaccgcctggcccgcagcacccgcgacctactggacattgccgagcgcatccaggaggccggcgcgggcctgcgtagcctggcagagccgtgggccgacaccaccacgccggccggccgcatggtgttgaccgtgttcgccggcattgccgagttcgagcgttccctaatcatcgaccgcacccggagcgggcgcgaggccgccaaggcccgaggcgtgaagtttggcccccgccctaccctcaccccggcacagatcgcgcacgcccgcgagctgatcgaccaggaaggccgcaccgtgaaagaggcggctgcactgcttggcgtgcatcgctcgaccctgtaccgcgcacttgagcgcagcgaggaagtgacgcccaccgaggccaggcggcgcggtgccttccgtgaggacgcattgaccgaggccgacgccctggcggccgccgagaatgaacgccaagaggaacaagcatgaaaccgcaccaggacggccaggacgaaccgtttttcattaccgaagagatcgaggcggagatgatcgcggccgggtacgtgttcgagccgcccgcgcacgtctcaaccgtgcggctgcatgaaatcctggccggtttgtctgatgccaagctggcggcctggccggccagcttggccgctgaagaaaccgagcgccgccgtctaaaaaggtgatgtgtatttgagtaaaacagcttgcgtcatgcggtcgctgcgtatatgatgcgatgagtaaataaacaaatacgcaaggggaacgcatgaaggttatcgctgtacttaaccagaaaggcgggtcaggcaagacgaccatcgcaacccatctagcccgcgccctgcaactcgccggggccgatgttctgttagtcgattccgatccccagggcagtgcccgcgattgggcggccgtgcgggaagatcaaccgctaaccgttgtcggcatcgaccgcccgacgattgaccgcgacgtgaaggccatcggccggcgcgacttcgtagtgatcgacggagcgccccaggcggcggacttggctgtgtccgcgatcaaggcagccgacttcgtgctgattccggtgcagccaagcccttacgacatatgggccaccgccgacctggtggagctggttaagcagcgcattgaggtcacggatggaaggctacaagcggcctttgtcgtgtcgcgggcgatcaaaggcacgcgcatcggcggtgaggttgccgaggcgctggccgggtacgagctgcccattcttgagtcccgtatcacgcagcgcgtgagctacccaggcactgccgccgccggcacaaccgttcttgaatcagaacccgagggcgacgctgcccgcgaggtccaggcgctggccgctgaaattaaatcaaaactcatttgagttaatgaggtaaagagaaaatgagcaaaagcacaaacacgctaagtgccggccgtccgagcgcacgcagcagcaaggctgcaacgttggccagcctggcagacacgccagccatgaagcgggtcaactttcagttgccggcggaggatcacaccaagctgaagatgtacgcggtacgccaaggcaagaccattaccgagctgctatctgaatacatcgcgcagctaccagagtaaatgagcaaatgaataaatgagtagatgaattttagcggctaaaggaggcggcatggaaaatcaagaacaaccaggcaccgacgccgtggaatgccccatgtgtggaggaacgggcggttggccaggcgtaagcggctgggttgtctgccggccctgcaatggcactggaacccccaagcccgaggaatcggcgtgacggtcgcaaaccatccggcccggtacaaatcggcgcggcgctgggtgatgacctggtggagaagttgaaggccgcgcaggccgcccagcggcaacgcatcgaggcagaagcacgccccggtgaatcgtggcaagcggccgctgatcgaatccgcaaagaatcccggcaaccgccggcagccggtgcgccgtcgattaggaagccgcccaagggcgacgagcaaccagattttttcgttccgatgctctatgacgtgggcacccgcgatagtcgcagcatcatggacgtggccgttttccgtctgtcgaagcgtgaccgacgagctggcgaggtgatccgctacgagcttccagacgggcacgtagaggtttccgcagggccggccggcatggccagtgtgtgggattacgacctggtactgatggcggtttcccatctaaccgaatccatgaaccgataccgggaagggaagggagacaagcccggccgcgtgttccgtccacacgttgcggacgtactcaagttctgccggcgagccgatggcggaaagcagaaagacgacctggtagaaacctgcattcggttaaacaccacgcacgttgccatgcagcgtacgaagaaggccaagaacggccgcctggtgacggtatccgagggtgaagccttgattagccgctacaagatcgtaaagagcgaaaccgggcggccggagtacatcgagatcgagctagctgattggatgtaccgcgagatcacagaaggcaagaacccggacgtgctgacggttcaccccgattactttttgatcgatcccggcatcggccgttttctctaccgcctggcacgccgcgccgcaggcaaggcagaagccagatggttgttcaagacgatctacgaacgcagtggcagcgccggagagttcaagaagttctgtttcaccgtgcgcaagctgatcgggtcaaatgacctgccggagtacgatttgaaggaggaggcggggcaggctggcccgatcctagtcatgcgctaccgcaacctgatcgagggcgaagcatccgccggttcctaatgtacggagcagatgctagggcaaattgccctagcaggggaaaaaggtcgaaaaggtctctttcctgtggatagcacgtacattgggaacccaaagccgtacattgggaaccggaacccgtacattgggaacccaaagccgtacattgggaaccggtcacacatgtaagtgactgatataaaagagaaaaaaggcgatttttccgcctaaaactctttaaaacttattaaaactcttaaaacccgcctggcctgtgcataactgtctggccagcgcacagccgaagagctgcaaaaagcgcctacccttcggtcgctgcgctccctacgccccgccgcttcgcgtcggcctatcgcggccgctggccgctcaaaaatggctggcctacggccaggcaatctaccagggcgcggacaagccgcgccgtcgccactcgaccgccggcgcccacatcaaggcaccctgcctcgcgcgtttcggtgatgacggtgaaaacctctgacacatgcagctcccggagacggtcacagcttgtctgtaagcggatgccgggagcagacaagcccgtcagggcgcgtcagcgggtgttggcgggtgtcggggcgcagccatgacccagtcacgtagcgatagcggagtgtatactggcttaactatgcggcatcagagcagattgtactgagagtgcaccatatgcggtgtgaaataccgcacagatgcgtaaggagaaaataccgcatcaggcgctcttccgcttcctcgctcactgactcgctgcgctcggtcgttcggctgcggcgagcggtatcagctcactcaaaggcggtaatacggttatccacagaatcaggggataacgcaggaaagaacatgtgagcaaaaggccagcaaaaggccaggaaccgtaaaaaggccgcgttgctggcgtttttccataggctccgcccccctgacgagcatcacaaaaatcgacgctcaagtcagaggtggcgaaacccgacaggactataaagataccaggcgtttccccctggaagctccctcgtgcgctctcctgttccgaccctgccgcttaccggatacctgtccgcctttctcccttcgggaagcgtggcgctttctcatagctcacgctgtaggtatctcagttcggtgtaggtcgttcgctccaagctgggctgtgtgcacgaaccccccgttcagcccgaccgctgcgccttatccggtaactatcgtcttgagtccaacccggtaagacacgacttatcgccactggcagcagccactggtaacaggattagcagagcgaggtatgtaggcggtgctacagagttcttgaagtggtggcctaactacggctacactagaaggacagtatttggtatctgcgctctgctgaagccagttaccttcggaaaaagagttggtagctcttgatccggcaaacaaaccaccgctggtagcggtggtttttttgtttgcaagcagcagattacgcgcagaaaaaaaggatctcaagaagatcctttgatcttttctacggggtctgacgctcagtggaacgaaaactcacgttaagggattttggtcatgcattctaggtactaaaacaattcatccagtaaaatataatattttattttctcccaatcaggcttgatccccagtaagtcaaaaaatagctcgacatactgttcttccccgatatcctccctgatcgaccggacgcagaaggcaatgtcataccacttgtccgccctgccgcttctcccaagatcaataaagccacttactttgccatctttcacaaagatgttgctgtctcccaggtcgccgtgggaaaagacaagttcctcttcgggcttttccgtctttaaaaaatcatacagctcgcgcggatctttaaatggagtgtcttcttcccagttttcgcaatccacatcggccagatcgttattcagtaagtaatccaattcggctaagcggctgtctaagctattcgtatagggacaatccgatatgtcgatggagtgaaagagcctgatgcactccgcatacagctcgataatcttttcagggctttgttcatcttcatactcttccgagcaaaggacgccatcggcctcactcatgagcagattgctccagccatcatgccgttcaaagtgcaggacctttggaacaggcagctttccttccagccatagcatcatgtccttttcccgttccacatcataggtggtccctttataccggctgtccgtcatttttaaatataggttttcattttctcccaccagcttatataccttagcaggagacattccttccgtatcttttacgcagcggtatttttcgatcagttttttcaattccggtgatattctcattttagccatttattatttccttcctcttttctacagtatttaaagataccccaagaagctaattataacaagacgaactccaattcactgttccttgcattctaaaaccttaaataccagaaaacagctttttcaaagttgttttcaaagttggcgtataacatagtatcgacggagccgattttgaaaccgcggtgatcacaggcagcaacgctctgtcatcgttacaatcaacatgctaccctccgcgagatcatccgtgtttcaaacccggcagcttagttgccgttcttccgaatagcatcggtaacatgagcaaagtctgccgccttacaacggctctcccgctgacgccgtcccggactgatgggctgcctgtatcgagtggtgattttgtgccgagctgccggtcggggagctgttggctggctggtggcaggatatattgtggtgtaaacaaattgacgcttagacaacttaataacacattgcggacgtttttaatgtactgaattaacgccgaatta

SEQ ID NO: 48 - protein, 62 aa, Artificial Sequence; identical to SEQ ID NO: 43
  Synthetic Construct

SEQ ID NO: 49 - DNA, 8975 bp, Artificial Sequence
  plasmid VC-MME445-1qcz
  transit_peptide (1964)..(2053)
  CDS (1964)..(2053)
  CDS (2054)..(2062): adapter
agcttggacaatcagtaaattgaacggagaatattattcataaaaatacgatagtaacgggtgatatattcattagaatgaaccgaaaccggcggtaaggatctgagctacacatgctcaggttttttacaacgtgcacaacagaattgaaagcaaatatcatgcgatcataggcgtctcgcatatctcattaaagcagggcatgccggtcgagtcaaatctcggtgacgggcaggaccggacggggcggtaccggcaggctgaagtccagctgccagaaacccacgtcatgccagttcccgtgcttgaagccggccgcccgcagcatgccgcggggggcatatccgagcgcctcgtgcatgcgcacgctcgggtcgttgggcagcccgatgacagcgaccacgctcttgaagccctgtgcctccagggacttcagcaggtgggtgtagagcgtggagcccagtcccgtccgctggtggcggggggagacgtacacggtcgactcggccgtccagtcgtaggcgttgcgtgccttccaggggcccgcgtaggcgatgccggcgacctcgccgtccacctcggcgacgagccagggatagcgctcccgcagacggacgaggtcgtccgtccactcctgcggttcctgcggctcggtacggaagttgaccgtgcttgtctcgatgtagtggttgacgatggtgcagaccgccggcatgtccgcctcggtggcacggcggatgtcggccgggcgtcgttctgggctcatggtagactcgacggatccacgtgtggaagatatgaatttttttgagaaactagataagattaatgaatatcggtgttttggttttttcttgtggccgtctttgtttatattgagatttttcaaatcagtgcgcaagacgtgacgtaagtatccgagtcagtttttatttttctactaatttggtcgaagctttgggcggatcctctagaattcgaatccaaaaattacggatatgaatataggcatatccgtatccgaattatccgtttgacagctagcaacgattgtacaattgcttctttaaaaaaggaagaaagaaagaaagaaaagaatcaacatcagcgttaacaaacggccccgttacggcccaaacggtcatatagagtaacggcgttaagcgttgaaagactcctatcgaaatacgtaaccgcaaacgtgtcatagtcagatcccctcttccttcaccgcctcaaacacaaaaataatcttctacagcctatatatacaacccccccttctatctctcctttctcacaattcatcatctttctttctctacccccaattttaagaaatcctctcttctcctcttcattttcaaggtaaatctctctctctctctctctctctgttattccttgttttaattaggtatgtattattgctagtttgttaatctgcttatcttatgtatgccttatgtgaatatctttatcttgttcatctcatccgtttagaagctataaatttgttgatttgactgtgtatctacacgtggttatgtttatatctaatcagatatgaatttcttcatattgttgcgtttgtgtgtaccaatccgaaatcgttgatttttttcatttaatcgtgtagctaattgtacgtatacatatggatctacgtatcaattgttcatctgtttgtgtttgtatgtatacagatctgaaaacatcacttctctcatctgattgtgttgttacatacatagatatagatctgttatatcattttttttattaattgtgtatatatatatgtgcatagatctggattacatgattgtgattatttacatgattttgttatttacgtatgtatatatgtagatctggactttttggagttgttgacttgattgtatttgtgtgtgtatatgtgtgttctgatcttgatatgttatgtatgtgcagcccaaacatgcagaggtttttctccgccagatcgattctcggttacgccgtcaagacgcggaggaggtctttctcttctcgttcttcgtctctcctttgctcttccatggcaatgattaattaacgaagagcaagagctcgaatttccccgatcgttcaaacatttggcaataaagtttcttaagattgaatcctgttgccggtcttgcgatgattatcatataatttctgttgaattacgttaagcatgtaataattaacatgtaatgcatgacgttatttatgagatgggtttttatgattagagtcccgcaattatacatttaatacgcgatagaaaacaaaatatagcgcgcaaactaggataaattatcgcgcgcggtgtcatctatgttactagatcgggaattggcatgcaagcttggcactggccgtcgttttacaacgtcgtgactgggaaaaccctggcgttacccaacttaatcgccttgcagcacatccccctttcgccagctggcgtaatagcgaagaggcccgcaccgatcgcccttcccaacagttgcgcagcctgaatggcgaatgctagagcagcttgagcttggatcagattgtcgtttcccgccttcagtttaaactatcagtgtttgacaggatatattggcgggtaaacctaagagaaaagagcgtttattagaataatcggatatttaaaagggcgtgaaaaggtttatccgttcgtccatttgtatgtgcatgccaaccacagggttcccctcgggatcaaagtactttgatccaacccctccgctgctatagtgcagtcggcttctgacgttcagtgcagccgtcttctgaaaacgacatgtcgcacaagtcctaagttacgcgacaggctgccgccctgcccttttcctggcgttttcttgtcgcgtgttttagtcgcataaagtagaatacttgcgactagaaccggagacattacgccatgaacaagagcgccgccgctggcctgctgggctatgcccgcgtcagcaccgacgaccaggacttgaccaaccaacgggccgaactgcacgcggccggctgcaccaagctgttttccgagaagatcaccggcaccaggcgcgaccgcccggagctggccaggatgcttgaccacctacgccctggcgacgttgtgacagtgaccaggctagaccgcctggcccgcagcacccgcgacctactggacattgccgagcgcatccaggaggccggcgcgggcctgcgtagcctggcagagccgtgggccgacaccaccacgccggccggccgcatggtgttgaccgtgttcgccggcattgccgagttcgagcgttccctaatcatcgaccgcacccggagcgggcgcgaggccgccaaggcccgaggcgtgaagtttggcccccgccctaccctcaccccggcacagatcgcgcacgcccgcgagctgatcgaccaggaaggccgcaccgtgaaagaggcggctgcactgcttggcgtgcatcgctcgaccctgtaccgcgcacttgagcgcagcgaggaagtgacgcccaccgaggccaggcggcgcggtgccttccgtgaggacgcattgaccgaggccgacgccctggcggccgccgagaatgaacgccaagaggaacaagcatgaaaccgcaccaggacggccaggacgaaccgtttttcattaccgaagagatcgaggcggagatgatcgcggccgggtacgtgttcgagccgcccgcgcacgtctcaaccgtgcggctgcatgaaatcctggccggtttgtctgatgccaagctggcggcctggccggccagcttggccgctgaagaaaccgagcgccgccgtctaaaaaggtgatgtgtatttgagtaaaacagcttgcgtcatgcggtcgctgcgtatatgatgcgatgagtaaataaacaaatacgcaaggggaacgcatgaaggttatcgctgtacttaaccagaaaggcgggtcaggcaagacgaccatcgcaacccatctagcccgcgccctgcaactcgccggggccgatgttctgttagtcgattccgatccccagggcagtgcccgcgattgggcggccgtgcgggaagatcaaccgctaaccgttgtcggcatcgaccgcccgacgattgaccgcgacgtgaaggccatcggccggcgcgacttcgtagtgatcgacggagcgccccaggcggcggacttggctgtgtccgcgatcaaggcagccgacttcgtgctgattccggtgcagccaagcccttacgacatatgggccaccgccgacctggtggagctggttaagcagcgcattgaggtcacggatggaaggctacaagcggcctttgtcgtgtcgcgggcgatcaaaggcacgcgcatcggcggtgaggttgccgaggcgctggccgggtacgagctgcccattcttgagtcccgtatcacgcagcgcgtgagctacccaggcactgccgccgccggcacaaccgttcttgaatcagaacccgagggcgacgctgcccgcgaggtccaggcgctggccgctgaaattaaatcaaaactcatttgagttaatgaggtaaagagaaaatgagcaaaagcacaaacacgctaagtgccggccgtccgagcgcacgcagcagcaaggctgcaacgttggccagcctggcagacacgccagccatgaagcgggtcaactttcagttgccggcggaggatcacaccaagctgaagatgtacgcggtacgccaaggcaagaccattaccgagctgctatctgaatacatcgcgcagctaccagagtaaatgagcaaatgaataaatgagtagatgaattttagcggctaaaggaggcggcatggaaaatcaagaacaaccaggcaccgacgccgtggaatgccccatgtgtggaggaacgggcggttggccaggcgtaagcggctgggttgcctgccggccctgcaatggcactggaacccccaagcccgaggaatcggcgtgagcggtcgcaaaccatccggcccggtacaaatcggcgcggcgctgggtgatgacctggtggagaagttgaaggccgcgcaggccgcccagcggcaacgcatcgaggcagaagcacgccccggtgaatcgtggcaagcggccgctgatcgaatccgcaaagaatcccggcaaccgccggcagccggtgcgccgtcgattaggaagccgcccaagggcgacgagcaaccagattttttcgttccgatgctctatgacgtgggcacccgcgatagtcgcagcatcatggacgtggccgttttccgtctgtcgaagcgtgaccgacgagctggcgaggtgatccgctacgagcttccagacgggcacgtagaggtttccgcagggccggccggcatggccagtgtgtgggattacgacctggtactgatggcggtttcccatctaaccgaatccatgaaccgataccgggaagggaagggagacaagcccggccgcgtgttccgtccacacgttgcggacgtactcaagttctgccggcgagccgatggcggaaagcagaaagacgacctggtagaaacctgcattcggttaaacaccacgcacgttgccatgcagcgtacgaagaaggccaagaacggccgcctggtgacggtatccgagggtgaagccttgattagccgctacaagatcgtaaagagcgaaaccgggcggccggagtacatcgagatcgagctagctgattggatgtaccgcgagatcacagaaggcaagaacccggacgtgctgacggttcaccccgattactttttgatcgatcccggcatcggccgttttctctaccgcctggcacgccgcgccgcaggcaaggcagaagccagatggttgttcaagacgatctacgaacgcagtggcagcgccggagagttcaagaagttctgtttcaccgtgcgcaagctgatcgggtcaaatgacctgccggagtacgatttgaaggaggaggcggggcaggctggcccgatcctagtcatgcgctaccgcaacctgatcgagggcgaagcatccgccggttcctaatgtacggagcagatgctagggcaaattgccctagcaggggaaaaaggtcgaaaaggtctctttcctgtggatagcacgtacattgggaacccaaagccgtacattgggaaccggaacccgtacattgggaacccaaagccgtacattgggaaccggtcacacatgtaagtgactgatataaaagagaaaaaaggcgatttttccgcctaaaactctttaaaacttattaaaactcttaaaacccgcctggcctgtgcataactgtctggccagcgcacagccgaagagctgcaaaaagcgcctacccttcggtcgctgcgctccctacgccccgccgcttcgcgtcggcctatcgcggccgctggccgctcaaaaatggctggcctacggccaggcaatctaccagggcgcggacaagccgcgccgtcgccactcgaccgccggcgcccacatcaaggcaccctgcctcgcgcgtttcggtgatgacggtgaaaacctctgacacatgcagctcccggagacggtcacagcttgtctgtaagcggatgccgggagcagacaagcccgtcagggcgcgtcagcgggtgttggcgggtgtcggggcgcagccatgacccagtcacgtagcgatagcggagtgtatactggcttaactatgcggcatcagagcagattgtactgagagtgcaccatatgcggtgtgaaataccgcacagatgcgtaaggagaaaataccgcatcaggcgctcttccgcttcctcgctcactgactcgctgcgctcggtcgttcggctgcggcgagcggtatcagctcactcaaaggcggtaatacggttatccacagaatcaggggataacgcaggaaagaacatgtgagcaaaaggccagcaaaaggccaggaaccgtaaaaaggccgcgttgctggcgtttttccataggctccgcccccctgacgagcatcacaaaaatcgacgctcaagtcagaggtggcgaaacccgacaggactataaagataccaggcgtttccccctggaagctccctcgtgcgctctcctgttccgaccctgccgcttaccggatacctgtccgcctttctcccttcgggaagcgtggcgctttctcatagctcacgctgtaggtatctcagttcggtgtaggtcgttcgctccaagctgggctgtgtgcacgaaccccccgttcagcccgaccgctgcgccttatccggtaactatcgtcttgagtccaacccggtaagacacgacttatcgccactggcagcagccactggtaacaggattagcagagcgaggtatgtaggcggtgctacagagttcttgaagtggtggcctaactacggctacactagaaggacagtatttggtatctgcgctctgctgaagccagttaccttcggaaaaagagttggtagctcttgatccggcaaacaaaccaccgctggtagcggtggtttttttgtttgcaagcagcagattacgcgcagaaaaaaaggatctcaagaagatcctttgatcttttctacggggtctgacgctcagtggaacgaaaactcacgttaagggattttggtcatgcattctaggtactaaaacaattcatccagtaaaatataatattttattttctcccaatcaggcttgatccccagtaagtcaaaaaatagctcgacatactgttcttccccgatatcctccctgatcgaccggacgcagaaggcaatgtcataccacttgtccgccctgccgcttctcccaagatcaataaagccacttactttgccatctttcacaaagatgttgctgtctcccaggtcgccgtgggaaaagacaagttcctcttcgggcttttccgtctttaaaaaatcatacagctcgcgcggatctttaaatggagtgtcttcttcccagttttcgcaatccacatcggccagatcgttattcagtaagtaatccaattcggctaagcggctgtctaagctattcgtatagggacaatccgatatgtcgatggagtgaaagagcctgatgcactccgcatacagctcgataatcttttcagggctttgttcatcttcatactcttccgagcaaaggacgccatcggcctcactcatgagcagattgctccagccatcatgccgttcaaagtgcaggacctttggaacaggcagctttccttccagccatagcatcatgtccttttcccgttccacatcataggtggtccctttataccggctgtccgtcatttttaaatataggttttcattttctcccaccagcttatataccttagcaggagacattccttccgtatcttttacgcagcggtatttttcgatcagttttttcaattccggtgatattctcattttagccatttattatttccttcctcttttctacagtatttaaagataccccaagaagctaattataacaagacgaactccaattcactgttccttgcattctaaaaccttaaataccagaaaacagctttttcaaagttgttttcaaagttggcgtataacatagtatcgacggagccgattttgaaaccgcggtgatcacaggcagcaacgctctgtcatcgttacaatcaacatgctaccctccgcgagatcatccgtgtttcaaacccggcagcttagttgccgttcttccgaatagcatcggtaacatgagcaaagtctgccgccttacaacggctctcccgctgacgccgtcccggactgatgggctgcctgtatcgagtggtgattttgtgccgagctgccggtcggggagctgttggctggctggtggcaggatatattgtggtgtaaacaaattgacgcttagacaacttaataacacattgcggacgtttttaatgtactgaattaacgccgaatta

SEQ ID NO: 50 - protein, 33 aa, Artificial Sequence; identical to SEQ ID NO: 45
  Synthetic Construct

SEQ ID NO: 51 - DNA, 8588 bp, Artificial Sequence
  plasmid VC-MME289-1qcz
gctttgggcggatcctctagaggacaatcagtaaattgaacggagaatattattcataaaaatacgatagtaacgggtgatatattcattagaatgaaccgaaaccggcggtaaggatctgagctacacatgctcaggttttttacaacgtgcacaacagaattgaaagcaaatatcatgcgatcataggcgtctcgcatatctcattaaagcagggcatgccggtcgagtcaaatctcggtgacgggcaggaccggacggggcggtaccggcaggctgaagtccagctgccagaaacccacgtcatgccagttcccgtgcttgaagccggccgcccgcagcatgccgcggggggcatatccgagcgcctcgtgcatgcgcacgctcgggtcgttgggcagcccgatgacagcgaccacgctcttgaagccctgtgcctccagggacttcagcaggtgggtgtagagcgtggagcccagtcccgtccgctggtggcggggggagacgtacacggtcgactcggccgtccagtcgtaggcgttgcgtgccttccaggggcccgcgtaggcgatgccggcgacctcgccgtccacctcggcgacgagccagggatagcgctcccgcagacggacgaggtcgtccgtccactcctgcggttcctgcggctcggtacggaagttgaccgtgcttgtctcgatgtagtggttgacgatggtgcagaccgccggcatgtccgcctcggtggcacggcggatgtcggccgggcgtcgttctgggctcatggtagactcgacggatccacgtgtggaagatatgaatttttttgagaaactagataagattaatgaatatcggtgttttggttttttcttgtggccgtctttgtttatattgagatttttcaaatcagtgcgcaagacgtgacgtaagtatccgagtcagtttttatttttctactaatttggtcgaatctagactgcagcaaatttacacattgccactaaacgtctaaacccttgtaatttgtttttgttttactatgtgtgttatgtatttgatttgcgataaatttttatatttggtactaaatttataacaccttttatgctaacgtttgccaacacttagcaatttgcaagttgattaattgattctaaattatttttgtcttctaaatacatatactaatcaactggaaatgtaaatatttgctaatatttctactataggagaattaaagtgagtgaatatggtaccacaaggtttggagatttaattgttgcaatgctgcatggatggcatatacaccaaacattcaataattcttgaggataataatggtaccacacaagatttgaggtgcatgaacgtcacgtggacaaaaggtttagtaatttttcaagacaacaatgttaccacacacaagttttgaggtgcatgcatggatgccctgtggaaagtttaaaaatattttggaaatgatttgcatggaagccatgtgtaaaaccatgacatccacttggaggatgcaataatgaagaaaactacaaatttacatgcaactagttatgcatgtagtctatataatgaggattttgcaatactttcattcatacacactcactaagttttacacgattataatttcttcatagccacccgggttgctcttccatggcaatgattaattaacgaagagcaagagctcgaatttccccgatcgttcaaacatttggcaataaagtttcttaagattgaatcctgttgccggtcttgcgatgattatcatataatttctgttgaattacgttaagcatgtaataattaacatgtaatgcatgacgttatttatgagatgggtttttatgattagagtcccgcaattatacatttaatacgcgatagaaaacaaaatatagcgcgcaaactaggataaattatcgcgcgcggtgtcatctatgttactagatcgggaattggcatgcaagcttggcactggccgtcgttttacaacgtcgtgactgggaaaaccctggcgttacccaacttaatcgccttgcagcacatccccctttcgccagctggcgtaatagcgaagaggcccgcaccgatcgcccttcccaacagttgcgcagcctgaatggcgaatgctagagcagcttgagcttggatcagattgtcgtttcccgccttcagtttaaactatcagtgtttgacaggatatattggcgggtaaacctaagagaaaagagcgtttattagaataatcggatatttaaaagggcgtgaaaaggtttatccgttcgtccatttgtatgtgcatgccaaccacagggttcccctcgggatcaaagtactttgatccaacccctccgctgctatagtgcagtcggcttctgacgttcagtgcagccgtcttctgaaaacgacatgtcgcacaagtcctaagttacgcgacaggctgccgccctgcccttttcctggcgttttcttgtcgcgtgttttagtcgcataaagtagaatacttgcgactagaaccggagacattacgccatgaacaagagcgccgccgctggcctgctgggctatgcccgcgtcagcaccgacgaccaggacttgaccaaccaacgggccgaactgcacgcggccggctgcaccaagctgttttccgagaagatcaccggcaccaggcgcgaccgcccggagctggccaggatgcttgaccacctacgccctggcgacgttgtgacagtgaccaggctagaccgcctggcccgcagcacccgcgacctactggacattgccgagcgcatccaggaggccggcgcgggcctgcgtagcctggcagagccgtgggccgacaccaccacgccggccggccgcatggtgttgaccgtgttcgccggcattgccgagttcgagcgttccctaatcatcgaccgcacccggagcgggcgcgaggccgccaaggcccgaggcgtgaagtttggcccccgccctaccctcaccccggcacagatcgcgcacgcccgcgagctgatcgaccaggaaggccgcaccgtgaaagaggcggctgcactgcttggcgtgcatcgctcgaccctgtaccgcgcacttgagcgcagcgaggaagtgacgcccaccgaggccaggcggcgcggtgccttccgtgaggacgcattgaccgaggccgacgccctggcggccgccgagaatgaacgccaagaggaacaagcatgaaaccgcaccaggacggccaggacgaaccgtttttcattaccgaagagatcgaggcggagatgatcgcggccgggtacgtgttcgagccgcccgcgcacgtctcaaccgtgcggctgcatgaaatcctggccggtttgtctgatgccaagctggcggcctggccggccagcttggccgctgaagaaaccgagcgccgccgtctaaaaaggtgatgtgtatttgagtaaaacagcttgcgtcatgcggtcgctgcgtatatgatgcgatgagtaaataaacaaatacgcaaggggaacgcatgaaggttatcgctgtacttaaccagaaaggcgggtcaggcaagacgaccatcgcaacccatctagcccgcgccctgcaactcgccggggccgatgttctgttagtcgattccgatccccagggcagtgcccgcgattgggcggccgtgcgggaagatcaaccgctaaccgttgtcggcatcgaccgcccgacgattgaccgcgacgtgaaggccatcggccggcgcgacttcgtagtgatcgacggagcgccccaggcggcggacttggctgtgtccgcgatcaaggcagccgacttcgtgctgattccggtgcagccaagcccttacgacatatgggccaccgccgacctggtggagctggttaagcagcgcattgaggtcacggatggaaggctacaagcggcctttgtcgtgtcgcgggcgatcaaaggcacgcgcatcggcggtgaggttgccgaggcgctggccgggtacgagctgcccattcttgagtcccgtatcacgcagcgcgtgagctacccaggcactgccgccgccggcacaaccgttcttgaatcagaacccgagggcgacgctgcccgcgaggtccaggcgctggccgctgaaattaaatcaaaactcatttgagttaatgaggtaaagagaaaatgagcaaaagcacaaacacgctaagtgccggccgtccgagcgcacgcagcagcaaggctgcaacgttggccagcctggcagacacgccagccatgaagcgggtcaactttcagttgccggcggaggatcacaccaagctgaagatgtacgcggtacgccaaggcaagaccattaccgagctgctatctgaatacatcgcgcagctaccagagtaaatgagcaaatgaataaatgagtagatgaattttagcggctaaaggaggcggcatggaaaatcaagaacaaccaggcaccgacgccgtggaatgccccatgtgtggaggaacgggcggttggccaggcgtaagcggctgggttgcctgccggccctgcaatggcactggaacccccaagcccgaggaatcggcgtgagcggtcgcaaaccatccggcccggtacaaatcggcgcggcgctgggtgatgacctggtggagaagttgaaggccgcgcaggccgcccagcggcaacgcatcgaggcagaagcacgccccggtgaatcgtggcaagcggccgctgatcgaatccgcaaagaatcccggcaaccgccggcagccggtgcgccgtcgattaggaagccgcccaagggcgacgagcaaccagattttttcgttccgatgctctatgacgtgggcacccgcgatagtcgcagcatcatggacgtggccgttttccgtctgtcgaagcgtgaccgacgagctggcgaggtgatccgctacgagcttccagacgggcacgtagaggtttccgcagggccggccggcatggccagtgtgtgggattacgacctggtactgatggcggtttcccatctaaccgaatccatgaaccgataccgggaagggaagggagacaagcccggccgcgtgttccgtccacacgttgcggacgtactcaagttctgccggcgagccgatggcggaaagcagaaagacgacctggtagaaacctgcattcggttaaacaccacgcacgttgccatgcagcgtacgaagaaggccaagaacggccgcctggtgacggtatccgagggtgaagccttgattagccgctacaagatcgtaaagagcgaaaccgggcggccggagtacatcgagatcgagctagctgattggatgtaccgcgagatcacagaaggcaagaacccggacgtgctgacggttcaccccgattactttttgatcgatcccggcatcggccgttttctctaccgcctggcacgccgcgccgcaggcaaggcagaagccagatggttgttcaagacgatctacgaacgcagtggcagcgccggagagttcaagaagttctgtttcaccgtgcgcaagctgatcgggtcaaatgacctgccggagtacgatttgaaggaggaggcggggcaggctggcccgatcctagtcatgcgctaccgcaacctgatcgagggcgaagcatccgccggttcctaatgtacggagcagatgctagggcaaattgccctagcaggggaaaaaggtcgaaaaggtctctttcctgtggatagcacgtacattgggaacccaaagccgtacattgggaaccggaacccgtacattgggaacccaaagccgtacattgggaaccggtcacacatgtaagtgactgatataaaagagaaaaaaggcgatttttccgcctaaaactctttaaaacttattaaaactcttaaaacccgcctggcctgtgcataactgtctggccagcgcacagccgaagagctgcaaaaagcgcctacccttcggtcgctgcgctccctacgccccgccgcttcgcgtcggcctatcgcggccgctggccgctcaaaaatggctggcctacggccaggcaatctaccagggcgcggacaagccgcgccgtcgccactcgaccgccggcgcccacatcaaggcaccctgcctcgcgcgtttcggtgatgacggtgaaaacctctgacacatgcagctcccggagacggtcacagcttgtctgtaagcggatgccgggagcagacaagcccgtcagggcgcgtcagcgggtgttggcgggtgtcggggcgcagccatgacccagtcacgtagcgatagcggagtgtatactggcttaactatgcggcatcagagcagattgtactgagagtgcaccatatgcggtgtgaaataccgcacagatgcgtaaggagaaaataccgcatcaggcgctcttccgcttcctcgctcactgactcgctgcgctcggtcgttcggctgcggcgagcggtatcagctcactcaaaggcggtaatacggttatccacagaatcaggggataacgcaggaaagaacatgtgagcaaaaggccagcaaaaggccaggaaccgtaaaaaggccgcgttgctggcgtttttccataggctccgcccccctgacgagcatcacaaaaatcgacgctcaagtcagaggtggcgaaacccgacaggactataaagataccaggcgtttccccctggaagctccctcgtgcgctctcctgttccgaccctgccgcttaccggatacctgtccgcctttctcccttcgggaagcgtggcgctttctcatagctcacgctgtaggtatctcagttcggtgtaggtcgttcgctccaagctgggctgtgtgcacgaaccccccgttcagcccgaccgctgcgccttatccggtaactatcgtcttgagtccaacccggtaagacacgacttatcgccactggcagcagccactggtaacaggattagcagagcgaggtatgtaggcggtgctacagagttcttgaagtggtggcctaactacggctacactagaaggacagtatttggtatctgcgctctgctgaagccagttaccttcggaaaaagagttggtagctcttgatccggcaaacaaaccaccgctggtagcggtggtttttttgtttgcaagcagcagattacgcgcagaaaaaaaggatctcaagaagatcctttgatcttttctacggggtctgacgctcagtggaacgaaaactcacgttaagggattttggtcatgcattctaggtactaaaacaattcatccagtaaaatataatattttattttctcccaatcaggcttgatccccagtaagtcaaaaaatagctcgacatactgttcttccccgatatcctccctgatcgaccggacgcagaaggcaatgtcataccacttgtccgccctgccgcttctcccaagatcaataaagccacttactttgccatctttcacaaagatgttgctgtctcccaggtcgccgtgggaaaagacaagttcctcttcgggcttttccgtctttaaaaaatcatacagctcgcgcggatctttaaatggagtgtcttcttcccagttttcgcaatccacatcggccagatcgttattcagtaagtaatccaattcggctaagcggctgtctaagctattcgtatagggacaatccgatatgtcgatggagtgaaagagcctgatgcactccgcatacagctcgataatcttttcagggctttgttcatcttcatactcttccgagcaaaggacgccatcggcctcactcatgagcagattgctccagccatcatgccgttcaaagtgcaggacctttggaacaggcagctttccttccagccatagcatcatgtccttttcccgttccacatcataggtggtccctttataccggctgtccgtcatttttaaatataggttttcattttctcccaccagcttatataccttagcaggagacattccttccgtatcttttacgcagcggtatttttcgatcagttttttcaattccggtgatattctcattttagccatttattatttccttcctcttttctacagtatttaaagataccccaagaagctaattataacaagacgaactccaattcactgttccttgcattctaaaaccttaaataccagaaaacagctttttcaaagttgttttcaaagttggcgtataacatagtatcgacggagccgattttgaaaccgcggtgatcacaggcagcaacgctctgtcatcgttacaatcaacatgctaccctccgcgagatcatccgtgtttcaaacccggcagcttagttgccgttcttccgaatagcatcggtaacatgagcaaagtctgccgccttacaacggctctcccgctgacgccgtcccggactgatgggctgcctgtatcgagtggtgattttgtgccgagctgccggtcggggagctgttggctggctggtggcaggatatattgtggtgtaaacaaattgacgcttagacaacttaataacacattgcggacgtttttaatgtactgaattaacgccgaattaa

SEQ ID NO: 52 - DNA, 9007 bp, Artificial Sequence
  plasmid VC-MME464-1qcz
  5'UTR (1666)..(1830)
  transit_peptide (1831)..(1938)
  CDS (1831)..(1938)
  transit_peptide (2016)..(2084)
  CDS (2016)..(2084)
  CDS (2085)..(2093): adapter
gctttgggcggatcctctagaggacaatcagtaaattgaacggagaatattattcataaaaatacgatagtaacgggtgatatattcattagaatgaaccgaaaccggcggtaaggatctgagctacacatgctcaggttttttacaacgtgcacaacagaattgaaagcaaatatcatgcgatcataggcgtctcgcatatctcattaaagcagggcatgccggtcgagtcaaatctcggtgacgggcaggaccggacggggcggtaccggcaggctgaagtccagctgccagaaacccacgtcatgccagttcccgtgcttgaagccggccgcccgcagcatgccgcggggggcatatccgagcgcctcgtgcatgcgcacgctcgggtcgttgggcagcccgatgacagcgaccacgctcttgaagccctgtgcctccagggacttcagcaggtgggtgtagagcgtggagcccagtcccgtccgctggtggcggggggagacgtacacggtcgactcggccgtccagtcgtaggcgttgcgtgccttccaggggcccgcgtaggcgatgccggcgacctcgccgtccacctcggcgacgagccagggatagcgctcccgcagacggacgaggtcgtccgtccactcctgcggttcctgcggctcggtacggaagttgaccgtgcttgtctcgatgtagtggttgacgatggtgcagaccgccggcatgtccgcctcggtggcacggcggatgtcggccgggcgtcgttctgggctcatggtagactcgacggatccacgtgtggaagatatgaatttttttgagaaactagataagattaatgaatatcggtgttttggttttttcttgtggccgtctttgtttatattgagatttttcaaatcagtgcgcaagacgtgacgtaagtatccgagtcagtttttatttttctactaatttggtcgaatctagactgcagcaaatttacacattgccactaaacgtctaaacccttgtaatttgtttttgttttactatgtgtgttatgtatttgatttgcgataaatttttatatttggtactaaatttataacaccttttatgctaacgtttgccaacacttagcaatttgcaagttgattaattgattctaaattatttttgtcttctaaatacatatactaatcaactggaaatgtaaatatttgctaatatttctactataggagaattaaagtgagtgaatatggtaccacaaggtttggagatttaattgttgcaatgctgcatggatggcatatacaccaaacattcaataattcttgaggataataatggtaccacacaagatttgaggtgcatgaacgtcacgtggacaaaaggtttagtaatttttcaagacaacaatgttaccacacacaagttttgaggtgcatgcatggatgccctgtggaaagtttaaaaatattttggaaatgatttgcatggaagccatgtgtaaaaccatgacatccacttggaggatgcaataatgaagaaaactacaaatttacatgcaactagttatgcatgtagtctatataatgaggattttgcaatactttcattcatacacactcactaagttttacacgattataatttcttcatagccacccaaacgcataaacttatcttcatagttgccactccaatttgctccttgaatctcctccacccaatacataatccactcctccatcacccacttcactactaaatcaaacttaactctgtttttctctctcctcctttcatttcttattcttccaatcatcgtactccgccatgaccaccgctgtcaccgccgctgtttctttcccctctaccaaaaccacctctctctccgcccgaagctcctccgtcatttcccctgacaaaatcagctacaaaaaggtgattcccaatttcactgtgttttttattaataatttgttattttgatgatgagatgattaatttgggtgctgcaggttcctttgtactacaggaatgtatctgcaactgggaaaatgggacccatcagggcccagatcgcctcttgctcttccatggcaatgattaattaacgaagagcaagagctcgaatttccccgatcgttcaaacatttggcaataaagtttcttaagattgaatcctgttgccggtcttgcgatgattatcatataatttctgttgaattacgttaagcatgtaataattaacatgtaatgcatgacgttatttatgagatgggtttttatgattagagtcccgcaattatacatttaatacgcgatagaaaacaaaatatagcgcgcaaactaggataaattatcgcgcgcggtgtcatctatgttactagatcgggaattggcatgcaagcttggcactggccgtcgttttacaacgtcgtgactgggaaaaccctggcgttacccaacttaatcgccttgcagcacatccccctttcgccagctggcgtaatagcgaagaggcccgcaccgatcgcccttcccaacagttgcgcagcctgaatggcgaatgctagagcagcttgagcttggatcagattgtcgtttcccgccttcagtttaaactatcagtgtttgacaggatatattggcgggtaaacctaagagaaaagagcgtttattagaataatcggatatttaaaagggcgtgaaaaggtttatccgttcgtccatttgtatgtgcatgccaaccacagggttcccctcgggatcaaagtactttgatccaacccctccgctgctatagtgcagtcggcttctgacgttcagtgcagccgtcttctgaaaacgacatgtcgcacaagtcctaagttacgcgacaggctgccgccctgcccttttcctggcgttttcttgtcgcgtgttttagtcgcataaagtagaatacttgcgactagaaccggagacattacgccatgaacaagagcgccgccgctggcctgctgggctatgcccgcgtcagcaccgacgaccaggacttgaccaaccaacgggccgaactgcacgcggccggctgcaccaagctgttttccgagaagatcaccggcaccaggcgcgaccgcccggagctggccaggatgcttgaccacctacgccctggcgacgttgtgacagtgaccaggctagaccgcctggcccgcagcacccgcgacctactggacattgccgagcgcatccaggaggccggcgcgggcctgcgtagcctggcagagccgtgggccgacaccaccacgccggccggccgcatggtgttgaccgtgttcgccggcattgccgagttcgagcgttccctaatcatcgaccgcacccggagcgggcgcgaggccgccaaggcccgaggcgtgaagtttggcccccgccctaccctcaccccggcacagatcgcgcacgcccgcgagctgatcgaccaggaaggccgcaccgtgaaagaggcggctgcactgcttggcgtgcatcgctcgaccctgtaccgcgcacttgagcgcagcgaggaagtgacgcccaccgaggccaggcggcgcggtgccttccgtgaggacgcattgaccgaggccgacgccctggcggccgccgagaatgaacgccaagaggaacaagcatgaaaccgcaccaggacggccaggacgaaccgtttttcattaccgaagagatcgaggcggagatgatcgcggccgggtacgtgttcgagccgcccgcgcacgtctcaaccgtgcggctgcatgaaatcctggccggtttgtctgatgccaagctggcggcctggccggccagcttggccgctgaagaaaccgagcgccgccgtctaaaaaggtgatgtgtatttgagtaaaacagcttgcgtcatgcggtcgctgcgtatatgatgcgatgagtaaataaacaaatacgcaaggggaacgcatgaaggttatcgctgtacttaaccagaaaggcgggtcaggcaagacgaccatcgcaacccatctagcccgcgccctgcaactcgccggggccgatgttctgttagtcgattccgatccccagggcagtgcccgcgattgggcggccgtgcgggaagatcaaccgctaaccgttgtcggcatcgaccgcccgacgattgaccgcgacgtgaaggccatcggccggcgcgacttcgtagtgatcgacggagcgccccaggcggcggacttggctgtgtccgcgatcaaggcagccgacttcgtgctgattccggtgcagccaagcccttacgacatatgggccaccgccgacctggtggagctggttaagcagcgcattgaggtcacggatggaaggctacaagcggcctttgtcgtgtcgcgggcgatcaaaggcacgcgcatcggcggtgaggttgccgaggcgctggccgggtacgagctgcccattcttgagtcccgtatcacgcagcgcgtgagctacccaggcactgccgccgccggcacaaccgttcttgaatcagaacccgagggcgacgctgcccgcgaggtccaggcgctggccgctgaaattaaatcaaaactcatttgagttaatgaggtaaagagaaaatgagcaaaagcacaaacacgctaagtgccggccgtccgagcgcacgcagcagcaaggctgcaacgttggccagcctggcagacacgccagccatgaagcgggtcaactttcagttgccggcggaggatcacaccaagctgaagatgtacgcggtacgccaaggcaagaccattaccgagctgctatctgaatacatcgcgcagctaccagagtaaatgagcaaatgaataaatgagtagatgaattttagcggctaaaggaggcggcatggaaaatcaagaacaaccaggcaccgacgccgtggaatgccccatgtgtggaggaacgggcggttggccaggcgtaagcggctgggttgcctgccggccctgcaatggcactggaacccccaagcccgaggaatcggcgtgagcggtcgcaaaccatccggcccggtacaaatcggcgcggcgctgggtgatgacctggtggagaagttgaaggccgcgcaggccgcccagcggcaacgcatcgaggcagaagcacgccccggtgaatcgtggcaagcggccgctgatcgaatccgcaaagaatcccggcaaccgccggcagccggtgcgccgtcgattaggaagccgcccaagggcgacgagcaaccagattttttcgttccgatgctctatgacgtgggcacccgcgatagtcgcagcatcatggacgtggccgttttccgtctgtcgaagcgtgaccgacgagctggcgaggtgatccgctacgagcttccagacgggcacgtagaggtttccgcagggccggccggcatggccagtgtgtgggattacgacctggtactgatggcggtttcccatctaaccgaatccatgaaccgataccgggaagggaagggagacaagcccggccgcgtgttccgtccacacgttgcggacgtactcaagttctgccggcgagccgatggcggaaagcagaaagacgacctggtagaaacctgcattcggttaaacaccacgcacgttgccatgcagcgtacgaagaaggccaagaacggccgcctggtgacggtatccgagggtgaagccttgattagccgctacaagatcgtaaagagcgaaaccgggcggccggagtacatcgagatcgagctagctgattggatgtaccgcgagatcacagaaggcaagaacccggacgtgctgacggttcaccccgattactttttgatcgatcccggcatcggccgttttctctaccgcctggcacgccgcgccgcaggcaaggcagaagccagatggttgttcaagacgatctacgaacgcagtggcagcgccggagagttcaagaagttctgtttcaccgtgcgcaagctgatcgggtcaaatgacctgccggagtacgatttgaaggaggaggcggggcaggctggcccgatcctagtcatgcgctaccgcaacctgatcgagggcgaagcatccgccggttcctaatgtacggagcagatgctagggcaaattgccctagcaggggaaaaaggtcgaaaaggtctctttcctgtggatagcacgtacattgggaacccaaagccgtacattgggaaccggaacccgtacattgggaacccaaagccgtacattgggaaccggtcacacatgtaagtgactgatataaaagagaaaaaaggcgatttttccgcctaaaactctttaaaacttattaaaactcttaaaacccgcctggcctgtgcataactgtctggccagcgcacagccgaagagctgcaaaaagcgcctacccttcggtcgctgcgctccctacgccccgccgcttcgcgtcggcctatcgcggccgctggccgctcaaaaatggctggcctacggccaggcaatctaccagggcgcggacaagccgcgccgtcgccactcgaccgccggcgcccacatcaaggcaccctgcctcgcgcgtttcggtgatgacggtgaaaacctctgacacatgcagctcccggagacggtcacagcttgtctgtaagcggatgccgggagcagacaagcccgtcagggcgcgtcagcgggtgttggcgggtgtcggggcgcagccatgacccagtcacgtagcgatagcggagtgtatactggcttaactatgcggcatcagagcagattgtactgagagtgcaccatatgcggtgtgaaataccgcacagatgcgtaaggagaaaataccgcatcaggcgctcttccgcttcctcgctcactgactcgctgcgctcggtcgttcggctgcggcgagcggtatcagctcactcaaaggcggtaatacggttatccacagaatcaggggataacgcaggaaagaacatgtgagcaaaaggccagcaaaaggccaggaaccgtaaaaaggccgcgttgctggcgtttttccataggctccgcccccctgacgagcatcacaaaaatcgacgctcaagtcagaggtggcgaaacccgacaggactataaagataccaggcgtttccccctggaagctccctcgtgcgctctcctgttccgaccctgccgcttaccggatacctgtccgcctttctcccttcgggaagcgtggcgctttctcatagctcacgctgtaggtatctcagttcggtgtaggtcgttcgctccaagctgggctgtgtgcacgaaccccccgttcagcccgaccgctgcgccttatccggtaactatcgtcttgagtccaacccggtaagacacgacttatcgccactggcagcagccactggtaacaggattagcagagcgaggtatgtaggcggtgctacagagttcttgaagtggtggcctaactacggctacactagaaggacagtatttggtatctgcgctctgctgaagccagttaccttcggaaaaagagttggtagctcttgatccggcaaacaaaccaccgctggtagcggtggtttttttgtttgcaagcagcagattacgcgcagaaaaaaaggatctcaagaagatcctttgatcttttctacggggtctgacgctcagtggaacgaaaactcacgttaagggattttggtcatgcattctaggtactaaaacaattcatccagtaaaatataatattttattttctcccaatcaggcttgatccccagtaagtcaaaaaatagctcgacatactgttcttccccgatatcctccctgatcgaccggacgcagaaggcaatgtcataccacttgtccgccctgccgcttctcccaagatcaataaagccacttactttgccatctttcacaaagatgttgctgtctcccaggtcgccgtgggaaaagacaagttcctcttcgggcttttccgtctttaaaaaatcatacagctcgcgcggatctttaaatggagtgtcttcttcccagttttcgcaatccacatcggccagatcgttattcagtaagtaatccaattcggctaagcggctgtctaagctattcgtatagggacaatccgatatgtcgatggagtgaaagagcctgatgcactccgcatacagctcgataatcttttcagggctttgttcatcttcatactcttccgagcaaaggacgccatcggcctcactcatgagcagattgctccagccatcatgccgttcaaagtgcaggacctttggaacaggcagctttccttccagccatagcatcatgtccttttcccgttccacatcataggtggtccctttataccggctgtccgtcatttttaaatataggttttcattttctcccaccagcttatataccttagcaggagacattccttccgtatcttttacgcagcggtatttttcgatcagttttttcaattccggtgatattctcattttagccatttattatttccttcctcttttctacagtatttaaagataccccaagaagctaattataacaagacgaactccaattcactgttccttgcattctaaaaccttaaataccagaaaacagctttttcaaagttgttttcaaagttggcgtataacatagtatcgacggagccgattttgaaaccgcggtgatcacaggcagcaacgctctgtcatcgttacaatcaacatgctaccctccgcgagatcatccgtgtttcaaacccggcagcttagttgccgttcttccgaatagcatcggtaacatgagcaaagtctgccgccttacaacggctctcccgctgacgccgtcccggactgatgggctgcctgtatcgagtggtgattttgtgccgagctgccggtcggggagctgttggctggctggtggcaggatatattgtggtgtaaacaaattgacgcttagacaacttaataacacattgcggacgtttttaatgtactgaattaacgccgaattaa

SEQ ID NO: 53 - protein, 62 aa, Artificial Sequence; identical to SEQ ID NO: 43
  Synthetic Construct

SEQ ID NO: 54 - DNA, 8678 bp, Artificial Sequence
  plasmid VC-MME465-1qcz
  transit_peptide (1666)..(1755)
  CDS (1666)..(1755)
  CDS (1756)..(1764): adapter
gctttgggcggatcctctagaggacaatcagtaaattgaacggagaatattattcataaaaatacgatagtaacgggtgatatattcattagaatgaaccgaaaccggcggtaaggatctgagctacacatgctcaggttttttacaacgtgcacaacagaattgaaagcaaatatcatgcgatcataggcgtctcgcatatctcattaaagcagggcatgccggtcgagtcaaatctcggtgacgggcaggaccggacggggcggtaccggcaggctgaagtccagctgccagaaacccacgtcatgccagttcccgtgcttgaagccggccgcccgcagcatgccgcggggggcatatccgagcgcctcgtgcatgcgcacgctcgggtcgttgggcagcccgatgacagcgaccacgctcttgaagccctgtgcctccagggacttcagcaggtgggtgtagagcgtggagcccagtcccgtccgctggtggcggggggagacgtacacggtcgactcggccgtccagtcgtaggcgttgcgtgccttccaggggcccgcgtaggcgatgccggcgacctcgccgtccacctcggcgacgagccagggatagcgctcccgcagacggacgaggtcgtccgtccactcctgcggttcctgcggctcggtacggaagttgaccgtgcttgtctcgatgtagtggttgacgatggtgcagaccgccggcatgtccgcctcggtggcacggcggatgtcggccgggcgtcgttctgggctcatggtagactcgacggatccacgtgtggaagatatgaatttttttgagaaactagataagattaatgaatatcggtgttttggttttttcttgtggccgtctttgtttatattgagatttttcaaatcagtgcgcaagacgtgacgtaagtatccgagtcagtttttatttttctactaatttggtcgaatctagactgcagcaaatttacacattgccactaaacgtctaaacccttgtaatttgtttttgttttactatgtgtgttatgtatttgatttgcgataaatttttatatttggtactaaatttataacaccttttatgctaacgtttgccaacacttagcaatttgcaagttgattaattgattctaaattatttttgtcttctaaatacatatactaatcaactggaaatgtaaatatttgctaatatttctactataggagaattaaagtgagtgaatatggtaccacaaggtttggagatttaattgttgcaatgctgcatggatggcatatacaccaaacattcaataattcttgaggataataatggtaccacacaagatttgaggtgcatgaacgtcacgtggacaaaaggtttagtaatttttcaagacaacaatgttaccacacacaagttttgaggtgcatgcatggatgccctgtggaaagtttaaaaatattttggaaatgatttgcatggaagccatgtgtaaaaccatgacatccacttggaggatgcaataatgaagaaaactacaaatttacatgcaactagttatgcatgtagtctatataatgaggattttgcaatactttcattcatacacactcactaagttttacacgattataatttcttcatagccacccaaacatgcagaggtttttctccgccagatcgattctcggttacgccgtcaagacgcggaggaggtctttctcttctcgttcttcgtctctcctttgctcttccatggcaatgattaattaacgaagagcaagagctcgaatttccccgatcgttcaaacatttggcaataaagtttcttaagattgaatcctgttgccggtcttgcgatgattatcatataatttctgttgaattacgttaagcatgtaataattaacatgtaatgcatgacgttatttatgagatgggtttttatgattagagtcccgcaattatacatttaatacgcgatagaaaacaaaatatagcgcgcaaactaggataaattatcgcgcgcggtgtcatctatgttactagatcgggaattggcatgcaagcttggcactggccgtcgttttacaacgtcgtgactgggaaaaccctggcgttacccaacttaatcgccttgcagcacatccccctttcgccagctggcgtaatagcgaagaggcccgcaccgatcgcccttcccaacagttgcgcagcctgaatggcgaatgctagagcagcttgagcttggatcagattgtcgtttcccgccttcagtttaaactatcagtgtttgacaggatatattggcgggtaaacctaagagaaaagagcgtttattagaataatcggatatttaaaagggcgtgaaaaggtttatccgttcgtccatttgtatgtgcatgccaaccacagggttcccctcgggatcaaagtactttgatccaacccctccgctgctatagtgcagtcggcttctgacgttcagtgcagccgtcttctgaaaacgacatgtcgcacaagtcctaagttacgcgacaggctgccgccctgcccttttcctggcgttttcttgtcgcgtgttttagtcgcataaagtagaatacttgcgactagaaccggagacattacgccatgaacaagagcgccgccgctggcctgctgggctatgcccgcgtcagcaccgacgaccaggacttgaccaaccaacgggccgaactgcacgcggccggctgcaccaagctgttttccgagaagatcaccggcaccaggcgcgaccgcccggagctggccaggatgcttgaccacctacgccctggcgacgttgtgacagtgaccaggctagaccgcctggcccgcagcacccgcgacctactggacattgccgagcgcatccaggaggccggcgcgggcctgcgtagcctggcagagccgtgggccgacaccaccacgccggccggccgcatggtgttgaccgtgttcgccggcattgccgagttcgagcgttccctaatcatcgaccgcacccggagcgggcgcgaggccgccaaggcccgaggcgtgaagtttggcccccgccctaccctcaccccggcacagatcgcgcacgcccgcgagctgatcgaccaggaaggccgcaccgtgaaagaggcggctgcactgcttggcgtgcatcgctcgaccctgtaccgcgcacttgagcgcagcgaggaagtgacgcccaccgaggccaggcggcgcggtgccttccgtgaggacgcattgaccgaggccgacgccctggcggccgccgagaatgaacgccaagaggaacaagcatgaaaccgcaccaggacggccaggacgaaccgtttttcattaccgaagagatcgaggcggagatgatcgcggccgggtacgtgttcgagccgcccgcgcacgtctcaaccgtgcggctgcatgaaatcctggccggtttgtctgatgccaagctggcggcctggccggccagcttggccgctgaagaaaccgagcgccgccgtctaaaaaggtgatgtgtatttgagtaaaacagcttgcgtcatgcggtcgctgcgtatatgatgcgatgagtaaataaacaaatacgcaaggggaacgcatgaaggttatcgctgtacttaaccagaaaggcgggtcaggcaagacgaccatcgcaacccatctagcccgcgccctgcaactcgccggggccgatgttctgttagtcgattccgatccccagggcagtgcccgcgattgggcggccgtgcgggaagatcaaccgctaaccgttgtcggcatcgaccgcccgacgattgaccgcgacgtgaaggccatcggccggcgcgacttcgtagtgatcgacggagcgccccaggcggcggacttggctgtgtccgcgatcaaggcagccgacttcgtgctgattccggtgcagccaagcccttacgacatatgggccaccgccgacctggtggagctggttaagcagcgcattgaggtcacggatggaaggctacaagcggcctttgtcgtgtcgcgggcgatcaaaggcacgcgcatcggcggtgaggttgccgaggcgctggccgggtacgagctgcccattcttgagtcccgtatcacgcagcgcgtgagctacccaggcactgccgccgccggcacaaccgttcttgaatcagaacccgagggcgacgctgcccgcgaggtccaggcgctggccgctgaaattaaatcaaaactcatttgagttaatgaggtaaagagaaaatgagcaaaagcacaaacacgctaagtgccggccgtccgagcgcacgcagcagcaaggctgcaacgttggccagcctggcagacacgccagccatgaagcgggtcaactttcagttgccggcggaggatcacaccaagctgaagatgtacgcggtacgccaaggcaagaccattaccgagctgctatctgaatacatcgcgcagctaccagagtaaatgagcaaatgaataaatgagtagatgaattttagcggctaaaggaggcggcatggaaaatcaagaacaaccaggcaccgacgccgtggaatgccccatgtgtggaggaacgggcggttggccaggcgtaagcggctgggttgcctgccggccctgcaatggcactggaacccccaagcccgaggaatcggcgtgagcggtcgcaaaccatccggcccggtacaaatcggcgcggcgctgggtgatgacctggtggagaagttgaaggccgcgcaggccgcccagcggcaacgcatcgaggcagaagcacgccccggtgaatcgtggcaagcggccgctgatcgaatccgcaaagaatcccggcaaccgccggcagccggtgcgccgtcgattaggaagccgcccaagggcgacgagcaaccagattttttcgttccgatgctctatgacgtgggcacccgcgatagtcgcagcatcatggacgtggccgttttccgtctgtcgaagcgtgaccgacgagctggcgaggtgatccgctacgagcttccagacgggcacgtagaggtttccgcagggccggccggcatggccagtgtgtgggattacgacctggtactgatggcggtttcccatctaaccgaatccatgaaccgataccgggaagggaagggagacaagcccggccgcgtgttccgtccacacgttgcggacgtactcaagttctgccggcgagccgatggcggaaagcagaaagacgacctggtagaaacctgcattcggttaaacaccacgcacgttgccatgcagcgtacgaagaaggccaagaacggccgcctggtgacggtatccgagggtgaagccttgattagccgctacaagatcgtaaagagcgaaaccgggcggccggagtacatcgagatcgagctagctgattggatgtaccgcgagatcacagaaggcaagaacccggacgtgctgacggttcaccccgattactttttgatcgatcccggcatcggccgttttctctaccgcctggcacgccgcgccgcaggcaaggcagaagccagatggttgttcaagacgatctacgaacgcagtggcagcgccggagagttcaagaagttctgtttcaccgtgcgcaagctgatcgggtcaaatgacctgccggagtacgatttgaaggaggaggcggggcaggctggcccgatcctagtcatgcgctaccgcaacctgatcgagggcgaagcatccgccggttcctaatgtacggagcagatgctagggcaaattgccctagcaggggaaaaaggtcgaaaaggtctctttcctgtggatagcacgtacattgggaacccaaagccgtacattgggaaccggaacccgtacattgggaacccaaagccgtacattgggaaccggtcacacatgtaagtgactgatataaaagagaaaaaaggcgatttttccgcctaaaactctttaaaacttattaaaactcttaaaacccgcctggcctgtgcataactgtctggccagcgcacagccgaagagctgcaaaaagcgcctacccttcggtcgctgcgctccctacgccccgccgcttcgcgtcggcctatcgcggccgctggccgctcaaaaatggctggcctacggccaggcaatctaccagggcgcggacaagccgcgccgtcgccactcgaccgccggcgcccacatcaaggcaccctgcctcgcgcgtttcggtgatgacggtgaaaacctctgacacatgcagctcccggagacggtcacagcttgtctgtaagcggatgccgggagcagacaagcccgtcagggcgcgtcagcgggtgttggcgggtgtcggggcgcagccatgacccagtcacgtagcgatagcggagtgtatactggcttaactatgcggcatcagagcagattgtactgagagtgcaccatatgcggtgtgaaataccgcacagatgcgtaaggagaaaataccgcatcaggcgctcttccgcttcctcgctcactgactcgctgcgctcggtcgttcggctgcggcgagcggtatcagctcactcaaaggcggtaatacggttatccacagaatcaggggataacgcaggaaagaacatgtgagcaaaaggccagcaaaaggccaggaaccgtaaaaaggccgcgttgctggcgtttttccataggctccgcccccctgacgagcatcacaaaaatcgacgctcaagtcagaggtggcgaaacccgacaggactataaagataccaggcgtttccccctggaagctccctcgtgcgctctcctgttccgaccctgccgcttaccggatacctgtccgcctttctcccttcgggaagcgtggcgctttctcatagctcacgctgtaggtatctcagttcggtgtaggtcgttcgctccaagctgggctgtgtgcacgaaccccccgttcagcccgaccgctgcgccttatccggtaactatcgtcttgagtccaacccggtaagacacgacttatcgccactggcagcagccactggtaacaggattagcagagcgaggtatgtaggcggtgctacagagttcttgaagtggtggcctaactacggctacactagaaggacagtatttggtatctgcgctctgctgaagccagttaccttcggaaaaagagttggtagctcttgatccggcaaacaaaccaccgctggtagcggtggtttttttgtttgcaagcagcagattacgcgcagaaaaaaaggatctcaagaagatcctttgatcttttctacggggtctgacgctcagtggaacgaaaactcacgttaagggattttggtcatgcattctaggtactaaaacaattcatccagtaaaatataatattttattttctcccaatcaggcttgatccccagtaagtcaaaaaatagctcgacatactgttcttccccgatatcctccctgatcgaccggacgcagaaggcaatgtcataccacttgtccgccctgccgcttctcccaagatcaataaagccacttactttgccatctttcacaaagatgttgctgtctcccaggtcgccgtgggaaaagacaagttcctcttcgggcttttccgtctttaaaaaatcatacagctcgcgcggatctttaaatggagtgtcttcttcccagttttcgcaatccacatcggccagatcgttattcagtaagtaatccaattcggctaagcggctgtctaagctattcgtatagggacaatccgatatgtcgatggagtgaaagagcctgatgcactccgcatacagctcgataatcttttcagggctttgttcatcttcatactcttccgagcaaaggacgccatcggcctcactcatgagcagattgctccagccatcatgccgttcaaagtgcaggacctttggaacaggcagctttccttccagccatagcatcatgtccttttcccgttccacatcataggtggtccctttataccggctgtccgtcatttttaaatataggttttcattttctcccaccagcttatataccttagcaggagacattccttccgtatcttttacgcagcggtatttttcgatcagttttttcaattccggtgatattctcattttagccatttattatttccttcctcttttctacagtatttaaagataccccaagaagctaattataacaagacgaactccaattcactgttccttgcattctaaaaccttaaataccagaaaacagctttttcaaagttgttttcaaagttggcgtataacatagtatcgacggagccgattttgaaaccgcggtgatcacaggcagcaacgctctgtcatcgttacaatcaacatgctaccctccgcgagatcatccgtgtttcaaacccggcagcttagttgccgttcttccgaatagcatcggtaacatgagcaaagtctgccgccttacaacggctctcccgctgacgccgtcccggactgatgggctgcctgtatcgagtggtgattttgtgccgagctgccggtcggggagctgttggctggctggtggcaggatatattgtggtgtaaacaaattgacgcttagacaacttaataacacattgcggacgtttttaatgtactgaattaacgccgaattaa

SEQ ID NO: 55 - protein, 33 aa, Artificial Sequence; identical to SEQ ID NO: 45
  Synthetic Construct

SEQ ID NO: 56 - DNA, 9043 bp, Artificial Sequence
  plasmid VC-MME489-1QCZ
agctttgggcggatcctctagaggacaatcagtaaattgaacggagaatattattcataaaaatacgatagtaacgggtgatatattcattagaatgaaccgaaaccggcggtaaggatctgagctacacatgctcaggttttttacaacgtgcacaacagaattgaaagcaaatatcatgcgatcataggcgtctcgcatatctcattaaagcagggcatgccggtcgagtcaaatctcggtgacgggcaggaccggacggggcggtaccggcaggctgaagtccagctgccagaaacccacgtcatgccagttcccgtgcttgaagccggccgcccgcagcatgccgcggggggcatatccgagcgcctcgtgcatgcgcacgctcgggtcgttgggcagcccgatgacagcgaccacgctcttgaagccctgtgcctccagggacttcagcaggtgggtgtagagcgtggagcccagtcccgtccgctggtggcggggggagacgtacacggtcgactcggccgtccagtcgtaggcgttgcgtgccttccaggggcccgcgtaggcgatgccggcgacctcgccgtccacctcggcgacgagccagggatagcgctcccgcagacggacgaggtcgtccgtccactcctgcggttcctgcggctcggtacggaagttgaccgtgcttgtctcgatgtagtggttgacgatggtgcagaccgccggcatgtccgcctcggtggcacggcggatgtcggccgggcgtcgttctgggctcatggtagactcgacggatccacgtgtggaagatatgaatttttttgagaaactagataagattaatgaatatcggtgttttggttttttcttgtggccgtctttgtttatattgagatttttcaaatcagtgcgcaagacgtgacgtaagtatccgagtcagtttttatttttctactaatttggtcgaatctagattcgacggtatcgataagctcgcggatccctgaaagcgacgttggatgttaacatctacaaattgccttttcttatcgaccatgtacgtaagcgcttacgtttttggtggacccttgaggaaactggtagctgttgtgggcctgtggtctcaagatggatcattaatttccaccttcacctacgatggggggcatcgcaccggtgagtaatattgtacggctaagagcgaatttggcctgtaggatccctgaaagcgacgttggatgttaacatctacaaattgccttttcttatcgaccatgtacgtaagcgcttacgtttttggtggacccttgaggaaactggtagctgttgtgggcctgtggtctcaagatggatcattaatttccaccttcacctacgatggggggcatcgcaccggtgagtaatattgtacggctaagagcgaatttggcctgtaggatccctgaaagcgacgttggatgttaacatctacaaattgccttttcttatcgaccatgtacgtaagcgcttacgtttttggtggacccttgaggaaactggtagctgttgtgggcctgtggtctcaagatggatcattaatttccaccttcacctacgatggggggcatcgcaccggtgagtaatattgtacggctaagagcgaatttggcctgtaggatccgcgagctggtcaatcccattgcttttgaagcagctcaacattgatctctttctcgatcgagggagatttttcaaatcagtgcgcaagacgtgacgtaagtatccgagtcagtttttatttttctactaatttggtcgtttatttcggcgtgtaggacatggcaaccgggcctgaatttcgcgggtattctgtttctattccaactttttcttgatccgcagccattaacgacttttgaatagatacgctgacacgccaagcctcgctagtcaaaagtgtaccaaacaacgctttacagcaagaacggaatgcgcgtgacgctcgcggtgacgccatttcgccttttcagaaatggataaatagccttgcttcctattatatcttcccaaattaccaatacattacactagcatctgaatttcataaccaatctcgatacaccaaatcgaagatctccctggaattccagctgaccaccatggcaattcccggggatcagctcgaatttccccgatcgttcaaacatttggcaataaagtttcttaagattgaatcctgttgccggtcttgcgatgattatcatataatttctgttgaattacgttaagcatgtaataattaacatgtaatgcatgacgttatttatgagatgggtttttatgattagagtcccgcaattatacatttaatacgcgatagaaaacaaaatatagcgcgcaaactaggataaattatcgcgcgcggtgtcatctatgttactagatcgggaattggcatgcaagcttggcactggccgtcgttttacaacgtcgtgactgggaaaaccctggcgttacccaacttaatcgccttgcagcacatccccctttcgccagctggcgtaatagcgaagaggcccgcaccgatcgcccttcccaacagttgcgcagcctgaatggcgaatgctagagcagcttgagcttggatcagattgtcgtttcccgccttcagtttaaactatcagtgtttgacaggatatattggcgggtaaacctaagagaaaagagcgtttattagaataatcggatatttaaaagggcgtgaaaaggtttatccgttcgtccatttgtatgtgcatgccaaccacagggttcccctcgggatcaaagtactttgatccaacccctccgctgctatagtgcagtcggcttctgacgttcagtgcagccgtcttctgaaaacgacatgtcgcacaagtcctaagttacgcgacaggctgccgccctgcccttttcctggcgttttcttgtcgcgtgttttagtcgcataaagtagaatacttgcgactagaaccggagacattacgccatgaacaagagcgccgccgctggcctgctgggctatgcccgcgtcagcaccgacgaccaggacttgaccaaccaacgggccgaactgcacgcggccggctgcaccaagctgttttccgagaagatcaccggcaccaggcgcgaccgcccggagctggccaggatgcttgaccacctacgccctggcgacgttgtgacagtgaccaggctagaccgcctggcccgcagcacccgcgacctactggacattgccgagcgcatccaggaggccggcgcgggcctgcgtagcctggcagagccgtgggccgacaccaccacgccggccggccgcatggtgttgaccgtgttcgccggcattgccgagttcgagcgttccctaatcatcgaccgcacccggagcgggcgcgaggccgccaaggcccgaggcgtgaagtttggcccccgccctaccctcaccccggcacagatcgcgcacgcccgcgagctgatcgaccaggaaggccgcaccgtgaaagaggcggctgcactgcttggcgtgcatcgctcgaccctgtaccgcgcacttgagcgcagcgaggaagtgacgcccaccgaggccaggcggcgcggtgccttccgtgaggacgcattgaccgaggccgacgccctggcggccgccgagaatgaacgccaagaggaacaagcatgaaaccgcaccaggacggccaggacgaaccgtttttcattaccgaagagatcgaggcggagatgatcgcggccgggtacgtgttcgagccgcccgcgcacgtctcaaccgtgcggctgcatgaaatcctggccggtttgtctgatgccaagctggcggcctggccggccagcttggccgctgaagaaaccgagcgccgccgtctaaaaaggtgatgtgtatttgagtaaaacagcttgcgtcatgcggtcgctgcgtatatgatgcgatgagtaaataaacaaatacgcaaggggaacgcatgaaggttatcgctgtacttaaccagaaaggcgggtcaggcaagacgaccatcgcaacccatctagcccgcgccctgcaactcgccggggccgatgttctgttagtcgattccgatccccagggcagtgcccgcgattgggcggccgtgcgggaagatcaaccgctaaccgttgtcggcatcgaccgcccgacgattgaccgcgacgtgaaggccatcggccggcgcgacttcgtagtgatcgacggagcgccccaggcggcggacttggctgtgtccgcgatcaaggcagccgacttcgtgctgattccggtgcagccaagcccttacgacatatgggccaccgccgacctggtggagctggttaagcagcgcattgaggtcacggatggaaggctacaagcggcctttgtcgtgtcgcgggcgatcaaaggcacgcgcatcggcggtgaggttgccgaggcgctggccgggtacgagctgcccattcttgagtcccgtatcacgcagcgcgtgagctacccaggcactgccgccgccggcacaaccgttcttgaatcagaacccgagggcgacgctgcccgcgaggtccaggcgctggccgctgaaattaaatcaaaactcatttgagttaatgaggtaaagagaaaatgagcaaaagcacaaacacgctaagtgccggccgtccgagcgcacgcagcagcaaggctgcaacgttggccagcctggcagacacgccagccatgaagcgggtcaactttcagttgccggcggaggatcacaccaagctgaagatgtacgcggtacgccaaggcaagaccattaccgagctgctatctgaatacatcgcgcagctaccagagtaaatgagcaaatgaataaatgagtagatgaattttagcggctaaaggaggcggcatggaaaatcaagaacaaccaggcaccgacgccgtggaatgccccatgtgtggaggaacgggcggttggccaggcgtaagcggctgggttgtctgccggccctgcaatggcactggaacccccaagcccgaggaatcggcgtgacggtcgcaaaccatccggcccggtacaaatcggcgcggcgctgggtgatgacctggtggagaagttgaaggccgcgcaggccgcccagcggcaacgcatcgaggcagaagcacgccccggtgaatcgtggcaagcggccgctgatcgaatccgcaaagaatcccggcaaccgccggcagccggtgcgccgtcgattaggaagccgcccaagggcgacgagcaaccagattttttcgttccgatgctctatgacgtgggcacccgcgatagtcgcagcatcatggacgtggccgttttccgtctgtcgaagcgtgaccgacgagctggcgaggtgatccgctacgagcttccagacgggcacgtagaggtttccgcagggccggccggcatggccagtgtgtgggattacgacctggtactgatggcggtttcccatctaaccgaatccatgaaccgataccgggaagggaagggagacaagcccggccgcgtgttccgtccacacgttgcggacgtactcaagttctgccggcgagccgatggcggaaagcagaaagacgacctggtagaaacctgcattcggttaaacaccacgcacgttgccatgcagcgtacgaagaaggccaagaacggccgcctggtgacggtatccgagggtgaagccttgattagccgctacaagatcgtaaagagcgaaaccgggcggccggagtacatcgagatcgagctagctgattggatgtaccgcgagatcacagaaggcaagaacccggacgtgctgacggttcaccccgattactttttgatcgatcccggcatcggccgttttctctaccgcctggcacgccgcgccgcaggcaaggcagaagccagatggttgttcaagacgatctacgaacgcagtggcagcgccggagagttcaagaagttctgtttcaccgtgcgcaagctgatcgggtcaaatgacctgccggagtacgatttgaaggaggaggcggggcaggctggcccgatcctagtcatgcgctaccgcaacctgatcgagggcgaagcatccgccggttcctaatgtacggagcagatgctagggcaaattgccctagcaggggaaaaaggtcgaaaaggtctctttcctgtggatagcacgtacattgggaacccaaagccgtacattgggaaccggaacccgtacattgggaacccaaagccgtacattgggaaccggtcacacatgtaagtgactgatataaaagagaaaaaaggcgatttttccgcctaaaactctttaaaacttattaaaactcttaaaacccgcctggcctgtgcataactgtctggccagcgcacagccgaagagctgcaaaaagcgcctacccttcggtcgctgcgctccctacgccccgccgcttcgcgtcggcctatcgcggccgctggccgctcaaaaatggctggcctacggccaggcaatctaccagggcgcggacaagccgcgccgtcgccactcgaccgccggcgcccacatcaaggcaccctgcctcgcgcgtttcggtgatgacggtgaaaacctctgacacatgcagctcccggagacggtcacagcttgtctgtaagcggatgccgggagcagacaagcccgtcagggcgcgtcagcgggtgttggcgggtgtcggggcgcagccatgacccagtcacgtagcgatagcggagtgtatactggcttaactatgcggcatcagagcagattgtactgagagtgcaccatatgcggtgtgaaataccgcacagatgcgtaaggagaaaataccgcatcaggcgctcttccgcttcctcgctcactgactcgctgcgctcggtcgttcggctgcggcgagcggtatcagctcactcaaaggcggtaatacggttatccacagaatcaggggataacgcaggaaagaacatgtgagcaaaaggccagcaaaaggccaggaaccgtaaaaaggccgcgttgctggcgtttttccataggctccgcccccctgacgagcatcacaaaaatcgacgctcaagtcagaggtggcgaaacccgacaggactataaagataccaggcgtttccccctggaagctccctcgtgcgctctcctgttccgaccctgccgcttaccggatacctgtccgcctttctcccttcgggaagcgtggcgctttctcatagctcacgctgtaggtatctcagttcggtgtaggtcgttcgctccaagctgggctgtgtgcacgaaccccccgttcagcccgaccgctgcgccttatccggtaactatcgtcttgagtccaacccggtaagacacgacttatcgccactggcagcagccactggtaacaggattagcagagcgaggtatgtaggcggtgctacagagttcttgaagtggtggcctaactacggctacactagaaggacagtatttggtatctgcgctctgctgaagccagttaccttcggaaaaagagttggtagctcttgatccggcaaacaaaccaccgctggtagcggtggtttttttgtttgcaagcagcagattacgcgcagaaaaaaaggatctcaagaagatcctttgatcttttctacggggtctgacgctcagtggaacgaaaactcacgttaagggattttggtcatgcattctaggtactaaaacaattcatccagtaaaatataatattttattttctcccaatcaggcttgatccccagtaagtcaaaaaatagctcgacatactgttcttccccgatatcctccctgatcgaccggacgcagaaggcaatgtcataccacttgtccgccctgccgcttctcccaagatcaataaagccacttactttgccatctttcacaaagatgttgctgtctcccaggtcgccgtgggaaaagacaagttcctcttcgggcttttccgtctttaaaaaatcatacagctcgcgcggatctttaaatggagtgtcttcttcccagttttcgcaatccacatcggccagatcgttattcagtaagtaatccaattcggctaagcggctgtctaagctattcgtatagggacaatccgatatgtcgatggagtgaaagagcctgatgcactccgcatacagctcgataatcttttcagggctttgttcatcttcatactcttccgagcaaaggacgccatcggcctcactcatgagcagattgctccagccatcatgccgttcaaagtgcaggacctttggaacaggcagctttccttccagccatagcatcatgtccttttcccgttccacatcataggtggtccctttataccggctgtccgtcatttttaaatataggttttcattttctcccaccagcttatataccttagcaggagacattccttccgtatcttttacgcagcggtatttttcgatcagttttttcaattccggtgatattctcattttagccatttattatttccttcctcttttctacagtatttaaagataccccaagaagctaattataacaagacgaactccaattcactgttccttgcattctaaaaccttaaataccagaaaacagctttttcaaagttgttttcaaagttggcgtataacatagtatcgacggagccgattttgaaaccgcggtgatcacaggcagcaacgctctgtcatcgttacaatcaacatgctaccctccgcgagatcatccgtgtttcaaacccggcagcttagttgccgttcttccgaatagcatcggtaacatgagcaaagtctgccgccttacaacggctctcccgctgacgccgtcccggactgatgggctgcctgtatcgagtggtgattttgtgccgagctgccggtcggggagctgttggctggctggtggcaggatatattgtggtgtaaacaaattgacgcttagacaacttaataacacattgcggacgtttttaatgtactgaattaacgccgaatta

SEQ ID NO: 57 - DNA, 29 bp, Artificial Sequence
  amplification of the targeting sequence of the gene IVD from Arabidopsis thaliana to generate targeting vectors
atagaattcatgcagaggtttttctccgc

SEQ ID NO: 58 - DNA, 29 bp, Artificial Sequence
  amplification of the targeting sequence of the gene IVD from Arabidopsis thaliana to generate targeting vectors
atagaattccgaagaacgagaagagaaag

SEQ ID NO: 59 - DNA, 31 bp, Artificial Sequence
  amplification of the targeting sequence of the gene IVD from Arabidopsis thaliana to generate targeting vectors
atagtttaaacatgcagaggtttttctccgc

SEQ ID NO: 60 - DNA, 36 bp, Artificial Sequence
  amplification of the targeting sequence of the gene IVD from Arabidopsis thaliana to generate targeting vectors
ataccatggaagagcaaaggagagacgaagaacgag

SEQ ID NO: 61 - DNA, 81 bp, Arabidopsis thaliana
atgcagaggtttttctccgccagatcgattctcggttacgccgtcaagacgcggaggaggtctttctcttctcgttcttcg

SEQ ID NO: 62 - DNA, 89 bp, Arabidopsis thaliana
atgcagaggtttttctccgccagatcgattctcggttacgccgtcaagacgcggaggaggtctttctcttctcgttcttcgtctctcct

SEQ ID NO: 63 - DNA, 786 bp, Escherichia coli
  CDS (1)..(786): transl_table=11
atgaacccgtcgcaacatgctgaacagtttcagagccagttagcgaactatgtgccacagttcactcccgaattttggccggtgtggttgatcattgccggagtattgctggttgggatgtggttggtgctggggctgcatgccttgcttcgtgctcgtggcgtgaagaaatcagccaccgatcatggtgagaagatttatctttacagcaaagcggtcagattatggcactggtcgaatgcgttactctttgtattgttgctggccagtgggctgataaatcactttgcgatggtgggcgcaactgcggttaaaagtctggttgcggtgcatgaagtttgcggatttttgttactggcatgctggctcggctttgtgctgatcaatgccgttggggataatggtcaccactatcgcattcgtcgtcaggggtggctggaacgagcggcaaaacaaacgcgattttatttgtttggcattatgcagggggaagaacatcctttcccggcaacaacccagtctaaatttaatcccttacagcaggtcgcctatgttggtgtcatgtatggattgctgccgttgttactattgacggggctgctgtgtctctatccgcaagccgtgggagatgtgtttcctggcgtaagatactggttattgcagacacattttgctctggcatttataagcctcttttttatcttcggtcatctttatctttgcaccacggggcgtacgccacacgaaacctttaaaagcatggtcgatggctatcaccggcactaa

SEQ ID NO: 64 - protein, 261 aa, Escherichia coli
MNPSQHAEQFQSQLANYVPQFTPEFWPVWLIIAGVLLVGMWLVLGLHALLRARGVKKSATDHGEKIYLYSKAVRLWHWSNALLFVLLLASGLINHFAMVGATAVKSLVAVHEVCGFLLLACWLGFVLINAVGDNGHHYRIRRQGWLERAAKQTRFYLFGIMQGEEHPFPATTQSKFNPLQQVAYVGVMYGLLPLLLLTGLLCLYPQAVGDVFPGVRYWLLQTHFALAFISLFFIFGHLYLCTTGRTPHETFKSMVDGYHRH

SEQ ID NO: 65 - DNA, 786 bp, Escherichia coli
  Escherichia coli CFT073
  CDS (1)..(786): transl_table=11
atgaacccgtcgcaacatgctgaacagtttcagagccagttggcgaactatgtgccacagttcaccccccaattttggccggtgtggttgatcattgccggactattgctggttgggatgtggttggtgctggggctacatgccttgcttcgtgctcgtggcgtgaagaaatcagccaccgatcatggtgagaggatttatctttacagcaaagcggtcagattatggcactggtcgaatgcgttactctttgtattgttgctggcaagtgggctgataaatcactttgcgctggtgggcgcaactgcggttaaaagtctggttgcggtgcatgaagtttgcggatttttgttactggcatgctggctcggctttgttctgatcaatgccgttgggggtaatggtcaccactatcgcattcgtcgtcaggggtggctggagcgagcggcaaaacaaacgcgattctatttgtttggcattatgcagggggaagaacatcctttcccggcaacaacccagtctaaatttaatcccttacagcaggttgcctatgttggtgtcatgtatggattgctgccgttgttactattgacggggctgctgtgtctctatccgcaagccgtgggagatatgtttcctggcgtaagatactggttattgcaggcgcattttgctctggcatttataagcctcttttttatcttcggtcatctttatctttgcaccacggggcgtacgccacacgaaacctttaaaagcatggtcgatggctatcaccggcactaa

SEQ ID NO: 66 - protein, 261 aa, Escherichia coli
  Escherichia coli CFT073
MNPSQHAEQFQSQLANYVPQFTPQFWPVWLIIAGLLLVGMWLVLGLHALLRARGVKKSATDHGERIYLYSKAVRLWHWSNALLFVLLLASGLINHFALVGATAVKSLVAVHEVCGFLLLACWLGFVLINAVGGNGHHYRIRRQGWLERAAKQTRFYLFGIMQGEEHPFPATTQSKFNPLQQVAYVGVMYGLLPLLLLTGLLCLYPQAVGDMFPGVRYWLLQAHFALAFISLFFIFGHLYLCTTGRTPHETFKSMVDGYHRH

SEQ ID NO: 67 - DNA, 765 bp, Salmonella enterica
  Salmonella enterica subsp. arizonae serovar 62:z4,z23:--
  CDS (1)..(765): transl_table=11
atgaatactatctggggagcggaactacactatgcgccggattattggccgctgtggttaatttacgcaggagtcgtggtgctgctcatgcttgtcggactggttgtccatgcgttattgcggcggatgcttgcgccaaaaacggcggacggcgaagagcatcgtgattatctctactcgctggcgattcgccgttggcattggggaaatgcgttactgtttattttattactgttaagcggtttatttggccatttttctctcggtcctgtagcgctaatggtgcaggtacatacctggtgtggttttgccttactggccttctgggtcgggtttgtgctgatcaacctcaccacaggtaatggacgtcactatcgggtaaatttttccgggctggtgacgcgctgcatacgtcagacgcgtttttacctttttggcatcatgaaaggggaagcgcatccgtttgcggcaacagagcagaataagttcaatccactgcaacaactggcatatctggcgattatgtacgcgctggtgccgttgttaatcatcaccggtttgctgtgtctctatccgcaggttgcgggtctgggccctgtgatgctggtgctgcatatggcgcttgctatcatcggcttactgtttatttgcgcgcatctctatctgtgtactcttggcgacacgccgggacaaattttccgtagcatggttgacggctatcaccgtcatcgtaccgcgccgcgcggggataagtccgccgtctga

SEQ ID NO: 68 - protein, 254 aa, Salmonella enterica
  Salmonella enterica subsp. arizonae serovar 62:z4,z23:--
MNTIWGAELHYAPDYWPLWLIYAGVVVLLMLVGLVVHALLRRMLAPKTADGEEHRDYLYSLAIRRWHWGNALLFILLLLSGLFGHFSLGPVALMVQVHTWCGFALLAFWVGFVLINLTTGNGRHYRVNFSGLVTRCIRQTRFYLFGIMKGEAHPFAATEQNKFNPLQQLAYLAIMYALVPLLIITGLLCLYPQVAGLGPVMLVLHMALAIIGLLFICAHLYLCTLGDTPGQIFRSMVDGYHRHRTAPRGDKSAV

SEQ ID NO: 69 - DNA, 765 bp, Salmonella enterica
  Salmonella enterica subsp. enterica serovar Paratyphi B str. SPB7
  CDS (1)..(765): transl_table=11
atgaatactatctggggagcggaactacattatgcgccagattattggccgctgtggttaatttacgcaggcgtcgtggtgctgctcatgcttgttgggctggttatccatgcgttattgcgccggatgctggcgccaaaaacggcgggcggcgaagaacatcgtgactatctctactcgctggcgattcgccgttggcattggggaaatgcgttactgtttgttttattactgttaagcggtttatttggtcatttttctctcggccctgtagcgctaatggtacaagtgcatacctggtgtggttttgccttactggctttctgggtcgggtttgtgctgatcaatctcaccacaggtaacgggcgtcactatcgggtaaatttttccggactggtaacgcgctgcatacgccagacgcgtttttacctttttggcattatgaaaggggaagcgcatccgttcgcggcaacagagcagaataagttcaatccactgcaacaactggcatatctggcgattatgtacgcgctggtaccgctgttaatcatcaccggtttgctgtgtctctatccgcaggttgcgggtctgggccctgtgatgctggtgctgcatatggcgcttgctatcatcggcttactgtttatttgcgcgcatctctatctgtgtactcttggcgacacgccgggacaaattttccgtagcatggttgacggctatcatcgtcatcgtaccgcgccgcgcggggataagtccgccgtctga

SEQ ID NO: 70 - protein, 254 aa, Salmonella enterica
  Salmonella enterica subsp. enterica serovar Paratyphi B str. SPB7
MNTIWGAELHYAPDYWPLWLIYAGVVVLLMLVGLVIHALLRRMLAPKTAGGEEHRDYLYSLAIRRWHWGNALLFVLLLLSGLFGHFSLGPVALMVQVHTWCGFALLAFWVGFVLINLTTGNGRHYRVNFSGLVTRCIRQTRFYLFGIMKGEAHPFAATEQNKFNPLQQLAYLAIMYALVPLLIITGLLCLYPQVAGLGPVMLVLHMALAIIGLLFICAHLYLCTLGDTPGQIFRSMVDGYHRHRTAPRGDKSAV

SEQ ID NO: 71 - DNA, 765 bp, Salmonella typhimurium
  CDS (1)..(765): transl_table=11
atgaatactatctggggagcggaactacattatgcgccagattattggccgctgtggttaatttacgcaggcgtcgtggtgctgctcatgcttgttgggctggttatccatgcgttattgcgccggatgctggcgccaaaaacggcgggcggtgaagaacatcgtgactatctctactcgctggcgattcgccgctggcattggggaaatgcgttactgtttgttttattactgttaagcggtttatttggtcatttttctctcggccctgtagcgctaatggtacaagtgcatacctggtgtggttttgccttactggctttctgggtcgggtttgtgctgatcaacctcaccacaggtaacgggcgtcactatcgggtaaatttttccggactggtaacgcgctgcatacgccagacgcgtttttacctttttggcattatgaaaggggaagcgcatccgttcgtggcaacagagcagaataagttcaatccactgcaacaactggcatatctggcgattatgtacgcgctggtaccgctgttaatcatcaccggtttgctgtgtctctatccgcaggttgcgggtctgggccctgtgatgctggtgctgcatatggcgcttgctatcatcggcttactgtttatttgcgcgcatctctatctgtgtactcttggcgacacgccgggacaaattttccgtagcatggttgacggctatcatcgtcatcgtaccgcgccgcgcggggataagtccgccgtctga

SEQ ID NO: 72 - protein, 254 aa, Salmonella typhimurium
MNTIWGAELHYAPDYWPLWLIYAGVVVLLMLVGLVIHALLRRMLAPKTAGGEEHRDYLYSLAIRRWHWGNALLFVLLLLSGLFGHFSLGPVALMVQVHTWCGFALLAFWVGFVLINLTTGNGRHYRVNFSGLVTRCIRQTRFYLFGIMKGEAHPFVATEQNKFNPLQQLAYLAIMYALVPLLIITGLLCLYPQVAGLGPVMLVLHMALAIIGLLFICAHLYLCTLGDTPGQIFRSMVDGYHRHRTAPRGDKSAV

SEQ ID NO: 73 - DNA, 22 bp, Artificial sequence
  primer
atgaacccgtcgcaacatgctg

SEQ ID NO: 74 - DNA, 18 bp, Artificial sequence
  primer
ttagtgccggtgatagcc

SEQ ID NO: 75 - protein, 261 aa, Artificial sequence
  consensus sequence
  Variant (3)..(6): Xaa in position 3 to 6 is any amino acid
  Variant (9)..(12): Xaa in position 9 to 12 is any amino acid
  Variant (13)..(22): Xaa in position 13 to 22 is any or no amino acid
  Variant (24)..(25): Xaa in position 24 to 25 is any amino acid
  Variant (28)..(28): Xaa in position 28 is any amino acid
  Variant (32)..(32): Xaa in position 32 is any amino acid
  Variant (36)..(39): Xaa in position 36 to 39 is any amino acid
  Variant (41)..(43): Xaa in position 41 to 43 is any amino acid
  Variant (45)..(46): Xaa in position 45 to 46 is any amino acid
  Variant (52)..(56): Xaa in position 52 to 56 is any amino acid
  Variant (58)..(58): Xaa in position 58 is any amino acid
  Variant (60)..(64): Xaa in position 60 to 64 is any amino acid
  Variant (66)..(66): Xaa in position 66 is any amino acid
  Variant (71)..(71): Xaa in position 71 is any amino acid
  Variant (73)..(73): Xaa in position 73 is any amino acid
  Variant (75)..(75): Xaa in position 75 is any amino acid
  Variant (79)..(79): Xaa in position 79 is any amino acid
  Variant (89)..(89): Xaa in position 89 is any amino acid
  Variant (93)..(94): Xaa in position 93 to 94 is any amino acid
  Variant (97)..(97): Xaa in position 97 is any amino acid
  Variant (99)..(100): Xaa in position 99 to 100 is any amino acid
  Variant (101)..(103): Xaa in position 101 to 103 is any or no amino acid
  Variant (105)..(107): Xaa in position 105 to 107 is any amino acid
  Variant (109)..(109): Xaa in position 109 is any amino acid
  Variant (112)..(113): Xaa in position 112 to 113 is any amino acid
  Variant (117)..(117): Xaa in position 117 is any amino acid
  Variant (121)..(121): Xaa in position 121 is any amino acid
  Variant (123)..(123): Xaa in position 123 is any amino acid
  Variant (130)..(132): Xaa in position 130 to 132 is any amino acid
  Variant (136)..(136): Xaa in position 136 is any amino acid
  Variant (140)..(143): Xaa in position 140 to 143 is any amino acid
  Variant (145)..(147): Xaa in position 145 to 147 is any amino acid
  Variant (149)..(151): Xaa in position 149 to 151 is any amino acid
  Variant (162)..(162): Xaa in position 162 is any amino acid
  Variant (165)..(165): Xaa in position 165 is any amino acid
  Variant (169)..(169): Xaa in position 169 is any amino acid
  Variant (172)..(172): Xaa in position 172 is any amino acid
  Variant (174)..(174): Xaa in position 174 is any amino acid
  Variant (182)..(182): Xaa in position 182 is any amino acid
  Variant (185)..(187): Xaa in position 185 to 187 is any amino acid
  Variant (190)..(190): Xaa in position 190 is any amino acid
  Variant (192)..(192): Xaa in position 192 is any amino acid
  Variant (196)..(197): Xaa in position 196 to 197 is any amino acid
  Variant (207)..(208): Xaa in position 207 to 208 is any amino acid
  Variant (210)..(214): Xaa in position 210 to 214 is any amino acid
  Variant (215)..(219): Xaa in position 215 to 219 is any or no amino acid
  Variant (221)..(222): Xaa in position 221 to 222 is any amino acid
  Variant (224)..(224): Xaa in position 224 is any amino acid
  Variant (228)..(228): Xaa in position 228 is any amino acid
  Variant (230)..(230): Xaa in position 230 is any amino acid
  Variant (232)..(232): Xaa in position 232 is any amino acid
  Variant (235)..(236): Xaa in position 235 to 236 is any amino acid
  Variant (243)..(243): Xaa in position 243 is any amino acid
  Variant (245)..(245): Xaa in position 245 is any amino acid
  Variant (248)..(250): Xaa in position 248 to 250 is any amino acid
  Variant (252)..(252): Xaa in position 252 is any amino acid
MNXXXXAEXXXXXXXXXXXXXXPXXWPXWLIXAGVXXXXMXXXLXXHALLRXXXXXKXAXXXXXRXYLYSXAXRXWHWXNALLFVLLLXSGLXXHFXLXXXXXVXXXVXVHXXCGFXLLAXWXGFVLINXXXGNGXHYRXXXXGXXXRXXXQTRFYLFGIMXGEXHPFXATXQXKFNPLQQXAYXXXMYXLXPLLXXTGLLCLYPQXXGXXXXXXXXXXLXXHXALAXIXLXFIXXHLYLCTXGXTPXXXFXSMVDGYHRH

SEQ ID NO: 76 - protein, 61 aa, Artificial sequence
  protein pattern
  Variant (2)..(2): Xaa in position 2 is Leu or Val
  Variant (9)..(9): Xaa in position 9 is Ala or Leu
  Variant (10)..(10): Xaa in position 10 is Thr or Val
  Variant (11)..(11): Xaa in position 11 is Gly or Thr
  Variant (12)..(12): Xaa in position 12 is Asp or Gly
  Variant (15)..(15): Xaa in position 15 is His or Arg
  Variant (19)..(19): Xaa in position 19 is Ile or Val
  Variant (20)..(20): Xaa in position 20 is Asn or Arg
  Variant (21)..(21): Xaa in position 21 is any amino acid
  Variant (22)..(22): Xaa in position 22 is Gln or Ser
  Variant (24)..(24): Xaa in position 24 is any or no amino acid
  Variant (26)..(26): Xaa in position 26 is any amino acid
  Variant (27)..(27): Xaa in position 27 is any or no amino acid
  Variant (29)..(29): Xaa in position 29 is Ala or Cys
  Variant (30)..(30): Xaa in position 30 is Ala or Ile
  Variant (31)..(31): Xaa in position 31 is Lys or Arg
  Variant (42)..(42): Xaa in position 42 is any amino acid
  Variant (45)..(45): Xaa in position 45 is Ala or Glu
  Variant (49)..(49): Xaa in position 49 is any or no amino acid
  Variant (51)..(51): Xaa in position 51 is Ala or Thr
  Variant (53)..(53): Xaa in position 53 is Glu or Gln
  Variant (54)..(54): Xaa in position 54 is Gln or Ser
  Variant (55)..(57): Xaa in position 55 to 57 is any amino acid
  Variant (58)..(58): Xaa in position 58 is Asn or Pro
  Variant (59)..(59): Xaa in position 59 is Leu or Pro
  Variant (60)..(60): Xaa in position 60 is any amino acid
WXGFVLINXXXXNGXHYRXXXXGXLXXRXXXQTRFYLFGIMXGEXHPFXAXTXXXXXXXXQ

SEQ ID NO: 77 - protein, 44 aa, Artificial sequence
  protein pattern
  Variant (2)..(2): Xaa in position 2 is any or no amino acid
  Variant (4)..(5): Xaa in position 4 to 5 is any or no amino acid
  Variant (7)..(7): Xaa in position 7 is Phe or Met
  Variant (11)..(11): Xaa in position 11 is Phe or Ile
  Variant (13)..(13): Xaa in position 13 is Gly or Ser
  Variant (15)..(15): Xaa in position 15 is Phe or Leu
  Variant (18)..(18): Xaa in position 18 is any amino acid
  Variant (19)..(19): Xaa in position 19 is Ala or Gly
  Variant (26)..(26): Xaa in position 26 is any amino acid
  Variant (28)..(28): Xaa in position 28 is Asp or Arg
  Variant (31)..(31): Xaa in position 31 is any amino acid
  Variant (32)..(32): Xaa in position 32 is Glu or Gln
  Variant (33)..(33): Xaa in position 33 is any amino acid
  Variant (35)..(35): Xaa in position 35 is Lys or Arg
LXLXXHXALAXIXLXFIXXHLYLCTXGXTPXXXFXSMVDGYHRH

SEQ ID NO: 78 - protein, 28 aa, Artificial sequence
  protein pattern
  Variant (3)..(3): Xaa in position 3 is Leu or Val
  Variant (4)..(4): Xaa in position 4 is Ala or Gly
  Variant (5)..(5): Xaa in position 5 is Ile or Val
  Variant (8)..(8): Xaa in position 8 is Ala or Gly
  Variant (10)..(10): Xaa in position 10 is Leu or Val
  Variant (14)..(15): Xaa in position 14 to 15 is Ile or Leu
  Variant (25)..(25): Xaa in position 25 is any or no amino acid
  Variant (27)..(27): Xaa in position 27 is any or no amino acid
AYXXXMYXLXPLLXXTGLLCLYPQXVXG

SEQ ID NO: 79 - protein, 13 aa, Artificial sequence
  protein pattern
  Variant (2)..(3): Xaa in position 2 to 3 is any amino acid
  Variant (4)..(4): Xaa in position 4 is Leu or Met
  Variant (6)..(6): Xaa in position 6 is Ala or Gln
  Variant (9)..(9): Xaa in position 9 is Glu or Thr
  Variant (10)..(10): Xaa in position 10 is any amino acid
VXXXVXVHXXCGF

SEQ ID NO: 80 - DNA, 972 bp, Escherichia coli
  CDS (1)..(972): transl_table=11
atgagtaagatttttgaagataactcgctgactatcggtcacacgccgctggttcgcctgaatcgcatcggtaacggacgcattctggcgaaggtggaatctcgtaaccccagcttcagcgttaagtgccgtatcggtgccaacatgatttgggatgccgaaaagcgcggcgtgctgaaaccaggcgttgaactggttgaaccgaccagcggtaataccgggattgcactggcctatgtagctgccgctcgcggttacaaactcaccctgaccatgccagaaaccatgagtattgaacgccgcaagctgctgaaagcgttaggtgcaaacctggtgctgacggaaggtgctaaaggcatgaaaggcgcaatccaaaaagcagaagaaattgtcgccagcaatccagagaaatacctgctgctgcaacaattcagcaatccggcaaaccctgaaattcacgaaaagaccaccggtccggagatatgggaagataccgacggtcaggttgatgtatttattgctggcgttgggactggcggtacgctgactggcgtcagccgctacattaaaggcaccaaaggcaagaccgatcttatctctgtcgccgttgagccaaccgattctccagttatcgcccaggcgctggcaggtgaagagattaaacctggcccgcataaaattcagggtattggcgctggttttatcccggctaacctcgatctcaagctggtcgataaagtcattggcatcaccaatgaagaagcgatttctaccgcgcgtcgtctgatggaagaagaaggtattcttgcaggtatctcttctggagcagctgttgccgcggcgttgaaactacaagaagatgaaagctttaccaacaagaatattgtggttattctaccatcatcgggtgagcgttatttaagcaccgcattgtttgccgatctcttcactgagaaagaattgcaacagtaa

SEQ ID NO: 81 - protein, 323 aa, Escherichia coli
MSKIFEDNSLTIGHTPLVRLNRIGNGRILAKVESRNPSFSVKCRIGANMIWDAEKRGVLKPGVELVEPTSGNTGIALAYVAAARGYKLTLTMPETMSIERRKLLKALGANLVLTEGAKGMKGAIQKAEEIVASNPEKYLLLQQFSNPANPEIHEKTTGPEIWEDTDGQVDVFIAGVGTGGTLTGVSRYIKGTKGKTDLISVAVEPTDSPVIAQALAGEEIKPGPHKIQGIGAGFIPANLDLKLVDKVIGITNEEAISTARRLMEEEGILAGISSGAAVAAALKLQEDESFTNKNIVVILPSSGERYLSTALFADLFTEKELQQ

SEQ ID NO: 82 - DNA, 1689 bp, Glycine max
  CDS (448)..(1365)
aacatacacttcttctattgcgacccatttttccaatccacaatcgtgggagtgagcgaacaactacaaagggatattagatactattgtgagtgagtgcgtgcgattcattgtgtttgtgtagtagtgactttgggttgggtttcgtctcaactcaacaaacgtcgtcgttctgcatttcccaaccttcctccaatggcttctgcttccttaatcaactcgttgacttgttcttcgcgtgctcccactcagcactgttccactttcacccgcaccaccgccgccacgtcactgagacaatttaacagccactgtcggagaccactcgcgacgaggatctcgccgccttccaccgttgtctgcaaagctgtctccgttaagccccaaaccgaaatcgaaggtctcaacattgctgaagatgtcacccagctcatagggaaaacgccaatggtttacctgaacaatatcgtgaagggttctgtggccaatattgctgccaagcttgagattatggagccctgttgtagtgtaaaggacaggattggttttagtatgataaatgatgctgagcagagaggagctataacacctgggaagagtatattggtggaacctactagcggcaacaccggaattggtcttgcctttatagcagcttcaagaggttataaactcattttgacaatgcctgcttcaatgagtttagaaagacgagttctcttgaaagcatttggggccgagcttgttttgactgatgcagcaaagggcatgaatggagcagttcaaaaagctgaagaaattttaaaaagtacccccaatgcatacatgcttcaacaatttgataatccttcaaatcctaagattcattatgagacaactggcccagagatatgggaagatacaagaggaaagatagatattttagttgcaggaattggaactggtggaactgtttctggagttggccaattcctaaaacaacaaaatccaaaaatacaggttattggtgtagagcctctggaaagcaacatacttactggcggaaagccaggacctcacaaaattcagggtattggggctggttttgtgcccaggaatttggatcaagatgtgcttgatgaagttatagcgatatcaagtgatgaagcagttgaaactgcaaagcaattagcactccaggaaggcttgctggtgggaatttcttcaggagctgctgctgcagctgctttgaaggttggaaagaggcctgagaatgcaggcaagcttattggggttgtcttcccaagctttggtgaaagatatttgtctactattcttttccagtcaattcgggaagaatgcgagaaaatgcaacctgagccatgaattgactttgcttgttaatgtttcatactcattctccacgagtatctgtatgtaaatgacagtgtgacatgtccatgttatgtccgtgtttctcatttttgacactcaagaaattagataactgtgtaaaggtcattgacttgacttacagcacagatcaatggcccttgattgaataagttttttttccttctctctttgggctaaaacttttagatgtagtaggaattactggcattgctcttctttttgtatggcagcgtaagaaatttctgtctaatgttcgctattaaaaaataattgatgaaacagtttatctgttgc

SEQ ID NO: 83 - protein, 305 aa, Glycine max
MVYLNNIVKGSVANIAAKLEIMEPCCSVKDRIGFSMINDAEQRGAITPGKSILVEPTSGNTGIGLAFIAASRGYKLILTMPASMSLERRVLLKAFGAELVLTDAAKGMNGAVQKAEEILKSTPNAYMLQQFDNPSNPKIHYETTGPEIWEDTRGKIDILVAGIGTGGTVSGVGQFLKQQNPKIQVIGVEPLESNILTGGKPGPHKIQGIGAGFVPRNLDQDVLDEVIAISSDEAVETAKQLALQEGLLVGISSGAAAAAALKVGKRPENAGKLIGVVFPSFGERYLSTILFQSIREECEKMQPEP

SEQ ID NO: 84 - DNA, 1618 bp, Glycine max
  CDS (430)..(1347)
aactactaaagggataaaatatgactactattagtgatgatcagtgattagtgtgattagtgcgtgcgattcattgtgtttgtgtagtagtgagtgactttgggttgggtttcgtctcaactcaacaaacgtcgtcgttctcccatttccaatctttctccaatggcttcttctgcttccttaatcaactcgttgacttgctcttcgcctgcacccactcagcactgtttcgccttcacccgcaccaccgccaccgctaccgccacgtcactgagacaattcaacagccaccgtccgcccccactcaccacgaggatctcctcgtcgccttccaccgttgtctgcaaagctgtctccgttaagccccaaaccgaaaccgaaggtctcaacattgctgacgatgtcacacagctcatagggaaaacgccgatggtttacctcaacaatatcgtgaagggttctgtggccaatattgctgcgaagcttgagattatggagccctgttgtagtgtcaaggacaggattggttttagtatgataaatgatgctgagcagagaggagctataacacctgggaagagtatattggtggaacctactagtgggaacacaggaattggtcttgcctttatagcagcttcaagaggatataagctaattttgacaatgcctgcttcaatgagtttagaaagacgggttcttttgaaagcatttggggccgagcttgttttgactgatgcagcaaagggcatgaatggagcagtacaaaaagctgaagaaattttaaaaagtacccccaattcatacatgcttcaacaatttgataatccttcaaatcctaaggttcattatgagacaactggcccggagatatgggaagatactagaggaaagatagatattttagttgcaggaattggaaccggtggaactgtttctggagctggccaattcctaaaacaacaaaatccgaaaatacaggttattggcgtagagcctctggaaagcaacatacttacaggtggaaagccaggacctcacaaaattcagggtattggggctggttttgtgcccaggaatttggatcaagatgtgcttgatgaagttatagcgatatcaagtgatgaagcagttgaaactgcaaagcaattagcactccaggaaggcttgctggtgggaatttcttcaggagctgcagctgcagctgctttgaaggttggaaagaggcctgagaatgcaggaaagcttattggggttgtcttcccaagctttggtgaaagatatttgtcaactattcttttccagtcaatacgggaagaatgcgagaaaatgcaacctgagccatgaattgactttgcttgttaatgtttcatactcattttccacaagtatctgtatggaatgacagtgtcagatgtccatgttatgcccgtgtttctcatttttgacactcaagaaattagataactgtgtacaggtcattgatttgacttacaacacagattaatgacccttgattgaagaaattttagatgtaataattattggcattgatgacaacgtagcaaatttctgccttatgttcgctattaaaaaataattgatgaaacagtttatc

SEQ ID NO: 85 - protein, 305 aa, Glycine max
MVYLNNIVKGSVANIAAKLEIMEPCCSVKDRIGFSMINDAEQRGAITPGKSILVEPTSGNTGIGLAFIAASRGYKLILTMPASMSLERRVLLKAFGAELVLTDAAKGMNGAVQKAEEILKSTPNSYMLQQFDNPSNPKVHYETTGPEIWEDTRGKIDILVAGIGTGGTVSGAGQFLKQQNPKIQVIGVEPLESNILTGGKPGPHKIQGIGAGFVPRNLDQDVLDEVIAISSDEAVETAKQLALQEGLLVGISSGAAAAAALKVGKRPENAGKLIGVVFPSFGERYLSTILFQSIREECEKMQPEP

SEQ ID NO: 86 - DNA, 1190 bp, Helianthus annuus
  CDS (33)..(1010)
tgattgattatctttgaataactgaacaagttatggctgaaggaaagagtgggatcgctaaggatgttacagaattgattggtaacactcctttggtttatctcaacaatgttgtggatggttgtgttggccgtattgcggctaaactggaaatgatggagccttgttctagtgttaaggacaggattggttatagcatgattacggacgccgaagaaaaggggctcataacacctggagagagtgtccttgtcgaaccaacaagcggcaacactggcattgggctagctttcatggctgcggcaaaggggtacaagctcatcattacgatgcctgcttcgatgagccttgagagacgaattgttctccgtgcttttggtgctgagttggtccttactgatcccgctaaaggagtgaaaggtgctctccagaaagctgaggagattatggctaaaacgccaaattcttacatgcttcagcagtttgagaatcctgctaatccaaagatccattacgaaacaactggacctgaagtctggaaaggtacaggtgggaaaatcgatgcttttgtttccggcattggtactggcggtacgattacaggtgcagggaaatatcttaaagagcagaaccctgacataaagctttacggcattgagcctactgaaagtgctattttgtctggaggaacccctggtccacataagatccaagggattggtgctggattcatccctggtgttttagaagttgatcttattgatgaagttattaaagtttcaagtgaagaagcaattgaaactgcaaagcttcttgctcttaaagaaggattacttgtggggatatcatctggtgcagcagccgcagctgcaatcaagattgcaaagaggccagaaagtgctggaaagctgattgttgctgtgttcccgagtttcggggagcggtatctgtcttctgtgctatttgattcggtgcgaaaggaggcagagactatgacttttgatccttgaatacaatgagattgtgttattaagagggatcatgtcaacatatttgaagttcaatttgtaactgatgtctttttttttcatggggcaccttgttctatttttggtcccgttgtatgcttgtttcgaatgttatatcatgtggatgatatctttttctaaaaaagcaaaaaaaaaaaaaaa

SEQ ID NO: 87 - protein, 325 aa, Helianthus annuus
MAEGKSGIAKDVTELIGNTPLVYLNNVVDGCVGRIAAKLEMMEPCSSVKDRIGYSMITDAEEKGLITPGESVLVEPTSGNTGIGLAFMAAAKGYKLIITMPASMSLERRIVLRAFGAELVLTDPAKGVKGALQKAEEIMAKTPNSYMLQQFENPANPKIHYETTGPEVWKGTGGKIDAFVSGIGTGGTITGAGKYLKEQNPDIKLYGIEPTESAILSGGTPGPHKIQGIGAGFIPGVLEVDLIDEVIKVSSEEAIETAKLLALKEGLLVGISSGAAAAAAIKIAKRPESAGKLIVAVFPSFGERYLSSVLFDSVRKEAETMTFDP

SEQ ID NO: 88 - DNA, 1855 bp, Citrullus lanatus
  Citrullus lanatus (watermelon)
  CDS (564)..(1541)
tattctttttctctccttctctttccccgttcttcctctctcgccgatctctccctctttctcctttctccctctcctcttccgcctcacgcccgcacaatcctcccccaactacgatctgcttccgatcggccagccccactagcgacttggcttcggcagcgcctcccagacgagcggcggacccggcggtgcagcggcaagaaccgactagcgcgacttccggcgaaaatctgtagtgagcggcggcgtccggcacagatctgaagtagatcctcgaacttcgacgatccgcagcagccgccgacgacccagcagccaccagcgacgacgacgacaacggaaggtcggagcaggcgcaacctcgacgcgaaaccacgtgtttcgtcaagtttcagcagcgttttccctcatacagcgttcggacactaatcgacgaggttttgggacgtttgactaagttttagtggggagctattcgaacacgtggcagcaagggaaacagtctatttcggcattcggatcgaggttaaggtcgcttatctgcatagttgttgctcaaaatggctgatgcaaagtctacaatagctaaagatgttactgaactaattgggaatacaccacttgtatacctcaaccgtgttgttgatggctgcgtggctcgggtagctgccaagttggagatgatggagccttgctccagtgtcaaagataggattggctatagcatgatttcagatgcagaaaacaagggtcttatcactccgggggagagtgtcttgattgaacctaccagtggtaatactggtataggcttggccttcattgctgctgccaagggttatagacttataatttgcatgcctgcatcaatgagtcttgaaagaagaaccattcttcgagctttcggagctgaactggttctcacagatccagctcgggggatgaaaggagcagttcaaaaggctgaagagataaaggcaaaaacacctaattcttacatccttcagcaatttgaaaaccctgctaacccgaagatccactatgagaccactggtccagagatctggaggggctcaggtggaaagattgacgcacttgtctctggtatagggactggaggtacagtgacaggtgcagggaagtatctcaaagaacaaaatcctaatattaagttatatggcgttgaacctgttgaaagtgcaattctatctggaggaaagcctggcccacataaaatccaaggaattggggcaggcttcatccctggagttttggatgtcaatttgctagatgaagttattcaagtatcaagtgaagaatctattgaaactgcaaagctgcttgcattgaaagaaggtctactggttggtatatcatctggcgcggccgcggctgctgcaattaggattgcaaagagaccagaaaatgctggaaagcttattgttgcggtattcccgagttttggggaacgatacctctcaaccgtgctgttcgagtctgtgaaacgagagactgagaatatggttttcgagccatgagaggtttatgtaatattttcttgcttcaaatggagagccagccagttgaacctgcaaatttcccatgagtcaaagcaaagaaagaaagtgaacttcaagcggttctttttagctttcgatgcttttgcttatacctgtagtgatttgaataacttgtttccttaatagcttctttcgtttatggtttgctcagttttagtggataaacacagatgcagctgagaataaggatagtctttcatgtattcccttctgtcgaataatgtatggaatgagtagtttctctgtgaaatggttttgaagatgaaaaaaaa

SEQ ID NO: 89 - protein, 325 aa, Citrullus lanatus
  Citrullus lanatus (watermelon)
MADAKSTIAKDVTELIGNTPLVYLNRVVDGCVARVAAKLEMMEPCSSVKDRIGYSMISDAENKGLITPGESVLIEPTSGNTGIGLAFIAAAKGYRLIICMPASMSLERRTILRAFGAELVLTDPARGMKGAVQKAEEIKAKTPNSYILQQFENPANPKIHYETTGPEIWRGSGGKIDALVSGIGTGGTVTGAGKYLKEQNPNIKLYGVEPVESAILSGGKPGPHKIQGIGAGFIPGVLDVNLLDEVIQVSSEESIETAKLLALKEGLLVGISSGAAAAAAIRIAKRPENAGKLIVAVFPSFGERYLSTVLFESVKRETENMVFEP

SEQ ID NO: 90 - DNA, 2978 bp, Escherichia coli
  CDS (874)..(1845): transl_table=11
  exon (1846)..(2978)
gaattcaaagaggaaaagtgatgaaacaaggcttggcacagactccctggtatgtaattctcaggactattcaaagggaaatacccactgtcttacttcgttattggatgccagctctgcccatcacttacaaggatgcttttcctagggggcatcctatgactagggaacctccatcctggagccgggtggactggctaggcagtggattccctggcccattcatctattcagtcgtggagaatgtaaggaaggctgggcgacagaaggctgagttcgctgctgggctgttacaggagaaactagagactctgttcaaagtccagggtgggggctgtgggaggaaatattagggaagcggggttcgggggataggtggtgaagctcacatccatcacgggtctctgcacacgacacaggggctccagccaagcctgggatgtgagcacgaggctcggattgcgcatgagctctgggaaagggtgaaagcaaagacaagagttgcgggggcagggaagactgcgaggactcagggactgggttcccgtaaacaccgatgactgcccacattgtggaaagctgggaaggggcgggcaggaatcctggagcgctacttgtcattcgggacaaagtccctccgcgttgggggcgagtagggggacggaggcgtttcggtgcgcacggagcccagccgcgttccgggaatcttgcgctcggccgcgcgtggtgctcaccgcccgacccgggtgcagcgggcagctcgggtgcaggcgggggcagaccctctgcgcccggcccgcctcctgtgggtataatagcgctcggctcctgggctccaacacgcctcccaccggaccagtggatccgtcgaccatgagtaagatttttgaagataactcgctgactatcggtcacacgccgctggttcgcctgaatcgcatcggtaacggacgcattctggcgaaggtggaatctcgtaaccccagcttcagcgttaagtgccgtatcggtgccaacatgatttgggatgccgaaaagcgcggcgtgctgaaaccaggcgttgaactggttgaaccgaccagcggtaataccgggattgcactggcctatgtagctgccgctcgcggttacaaactcaccctgaccatgccagaaaccatgagtattgaacgccgcaagctgctgaaagcgttaggtgcaaacctggtgctgacggaaggtgctaaaggcatgaaaggcgcaatccaaaaagcagaagaaattgtcgccagcaatccagagaaatacctgctgctgcaacaattcagcaatccggcaaaccctgaaattcacgaaaagaccaccggtccggagatatgggaagataccgacggtcaggttgatgtatttattgctggcgttgggactggcggtacgtggactggcgtcacgccctacattaaaggcaccaaaggcaagaccgatcttatctctgtcgccgttgagccaaccgattctccagttatcgcccaggcgctggcaggtgaagagattaaacctggcccgcataaaattcagggtattggcgctggttttatcccggctaacctcgatctcaagctggtcgataaagtcattggcatcaccaatgaagaagcgatttctaccgcgcgtcgtctgatggaagaagaaggtattcttgcaggtatctcttctggagcagctgttgccgcggcgttgaaactacaagaagatgaaagctttaccaacaagaatattgtggttattctaccatcatcgggtgagcgttatttaagcaccgcattgtttgccgatctcttcactgagaaagaattgcaacagtaatggccagctgcgccttctagttgccagccatctgctgttacccctccctgtgccttcctagaccctggaaggtgccactccagtgcccaccgtcctttcttaataaagcggaggaaattgcatcacattgtctgagtaggtgtcattctattctagggggtggggtcgggcaggatagcgagggggaggattgggaagacaatagcaggggtgctgtgggctctatgggtacccaggtgctgaataattgacccggttcctcctggggcagaaagaagcaggcacatccccttctctgtgacacacccggtcctcgcccctggtccttagttccagccccactcataggacactcacagctcaggagggctccgccttcaatcccacccgctaaagtgcttggagcggtctctccctctcagccaccagccgaatctaggcctccagagtgggaagaatttaagcaagacaggctatgaagtacagagggagagaaaatgcctccaacatgtgaggaagtgatgagagaaagcgtagaattagttttgtggcataaattttaaggtgactacacacttggcccaactacccttgggaaatgtgtgtgtgttagtcactcagttgtgtccagctctttgtgaccccacggactgtggctgccaggctcctctgtccatgggattctccagggcaagaatactggagggggttgccattccccaggggatcttcccagcccaaggatcaaacccgagtttctgcattgcaggcagattctttactctctgagccatcagggaagccctgtgggaaatgggaaccatgcaagaatggctttgggaccaataggaccagaatgtttgggatctgaactgggtcaagagatgtggaagagagattctaaatgcatgtgttcatgctaagtggcttcagtcgtgtcctactatttgcaaccccgatgaactgcagccaccaggctcctctgtcatgggattctccattcaagaatactggagtgagtttccttcctccccaggggatctccaaacccagggattgaccaggatctcttgtatctcctggcacttgacaggcaaatctctcaccactagcgccactggacccagtctaag

SEQ ID NO: 91 - protein, 323 aa, Escherichia coli
MSKIFEDNSLTIGHTPLVRLNRIGNGRILAKVESRNPSFSVKCRIGANMIWDAEKRGVLKPGVELVEPTSGNTGIALAYVAAARGYKLTLTMPETMSIERRKLLKALGANLVLTEGAKGMKGAIQKAEEIVASNPEKYLLLQQFSNPANPEIHEKTTGPEIWEDTDGQVDVFIAGVGTGGTWTGVTPYIKGTKGKTDLISVAVEPTDSPVIAQALAGEEIKPGPHKIQGIGAGFIPANLDLKLVDKVIGITNEEAISTARRLMEEEGILAGISSGAAVAAALKLQEDESFTNKNIVVILPSSGERYLSTALFADLFTEKELQQ

SEQ ID NO: 92 - DNA, 1483 bp, Spinacia oleracea
  CDS (62)..(1213)
aatacattatacattgcagattacacacatacaggtacagagaggagagagaaagttggctatggcttcattggtcaacaacgcatacgctgcgattcgcacctccaaattggagctccgagaagttaagaatcttgccaatttccgagttggacctccatcatcgctcagctgcaacaatttcaagaaggtttcttcttctccaatcacctgcaaagctgtgtctctttcgcctccatccaccattgaaggccttaacattgctgaagatgtttctcagctaattggaaaaaccccaatggtgtatctcaacaatgtatcaaaaggatcagttgcaaacattgctgcgaagcttgagagcatggaaccttgctgcagtgtcaaggacaggattggctacagtatgattgatgatgctgagcagaaaggagttatcacacctggaaagactactctagtggagcctacgagtgggaatactggaataggacttgcctttatagctgctgccagaggatacaagattaccttgacaatgccagcttccatgagtatggaaaggagagttatcttgaaagcatttggagctgagttggtcctgactgatccagctaagggaatgaaaggagcagttgagaaggctgaagaaattttgaagaaaactcctgattcctacatgcttcagcagtttgacaatcctgcaaatcccaagatacattacgagacaacaggtcccgagatctgggaagacacaaaaggcaaagtggacatttttgttgcaggcattggaactggaggaacgatttctggagttggacggtacctcaaagaacgtaaccctggtgtgcaggtaattggtatagaacctacagaaagcaacatactttctggtggaaagcctggtccacacaagattcaaggacttggagctggttttgttcccagcaatttagatttgggtgtgatggatgaagttatagaggtatctagtgaagaagctgtagaaatggcaaagcaattggcaatgaaagaaggcttgttggttggcatttcatctggagcagcagcagctgctgcagtcaggattggtaaaagacctgaaaatgcaggaaaacttattgctgttgtgttcccaagctttggtgagagatacctgtcatccattttgttccagtctattcgagaagagtgtgaaaacatgaagccagaatagtgaggatcatttcttggatattcttggcgggggcacattgttagatttttcaggttgtgcctcttgcttgcttgtcgcgttctttagagccaagaatggtttatgttttctcaatttatttgttgacatgaaatgagcaataaaattatgcatgtagatcagaacagcagatgatgatttttaacaaattttcctaatattactttggcttactcaattattgttgcatatgatagtttttgtattcatgcacgagttctttcgaaaaaa

SEQ ID NO: 93 - protein, 383 aa, Spinacia oleracea
MASLVNNAYAAIRTSKLELREVKNLANFRVGPPSSLSCNNFKKVSSSPITCKAVSLSPPSTIEGLNIAEDVSQLIGKTPMVYLNNVSKGSVANIAAKLESMEPCCSVKDRIGYSMIDDAEQKGVITPGKTTLVEPTSGNTGIGLAFIAAARGYKITLTMPASMSMERRVILKAFGAELVLTDPAKGMKGAVEKAEEILKKTPDSYMLQQFDNPANPKIHYETTGPEIWEDTKGKVDIFVAGIGTGGTISGVGRYLKERNPGVQVIGIEPTESNILSGGKPGPHKIQGLGAGFVPSNLDLGVMDEVIEVSSEEAVEMAKQLAMKEGLLVGISSGAAAAAAVRIGKRPENAGKLIAVVFPSFGERYLSSILFQSIREECENMKPE

SEQ ID NO: 94 - DNA, 969 bp, Erwinia chrysanthemi
  CDS (1)..(969): transl_table=11
atgagtaagatctacgaagacaattctttcactatcggccatacgccgctggttcgtctgaatcgcatcggcaatgggcgtattctggctaaggtggagtcgcgtaacccgagcttcagcgtgaaatgccgtatcggcgccaatctgatttgggatgccgaaaaacgcggcgtgctgaagcccggcatcgaactcgtagaaccgaccagcggtaataccggtatcgcactggcgtatgtggcggcggcgcgcggttataaactgacgctgaccatgccggaaaccatgagcattgaacgccgcaagctgctcaaggcgctgggcgccaacctggtgctgaccgaaggcgccaaaggcatgaagggcgctatcgccaaagccgaagaaatcgtggccagcgacccgcaacgttacctgctgctgcagcagttcagtaacccggccaacccggaaattcacgaaaaaaccaccggcccggaaatctgggaagacaccgacggcgaagtggacgtgttcatttccggcgtgggcaccggcggtacgctgaccggcgttagccgttacatcaagaacaccaagggtaaagccatcatctccgttgccgttgagccaaccgactcgccggtcatcacccaggcgctggctggtgaagagatcaaacccggtccgcacaagatccaggggatcggcgccggtttcattccagccaacctggacctgaaactggtcgatcgcgttgagcgcgtcaccaacgaagaggctatccacaccgcgcgccgtctgatggaagaagaaggcattctggcggggatctcttcaggcgcagcggtagcggcggccctgaacctgctgaaagaagaggaattcgccaacaagaccatcgtggtgatcctgccctcttccggcgaacgttacctcagtacggcgttgtttgccgatctgttcaccgaacaggaactgcagcagtaa

SEQ ID NO: 95 - protein, 322 aa, Erwinia chrysanthemi
MSKIYEDNSFTIGHTPLVRLNRIGNGRILAKVESRNPSFSVKCRIGANLIWDAEKRGVLKPGIELVEPTSGNTGIALAYVAAARGYKLTLTMPETMSIERRKLLKALGANLVLTEGAKGMKGAIAKAEEIVASDPQRYLLLQQFSNPANPEIHEKTTGPEIWEDTDGEVDVFISGVGTGGTLTGVSRYIKNTKGKAIISVAVEPTDSPVITQALAGEEIKPGPHKIQGIGAGFIPANLDLKLVDRVERVTNEEAIHTARRLMEEEGILAGISSGAAVAAALNLLKEEEFANKTIVVILPSSGERYLSTALFADLFTEQELQQ

SEQ ID NO: 96 - DNA, 1678 bp, Sorghum bicolor
  CDS (198)..(1406)
cctcgatggctgctgccattgggtccccgttgcgattcgctgcgccctcaccaactaccctacacccactccgccagccactctaccagcggatccaccccatgtgcagcggcgagcctctaccagccagcctactcgggacctcgtagtcgcagtagcccccgaatcacgcgcacctttaccgcacgccgagaaggatgtcgtcgtggtcgtcgccctcagccgccgccgccgccaacacgggcgcccgattcggccccttcccttgccgagcgctgcggctcgcgccgtatccgtcgctcgcccggggagcccccgcctcgccgccgctcgtcctcaggtcccacccccacccgggcggccgtggccatggcctcctcgcgcgcaccggcggctcctctccctcctcgcggtgccgcgccgtcgccgccgaggtcgagggcctcaacatcgccgacaacgtcacccagctcatcggcaagacaccaatggtgtatctcaacaacgtcgtcaagggctcggtcgccaatgttgctgctaagctcgagattatggagccctgttgtagtgtcaaggacaggatagggtacagtatgataaatgatgctgaagagaggggcttgattactcctggaaagagtgttttggtggaagcaacaagtggaaatacaggcatcggtcttgcctttattgctgcatccaaaggatataagttgatattaacaatgccttcatcaatgagcatggagagaagagtcctactcagagcatttggtgccgaacttgtccttactgatgctgcaaaagggatgaaaggggccgtagataaggctacagagattttaaataagacacctaactcttacatgcttcaacagtttgataaccctgccaaccctaaggtacattatgagactaccggtccagagatctgggaggattcaaaggggaaggtagatatattcattggtggaattggaacaggggggacaatatctggtgctggccgtttcttaaaggagaaaaatcctggaattaaggttattggtattgagccttctgaaagtaacatactctccggtggaaaacctggtccacataagattcagggaattggcgcagggtttgttccaaggaacttggatagcgatattcttgatgaagtaattgagatatcaagtgatgaagctgttgagacagcaaaacagctggctgttcaggaaggattactggtgggaatctcctctggagcagctgccgccgctgccataaaggttgccaaaagaccagaaaatgctggaaagctgatagtggttgtgtttccgagctttggcgagaggtacctttcaactgtcctctatcagtccataagagaagaatgcgaaaacatgcagcctgagccatgaggaagccgtcactttaaacagcataataaatgtttctaaaataagatgtgtggccagcatcggtgtgctccacttgatatcatttggccatgcccacgctatccttttggctctatgaccggaactatacaggcgtgtgagaaatatccatgactctcccaactgctttccacacttcttaattgtctatacgattcaagctgatttgattggtatttgtaaacaatttgtccttgaatctttgaagtcaaacaaagtcagttggccgaatc

SEQ ID NO: 97 - protein, 402 aa, Sorghum bicolor
MSSWSSPSAAAAANTGARFGPFPCRALRLAPYPSLARGAPASPPLVLRSHPHPGGRGHGLLARTGGSSPSSRCRAVAAEVEGLNIADNVTQLIGKTPMVYLNNVVKGSVANVAAKLEIMEPCCSVKDRIGYSMINDAEERGLITPGKSVLVEATSGNTGIGLAFIAASKGYKLILTMPSSMSMERRVLLRAFGAELVLTDAAKGMKGAVDKATEILNKTPNSYMLQQFDNPANPKVHYETTGPEIWEDSKGKVDIFIGGIGTGGTISGAGRFLKEKNPGIKVIGIEPSESNILSGGKPGPHKIQGIGAGFVPRNLDSDILDEVIEISSDEAVETAKQLAVQEGLLVGISSGAAAAAAIKVAKRPENAGKLIVVVFPSFGERYLSTVLYQSIREECENMQPEP

SEQ ID NO: 98 - DNA, 1407 bp, Glycine max
  CDS (126)..(1103)
ccctgttcaaaatcggtcgatccactgccaccgccagctttgtagttcgtagatagccgatgtgcttgtcttagtgtgtcagtcattcctgttcctcaagtcaagctttgtagtgagcagatataatggctgttgaaaggtccggaattgccaaagatgttacggaattgattggtaaaaccccattagtatatctaaataaacttgcggatggttgtgttgcccgggttgctgctaaactggagttgatggagccatgctctagtgtgaaggacaggattgggtatagtatgattgctgatgcagaagagaagggacttatcacacctggaaagagtgtcctcattgagccaacaagtggtaatactggcattggattagccttcatggcagcagccaggggttacaagctcataattacaatgcctgcttctatgagtcttgagagaagaatcattctattagcttttggagctgagttggttctgacagatcctgctaagggaatgaaaggtgctgttcagaaggctgaagagatattggctaagacgcccaatgcctacatacttcaacaatttgaaaaccctgccaatcccaaggttcattatgaaaccactggtccagagatatggaaaggctccgatgggaaaattgatgcatttgtttctgggataggcactggtggtacaataacaggtgctggaaaatatcttaaagagcagaatccgaatataaagctgattggtgtggaaccagttgaaagtccagtgctctcaggaggaaagcctggtccacacaagattcaagggattggtgctggttttatccctggtgtcttggaagtcaatcttcttgatgaagttattcaaatatcaagtgatgaagcaatagaaactgcaaagcttcttgcgcttaaagaaggcctatttgtgggaatatcttccggagctgcagctgctgctgcttttcagattgcaaaaagaccagaaaatgccgggaagcttattgttgccgtttttcccagcttcggggagaggtacctgtcctccgtgctatttgagtcagtgagacgcgaagctgaaagcatgacttttgagccctgaattcccgtttaaggctctcactactgaattttcttgttacttgtaccaggctttaactagattgttagagtactactgtttgtgactctgactctaaaataaaacttgctccaaaagactagtttttcttgatgcccctggagcgataattttgtgcctgcaacattaaaaagtattcaaagttgcttataagtaacatgtttcatcttttgttgttgttgagacgaacacggatgaggtcataataccatgtttctgatttcctttggtagggaagatatagaccgaagttgatttgttggac

SEQ ID NO: 99 - protein, 325 aa, Glycine max
MAVERSGIAKDVTELIGKTPLVYLNKLADGCVARVAAKLELMEPCSSVKDRIGYSMIADAEEKGLITPGKSVLIEPTSGNTGIGLAFMAAARGYKLIITMPASMSLERRIILLAFGAELVLTDPAKGMKGAVQKAEEILAKTPNAYILQQFENPANPKVHYETTGPEIWKGSDGKIDAFVSGIGTGGTITGAGKYLKEQNPNIKLIGVEPVESPVLSGGKPGPHKIQGIGAGFIPGVLEVNLLDEVIQISSDEAIETAKLLALKEGLFVGISSGAAAAAAFQIAKRPENAGKLIVAVFPSFGERYLSSVLFESVRREAESMTFEP

SEQ ID NO: 100 - DNA, 1618 bp, Glycine max; identical to SEQ ID NO: 84
  CDS (163)..(1347)

SEQ ID NO: 101 - protein, 394 aa, Glycine max
MASSASLINSLTCSSPAPTQHCFAFTRTTATATATSLRQFNSHRPPPLTTRISSSPSTVVCKAVSVKPQTETEGLNIADDVTQLIGKTPMVYLNNIVKGSVANIAAKLEIMEPCCSVKDRIGFSMINDAEQRGAITPGKSILVEPTSGNTGIGLAFIAASRGYKLILTMPASMSLERRVLLKAFGAELVLTDAAKGMNGAVQKAEEILKSTPNSYMLQQFDNPSNPKVHYETTGPEIWEDTRGKIDILVAGIGTGGTVSGAGQFLKQQNPKIQVIGVEPLESNILTGGKPGPHKIQGIGAGFVPRNLDQDVLDEVIAISSDEAVETAKQLALQEGLLVGISSGAAAAAALKVGKRPENAGKLIGVVFPSFGERYLSTILFQSIREECEKMQPEP

SEQ ID NO: 102 - DNA, 1077 bp, Coprinopsis cinerea
  Coprinopsis cinerea okayama7#130
  CDS (1)..(1077)
atgatattctcttccagcttgcgctccgctgcgagacggggctttgttaccaatgcgcctgtgaatggctttgatggtgctattggcaacacccctctgatttacttgaaaggcctctcggaacgcattggttccaagatttatggcaaggccgagttccaaaaccccggtggaagtgtcaaggaccgtgctgcccttgggctcatcaacaatgctgaaaagctcggattgttgaagcctggtggcacagtcgttgagggcaccgctggtaacactggtattggtctcgctcatgtctgccgagcgaagggatacaagtgcgttatctacatgcctaacacccagagtcaggaaaagatcgacctccttcgtatgctcggtgcagacgtccgccccgtccccgccgtagcctacgaaaaccccaaaaactacaatcaccaagccaaagaatatgccgaatcgttacccaacgccgtctggaccaaccaattcgacaacgtcgctaatgcccaggcgcattatgatactactggaccagagatttgggaacagaccgggggcaaggtggatgggttcatttgtgccacaggtacgggtggtactttggcgggtgttgggaggtacttgaaggagaagagtggggggaagacgcaggtttggattgcggatcctccaggaagtgtgttgaccagctatgtgaatagcgggggcaagttgacagagaggtctgggagctctattaccgagggtattggccagggtcgtatcacggacaacttgggcacctttgtgaagcaagtggacggtgctttcactgtgccggatgagaaatccatcgctatgctttacgagctccttgagaccgagggtctctatctcggcgcaagcactgcactcaacgttgtcgctgcctatgagctcgcgcagaagctcggcaagggctccagcgttgttaccatccttgccgatggagcctaccgataccagagccgactgttctcgaagaagtggctagaggccaagggattgtctggtgctatccctgaacacctcaaaaagtattctgtcttggagtag

SEQ ID NO: 103 - protein, 358 aa, Coprinopsis cinerea
  Coprinopsis cinerea okayama7#130
MIFSSSLRSAARRGFVTNAPVNGFDGAIGNTPLIYLKGLSERIGSKIYGKAEFQNPGGSVKDRAALGLINNAEKLGLLKPGGTVVEGTAGNTGIGLAHVCRAKGYKCVIYMPNTQSQEKIDLLRMLGADVRPVPAVAYENPKNYNHQAKEYAESLPNAVWTNQFDNVANAQAHYDTTGPEIWEQTGGKVDGFICATGTGGTLAGVGRYLKEKSGGKTQVWIADPPGSVLTSYVNSGGKLTERSGSSITEGIGQGRITDNLGTFVKQVDGAFTVPDEKSIAMLYELLETEGLYLGASTALNVVAAYELAQKLGKGSSVVTILADGAYRYQSRLFSKKWLEAKGLSGAIPEHLKKYSVLE

SEQ ID NO: 104 - DNA, 1125 bp, Coprinopsis cinerea
  Coprinopsis cinerea okayama7#130
  CDS (1)..(1125)
atgaccgctgcaattctcgataatgccctcggcgctgttggccacacaccgctgattcgactggacaagattgcaaaggcttatgacctgaaatgcaacctacttggcaaggtcgagtatatgtccgcgggtgggtccgtgaaggaccgaattgcaaaggctatggtcgaagcagcagagcgggagggcaagctcatccccggcaagagtgttgtcattgaacccacgtccggcaacactgataaggggtattcggttatcataaccctccccaataaaatgtcactagaaaaggaagctctcctgcgtgcacttggagctgaagttatccgcacaccgaccgaagccgcttgggacgctcctgaaagccacataggagtcgcgcagcgcctgcaaagggaaatccctcacgctatcatcctcgaccagtataagaacgtaaacaacccactcgctcatgaatacaccactggccctgaaatcgtcgctgctgttgaggcgaccccgtctacctcggcccacccttcgtcgggcaaggttgacgtcattgtcgctggcgctggtacgggtggtactgtcaccggtctttcgcgcgcaatcaaaaagaagcataacaaggaatgcattgtcgttgctgccgaccccaaaggaagtgtacttgctctccccaacaacttgaacgacgaagatgccggtgcgatgtatgtggttgagggtatcggatacgattttgttccggacgttcttacccgagatccaaccgaaatcgattactggctgaagaccggagatgaggagtctttcgatgctgtccagcagctgatgaggaaggagggactcctcgttggtggtagcagtggaagcgctctttctggtgccttgagatggctcaagagtgacgctggtcgacctattgccgagaccgaagggaagaacgttgtcgtattgctacctgatggaatccgaaattacatgagcaagccttggttcttgaagatcgctatggaagcggagccctcgcctctcgctggaaccattgcccagatcctcaagaagcctgaagcctctaagactcccagcgcccccactattgctcaatcaccgagctcccagacctcgcattga

SEQ ID NO: 105 - protein, 374 aa, Coprinopsis cinerea
  Coprinopsis cinerea okayama7#130
MTAAILDNALGAVGHTPLIRLDKIAKAYDLKCNLLGKVEYMSAGGSVKDRIAKAMVEAAEREGKLIPGKSVVIEPTSGNTDKGYSVIITLPNKMSLEKEALLRALGAEVIRTPTEAAWDAPESHIGVAQRLQREIPHAIILDQYKNVNNPLAHEYTTGPEIVAAVEATPSTSAHPSSGKVDVIVAGAGTGGTVTGLSRAIKKKHNKECIVVAADPKGSVLALPNNLNDEDAGAMYVVEGIGYDFVPDVLTRDPTEIDYWLKTGDEESFDAVQQLMRKEGLLVGGSSGSALSGALRWLKSDAGRPIAETEGKNVVVLLPDGIRNYMSKPWFLKIAMEAEPSPLAGTIAQILKKPEASKTPSAPTIAQSPSSQTSH

SEQ ID NO: 106 - DNA, 954 bp, Clavibacter michiganensis
  Clavibacter michiganensis subsp. sepedonicus
  CDS (1)..(954): transl_table=11
atgaaggtggaacccatggcaggtcgcgtctacgacgacatcacccagctggtcggcggcacgccgctcgtccggctcaaccggctcaccgagggactcgacgcgacggtgctcgtgaagctcgagtcgcacaacccggcgtccagcgtgaaggaccgcatcggcgtcgccatcatcgacgcggccgaggaggcgggggcgctgaagcccggcggcaccatcgtcgagggcacgagcggcaacacgggcatcgcgctcgcgatggtcggcgcggcgcgtgggtacaaggtcgtgctcacgatgcccgagacgatgagcatcgagcgccggctggtgctgcgcgcgtacggcgccgagatcgtgctgacccccggccccgagggcatgcgcggcgcggtcgaccgggccaagcagatcgtggacgagacgccgaactccatctgggcgcagcagttcgcgaacgcggcgaacccgcagaagcaccgcgagaccacggccgaggaggtctgggcggacaccgacggcagcgtcgacgtgttcatcgcgggcgtcggcacgggcggcaccatcacgggcgtcggccaggtgctgaaggagcggaagccgggcgtcaagatcgtcgcggtcgagccgctcgactcgcccatcctcaacggcggcaagcccggccctcacaagatccagggcatcggcgcgaacttcgtgcccgagatcctcgacaccgggatctacgacgaggtcgtcgacgtctcgctcgaggactccatccgcgtctcgcgcgcgctcgcgaccgacgagggcatcctctgcgggatctcgtccggatccatcgtgtgggccgcgctcgagatcgcgaagcgcccggagagcaaaggcaagaccatcgtggcgatcgtgtgcgacttcggcgagcggtacctctcgaccgtgctgttcgacgacctgcgcgactag

SEQ ID NO: 107 - protein, 317 aa, Clavibacter michiganensis
  Clavibacter michiganensis subsp. sepedonicus
MKVEPMAGRVYDDITQLVGGTPLVRLNRLTEGLDATVLVKLESHNPASSVKDRIGVAIIDAAEEAGALKPGGTIVEGTSGNTGIALAMVGAARGYKVVLTMPETMSIERRLVLRAYGAEIVLTPGPEGMRGAVDRAKQIVDETPNSIWAQQFANAANPQKHRETTAEEVWADTDGSVDVFIAGVGTGGTITGVGQVLKERKPGVKIVAVEPLDSPILNGGKPGPHKIQGIGANFVPEILDTGIYDEVVDVSLEDSIRVSRALATDEGILCGISSGSIVWAALEIAKRPESKGKTIVAIVCDFGERYLSTVLFDDLRD

SEQ ID NO: 108 - DNA, 960 bp, Synechococcus sp.
  Synechococcus sp. PCC 7002
  CDS (1)..(960): transl_table=11
atgaaaattgccaagaacattaccgaattagtaggaaaaacgccccttgtgcagttaaatcgtattcctgagcaggaaaattgtgttgcccaggttgtgatcaaattagaagggatgaatccagccgcctccgttaaagaccgcattggcgtcaatatgatcgaagctgccgaagccgctggggaaatcacccccggtaaaacgattttggtagaaccgacttccgggaatacaggcattgccctagcgatggccgctgccgccaaaggctatcagttaattttgacgatgccagaaaccatgagtatggagcgacgggccatgctcctcgcctatggagcacaactcgaactgacctctggggatgcgggcatgagtgcttgtatcaccaaagcccaggaaatcgtcgataccctgcccaatgcctatatgttgcagcagtttaataatttggcgaaccccgatgcccaccgcaaaactacagccctcgaaatttgggaagatacagagggaaaagtcgatatgatcattgctggagttggtaccggtggcacaattaccggaatcgccgaggtgctaaaaaaatataagcccgaatgccaggcgatcgccgttgaaccagccaatagccccgtactttctggtggtaaacccggcccccacaaaatccaaggcatcggcgcgggtttcgtccccagtgtgctcaatcaaaccatcattgatgaagtggtgacggtaaccgacgaagccgcgattaattttggccgtcgcttagctagggaagaaggtattttatcgggcatttcaacgggggccgccctctgtgctgcgatcaaggttgcccaacgtccagaaaacagtggcaaactcattgttgtgatccaaccaagctacggggaaagatacctgagtactcccctttatcaggatctccctgccaacgtgattcattcggtttga

SEQ ID NO: 109 - protein, 319 aa, Synechococcus sp.
  Synechococcus sp. PCC 7002
MKIAKNITELVGKTPLVQLNRIPEQENCVAQVVIKLEGMNPAASVKDRIGVNMIEAAEAAGEITPGKTILVEPTSGNTGIALAMAAAAKGYQLILTMPETMSMERRAMLLAYGAQLELTSGDAGMSACITKAQEIVDTLPNAYMLQQFNNLANPDAHRKTTALEIWEDTEGKVDMIIAGVGTGGTITGIAEVLKKYKPECQAIAVEPANSPVLSGGKPGPHKIQGIGAGFVPSVLNQTIIDEVVTVTDEAAINFGRRLAREEGILSGISTGAALCAAIKVAQRPENSGKLIVVIQPSYGERYLSTPLYQDLPANVIHSV

SEQ ID NO: 110 - DNA, 978 bp, Synechococcus sp. PCC 7002
  CDS (1)..(978): transl_table=11
atggatatcaaagacggttttgttggtgcagttggcaacacccccctcattcgcctaaacagttttagtgaagcaacgggctgtgaaattttaggcaaagcagaatttctcaatcccggtggttccgtcaaagaccgggccgccctctacatcatcaaagacgccgaagaacggggcctgctcaaacctggtggcaccgttgttgaaggcaccgcagggaacacaggcattggtctggttcatatctgtaatgctaagggttacaagtgcatcattgtgatccccgaaacccagtcccaagaaaaaattgacctgctccgcactttaggggcagaagtaattacggttccggcggtgccctatgccgaccctaacaattatgtgaaatattcccaacggctcgccgcagaaacagaaaacgcgatctgggcgaatcagtttgataatttagccaaccgccgcgcccactacgagaccactggccccgaaatttgggctcaaaccgacggcaaaattgatgcttggacggctgctacgggaactgggggcacctatgctggtaccgccctttacctcaaggaaaaaaatcctaacgttaaatgtgttgtggctgaccccatgggtagtgtgctctatagctatgtaaaaacgggcaaactcgaccgggaaggcggttcgatcacggaaggcattggtcaaggacgcattaccgccaatatggaaggagtgcccatggacgacgccattcgggttgatgaccaagaggcggtgcaggttgtgtatcaactcttgaaaaaagatggtctgtttatggggggctccgtaggaattaatgtcggtgctgcctatgccctcgcgaaggaaatggggccaggtcatactattgtgacggtgttgtgtgacagtggcgctcgttatcaatctcgcctatttaacccagcatggctcgccagtaaagggctatctattcctaattaa

SEQ ID NO: 111 - protein, 325 aa, Synechococcus sp. PCC 7002
MDIKDGFVGAVGNTPLIRLNSFSEATGCEILGKAEFLNPGGSVKDRAALYIIKDAEERGLLKPGGTVVEGTAGNTGIGLVHICNAKGYKCIIVIPETQSQEKIDLLRTLGAEVITVPAVPYADPNNYVKYSQRLAAETENAIWANQFDNLANRRAHYETTGPEIWAQTDGKIDAWTAATGTGGTYAGTALYLKEKNPNVKCVVADPMGSVLYSYVKTGKLDREGGSITEGIGQGRITANMEGVPMDDAIRVDDQEAVQVVYQLLKKDGLFMGGSVGINVGAAYALAKEMGPGHTIVTVLCDSGARYQSRLFNPAWLASKGLSIPN

SEQ ID NO: 112 - DNA, 924 bp, Exiguobacterium sibiricum 255-15
  CDS (1)..(924): transl_table=11
atgatcgcgaaatcagtccgcgacctcgtcggaaatacgccgctctacgagattacttcattcgatttgcctgctggtacgcggattttggcgaagctcgaatggatgaaccctgggggcagcgtcaaagaccgcctgggcattcaactcgttgatgccgcgatcgaacagggatatgtgacacgaggcggaacgatcatcgaaccgactgccggcaacaccggcatcggtttggcgctcgccgctaaaaaatatgaccttcaagtcatctgtgtcgttccggaaaagttcagccaggagaaacagacgttgatgcgggcactcggcgcgactgtcgtcaacacaccgactgagctcgatatgcagggtgcgatcgataaagccaaagaactcggacaaacgattccaaacagctatgttccgcttcaattcgaaaacgaagaaaatccggttacgtatcagcggacacttggtcctgagctgatggcggagctggatcagattgattggttcgttgcgggatgcggatcaggtggaacgtttgccggaacagcggcgtatttaaaagaacgtctcgggacaaaaggtgcaatcgttgaaccggaaggctcagtcctcaacgggggaccggccggaccgcataagacggaaggcatcgggacggccaaatggccaagtctcgtttcccgtgacttagtggatgaaattcatacgatttccgatcatgacgcttttacgaaagtccatgagctagcggcccgtgaaggattgctcgtcggcagttcggccggcgcggcactcgttgcagcacttgatctggcacatcgttttcccggcagtaccatcgtcaccgtctttgcggacagtgccgaacggtatttaagccaacaaatctttgaaaaggtggacgagacacatgcgtaa

SEQ ID NO: 113 - protein, 307 aa, Exiguobacterium sibiricum 255-15
MIAKSVRDLVGNTPLYEITSFDLPAGTRILAKLEWMNPGGSVKDRLGIQLVDAAIEQGYVTRGGTIIEPTAGNTGIGLALAAKKYDLQVICVVPEKFSQEKQTLMRALGATVVNTPTELDMQGAIDKAKELGQTIPNSYVPLQFENEENPVTYQRTLGPELMAELDQIDWFVAGCGSGGTFAGTAAYLKERLGTKGAIVEPEGSVLNGGPAGPHKTEGIGTAKWPSLVSRDLVDEIHTISDHDAFTKVHELAAREGLLVGSSAGAALVAALDLAHRFPGSTIVTVFADSAERYLSQQIFEKVDETHA

SEQ ID NO: 114 - DNA, 981 bp, Mesorhizobium loti MAFF303099
  CDS (1)..(981): transl_table=11
atgaacaagcccgtcacctccgcccgcgtccccggccgcggccgcatctacagttccatcaccgacacgatcggcgacacgcccctggtccggctcgacaaattcgccaaggagaagggggttgtcgccaatctcgtggccaagctcgaattcttcaacccgatcgcctcggtcaaggaccgcatcggcgtggcgatgatcgaggcgctggaggcggccggcaagatctcgcccggcaagacgacgctgatcgaaccgacctcgggcaacaccggcatcgcgcttgccttcgccgccgccgccaagggctacaagctcatcctgaccatgcccgaaacgatgtcggtcgagcgccgcaagatgctggcgctgctcggcgccgaactggtgctgaccgaagggccgaaaggcatgaagggcgccatcgccaaggccgacgagctggccgcgacaatccccaatgccgttatcccgcagcagttcgaaaaccccgccaacccggaaatccaccgcaagacgacagcgcaggagatctggaacgacacgcagggcgaggtcgacatcttcgtcgccggcatcggcacgggcggcaccatcaccggcgtcggccaggtgctgaagaagctcaagccctcgctgcatgtcgtcgccgtcgagccggaagcctcgccggtgctgtcgggcggccagcccggcccgcacaagatccagggcatcggcgccggcttcgcaccaaaaatcctcgacaccacgatctatgacgagatcatcaaggtttccaacgaggattccgtcgccaatgcccgcctcgtcgcccgtctcgaaggggtgccggtcggcatctcgtcgggtgcggcgctgcaggcggcaatcgtcgtcggctcgcggccggagaacaagggcaagaccctggtcgtggtcatccccgacttcgccgagcgctacctgtcgacgatcttgttcgaggggctgggggcttag

SEQ ID NO: 115 - protein, 326 aa, Mesorhizobium loti MAFF303099
MNKPVTSARVPGRGRIYSSITDTIGDTPLVRLDKFAKEKGVVANLVAKLEFFNPIASVKDRIGVAMIEALEAAGKISPGKTTLIEPTSGNTGIALAFAAAAKGYKLILTMPETMSVERRKMLALLGAELVLTEGPKGMKGAIAKADELAATIPNAVIPQQFENPANPEIHRKTTAQEIWNDTQGEVDIFVAGIGTGGTITGVGQVLKKLKPSLHVVAVEPEASPVLSGGQPGPHKIQGIGAGFAPKILDTTIYDEIIKVSNEDSVANARLVARLEGVPVGISSGAALQAAIVVGSRPENKGKTLVVVIPDFAERYLSTILFEGLGA

SEQ ID NO: 116 - DNA, 1089 bp, Mesorhizobium loti MAFF303099
  CDS (1)..(1089): transl_table=11
atgttgaatcgacagaaaatcaggaccaccgccgggcgcggccgcctgttcgacagcattctcgacaccgtcggcgacacgccggtgatccgcgtcaacaatctcgggccggcccatgcgacggtctacgtcaaggccgagttcttcaaccccgccgcctcggtcaaggaccggctggcgctcaacatcatcgaggagggcgagcgcagcggtgcgttgaagcccggccagacggtggtcgaggccaccagtggcaacaccggcattgggctggccatggtctgcgcgcaaaagggctatccgctggtcgtcaccatggccgacagcttttccgtcgagcgccgcaagctgatgcgcatgctgggcgccaaggtggtgctgacgccgcgcgccgaaaagggttttggcatgtacaagaaggcggtggagctggccgaggccaatggctggttcctcgcccgccagttcgagaccgccgccaacgccgccatccacgaggcgaccacggcgcgcgagatcatcaatgatttcgccggctcgcggctcgactgcttcgtcaccggctacggcaccggcggcaccgtcgtcggcgtggcgcgtgtgctgcgccgcgagcggccggacacccgcatcgtgctctccgaaccggccaatgcgcagctcattggcagcggcaaggcacagcagcgcggtgcccatggcgcccctgccgccagccatccggccttcgagccgcatccgatccagggctggacgccggacttcatccccaatgtgctgcaagaggcgatcgacgccagcctctatgacgaggtgatgccgattgccgggcccgaaggcatcaaatgggccaaggcactggctcagaaggagggcatctttaccggaatttccggcggcgccaccttcgccgtggcacggcaggtcgcggaaaaggcgccggccggatcggtgatcctgtgcatgctgcccgacaccggcgagcgctacatgtcgacgccgctgttcgacggcatcgaggccgagatggatgccgaggagatggcgctgtcgcgctcgacgcccggcggccagttcccggcggcttga

SEQ ID NO: 117 - protein, 362 aa, Mesorhizobium loti MAFF303099
MLNRQKIRTTAGRGRLFDSILDTVGDTPVIRVNNLGPAHATVYVKAEFFNPAASVKDRLALNIIEEGERSGALKPGQTVVEATSGNTGIGLAMVCAQKGYPLVVTMADSFSVERRKLMRMLGAKVVLTPRAEKGFGMYKKAVELAEANGWFLARQFETAANAAIHEATTAREIINDFAGSRLDCFVTGYGTGGTVVGVARVLRRERPDTRIVLSEPANAQLIGSGKAQQRGAHGAPAASHPAFEPHPIQGWTPDFIPNVLQEAIDASLYDEVMPIAGPEGIKWAKALAQKEGIFTGISGGATFAVARQVAEKAPAGSVILCMLPDTGERYMSTPLFDGIEAEMDAEEMALSRSTPGGQFPAA

SEQ ID NO: 118 - DNA, 930 bp, Thermoplasma volcanium GSS1
  CDS (1)..(930): transl_table=11
atgatgcacgcagaattagggccagatatggtttccaagattcttgaccacatgaaggctgcgcatataggaaatacgcctgtagaagagatcgatgcgaatggcaatatatacgctaagatagaatgggagaataggttcgggtcgatcaaagataggccggcattcttcataatggattatcttaagtccaagggtgtacttgaaggtaaggctatagtagaagcctcatcaggaaatactggccttgcgatatctacaatatcctctatgttgggcttgcagtcctgcattgttttgccagaaaacgcaagtcaggcaacaaagaaaattatagttgaaaatggctctcaactcattcttacgcctcccgatcttggtactgaggggagcatagaaaaagcaaggtcattagcctcttcaggcagtttttattggataaatcagcattcgaacccactcaacagcgatgtacactactacagtacagcacctgaattgctagatcaggaagggatgcctgaagcaatagttgcgggagtaggaacgggtggtacgatcacaggcatagcaagatactttaaggaaagagacccatcagtaaaggtgataggcgttcagccatcgctatattcccacatccctgggctaagggatataaagaagacttctaacaaaggcttgatcgatctttacggcagctacatcgatgatttcctatatgtgaaggaatcagatgccattgcagaagttttcgatcattacgtaaatacaggggagcttatagggatatcttcgggtgcaaatctttacgcgtctaagcagctctcgagcaaatttaagaagatattcacagtattcccagatagcggccgcaagtatttggatattttaaagccatacgataaaaacaacgttttaaattattga

SEQ ID NO: 119 - protein, 309 aa, Thermoplasma volcanium GSS1
MMHAELGPDMVSKILDHMKAAHIGNTPVEEIDANGNIYAKIEWENRFGSIKDRPAFFIMDYLKSKGVLEGKAIVEASSGNTGLAISTISSMLGLQSCIVLPENASQATKKIIVENGSQLILTPPDLGTEGSIEKARSLASSGSFYWINQHSNPLNSDVHYYSTAPELLDQEGMPEAIVAGVGTGGTITGIARYFKERDPSVKVIGVQPSLYSHIPGLRDIKKTSNKGLIDLYGSYIDDFLYVKESDAIAEVFDHYVNTGELIGISSGANLYASKQLSSKFKKIFTVFPDSGRKYLDILKPYDKNNVLNY

SEQ ID NO: 120 - DNA, 876 bp, Thermotoga maritima MSB8
  CDS (1)..(876): transl_table=11
atgatggaaagactgatagggagcactcctatagtgagactcgattcgatagactcgagaatcttcttgaaactggaaaagaataatcccggtggtagtgtaaaagacagacccgccctcttcatgattctcgacgcagagaaaagaggactcctcaagaacggtatcgtggaaccaacgagcggcaacatgggaatcgccatagcgatgatcggagcaaagagaggacacagggtgatcctcacgatgcccgaaaccatgagcgttgagagaagaaaggtcctgaaaatgctcggagcagaactcgttctcacaccaggggaactgggaatgaaaggtgcggtggaaaaggcgctcgagatatccagagaaaccggcgcgcacatgctcaaccagttcgaaaacccctacaacgtctactctcaccagttcactacaggtccggagatcctcaaacagatggactatcagatagacgccttcgtcgcgggagtgggaacgggaggcacgatcagcggagtgggaagggttttgaaaggcttctttggaaacggagtgaagatagtagcggtagagcccgcaaaatctcccgttctctctggaggccagccgggaaaacacgccatccagggtataggagcgggctttgttccgaagatcctggacagatccgtgatagacgaagtgatcaccgtggaggacgaagaggcctacgagatggcgaggtacctcgcaaaaaaagagggacttctcgtagggatctcttccggtgccaacgtcgcagccgctttgaaagtagcccagaaactcgggccagacgcgagggttgtgaccgttgcaccggaccacgcggaaagatacctgagtatcctatga

SEQ ID NO: 121 - protein, 291 aa, Thermotoga maritima MSB8
MMERLIGSTPIVRLDSIDSRIFLKLEKNNPGGSVKDRPALFMILDAEKRGLLKNGIVEPTSGNMGIAIAMIGAKRGHRVILTMPETMSVERRKVLKMLGAELVLTPGELGMKGAVEKALEISRETGAHMLNQFENPYNVYSHQFTTGPEILKQMDYQIDAFVAGVGTGGTISGVGRVLKGFFGNGVKIVAVEPAKSPVLSGGQPGKHAIQGIGAGFVPKILDRSVIDEVITVEDEEAYEMARYLAKKEGLLVGISSGANVAAALKVAQKLGPDARVVTVAPDHAERYLSIL

SEQ ID NO: 122 - DNA, 969 bp, Vibrio cholerae O1 biovar eltor str. N16961
  CDS (1)..(969): transl_table=11
atgagcaaaatctacgaagacaattcactgactattggtaacactccactagtgcgcttaaacaaagtctctaacggcaaagtgctggctaagattgaagcacgcaacccaagcttcagcgtaaaatgccgaatcggagccaatatgatttgggaagctgaaaagcaaggcaaactcaagcctggcgttgaattagtagagccaacaagtggtaatactggtgttgccctagcgtttgttgctgcagctcgtggatacaagttaactctgaccatgcctgaatcgatgagtttagagcgtcgtaagctactcaaagcacttggcgccaatttagaactgactgaagcagcaaaaggcatgaaaggcgcgattgcgaaagcagaagagattgttgccagcaacccagaaaaatatttgctcctccagcaattcaataacccagctaacccgcagatccatgaaaagaccacaggcccagagatttgggatgcaacagatggtcaaattgatgtgtttgttgctggtgtgggtactggcggtacattaacgggtaccagtcgctacatcaaaggcactcaaggtaaagctattctttctgttgcggttgaaccggctgaatcaccggtcattacacaagcgctggcgggagaagaaatcaaacctgctccacataaaattcaaggtatcggtgccggttttatccctggtaacttagatttaagcttgattgatcgtgttgagcgtgtcacctcagatgaagcgattgaaatggcgcgtcgcctaatggaagaagaaggcattctcgcggggatctcttctggtgctgcggttgttgccgctaaccgaatcgcacaattgcctgaatttgaaggaaaaactatagttactgtgttaccaagttcaggtgaacgttacttgagcacagctctattcgcaggcattttcactgataaagaaaaccagcagtaa

SEQ ID NO: 123 - protein, 322 aa, Vibrio cholerae O1 biovar eltor str. N16961
MSKIYEDNSLTIGNTPLVRLNKVSNGKVLAKIEARNPSFSVKCRIGANMIWEAEKQGKLKPGVELVEPTSGNTGVALAFVAAARGYKLTLTMPESMSLERRKLLKALGANLELTEAAKGMKGAIAKAEEIVASNPEKYLLLQQFNNPANPQIHEKTTGPEIWDATDGQIDVFVAGVGTGGTLTGTSRYIKGTQGKAILSVAVEPAESPVITQALAGEEIKPAPHKIQGIGAGFIPGNLDLSLIDRVERVTSDEAIEMARRLMEEEGILAGISSGAAVVAANRIAQLPEFEGKTIVTVLPSSGERYLSTALFAGIFTDKENQQ

SEQ ID NO: 124 - DNA, 924 bp, Bacillus halodurans C-125
  CDS (1)..(924): transl_table=11
atgagagtggcaaactccattaccgatttgatcggtcaaacgccgttagtaaaattaaatcgactcgtttctgacaaacatgccgatgtttacttaaagcttgaattttttaaccctggaagcagcgtaaaagatcgtattgcacttgcgatgattgaagctgcagaaaagtctggggctttaaagcctgatgatacaatcgttgagcctacttctggaaatactgggatcggccttgcgatggttgctgcggcaaaagggtataaaacaaaacttgtcatgcctgagacgatgagtttagagcgccggaacttgctgcgtgcatacggtgcagagcttgttctaactcctggccctgaaggaatgggaggagcgattcgtaaagcaacagagcttgcccaagaaaatgggtacttcatgccacaacaatttgaaaatgaagcgaacccagaaattcaccgtgaaacgacaggtcgtgagcttcttgagcaggtggacggtcagcttgatggcttcgtatctggaattggaacaggtggaacgattacaggtgcaggtggattgctaaaagaaaacttcccgaacttgcacattgcagctgttgagcctgcagattctccagtattatctggtggaaacccagggcctcataaaattcaaggaattggtgccggatttgtgccgaaaatccttgatacagacatctatgatgaagtcataaaagtttcaacagaacaagcatttgaatacgctcgtcgtgcagcgaaagaagaaggaatccttggaggaatttcttctggtgcagccatttatgcagcgttgcaagtggctgaaaagcttgggccaggtaaaaaagtagtagccgtcatcccatcaaatggagagcgctacttgagcacacctctttatcaatttgaggactaa

SEQ ID NO: 125 - protein, 307 aa, Bacillus halodurans C-125
MRVANSITDLIGQTPLVKLNRLVSDKHADVYLKLEFFNPGSSVKDRIALAMIEAAEKSGALKPDDTIVEPTSGNTGIGLAMVAAAKGYKTKLVMPETMSLERRNLLRAYGAELVLTPGPEGMGGAIRKATELAQENGYFMPQQFENEANPEIHRETTGRELLEQVDGQLDGFVSGIGTGGTITGAGGLLKENFPNLHIAAVEPADSPVLSGGNPGPHKIQGIGAGFVPKILDTDIYDEVIKVSTEQAFEYARRAAKEEGILGGISSGAAIYAALQVAEKLGPGKKVVAVIPSNGERYLSTPLYQFED

SEQ ID NO: 126 - DNA, 939 bp, Bacillus halodurans C-125
  CDS (1)..(939): transl_table=11
atgaagatcgtaaataatattgccgagctcatcggtgacacacctttggttcggcttaatcgcttgccgaacccaaagggagctgccgtttatttgaaaatggagatgtttaacccaagtgggagcgtaaaagatcgagcagcctatcaaatgattgtccaagcggaaaaggacggctatcttaagccaggttccacgatcattgaaccaacaagtggaaacacaggcattggtcttgcaatgaatgctgcggcgagaggctatcgggccattcttaccatgcctgatacaatgtcagaggagcgaatcaacctattaaaggcctacggggcagaggttgtactgaccgaaggagaaaagaaaatgccgggggctatcgaaaaagcccatgaattagtaagagaaatcccgaatagttttatgccgatgcaatttgagaattcggcaaaccctgatgctcaccgtttcacgaccgctgtggaaatcaagaaagcccttgattccatcggtaaaaagttaagcgcctttgttgctgcctctggtacgggtggtacgattacgggaacaggagaagagttgaaaaagttttatccaaacgtagagatccatgtcgttgagccgttcggatcccccgttctctcaggaggaaagccaggtccacataaactagttgggaccagccccggctttgtacctccgattttaaaccaagacgtttatgatgtgattgataaaatcaaggatgaagatgcatatgaagctgcgcgaaatcttgctcgcctggaaggaatcttagtcggtccttcatcaggtgcggcttgctatgcggcgatgaaggtggccgagcgcttagctccagatgaggtcgttgtctgtatcgcgtgtgatactggggaacgttatttatctaccgacctgtttgattttgagagtcaataa

SEQ ID NO: 127 - protein, 312 aa, Bacillus halodurans C-125
MKIVNNIAELIGDTPLVRLNRLPNPKGAAVYLKMEMFNPSGSVKDRAAYQMIVQAEKDGYLKPGSTIIEPTSGNTGIGLAMNAAARGYRAILTMPDTMSEERINLLKAYGAEVVLTEGEKKMPGAIEKAHELVREIPNSFMPMQFENSANPDAHRFTTAVEIKKALDSIGKKLSAFVAASGTGGTITGTGEELKKFYPNVEIHVVEPFGSPVLSGGKPGPHKLVGTSPGFVPPILNQDVYDVIDKIKDEDAYEAARNLARLEGILVGPSSGAACYAAMKVAERLAPDEVVVCIACDTGERYLSTDLFDFESQ

SEQ ID NO: 128 - DNA, 948 bp, Pasteurella multocida subsp. multocida str. Pm70
  CDS (1)..(948): transl_table=11
atgaccatttactcagataattcttattcaattggtaatacaccacttgtgcgcttgaaacactttggtcaaggcaatattgtggtcaaagtggaagggcgtaatcccagttttagtgtgaagtgccgtattggggcgaatatggtatggcaagcagaaaaagacggtatcttgacgaaagaaaaagaaattgtcgatgctaccagtgggaatactgggatcgccttagcctatgtggcagctgcacgcggttataaaatcactttaacgatgccagaaaccatgagtgcagaacgtaaacgtttattacgtggattgggcgtcaatttagttttaacggaaggtgcattgggcatgaaaggggctattgccaaagcagaagaaattgtcgcgtctgatccacaacgctatgtaatgttaaagcagtttgaaaatccggctaatccagccattcaccaacaaacaaccggaccggaaatttggcgtgatacggatggtcaaattgatgtgctggttgctggtgttggcaccggcgggacgattacagggattagccgttatattaaacaagataaaggtaaagcgattctctctgtggcagttgaacctgcggaatcaccagtgattagtcaaactttagccggtgaagagatcaagcctgccccacataaaattcaaggcattggcgcgggctttatccctaaaaatttagaccttgcattagtggatcgtgttgaaaccgtgagtagtgaggaagccatgcaaactgcacgtcgattaatggcagaagaaggcattttaggggggatttcatcaggagcggcggtggctgccgcagatcgtttggcaaaattacctgaatttgccgagaaattaatcgtagtgattttaccgtctgcgtcagaacgctatttaagtacggcattatttgaaggcattgaggcttaa

SEQ ID NO: 129 - protein, 315 aa, Pasteurella multocida subsp. multocida str. Pm70
MTIYSDNSYSIGNTPLVRLKHFGQGNIVVKVEGRNPSFSVKCRIGANMVWQAEKDGILTKEKEIVDATSGNTGIALAYVAAARGYKITLTMPETMSAERKRLLRGLGVNLVLTEGALGMKGAIAKAEEIVASDPQRYVMLKQFENPANPAIHQQTTGPEIWRDTDGQIDVLVAGVGTGGTITGISRYIKQDKGKAILSVAVEPAESPVISQTLAGEEIKPAPHKIQGIGAGFIPKNLDLALVDRVETVSSEEAMQTARRLMAEEGILGGISSGAAVAAADRLAKLPEFAEKLIVVILPSASERYLSTALFEGIEA

SEQ ID NO: 130 - DNA, 918 bp, Pseudomonas aeruginosa PAO1
  CDS (1)..(918): transl_table=11
atgatctacgattcgctactcgatttaattggcgggacgccggtgatacggctgagcaaattgtctgctcgcctgggggtgagcgtattcgccaagctggaatccttcaatccaggaggaagtcataaggcgcgtatcgcgctctggatgattctggatgccgaacgcaaaggaatcctggtgcgcgggaaagggcagaccattctcgagccgagcgggggaaatacggggattggactggcaatggcggggaacatcctggggtaccgcgtgtccctggtggttcccgacaactacagccctgacaagagacaattgctcgagctgtatggcgctcacgtcgtgctgtcggatagcagaaaagggaacaactcgcatggcgagctggcaatccagatactgctggaacatccggagttcgtcatgctcaaccagcagcgcaatccagccaacccgcaagcccatcgcgaagctacagccctggaaatcctgagggactttgcaggccagccacccccggacttcttcttcgctggcattggaactggtggacatatcacgggtgttggagaggtgctgaggaaccactggccggatatggccatctatggcgtgcagccagagcagtgcgacttgctcgacgataggcacgcatcgcatgagattcagggactttccattggtatcgtgccggaagtctgcaacctcggcattgttactggcatggtcggggtgtcgaaatctgcctgcttgtcgatgatccgggaagtcctgcaaaacgactctgtgagcatggggttgtcctccgcagccaacctggtcgcggtgctgaacatggcatctgccatgccgtcaggcgctcgtgtactgacgatgatctacgatggcgtcgagtcatacatggacgcttttcgatga

SEQ ID NO: 131 - protein, 305 aa, Pseudomonas aeruginosa PAO1
MIYDSLLDLIGGTPVIRLSKLSARLGVSVFAKLESFNPGGSHKARIALWMILDAERKGILVRGKGQTILEPSGGNTGIGLAMAGNILGYRVSLVVPDNYSPDKRQLLELYGAHVVLSDSRKGNNSHGELAIQILLEHPEFVMLNQQRNPANPQAHREATALEILRDFAGQPPPDFFFAGIGTGGHITGVGEVLRNHWPDMAIYGVQPEQCDLLDDRHASHEIQGLSIGIVPEVCNLGIVTGMVGVSKSACLSMIREVLQNDSVSMGLSSAANLVAVLNMASAMPSGARVLTMIYDGVESYMDAFR

SEQ ID NO: 132 - DNA, 933 bp, Lactococcus lactis subsp. lactis Il1403
  CDS (1)..(933): transl_table=11
atgactaaaatttatgataacattactgaattaatcggacaaactccaattgttaaacttcaacatgttccagcagagagtgctgatgtctatgtcaaacttgaagctttcaatcctggtggttctgtgaaagatcggattgcccttgcaatgattcgggcggctgaggccgatggacatttaaaacctggtggaacaatcgttgaaccgacttctggaaatacaggaattggactcgccttcgttggctctgctttgggttacaaagttgtcattgtcatgccagagtcattctcacttgaacgtcgcaaattgattcaagcttacggggctcaattagttttaacacccgctagtggtggaatgaaagcagcaattgctaaggcaaaagaactctcagaaacagaaggttattttcttgccatgcaatttgaaaatcccgcaaatcctgaaattcatgaaaaaacaacaggagctgagattattgatgcttttgggccaactggacttgatgcctttgtggcaggtgcagggactggtggaacgataacaggagtttcgcatgccctcaaaaaagcaaatccaactatcaaaacttatgttgtcgaagctgatgaatctgctattctctcgggtgaggctgctggcccacataaaatccaaggtatttctgctggttttattcctgggaatcttgacactaaatcttatgatgaaatcattcgggtcaaaggagatgatgccattttaacggctcgtcatcttggaggaaaagaaggatttttagttggaatttcttcgggcgcagccatttatgctgcccttgaagtagctaaaaaattaggtaagggtaaaaaagtgttagcgattgctcctgataatggagaacgctacttatcaacggctctttatgattttgagtctgaaaaataa

SEQ ID NO: 133 - protein, 310 aa, Lactococcus lactis subsp. lactis Il1403
MTKIYDNITELIGQTPIVKLQHVPAESADVYVKLEAFNPGGSVKDRIALAMIRAAEADGHLKPGGTIVEPTSGNTGIGLAFVGSALGYKVVIVMPESFSLERRKLIQAYGAQLVLTPASGGMKAAIAKAKELSETEGYFLAMQFENPANPEIHEKTTGAEIIDAFGPTGLDAFVAGAGTGGTITGVSHALKKANPTIKTYVVEADESAILSGEAAGPHKIQGISAGFIPGNLDTKSYDEIIRVKGDDAILTARHLGGKEGFLVGISSGAAIYAALEVAKKLGKGKKVLAIAPDNGERYLSTALYDFESEK

SEQ ID NO: 134 - DNA, 921 bp, Lactococcus lactis subsp. lactis Il1403
  CDS (1)..(921): transl_table=11
atggtaaaaattgttgaaaatattactgaattagttggaaatagtccaattatcaaactaaaaaatggtccagaaaatggagcagaaatttatctaaaacttgaatattttaatcctggaggttcagttaaagaccggattgctttacaaatgattcggcaagccgaagcagatggtcgcttaaaaaagggaggaacgattgttgaacctacctctgggaacacaggaattggacttgccatggctggtgcagctttaggctataatgtggttattatcatgcctgatagttactcaaaagagcgtcgtcagattattcaagcttatggagcagaattgattttgactccagcagctgatggcatcaaagctgccattgatttaggtcaaaaattagttgaagaaaatggttggtttatgccaatgcaatttgaaaatccagctaatttaaaagcccatgaattaacgactggtccagaaataattgaagcatttggtgaaaatggcctggacgcatttgttgcttgtgcaggcactgggggtacaatttctggtgtttctcactatcttaaaagtcaaaattctaaaatcaaaacttttgttgtcgaaccggcagaatcaccaattttaacaggaggtgagagtggtccacaccgcattcaaggaattggtattccatttatgtcaccaaatttagatacgaaagcttatgatggtgtaattgatgtaacaagtgatgaggctttagagaccgcaagaaaaattggcaaaagcgaaggatttttagtaggtatatcttctggcgcagcaatttgggcagcttatgaattggcaaaaaaacttggcaaaggtcaaaaagttctcgcactttgtgctgacaatggtgagcgctatctttcaacagaactctatgattattaa

SEQ ID NO: 135 - protein, 306 aa, Lactococcus lactis subsp. lactis Il1403
MVKIVENITELVGNSPIIKLKNGPENGAEIYLKLEYFNPGGSVKDRIALQMIRQAEADGRLKKGGTIVEPTSGNTGIGLAMAGAALGYNVVIIMPDSYSKERRQIIQAYGAELILTPAADGIKAAIDLGQKLVEENGWFMPMQFENPANLKAHELTTGPEIIEAFGENGLDAFVACAGTGGTISGVSHYLKSQNSKIKTFVVEPAESPILTGGESGPHRIQGIGIPFMSPNLDTKAYDGVIDVTSDEALETARKIGKSEGFLVGISSGAAIWAAYELAKKLGKGQKVLALCADNGERYLSTELYDY

SEQ ID NO: 136 - DNA, 954 bp, Deinococcus radiodurans R1
  CDS (1)..(954): transl_table=11
atgatcgagtctttcatcggccacacgcccctggtgcagttgcggcgggtggtcacgcctgacatggccgacgtgtttatcaaactggagggtcagaaccccggcggcagcatcaaggaccgcaccgcgctgggactggtgcaagacgccgagcgccggggcgtcctcaaacccggcgggaccatcgtggagcccaccagcggcaacaccggcatcgggctggcgcaggtggcggcggcgaagggctacaaactcatcctgtgcatgcccgcccagatgagcgaggagcgcaagcgcacgctgagggcctacggcgccgagctgattctcaccgaccccgagcgccggatgctcgccgccatcgaggaagccgagaagattgccgccgaaacgggcgcggtgatgatgaaccagttcgccaaccccgccaaccccgccacccacgaggcgagcaccggccccgagctgtgggagcagatggaaggacgcgtggacgctttcgtgtacggcaccggcaccggcggaaccatcacaggcaccgggcgttacctcaagcggcaggacccgaacattcaggtcatcgcctgcgagcccgcccgctccaacgtcctttcgggcggcgagcgtggcaaccacgggtttcaggggatggggccgggcttcattcccgacaacctcgaccgcagcctgctcgacgacgtgattcaggtctgggaggaagacgcctacccccttgcccgccgactggcgcaggaagaaggcatcttcatcggcatgagcagcggcgcgatggtctggaccgcactcgaagtcgcccggcgcctcggccccggcaagcgcgtggtcaccatcgcctgcgacaccggggcgcgctacttgaccacggcgctcttttccggcgagggcgacaccccggcgggttatctgccgtattcgcgtgagcgggtggagtga

SEQ ID NO: 137 - protein, 317 aa, Deinococcus radiodurans R1
MIESFIGHTPLVQLRRVVTPDMADVFIKLEGQNPGGSIKDRTALGLVQDAERRGVLKPGGTIVEPTSGNTGIGLAQVAAAKGYKLILCMPAQMSEERKRTLRAYGAELILTDPERRMLAAIEEAEKIAAETGAVMMNQFANPANPATHEASTGPELWEQMEGRVDAFVYGTGTGGTITGTGRYLKRQDPNIQVIACEPARSNVLSGGERGNHGFQGMGPGFIPDNLDRSLLDDVIQVWEEDAYPLARRLAQEEGIFIGMSSGAMVWTALEVARRLGPGKRVVTIACDTGARYLTTALFSGEGDTPAGYLPYSRERVE

SEQ ID NO: 138 - DNA, 999 bp, Xylella fastidiosa 9a5c
  CDS (1)..(999): transl_table=11
gtgtgtacatcctccctgattacttccacagagaccttcatgactatctacaacactatcctggacacgattggccacacacccgtggttaaactgaaccgtattgctccggcacacgtggatctgtacatcaaggttgaatcattcaatccaagcggctcggtcaaagaccgtctggcactggccattattctcgacgccgaacaacaggggttattgaaacccggcgacaccatcgttgaagccacttcgggaaatactggcgtcgccctggccatgatcgccgctgcccgcggctacacgtttgtcgccaccatggtcgaaaccttttcgatcgagcggcgcaaactgatgcgcgcttacggtgccaaagtcatcctcaccccagccgccgaacgcggtagcggcatggtacgcaaagccaaagaactcgccgaacagcacggctggttcctcgccagtcaattttccaacccagccaacccggcctatcaccgcaacaccaccgccgcggaaatcctacgagactttgccggacgccgcctcgaccacttcgtcagcggatggggcaccggcggcacgcttactggtgttggtgaagtgctgaaaatcgcgcgaccagacatcacgatcaccgccagcgaacccgccagcgcagcactgctccaagggaaggaatggcaaccccacaagattcaaggatggacacccgatttcgtaccggaggtactgaatcgttccgttccacaccacatcctcagtgttaccgacgacgatgcaatcacggtggcccgtcgcctggccgcggaggaaggtgttttctcggggatctccggcggtgccaccgtcgcaacagcactgcagatcgcccaacaggcccaaccgggtgccgtgatcctcgccatgctgccagataccggcgaacgttacttctccaccccactgttcgctgacatcaatgagcattcagacgacgcgtggttagccagtctcggctga

SEQ ID NO: 139 - protein, 332 aa, Xylella fastidiosa 9a5c
MCTSSLITSTETFMTIYNTILDTIGHTPVVKLNRIAPAHVDLYIKVESFNPSGSVKDRLALAIILDAEQQGLLKPGDTIVEATSGNTGVALAMIAAARGYTFVATMVETFSIERRKLMRAYGAKVILTPAAERGSGMVRKAKELAEQHGWFLASQFSNPANPAYHRNTTAAEILRDFAGRRLDHFVSGWGTGGTLTGVGEVLKIARPDITITASEPASAALLQGKEWQPHKIQGWTPDFVPEVLNRSVPHHILSVTDDDAITVARRLAAEEGVFSGISGGATVATALQIAQQAQPGAVILAMLPDTGERYFSTPLFADINEHSDDAWLASLG

SEQ ID NO: 140 - DNA, 921 bp, Streptococcus pneumoniae TIGR4
  CDS (1)..(921): transl_table=11
atgtctatttataacaacattactgaattaatcggtcaaacaccgattgttaaacttaacaacatcgtgccagaaggtgctgcagacgtctatataaagcttgaagcatttaatcctggttcatctgtaaaagaccgtattgcccttagcatgattgaaaaagctgaacaagatggtattctgaaacctggttctactattgttgaagcaacaagtggaaacaccggtattggactttcatgggtaggtgctgctaaagggtataaagtcgtcatcgttatgcctgaaactatgagtgtagaacgacgtaaaattatccaagcttatggtgctgaactcgtcctaactcctggtagcgagggaatgaaaggtgctattgctaaggctcaagaaatcgctgctgaacgtgatggtttccttcctcttcaatttgacaatccagctaatccagaagtacacgaaagaacaacaggagctgagatactagctgctttcggtaaagatggattagatgcctttgttgctggagtaggtactggtggaacgatttctggtgtttctcatgcactcaaatcagaaaattctaacattcaagtttttgcagtagaagcagatgaatctgctattctatctggtgaaaaacctggtcctcacaaaattcaaggtatctcagctggatttattcctgatacacttgatactaaagcctatgatggtatcgttcgtgtaacatcagatgacgctcttgcactcggacgtgaaattggtggaaaagaaggcttccttgtagggatttcctcagctgcagctatctacggagccatcgaggttgccaaaaaattaggtacaggtaaaaaagtccttgccctagcaccagataacggtgaacgttatctctctacagcactttatgaattgtaa

SEQ ID NO: 141 - protein, 306 aa, Streptococcus pneumoniae TIGR4
MSIYNNITELIGQTPIVKLNNIVPEGAADVYIKLEAFNPGSSVKDRIALSMIEKAEQDGILKPGSTIVEATSGNTGIGLSWVGAAKGYKVVIVMPETMSVERRKIIQAYGAELVLTPGSEGMKGAIAKAQEIAAERDGFLPLQFDNPANPEVHERTTGAEILAAFGKDGLDAFVAGVGTGGTISGVSHALKSENSNIQVFAVEADESAILSGEKPGPHKIQGISAGFIPDTLDTKAYDGIVRVTSDDALALGREIGGKEGFLVGISSAAAIYGAIEVAKKLGTGKKVLALAPDNGERYLSTALYEL

SEQ ID NO: 142 - DNA, 912 bp, Clostridium acetobutylicum ATCC 824
  CDS (1)..(912): transl_table=11
gtgaactatatagacgacattagacaaattataggaaacactcctataataaaaatcaataactttggattaaatagtggagtgaatatttttgctaagcttgaattattgaatccaggaggcagtgtaaaagatagagtaggcgtttatatgatagaggatgcagaaaagaagggaaaactaaaaaaaggttataccatagttgaaggcacagcgggtaatacaggtataggaatagcacttgcagctataaacaaagggtataatgtaatctttgttgtacctgagaagttttctatagaaaagcagacgcttatgaaagcatttggtgcaaaaattataaatacgcctagagaggaaggaatgcagggagcagttaagaaggcaaatgagcttttgagtaccatacctaattctataagtcttggtcaattcgtaaaccaagcaaatccattggcacactatgaaactacaggacctgagatttatagagatcttgaaggcaacattgattatgtagttgcaggtgctggtagtggaggaacctatgctggtgtattaaagtttttaaaagagaaaaaaccaaatataaagggtgtacttgctgatcctgaaggttctaccatgggtggaggagaggaagctagctatgatatcgaaggtataggaaatgattttattccagataccatggatatgaatcttgtagatgaagttattaaggttaatgatgctgaggcttttcatatggtaaggcaacttgcccttaaagaaggactgatagttggaagttcatctggtgcagctatggcagcagcaattaaattaagtaaaaagattaaaagtggtaatatagttactatctttccagatagaggtgacaggtattttagtaaaaatattttaggatag

SEQ ID NO: 143 - protein, 303 aa, Clostridium acetobutylicum ATCC 824
MNYIDDIRQIIGNTPIIKINNFGLNSGVNIFAKLELLNPGGSVKDRVGVYMIEDAEKKGKLKKGYTIVEGTAGNTGIGIALAAINKGYNVIFVVPEKFSIEKQTLMKAFGAKIINTPREEGMQGAVKKANELLSTIPNSISLGQFVNQANPLAHYETTGPEIYRDLEGNIDYVVAGAGSGGTYAGVLKFLKEKKPNIKGVLADPEGSTMGGGEEASYDIEGIGNDFIPDTMDMNLVDEVIKVNDAEAFHMVRQLALKEGLIVGSSSGAAMAAAIKLSKKIKSGNIVTIFPDRGDRYFSKNILG

SEQ ID NO: 144 - DNA, 930 bp, Clostridium acetobutylicum ATCC 824
  CDS (1)..(930): transl_table=11
atgggtaaaatctataagaacttaattgaaactattggaagaactccattagtagaactttcaaattacaaagaaaaaaataaaattgagggaaatattctaggaaaggtagagtactttaatccatcaggaagcataaaagatagaattgcatattcaatgataaaaaatgcagaagaacaggggttaataaataaggatacagttataatagaaccaacaagcggaaatactggagttggtcttgcatttatagcagcagcaaagggatataagcttatattaacaatgcctgaaactatgagtgttgaaagaagaaagcttttgacagcatatggagctgaaatagttcttacttcaggagttgaaggaatgacgggagctattaaaaaggcaaatgagcttgcaagtgaaaatcctaattcttttataccacagcagttcaaaaatccatcaaatccagctatacatgaagttacaactggaatagaaatatgggaggatactgatggaaaagttgatgcagtagttgcaggagtaggaacaggtggtactataacaggtattgctaaaactcttagagaaaaaaataaagatataaaaattatagcagtagaaccagcaacttcaccagtactttctggaggaaaagcaggtcctcacaagattcagggaataggagccggatttgttcctgatgtatatgaagcagaattaatagatgagataattcaagttaaaaatgaagatgcatttgcttctgccaaagagcttgctagagaagagggaatacttgcaggaatatcatcaggtgcagcactatttgcggctaaagaggttgcatcaagaccagaattcaagggtaagaatgttgttgtgattcttcctgatagcggtcaaagatatttatcaatgtctgtatttgattaa

SEQ ID NO: 145 - protein, 309 aa, Clostridium acetobutylicum ATCC 824
MGKIYKNLIETIGRTPLVELSNYKEKNKIEGNILGKVEYFNPSGSIKDRIAYSMIKNAEEQGLINKDTVIIEPTSGNTGVGLAFIAAAKGYKLILTMPETMSVERRKLLTAYGAEIVLTSGVEGMTGAIKKANELASENPNSFIPQQFKNPSNPAIHEVTTGIEIWEDTDGKVDAVVAGVGTGGTITGIAKTLREKNKDIKIIAVEPATSPVLSGGKAGPHKIQGIGAGFVPDVYEAELIDEIIQVKNEDAFASAKELAREEGILAGISSGAALFAAKEVASRPEFKGKNVVVILPDSGQRYLSMSVFD

SEQ ID NO: 146 - DNA, 1038 bp, Agrobacterium tumefaciens str. C58
  CDS (1)..(1038): transl_table=11
atgaccattcattcctctgcgctcagtgcaatcggcaacacgccgctcatccgtctgaaggctgcctctgaagcgacggggtgtgaaatcctcggcaaggcggaattcctcaatcccggccagtcggtgaaggatcgtgcagcgctctacatcatccgcgacgccgaacggcgcggccaattgcgcccgggcggcaccatcgtggaaggcacggccggaaataccggcatcggcctgtcgctggtcgccaatgcgctcggctacaagacggtgatcgtcattcccgagacgcagagccaggagaagaaggacgcgctgaagcttctcggcgccaagctggtcgaagtaccggccgcgccttattccaatccgaacaattacgtaaaggtctccggccggcttgcaaaacagctcgccgccacggatgaaaacggcgcgatctgggccaaccagttcgacaatatcgccaaccgtcaggcgcatatcgagacgaccgcgcctgagatctgggaccagacggacggcaaggtcgatggcttcatatgctcggtcggttccggcggaacactggccggcgtcgccgacggcctgcgcgatttcaatcccgacatcaagatcggtcttgccgaccctgaaggtgccgccctttatgaattttacaaacacggcgtcctgaagtccgaaggctcctccattaccgaaggcatcggacaggggcgcatcaccgccaatctggaagggttcgcaccggatttctcctatcgtatttcggacgcggaagcgctgccggtgctgttcgatctggtcacgaaagaaggcctgtgcctcggcggttcttccggcatcaacattgccggcgcaatccgccttgcccgtgagctcggtccggggcatacaatcgtgacgatactgtgcgactacggtaatcgttatcagtcgaagctcttcaatccggatttcctgcgctccaaggggcttcccgtgccgcagtggctggcgaccaagagcgagattccggttccctacgaaaccgtttga

SEQ ID NO: 147 - protein, 345 aa, Agrobacterium tumefaciens str. C58
MTIHSSALSAIGNTPLIRLKAASEATGCEILGKAEFLNPGQSVKDRAALYIIRDAERRGQLRPGGTIVEGTAGNTGIGLSLVANALGYKTVIVIPETQSQEKKDALKLLGAKLVEVPAAPYSNPNNYVKVSGRLAKQLAATDENGAIWANQFDNIANRQAHIETTAPEIWDQTDGKVDGFICSVGSGGTLAGVADGLRDFNPDIKIGLADPEGAALYEFYKHGVLKSEGSSITEGIGQGRITANLEGFAPDFSYRISDAEALPVLFDLVTKEGLCLGGSSGINIAGAIRLARELGPGHTIVTILCDYGNRYQSKLFNPDFLRSKGLPVPQWLATKSEIPVPYETV

SEQ ID NO: 148 - DNA, 969 bp, Sinorhizobium meliloti 1021
  CDS (1)..(969): transl_table=11
atgcctgaagcgcgcaagcccggccgcggccgcgtcttttcctcgatcaccgagacgatcggcgacactcccatcgtgcggctggacaagctcgccaaggaaaagggcgtgaaggcgaacctgctcgccaagctcgaattcttcaacccgatcggctccgtcaaggaccgcatcggcgtcgcgatgatcgaatcgctcgaggcgcaagggaagatcacgcccggccgcacgacgctggtcgagccgacttcgggcaatacgggcatagcactcgccttcgtcgcggccgccaagggctacaggctgatcctcaccatgcccgagacgatgtcggtcgaacgccgcaagatgctgacgcttctcggtgccgaactggtgctgacggaaggcgccaagggcatgaagggcgcaatcgccaaggcccaggaactcaccgagacgctgcccgacgcgatcattccgcagcagttcgagaacccggccaatccggaaatccaccgcacgacgaccgccgaggagatctggaacgacacggaaggcgcagtcgacatcctcgtgtccggcatcggcaccggcggcaccatcaccggtgccggccaggtgctcaaggcccgtaagccatcggtcagggtgatcgccgtcgagcccgaagaatcccctatcctttccggcggcgccccgggtccgcacaagatccagggtatcggcgcgggtttcgcaccagcgatcctcgacacgagcgtctatgacgaagtcgtcacggtaaatgcgggcgaggccatagaggcggcgcggctcgtcgccagactcgaaggcgtgccggtcggcatttccgccggtgccgcgctccaggcggcgatagaggtgggacagcgcgaggaaaacgccggcaggaatatcgtcgtgatcattccgtcctttgccgaacggtatctttcgacggtgctgttcgagggattgggagcctag

SEQ ID NO: 149 - protein, 322 aa, Sinorhizobium meliloti 1021
MPEARKPGRGRVFSSITETIGDTPIVRLDKLAKEKGVKANLLAKLEFFNPIGSVKDRIGVAMIESLEAQGKITPGRTTLVEPTSGNTGIALAFVAAAKGYRLILTMPETMSVERRKMLTLLGAELVLTEGAKGMKGAIAKAQELTETLPDAIIPQQFENPANPEIHRTTTAEEIWNDTEGAVDILVSGIGTGGTITGAGQVLKARKPSVRVIAVEPEESPILSGGAPGPHKIQGIGAGFAPAILDTSVYDEVVTVNAGEAIEAARLVARLEGVPVGISAGAALQAAIEVGQREENAGRNIVVIIPSFAERYLSTVLFEGLGA

SEQ ID NO: 150 - DNA, 1086 bp, Sinorhizobium meliloti 1021
  CDS (1)..(1086): transl_table=11
ttggctaatgccggcatccgttccgtccagcgcgaggttttcaatatgcctgttcttccgtccgtgctcgaagcaatcggcaatacgccgctgatccggctcaaggccgtgtccgaagcgaccggctgcaacattctcggcaaagcggagttcctcaatcccgggcagtccgtaaaggaccgggcagcgctctggatcatccgccaggccgaaaagtccggccagttgcggccgggcggcgtgattgtcgaaggtacggccggcaatacggggatcggccttgccgttgtcggcagcgcacttggataccgcaccgtcatcgtcattcccgaaacccagagccaggaaaagaaggacgcgctacgcctgcttggggccgaactggtcgaagttccggctgtgccttacaggaatcccaacaactacgtgaagatctccggccggttggcggcccaactcgccgaaaccgagccgaacggcgccatctgggcgaaccagttcgacaatgtcgccaaccggcaagcgcatgtcgacacgaccgcgcctgaaatctggcgcgacaccgacggcaaggtcgacggcttcatctgcgccgtcggctccggcggcacgcttgccggcgtggcggaaggcttgcgcgcccgcaatgcggcgatcaagatcggcatcgccgaccctgagggggccgcactctacaatttttatgcccatggcgagctcaagtcgagcggcagctcgatcaccgaaggcatcggtcaaggccgaatcaccgccaacctcgaagacttcacgccggacttcgcctaccagattccggatgctgaagcggtgccctacgtcttcgatctcatcgaaaaggaaggtatttgcgtcggcggctcgaccggcatcaacatcgccggcgccgtgcggcttgcacgggacctcgggccgggacacacgatcgtgacgatcctctgcgactatggtaaccgctatcagtcgaagctcttcaatccggacttcctgacctccaagggcctgccggttccggactggctgaagaccgcttcgaacatagcagtgccatacgaacccgctggatag

SEQ ID NO: 151 - protein, 361 aa, Sinorhizobium meliloti 1021
MANAGIRSVQREVFNMPVLPSVLEAIGNTPLIRLKAVSEATGCNILGKAEFLNPGQSVKDRAALWIIRQAEKSGQLRPGGVIVEGTAGNTGIGLAVVGSALGYRTVIVIPETQSQEKKDALRLLGAELVEVPAVPYRNPNNYVKISGRLAAQLAETEPNGAIWANQFDNVANRQAHVDTTAPEIWRDTDGKVDGFICAVGSGGTLAGVAEGLRARNAAIKIGIADPEGAALYNFYAHGELKSSGSSITEGIGQGRITANLEDFTPDFAYQIPDAEAVPYVFDLIEKEGICVGGSTGINIAGAVRLARDLGPGHTIVTILCDYGNRYQSKLFNPDFLTSKGLPVPDWLKTASNIAVPYEPAG

SEQ ID NO: 152 - DNA, 924 bp, Bacillus subtilis subsp. subtilis str. 168
  CDS (1)..(924): transl_table=11
atgacagtgattacggacattaccgagctgattgggaatacaccgcttctccgcttgaagaactttgatgttccagaaggagtcgcggtgtatgccaagcttgaaatgatgaatccagggggaagcatcaaagacagactgggagatatgctgattcgtgacgcgctcgattcaggcaaagtgaaacccggcggagtgattatagaagctacggcaggcaatacagggatcggccttgcgttaagtgccagaaaatatgggctgaaagcgattttctgtgtccctgaacatttcagcagagagaaacagcaaattatgcaagcgcttggcgcatcaatcattcatacaccgcgtcaagacggaatgcagggagccattcaaaaagccattcagctggagactgaaattgaaaattcttattgcgttttgcaatttaaaaaccgagtaaatccatcgacttactataagacgcttggacctgaaatgtgggaagcgcttgacgggaatattcatacatttgtcgcaggggcaggatcaggaggcacattcgcagggacagcttccttcttaaaagaaaaaaatccagcagtcaaaacggtgattgttgaaccggtgggctcgattttaaacggaggagagccccacgctcataaaacagagggcatcggcatggagtttatccccgattatatggataagagccattttgacgagatctacaccgtaacagatgagaatgcgtttagacttgtgaaagaagcggcagaaaaagaaggcctgctgatcggaagctcttcaggtgcagcgctttatgcggcattggaggaagcgaaaaaagcatccgctggaactaacattgtcacagtatttcctgacagcagcgatcgatatatcagcaaacaaatatacgaaggaggcatctga

SEQ ID NO: 153 - protein, 307 aa, Bacillus subtilis subsp. subtilis str. 168
MTVITDITELIGNTPLLRLKNFDVPEGVAVYAKLEMMNPGGSIKDRLGDMLIRDALDSGKVKPGGVIIEATAGNTGIGLALSARKYGLKAIFCVPEHFSREKQQIMQALGASIIHTPRQDGMQGAIQKAIQLETEIENSYCVLQFKNRVNPSTYYKTLGPEMWEALDGNIHTFVAGAGSGGTFAGTASFLKEKNPAVKTVIVEPVGSILNGGEPHAHKTEGIGMEFIPDYMDKSHFDEIYTVTDENAFRLVKEAAEKEGLLIGSSSGAALYAALEEAKKASAGTNIVTVFPDSSDRYISKQIYEGGI

SEQ ID NO: 154 - DNA, 999 bp, Caulobacter crescentus CB15
  CDS (1)..(999): transl_table=11
atgtccgctctgcccagcgtccttgacgcgatcggaaacacgcccctgatccgcctggcccgcgccagcgaagccacgggctgcgagatcctaggcaaggccgagttcatgaacccgggccaatcggtcaaggaccgcgccgcgctggccatcattcgcgacgccgaggccaagggtttgctgcgccccggcggtcggatcgtcgaaggcacggcgggcaacaccggcatcggcctggccatggtcgcctcggcgctgggctacaagacgaccatcgtcatcccgcgcacccagagccaggaaaagaaggacgccatccgcctgctgggcgccgaactggtcgaggtggacgccgtcccctattccaaccccgacaattacgtccgctattccgggcgcttggctgaggaacttgccaggacggaaccccacggcgtgatctgggccaaccagttcgacaacaccgccaaccgcgacgcgcactatcacacgacggggccggaaatcttcgatcagacaagtggtaaggtcgacggcttcatctgcgccgtcggctcgggcggcaccctggccggcgtggccgcagcgctgcgcgaacgcaagccgggcgtgaggatcggtctggccgatccctacggcgcggcgctttacgcctggtacaaggacggcgaactcaaatcggaaggctcctcgatcagcgagggcatcggccagggtcggatcacggccaatctcgagggcctggcgatcgacgatccgttccgggtgtccgaccaagagatgctggaagtgctctatgacctggtgcagcacgaaggcctttgcctgggcggatcggccgggatcaatgtcgccggcgcgatcaagctggcgacggcgatgggccctggccacaccatcgtgacggtgctgtgcgaccacggctcgcgctaccagtccaagctcttcaatcccgtcttccttaaggaaaagggcctgccgacgccgccctggatgtag

SEQ ID NO: 155 - protein, 332 aa, Caulobacter crescentus CB15
MSALPSVLDAIGNTPLIRLARASEATGCEILGKAEFMNPGQSVKDRAALAIIRDAEAKGLLRPGGRIVEGTAGNTGIGLAMVASALGYKTTIVIPRTQSQEKKDAIRLLGAELVEVDAVPYSNPDNYVRYSGRLAEELARTEPHGVIWANQFDNTANRDAHYHTTGPEIFDQTSGKVDGFICAVGSGGTLAGVAAALRERKPGVRIGLADPYGAALYAWYKDGELKSEGSSISEGIGQGRITANLEGLAIDDPFRVSDQEMLEVLYDLVQHEGLCLGGSAGINVAGAIKLATAMGPGHTIVTVLCDHGSRYQSKLFNPVFLKEKGLPTPPWM

SEQ ID NO: 156 - DNA, 987 bp, Caulobacter crescentus CB15
  CDS (1)..(987): transl_table=11
atggacgacgcttcctccctctatgacgccgcccgcttcaagcgcgctggccgtggcaagatctatgactcgatcatcgacacgatcggtgacaccccgctggtgcgcctgccgcgtctgtccgccgagctgaaccccaaggccgaggtcctggccaagctggagttcttcaacccgatcgcctcggtgaaggaccggatcggcgtctcgatgatcgagtcgctggaggctcagggcgtcttgaagccgggcgcgacgattatcgagccgacctcgggcaacaccggcatcgccctggccttcgtcgcggcggccaagggctacaagctgaccctggtcatgcccgagagcatgtcgatcgagcgccgcaagatgctgctgctgctcggcgccaagctggaactgaccccggccgagaagggcatgcgcggcgcggtcacccgggcccaggagctgatcgaggcgaccccgggcgcggtgatgccgcaacagttcgaaaacagcgccaatccgctgatccatcgcgtctcgaccgccgaggagatctggaacgacaccgccggcgcggtcgacgcggtggtctcgggcgtcgggaccggcggcaccatcacgggcgttggccaggcgctgaaggcgcgcaagccctcgctgaagatggtggcggtggagcccgaggcctcgccggtgctgtcgggcggcgcgccgggtccgcacaagatccaggggatcggcgcgggcttcgtgcccggcgtgctggatcgcggcgtcatcgacgacatcgtccaggtcagcaatgacgacgccttcgccatggcccgccgcgcggcggccaccgaagggttgccggtcggcatcagctccggcgcggccctgacggccgcgttcgatctggccctgcgcgatgcgtacaagggcaagacgatcgtggtgatcatccccagcttcgccgagcgctacctgtcgacggctttgttcgacgggctctag

SEQ ID NO: 157 - protein, 328 aa, Caulobacter crescentus CB15
MDDASSLYDAARFKRAGRGKIYDSIIDTIGDTPLVRLPRLSAELNPKAEVLAKLEFFNPIASVKDRIGVSMIESLEAQGVLKPGATIIEPTSGNTGIALAFVAAAKGYKLTLVMPESMSIERRKMLLLLGAKLELTPAEKGMRGAVTRAQELIEATPGAVMPQQFENSANPLIHRVSTAEEIWNDTAGAVDAVVSGVGTGGTITGVGQALKARKPSLKMVAVEPEASPVLSGGAPGPHKIQGIGAGFVPGVLDRGVIDDIVQVSNDDAFAMARRAAATEGLPVGISSGAALTAAFDLALRDAYKGKTIVVIIPSFAERYLSTALFDGL

SEQ ID NO: 158 - DNA, 978 bp, Synechocystis sp. PCC 6803
  CDS (1)..(978): transl_table=11
atggatattaagcacggctttgtggactccattggccacacccccttgattcgccttaacagtttcagtgacgaaaccggctgtgaaattttaggcaaagcagaatttatgaaccctggtggttctgtcaaagaccgggccgccctgggcatcatcgaaaccgccgaaaaggaagggaagctcaaacccggtggcactgtggtggaaggcacagcgggtaatacgggcattggtctcgcccacatttgcaacgccaagggttataaatgcttaattgtcattcccgacacccaatcccaggaaaaaattgatttgctccgcaccctgggggcagaagtcaggaccgtgcccgccgtgccctaccgggatcccaacaattacgtcaaactctccggacgcattgccgcagaattagataacgccatttgggccaatcaatttgataatttggccaaccgtgatgcccactaccacaccaccggccccgaaatttggcaacaaacggacggcaaagtagatgcttgggtggcagccactggcaccggaggaacctatgcaggggtagccctgtatcttaaagaacagtctgaggccgtgcaatgcgtggtggcggaccccatgggtagtgggctgtatagcttcatcaaaactggggagattaaccccagcggcaactccatcaccgaaggcattggcaacagtcgcatcaccgccaacatggaaaatgtgcccattgacgatgcggtgcaaattgacgatccagaagcgttgcgggtggtgtaccaacttctgcggcgggatggcctatttatgggcggttccgtgggcattaatgtgggagcggcttaccaattggccaaaaaacttgggccggggcataccattgttaccgtactttgtgacggaggagcccgttaccaatcccgtctttacaatcaggaatggttgaccagtaaaggtttaacaattcccgattaa

SEQ ID NO: 159 - protein, 325 aa, Synechocystis sp. PCC 6803
MDIKHGFVDSIGHTPLIRLNSFSDETGCEILGKAEFMNPGGSVKDRAALGIIETAEKEGKLKPGGTVVEGTAGNTGIGLAHICNAKGYKCLIVIPDTQSQEKIDLLRTLGAEVRTVPAVPYRDPNNYVKLSGRIAAELDNAIWANQFDNLANRDAHYHTTGPEIWQQTDGKVDAWVAATGTGGTYAGVALYLKEQSEAVQCVVADPMGSGLYSFIKTGEINPSGNSITEGIGNSRITANMENVPIDDAVQIDDPEALRVVYQLLRRDGLFMGGSVGINVGAAYQLAKKLGPGHTIVTVLCDGGARYQSRLYNQEWLTSKGLTIPD

SEQ ID NO: 160 - DNA, 996 bp, Synechocystis sp. PCC 6803
  CDS (1)..(996): transl_table=11
gtggggtttttcgttgtaagatgcaggcagatttcccttcttggtgggcccttacctatgaaaattgccagtaatattacagagctaattggtcgtactcctctggttcgcctcaatcgcattcccctattggagggatgtggggccaagattgtagtcaagttggaggggatgaatccagcggcttcggtaaaggaccgcattggcattaatatgattaaccgggcagaacaagagggattaattgaaccagggaagactctgctgattgagcccacttctggtaatacgggcattgcccttgccatggtggccgcagccaagggttaccaattaattttgacgatgcctgaaaccatgagccaagaacggcgggcgatgttaaaagcctatggagcaaaactagaactgaccccggggagtgaagggatggggggatgtattagaagagcccaagaattggctgagagtttgccaaatgcctatatgttgcaacagtttgataatccggctaatcctcaaattcatcaacagactacggcattggaaatttggcaagataccgatggagccattgatttcctcgtggcgggggttggcactggtgggactattaccggggtggcttctgtgttaaaagaaaaaaaacctagctttcaggcgatcgccgtagaaccccaaaatagcccagtcttatcagggggtaagccggggccgcataaaattcaaggtattggggcgggctttattcccgaagtgttagatgtaaacctgattgacgaagtgattgccgtgaccgatgaagaggcgatcgcctacggtcgtagattagccagggaagaaggaatattatcggggatttccactggagcagctctggcggcggccatcaaagtggcaaaaagacctgccaataaagataaattgattgtcatgatccaacccagttttggggaaagatacctcagcacccccctatttcaggatttggagtaa

SEQ ID NO: 161 - protein, 331 aa, Synechocystis sp. PCC 6803
MGFFVVRCRQISLLGGPLPMKIASNITELIGRTPLVRLNRIPLLEGCGAKIVVKLEGMNPAASVKDRIGINMINRAEQEGLIEPGKTLLIEPTSGNTGIALAMVAAAKGYQLILTMPETMSQERRAMLKAYGAKLELTPGSEGMGGCIRRAQELAESLPNAYMLQQFDNPANPQIHQQTTALEIWQDTDGAIDFLVAGVGTGGTITGVASVLKEKKPSFQAIAVEPQNSPVLSGGKPGPHKIQGIGAGFIPEVLDVNLIDEVIAVTDEEAIAYGRRLAREEGILSGISTGAALAAAIKVAKRPANKDKLIVMIQPSFGERYLSTPLFQDLE

SEQ ID NO: 162 - DNA, 912 bp, Salmonella enterica subsp. enterica serovar Typhi str. CT18
  CDS (1)..(912): transl_table=11
atgaatacattagaacaaaccatcggcaatacgccgctggtcaaattacaacggctggggccggataacggcagtgaaatctgggtcaagctggaaggcaataatccggcaggatcggtgaaagatcgcgcggcgctatcgatgattgtcgaggcggaaaagcgcggggaaattaaaccgggcgatgccctgattgaagcgaccagcggcaacactggcattgcgctggcgatgatcgccgcgctgaaaggttatcgcatgaagctgttgatgccggacaacatgagccaggagcgtcgggcggcaatgcgggcctatggcgcggaactgattctggtcactaaagagcagggaatggaaggggcgcgcgatttagcgctcgctatgtctgagcgcggagaaggtaaactgctcgatcagtttaataatcctgataatccctacgcccactacacgaccaccggcccggaaatctggcggcaaacgtcaggtcgcatcacccattttgtctccagcatgggcacgaccggcaccattaccggcgtgtcgcgttttctgcgcgagcaggaaaaaacggtcaccatcgttggcctgcaaccggaagagggcagcagtattccgggcattcgccgctggcctacggaatatatgccgggcatatttaacgcctcgctggtggatgaggtgctggatattcatcagaatgatgccgaaaacaccatgcgtgaactggcggttcgtgaagggattttctgcggcgtcagctccggcggcgcggtagcgggcgcgttacgcgtcgcacgagccacgcccggcgcgatagtggtggcgatcatctgcgatcgcggcgaccgttacttgtctaccggcgtgtttggtgaagagcatttcagccagggggcagggatttaa

SEQ ID NO: 163 - protein, 303 aa, Salmonella enterica subsp. enterica serovar Typhi str. CT18
MNTLEQTIGNTPLVKLQRLGPDNGSEIWVKLEGNNPAGSVKDRAALSMIVEAEKRGEIKPGDALIEATSGNTGIALAMIAALKGYRMKLLMPDNMSQERRAAMRAYGAELILVTKEQGMEGARDLALAMSERGEGKLLDQFNNPDNPYAHYTTTGPEIWRQTSGRITHFVSSMGTTGTITGVSRFLREQEKTVTIVGLQPEEGSSIPGIRRWPTEYMPGIFNASLVDEVLDIHQNDAENTMRELAVREGIFCGVSSGGAVAGALRVARATPGAIVVAIICDRGDRYLSTGVFGEEHFSQGAGI

SEQ ID NO: 164 - DNA, 927 bp, Listeria innocua Clip11262
  CDS (1)..(927): transl_table=11
atgacaattgtaaattcgatcactgatttaattggaaagacacctattgtgaaacttaatcgtttaccagaagcaggtagcgccgacgtatatgtgaaattagaattccaaaatccgggtggtagcgtaaaagatcgtattgctaatgcgatgatcgaaagcgctgaaaaatcaggtgcattaaaaccaggagatacaattatcgaaccaactagtggtaacactggtatcggactagcaatggtagcagcggcaaaaggttaccaagcaatcttcgtaatgccagaaacaatgagtatagaacgtcgtaaattacttcaagcttatggtgcgaaattagtgttaactccagggccagatggcatgaaaggcgcaattgctaaagcagaagagcttgcaaaagaaaataattatttcgttcctcaacaattccacaatccagcaaacccagctgtccatgaagaaacaactggaccagaaatcgttgaagctttcggtaaagacggcttagatgctttcattgcaggagtaggaacaggcggaacagtaactggtgtaggacacgtacttaaaaagaactacccagatgttaaaatctatgctcttgaaccagaagaatccccagtacttagcggtggttctccatcgcctcataaaatccaaggtatcggagctggttttgtaccagatacattagatacaaaagtttatgatggcattttgaaagtttcgagtgaagatgcgcttgaaacagcacgcgaagtagcgaaaaaagaaggtatcttagtaggtatttcttccggagcaactattaaagccgctctagaccttgcaaaagaacttggtgctggtaaaaaagtgctcgcaatcgttgcaagtaacggcgaacgctacttaagtacaccgctttataattttgaagattag

SEQ ID NO: 165 - protein, 308 aa, Listeria innocua Clip11262
MTIVNSITDLIGKTPIVKLNRLPEAGSADVYVKLEFQNPGGSVKDRIANAMIESAEKSGALKPGDTIIEPTSGNTGIGLAMVAAAKGYQAIFVMPETMSIERRKLLQAYGAKLVLTPGPDGMKGAIAKAEELAKENNYFVPQQFHNPANPAVHEETTGPEIVEAFGKDGLDAFIAGVGTGGTVTGVGHVLKKNYPDVKIYALEPEESPVLSGGSPSPHKIQGIGAGFVPDTLDTKVYDGILKVSSEDALETAREVAKKEGILVGISSGATIKAALDLAKELGAGKKVLAIVASNGERYLSTPLYNFED

SEQ ID NO: 166 - DNA, 960 bp, Nostoc sp. PCC 7120
  CDS (1)..(960): transl_table=11
atgcgaattgctaatgatgtaacagaacttattggaggtacacctttagttaagcttaataagattccgcaagcggaaggagtagttgccagaatagttgtcaaactagaaggaatgaatccagcctcttccgtaaaagaccggattggggtgagtatgattaacgcagcagaagcggaaggtttaatcataccgggaaaaactattttagtagaaccaacttccggtaacacaggaattgccctggcgatggtagccgccgcccgtggctatcggttaattttgactatgccagagactatgagccaagaaagacgggctatgttgcgggcttatggtgcaactctagagttgactccaggtacagaaggtatgcggggagccattcgcaaagccgaagaaattgtggctagtacccctgatactcatatgctgcaacagtttcgcaacccagctaaccccaaaatccaccgtgaaactaccgccgaagaaatttggaatgataccgatggtgaagttgatattgtgattgctggggtgggtactggaggaacaattactgggattgcagaggtattgaaacaacgcaaacctagctttcaggcgatcgcagttgaacctagcaatagtcctatcctttccggtggacaagccgggccacacaaaatccaaggtatcggtgcaggctttgttcccgatgtcctccgtctagaattggtggatgaagtcatcagagttagcgatgatcaagcgatgagctacgggcggcgtttagccagagaagaaggtttgctatctggtatttcctctggtgcggctttgtgtgcagctttacaggtggggaaacgtccagaaaatgccggcaagttaattgtgatgattcaaccttccttcggcgaacgctacctcagcacccctttgtttcaggatttgacgaatgaaactgctggtgtcagttag

SEQ ID NO: 167 - protein, 319 aa, Nostoc sp. PCC 7120
MRIANDVTELIGGTPLVKLNKIPQAEGVVARIVVKLEGMNPASSVKDRIGVSMINAAEAEGLIIPGKTILVEPTSGNTGIALAMVAAARGYRLILTMPETMSQERRAMLRAYGATLELTPGTEGMRGAIRKAEEIVASTPDTHMLQQFRNPANPKIHRETTAEEIWNDTDGEVDIVIAGVGTGGTITGIAEVLKQRKPSFQAIAVEPSNSPILSGGQAGPHKIQGIGAGFVPDVLRLELVDEVIRVSDDQAMSYGRRLAREEGLLSGISSGAALCAALQVGKRPENAGKLIVMIQPSFGERYLSTPLFQDLTNETAGVS

SEQ ID NO: 168 - DNA, 975 bp, Nostoc sp. PCC 7120
  CDS (1)..(975): transl_table=11
atggatatcaaaaatggctttataggaactgttggcaacacaccactaattcgtttaaacagttttagtgaagaaacaggatgtgaaattctcgctaaagcagaatttctcaatcctggtggttcagtcaaagaccgcgccgcactttacatcatccaagatgcagaagaaaaaggactcctcaaagcaggcggaactgttgtagaaggaactgctggtaatactggcattggattagcgcatatttgcaatgccaaaggctacaaatgcctgataattattcctaacacccaatcacaggaaaagattgatgcactcacagctttgggtgcagaagtccgtcccgttcctgctgtaccttacaaagacccaaacaattacgtcaaactatctgggagaattgctgcggagttagacaacgcaatttgggcaaatcagtttgataatttagctaaccgccgcgctcattacgagactaccggcccagaaatctggacacaaaccgatggtaaagttgatgcttgggtagcttccactggtactggtggcacatttgccggtgtagccatgtatctgaaaaaccaaaatcccgccattaaatgcgtagtagctgacccactaggtagcggactatatagttacatcaaaactggtgacatcaagatagaaggaaattctatcaccgaaggtattggtaacagccgcgtcacagctaatatggaaggcgcaccaactgatgatgccatccaaatagatgaccatgaagctttgcgggtagtttaccaactgttgcggaaagatggtttattcatgggtggttcgacaggtattaatgttgccggtgctgtagctttggcgaagcaattggggcctggtcacaggattgtcaccatattatgtgatagtggttcccgctaccaatcgcgtatattcaaccgtgattggcttgcatccaaaggactaacggtagattag

SEQ ID NO: 169 - protein, 324 aa, Nostoc sp. PCC 7120
MDIKNGFIGTVGNTPLIRLNSFSEETGCEILAKAEFLNPGGSVKDRAALYIIQDAEEKGLLKAGGTVVEGTAGNTGIGLAHICNAKGYKCLIIIPNTQSQEKIDALTALGAEVRPVPAVPYKDPNNYVKLSGRIAAELDNAIWANQFDNLANRRAHYETTGPEIWTQTDGKVDAWVASTGTGGTFAGVAMYLKNQNPAIKCVVADPLGSGLYSYIKTGDIKIEGNSITEGIGNSRVTANMEGAPTDDAIQIDDHEALRVVYQLLRKDGLFMGGSTGINVAGAVALAKQLGPGHRIVTILCDSGSRYQSRIFNRDWLASKGLTVD

SEQ ID NO: 170 - DNA, 963 bp, Nostoc sp. PCC 7120
  CDS (1)..(963): transl_table=11
atgcgggttgctcgtaacattacagaacttgttggtcgtacacctttagtacagctaaatcgtattccccaagaggaaggatgtgtagctcagattcttgtgaagatggaaagtatgaacccatcatcatcagtgaaagaccgaattggggtgagtatgattaatgcagctgaacaggaggggttgattgctcctgggaagactgtattagtagaacccacatcgggaaatacagggattgctttagcaatggcagcagcagccaagggttatcgcttaattttaacgatgccagaaaccatgagtggtgagcgtcgggctatgttgcgggcttatggagcggagttagaattgacaccgggaatggagggaatgagtggagcgattcgccgggcgcaggagatagtgaatactacccctcatgcttatatgttgcagcagttccgcaacccagcgaacgtgaaaatacatcgagagactaccgccgaggaaatctgggaagataccgatggtcaggtagatatgattgtcgcaggggtaggtacaggtggtacgatcacaggtgtagcggaagtgctgaaagcccgtaaaccaagttttcaggcgatcgcagttgagcctgccaatagtccagttttatctggaggtaaaccaggcccccataaaattcagggaattggtgcgggattcgttccccaagttctaaaaacacaattgattgatgaagtgattacggtcacagatgaagaagcgatcgcttacggtcggcgtttagctagagaagaagggctactatctgggatttccagtggtgctgctttgtttgctgccattcgcgtagctcaacgtccagaaaacgccggacgcttaattgtattgattcagcctagttttggagaaaggtatcttagtacaccattgttccaagacctagaaacaaaggcaacagctagcattagctaa

SEQ ID NO: 171 - protein, 320 aa, Nostoc sp. PCC 7120
MRVARNITELVGRTPLVQLNRIPQEEGCVAQILVKMESMNPSSSVKDRIGVSMINAAEQEGLIAPGKTVLVEPTSGNTGIALAMAAAAKGYRLILTMPETMSGERRAMLRAYGAELELTPGMEGMSGAIRRAQEIVNTTPHAYMLQQFRNPANVKIHRETTAEEIWEDTDGQVDMIVAGVGTGGTITGVAEVLKARKPSFQAIAVEPANSPVLSGGKPGPHKIQGIGAGFVPQVLKTQLIDEVITVTDEEAIAYGRRLAREEGLLSGISSGAALFAAIRVAQRPENAGRLIVLIQPSFGERYLSTPLFQDLETKATASIS

SEQ ID NO: 172 - DNA, 903 bp, Ralstonia solanacearum GMI1000
  CDS (1)..(903): transl_table=11
atggcttatcccaccatcgaagacaccatcggcaatacgccgctggtcaggctccagcgcattcccggcgaggacaacgcgcgacgcggcaacgtgatcctcggcaagctcgagggcaacaatccggccggctcggtcaaggatcgtccggcgctttcgatgatcaagcatgccgagacgcgcggccgcatcaagccgggcgacacgctgatcgaagccacctcgggcaataccggtatcgcgctggcgatggctgctgccatccgcggttacaagatggtactgatcatgccggaggacttgtcggtcgagcgccgccagagcatggcggcgtacggcgcggagatcgtcctgacgccggtcaagggcggcatggagtacgcccgcgatctggccgacgcgatggagcgggacggcaagggcgtcatcctcgaccagttcgccaatcctgacaatccgctggcgcactatgaaggcaccggcccggaaatctggcgcgacaccgaagggcgcattacccatttcgtctcggcgatgggcacgaccggcaccatcaccggcgtctcgcggttcctgaaggagaagaatcccgccatccagatcgtcggcgcgcagccggcggaaggctcgcgcattcccggcatccgcaagtggccggaggcgtatatgccgaagatctacgatcccaagcacatcgatcgtaccgagtcggtctcgcagtccgatgccgagcacatggcgcgtcgcatggcgcgcgaggaagggatcttctgcggcatctcggcggcgggcgcgctgtgcgtggcgctgcgggtggcggaggcggtcgagaacgcgaccatcgtctttgtcgtttgcgaccggggcgaccgctacctgtccaccggcgtgtttccggcctga

SEQ ID NO: 173 - protein, 300 aa, Ralstonia solanacearum GMI1000
MAYPTIEDTIGNTPLVRLQRIPGEDNARRGNVILGKLEGNNPAGSVKDRPALSMIKHAETRGRIKPGDTLIEATSGNTGIALAMAAAIRGYKMVLIMPEDLSVERRQSMAAYGAEIVLTPVKGGMEYARDLADAMERDGKGVILDQFANPDNPLAHYEGTGPEIWRDTEGRITHFVSAMGTTGTITGVSRFLKEKNPAIQIVGAQPAEGSRIPGIRKWPEAYMPKIYDPKHIDRTESVSQSDAEHMARRMAREEGIFCGISAAGALCVALRVAEAVENATIVFVVCDRGDRYLSTGVFPA

SEQ ID NO: 174 - DNA, 975 bp, Ralstonia solanacearum GMI1000
  CDS (1)..(975): transl_table=11
atggccatacgggacgggttttccggcagcatcggcaatacgccgctgatccggctggcgaggctgagcgaggaaaccggctgcgagatcctcggcaaggccgaattcctgaacccgggcggatcggtcaaggaccgcgcggccctctatatcatccgggacgccgagcggcgcggcacgctcagggccggcggcacggtggtcgagggcaccgccggcaacacgggcatcgggctggcccatctctgcgcggcgcgcggctaccgctgcgtgatcgtcatccccgagacacaatcgcccgaaaaaatggacctgctgcgcgcgctcggcgccgaagtgcgcccggtgccggccgtaccgtacaaagaccccaacaactaccagaagatcgccggccgcctcgcgcaagaaaccgccaacgcgatctgggccaaccagttcgacaacctcgtcaaccggcaggcccactacgaaaccaccggcccggaaatctggcgcgacaccgccggccgcgtggatgccttcgtctgcgcgaccggcaccggcggcacgctggcgggcgtcgcccgctacctcaaggaacagaacccggccgtgcggaccgtgctggccgatccgcacggcagcggcctgtacagcttcgtgaagaccggcagcatccaggccgaaggcagctccatcaccgagggcatcggctccacccgcgtcaccgccaacctcgaaggcacgcccatcgacgacgccgtgcgcatcgatgaccagacctgcgtcacgatggtctaccggctgctgcgggaagaaggcctgttcgtgggcggctcgaccggcatcaacgtcgccgcggcggtgcagctggcgcgcgaactggggccgggtcataccatcgtcacgctgctgtgcgatcggggcaatctgtactttgcgcggttgttcaatggggcgtggctggcgcagaaggggttggtggcgggatga

SEQ ID NO: 175 - protein, 324 aa, Ralstonia solanacearum GMI1000
MAIRDGFSGSIGNTPLIRLARLSEETGCEILGKAEFLNPGGSVKDRAALYIIRDAERRGTLRAGGTVVEGTAGNTGIGLAHLCAARGYRCVIVIPETQSPEKMDLLRALGAEVRPVPAVPYKDPNNYQKIAGRLAQETANAIWANQFDNLVNRQAHYETTGPEIWRDTAGRVDAFVCATGTGGTLAGVARYLKEQNPAVRTVLADPHGSGLYSFVKTGSIQAEGSSITEGIGSTRVTANLEGTPIDDAVRIDDQTCVTMVYRLLREEGLFVGGSTGINVAAAVQLARELGPGHTIVTLLCDRGNLYFARLFNGAWLAQKGLVAG

SEQ ID NO: 176 - DNA, 1017 bp, Ralstonia solanacearum GMI1000
  CDS (1)..(1017): transl_table=11
atgatcgcgaaaagcatcgtcgactgcattggcggcaccccgctcgtgcagctcgcccgcctgtacgacggccgcaaggccgaggtgttcgccaagctggaaatgctgaacccggccggcagcatcaaggaccggccggcccgctacatcatcgagcgcggattggccgagggttcgatcgcgccgggcacgcacatcatcgaaagctcctcggggaacctcgccatcgcgctggcgatggtgtgccggatcaagggactgcgcttcacggcggtggtcgatccgaagatctccccgaccaacctgaagatcctgcgctgctacggcgccggcatcgagcgcgtgacccgcaaggacagccagggcggctacctggagacgcgcatcgagcgcgtccggcagatgctggcgagcgagccgggcgcggtgtggatcaaccagtacggcaatccgcgcaactgggaaagccacttccacggcgaaggcgatgagatcgcgcgcgcgctcgaccggccggccgacatgctggtgctgggcgtcagcacgtcgggcaccgtgctcggcattgcccggcgcctgcgccgcgagtggccggggctcagggtggtcgcggtcgatgcggtgggctcggtgctgttcggcgccaagccggggccgcgcgagctgcccggcatcggcgcgagccgggtgcccgagctgctgtgccgcgacgacatcgacgacgtcatccatgtcgacgactacgacgcggccatgggctgccggcgcctgctcgaacgcgaaggcatcttcgcgggcggatcgtcgggcgccgtcgtggtcgccatcgatcgcctgctggcgcgcgccacgcggccgctgcgcatcgtcacattgctgcccgatcgcggcgagcgctatctcgacagcgtctacgacgacgagtggcttgcgcgcatcgctgcatcccgggcgggcggcgccgtttccgccgcctcgccgtctctccacgtcccatcccttgaagaggtgctctga

SEQ ID NO: 177 - protein, 338 aa, Ralstonia solanacearum GMI1000
MIAKSIVDCIGGTPLVQLARLYDGRKAEVFAKLEMLNPAGSIKDRPARYIIERGLAEGSIAPGTHIIESSSGNLAIALAMVCRIKGLRFTAVVDPKISPTNLKILRCYGAGIERVTRKDSQGGYLETRIERVRQMLASEPGAVWINQYGNPRNWESHFHGEGDEIARALDRPADMLVLGVSTSGTVLGIARRLRREWPGLRVVAVDAVGSVLFGAKPGPRELPGIGASRVPELLCRDDIDDVIHVDDYDAAMGCRRLLEREGIFAGGSSGAVVVAIDRLLARATRPLRIVTLLPDRGERYLDSVYDDEWLARIAASRAGGAVSAASPSLHVPSLEEVL

SEQ ID NO: 178 - DNA, 1029 bp, Brucella melitensis 16M
  CDS (1)..(1029): transl_table=11
atgttcaattcggtactcgacacaatcggcaacacgccgttgatccgcctcagcaaggcttccgagctcacaggatgcgatatttacgggaaagcagagtttctcaatccgggccagtcggtcaaggaccgtgcggcgctctacattatccgcgatgcggaaaaacgcgggcttttgcggcccggaggcgtgattgtggaaggaaccgcgggcaataccggcattggcctcacgatggtcgccaaggcattgggctaccgcacggcgatcgtgattcctgaaacgcagagccaggaaaaaaaggaagtcttgcgcctgctcggtgcagagctgatcgaggttcccgccgccccctatcgcaacccgaacaattatgtgcgcctttcagggcgtcttgccgagcaactggccaaaaccgagccgaatggcgcaatatgggccaatcagttcgacaatacggtcaaccggcaagcccatatcgagaccacggcgcaggaaatctggcgcgatacaagcgaccagatcgatggttttgtggccgctgtgggatctggcggtacgcttgccggaacggcgattggcctgaaggaacggaaccacaatatcaaaattgctctggcggacccgcatggcgcggcgcttcacgccttctatacgaccggcgaattgaaggcagaaggcgattcgatcaccgaaggcatcgggcaggggcgcatcaccgccaatcttgaaggcttcacccctgatttttcctaccagattcccgatgcggaggcgctcgatatcctgtttgccctcgtggaagaggaggggctttgcctcggcggctcgtccggcatcaacattgccggtgcaatccggcttgcaaaagatctcgggccgggccacacaattgtgaccgtgctttgtgactacggtaatcgttaccagtcaaagctgttcaatcccgccttcctccgcggcaagagcctgcccgtgccgcgctggctggagaagaaaaccgaaatagacataccgttcgaggggtaa

SEQ ID NO: 179 - protein, 342 aa, Brucella melitensis 16M
MFNSVLDTIGNTPLIRLSKASELTGCDIYGKAEFLNPGQSVKDRAALYIIRDAEKRGLLRPGGVIVEGTAGNTGIGLTMVAKALGYRTAIVIPETQSQEKKEVLRLLGAELIEVPAAPYRNPNNYVRLSGRLAEQLAKTEPNGAIWANQFDNTVNRQAHIETTAQEIWRDTSDQIDGFVAAVGSGGTLAGTAIGLKERNHNIKIALADPHGAALHAFYTTGELKAEGDSITEGIGQGRITANLEGFTPDFSYQIPDAEALDILFALVEEEGLCLGGSSGINIAGAIRLAKDLGPGHTIVTVLCDYGNRYQSKLFNPAFLRGKSLPVPRWLEKKTEIDIPFEG

SEQ ID NO: 180 - DNA, 909 bp, Clostridium perfringens str. 13
  CDS (1)..(909): transl_table=11
atgaaatattataatgatataagagatttaataggaaatactccaatattaaaactaaataatataagtacaaaagaaggagtaaatatttatgccaaaatagaaggtactagtccagggggaagttgtaaagatagagtcggaatatatatggtagaaaaagctgagaaagaaggaaaacttaaacctggaagcactattatagaggctactgccggaaatacaggtattggcatagctttagcagctattaataaaggttataaaataatatttatagttcctgataaattttctatagagaagcaaaagataatgaaagctttaggtgctgaaataataaatactcctaaagaagaggggatggaaggtgctataaatttagcaaattcattattaagtgagattcctaattcattatcattaaatcaattcaaaaatgaggcaaatccattagctcattacgagactactggtagagaattatatgatggattagatggagaaattgattattttgttgctggagcaggaagcggaggaacaatttctggtgtattaaaattcttaaaagaaaatatttcagaagtaaaaggaatattagctgatccagtaggttctattattggtggtggacaatgtggaacttataaaatagaaggaataggaaacaattttattccagaaactatggatatgagcttagtagatgatgttataaaagtaaatgatgaggaagcttttgatgcagtaaaattattagctaaaaaagaaggattaatagttggttcctcttcaggagcagcatttgcagcagtattaaaattagctgagaaaatagagaagggcaatatagtaacaatatttccagatagaggagataggtattttagtacagatcttttttaa

SEQ ID NO: 181 - protein, 302 aa, Clostridium perfringens str. 13
MKYYNDIRDLIGNTPILKLNNISTKEGVNIYAKIEGTSPGGSCKDRVGIYMVEKAEKEGKLKPGSTIIEATAGNTGIGIALAAINKGYKIIFIVPDKFSIEKQKIMKALGAEIINTPKEEGMEGAINLANSLLSEIPNSLSLNQFKNEANPLAHYETTGRELYDGLDGEIDYFVAGAGSGGTISGVLKFLKENISEVKGILADPVGSIIGGGQCGTYKIEGIGNNFIPETMDMSLVDDVIKVNDEEAFDAVKLLAKKEGLIVGSSSGAAFAAVLKLAEKIEKGNIVTIFPDRGDRYFSTDLF

SEQ ID NO: 182 - DNA, 903 bp, Clostridium perfringens str. 13
  CDS (1)..(903): transl_table=11
atggtttttaacagtcttttaagtttaataggaaacacaccaatattaaaagcaaataatttatttgaagggaataatgtatttgttaagcttgaaaaatttaatccaggaggaagtataaaagatagagcagctttaggaatgatagaagaagctgaaaaaaatggattattaaaagaaaatggagttatagtagaaccaactagtggaaatacaggaattgccatagctatgattggtaaaattaaagggtataaagttattataactatgccagagacaatgagtaaagaaagaagagatatgatcaaagcttatggtgcagagataattttaactgaaggaagcaaaggaatgaagggagctattgaagaagcagagaggttagctagtacaaagggatatttcatgcctcaacagtttttaaatgaagctaatgctaaaaaacattatgaaactactgcggaagaaataataagagatattccagacttagatgtatttattgcaggggtaggaactggaggaactattacaggagtaggaagaaaattaaaggaatataatcctaatataaaaatagttgctgtagaacctagtgattcagctgtattatcaggagaaaattctggtcctcataaaattcaaggaataggtgctggattcataccaaagatatatgactcatcagtagttgatgaaataataaaggttaaaaatgaagatgcatacactatggcaaaaaactttgctgataaagaaggagttttagtaggtatatcttctggagctgcactaaaaggggcaaaggatattttagaaaatatagcaaaagataaaaaagtgttagttatagcacctgatggaggagaaaaatatttttcaacagggctatatgagtaa

SEQ ID NO: 183 - protein, 300 aa, Clostridium perfringens str. 13
MVFNSLLSLIGNTPILKANNLFEGNNVFVKLEKFNPGGSIKDRAALGMIEEAEKNGLLKENGVIVEPTSGNTGIAIAMIGKIKGYKVIITMPETMSKERRDMIKAYGAEIILTEGSKGMKGAIEEAERLASTKGYFMPQQFLNEANAKKHYETTAEEIIRDIPDLDVFIAGVGTGGTITGVGRKLKEYNPNIKIVAVEPSDSAVLSGENSGPHKIQGIGAGFIPKIYDSSVVDEIIKVKNEDAYTMAKNFADKEGVLVGISSGAALKGAKDILENIAKDKKVLVIAPDGGEKYFSTGLYE

SEQ ID NO: 184 - DNA, 975 bp, Arabidopsis thaliana
  CDS (1)..(975)
atggaggaggaccggtgttcgatcaaggatgatgcaactcaattgataggtaacaccccaatggtatatctgaacaacattgtggatggttgtgtagctcgtattgcagctaagcttgaaatgatggagccttgctctagtgtcaaggagcgaattgcttatggtatgattaaagatgcagaagacaagggattgattactcctgggaagagcacactgattgaggctacctctggtaacaccgggattggtttagccttcatcggtgcagctaaaggttacaaagtggtcctcacaatgccctcatcaatgagccttgagagaaaaatcattcttttagcattaggtgcggaggttcacctcacagatcctagtaaaggcgttcaaggaataatcgacaaagctgaagagatatgtagcaaaaatccagatagtatcatgctagaacagttcaaaaatccttcaaacccgcaaactcattatcgaaccacgggtccagagatatggagagactctgcaggggaagtagacatattggttgccggtgttggaactggtggaacgctttccggatcaggaagattcctcaaggagaagaataaagactttaaggtttatggtgtggaacctacagaaagtgcggtaataagtggaggcaaaccgggtacacatttgatccaaggtattggggctggactcatcccagacaatttggatttcaacgttcttgatgaagtcatccaagtgacaagtgtggaagcaattgaaacagccaaacttcttgccctgaaagaaggattactggtgggaatatcttctggagctgctgcagccgctgcgataaaggtggcaaagcggccagaaaacgccggcaaactcatagttgtgattttccctagcggtggggaacgttacctatcgacctcattgttcgaatcagtcagacatgaagcagagaatttgccaattcaatga

SEQ ID NO: 185 - protein, 324 aa, Arabidopsis thaliana
MEEDRCSIKDDATQLIGNTPMVYLNNIVDGCVARIAAKLEMMEPCSSVKERIAYGMIKDAEDKGLITPGKSTLIEATSGNTGIGLAFIGAAKGYKVVLTMPSSMSLERKIILLALGAEVHLTDPSKGVQGIIDKAEEICSKNPDSIMLEQFKNPSNPQTHYRTTGPEIWRDSAGEVDILVAGVGTGGTLSGSGRFLKEKNKDFKVYGVEPTESAVISGGKPGTHLIQGIGAGLIPDNLDFNVLDEVIQVTSVEAIETAKLLALKEGLLVGISSGAAAAAAIKVAKRPENAGKLIVVIFPSGGERYLSTSLFESVRHEAENLPIQ

SEQ ID NO: 186 - DNA, 957 bp, Corynebacterium glutamicum ATCC 13032
  CDS (1)..(957): transl_table=11
atgattggagcaccacccgacatgggcaatgtgtacaacaacatcaccgaaaccatcggccacaccccactggtaaagctgaacaagctcaccgaaggcctcgacgcaactgtcctggtcaagcttgagtcattcaacccagcaaactccgtcaaggaccgtatcggtctggccatcgttgaagatgcagagaagtccggtgcactgaagccaggcggcaccatcgttgaagcaacctccggcaacaccggtatcgcactggcaatggtcggcgctgcacgcggatacaacgttgttctcaccatgccggagaccatgtccaacgagcgtcgcgttctcctccgcgcttacggtgcagagatcgttcttaccccaggtgcagcaggcatgcagggtgcaaaggacaaggcagacgaaatcgtcgctgaacgcgaaaacgcagtccttgctcgccagttcgagaacgaggcaaacccacgcgtccaccgcgacaccaccgcgaaggaaatcctcgaagacaccgacggcaacgttgatatcttcgttgcaagcttcggcaccggcggaaccgtcaccggcgttggccaggtcctgaaggaaaacaacgcagacgtacaggtctacaccgtcgagccagaagcgtccccacttctgaccgctggcaaggctggtccacacaagatccagggcatcggcgcaaacttcatccccgaggtcctggaccgcaaggttctcgacgacgtgctgaccgtctccaacgaagacgcaatcgcattctcccgcaagctcgctaccgaagagggcatcctcggcggtatctccaccggcgcaaacatcaaggcagctcttgaccttgcagcaaagccagagaacgctggcaaaaccatcgtcaccgttgtcaccgacttcggcgagcgctacgtctccaccgttctttacgaagacatccgcgactaa

SEQ ID NO: 187 - protein, 318 aa, Corynebacterium glutamicum ATCC 13032
MIGAPPDMGNVYNNITETIGHTPLVKLNKLTEGLDATVLVKLESFNPANSVKDRIGLAIVEDAEKSGALKPGGTIVEATSGNTGIALAMVGAARGYNVVLTMPETMSNERRVLLRAYGAEIVLTPGAAGMQGAKDKADEIVAERENAVLARQFENEANPRVHRDTTAKEILEDTDGNVDIFVASFGTGGTVTGVGQVLKENNADVQVYTVEPEASPLLTAGKAGPHKIQGIGANFIPEVLDRKVLDDVLTVSNEDAIAFSRKLATEEGILGGISTGANIKAALDLAAKPENAGKTIVTVVTDFGERYVSTVLYEDIRD

SEQ ID NO: 188 - DNA, 1011 bp, Fusobacterium nucleatum subsp. nucleatum ATCC 25586
  CDS (1)..(1011): transl_table=11
atggagcaaaaaaaaatgaaatatttagaaaatttagttggaaaaactcctatgttagaattgatatttgattataaaggagaagaaagaagaatttttgtaaaaaatgaaagttataatttaactggaagtattaaagatagaatggcattttataccttaaaaaaggcttatgaaaagaatgagataaaaaaaggagcacctattgttgaagctacaagtggaaacacaggaatagctttttctgctatgggagcaattttaggacaccctgttattatttatatgccagattggatgagtgaagaaagaaagtctttaattcgttcttttggagcaaaaattattttggtaagtagaaaagagggaggatttttaggaagtatagaaaagacaaaagagtttgctaaaaataatcctgatacttatttacctagccaattctctaacctttataacagtgaagcacattattatgggataggtttagaaattgtaaatgaaatgaaaagtttaaatttaaatattgatggttttgttgcaggagttggaactggtggaacagttatgggaataggaaaaagaattaaagaaaatttttctaatgcaaaaatatgtccacttgaacctttaaattctccaactttatctactggatataaggttgctaaacatagaatagaaggaatttctgatgaatttatacctgatttagtaaaattagataaacttgataatgtagtaagtgtagatgatggagatgctattgttatggcacaaaaacttgctaaatgtggtttaggagttggaatatcatctggggctaattttataggagcattgatgttacaaaataagcttggaaaagacagtgttatagtaactgtattccctgatgataataaaaaatacctaagtacagatttaatgagagaagaaaaagtaaaagaagatttcttatcaaaagatataactctaaaagaaataaagaatgttcttagagtaatttaa

SEQ ID NO: 189 - protein, 336 aa, Fusobacterium nucleatum subsp. nucleatum ATCC 25586
MEQKKMKYLENLVGKTPMLELIFDYKGEERRIFVKNESYNLTGSIKDRMAFYTLKKAYEKNEIKKGAPIVEATSGNTGIAFSAMGAILGHPVIIYMPDWMSEERKSLIRSFGAKIILVSRKEGGFLGSIEKTKEFAKNNPDTYLPSQFSNLYNSEAHYYGIGLEIVNEMKSLNLNIDGFVAGVGTGGTVMGIGKRIKENFSNAKICPLEPLNSPTLSTGYKVAKHRIEGISDEFIPDLVKLDKLDNVVSVDDGDAIVMAQKLAKCGLGVGISSGANFIGALMLQNKLGKDSVIVTVFPDDNKKYLSTDLMREEKVKEDFLSKDITLKEIKNVLRVI

SEQ ID NO: 190 - DNA, 951 bp, Fusobacterium nucleatum subsp. nucleatum ATCC 25586
  CDS (1)..(951): transl_table=11
ttgagaataaagtttgataggaggatttttatgttagcaaattctgtaattgatttaattgggaacactccattggtaaagattaataatattgatacttttggaaatgaaatttatgtaaaattggaaggttcaaatcctggtagaagtacaaaagacagaattgccttaaaaatgattgaggaagctgaaaaggaaggtttaattgataaagatactgttattatagaagctacaagcggaaacactggaattggacttgctatgatatgtgcagttaaaaactataaattaaaaattgttatgcctgatactatgagtatagaaagaatacagcttatgagagcttatggaactgaggttatattaactgatggttctcttggaatgaaagcctgtttagaaaaattagaagaacttaaaaagaatgaaaaaaaatattttgttcctaaccaattcactaatgtgaataatccaaaagcccactatgaaactactgctgaagaaattttaaaagatttaaataacaaagtggatgtatttatttgtggaacagggacaggaggtagtttttctggaactgctaaaaagctaaaagaaaaattgcctaatataaaaactttccctgttgaacctgcttcatctccattgctttcaaaaggttatataggtcctcataaaattcaaggtatgggaatgagtataggtggtattccagcagtttatgatggaagtttagcagatgatattttagtttgtgaagatgatgatgcttttgaaatgatgagagaattaagttttaaagaaggtattttaggtggaatttctactggtgctacttttaaagcggctcttgactattcaaaagaaaatgctgataaaggtttgaaaatagttgtcctttctactgactcaggtgaaaaatatttatctaatatttgtgatttataa

SEQ ID NO: 191 - protein, 316 aa, Fusobacterium nucleatum subsp. nucleatum ATCC 25586
MRIKFDRRIFMLANSVIDLIGNTPLVKINNIDTFGNEIYVKLEGSNPGRSTKDRIALKMIEEAEKEGLIDKDTVIIEATSGNTGIGLAMICAVKNYKLKIVMPDTMSIERIQLMRAYGTEVILTDGSLGMKACLEKLEELKKNEKKYFVPNQFTNVNNPKAHYETTAEEILKDLNNKVDVFICGTGTGGSFSGTAKKLKEKLPNIKTFPVEPASSPLLSKGYIGPHKIQGMGMSIGGIPAVYDGSLADDILVCEDDDAFEMMRELSFKEGILGGISTGATFKAALDYSKENADKGLKIVVLSTDSGEKYLSNICDL

SEQ ID NO: 192 - DNA, 942 bp, Streptococcus pyogenes MGAS8232
  CDS (1)..(942): transl_table=11
atgactaaaatttacaaaactataacagaattagtaggtcaaacacctattatcaaacttaaccgtttaattccaaacgaagctgctgacgtttatgtaaaattagaagcttttaacccaggatcttctgttaaagatcgtattgctttatcgatgattgaagctgctgaagctaaaggtctgataagtcctggtgacgttattatcgaaccaacaagtggtaatacaggtattggtcttgcatgggtaggtgctgctaaagggtatcgagtcattattgttatgcccgaaactatgagcttggaaagacggcaaatcattcaggcttatggtgcagagcttgtcttaacacctggagcagaaggtatgaaaggggctattgcaaaagctgaaactttagcaatagaactaggtgcttggatgcctatgcaatttaataaccctgccaatccaagcatccatgaaaaaacaacagctcaagaaattttggaagcttttaaggagatttctttagatgcattcgtatctggtgttggtactggaggaacactttctggtgtttcacatgtcttgaaaaaagctagccctgaaactgttatctatgctgttgaagctgaagaatctgctgtcttatctggtcaagagcctggaccacataaaattcaaggtatatcagctggatttatcccaaacacgttagataccaaagcctatgaccaaattatccgtgttaaatcgaaagatgctttagaaactgctcgactaacaggagctaaggaaggcttcctggttgggatttcttctggagctgctctttacgccgctattgaagtcgctaaacagttaggaaaaggcaaacatgtgttaactattttaccagataatggcgaacgctatttatcgactgaactctatgatgtaccagtaattaagacgaaataa

SEQ ID NO: 193 - protein, 313 aa, Streptococcus pyogenes MGAS8232
MTKIYKTITELVGQTPIIKLNRLIPNEAADVYVKLEAFNPGSSVKDRIALSMIEAAEAKGLISPGDVIIEPTSGNTGIGLAWVGAAKGYRVIIVMPETMSLERRQIIQAYGAELVLTPGAEGMKGAIAKAETLAIELGAWMPMQFNNPANPSIHEKTTAQEILEAFKEISLDAFVSGVGTGGTLSGVSHVLKKASPETVIYAVEAEESAVLSGQEPGPHKIQGISAGFIPNTLDTKAYDQIIRVKSKDALETARLTGAKEGFLVGISSGAALYAAIEVAKQLGKGKHVLTILPDNGERYLSTELYDVPVIKTK

SEQ ID NO: 194 - DNA, 927 bp, Methanosarcina acetivorans C2A
  CDS (1)..(927): transl_table=11
atgggtcaaatctattcagacataacatggacaatcggaaacacaccgcttgtccgtttaaaccacatcacgaagggtcttcatacggatgtgctggttaaggtagagtcctttaacccgatggggagtgtaaaggacagaatcggactggcaatgcttgaggaagccgaacgtgagggaaaaatcaaagaaggcaccacaattgttgaagccacaagcgggaacaccggaatagcccttgcaggagtgtgtgctgcccgtggctataaactcatccttgttatgcctgagacgatgagcatagaacgaagaaagctgctgaaagctctgggcgcagaactcgtcctgaccccgggccccgaagggatgaaaggggcagtcaataaagcggaacagatggcttcagcagaccccactctttactatatgccccagcaatttcagaaccctgcaaaccctgaggcccaccgcaggacaactgccgaggagatctggagagatacggatgggaaagcggatgttctcgtagcaggcgtggggaccggagggacaatcacaggtattgccggagtcctcaagaaaaggaaaaccggtttcagggctattgcagtcgaacctaccgaatctcccgtactcagcggcggaagcccgggcccacacaggatccagggaataggtgcaggttttatcccggatgtccttcagcttggtcttgttgatgaaattatcaaagtatctgcagatgaagctatttccacgggaagaaggctggcaagggaagaaggcattcttgcaggcatatcttcaggagcggctacatgcgcagccctgcaggtagcatccaggaaagagatgagcggaaagacaattgttgtcatcctgccggataccggagagcgttatctgagcaccgatctgtttagctga

SEQ ID NO: 195 - protein, 308 aa, Methanosarcina acetivorans C2A
MGQIYSDITWTIGNTPLVRLNHITKGLHTDVLVKVESFNPMGSVKDRIGLAMLEEAEREGKIKEGTTIVEATSGNTGIALAGVCAARGYKLILVMPETMSIERRKLLKALGAELVLTPGPEGMKGAVNKAEQMASADPTLYYMPQQFQNPANPEAHRRTTAEEIWRDTDGKADVLVAGVGTGGTITGIAGVLKKRKTGFRAIAVEPTESPVLSGGSPGPHRIQGIGAGFIPDVLQLGLVDEIIKVSADEAISTGRRLAREEGILAGISSGAATCAALQVASRKEMSGKTIVVILPDTGERYLSTDLFS

SEQ ID NO: 196 - DNA, 921 bp, Thermoanaerobacter tengcongensis MB4
  CDS (1)..(921): transl_table=11
atggtggcgaacaatattcttgatttgatagggaaaacccctgtggtaaagttaaataaggtgcctgataaaaatagcgctgaagtgtacttgaaacttgagttttttaaccctgccggcagcgtcaaagacagaattgcacttgctatgatagaaaaggcagaaaaagaagggatattaaaaaaaggcagtgtgattgtggaacccaccagtggaaatacaggaatagggctggcaatggtgggggctgcaaaaggatataaagttataatagtcatgcctgacaccatgagcatggaaaggcggatgcttttggctgcttacggggcagaggtgattttgactcctggaaaactgggcatggagggagctattagaaaagcggaagagttagttaagcagaacaagaactatttcatgccccagcagtttgagaatttagcaaatcctctcattcatgaagagactactgcaaaggaaataatagaggattttaaggaaggtttagatgcttttgtagccggtataggtacaggagggactattacgggagttggtagggtccttaaaaaagtttttccagatataaagattgtgggggtagaaccttactctgccgcagttttatctggaagagaaccgggtccccacaagattcagggaattggagcaggctttatacccaaagtcttggatagagaagtgctaaatgaagtgataccagtgaaagatgaagatgcctttgaaatgactagaattttggccaaaaaagaaggtattttggcagggatttctactggtgcttctttgtgggcagcgcttaatgtagctaagaaattaggaaaagggaagaaagtccttgcgatagcgccagacagtggagaaaggtatttaagcactcagattttcagagaacattga

SEQ ID NO: 197 - protein, 306 aa, Thermoanaerobacter tengcongensis MB4
MVANNILDLIGKTPVVKLNKVPDKNSAEVYLKLEFFNPAGSVKDRIALAMIEKAEKEGILKKGSVIVEPTSGNTGIGLAMVGAAKGYKVIIVMPDTMSMERRMLLAAYGAEVILTPGKLGMEGAIRKAEELVKQNKNYFMPQQFENLANPLIHEETTAKEIIEDFKEGLDAFVAGIGTGGTITGVGRVLKKVFPDIKIVGVEPYSAAVLSGREPGPHKIQGIGAGFIPKVLDREVLNEVIPVKDEDAFEMTRILAKKEGILAGISTGASLWAALNVAKKLGKGKKVLAIAPDSGERYLSTQIFREH

SEQ ID NO: 198 - DNA, 939 bp, Thermoanaerobacter tengcongensis MB4
  CDS (1)..(939): transl_table=11
atgtcgggaagagaaaataaaatttatgaggatataactcagcttataggcaatacacctatgattaggttgaataaagttgttcctgaaaattcagcggaggtcatagtaaaattagagtcttttaacccaggtggaagtgttaaggacagaattgcattaaatatgataaaaagagctgaggaagaaggaagattaaaacctggtgggacaattgttgaacctaccagtggaaatacaggcattggtcttgcgatggttagtgctgtaaaagggtataagttgattcttgtaatgcctgatacgatgagtatagaacgacgaaatttacttttgtcatatggagcagagcttgttttaacacccggtgcagagggtatgaaaggagccataaaaaaggcacaagaaattttggaattaaatcctgattatataatgttagatcagtttaaaaatcctgcgaatccagaaatacatgaacttacaacggcaaaagaaatattaaaagatacaaatggaatagtagatgcatttgtagcaggtgtaggcacagggggaacaatatccggagtagggaaagttttaaagcaatataacaaagatataaaaatttttgcagtagaaccagaggaatctcctgtattgtcaggcggcaaacctggacctcataagatacaaggaataggagctggatttattcctgacacattaaatcttgacgttatcgatgaaattataaaggtaaaagagagagatgcttttgaaatgtcaatgaaacttgcaaaacaagaagggattctttgtggtatttcttcaggcgcaaatgtttttgcggcagttgaagttgcaaatcgcctcgggaaaggaaaacgagttgtaacagtactacctgatactggggaaagatatttaagtatgcacaaattttttgaatattga

SEQ ID NO: 199 - protein, 312 aa, Thermoanaerobacter tengcongensis MB4
MSGRENKIYEDITQLIGNTPMIRLNKVVPENSAEVIVKLESFNPGGSVKDRIALNMIKRAEEEGRLKPGGTIVEPTSGNTGIGLAMVSAVKGYKLILVMPDTMSIERRNLLLSYGAELVLTPGAEGMKGAIKKAQEILELNPDYIMLDQFKNPANPEIHELTTAKEILKDTNGIVDAFVAGVGTGGTISGVGKVLKQYNKDIKIFAVEPEESPVLSGGKPGPHKIQGIGAGFIPDTLNLDVIDEIIKVKERDAFEMSMKLAKQEGILCGISSGANVFAAVEVANRLGKGKRVVTVLPDTGERYLSMHKFFEY

SEQ ID NO: 200 - DNA, 951 bp, Streptomyces coelicolor A3(2)
  CDS (1)..(951): transl_table=11
atgcgctacgactccccgctggccgcggtgggcaacacccccctggtgcgcctgccgcggctgtcgccgtccgacgacgtccgcatctgggccaagctggaggaccgcaacccgaccggctcgatcaaggatcgccccgcgctccacatgatcgagcaggccgagaaggacggccgcctcacccagggctgcaccatcctggagccgaccagcggaaacaccggcatctccctggccatggccgccaggctcaagggctaccgcatcgtctgcgtcatgcccgagaacacctcccaggaacgccgggacctgctcaccatgtggggcgcggagatcatctcctccccggccgcgggcggctccaacaccgccgtacgcgtcgccaaggaactctccgccgaacacccggactgggtgatgctctaccagtacggcaacccggacaacgcgggcgcccactacgccggcaccggccccgagatcctcgccgacctgccgtcggtcacgcacttcgtcgcgggcctgggaacgacggggacgctgatgggcgtcggccgctacctgcgcgagcacaagccggacgtgaagatcgtcgccgccgaaccgcgctacgacgacctggtctacggcctgcgcaacctcgacgagggcttcgtccccgagctgtacgacgcctccgtcctcaccacccgcttctcggtgggctccgccgacgcggtcacccgcacccgcgagctgctccagcaggagggcatcttcgcgggcgtctccaccggcgccgccctgcacgccgcgatcggcgtcgggaagaaggcggtcaaggcgggggagagcgcggacatcgtgttcgtcgtcgccgacggcggctggaagtacctgtcgaccggcgtctacaccgccgagacgaccgaggcggccatcgagaccctgcacggccagctctgggcctga

SEQ ID NO: 201 - protein, 316 aa, Streptomyces coelicolor A3(2)
MRYDSPLAAVGNTPLVRLPRLSPSDDVRIWAKLEDRNPTGSIKDRPALHMIEQAEKDGRLTQGCTILEPTSGNTGISLAMAARLKGYRIVCVMPENTSQERRDLLTMWGAEIISSPAAGGSNTAVRVAKELSAEHPDWVMLYQYGNPDNAGAHYAGTGPEILADLPSVTHFVAGLGTTGTLMGVGRYLREHKPDVKIVAAEPRYDDLVYGLRNLDEGFVPELYDASVLTTRFSVGSADAVTRTRELLQQEGIFAGVSTGAALHAAIGVGKKAVKAGESADIVFVVADGGWKYLSTGVYTAETTEAAIETLHGQLWA

SEQ ID NO: 202 - DNA, 960 bp, Xanthomonas axonopodis pv. citri str. 306
  CDS (1)..(960): transl_table=11
atggccctgtacgacaacattctcgacaccatcggccgcaccccggtggtcaagctccaacgcctcgccccggataacgtgaccttgtacgtcaaggtcgaatcgttcaatcccggcggctcggtcaaggaccggctggcgctggcgatcatcctggacgccgaacagcgcggcctgctcaagcccggcgacaccatcgtcgaagccacctccggcaacaccggcgtggcactggccatggtggccgcagcacgcggctacaagttcgtcgccaccatggtggaaaccttctccatcgaacgccgcaagctgatgcgtgcctatggcgccaaggtcatcctgacgccggctgccgagcgcggcagcggcatggtgcgcaaagcgaaggagctggccgaacagcacggctggttcctggccagccagttcgccaatccggccaacccggcctaccaccgcaacaccaccgctgccgagatcctgcgcgatttcgccggccaccggctggaccatttcgtcaccggctggggcaccggcggcaccctcaccggcgtgggcgaggtcctgagcgttgcgcgcccggaagtgcgcatcaccgcctcggagccggctggcgccgccttgctgcaaggccaggactggaaaccgcacaagatccagggctggaccccggacttcatacccgaggtgctcaaccgcgaggtcgcccatgaggtgctgagcgtggaagacaccgacgccatcaccgtggcgcggcgcctggccgccgaagaaggcatcttcaccggcatctccggcggtgccaccgtcgccaccgcgctgcgcgtggcagaaggcgcggtgcctggcgccgtcatcctggcgatgctgcccgacactggcgagcgctacttctcgaccccgctcttcgccgacatcaacgaaggctccgacgacgactggctggccgggctgccctga

SEQ ID NO: 203 - protein, 319 aa, Xanthomonas axonopodis pv. citri str. 306
MALYDNILDTIGRTPVVKLQRLAPDNVTLYVKVESFNPGGSVKDRLALAIILDAEQRGLLKPGDTIVEATSGNTGVALAMVAAARGYKFVATMVETFSIERRKLMRAYGAKVILTPAAERGSGMVRKAKELAEQHGWFLASQFANPANPAYHRNTTAAEILRDFAGHRLDHFVTGWGTGGTLTGVGEVLSVARPEVRITASEPAGAALLQGQDWKPHKIQGWTPDFIPEVLNREVAHEVLSVEDTDAITVARRLAAEEGIFTGISGGATVATALRVAEGAVPGAVILAMLPDTGERYFSTPLFADINEGSDDDWLAGLP

SEQ ID NO: 204 - DNA, 933 bp, Chlorobium tepidum TLS
  CDS (1)..(933): transl_table=11
atggccaccatcgcaaatatcacgaacaccatcggacgcacgccgctggtgcggctcaacaagctcgccaagggcctcgacgccgatattctcctcaagcttgaatacttcaacccgctcggcagcgtgaaggatcgcatcgggcgcgccatgatcgaagctgccgaagccgaggggaaaatcgacgcccggacgctcatcgtcgagccgaccagcggcaacaccggcatcgcgctcgccttcgtctgcgcccagcgcggctaccggctgctgctcacgatgcccgaaaccatgagcatcgagcgccgcaaactgctgcgctacctcggcgcggagctggtgctcactcccggagcgcaggggatgaaaggggcgattgaagaggcggcgcggatcgtcgaggcggagaaaaacagcttcaaccccggccagttccgcaacccggccaaccccctgattcaccaggcgaccaccggccccgaaatctggaacgacaccgaagggcgcgttgacatgcttgtttcaggcgtcggcacgggcggcaccatcaccggcacatcacgtttcatcaaggcgctgaagcccaacttcaaaagcatcgccgtggagcccaaagattcagctgtgctctccggcgggcagccggggcctcacaaaatccagggcatcggcgcgggcttcgtgcccgatgtgctcgacgtctcgctgctcgacgaggtggtgacggtgagcaacgacgacgcgatctcgaccgcgcgggcactcgcttcgcaggagggcatcctctgcggtatctcctccggcgcggcggttcacgcagccatcgaagtggcgaaacgctcgtcatccgcaggcaaaaccatcgtcgccatcatcccgagcaccggcgaacgctacctcagcactgcgctgtttgaagacatcgaagcgtga

SEQ ID NO: 205 - protein, 310 aa, Chlorobium tepidum TLS
MATIANITNTIGRTPLVRLNKLAKGLDADILLKLEYFNPLGSVKDRIGRAMIEAAEAEGKIDARTLIVEPTSGNTGIALAFVCAQRGYRLLLTMPETMSIERRKLLRYLGAELVLTPGAQGMKGAIEEAARIVEAEKNSFNPGQFRNPANPLIHQATTGPEIWNDTEGRVDMLVSGVGTGGTITGTSRFIKALKPNFKSIAVEPKDSAVLSGGQPGPHKIQGIGAGFVPDVLDVSLLDEVVTVSNDDAISTARALASQEGILCGISSGAAVHAAIEVAKRSSSAGKTIVAIIPSTGERYLSTALFEDIEA

SEQ ID NO: 206 - DNA, 966 bp, Thermosynechococcus elongatus BP-1
  CDS (1)..(966): transl_table=11
atgaatattgcccccgatattactgccctcattggtcggacgccccttgtacgcctgaaccgcattccccaagcggagggctgcgttgccgaaattgtcgtcaagctagagagcatgaatcctgcggcctcagttaaggatcgcattggcctaagtatgattcaggaggcagaagcagcgggtctcattacccctggtaaaacggttttggtggagccgacatcgggaaatactgggattgccttggccatggtcgcggcggcaaagggctatcggctgattctcaccatgccagaaaccatgagtgcagagcgccgagccatgctgcgtgcctatggcgcagagctggatttgacccccggcaccgaggggatgagtggcgccattcgtcgtgctgaagagattgctgcctcccttgaagatgctttcatgttgcagcagttcaaaaatcccgccaatccaaagattcaccgtgaaaccactgcgcttgaaatttggcaagatacagacggtcaagttgatattttggtggctggcgttggtacggggggcacgattacgggggtagcagaagtgatcaaagcaaagaagcctacctttcaagcgatcgccgtcgaacccagcaatagtccagtcctttcaggaggcaaaccgggaccccacaaaattcaaggcattggtgctggctttgtgccccccgttctcaaacgagaactcattgatgaagtcatccctgtctccgatgatcaagccatccattttggtcgccgcttagcccgtgaagaaggcctgctctcaggtatttccagtggggctgccctttgtgctgccattcaggtggctcaacgtcctgaaaatgccggcaagttaattgtcatggtgcagcccagttttggcgaacgctacttgagcacccccctcttccaagaggccctgcccttggtgccaagctacttgcaaacttag

SEQ ID NO: 207 - protein, 321 aa, Thermosynechococcus elongatus BP-1
MNIAPDITALIGRTPLVRLNRIPQAEGCVAEIVVKLESMNPAASVKDRIGLSMIQEAEAAGLITPGKTVLVEPTSGNTGIALAMVAAAKGYRLILTMPETMSAERRAMLRAYGAELDLTPGTEGMSGAIRRAEEIAASLEDAFMLQQFKNPANPKIHRETTALEIWQDTDGQVDILVAGVGTGGTITGVAEVIKAKKPTFQAIAVEPSNSPVLSGGKPGPHKIQGIGAGFVPPVLKRELIDEVIPVSDDQAIHFGRRLAREEGLLSGISSGAALCAAIQVAQRPENAGKLIVMVQPSFGERYLSTPLFQEALPLVPSYLQT

SEQ ID NO: 208 - DNA, 1089 bp, Thermosynechococcus elongatus BP-1
  CDS (1)..(1089): transl_table=11
atgccaaaggcacactgggcgatcgctctccctgaagggaattctggcggcaaagccttttaccataaaagtattcagttcacttcaaacaacgacggcatgaatattaaacagggttttgtcggcaccgtcgggcagacgccgctgattcgcctcaattactttagtgacctcacgggctgtgaaattctcggtaaagcagagttcctcaaccccggtggctccgtcaaggatcgagcggccctctacattattgaagatgctgaaagaaaaggccttctcaaacctggcggtacagtggtcgagggtacagcgggcaataccggcattggcctagcccacatctgcaatgccaagggctacaggtgcttgattgtgattcccaatacccaatcccaagaaaaaattgacctgttgcgtaccctaggtgccgaggtgcgccccgttcctgccgtgccctacaaagaccccaataactatgtgaagctctctggccgtattgctgctgagatggagaatgccctctgggcgaaccagttcgataaccttgccaatcgccaggcccactacgaaaccactggccctgaaatctgggagcagaccgatggccgaattgatgcgtgggtagcagccactggcacggggggtacctatgcaggtgtagccctgttcctcaaggaaaaaaatcccgccattcgcaccgtgattgctgatccgatgggcagcgctatctatagctatgtaaaaacgggtaccctcagtagcacagggagttcaatcactgaaggcattggcaatagccgcattacagccaatttagcaggcgctcccattgatgatgcgattcaaattgaggatcaagagtgccttgacgtcatttatcaactgctgcactacgatggccttttcatggggggctccgtgggcattaatgtcggggcagcggtacgcctagccaaggaactcggccccggccacacaattgtcacagtgctgtgcgacgggggttcccgctatcaatcgcggctctttaacccagagtggctggccagtaaagggctacgggtgccagagattaaaaaacgttaa

SEQ ID NO: 209 - protein, 362 aa, Thermosynechococcus elongatus BP-1
MPKAHWAIALPEGNSGGKAFYHKSIQFTSNNDGMNIKQGFVGTVGQTPLIRLNYFSDLTGCEILGKAEFLNPGGSVKDRAALYIIEDAERKGLLKPGGTVVEGTAGNTGIGLAHICNAKGYRCLIVIPNTQSQEKIDLLRTLGAEVRPVPAVPYKDPNNYVKLSGRIAAEMENALWANQFDNLANRQAHYETTGPEIWEQTDGRIDAWVAATGTGGTYAGVALFLKEKNPAIRTVIADPMGSAIYSYVKTGTLSSTGSSITEGIGNSRITANLAGAPIDDAIQIEDQECLDVIYQLLHYDGLFMGGSVGINVGAAVRLAKELGPGHTIVTVLCDGGSRYQSRLFNPEWLASKGLRVPEIKKR

SEQ ID NO: 210 - DNA, 927 bp, Oceanobacillus iheyensis HTE831
  CDS (1)..(927): transl_table=11
atgagggtctctgataatattacaggtttaattggcggaacaccgattgttaaattacacaatgttacagatgaaggtagtgcagatgtatacgcaaaggtagagtttatgaatcctggtagctctgtgaaagaccgtattgctatcgcgatgattgaagcagcagaacaaggtggaaagctaaaagaaggcgatactattattgagccgactagtggaaatactggtattggccttgcaatggtagcagctgcaaaaggataccgtgcagttctagtaatgccagatacgatgagtcaggaacgcaggaatctccttcgtgcttatggtgctgaacttgtactgacacctggtgctgaagggatgaaaggtgcaattgcgaaagcggtagaattgcaagaagagaatgattactttatgccgcaacaatttagcaaccctgcaaatcctgatattcacgaaaaaacgactggtaaagaaattgtggagcagatgaaagatggtcttgatggattcgtatctggtattggtactggtggaacaattaccggtgcaggtaaggtgctaaaaaatcattttcaagatattaaattatacgcagtagagccggctgattctccaatactttcaggaggaagtcctgggccgcataaaatacaaggaattggagccggctttaaaccggatgtgttagacaccgcaatctatgatgaagttttaacaattagtaatgaggaagcatatgaagcagctagaaaagttgcaacgaccaatggcatattgggaggtatttcttccggtgctgcagttgctgctgcagttaaagttgctaaacaattaggcgcaggtaagaaagttcttgctatattaccagataatggtgagcgctatctatcaacaccgttatatcaatttgataaagagtaa

SEQ ID NO: 211 - protein, 308 aa, Oceanobacillus iheyensis HTE831
MRVSDNITGLIGGTPIVKLHNVTDEGSADVYAKVEFMNPGSSVKDRIAIAMIEAAEQGGKLKEGDTIIEPTSGNTGIGLAMVAAAKGYRAVLVMPDTMSQERRNLLRAYGAELVLTPGAEGMKGAIAKAVELQEENDYFMPQQFSNPANPDIHEKTTGKEIVEQMKDGLDGFVSGIGTGGTITGAGKVLKNHFQDIKLYAVEPADSPILSGGSPGPHKIQGIGAGFKPDVLDTAIYDEVLTISNEEAYEAARKVATTNGILGGISSGAAVAAAVKVAKQLGAGKKVLAILPDNGERYLSTPLYQFDKE

SEQ ID NO: 212 - DNA, 930 bp, Oceanobacillus iheyensis HTE831
  CDS (1)..(930): transl_table=11
ttggcaatttatgaatcgatacaacaattgattggcaatacacctttattaagaattaatgagatggacattccaaataatgttcatctctatgcaaaattagaatttttaaatcctggcggaagtgtaaaagatcgtttaggacaatatttaattgataaagcttgggagcaaggctttcttcgagagggaagtacaataatcgaaccaacagctggaaatactggtattggtttagctttagctgctagaacgaaaaagttgtcggttattttttgtgtacctgagcaatttagtgtcgaaaagcaacaaatcatgagagctttaggtgcaactatcattcatactccaaaagaaaaagggatgatgggtgcaatagaaaaagctgaacaattagttgaagaaatcccaaatagctattctccacagcagttttcaaataaatttaatcctatgacctattatgagacgatggcaccggaaatttggagtgatttacaaggagatattgatatctttgtagcgggtgcgggatcgggaggtacttttacaggttgtgcgagttattttaaggaaagaaaaaactcgattcataatgttatcgttgagcccgttggttcaattttagggggaggagaagctggtccacatttaaccgaaggaattggaatggaatttatccctgagtacatgaatcaaagctttatggatgaggtacaaactatttcggataaagaagctttttcgatggtagaagaacttgctagaaaagaaggattgttagtgggtagttcttctggttcagcgatggtagctgctttaaacaaagcaagagaagctagatcaggaacgacaattgttactattcttcctgatggaagtgatcgctatttaagtaaacagatttataatgtgtcaaagcaattgtaa

SEQ ID NO: 213 - protein, 309 aa, Oceanobacillus iheyensis HTE831
MAIYESIQQLIGNTPLLRINEMDIPNNVHLYAKLEFLNPGGSVKDRLGQYLIDKAWEQGFLREGSTIIEPTAGNTGIGLALAARTKKLSVIFCVPEQFSVEKQQIMRALGATIIHTPKEKGMMGAIEKAEQLVEEIPNSYSPQQFSNKFNPMTYYETMAPEIWSDLQGDIDIFVAGAGSGGTFTGCASYFKERKNSIHNVIVEPVGSILGGGEAGPHLTEGIGMEFIPEYMNQSFMDEVQTISDKEAFSMVEELARKEGLLVGSSSGSAMVAALNKAREARSGTTIVTILPDGSDRYLSKQIYNVSKQL

SEQ ID NO: 214 - DNA, 924 bp, Oceanobacillus iheyensis HTE831
  CDS (1)..(924): transl_table=11
atgcgtgtagtcaatgatgtaactgaattaattggtcaaacaccaatggttaagttaaatcgtctccaaccagaaaatgcagctgacatatatgtaaagttagagatgtttaatccgagcggtagtgtaaaagaccgagctgcatcccatatgatacgtgtagcagaagaacaagggttaataaaacaaggagccactattatagaacctacaagtggaaatacaggcatcggtttggcaatggcggcatctgctaaaggatataaagcaattatgattatgccggataatagtacgatggaacgtcgaaatatattaaaggcgtatggagcagaagtcgtacttacgccaagtgaggaaaaaatgcctggatccatacgtaaagcgctagaacttcaaaaatccattcctaacagttttatacctcaacaatttgaaaatgtagctaacccagatgttcatcgtattagcactgctttagaaatcttggaacagatggataatcaattagatgcgtttgtctgtactgcaggaactggtggtacggtaacaggtacaggagaaacattaaaggaaaagttaccacatgtgcatgtggcggttgtggaaccagaaggatcacccgtcttatcaggaggaaagccgggaccgcataaactcgttggcacaagtccgggattcgtacctgatattttaaatacggatgtatacgatgaaatcattcaaattaaagatgaacaagctgtcactttattaaaagaccttgctcaaaaagaagggatttttcttggtccatctggagcagctgctgtatatgcggcaatggaagtagcgaagaagcttggcccaaacaaaaagcttgtatgtatagcaccagatacaggagaacgttatctatccatggatatgtttgatgaaaagtaa

SEQ ID NO: 215 - protein, 307 aa, Oceanobacillus iheyensis HTE831
MRVVNDVTELIGQTPMVKLNRLQPENAADIYVKLEMFNPSGSVKDRAASHMIRVAEEQGLIKQGATIIEPTSGNTGIGLAMAASAKGYKAIMIMPDNSTMERRNILKAYGAEVVLTPSEEKMPGSIRKALELQKSIPNSFIPQQFENVANPDVHRISTALEILEQMDNQLDAFVCTAGTGGTVTGTGETLKEKLPHVHVAVVEPEGSPVLSGGKPGPHKLVGTSPGFVPDILNTDVYDEIIQIKDEQAVTLLKDLAQKEGIFLGPSGAAAVYAAMEVAKKLGPNKKLVCIAPDTGERYLSMDMFDEK

SEQ ID NO: 216 - DNA, 912 bp, Shigella flexneri 2a str. 301
  CDS (1)..(912): transl_table=11
gtgagtacattagaacaaacaataggcaatacgcctctggtgaagttgcagcgaatggggccggataacggcagtgaagtgtggttaaaactggaaggcaataacccggcaggttcggtgaaagatcgtgcggcactttcgatgatcgtcgaggcggaaaagcgcggggaaattaaaccgggtgatgtcttaatcgaagccaccagtggtaacaccggcattgcgctggcaatgattgccgcgctgaaaggctatcgcatgaaattgctgatgcccgacaacatgagccaggaacgccgtgcggcgatgcgtgcttatggtgcggaactgattcttgtcaccaaagagcagggcatggaaggtgcgcgcgatctggcgctggagatggcgaatcgtggcgaaggaaagctgctcgatcagttcaataatcccgataacccttatgcgcattacaccaccaccgggccggaaatctggcagcaaaccggcgggcgcatcactcattttgtctccagcatggggacgaccggcactatcaccggcgtttcatgctttatgcgcgaacaatccaaaccggtgaccattgttggcctgcaaccggaagaaggcagcagtattccgggcattcgccgctggcctgcggaatatctgccggggattttcaacgctgcgctggtggatgaggtgctggatattcatcagcgcgatgcggaaaacaccatgcgcgaactggcggtgcgggaaggaatattctgtggcgtcagctcaggcggcgcggttgctggagcactgcgggtggcaaaagctaaccctggtgcggtggtggtagcgatcatctgcgatcgtggcgatcgctacctctccaccggagtgtttggggaagagcattttagtcagggggcagggatttaa

SEQ ID NO: 217 - protein, 303 aa, Shigella flexneri 2a str. 301
MSTLEQTIGNTPLVKLQRMGPDNGSEVWLKLEGNNPAGSVKDRAALSMIVEAEKRGEIKPGDVLIEATSGNTGIALAMIAALKGYRMKLLMPDNMSQERRAAMRAYGAELILVTKEQGMEGARDLALEMANRGEGKLLDQFNNPDNPYAHYTTTGPEIWQQTGGRITHFVSSMGTTGTITGVSCFMREQSKPVTIVGLQPEEGSSIPGIRRWPAEYLPGIFNAALVDEVLDIHQRDAENTMRELAVREGIFCGVSSGGAVAGALRVAKANPGAVVVAIICDRGDRYLSTGVFGEEHFSQGAGI

SEQ ID NO: 218 - DNA, 930 bp, Leptospira interrogans serovar Lai str. 56601
  CDS (1)..(930): transl_table=11
atgaaagctaagagcattttagaaacgatcggaaatacacctcatgtaaaaattaaccgtttgtttaatacgaaaagcgaggtttatgcaaaattagaaagatccaatccaggcgggtccattaaggatcgcattgcactttccatgatcgaagacgcggaaaaaacaggtaaacttactaaagacagcatcattgtagaacctacttctggaaatactggaattggtttagcactcgttgcagcggttaaaggttataagttacttttagttatgcctgaatctatgagtatcgagagaagaagaattatggcggcgtacggagcggagtttgaactgactccaagagaaaaaggaatgccgggtgcgatcgaaaaggcaaaacaaattgtcgcagaaaatccaaaagcgtggatgcctcaacaatttgaaaacgaagcaaatattaagattcacgtagaaacaaccgctcaagaaattgcaaaagattttccagatgggctggactacgtaattacaggtgtcggcactgggggacatatcacgggtgtggcgcaggtcctaaaacaaaaatttcctaaattgaaagtgtttgccgtggaaccagaagcatctccagtaatctccggaggaaaaccgggaccacatccgattcaaggaattggtgcgggatttattcctaaaaatttacatacaaatcttttagacggaactatacaaattagtaaagacgaagcgtttgagtatgcacaaagagcggcaaaagaagaaggactttttataggagtttcatccggagcggcacttgcagcggttgcaaaaaaattgcctgaaattccggaaggttcaagaatattaactttttcttatgacactggagaaaggtatctttctatcgaagggcttttccctgttccatctaacgcataa

SEQ ID NO: 219 - protein, 309 aa, Leptospira interrogans serovar Lai str. 56601
MKAKSILETIGNTPHVKINRLFNTKSEVYAKLERSNPGGSIKDRIALSMIEDAEKTGKLTKDSIIVEPTSGNTGIGLALVAAVKGYKLLLVMPESMSIERRRIMAAYGAEFELTPREKGMPGAIEKAKQIVAENPKAWMPQQFENEANIKIHVETTAQEIAKDFPDGLDYVITGVGTGGHITGVAQVLKQKFPKLKVFAVEPEASPVISGGKPGPHPIQGIGAGFIPKNLHTNLLDGTIQISKDEAFEYAQRAAKEEGLFIGVSSGAALAAVAKKLPEIPEGSRILTFSYDTGERYLSIEGLFPVPSNA

SEQ ID NO: 220 - DNA, 969 bp, Shewanella oneidensis MR-1
  CDS (1)..(969): transl_table=11
atgagcaaaattttcgaagacaattcatatactattggcaacaccccgttagtgcgtttaaaccgagtaagccaaggtaaagtgctggcgaaagtcgaatcacgcaatcccagtttcagtgtcaaatgccgtatcggtgccaatatgatttgggatgccgagaaaaaaggactgctcaccaaagatcatgagctgattgagccaacatccggtaacacgggtatcgctttagcctatgtagcagcagctcgtggttacaagctgaccctgaccatgccaaatactatgagcttagagcgtcgtaagttgcttaaagctttaggtgcaaatctggtgctgaccgaaggcgccaaaggcatgaaaggcgcgattgataaagcggaagagatccgtcaatcggcgcctgaaaaatatattttgttgcagcagtttaataaccctgccaaccccgagatccacgaaaaaaccacaggtccagaaatttggaatgacactgatggcgctgtcgatgtgtttgttgctggtgtgggtactggcggtactatcacgggtgtcagccgttacttgaaaaaagtggcaggcaaagcgattacctcggtggcggtagaacctgccgactcaccagttatcactcaaaccttagcgggattacctgtacaacctggcccacataaaattcaagggattggcgcaggttttatcccaggtaaccttgatatcgagcttatcgatcgcgttgagacagtcaccaacgatgaagcaattgaaatggcgcgccgcttgatgcaggaggaaggtattttagtgggtatttcttcaggagctgccgtggttgccgctaaccgtatcgctgctctgcctgagtttgcggataaaaccattgtggtagtactgccttcagctgcagagcgttacttatcttcagtattgttccaaggccaatttggcgacgaagaaaatatccagtaa

SEQ ID NO: 221 - protein, 322 aa, Shewanella oneidensis MR-1
MSKIFEDNSYTIGNTPLVRLNRVSQGKVLAKVESRNPSFSVKCRIGANMIWDAEKKGLLTKDHELIEPTSGNTGIALAYVAAARGYKLTLTMPNTMSLERRKLLKALGANLVLTEGAKGMKGAIDKAEEIRQSAPEKYILLQQFNNPANPEIHEKTTGPEIWNDTDGAVDVFVAGVGTGGTITGVSRYLKKVAGKAITSVAVEPADSPVITQTLAGLPVQPGPHKIQGIGAGFIPGNLDIELIDRVETVTNDEAIEMARRLMQEEGILVGISSGAAVVAANRIAALPEFADKTIVVVLPSAAERYLSSVLFQGQFGDEENIQ

SEQ ID NO: 222 - DNA, 867 bp, Shewanella oneidensis MR-1
  CDS (1)..(867): transl_table=11
atgactattgaagcctgtatcgggcaaacgccgctagttcgcctgcagcggcttgattgcggtagctcaaccgtgttgttaaagctggaggggaataatcctgctggctcggtaaaggatcgcgccgcactgaatatgattaatcaggcggagcttcgccaagaaatcgccccaggtgataccttgattgaagccacaagtggtaatacaggaattgccttagcgatggctgcggccattaaaggttacaagatgatcctgattatgccgtccaattcgacccaagagcgtaaagatgccatgcaggcttatggtgccgagctgctgctggtggacaacatggaagccgcgcgggatttggccttagcgcttcaggctgaagggaagggcaaggtactggatcagtttaataatcaagataatgctaacgcgcattttctcactactggccccgaaatttggcagcagagccaaggtaagatcacccattttgtttctagcatggggaccactggtactattatgggcgtgtcgaaatacctaaagagtcgcaatcccgatattaccattgtcggtcttcaacccgccgatggcagttcgattccgggcattcgccgttggccgcaggaatatttaccaggcatctttgatgccgcccgtgtcgatttaatgatggatatcgaagagcaagacgccaaagccatggctcgagccttagcgcgagaagagggcatttgtgctggtgtgagttctggcggcgcggtatatgcagcacttgagttagcaaggcagtatccaggctctgtagtggtcgcgattgtgtgtgataggggcgatcgttatctgtcatctgggttattttcttaa

SEQ ID NO: 223 - protein, 288 aa, Shewanella oneidensis MR-1
MTIEACIGQTPLVRLQRLDCGSSTVLLKLEGNNPAGSVKDRAALNMINQAELRQEIAPGDTLIEATSGNTGIALAMAAAIKGYKMILIMPSNSTQERKDAMQAYGAELLLVDNMEAARDLALALQAEGKGKVLDQFNNQDNANAHFLTTGPEIWQQSQGKITHFVSSMGTTGTIMGVSKYLKSRNPDITIVGLQPADGSSIPGIRRWPQEYLPGIFDAARVDLMMDIEEQDAKAMARALAREEGICAGVSSGGAVYAALELARQYPGSVVVAIVCDRGDRYLSSGLFS

SEQ ID NO: 224 - DNA, 927 bp, Streptococcus mutans UA159
  CDS (1)..(927): transl_table=11
atggcaaaaatttataacaacattactgaattaattggcaatacacctattgtaaaactcaacaatgttgttcctgaagatgcagctgatgtttatgttaaacttgaagctttcaatcctggttcttccgttaaagatcggattgctttaagcatgattgaagatgctgaaaaacgtggtctcatcaaacctggagataccattgtcgaaccgacaagtggtaatacaggtattggactttcatgggtcggcgctgccaaaggttacaatgtcattattacaatgcctgaaacaatgagcgttgaacgccgcaaaattatacaagcttacggtgccaaactcgtattgacaccaggaagtgctggtactaagggtgccattgacaaagctcacgagattgccaaagaagttggtggttgggtgcctctgcaatttgacaatccagctaatccaaaaattcacgaattgacaacaggtcctgagattctggaagcatttggttcacatggacttgatgctgtcgttgctggtattggtactggtggtacgattactgggatttcacgtgcccttaaaaaagacaatcctgacattaaaatctatggattggaagctgatgaatctgctgttttgtcaggtgacaaaccggggccccataaaatccaaggtatctcaacaggctttatcccagctgcattagatactcattcttatgatgaagttatccgtgttaaatctgatgatgctttggctactggtcgctacttcggcggtaaggaaggattcctacttggcatctccgcttctgctgctgtctgggccgcacttgaagtcgctaaaaaactcggtaagggtaaaaaagtcttggctattgcacctgataatggtgagcgttatctttcaaccgcactttatgaatttaactaa

SEQ ID NO: 225 - protein, 308 aa, Streptococcus mutans UA159
MAKIYNNITELIGNTPIVKLNNVVPEDAADVYVKLEAFNPGSSVKDRIALSMIEDAEKRGLIKPGDTIVEPTSGNTGIGLSWVGAAKGYNVIITMPETMSVERRKIIQAYGAKLVLTPGSAGTKGAIDKAHEIAKEVGGWVPLQFDNPANPKIHELTTGPEILEAFGSHGLDAVVAGIGTGGTITGISRALKKDNPDIKIYGLEADESAVLSGDKPGPHKIQGISTGFIPAALDTHSYDEVIRVKSDDALATGRYFGGKEGFLLGISASAAVWAALEVAKKLGKGKKVLAIAPDNGERYLSTALYEFN

SEQ ID NO: 226 - DNA, 927 bp, Streptococcus agalactiae NEM316
  CDS (1)..(927): transl_table=11
atgtcaaaaatttataattctattacagacttaatcggaaatacacccattattcaattacatcatattgttccagaaggagctgcagaggtgtacgttaagttagaatcctttaacccaggttcatctgtcaaagatcgtatcgctctagctatgattgaagatgcagagcaaaaagggattcttaaagccggagatacaatcgtagaacctacatctggtaatacaggtatcggtttggcttgggtaggaaaagctaaagggtataatgttattattgttatgccagaaaccatgtcaattgaacgtcgtaaaatcattcaagcctatggtgctcaattagtactaacacctggtagtgaagggatgaagggagctattgctaaggcaaaagaaatttctgcagagcaaaatgcttggctacccctgcaatttaataatcaagccaatccagaaatccacgaaaaaacgactggtagggaaattatcgagacttttggtgaaaaaggtttagatgcttttatcgcaggtgtgggaactggtgggacaattactggtgtctctcgtgcattaaaaaaagtcaatcctgatgtcgctatttatgctgtagaagctgatgaatctgcaatcctttctggtgagcaacctgggcctcataaaatacaagggatttctgcaggtttcattccagaaacattggctacagattcttatgatcatatcattcgcgttacatctgacgatgctattgaaacaggacgtatcatcggcgggctagaaggtttcctcgcaggaatttctgcttcagctgctatttatgctgctattgaagtggccaaacaactaggaaaagggaaaaaggttttagctcttctccctgataatggcgaacgttacttatcaacaagcctgtatgattttgaataa

SEQ ID NO: 227 - protein, 308 aa, Streptococcus agalactiae NEM316
MSKIYNSITDLIGNTPIIQLHHIVPEGAAEVYVKLESFNPGSSVKDRIALAMIEDAEQKGILKAGDTIVEPTSGNTGIGLAWVGKAKGYNVIIVMPETMSIERRKIIQAYGAQLVLTPGSEGMKGAIAKAKEISAEQNAWLPLQFNNQANPEIHEKTTGREIIETFGEKGLDAFIAGVGTGGTITGVSRALKKVNPDVAIYAVEADESAILSGEQPGPHKIQGISAGFIPETLATDSYDHIIRVTSDDAIETGRIIGGLEGFLAGISASAAIYAAIEVAKQLGKGKKVLALLPDNGERYLSTSLYDFE

SEQ ID NO: 228 - DNA, 936 bp, Corynebacterium efficiens YS-314
  CDS (1)..(936): transl_table=11
atgggcaacgtgtacaacaacatcactgagaccatcggccgcacccccctggtcaaactcaaccgcctcaccgagggcctggacgccaccgtcctggtgaagctcgagtccttcaaccccgcgaactccgtcaaggaccgcatcggtctagccatcatcgacgccgctgaggcctccggtgaactgaagccgggtggcaccatcgtcgaggcaacctccggcaacaccggtatcgccctggccatggtcggcgcagcccgcggttacaaggttgtcctgaccatgccggagaccatgtccaccgagcgtcgcgtcctgctgcgcgcctacggcgcggaaatcgtcctcaccccgggtgcagccggtatgcagggcgccaaggacaaggccgatgagatcgtcgccgagcgcgagaacgccatcctggcccgccagttcgagaaccccgccaacccggagatccaccgcgagaccaccgccaaggagctcatggaggacaccgacggtaacttcgacatcttcgtcgcaggtttcggcaccggcggcaccatcaccggtgtcggtggcgtgctcaaggagcacaacccggaggcccaggtctacgcagttgagcctgaggcatccccgctgctgacctctggcaaggccggcccgcacaagatccagggcatcggcgccaacttcatcccggaaaacctcgaccgtaagatcctcgatgatgtcatcaccatctccaacgaggatgccgtcacctggtcccgcaagctggccaccgaggagggcatcctgggtggtatctccaccggtgccaacatcaaggccgctctggacctggctgccaagccggagaacgccggcaagaccatcgtcaccaccgtctgtgacttcggtgagcgctacgtctccaccgtcctctacgaggacatccgcgactaa

SEQ ID NO: 229 - protein, 311 aa, Corynebacterium efficiens YS-314
MGNVYNNITETIGRTPLVKLNRLTEGLDATVLVKLESFNPANSVKDRIGLAIIDAAEASGELKPGGTIVEATSGNTGIALAMVGAARGYKVVLTMPETMSTERRVLLRAYGAEIVLTPGAAGMQGAKDKADEIVAERENAILARQFENPANPEIHRETTAKELMEDTDGNFDIFVAGFGTGGTITGVGGVLKEHNPEAQVYAVEPEASPLLTSGKAGPHKIQGIGANFIPENLDRKILDDVITISNEDAVTWSRKLATEEGILGGISTGANIKAALDLAAKPENAGKTIVTTVCDFGERYVSTVLYEDIRD

SEQ ID NO: 230 - DNA, 900 bp, Pseudomonas putida KT2440
  CDS (1)..(900): transl_table=11
atgaccttgcagtacccaaccatcgccgattgcgtcggcaatacgccactggttcgcctgcagcgcatcgctggcgaaaccagcaataccctcctgctcaagctcgaaggtaacaatcctgccggctcggtgaaagaccgcccggccctgtcgatgatcgctcgcgccgaattgcggggccagatcaagccaggcgataccctgatcgaagccacctccggcaacacgggcatcgccctggcgatggcggcggcgatcaagggctacaagatgatcctgatcatgcccgacaactccaccgccgagcgcaaggccgccatgacggcctatggcgccgagctgatcctggtgaccaaggaggaggggatggaaggcgcccgtgacctggccgagaagctgcaggccgaaggccgtggcctggtgctcgaccagttcgccaacggcgacaacccgatcgcccactacaacagcaccggcccggagatctggcagcagacccagggcaccattacccatttcgtcagctccatggggaccaccggtaccatcatgggctgctcgcagtacctcaaggaacagaaccccgcggtgcagatcatcggcctgcaaccgatggaaggctcggctattccgggcattcgccgctggcccgaggaatatttgccgaaaatcttcgacgccacccgcgtcgaccgcgtggtcgacatgtcgcagcaggaagccgaagacaccacccgtcgccttgcgcgtgaagagggcattttctgcggcgtgtcttctggtggtgcggtcgcggccatgttgcgtctgtcccgcgaagtggaaaatgcggtcatggttgcgatcatttgcgaccgcggcgaccgttatctgtccactggcctgtttgatccacgctaa

SEQ ID NO: 231 - protein, 299 aa, Pseudomonas putida KT2440
MTLQYPTIADCVGNTPLVRLQRIAGETSNTLLLKLEGNNPAGSVKDRPALSMIARAELRGQIKPGDTLIEATSGNTGIALAMAAAIKGYKMILIMPDNSTAERKAAMTAYGAELILVTKEEGMEGARDLAEKLQAEGRGLVLDQFANGDNPIAHYNSTGPEIWQQTQGTITHFVSSMGTTGTIMGCSQYLKEQNPAVQIIGLQPMEGSAIPGIRRWPEEYLPKIFDATRVDRVVDMSQQEAEDTTRRLAREEGIFCGVSSGGAVAAMLRLSREVENAVMVAIICDRGDRYLSTGLFDPR

SEQ ID NO: 232 - DNA, 975 bp, Pseudomonas putida KT2440
  CDS (1)..(975): transl_table=11
atgagccgtatcttcgcagacaacgcccactccatcggtaacacgccgctggtgcagatcaaccgcatcgctccgcgcggtgtgaccatcctggccaagatcgaagggcgcaaccccgggtactcggtcaaatgccgcattggcgcgaacatggtctgggacgccgagagcagcggcaagctcaaaccgggcatgaccattgtcgagcccacctcgggcaacaccggcatcggcctggccttcgtcgccgccgcccgcggctacaagctgatgctgaccatgcccgcttcgatgagcctggagcgccgcaaggtgctgaaggcactgggcgccgaactggtattgaccgatccggccaagggcatgaagggcgcgatcgagaaggccaacgaaatcgtcgcctccgacccggagcagtacttcctgccgggccagttcgaaaacccggccaacccggccattcacgagaaaaccaccggtcctgagatctggaacgacacggacggcgccatcgacgtgctggtggcaggcgtgggcactggcgggaccatcaccggcgtgtcgcgctacatcaaacatacccagggcaaggccatcctgtcggtggcagtggaacccgtggcatcgccactgatcagccagaccctggccggcgaagaactcaagccaagcccgcacaaaatccagggcatcggcgccggtttcgtgccgaaaaacctcgacctgtcgattgtcgaccaagtggagacggtgaccgacgaagagtccaaggccatggcgattcgcctgatgcaggaagagggcatcctttgtggtatttcctgcggtgcggcaatggcggcagcggtgcgtctggccgaaaaaccggaaatgcagggtaagaccatcgtcgtaatcctgcccgattcgggcgagcgatacttgtcgagcatgctgttcagcgacatgttcagcgagcaggaaacccagcagtaa

SEQ ID NO: 233 - protein, 324 aa, Pseudomonas putida KT2440
MSRIFADNAHSIGNTPLVQINRIAPRGVTILAKIEGRNPGYSVKCRIGANMVWDAESSGKLKPGMTIVEPTSGNTGIGLAFVAAARGYKLMLTMPASMSLERRKVLKALGAELVLTDPAKGMKGAIEKANEIVASDPEQYFLPGQFENPANPAIHEKTTGPEIWNDTDGAIDVLVAGVGTGGTITGVSRYIKHTQGKAILSVAVEPVASPLISQTLAGEELKPSPHKIQGIGAGFVPKNLDLSIVDQVETVTDEESKAMAIRLMQEEGILCGISCGAAMAAAVRLAEKPEMQGKTIVVILPDSGERYLSSMLFSDMFSEQETQQ

SEQ ID NO: 234 - DNA, 984 bp, Escherichia coli CFT073
  CDS (1)..(984): transl_table=11
  misc_feature (887)..(887): n is a, g, c or t
atgagtaagatttttgaagataactcgctgactatcggtcacacgccgctggttcgcctgaatcgcatcggtaacggacgcattctggcgaaggtggaatctcgtaaccccagcttcagcgttaagtgccgtatcggtgccaacatgatttgggatgccgaaaagcgcggcgtgctgaaaccaggcgttgaactggttgaaccaaccagcggtaataccgggattgcactggcctatgtagctgccgctcgcggttacaaacttaccctgaccatgccagaaaccatgagtattgaacgccgcaagctgctgaaagcgttaggtgcaaacctggtgctgaccgaaggtgctaaaggcatgaaaggcgcaatccaaaaagcagaagaaattgtcgccagcaatccagagaaatacctgctgctgcaacaattcagcaatccggcaaaccctgaaattcatgaaaaaaccaccggtccggagatctgggaagataccgacggtcaggttgatgtatttattgctggcgttgggactggcggtacgctgactggcgtcagccgctacattaaaggcaccaaaggcaagaccgatcttatctctgtcgccgttgagccaaccgattctccagttatcgcccaggcgctggcaggtgaagagattaaacctggtccgcataaaattcagggtattggcgctggttttatcccggctaaccttgatctcaagctggtcgacaaagtcattggcatcaccaatgaagaagccatttctaccgcacgtcgtctgatggaagaagaaggcattcttgctggtatctcttctggagcagctgttgctgcggcgttgaaactacaagaagatgaaagctttaccaataagaatattgnggttattctgccgtcatcgggtgagcgttatttaagcactgcattgtttgccgatcttttcactgagaaagaactgcaacagaatgccagcttgtaa

SEQ ID NO: 235 - protein, 327 aa, Escherichia coli CFT073
  misc_feature (296)..(296): The Xaa at location 296 stands for Ala, Glu, Gly, or Val.
MSKIFEDNSLTIGHTPLVRLNRIGNGRILAKVESRNPSFSVKCRIGANMIWDAEKRGVLKPGVELVEPTSGNTGIALAYVAAARGYKLTLTMPETMSIERRKLLKALGANLVLTEGAKGMKGAIQKAEEIVASNPEKYLLLQQFSNPANPEIHEKTTGPEIWEDTDGQVDVFIAGVGTGGTLTGVSRYIKGTKGKTDLISVAVEPTDSPVIAQALAGEEIKPGPHKIQGIGAGFIPANLDLKLVDKVIGITNEEAISTARRLMEEEGILAGISSGAAVAAALKLQEDESFTNKNIXVILPSSGERYLSTALFADLFTEKELQQNASL

SEQ ID NO: 236 - DNA, 918 bp, Clostridium tetani E88
  CDS (1)..(918): transl_table=11
atgaaaatatacaataatctaatagagcttataggaaagacaccacttgtaaacctaaataaatttgaaaagaaaaatggattagattcaaatataattgcaaaggtggaatattttaatccatcaggtagtgtaaaggatagagcagcattatctatgatagaagaagctgagaggactaatctaataaataaagatactgtaataattgagccaactagtggaaatacaggtataggcttagctttaatttgtgcaattaaaggatatagattgattttgactatgccagagactatgagtatagaaagaagaaatatactaaaggcttatggggcagaagtagttttaactcctggaaacaagggaatgaatggttctatacaaaaagcagaagaattagcaaaggaaatgggaaatgtttttattccacaacaatttaataacccttccaactcagctattcataaaataacaacagcaaaagaaataataaatgatttggatggaaaggtagatatatttattgcgggagttggaactggtggtacagtaacaggtgttggagaaggattaaaagaatataataaaaatataaaaattgtagcagtggagcctgaaaattcacctattttgtctggtgggaaaccggggccacacaaaatacagggtataggagcaggctttattccagaaatattagatatgaatataatagatgagatatttaaagctcctaatgaagaatccatagaaattatgaagaaaatagttaaattagaaggattgtttgtaggaatatcttcaggagctgcattatatgcggcaaaagaaataggtaaaagagaagagaataaaggtaaaaatatagtggtgttattaccagacacaggtatgagatatttatcaagttattag

SEQ ID NO: 237 - protein, 305 aa, Clostridium tetani E88
MKIYNNLIELIGKTPLVNLNKFEKKNGLDSNIIAKVEYFNPSGSVKDRAALSMIEEAERTNLINKDTVIIEPTSGNTGIGLALICAIKGYRLILTMPETMSIERRNILKAYGAEVVLTPGNKGMNGSIQKAEELAKEMGNVFIPQQFNNPSNSAIHKITTAKEIINDLDGKVDIFIAGVGTGGTVTGVGEGLKEYNKNIKIVAVEPENSPILSGGKPGPHKIQGIGAGFIPEILDMNIIDEIFKAPNEESIEIMKKIVKLEGLFVGISSGAALYAAKEIGKREENKGKNIVVLLPDTGMRYLSSY

SEQ ID NO: 238 - DNA, 912 bp, Lactobacillus plantarum WCFS1
  CDS (1)..(912): transl_table=11
atgctcattcagcacgttcaagaacttatcggccacacccccctgatggcgttacccatcgaggttccaaatcacagtcacatctatgccaagcttgaaatgttcaaccccggcggcagtattaaggaccggctgggagcctatctgattgaagacggcttgcaacggggccgggttaacgccaagacaacgattattgaaccaactgctggtaacaccggaattggtttagccttagcaactcaagcgcaccacctacgtaccatcttagtcgtcccagaaaagttcagtatggaaaaacaagttttaatgcaagcattgggtgctgaaattgttcatacacctagcgaggaaggaatcaaaggtgccattcgcaaagctgaggcactagccgcaacgatttccaacagttacgtccccatgcaattcaagaatccggctaatcccgcggcttattaccacacactggcaccagaaattctggcggacatgcctgcacctataaccgccttcgtcgctggagccggtagcggtgggacatttgccggagtagcggcttatcttcaagcccaagattcagcaaccaaagccgtagtcgttgagccagaaggttccattttaaatggtggaccagctcacgcacatcgtaccgagggaatcggcgtcgaattcatcccaccatttttcgatcaggttcgcatcgatcagacactgaccatcgcggacaatgatgcctttgcccaagttcgacacctagcccgtgaccacggtttactgattggcagttctagcggcgctgcgctagccgctagtttacaacttgccaccaacctgcctgccaatagtcatatcgtgaccatctttccagacagtagtgagcgttatctgagccaaaaaatctatacgaaatga

SEQ ID NO: 239 - protein, 303 aa, Lactobacillus plantarum WCFS1
MLIQHVQELIGHTPLMALPIEVPNHSHIYAKLEMFNPGGSIKDRLGAYLIEDGLQRGRVNAKTTIIEPTAGNTGIGLALATQAHHLRTILVVPEKFSMEKQVLMQALGAEIVHTPSEEGIKGAIRKAEALAATISNSYVPMQFKNPANPAAYYHTLAPEILADMPAPITAFVAGAGSGGTFAGVAAYLQAQDSATKAVVVEPEGSILNGGPAHAHRTEGIGVEFIPPFFDQVRIDQTLTIADNDAFAQVRHLARDHGLLIGSSSGAALAASLQLATNLPANSHIVTIFPDSSERYLSQKIYTK

SEQ ID NO: 240 - DNA, 1119 bp, Pseudomonas syringae pv. tomato str. DC3000
  CDS (1)..(1119): transl_table=11
atgtcgtttgcaaagaaaaacgtaattgatggaatttctaaaactccgcttattgatcttgcaaggatcaataaggaaataagtactaacgtcattgttaagttagagaaatacaatcctggtggaagcatcaaggatagagccgcagcttatattattcgggaagctgagaaaaaggggcaactcaagccaggcggtacaataattgagtcgtcctcggggaacttcgcaatcagccttgctatgatcggtgctgtaagtggatataaagtcattgcgctcgttgaccctaaagccacggaaaccaataaagctctcatgaaagcatatggggctgaagttattaccgtgactgaaaaggatgataccggctcttatcataaaactcgtattaagctagctaatgacttagctaaaaaaattccaggaagctatcgaccagatcaatgctttaacgtccttagctccctagcacattataactcgactgcaaaagagatccatgaacaaacctcaggaaatattgcaggtgtggtttgcgctgtaagtacaggcggccaaattggaggagtctcagaatacttcaaagatcaccttcctgatgtcaaagttacctgtgtagacgcttacggctcagcagtatttggagggccctctcatgcttacaaaattccaggcgtcggacttggatggacacctaggaatataaatgatactacaaagatcgattacttttatcgggcaaaagacgagtcagcttatatagctgctcgacttctttgccggcatgagggaatattggtaggtgtctcctccggagcagttcttttggctgcgcttaatttgtctttacatttaggaaatcaaaagcctattgtggccattctaggggatagcggggaaagatatttagatactctttacaatgatgattggcttaatgaacatggagtagatactggacttgaacttaacaagttacagctactcattgacaatatggcgaccccaattgagtcccctcacataaagagtaactatagagacgacctgattggtattctagaagttccagaaactactattacccatttcaatatgttggaaggtcgaaattga

SEQ ID NO: 241 - protein, 372 aa, Pseudomonas syringae pv. tomato str. DC3000
MSFAKKNVIDGISKTPLIDLARINKEISTNVIVKLEKYNPGGSIKDRAAAYIIREAEKKGQLKPGGTIIESSSGNFAISLAMIGAVSGYKVIALVDPKATETNKALMKAYGAEVITVTEKDDTGSYHKTRIKLANDLAKKIPGSYRPDQCFNVLSSLAHYNSTAKEIHEQTSGNIAGVVCAVSTGGQIGGVSEYFKDHLPDVKVTCVDAYGSAVFGGPSHAYKIPGVGLGWTPRNINDTTKIDYFYRAKDESAYIAARLLCRHEGILVGVSSGAVLLAALNLSLHLGNQKPIVAILGDSGERYLDTLYNDDWLNEHGVDTGLELNKLQLLIDNMATPIESPHIKSNYRDDLIGILEVPETTITHFNMLEGRN

SEQ ID NO: 242 - DNA, 903 bp, Pseudomonas syringae pv. tomato str. DC3000
  CDS (1)..(903): transl_table=11
atgaccctgcagtatcaaaccatcgccgattgcgtcggcaacaccccgcttgtgcgtctgcaacgcatgatgggcactaccagcaataccatcctgttgaaactggaaggtaacaaccctgctggttcggtaaaagaccgcccggcgttgtcgatgatcacccgtgccgagctgcgcggccagatcgtccccggcgacacgctgatcgaagccacctccggcaacaccggcattgcgctggccatggcggcggcgatcaagggttaccgcatgattctgatcatgccggacaactccagtgccgaacgcaaggcggcaatgaccgcctatggcgccgagctgattctggtcagcaaggacgaaggcatggaaggcgcgcgtgatctggctgatcgcatgcaggcagagggtcgcggcaaagtgctcgatcagttcgccaacggcgacaatcccgaggcgcattacacgtccaccggtccggaaatctggcaacaaacggcgggcaccgttacccacttcgtcagttcgatgggcaccaccggcaccatcatgggcacttcgcgctacctcaaggagcagaaccccgacgtgcagatcgtcggtctgcaaccgatggaaggcgcgtcaatccctggtattcgccgctggccttatgagtacctgccgaaaatctatcagtcggatcgcgtcgatcgcatcatcgacatggggcagaccgaggccgaagaaaccatgcgcaggctggctcgtgaagagggcattttctgtggcgtttcgtccggcggttcggtggccggtgcgctgcgtattgcccgcgaagtcgaaaacgccaccattgtggcaatcatctgtgaccgaggcgaccgctacctgtcgaccggtatctacgacatgcccaactga

SEQ ID NO: 243 - protein, 300 aa, Pseudomonas syringae pv. tomato str. DC3000
MTLQYQTIADCVGNTPLVRLQRMMGTTSNTILLKLEGNNPAGSVKDRPALSMITRAELRGQIVPGDTLIEATSGNTGIALAMAAAIKGYRMILIMPDNSSAERKAAMTAYGAELILVSKDEGMEGARDLADRMQAEGRGKVLDQFANGDNPEAHYTSTGPEIWQQTAGTVTHFVSSMGTTGTIMGTSRYLKEQNPDVQIVGLQPMEGASIPGIRRWPYEYLPKIYQSDRVDRIIDMGQTEAEETMRRLAREEGIFCGVSSGGSVAGALRIAREVENATIVAIICDRGDRYLSTGIYDMPN

SEQ ID NO: 244 - DNA, 984 bp, Pseudomonas syringae pv. tomato str. DC3000
  CDS (1)..(984): transl_table=11
ttgattttatttttaaatttcaggtatgaaaacatgaattctatcgagctggccataggcaatacgcccatggtggaactgaaaagttttgatctgccaccaggcataaggatttttgcaaagctggagtttttgaatcctggtggaagtatcaaggatcgtgtcgtaaaccatatatttaacgacgctgaagcccgcggactattgtgccgcggttcgacagtaatagaaaacacatcgggcaataccggtgccgctatcgcaatgctggcggccgctagaggttatcgcgttattctcaccatgccggataaagtcagcaaagaaaaacaagatacactcagggctttgggcgctgaagtcattatgtgcccaacgtcagccgctccggattcacctgagcattatgttcaggtagcgaagtctttacacgccgatacgcccaactcgttcatgctgcatcaatatgataaccctctaaatccggaagctcacaagctcacgactggtccagagatttggcgagacttgaaggggggtatctccgtatttgtggctgctggcagcacgggcggtacaatatcaggcatttcacgttatctgaaaagtcaggacaaaactatcagatcggtgctcctggatcccaaaggatctatttattataaatacttttacgagggcgtgattgatccactagtgataggcccttaccaggttgaaggtgtgggagaagatcatttggccaagtgtatggattttgaaatgatcgacgacgttattcagtttgatgatgctgctgcctttggaacatgtaggttgctcgctcaaaaggaagggttgctgtgtgggggaagttcaggggcgaatgtctggggatgccttcaagttgcaaagcgtctttcgtcccctgcaaatatcgtcactgtgttgccagacagcggagttaagtacctgtcaaaaatatataactcgccgtttacgtga

SEQ ID NO: 245 - protein, 327 aa, Pseudomonas syringae pv. tomato str. DC3000
MILFLNFRYENMNSIELAIGNTPMVELKSFDLPPGIRIFAKLEFLNPGGSIKDRVVNHIFNDAEARGLLCRGSTVIENTSGNTGAAIAMLAAARGYRVILTMPDKVSKEKQDTLRALGAEVIMCPTSAAPDSPEHYVQVAKSLHADTPNSFMLHQYDNPLNPEAHKLTTGPEIWRDLKGGISVFVAAGSTGGTISGISRYLKSQDKTIRSVLLDPKGSIYYKYFYEGVIDPLVIGPYQVEGVGEDHLAKCMDFEMIDDVIQFDDAAAFGTCRLLAQKEGLLCGGSSGANVWGCLQVAKRLSSPANIVTVLPDSGVKYLSKIYNSPFT

SEQ ID NO: 246 - DNA, 975 bp, Pseudomonas syringae pv. tomato str. DC3000
  CDS (1)..(975): transl_table=11
atgagccgtatctacgctgataacgcccattccatcgggaacacaccgctggtgcagatcaaccgtatcgcgccgcgcggtgtcaccattctggccaagatcgaagggcgtaatccgggctattccgtcaagtgtcggatcggcgccaacatgatctgggacgctgaagccagcggcaggctcaagcccggcatgaccattgtcgaacccacctctggcaacaccgggatcggtctggcattcgttgccgccgctcgcggttacaaactgatgctgaccatgcccgcttccatgagcatagaacgtcgcaaggtgctcaaggcgctgggggctgaattggtgttgaccgagccagccaaggggatgaaaggcgcgattgccaaggccgaagagttgctggctggcgatcccgagacatttttcatgcctgcccaattcgacaacccggccaacccggccatccacgagaaaacgaccggccccgaaatctgggctgataccgacggcaccatcgacgtgctggtagccggcgtcgggacgggcgggactatcaccggtatttcccgatatatcaagcacacagcgggtaagccgatcctgtcggtcgcggtagaacccgacagttcgccgatcatcacccaagccatggccggtgaagaaatcacgcctgctccgcacaagattcagggcatcggcgcgggcttcattccgaaaaacctcgacctgtcgattgttgaccgggtagaacgcgtcaccgacgatgagtccaaggcgatggccaggcgcttgatgcaggaagagggcatcctgtgcggaatctcctgcggcgcagcaatggcggctgccgttcgtctggctgaaaagccggaaatgcagggcaagactatcgtcgttattctcccagactccggcgagcgttacctgtcgagcatgctgttcagcgatcttttcactgaccaggagctatcgcagtaa

SEQ ID NO: 247 - protein, 324 aa, Pseudomonas syringae pv. tomato str. DC3000
MSRIYADNAHSIGNTPLVQINRIAPRGVTILAKIEGRNPGYSVKCRIGANMIWDAEASGRLKPGMTIVEPTSGNTGIGLAFVAAARGYKLMLTMPASMSIERRKVLKALGAELVLTEPAKGMKGAIAKAEELLAGDPETFFMPAQFDNPANPAIHEKTTGPEIWADTDGTIDVLVAGVGTGGTITGISRYIKHTAGKPILSVAVEPDSSPIITQAMAGEEITPAPHKIQGIGAGFIPKNLDLSIVDRVERVTDDESKAMARRLMQEEGILCGISCGAAMAAAVRLAEKPEMQGKTIVVILPDSGERYLSSMLFSDLFTDQELSQ

SEQ ID NO: 248 - DNA, 969 bp, Vibrio parahaemolyticus RIMD 2210633
  CDS (1)..(969): transl_table=11
atgagcaaaatctacgaagataactctcttaccattggtaatacgcccctagttcgcctaaacaaagtgagcaaaggtaacgttctagcgaaaattgaagcacgcaacccaagcttcagcgttaagtgccgtatcggtgcaaacatgatttgggaagcagaaaaagctggcactttaaagccaggagtagaactagtagaaccaaccagtggtaacacaggtatcgcattagcgttcgtagcagccgctcgcggttacaaattgactctaactatgcctgaatcaatgagccttgagcgccgcaagctacttaaagcactaggcgcaaaccttgagctaactgaagcagcgaaaggcatgaaaggcgcaattgctaaagcagaagagatcgtagcaagcaatcctgaaaaataccttcttctacaacagttcaacaaccctgctaacccgcaaattcacgagaaaaccactggccctgaaatctgggatgcgacagacggtgaaatcgatgtgctagtagcaggcgttggtacaggcggtacaatcacaggtacaagccgttacattaaaggtgagaaaggtaaagcgatcacttctgttgctgtagaacctgcagaatcaccagtaatcgcgcaagcgctagcaggcgaagaaattcaaccagcgccacataaaatccaaggtatcggtgcaggtttcattcctggaaacctagatttggacattatcgaccgagttgagccagtgacttctgaagaagcaattgagatggctcgtcgactaatggaagaggaaggcatccttgcgggtatctcttcaggcgctgctgtcgttgctgcgaaccgaattgcagaactacctgaatttgaaggaaaaaccatcgtgacaattctgccaagctcaggtgaacgttacctaagtacggcactatttgctggtatctttaccgaaaaagagaaccaacaataa

SEQ ID NO: 249 - protein, 322 aa, Vibrio parahaemolyticus RIMD 2210633
MSKIYEDNSLTIGNTPLVRLNKVSKGNVLAKIEARNPSFSVKCRIGANMIWEAEKAGTLKPGVELVEPTSGNTGIALAFVAAARGYKLTLTMPESMSLERRKLLKALGANLELTEAAKGMKGAIAKAEEIVASNPEKYLLLQQFNNPANPQIHEKTTGPEIWDATDGEIDVLVAGVGTGGTITGTSRYIKGEKGKAITSVAVEPAESPVIAQALAGEEIQPAPHKIQGIGAGFIPGNLDLDIIDRVEPVTSEEAIEMARRLMEEEGILAGISSGAAVVAANRIAELPEFEGKTIVTILPSSGERYLSTALFAGIFTEKENQQ

SEQ ID NO: 250 - DNA, 942 bp, Streptococcus pyogenes SSI-1
  CDS (1)..(942): transl_table=11
atgactaaaatttacaaaactataacagaattagtaggtcaaacacctattatcaaacttaaccgtttaattccaaacgaagctgctgacgtttatgtaaaattagaagcttttaacccaggatcttctgttaaagatcgtattgctttatcgatgattgaagctgctgaagctgaaggtctgataagtcctggtgacgttattatcgaaccaacaagtggtaatacaggtattggtcttgcatgggtaggtgctgctaaagggtatcgagtcattattgttatgcccgaaacgatgagcttggaaagacggcaaatcattcaggcttatggtgcagagcttgtcttaacacctggagcagaaggtatgaaaggggctattgcaaaagctgaaactttagcaatagaactaggtgcttggatgcctatgcaatttaataaccctgccaatccaagcatccatgaaaaaacaacagctcaagaaattttggaagcttttaaggagatttctttagatgcattcgtatctggtgttggtactggaggaacactttctggtgtttcacatgtcttgaaaaaagctaaccctgaaactgttatctatgctgttgaagctgaagaatctgctgtcttatctggtcaagagcctggaccacataaaattcaaggtatatcagctggatttatcccaaacacgttagataccaaagcctatgaccaaattatccgtgttaaatcgaaagatgctttagaaactgctcgactaacaggagctaaggaaggcttcctggctgggatttcttctggagctgctctttacgccgctattgaagtcgctaaacagttaggaaaaggcaaacatgtgttaactattttaccagataatggcgaacgctatttatcgactgaactctatgatgtaccagtaattaagacgaaataa

SEQ ID NO: 251 - protein, 313 aa, Streptococcus pyogenes SSI-1
MTKIYKTITELVGQTPIIKLNRLIPNEAADVYVKLEAFNPGSSVKDRIALSMIEAAEAEGLISPGDVIIEPTSGNTGIGLAWVGAAKGYRVIIVMPETMSLERRQIIQAYGAELVLTPGAEGMKGAIAKAETLAIELGAWMPMQFNNPANPSIHEKTTAQEILEAFKEISLDAFVSGVGTGGTLSGVSHVLKKANPETVIYAVEAEESAVLSGQEPGPHKIQGISAGFIPNTLDTKAYDQIIRVKSKDALETARLTGAKEGFLAGISSGAALYAAIEVAKQLGKGKHVLTILPDNGERYLSTELYDVPVIKTK

SEQ ID NO: 252 - DNA, 918 bp, Enterococcus faecalis V583
  CDS (1)..(918): transl_table=11
atgattgttcagtcaattttagacacaatcggagcaacaccattatttgaatttacaagtgaacaatatcctatgccagaaggcactaaaatttatgcgaaactagaatatttgaatccaggtggcagcgtcaaagatcggcttggtgtgcatcttctcaaagaagcaatgaaaacgggaaagataaatcaagccacaacaattattgaaccgacagcggggaatacagggattggacttggattagctgccagtcaactgggcctcaagacaatctttgttgtgccagaaaaatttagtcaggaaaaacaacagctgatgcaagcgttaggtgctaaaattgtcccttcgccaacagagcaagggattgtcggagcgataactagtgcccaagacttagccaaggaaattcctaatagttacgtgccgttacaatttgaaaatccggataaccctgctgcttactacgaaggattaggacctgaaattgttcaagacttaggcggaaagattactagctttgtcgcaggtttaggcagtggtggaacgtttgcaggtgttggcagatatctcaaagaacaaaatagtaagacgcaattatggggcgtggagccagaaggttcaattttaaatggcggacctgcacacggacatgaaatcgaaggcattggcgtggagttcgtgccgccttttcttaaacagattcctgtggacggcttttataccatttcagacgaggatggttttttctgggtcaaacaattagccaagaaaagcgctttgctggtgggaagctccagcggcgcagcatttgcggcggcattaagagaggcgcgccgcttaccagcaggcagcacaattgtaactatttttcctgacggtagtgatcgttatttatcaaaaaatatttattcttag

SEQ ID NO: 253 - protein, 305 aa, Enterococcus faecalis V583
MIVQSILDTIGATPLFEFTSEQYPMPEGTKIYAKLEYLNPGGSVKDRLGVHLLKEAMKTGKINQATTIIEPTAGNTGIGLGLAASQLGLKTIFVVPEKFSQEKQQLMQALGAKIVPSPTEQGIVGAITSAQDLAKEIPNSYVPLQFENPDNPAAYYEGLGPEIVQDLGGKITSFVAGLGSGGTFAGVGRYLKEQNSKTQLWGVEPEGSILNGGPAHGHEIEGIGVEFVPPFLKQIPVDGFYTISDEDGFFWVKQLAKKSALLVGSSSGAAFAAALREARRLPAGSTIVTIFPDGSDRYLSKNIYS

SEQ ID NO: 254 - DNA, 951 bp, Coxiella burnetii RSA 493
  CDS (1)..(951): transl_table=11
atggttctcgacaatatacttcaagttatcggcaaaacgccggttgtgcgcttgcatcgaattggccaatcccttccttgcgaactctatggcaaatgcgaatttctcaatccaggcggttccgttaaagaccgaattggcgctgccatgattgaatcggcggaaaaacagggaaaaattaaaccgggcgatacgctcatcgaaccaacctctggcaatacggggatcggtattgctttagccggagccgtcaaaggctatcgagttattatcacgatgccagaaaaaatgagccacgaaaaacaagtggttttggaagcgctgggcgcaaccatttatcgaacccctacagaagcagcctatgatgatcccgaaagccatatttcactcgctaaacgtctaaaccaggaaattcctaattcttacattctcgatcaatacagcaatgcggaaaatcccgatatccattaccaaaccacaggccaagagattttggacgacatgggggaaaacctttccatggttgtaatgggcgttggtacaggcgggaccatcatcggtgttgcaaaaaaactaaaagaagtgaatccttcgattcagattatcggcgtcgatcctattggatctattctcgggggcggggatgaaattaaaccttaccttgtagaaggcatcggttatgattttattcccgaagtgctcgataacaacctcatcgatgagtacatcaaaattaacgacaaagattcttttttaatggcgcgtcgtttaattcgtgaagaggggctcttagtgggcggctcttccggatcagctgtttgggcggcttgccaagcggctcaacgattgaaagaaggcgaacgatgtctggttattttgccggatgctattcgaaattatttgactaaatttgtagacgacgcctggatgaaggcgcaagggtttttgtaa

SEQ ID NO: 255 - protein, 316 aa, Coxiella burnetii RSA 493
MVLDNILQVIGKTPVVRLHRIGQSLPCELYGKCEFLNPGGSVKDRIGAAMIESAEKQGKIKPGDTLIEPTSGNTGIGIALAGAVKGYRVIITMPEKMSHEKQVVLEALGATIYRTPTEAAYDDPESHISLAKRLNQEIPNSYILDQYSNAENPDIHYQTTGQEILDDMGENLSMVVMGVGTGGTIIGVAKKLKEVNPSIQIIGVDPIGSILGGGDEIKPYLVEGIGYDFIPEVLDNNLIDEYIKINDKDSFLMARRLIREEGLLVGGSSGSAVWAACQAAQRLKEGERCLVILPDAIRNYLTKFVDDAWMKAQGFL

SEQ ID NO: 256 - DNA, 984 bp, Streptomyces avermitilis MA-4680
  CDS (1)..(984): transl_table=11
gtgcccgacaaaacgttcccaggcattctgtcaaccgtaggaaacaccccacttgtggaattggaaaggctgctgccggatttcggctcccgggtattcgggaagatcgagaggttcaatccgggcggcagcatcaaggaccgttccgccctcggcatgctgctcgccggcatccgcagcggcgaggtgcagcccggccgtaccgtgatcatcgagtccagctcgggcaatctggccgtcggactggcccagatctgccgctacttcggactgcgcttcatctgcgtggtcgacggcaagaccaccgagcagaacctcgccatcctcagcgcgttccgggccgaggtcgaggtcgtcaccgaacgcgacgagctgaccggcgagttcctgcccgtgcggctgcgccgggtgcgcgagctggtggccgcgacgccggacgcgtactggcccaaccagtacgcgagcctgctcaaccccaaggcgcacgagaccacgatgcgggagatcgaggagtccctcgacggtgcggtcgacttcctcttctgctcggtcagcaccttcggcacgctgcgcggctgccgtgaccacatcagggcccgcggcctggacaccacgatcgtcgcggtggacgccctgggcagcgcgatcttcggcctcgagtccacccagcggctcataccggggcacggcgcctccgtggtgccgcccctgatggacgcctcggcggccgacgaggtggtgcacatatccgatctggaatgcgtcgtcgcctgccgccggctcatcggtcgtgaagcggtcctcgcgggcggctcgtccggggcgaccgtcgccgcgctgtggaagatccggcaccgcattccggagggctcgaactgcgtcctcatattccccgacggcggcgaccgctatctcgacaccatctattccgacgcctgggtgaaccagaacttcggagacgtcgcacacctgtggaaggactga

SEQ ID NO: 257 - protein, 327 aa, Streptomyces avermitilis MA-4680
MPDKTFPGILSTVGNTPLVELERLLPDFGSRVFGKIERFNPGGSIKDRSALGMLLAGIRSGEVQPGRTVIIESSSGNLAVGLAQICRYFGLRFICVVDGKTTEQNLAILSAFRAEVEVVTERDELTGEFLPVRLRRVRELVAATPDAYWPNQYASLLNPKAHETTMREIEESLDGAVDFLFCSVSTFGTLRGCRDHIRARGLDTTIVAVDALGSAIFGLESTQRLIPGHGASVVPPLMDASAADEVVHISDLECVVACRRLIGREAVLAGGSSGATVAALWKIRHRIPEGSNCVLIFPDGGDRYLDTIYSDAWVNQNFGDVAHLWKD

SEQ ID NO: 258 - DNA, 1029 bp, Streptomyces avermitilis MA-4680
  CDS (1)..(1029): transl_table=11
atgcccggatccctgcggcgcccgtccgtggtctcccgcgtgtccgacctcatcggctacaccccgctgctggaactcgcggccacggagaccggcagccgcctgctgctgaagctggagatgttcaaccccaccggcaccgcgaagatccgcatggcccgccagatgatcaccgatgccgaggagcgcggcgaactgcgcgcgggaggccggatcatcgagtccacctccggcaacaccggcctgggcctggccgtcatcgccgccgaacgcggctacaccttcaccgccgtcgtcgacaaccacgccgccgtcgacaagctgcgggccatgaaggccctgggcgccgaactggtccacgtcgtggacgacggaaccgacgaactcgccaccgccgcccgtgaggaactcgccgaggagatggcgcgcggccaggacaacaccatcttcaccgagcagcacaacaaccccagcaacggcgtcggctacttccccgtcgcccacgaactccacgaggcactcgacggccgcctcgacgtcctcgtcggggccgtcggcaccggcggcggcctgtgcggcacggcccgtgaactgcgcaccctcatacccggcttcaccaccatcggcgtcgaaccgaaggggtcgatcgcgttcggcggcccggcgcacgactactaccagtcgggcaccggcacgcccgagggcgccccgatcggtgctctggtcgacttcggcctcatcgacgaaggggccaaggtcggtgacgtcgaggcgttcgccacctgccgggccgtggcccgcaccggcctgctcatcgggggctccgccggcggcgtcgtccacgaagccctgacccgcctgcccggacttccgcccggcacgactatggtcgccctgatcaatgacggcggggagaagtacatggacaccgtcttcaacgacgactggatgcgggcccgcgacctcctcgatcccgcggcggaacgggaagtcgacgaactcctcaccaagctccgcgggaaccgatga

SEQ ID NO: 259 - protein, 342 aa, Streptomyces avermitilis MA-4680
MPGSLRRPSVVSRVSDLIGYTPLLELAATETGSRLLLKLEMFNPTGTAKIRMARQMITDAEERGELRAGGRIIESTSGNTGLGLAVIAAERGYTFTAVVDNHAAVDKLRAMKALGAELVHVVDDGTDELATAAREELAEEMARGQDNTIFTEQHNNPSNGVGYFPVAHELHEALDGRLDVLVGAVGTGGGLCGTARELRTLIPGFTTIGVEPKGSIAFGGPAHDYYQSGTGTPEGAPIGALVDFGLIDEGAKVGDVEAFATCRAVARTGLLIGGSAGGVVHEALTRLPGLPPGTTMVALINDGGEKYMDTVFNDDWMRARDLLDPAAEREVDELLTKLRGNR

SEQ ID NO: 260 - DNA, 888 bp, Nitrosomonas europaea ATCC 19718
  CDS (1)..(888): transl_table=11
atgcataacaccatcgaaaatttcatcggccatactcccctggttcggctcaagcgtattccgagtgaaaccagtaataccattctggcaaagctggaaggcaataacccggctggttcagtcaaggatcggccagcctattccatgatcatgcgtgcacagcaacgcggcgacatccggccgggagatacgctgatcgaagcaaccagtggcaataccggtattgcactggccatggcagcggcgattctgggttatcgcatgattctggtcatgccggagaatctgagcctggagcgccgtcaggtaatgtctgcatatggtgccgagattgttctgactcccaaagagggaagcatggagctggccagagatactgctgagcaactgtgcaatgccggcaagggcatcattctcgatcaattttccaatcccgataatccgctggcgcattatgaaactacagcccccgagatctggcaggatacggcgggaacggtcacacatttcgtaagcagtatgggaacgaccggcacgatcatgggctgtgcccgctatttccgcgaacaggagcagaaggtggaaattatcggtgtgcaaccacaggagaatgcacagattcccggaatccgtaaatggccggaagcttatctgcccaaaatatatcagccggagctggttgaccgtattttgctggtatcccagcaggaagccgaggaaatggctcgccgtctggcgcgtgaggaaggattgtttaccggtatttcttctggaggggctctggcagccgctctgaaggtttccgcgcaggtgcagaacgcagtgattgtttttatcgtatgcgatcgcggggatcgctacttatcgaccggggtttttccttcctga

SEQ ID NO: 261 - protein, 295 aa, Nitrosomonas europaea ATCC 19718
MHNTIENFIGHTPLVRLKRIPSETSNTILAKLEGNNPAGSVKDRPAYSMIMRAQQRGDIRPGDTLIEATSGNTGIALAMAAAILGYRMILVMPENLSLERRQVMSAYGAEIVLTPKEGSMELARDTAEQLCNAGKGIILDQFSNPDNPLAHYETTAPEIWQDTAGTVTHFVSSMGTTGTIMGCARYFREQEQKVEIIGVQPQENAQIPGIRKWPEAYLPKIYQPELVDRILLVSQQEAEEMARRLAREEGLFTGISSGGALAAALKVSAQVQNAVIVFIVCDRGDRYLSTGVFPS

SEQ ID NO: 262 - DNA, 1302 bp, Arabidopsis thaliana
  CDS (1)..(1302)
atggtggcgatgatcatggcttcaaggtttaaccgggaagctaagctcgcatctcaaatcttgtctacacttttgggaaaccgaagctgctacacatccatggccgccacatcttcctctgctttacttcttaatccgttgacttcttcttcttcttcttctactctccgtcgtttcagatgctcgccagagatctcttctctctccttctcctccgcttctgatttctctctagcgatgaagaggcagagtcggagttttgctgatggttcggaacgagatccgtctgttgtgtgtgaggctgttaagcgcgagactggacctgatggactcaacatcgctgacaatgtgtctcagctcattgggaaaactcctatggtgtacttgaacagtatagcaaaaggttgtgtagcaaatattgctgccaaactcgagatcatggagccatgttgcagtgtcaaggataggattgggtacagtatggttactgatgctgagcaaaaaggatttatatcacctggaaagagtgttcttgtggaacctacaagtggaaacacgggtattggcctagcattcatcgctgcttcaaggggctatagacttatcttgacaatgccagcatccatgagtatggaaagaagggttcttttaaaggcatttggagctgagcttgtattaacagatcctgctaaaggcatgactggagcggttcagaaggctgaagagatcttgaaaaacactcctgatgcatacatgctccaacagtttgacaaccctgcaaatccaaagattcattacgagactactggtcctgagatctgggatgatacaaagggcaaggtggatatctttgttgcaggaattggaactggtggaactatcactggtgttggtcgatttattaaagagaaaaatcccaaaacgcaggttattggtgtagaacccaccgaaagcgatatactttctggtggcaaaccgggacctcacaagattcaaggaattggagctggatttatacctaagaatttggatcagaaaattatggatgaagtcatagcgatttcaagtgaggaagctatagaaaccgcaaagcaactagctcttaaggaaggcttgatggttggtatatcatctggagctgcagctgctgctgcaatcaaggtggctaagagacctgagaatgctggaaaactcatagctgttgttttcccgagcttcggggagagatatctatcgaccccgctgttccagtctatccgggaagaggtggagaaaatgcagcctgagagagtcagcggttaa

SEQ ID NO: 263 - protein, 433 aa, Arabidopsis thaliana
MVAMIMASRFNREAKLASQILSTLLGNRSCYTSMAATSSSALLLNPLTSSSSSSTLRRFRCSPEISSLSFSSASDFSLAMKRQSRSFADGSERDPSVVCEAVKRETGPDGLNIADNVSQLIGKTPMVYLNSIAKGCVANIAAKLEIMEPCCSVKDRIGYSMVTDAEQKGFISPGKSVLVEPTSGNTGIGLAFIAASRGYRLILTMPASMSMERRVLLKAFGAELVLTDPAKGMTGAVQKAEEILKNTPDAYMLQQFDNPANPKIHYETTGPEIWDDTKGKVDIFVAGIGTGGTITGVGRFIKEKNPKTQVIGVEPTESDILSGGKPGPHKIQGIGAGFIPKNLDQKIMDEVIAISSEEAIETAKQLALKEGLMVGISSGAAAAAAIKVAKRPENAGKLIAVVFPSFGERYLSTPLFQSIREEVEKMQPERVSG

SEQ ID NO: 264 - DNA, 1553 bp, Arabidopsis thaliana
  CDS (72)..(1370)
ttggtctaaaaatggaccgtatctgaaaatccaatcgacgtcgtattccaagaaaatagaaaagtaggatcatggtggcgatgatcatggcttcaaggtttaaccgggaagctaagctcgcatctcaaatcttgtctacacttttgggaaaccgaagctgctacacatccatggccgccacatcttcctctgctttacttcttaatccgttgacttcttcttcttcttcttctactctccgtcgtttcagatgctcgccagagatctcttctctctccttctcctccgcttctgatttctctctagcgatgaagaggcagagtcggagttttgctgatggttcggaacgagatccgtctgttgtgtgtgaggctgttaagcgcgagactggacctgatggactcaacatcgctgacaatgtgtctcagctcattgggaaaactcctatggtgtacttgaacagtatagcaaaaggttgtgtagcaaatattgctgccaaactcgagatcatggagccatgttgcagtgtcaaggataggattgggtacagtatggttactgatgctgagcaaaaaggatttatatcacctggaaagagtgttcttgtggaacctacaagtggaaacacgggtattggcctagcattcatcgctgcttcaaggggctatagacttatcttgacaatgccagcatccatgagtatggaaagaagggttcttttaaaggcatttggagctgagcttgtattaacagatcctgctaaaggcatgactggagcggttcagaaggctgaagagatcttgaaaaacactcctgatgcatacatgctccaacagtttgacaaccctgcaaatccaaagattcattacgagactactggtcctgagatctgggatgatacaaagggcaaggtggatatctttgttgcaggaattggaactggtggaactatcactggtgttggtcgatttattaaagagaaaaatcccaaaacgcaggttattggtgtagaacccaccgaaagcgatatactttctggtggcaaaccgggacctcacaagattcaaggaattggagctggatttatacctaagaatttggatcagaaaattatggatgaagtcatagcgatttcaagtgaggaagctatagaaaccgcaaagcaactagctcttaaggaaggcttgatggttggtatatcatctggagctgcagctgctgctgcaatcaaggtggctaagagacctgagaatgctggaaaactcatagctgtaagtcttttcgcttcggggagagatatctatcgaccccgctgttccagtctatccgggaagaggtggagaaaatgcagcctgaggtatgaacattagcaacttggtctacttctgcaaagctctttctcccataattacagtctgagtgctaagcaatttatttttatcaataaggcattagtgaatgtggtttgagttctattttggatatccaacactagtctatgttttactcaacattttctgttggaaatcccaatgcttaattatattgaattg

SEQ ID NO: 265 - protein, 432 aa, Arabidopsis thaliana
MVAMIMASRFNREAKLASQILSTLLGNRSCYTSMAATSSSALLLNPLTSSSSSSTLRRFRCSPEISSLSFSSASDFSLAMKRQSRSFADGSERDPSVVCEAVKRETGPDGLNIADNVSQLIGKTPMVYLNSIAKGCVANIAAKLEIMEPCCSVKDRIGYSMVTDAEQKGFISPGKSVLVEPTSGNTGIGLAFIAASRGYRLILTMPASMSMERRVLLKAFGAELVLTDPAKGMTGAVQKAEEILKNTPDAYMLQQFDNPANPKIHYETTGPEIWDDTKGKVDIFVAGIGTGGTITGVGRFIKEKNPKTQVIGVEPTESDILSGGKPGPHKIQGIGAGFIPKNLDQKIMDEVIAISSEEAIETAKQLALKEGLMVGISSGAAAAAAIKVAKRPENAGKLIAVSLFASGRDIYRPRCSSLSGKRWRKCSLRYEH

SEQ ID NO: 266 - DNA, 942 bp, Helicobacter hepaticus ATCC 51449
  CDS (1)..(942): transl_table=11
atgctctatcgttcaagtcttgaacttatagggcatacaccacttttagaacttactcatttgaatattgcaaacaataaccgcatttttgcaaagctagaattctataatcctgcaggaggaataaaagacagggtagctctttacatctgccaaaagcttaaggaaaagggtcttttacataaagattctgttattattgaagctactgcggggaatacaggacttggtatcgcctttgtggcacaacattttgggtgcaaagctattcttatcgtacctgataaattctctattgaaaaacagattctaatgcgcgcacttggcgcacaagtcatcaatacgcccaaagaaaaaggaatgcaaggtgctatggacagagcacaagaaatgttatcttgcacaccttatgctttaagtcttaatcaatttgagaatcttgataatccacaagcacattatcttactacagctaaagaaatttatgatgatatggcaaaagtgcaagcaaatagtgaaaatggctctgacgcactcattgattatcttgtatgtggtgctgggagcggagggagctttagcggtatagttggttatcttaaaaagcaagattctcgcataaaaggtgtgctatgcgaccctgtaggctctattatcggcggtggtgaagagggttgtgcaaatattgaaggtattggtaataactttatccctcatacaatggatatttcactcattgatagtgtgcaaaaaatcacagatgaggaagcttatgagggtgtaagaatgctagctaaaaatgagggaatcttagcaggcatatcttctggagcgtgtttgatagcttgtctaaaactcgctaatgaagtgcaaaatagcctgattgtaacactttttgcagatgacttaagccgttattttagtcgcaatttaattgattaa

SEQ ID NO: 267 - protein, 313 aa, Helicobacter hepaticus ATCC 51449
MLYRSSLELIGHTPLLELTHLNIANNNRIFAKLEFYNPAGGIKDRVALYICQKLKEKGLLHKDSVIIEATAGNTGLGIAFVAQHFGCKAILIVPDKFSIEKQILMRALGAQVINTPKEKGMQGAMDRAQEMLSCTPYALSLNQFENLDNPQAHYLTTAKEIYDDMAKVQANSENGSDALIDYLVCGAGSGGSFSGIVGYLKKQDSRIKGVLCDPVGSIIGGGEEGCANIEGIGNNFIPHTMDISLIDSVQKITDEEAYEGVRMLAKNEGILAGISSGACLIACLKLANEVQNSLIVTLFADDLSRYFSRNLID

SEQ ID NO: 268 - DNA, 903 bp, Helicobacter hepaticus ATCC 51449
  CDS (1)..(903): transl_table=11
atgatagctcaaaatattaccgaactcattggcaacactccgattttacaacttcagcaatttgctccaaatctttatggcaaatgcgagtttttaaacccaagccattctgttaaagaccgccccgcatatgcaatgatagatgaggctctaaagacaggcaaaatcacaaaagatacaactattgtagaatgcacaagcggcaatatgggcatatctctcgctatgatttgtgcttctcttggattaaaaatcatcatcactatgccagaatctatgagcatagaaagacgcaagatgatagctttgtttggtgcgaatcttgtgcttactcctgcaagtgagggtatgcaaggtgcgctcaataaggctcaagaaattttagattccacaccaaactcatttatgccaagtcaatttgataatctcgctaacaaagaaatgcacaaacgcactactgcactagagatttataaaagctttgagggaagtttggattattttgtggcaggatttggcacaggtgggacaattagcggtgtaggcgaagtgcttaaagagaagattccatctattaaaattattggtgtagagcctgctgcttcaccactgcttagcaaaggacaagcgggaccacataagattcaaggcattggcgcgaactttatccctaaaatccttaatcgcgatgtgatagattctattgaagttgtagaaaatgaagtcgctattaaaatggctcaaaatttaggcaaaatcggcgtaatggttggaatttctagtggcgcaaatgtcgcagctgcacttgaaattgccaaaaacaatccaaataaaaaagtgcttactatgcttaatgacacagcagagcgatacctttcaacggatttatttaatacgctttaa

SEQ ID NO: 269 - protein, 300 aa, Helicobacter hepaticus ATCC 51449
MIAQNITELIGNTPILQLQQFAPNLYGKCEFLNPSHSVKDRPAYAMIDEALKTGKITKDTTIVECTSGNMGISLAMICASLGLKIIITMPESMSIERRKMIALFGANLVLTPASEGMQGALNKAQEILDSTPNSFMPSQFDNLANKEMHKRTTALEIYKSFEGSLDYFVAGFGTGGTISGVGEVLKEKIPSIKIIGVEPAASPLLSKGQAGPHKIQGIGANFIPKILNRDVIDSIEVVENEVAIKMAQNLGKIGVMVGISSGANVAAALEIAKNNPNKKVLTMLNDTAERYLSTDLFNTL

SEQ ID NO: 270 - DNA, 1050 bp, Rhodopirellula baltica SH 1
  CDS (1)..(1050): transl_table=11
ttgctcctgagccaaccatccatgaaccaactttcctcgcgagtttgcaatggcgtcctcgatgcaatcggcggcacaccattggttcgactcaaccgatttttggaccgacctgatattgagttgattgtgaaatgggaggcggcgaatccgggcggaagtgccaaggatcgtccagccgcgaagatgctgtccgaggcactcaaacgcggtgagatcggccccgaaaccacgatcgtcgaatcgacgtctgggaacatgggcatcggtctggctcaagtgtgccggtaccacggattgaaattcatctgcgtcgtcgatcctcgagcacagaagcaaaacctctcgatcatcgaagcactcggtggcacgattgagctagtcacccagccgctgaaaggtgatttcctggctgcacgcatcgcgaaagtttgcgagctgatcgagacaacaccgaacagttattggcccaatcagtacgccaacaccgacaaccctcgatcacactttaaaggaaccatccgcgaaatcgatgagacgctcaatggtgaattcgatgtcttgttcgtggcgacgagcagcacggggaccgctcaaggttgtcgtgattttttgaagtcgcgaggacgcgacgttcaggtcgtcgcggtcgattcagtgggcagtgttttgttcggcgggtcgtctggtcctcgcaagatccctggtttgggtgcggggaaggaacctcgattggcggcgggccaatcattcgatcatctcgttcgcgtctcggatttggaatgtgtcgttggatgtcgcagggcggcgcagcgagaggcgatgttgattggtggttcggccggtggcgttctgatgagcgtcggacgaatgcaagaacaattcgctggcaagcgttgcgtcgcggtgctccatgattccggcacgcgatatctcgaaacagtctttagcgatgaatgggtttcggagtcgctgggttgtaccagcgaggaactcaactatctggtcggttcttcctcgtttgagttttttgaaggagtgagcgcatga

SEQ ID NO: 271 - protein, 349 aa, Rhodopirellula baltica SH 1
MLLSQPSMNQLSSRVCNGVLDAIGGTPLVRLNRFLDRPDIELIVKWEAANPGGSAKDRPAAKMLSEALKRGEIGPETTIVESTSGNMGIGLAQVCRYHGLKFICVVDPRAQKQNLSIIEALGGTIELVTQPLKGDFLAARIAKVCELIETTPNSYWPNQYANTDNPRSHFKGTIREIDETLNGEFDVLFVATSSTGTAQGCRDFLKSRGRDVQVVAVDSVGSVLFGGSSGPRKIPGLGAGKEPRLAAGQSFDHLVRVSDLECVVGCRRAAQREAMLIGGSAGGVLMSVGRMQEQFAGKRCVAVLHDSGTRYLETVFSDEWVSESLGCTSEELNYLVGSSSFEFFEGVSA

SEQ ID NO: 272 - DNA, 960 bp, Rhodopirellula baltica SH 1
  CDS (1)..(960): transl_table=11
atgggaggttacagcctgatgtctcgaggaaaaactttcgacaacattgcccgcgcgatcggtgacacgccgatggtgcagatcaatcgcttggtgccttcgggtgatgcgactgtcttcgccaagtgcgagttctttcagccgctcaatagcgtgaaagaccgtatcggcgttgcgatgatcgaagctggggaacgcgatggaagcatcaaccccgatacgcacatcatcgaacccaccagtggcaacaccggaattgctctcgcgtttgtttgtgccgcgaaaggctacaagctgacgctcacgatgcctgaatcgatgtcggtcgaacgccgtgcgttgcttcgagcgatgggggccaacttggtgttgacgcctgctggtgacgggatgaagggggcaatcacaacggctcaagagttggtcgaccaaaccgacaactcgttcatgccgcagcaatttgagaacccatctaaccctgcgatccacgaagcgaccaccggccctgaaatttgggccgacacggacgggaagatcgacgcgatcgtggcgggcgttggaacgggcggaacgatcactggtgtggctcgctacttgaagaaacaaaacccagacttcaaagcattcgcggtcgaaccaaagcattcgcccgtgatcagtggcggatcacctggcaaacaccgcattcaaggaattggcgcaggcttcattcccggaaatttggacacgtcgatcattgatgacgtcgttcaggtcgatgacgaagatgcgttcgagtgggggcgtcagcttgccaagcaagaaggcatcgtcgcggggatcagcagcggtgcaaacatgtgggcggctgctcagattgctgcgcgacccgagatgaagggcaagcgtattgtcaccgtgatgtgcagcttaggtgaacgttatctcagcacgccgctgtttggtgacctaggtttgtaa

SEQ ID NO: 273 - protein, 319 aa, Rhodopirellula baltica SH 1
MGGYSLMSRGKTFDNIARAIGDTPMVQINRLVPSGDATVFAKCEFFQPLNSVKDRIGVAMIEAGERDGSINPDTHIIEPTSGNTGIALAFVCAAKGYKLTLTMPESMSVERRALLRAMGANLVLTPAGDGMKGAITTAQELVDQTDNSFMPQQFENPSNPAIHEATTGPEIWADTDGKIDAIVAGVGTGGTITGVARYLKKQNPDFKAFAVEPKHSPVISGGSPGKHRIQGIGAGFIPGNLDTSIIDDVVQVDDEDAFEWGRQLAKQEGIVAGISSGANMWAAAQIAARPEMKGKRIVTVMCSLGERYLSTPLFGDLGL

SEQ ID NO: 274 - DNA, 972 bp, Rhodopirellula baltica SH 1
  CDS (1)..(972): transl_table=11
atgacgaatcatccggcttcgtacagctatgcgaccgaagcgatcacgactccgattgcgccggtgaaactgtccgatgatgggccagtcatttggtgcaagctggaatatcacaacccgagtggctccaccaaagatcggatcgctcgtttcatcttgggaaaggcaatccgaagcgggttgctgggccgtggtgatgcggtggtcgaagcatcgagcgggtcgaccagcatttcgcttgcattgatgtgcgcccagtttggtttgcgattcactgcggtcatgccgcgcggggtgagttccgaacggatcaagatgattcgagcgtttggagccgaagtgatcctgacaccggcggaagaaggtgtgggcggagcgatggcattagcagatgagatcgccggtcgaggagaagcgttcgcaagcaagcagtttgagaacccagacaacccggcggcacatcgctatcaaaccgccgcagaaatcatcgctcaagttccttctcgctcggtggatgcggtcgtcagtggggtcggaacgggtggcaccttggtcgggctgtaccagggattctgcgattttggatgcatcactcggccggtgctggctcggccggtctgctccgatggcctgtatgagctggagtgttccagtttcagcaagaagataccgggtgtggtggaaagtgcttcggcaatcttccgcgatgcccatctgcccggactcagacaagtcgatgtgaaagacagcgtggctttggcgtgttgtcgccaactgatccggcgtggatttcccgtcgggccaagttcagggttgaacttcgccgcggccctggaagccgcacgcgatctcccgcccgattcaacgatcgtcacggtctttcccgaccgcatggaacgctacttctcgacgccgttgttcagcgactcagtggaagagttggaatgcgatccggcccagacatgttgctga

SEQ ID NO: 275 - protein, 323 aa, Rhodopirellula baltica SH 1
MTNHPASYSYATEAITTPIAPVKLSDDGPVIWCKLEYHNPSGSTKDRIARFILGKAIRSGLLGRGDAVVEASSGSTSISLALMCAQFGLRFTAVMPRGVSSERIKMIRAFGAEVILTPAEEGVGGAMALADEIAGRGEAFASKQFENPDNPAAHRYQTAAEIIAQVPSRSVDAVVSGVGTGGTLVGLYQGFCDFGCITRPVLARPVCSDGLYELECSSFSKKIPGVVESASAIFRDAHLPGLRQVDVKDSVALACCRQLIRRGFPVGPSSGLNFAAALEAARDLPPDSTIVTVFPDRMERYFSTPLFSDSVEELECDPAQTCC

SEQ ID NO: 276 - DNA, 951 bp, Haemophilus ducreyi 35000HP
  CDS (1)..(951): transl_table=11
atgacaattttcgcagataattcatataccattggcaatacccccattgtgcgtttaaaacattttggtcaaaatggcaatttactagtgaaaattgaagcccgtaatccaagctttagtgttaaatgtcgtattggtgccaatatggtatggcaagcggaaaaagacggtattctaactaaagataaagaaattgtggatgcaacaagcggcaatacaggcattgcgttagcctatgttgcggcagctcgtggctataaaatcaccttaacaatgccagaaaccatgagcgatgaacgtaaacgtctattacgtggcttaggcgcaaatttagtgcttactgaaagcacattaggtatgaaaggcgctattgctaaagctgaagagattttcgctagcgatccaaaccgttacataatgctaaaacagtttgaaaatccagcaaatccagccattcaccaacaaacgacaggtcctgagatttggcaggcgactgaaggcaaaattgatgttatcgtagcaggcgtaggcactggcggtacaatcacaggcgtttcacgctatataaaacaagacaaaggcaaacaaattatctctgttgcagtggaaccaaaagaatccccggtaataacacaaacattaaatggcgaggaagtgcaacctggtccacataaaattcaaggtattggtgcgggctttattcctaaaaacttagatttaacgttaattgaccgcgttgaacaagtatcgagcgaagaagcccttaaaatagcacatcaacttatggctaaagaaggtattctagtcggcatttcatctggtgccgcagtcgcagcagcagatcgtttagctaaattacctgaatttgcggataaacaaattgtggcagtcttaccttctgcatcagaacgttacttaagtaccttattatttgaaggaattgaaatttaa

SEQ ID NO: 277 - protein, 316 aa, Haemophilus ducreyi 35000HP
MTIFADNSYTIGNTPIVRLKHFGQNGNLLVKIEARNPSFSVKCRIGANMVWQAEKDGILTKDKEIVDATSGNTGIALAYVAAARGYKITLTMPETMSDERKRLLRGLGANLVLTESTLGMKGAIAKAEEIFASDPNRYIMLKQFENPANPAIHQQTTGPEIWQATEGKIDVIVAGVGTGGTITGVSRYIKQDKGKQIISVAVEPKESPVITQTLNGEEVQPGPHKIQGIGAGFIPKNLDLTLIDRVEQVSSEEALKIAHQLMAKEGILVGISSGAAVAAADRLAKLPEFADKQIVAVLPSASERYLSTLLFEGIEI

SEQ ID NO: 278 - DNA, 969 bp, Prochlorococcus marinus subsp. marinus str. CCMP1375
  CDS (1)..(969): transl_table=11
atgccaatagcaaatgacataacaagcttagtggggcaaacaccactagtaagactaaatcgcctcccaaaagcgtttggatgtaaagcggaggtattagcaaaacttgaaagttttaatcccacagcatctgtaaaagaccgtatagcaggcgccatggtggttgaagctgaaaaacaaggaactattaaacctggtgaaactgtcttaatagaaccaacaagtggtaatacaggaatcgctctcgcaatggttgcagcagcgaaaggctatcgattaattcttacaatgcctgacacgatgagtaccgaaaggaggtcaatgcttcgagcttatggagcagaacttcaactaaccccagggaaagatggaatacaaggggctatcaacttggccaaagaattagtagcttcaatttcgcattcttacctattacaacaatttgataatccagctaatccgcagattcatgaagcgacaaccgctgaagaaatttggtcagattgcgaaggaaaacttgatggcttaatagctggaataggcactggcggaacaattactggttgcgcaagagttctaaaagctcgtaatcctgcgctaaagatttatgcaattgagccctcatcaagtgcagtactttcagggaaagagcctggccctcatagcattcaaggaatcggtgctggttttattccaaaagtacttgatatatcactaattgatgaagtaatagagattaatgatcaagaagcaatggaagctgggaggaaacttgcaaaagaagaaggtctccttagcggaattagtagtggcgcagctctagcggctgctctaaaaatagggaaaaggcccgaaatggaaaataaaaggttagtggttgtttttcctagttttggcgagagatatttatctacttctatgtttaacaatctttcaaccagccaaccaaagaaagatggatacatttag

SEQ ID NO: 279 - protein, 322 aa, Prochlorococcus marinus subsp. marinus str. CCMP1375
MPIANDITSLVGQTPLVRLNRLPKAFGCKAEVLAKLESFNPTASVKDRIAGAMVVEAEKQGTIKPGETVLIEPTSGNTGIALAMVAAAKGYRLILTMPDTMSTERRSMLRAYGAELQLTPGKDGIQGAINLAKELVASISHSYLLQQFDNPANPQIHEATTAEEIWSDCEGKLDGLIAGIGTGGTITGCARVLKARNPALKIYAIEPSSSAVLSGKEPGPHSIQGIGAGFIPKVLDISLIDEVIEINDQEAMEAGRKLAKEEGLLSGISSGAALAAALKIGKRPEMENKRLVVVFPSFGERYLSTSMFNNLSTSQPKKDGYI

SEQ ID NO: 280 - DNA, 987 bp, Prochlorococcus marinus subsp. marinus str. CCMP1375
  CDS (1)..(987): transl_table=11
atgaccccaatatacgaagacaacagccttgcaataggcaacaccccgctagtaaaacttcactctgttaccaaaaactgtaaagcaacagttttggcaaaaatcgaaggtcgcaatcctgcatatagcgtcaaatgcagaattggagcgaacatgatttgggatgcagaaaagaaaggtctcctcaataaacagcaaaccattattgaacccacttcaggtaatactggtattgcccttgcttttactgctgctgcaaagggttacaaactaacactcacaatgcctgagtcaatgtccttggaaaggaggagggtaatggcagtccttggtgctgaactaattcttactgaagctgcaaaaggtatgcctggcgctattgcaaaagcaaaagagattgcagaaagtgatcctaataaatatttcatgcctggacaatttgacaaccctgccaatccagagattcacttcaaaacaacaggtccagaaatctggaatgactgcaatgggaacattgatgtacttgttgcaggagtaggcactggaggaactattactggtgtatcaaaatttttaaagcaagagaaaaggaaacaagttctttccgtagcagtagaaccatcccatagccctgtgatttcccaaaccatcaatggccaagaagtaaagccaggacctcataaaatacaaggcatcggagctggatttatccctaaaaatttagacctctcattagttgaccaagttgagcaagtcagtaatgaagaatcaatcgcaatggctcttcgcttggcaaaagaagaaggcttactagttggtatatcttgcggagctgcagcaacagctgcaattcgattggccgaacaagaacaatttgctggcaaaacaattgttgttgttttaccagaccttgctgagcgctatctctcatcagtaatgttcgcagaagtcccaacaggtattatcgaacaacccaaaaccaactaa

SEQ ID NO: 281 - protein, 328 aa, Prochlorococcus marinus subsp. marinus str. CCMP1375
MTPIYEDNSLAIGNTPLVKLHSVTKNCKATVLAKIEGRNPAYSVKCRIGANMIWDAEKKGLLNKQQTIIEPTSGNTGIALAFTAAAKGYKLTLTMPESMSLERRRVMAVLGAELILTEAAKGMPGAIAKAKEIAESDPNKYFMPGQFDNPANPEIHFKTTGPEIWNDCNGNIDVLVAGVGTGGTITGVSKFLKQEKRKQVLSVAVEPSHSPVISQTINGQEVKPGPHKIQGIGAGFIPKNLDLSLVDQVEQVSNEESIAMALRLAKEEGLLVGISCGAAATAAIRLAEQEQFAGKTIVVVLPDLAERYLSSVMFAEVPTGIIEQPKTN

SEQ ID NO: 282 - DNA, 945 bp, Candidatus Blochmannia floridanus
  CDS (1)..(945): transl_table=11
atgaataaaatttatcaagataattcttatactattggtcatactccattagtacgacttaataaaattggtaatcaatttattatggccaaaattgaatcaagaaatcccagttttagcgttaaatgtcgcattggatctaacatgatatgggacgcagaaaaaaaaaatatattaaacccaaatatcactattatagaagcaactagcggaaatactggtatagctttagcatatgtaactgcagcacgaaactacaaattactcttaactatgcctgaaactatgagtattgaacgacaaaaactaatacgagctttaggtgcagatataatcttaacagaaggacatcttggtatgaaaggagcgatcaatcgcgcaaccgaaattgcaaacgataacccaagcaaatatttattactacaacaatttagtaatccagcaaatcctaatattcacgaacgcaccacaggaccagaaatttggtatgatactcatggaaatatagatatatttgttgctggagttggaactggaggtaccatcacaggagtaggaagattttttaaacaaatacaaaacaaaaaaatcactatagtagcggttgaaccaaaagattctccagtcattactcaaaccttgtctggacaaagtataaaaccagccccacataaaatccaaggaattggagcaggattcatccccaaaaatttagatttaaatttaattgatcaagtagtaactgtcgaaacagatgcagcaatttcttatgctaaattcttaatgcaaaaagaaggaattttagcaggtatttcctcaggagctgctttagcagcagcagtacaattacaacaacaggaaaaacatactaataaaaatatagttataatacttccgtcatctggagaaagatatttaagcaccatactattttcggattcatga

SEQ ID NO: 283 - protein, 314 aa, Candidatus Blochmannia floridanus
MNKIYQDNSYTIGHTPLVRLNKIGNQFIMAKIESRNPSFSVKCRIGSNMIWDAEKKNILNPNITIIEATSGNTGIALAYVTAARNYKLLLTMPETMSIERQKLIRALGADIILTEGHLGMKGAINRATEIANDNPSKYLLLQQFSNPANPNIHERTTGPEIWYDTHGNIDIFVAGVGTGGTITGVGRFFKQIQNKKITIVAVEPKDSPVITQTLSGQSIKPAPHKIQGIGAGFIPKNLDLNLIDQVVTVETDAAISYAKFLMQKEGILAGISSGAALAAAVQLQQQEKHTNKNIVIILPSSGERYLSTILFSDS

SEQ ID NO: 284 - DNA, 912 bp, Bordetella parapertussis 12822
  CDS (1)..(912): transl_table=11
atgagcactcctacctaccccactatcgagcaaaccgtcggcaatacgccgctcgtgcgcctgcagcgcattcctggcgcggccgggcaggcgcgcggcaacgtgatcctggccaagctggagggcaacaaccctgccggctcggtcaaggaccgtcctgccctgtccatgatcctgcgcgccgaagagcgcggcgaaatccatccgggcgataccctgatcgaggccaccagcggcaataccggcatcgcgctggccatgacggcggccatgcgcgggtaccggatggtcctcatcatgcccgacaacctgtcgctcgagcggcgggccgccatgaccgcctatggcgccgaactgatcctcacgcctgccgccaagggcggcatggaatacgcccgcgacctggccacggccatgcaggccgaaggcaagggcaaggtgctggaccaattcggcaacccggacaacccgcgcgcccatatcgagggcaccggcccggaaatctggaaccagacggatggccgcgtcacgcatttcgtcagcgcgatgggcaccaccggcaccatcatgggcgtgtccacctacctgaagtcgcgcaacgcggcggtgcaggtggttggcgcgcagccggccgaaggctcgcagatcccgggcatccgcaagtggcccgaggcctacatgccgaagatcttcgaccgttcgctggtcgacgcctatgagtccatcgcgcaggccgaggcggagaccatggcgcgccggctggccgccgaagaaggcatattcgccggcatttcgtcggcgggcgccctggtggcggcgttgcgcgtggccgagcgggtcgagaacgccaccattgtattcatcgtgtgcgaccgcggcgaccgctacctgtcgaccggcgtcttcaactga

SEQ ID NO: 285 - protein, 303 aa, Bordetella parapertussis 12822
MSTPTYPTIEQTVGNTPLVRLQRIPGAAGQARGNVILAKLEGNNPAGSVKDRPALSMILRAEERGEIHPGDTLIEATSGNTGIALAMTAAMRGYRMVLIMPDNLSLERRAAMTAYGAELILTPAAKGGMEYARDLATAMQAEGKGKVLDQFGNPDNPRAHIEGTGPEIWNQTDGRVTHFVSAMGTTGTIMGVSTYLKSRNAAVQVVGAQPAEGSQIPGIRKWPEAYMPKIFDRSLVDAYESIAQAEAETMARRLAAEEGIFAGISSAGALVAALRVAERVENATIVFIVCDRGDRYLSTGVFN

SEQ ID NO: 286 - DNA, 987 bp, Prochlorococcus marinus subsp. pastoris str. CCMP1986
  CDS (1)..(987): transl_table=11
atggcaaaaatttatgaggacaacagctttgctattggaaacactccattagtaaaattaaaatcagttactaaaaacgctaaagctactgtattagcaaaaattgaaggtagaaatcctgcatatagtgttaaatgcaggattggtgcaaacatgatatgggatgcggagaaaagcggaaaacttacaaaagacaaaactatcgttgaacctacctctggaaatactggaattgccttagcttttacagcttcagcaagaggttacaaactagtccttacaatgccagaatctatgtctattgagaggagaagggtgatggcagtattgggcgccgaaattgttttaacagaggcttctaaaggtatgccaggagcaattgccaaagctaaagagatcgcagaaagtaatccctctaaatatttcatgccaggtcaatttgataatccagcaaacccagaaattcatttcaaaacaactgggcctgaaatttgggatgattgcgatggtgagattgatgtttttgttgcaggggttggaacaggtggaacaattacaggagtttcaagatacatcaaacaagagaagggcaagaatattgtttctgtagcagtagaaccatcacatagccctgttattacacagacaatgaatggcgaagaagttaaatctggaccacacaaaatacaaggaataggcgcaggatttattcctaaaaaccttgatttatcaattgttgataaagttgagcaggttactaatgatgaatcaatcgagatggctcttagattggcaaaagaagaggggcttctcgtgggaatatcttgtggagctgctgctgctgctgctgttagattagctgagcaagatgaatatgcaggaaaaactatagtggttgttttaccagatttagctgagaggtatttatcatcaattatgtttaccgaagttccaaatggaataattgaggagccagttaaagcttaa

SEQ ID NO: 287 - protein, 328 aa, Prochlorococcus marinus subsp. pastoris str. CCMP1986
MAKIYEDNSFAIGNTPLVKLKSVTKNAKATVLAKIEGRNPAYSVKCRIGANMIWDAEKSGKLTKDKTIVEPTSGNTGIALAFTASARGYKLVLTMPESMSIERRRVMAVLGAEIVLTEASKGMPGAIAKAKEIAESNPSKYFMPGQFDNPANPEIHFKTTGPEIWDDCDGEIDVFVAGVGTGGTITGVSRYIKQEKGKNIVSVAVEPSHSPVITQTMNGEEVKSGPHKIQGIGAGFIPKNLDLSIVDKVEQVTNDESIEMALRLAKEEGLLVGISCGAAAAAAVRLAEQDEYAGKTIVVVLPDLAERYLSSIMFTEVPNGIIEEPVKA

SEQ ID NO: 288 - DNA, 987 bp, Prochlorococcus marinus str. MIT 9313
  CDS (1)..(987): transl_table=11
atgtcccgcatttacgaagacaacagccaggcaatcggcaacactccactggtcaaactgcacgccgtcagcaaaaacgccaaggcaactgttctcgcaaagattgaaggccgcaatcccgcctacagcgtgaaatgccgcattggcgccaacatgatctgggatgccgaaaagcgcggtttactgagcaaagagcgcacgatcattgagcccacctctggtaacaccggcattgcactggcctacacagcagcagcccgcggctacaaactgatcctcaccatgcccgaatcaatgtcgctagaacggcggcgggtgatggcagtgcttggtgcagaactcattctcacagaagcagccaagggaatgccaggcgccattgccaaggcaaaagagatcgccgaaagcgatccccagaaatacttcatgcccggtcagtttgagaatccggccaatcccgacatccacagcaaaacaaccggtccagaaatctggaacgactgtgatggcgccattgatgtgctcgtgtctggcgtaggcaccggcggcacgatcacaggtgtctcccgttacatcaagcaggagaaaggcaaagccatcatttctgtagccgtcgaaccaacccatagcccggttatcagccaaaccctcaacggggaagaggtcaaacctggtcctcacaaaatccagggcattggagccggcttcattcccaaaaacctcgatctttctttagtggatcgtgtggagcaggtcagcaatgatgaatccatcgccatggccctgcgcttggcaaatgaagaaggtctactggtgggcatctccagtggtgcggcagttgcagcggctattcgtctggcagaacaacccgaatttgcgggcaaaaccatcgtggtcgtgctgccagacatggccgagcgttatctctcttcagtgatgtttgagagtgtgcccacaggcatcattcaggcccctgtagctgcctaa

SEQ ID NO: 289 - protein, 328 aa, Prochlorococcus marinus str. MIT 9313
MSRIYEDNSQAIGNTPLVKLHAVSKNAKATVLAKIEGRNPAYSVKCRIGANMIWDAEKRGLLSKERTIIEPTSGNTGIALAYTAAARGYKLILTMPESMSLERRRVMAVLGAELILTEAAKGMPGAIAKAKEIAESDPQKYFMPGQFENPANPDIHSKTTGPEIWNDCDGAIDVLVSGVGTGGTITGVSRYIKQEKGKAIISVAVEPTHSPVISQTLNGEEVKPGPHKIQGIGAGFIPKNLDLSLVDRVEQVSNDESIAMALRLANEEGLLVGISSGAAVAAAIRLAEQPEFAGKTIVVVLPDMAERYLSSVMFESVPTGIIQAPVAA

SEQ ID NO: 290 - DNA, 891 bp, Chromobacterium violaceum ATCC 12472
  CDS (1)..(891): transl_table=11
atgtacaaacatctggaagatttcgtcggcggcacgccgctggtgcggctcaaacgcctgccgggcgacaacggcaacgtggtgctgctgaagctggagggcaacaatccggcaggatcggtgaaggaccggccggcgctgtcgatgatccgccgcgccgaggcgcgcggcgacatccggcccggcgacacgctgatcgagccgaccagcggcaacaccggcatcgcgctggcgatggcggcggcgatgatgggctaccgcatggtgctgatcatgccggagaattccagcgccgagcgggtgcaggcgatgcgcgcctacggcgccgaggtgatcctgacgccggcggccggttcgatgccggcggcgatagacctggcgcgcagcatggaggcggcaggcgagggccgcatcctggatcaattctccaatccggacaatccccaggcgcattacgagggcaccggcccggaaatctgggcggagaccgaaggcaggatcacccatttcgtgtccagcatgggcaccactggcaccatcatgggcaccggccgcttcctgaaggagaagaatccggccatccgcatcgtcggcgtccacccggagccgggcagccagatcgccggcatccgcaagtgggaagacccgtacgtgcccaagatctgcgatttttcccgcatcgacgagatcctgcacgtcggacagaaggaggcggaagacactgcccggctgctggcgaggcgcgagggcatcctggccgggccgtcgtctggcggcgcgttggcggtggctcttaggctggacgcgcaactgagggacgcggtgatcgtgtccgtggtgtgcgaccgcggcgaccgctacctgtccactggattgttcgatcctgcttga

SEQ ID NO: 291 - protein, 296 aa, Chromobacterium violaceum ATCC 12472
MYKHLEDFVGGTPLVRLKRLPGDNGNVVLLKLEGNNPAGSVKDRPALSMIRRAEARGDIRPGDTLIEPTSGNTGIALAMAAAMMGYRMVLIMPENSSAERVQAMRAYGAEVILTPAAGSMPAAIDLARSMEAAGEGRILDQFSNPDNPQAHYEGTGPEIWAETEGRITHFVSSMGTTGTIMGTGRFLKEKNPAIRIVGVHPEPGSQIAGIRKWEDPYVPKICDFSRIDEILHVGQKEAEDTARLLARREGILAGPSSGGALAVALRLDAQLRDAVIVSVVCDRGDRYLSTGLFDPA

SEQ ID NO: 292 - DNA, 999 bp, Wolinella succinogenes DSM 1740
  CDS (1)..(999): transl_table=11
ttgtataatcctcctagattaattgcgcaagagagttttaaaaagatcaaaactttaaacgaaggagaaaaaatgaaagtcgctcagaatgttcaagaactcatcggcaagacccccctagttaggctcaatttcgcctctaaagagagtggagctaatgtcatcggcaaatgcgaattcatgaacccctcaggctcggtcaaagaccgaatcgccctagggatgatcaatgccgccattggggcgggtaaaatcacccctgagaccatcgtcattgagcccaccagtggaaatacaggaatcggactggcttctgtctgcgccgccaaaggaatcaagctcattctcactatgccaagctccatgagtattgagcggcgtaaactattggcggctttgggagcgcaaatcgagctaacccctgccgaaaaagggatgaaaggtgcagtggagagagctttggagctcgcccaagagaccaaaaactctttcgttcctcagcagtttgaaaaccccgccaaccctgaatatcaccgagtgaccacggcggtggagatttgggaagatttagatggcaaggtggatgtgctagtggctggagtcggcacgggcggcacgatcacaggcgtgggcgaggtgctcaaggcaaagaatcctaatctcaaaatctacgccgttgagcctatcgattctcctgtcctctctggaggcaagcccggccctcacaagattcagggaatcggagcaggatttgtccccaaggcgctcaacaccgccctctatgatgaggtgattcaggtgaaggtgagcgatgcttacgagatgtctagacgacttggcaaggaggaggggattttggttggaatctctgcaggcgccaacatttgggcctctaaagagattggcaagaaataccccggaaaaacagtggtgacgattctttgcgatacgggtgagagatacctaagcaccgagctttttgaccttcagccttcctga

SEQ ID NO: 293 - protein, 332 aa, Wolinella succinogenes DSM 1740
MYNPPRLIAQESFKKIKTLNEGEKMKVAQNVQELIGKTPLVRLNFASKESGANVIGKCEFMNPSGSVKDRIALGMINAAIGAGKITPETIVIEPTSGNTGIGLASVCAAKGIKLILTMPSSMSIERRKLLAALGAQIELTPAEKGMKGAVERALELAQETKNSFVPQQFENPANPEYHRVTTAVEIWEDLDGKVDVLVAGVGTGGTITGVGEVLKAKNPNLKIYAVEPIDSPVLSGGKPGPHKIQGIGAGFVPKALNTALYDEVIQVKVSDAYEMSRRLGKEEGILVGISAGANIWASKEIGKKYPGKTVVTILCDTGERYLSTELFDLQPS

SEQ ID NO: 294 - DNA, 963 bp, Gloeobacter violaceus PCC 7421
  CDS (1)..(963): transl_table=11
gtggtgagcaccgagattggcccgagcgccctgggaagcgtccagcctcccgccgagacggacctgctgcagtgggtgggcaacacgcctttgctgcgcctggagcgggtgacggcggggctttccccggacgtcgaagtgtacggcaaggcggagtggttcaacccgggcggctccgtcaaagatcgcccggcgctcaatatgattctcgaaggcgagcgcagcggccggctgacccgcgagaaaattattctcgatgccacctccggcaacaccggcatcgcctacgcctggatcgccgcgcgccggggctatcgcgtcaaactggccctgcccctgaacgcgagcgaagagcgcaagcgcatcctcaaggcctacggcgtcgatctcatcctcaccgatccgaccctcggttccgacggtgccatccaggaggcacgccggctctacgcagcggatcccgaacggtacttctatcccgaccagtacagcaacaacgccaactggcaggcgcactatctgacgacgggcgtcgaaatctaccagcagaccggtgggcgggtcacccattttgtggcggggctcggcacctcgggcacctgcatgggggtgggacggcgcctcaaggagttcgacccggccgttcgggtgattgccatgcagcccgactcgcccttccatgggctcgaagggctcaaacacatggagacggcgatcgtcccggcgatctacaaccctgctttgcccgaccggcaggtcgaagtgtccaccgaggaagcccaacgcaccgtcaagcgcctcgcccgtgaggagggcatgctggtgggcatctccgcagggggcaacgtggcggcggctttacgcctggcgcgcgaactcgaccgcggcgtggtggtcaccattttgtgcgacagtgccgacaagtacctttcggagcgcttctgggacgacccgaatctataa

SEQ ID NO: 295 - protein, 320 aa, Gloeobacter violaceus PCC 7421
MVSTEIGPSALGSVQPPAETDLLQWVGNTPLLRLERVTAGLSPDVEVYGKAEWFNPGGSVKDRPALNMILEGERSGRLTREKIILDATSGNTGIAYAWIAARRGYRVKLALPLNASEERKRILKAYGVDLILTDPTLGSDGAIQEARRLYAADPERYFYPDQYSNNANWQAHYLTTGVEIYQQTGGRVTHFVAGLGTSGTCMGVGRRLKEFDPAVRVIAMQPDSPFHGLEGLKHMETAIVPAIYNPALPDRQVEVSTEEAQRTVKRLAREEGMLVGISAGGNVAAALRLARELDRGVVVTILCDSADKYLSERFWDDPNL

SEQ ID NO: 296 - DNA, 963 bp, Gloeobacter violaceus PCC 7421
  CDS (1)..(963): transl_table=11
atgcatatcgctcacgacatcaccgaactgatcggccgcactccgctggtgcagctcaaccgtattccggccgccgagggtgcccttgcccgcatcgtggtcaaactcgaaagtttcaacccggccgcctccgtcaaagaccgcatcggcgtctcgatgatcaacgaagccgaaaagtcgggctttatcctgccgggcaaaacgaccctggtcgaacccacctccggcaacaccggcatcgccctggccatggtggcggcggcgcgcggctaccggctcatcctcacgatgcccgagacgatgagcagcgagcggcgggcgctcctgcgggcctacggcgcccaactcgaattgacccccggttcagaagggatgcgcggggccatccgccgcgctgaggagattacccgcgaagtgcccgacgcgtttatactccagcagtttcgcaaccccgccaatcccaagatccaccgcgagacgaccgccgaagaactctggcgcgacaccgacgggcagatggatatttttgtctccggggtgggtaccggcggcaccgtgaccggggtgggcgaagtctggaaggtgcgcaagcccggcgtgcagatcgtggcagtggaaccggcggcaagcccggtgctctccggcggtaaacccggctcgcacctcatccagggcattggcgcgggctttgtaccggatgtactgcggcgcgacgtgatcgacgaagtgatcgccgtagccgatgagaaagcgatcgaatacagccgcaggcttgccaaagaagaagggcttctctcgggcatctccaccggggcggctctgtgggcggctctgcagctggccaagcgccccgagaacaccggcaagctcattgtctttatccaacccagcttcggcgagcgctacttgagcacggcccttttccagaacgaagggcaatcgcccaccgccgtcgcccgctag

SEQ ID NO: 297 - protein, 320 aa, Gloeobacter violaceus PCC 7421
MHIAHDITELIGRTPLVQLNRIPAAEGALARIVVKLESFNPAASVKDRIGVSMINEAEKSGFILPGKTTLVEPTSGNTGIALAMVAAARGYRLILTMPETMSSERRALLRAYGAQLELTPGSEGMRGAIRRAEEITREVPDAFILQQFRNPANPKIHRETTAEELWRDTDGQMDIFVSGVGTGGTVTGVGEVWKVRKPGVQIVAVEPAASPVLSGGKPGSHLIQGIGAGFVPDVLRRDVIDEVIAVADEKAIEYSRRLAKEEGLLSGISTGAALWAALQLAKRPENTGKLIVFIQPSFGERYLSTALFQNEGQSPTAVAR

SEQ ID NO: 298 - DNA, 882 bp, Photorhabdus luminescens subsp. laumondii TTO1
  CDS (1)..(882): transl_table=11
gtggcaagcttggaacattttataggtaacaccccgctggtaaaattacaacgaatcaccgataagctagggggggaaatatgggtgaagcttgaaggtaataatccggcaggctcgataaaggacagaacagcgctatcaatgattcagcaagctgaattgcgcggtgaaatttctcccggtgacgtattaattgaagccactagcggaaatacgggtattgcgttagcaatgattgccgcagtgaaaggttatcaccttaaattactgatgcctgataatatgagccttgagcgtcaggcttctatgcgagcttatggtgcagaactgattttagtgagtagagcaatgggcatggaaggtgcacgtgatttagctcagcaaatggagcgtaatggtgaaggtaaagttcttgatcaattcaataacccagataatcctttagcgcattttacgacgacagggccggaaatttggcagcagacgcaagggcgtattacacattttgtttccagtatgggaacgacgggaaccattaccggtgttagccgctatttaaaaagccagtctaatcgtgtacagattattggcttacaaccggcggagaatagccatattcccggtattcgccgttggtcgccggcttatttgcctggcattttccgcaaggagctagttgatcaagtgctggatatcactcagaaagaagctgaagataccatgcgtttattagctcagaaagaagggattttctgtggagttagttccggcggtgctgttgctggagcattaagtattgcagcacaaaatccaggttctgttattgttaccattatttgcgatcgtggtgatagatatctttctaccggagtatttaattaa

SEQ ID NO: 299 - protein, 293 aa, Photorhabdus luminescens subsp. laumondii TTO1
MASLEHFIGNTPLVKLQRITDKLGGEIWVKLEGNNPAGSIKDRTALSMIQQAELRGEISPGDVLIEATSGNTGIALAMIAAVKGYHLKLLMPDNMSLERQASMRAYGAELILVSRAMGMEGARDLAQQMERNGEGKVLDQFNNPDNPLAHFTTTGPEIWQQTQGRITHFVSSMGTTGTITGVSRYLKSQSNRVQIIGLQPAENSHIPGIRRWSPAYLPGIFRKELVDQVLDITQKEAEDTMRLLAQKEGIFCGVSSGGAVAGALSIAAQNPGSVIVTIICDRGDRYLSTGVFN

SEQ ID NO: 300 - DNA, 954 bp, Photorhabdus luminescens subsp. laumondii TTO1
  CDS (1)..(954): transl_table=11
atgaataaaatttacgaagataattctttgactattggtcgtaccccgttaattcgcctaaaacactttggcaatgggcgtattctggcaaaagtagaatcccgtaacccaagttttagtgtaaaatgtcgcattggttccaacatgatttgggatgctgaaaaacacggtatcctacaacccgggaaagagttggtagaacctaccagcggtaataccgggatagcccttgcttatgttgccgccgctcggggctacaaattaacgctgactatgccagaaaccatgagtattgagcgccgcaagctattgaaagcattgggagcgcaactggtgctgacggaaggcgctaaaggtatgaagggtgccattgagaaagctaacgagattaaagctagcgatcccgatcgttatattatcctgcaacagtttagcaatccggcaaacccggaaatccatgaaaaaaccacaggcccggaaatctgggaagacacagacggtgaagtagatgtatttgttaccggtgtagggactggcggtacattaacaggggttgcccgttacctgaaaaacaccaaaggtaaaaatatcaccacggttgctgtagagccggaagaatcacccgtcatcagccagactctggccggtgaagaagtgaaaccgggtccccataagattcaaggtattggtgcaggtttcattccagataaccttgatttgacactggttgatcgcgttttcaaaatcagcagtgaggaagctatcaaaaccgcacgtgaaatcatggtaaaagagggcattctggcaggtatctcctctggagccgccgttgcagcagcggtgaaactttctcaggaaccagaatataaagataaaaatatcgtcgtcattctggcttcatcaggtgaacgttatctaagcagtgtactgtttgctgacttgtctgatgaataa

SEQ ID NO: 301 - protein, 317 aa, Photorhabdus luminescens subsp. laumondii TTO1
MNKIYEDNSLTIGRTPLIRLKHFGNGRILAKVESRNPSFSVKCRIGSNMIWDAEKHGILQPGKELVEPTSGNTGIALAYVAAARGYKLTLTMPETMSIERRKLLKALGAQLVLTEGAKGMKGAIEKANEIKASDPDRYIILQQFSNPANPEIHEKTTGPEIWEDTDGEVDVFVTGVGTGGTLTGVARYLKNTKGKNITTVAVEPEESPVISQTLAGEEVKPGPHKIQGIGAGFIPDNLDLTLVDRVFKISSEEAIKTAREIMVKEGILAGISSGAAVAAAVKLSQEPEYKDKNIVVILASSGERYLSSVLFADLSDE

SEQ ID NO: 302 - DNA, 1029 bp, Photorhabdus luminescens subsp. laumondii TTO1
  CDS (1)..(1029): transl_table=11
atgaatcttagtaaaaacatattacaaactataggtaatactccagtagttatgttgaatggtagatatactaaaggtattaatgtctttctcaaaatggagaatattaaccccggtgggagtattaaagatcgtattgcagttgctatgttggaaagggctgaggctcagggagaattaagaccgggaatggtggtgattgaaccatcatcggggaatacggcaattggtctggcaatggcgtgtgctgttaaaggttatcgatttattgcggttttagatcgcatggtgccggcagcaaaacgcgataaaataaaagcatttggtgcggaaattattttcctaccagaatttgaagcgggaaaagatactgtcaaatatcgcattgatttaactaaagagattataaaagtctatccgaatgcgtttagccctatgcaatttgaaaatcaggttaatcctgatgagcattatcgttccacggggcgtgagttgtatgaaatctttggcaataatttgacagcttgttttgcgacagcaggaagttgtggaacactgactggaatttcccgttatttgaaagagaaagatccacaggtgcgaatttatggtgttgaacccgtggggtcaattattttcggtggtgaaccaggaaaatatctggtacaaggtgcaggattagcgtttataccttctattttggatcgtaccaatatcgatattaccttgaaagttgcagatattgatgcattccgagtagcaagaaagttagccagaaatgaaggtattttaattggtggaacgggaggttgtgcggtaagcgcagcattaaatcgcctggatgattttaaacctggcgataatattgttgtcattattcctgatagtggagaacgttatatcgacacaatttataatgatgcttggttatttgaaaataatttctcagaattaattgaggaaagtaaaacagaacctcaattagaagaaattattacaaacatggggtgcgtattaaatgagttctga

SEQ ID NO: 303 - protein, 342 aa, Photorhabdus luminescens subsp. laumondii TTO1
MNLSKNILQTIGNTPVVMLNGRYTKGINVFLKMENINPGGSIKDRIAVAMLERAEAQGELRPGMVVIEPSSGNTAIGLAMACAVKGYRFIAVLDRMVPAAKRDKIKAFGAEIIFLPEFEAGKDTVKYRIDLTKEIIKVYPNAFSPMQFENQVNPDEHYRSTGRELYEIFGNNLTACFATAGSCGTLTGISRYLKEKDPQVRIYGVEPVGSIIFGGEPGKYLVQGAGLAFIPSILDRTNIDITLKVADIDAFRVARKLARNEGILIGGTGGCAVSAALNRLDDFKPGDNIVVIIPDSGERYIDTIYNDAWLFENNFSELIEESKTEPQLEEIITNMGCVLNEF

SEQ ID NO: 304 - DNA, 969 bp, Vibrio vulnificus YJ016
  CDS (1)..(969): transl_table=11
atgagcaaaatctacgaagacaactctctgactattggcaatactccactggttcgtttgaacaaggtgagtaacggtaaagtgctcgcgaaaattgaagcacgcaaccctagcttcagtgttaagtgccgtatcggtgcaaacatgatttgggaagcagaaaaagaaggcaaactgaaaccaggtgttgaattggtagaaccaaccagtggtaatactggtattgcactggcatttgttgcagccgctcgtggttacaagctgacactgacgatgcctgagtccatgagtctagagcgccgtaaactattgaaagcacttggtgcaaatctagagcttactgaagcggcgaaaggcatgaaaggcgcaatcgctaaagcagaagaaattgttgctagcaaccctgaaaaatacctacttcttcaacaattcaataacccagcaaacccagaaatccacgaaaaaaccactggtccagaaatctgggaagccacagatggcgctatcgatgtctttgttgctggtgtaggtactggtggtaccattactggtaccagccgttacatcaaaggtgagaaagggaaacaaattctttccgttgctgttgagccaacagaatctcctgtaatttctcaagcgctggcaggtgaagaaatcaagccagcaccacacaaaatccaaggtatcggcgctggtttcattcctggtaacctcgacttgtcactgattgaccgtgttgagaaagtgacatcggaagaagccattgaaatggctcgtcgcctaatggaagaagaaggtatcttggcgggtatttcatcaggagcagcagtagtggcagcaaaccgccttgctgaactccctgaattcgaaggaaaaaccattgtcactgtactacctagctctggtgaacgttacctaagtaccgccctatttgctggcatctttactgagaaagagaaccagcagtaa

SEQ ID NO: 305 - protein, 322 aa, Vibrio vulnificus YJ016
MSKIYEDNSLTIGNTPLVRLNKVSNGKVLAKIEARNPSFSVKCRIGANMIWEAEKEGKLKPGVELVEPTSGNTGIALAFVAAARGYKLTLTMPESMSLERRKLLKALGANLELTEAAKGMKGAIAKAEEIVASNPEKYLLLQQFNNPANPEIHEKTTGPEIWEATDGAIDVFVAGVGTGGTITGTSRYIKGEKGKQILSVAVEPTESPVISQALAGEEIKPAPHKIQGIGAGFIPGNLDLSLIDRVEKVTSEEAIEMARRLMEEEGILAGISSGAAVVAANRLAELPEFEGKTIVTVLPSSGERYLSTALFAGIFTEKENQQ

SEQ ID NO: 306 - DNA, 936 bp, Corynebacterium diphtheriae NCTC 13129
  CDS (1)..(936): transl_table=11
atggctaaaatttacgacagcatcctcgacaccgtgggcaataccccactgattaagctcaatcgcctcgacaaatacctccccggcaacgttgtggtcaaagttgagttttttaaccctgcaaattctgtgaaagaccgtattggtaaagcaatcgtcgacgcagcagaagcctccggtgatctcaagccaggtggcaccatcgttgaagcaacatccggcaacaccggtatcgctctcgcactcgtcggtgctgcccgcggctacaacgttgtgctcaccatgccagaaacgatgtccctcgagcgccgcgtcatgctacgcgcctatggtgcagagatcgttctcacctctggtgcagccggaatgcaaggcgccgtagacaaagcaaacgaaatcgtcgctgagcgcgacaacgccatcctcgccagccagttcaagaacgccgccaacccagaaattcaccgtcgtactaccggcgaagaaatctggaacgacaccgacggacaggtcgacatcttcgtcgcaggcgtgggtaccggcggaaccgtcaccggcgctggcgaaaccctgaagaagcacaacccagagatcaaggtctacgccgtcgagccagcagcctccgctctcctaaccaccggcaaggcaggcccacacaagatccaaggcctcggcgcaaactttatcccaagcgttctaaaccagaaggtctacgaagaagtcattaccgtaactaacgaggacgcaatctccacctcacgccagcttgccgcacaagaaggcatcctaggcggcatttctgccggcgccaacctcaaggcagcacttgagcttgcagcattgccagaaaacgagggcaagaccatcgtcaccgtcgtacctgactacggcgagcgctacgtatcaaccgtcttgttcgacgacatccgcgactaa

SEQ ID NO: 307 - protein, 311 aa, Corynebacterium diphtheriae NCTC 13129
MAKIYDSILDTVGNTPLIKLNRLDKYLPGNVVVKVEFFNPANSVKDRIGKAIVDAAEASGDLKPGGTIVEATSGNTGIALALVGAARGYNVVLTMPETMSLERRVMLRAYGAEIVLTSGAAGMQGAVDKANEIVAERDNAILASQFKNAANPEIHRRTTGEEIWNDTDGQVDIFVAGVGTGGTVTGAGETLKKHNPEIKVYAVEPAASALLTTGKAGPHKIQGLGANFIPSVLNQKVYEEVITVTNEDAISTSRQLAAQEGILGGISAGANLKAALELAALPENEGKTIVTVVPDYGERYVSTVLFDDIRD

SEQ ID NO: 308 - DNA, 999 bp, Rhodopseudomonas palustris CGA009
  CDS (1)..(999): transl_table=11
atgtccagcgcagcaaccgcatcgatcaaagccgtcgcagaagcaccagcccatcgtcccggccgcggccgagtgtacgagtcgatcgccgatgcttacggcgatacgccgctggtacgtctgaaccggctgccgcagcagcacggcgtcaaggcgacgatctatgccaagctcgagtacttcaatccggcgagcagcgtgaaggaccgtatcggtgcggcgatgatcgcggcgctggagcaggaaggtatcatcaagcccgacaccgtgctgatcgaaccgacctccggtaacactggtatcgcgctggccttcgtggcggccgccaagggctaccggctgaagctggtgatgccggaatcgatgtcgatcgagcgccgcaagatgctcgccttcctcggtgccgaactggtgctgaccgaagccgccaagggcatgaagggcgcggtcgccaaggccgaagagctggtggcggcgaccccgaacgccgtgatgccgcagcagttcaagaacctcgccaacccggcggtgcatcgccgcaccaccgcggaggagatctggaacgataccgacggcgcggtcgatatcttcgtggccggcgtcggcaccggcggcaccgtctcgggcgtcggccaggtgctgaagccgcgcaaggcgtcgctgaaggtggtggcggtcgagccggaggaaagcccggtgctgtcgggcggcgcgcccggcccgcacaagatccagggcatcggcgccggcttcgtgccggacatcctcgaccgctcggtgatcgacgaggtggtcaagatcccgagcgccaccgcgattgaaacctcgcgcgcgctggcgcgccacgaaggcatcccgggcggcatctcgtcgggcgccgcgatcgccgccgcgatcgaactcggcaagcggccggaaaatgccggcaagacgatcgtggcgatcgtgccgtcgttctcggaacgctacctgtcgacggtgctgttcgaaggcgtctga

SEQ ID NO: 309 - protein, 332 aa, Rhodopseudomonas palustris CGA009
MSSAATASIKAVAEAPAHRPGRGRVYESIADAYGDTPLVRLNRLPQQHGVKATIYAKLEYFNPASSVKDRIGAAMIAALEQEGIIKPDTVLIEPTSGNTGIALAFVAAAKGYRLKLVMPESMSIERRKMLAFLGAELVLTEAAKGMKGAVAKAEELVAATPNAVMPQQFKNLANPAVHRRTTAEEIWNDTDGAVDIFVAGVGTGGTVSGVGQVLKPRKASLKVVAVEPEESPVLSGGAPGPHKIQGIGAGFVPDILDRSVIDEVVKIPSATAIETSRALARHEGIPGGISSGAAIAAAIELGKRPENAGKTIVAIVPSFSERYLSTVLFEGV

SEQ ID NO: 310 - DNA, 1038 bp, Rhodopseudomonas palustris CGA009
  CDS (1)..(1038): transl_table=11
atgagcatcaagaacgacgtcgtcgacgccatcggcaacacgcccctgatcaaattgaagcgcgcgtcggaggcgaccagctgcaccattctcggcaaggccgagttcatgaatccgggccagtcggtgaaggatcgggctgcgctgttcatcatccaggatgcggtgaagcgcgggacgctgcgtcccggcggcgtcgtggtcgaaggcaccgccggcaataccggcatcgggctggcactggccgccaatgcactcggtttccgtaccgtaatcgtgatcccgaacacgcagagccaggaaaagaaggacatgctgcggctatgcggcgccgagcttatcgaggtgcccgccgtcccctacgctaatcccaacaactacgtgaagctgtccggccgtctcgccgcgcagctcgccgaaaccgaaccgaacggagcgatctgggccaatcagttcgacaacgtcgccaaccgccaagcccatatcgagacgaccgcaccggaaatctggaatcagaccgatggcaaggtcgacggcttcgtcgccgcggtcggctccggcggcacgctggccggcgtgtcgatcggtctcaagcagttcaatccgaaagtccgcgccgtgctcgccgacccgttgggctcggcgctgtacaattactacaagaacggcgcgctgaaatcggaaggctcctcgattaccgaaggcatcggccagggccgcgtcaccgccaatctggaaggcgcgcagatcgacgacgcctatcagatccccgacgatgaagcggtgccgctgatctacgatctgctcgaacacgaaggactgtgcctcggcggctcgagcggcatcaacgttgccggcgcgatccgcctcgccaaggatctcggccccggccataccatcgtgaccatcctgtgcgattacggcagccgttatcagtccaagctgttcaacccggacttcatgcgcagcaagaacctgccggtgccggactggatggagaccaagagcacgattcaggtgccgttcgaaccggtgtga

SEQ ID NO: 311 - protein, 345 aa, Rhodopseudomonas palustris CGA009
MSIKNDVVDAIGNTPLIKLKRASEATSCTILGKAEFMNPGQSVKDRAALFIIQDAVKRGTLRPGGVVVEGTAGNTGIGLALAANALGFRTVIVIPNTQSQEKKDMLRLCGAELIEVPAVPYANPNNYVKLSGRLAAQLAETEPNGAIWANQFDNVANRQAHIETTAPEIWNQTDGKVDGFVAAVGSGGTLAGVSIGLKQFNPKVRAVLADPLGSALYNYYKNGALKSEGSSITEGIGQGRVTANLEGAQIDDAYQIPDDEAVPLIYDLLEHEGLCLGGSSGINVAGAIRLAKDLGPGHTIVTILCDYGSRYQSKLFNPDFMRSKNLPVPDWMETKSTIQVPFEPV

SEQ ID NO: 312 - DNA, 924 bp, Geobacter sulfurreducens PCA
  CDS (1)..(924): transl_table=11
atgccgctactaaccaacgacaaggtaatcgagcagatcggcaatacccctctcctgagactggcaaagcttgagcgaaagggttcggcagccgtattcggcaaggcggagttcttcaaccccggcggcagcatcaaggatcgtatctgcctcgccatgatcgaggccgccgagcgtgacggcaccctcaagcccggcgccacggtggtggagcccaccagcggcaatacgggcatcggcctgtccatgatctgcgcggtcaaggggtacaagctcatcctgaccatgcccgataccatgactgtggagcggcggcggctgctggcggcgtacggcgccgaactgatcctcacccccggcgcccaggggatgcgcggggccgttatgaaggcggaggaactggcggcccagccggggcacgtgatgatgcaccagttcaagaacccggcaaacccggatatccatcgccggaccacggggccggagatcgtggaaaccctgtccggcacgaccatcgacgccttcgtggcgggggtgggcaccggcggcaccatcaccggcgtcggcgaggtgctcaggacgcacaactcctcggtgcgggtcgtggcggtggagccggctgattcgccggtcctctcgggaggccagcccggtccccacaagatccagggaatcggagccggcttcgttcccgatgtgctcaataccaaggtgtatgacgagatcatcaccgtttccaacgacgatgcctatgccaccgtgcgcgacttggcccgcgaggagggcatcctcgtcggcatctcctcaggtgccaacgtcttcgccgcccttcaggtggctgccaagctcgggccgggcaagaacgtggtaacgatcctgtgcgacaccggcgagcggtacctttccaccggggtgttcgactga

SEQ ID NO: 313 - protein, 307 aa, Geobacter sulfurreducens PCA
MPLLTNDKVIEQIGNTPLLRLAKLERKGSAAVFGKAEFFNPGGSIKDRICLAMIEAAERDGTLKPGATVVEPTSGNTGIGLSMICAVKGYKLILTMPDTMTVERRRLLAAYGAELILTPGAQGMRGAVMKAEELAAQPGHVMMHQFKNPANPDIHRRTTGPEIVETLSGTTIDAFVAGVGTGGTITGVGEVLRTHNSSVRVVAVEPADSPVLSGGQPGPHKIQGIGAGFVPDVLNTKVYDEIITVSNDDAYATVRDLAREEGILVGISSGANVFAALQVAAKLGPGKNVVTILCDTGERYLSTGVFD

SEQ ID NO: 314 - DNA, 990 bp, Bdellovibrio bacteriovorus HD100
  CDS (1)..(990): transl_table=11
atgagaatatattctgatatcacgaaaaccattggtcaaacccccttaatcgaaatgcaaagaatcggcaaaggtttgccggggcgtcttctgctaaagcttgagttctttaatcccctgggatccgtcaaagaccgcatcggtctggcgatgatcgaggacgccgagcgctcaggtcagctaaagcctgggatgaaaattatcgaacccacaagcggcaacacaggcattgcgctggcttttgtggccgctgccaaaggttatgatatcactctgaccatgccagaaaccatgtctcaagagcgccgcacgttgctgctgatgctgggggcgaaaattattctgactccggggcccttgggtatgaagggggccattgccaaagccatggagcttctggaacaaacacccaatgcctggatgcctcgtcagtttgacaatccggccaatccggccattcacaaagaaaccacggctcttgaaatctggaacgacaccgatggcaaggtcgatatggtcgttagcggcgtcgggacttccggcaccatcactggtgtgggcaccgtgcttaaagccaaaaacaaaaacatcaaaatcatcgctgtcgaaccggctgaaagcccggtgctttccggcggtaaacccgggcctcacaagatccagggcctgggggcaggttttgttcccagcgtgatggacagatctgttgtcgatggggtggagcaggtgtcttcggaagagtccataaaagtggctcgggaagtgatcaaaaaagaaggcatcccggtggggatttcctcgggggcggcgatcagtgccggtcttcgccaagcggcgaaagaggaaaaccgcggtaagaatatcgtcgtgattattccaagcaccaccgaacggtatctgtcgaccttgttggccgaacaggaacgggcagaggcattgagtttgcctgtcgctacggtggatgaaaattacctgagtaaagtgaagtaa

SEQ ID NO: 315 - protein, 329 aa, Bdellovibrio bacteriovorus HD100
MRIYSDITKTIGQTPLIEMQRIGKGLPGRLLLKLEFFNPLGSVKDRIGLAMIEDAERSGQLKPGMKIIEPTSGNTGIALAFVAAAKGYDITLTMPETMSQERRTLLLMLGAKIILTPGPLGMKGAIAKAMELLEQTPNAWMPRQFDNPANPAIHKETTALEIWNDTDGKVDMVVSGVGTSGTITGVGTVLKAKNKNIKIIAVEPAESPVLSGGKPGPHKIQGLGAGFVPSVMDRSVVDGVEQVSSEESIKVAREVIKKEGIPVGISSGAAISAGLRQAAKEENRGKNIVVIIPSTTERYLSTLLAEQERAEALSLPVATVDENYLSKVK

SEQ ID NO: 316 - DNA, 990 bp, Bdellovibrio bacteriovorus HD100
  CDS (1)..(990): transl_table=11
atgcaggccggttccgtttcagacgttgtgggtcacacaccgttaatcaaacttcaatctctttcaaaaatcaccggatgtgagatctttgccaaagccgaatatctgaatccaggtggcagcgtgaaagatcgcacagcgctgggaatcattcaaagcgccgaaaaacaaggtctgctgaagcccggggacacgattgtggaaggcaccgcagggaatacggggattggtcttgccacgctggcggcgcagcgggggtaccactgtgtgatcgtgatgccggacaaccagtccaaagaaaaataccatgcgctcgaagccctgggtgtggagcttgtgaaggtcgctccctgtccctttgccaatcccaaccacttctaccacacagcacgcgccctggctgaatctcgccccaattccttttgggccaaccagtttgagaacaccgccaatttcgagattcactacaagacgaccggccctgagatctgggagcagatgggtcaaagggtggacgcctttgtttcctctgtcggaaccggaggaacgctggcgggagtgtcggcctatttaaaagaacaagatcccaaggtattcacgcttctggcggaccccatgggctcgggtctttattcgtttgtaaaaagtggaaagttcgaagcgcagggcagctcgatcactgaggggatcgggatcatgcgcctgaccgaaaactttaaaaaggcccgtgttgatgaggccgttcaaatccacgacgaacaaatgctttcgatgctttattacctggctcagcatgaaggattgctggtggggacatcggcggccttgaacatctttgcctcataccagtatgccttgcaaaaccagggaaagggattgcggattgcgactgtgatgggagactcggcccttcgctatcaatccaaggtgtttaatccacagttcctgaatgaaaagaacctgaaaattatgcctttgattcatagttaa

SEQ ID NO: 317 - protein, 329 aa, Bdellovibrio bacteriovorus HD100
MQAGSVSDVVGHTPLIKLQSLSKITGCEIFAKAEYLNPGGSVKDRTALGIIQSAEKQGLLKPGDTIVEGTAGNTGIGLATLAAQRGYHCVIVMPDNQSKEKYHALEALGVELVKVAPCPFANPNHFYHTARALAESRPNSFWANQFENTANFEIHYKTTGPEIWEQMGQRVDAFVSSVGTGGTLAGVSAYLKEQDPKVFTLLADPMGSGLYSFVKSGKFEAQGSSITEGIGIMRLTENFKKARVDEAVQIHDEQMLSMLYYLAQHEGLLVGTSAALNIFASYQYALQNQGKGLRIATVMGDSALRYQSKVFNPQFLNEKNLKIMPLIHS

SEQ ID NO: 318 - DNA, 1047 bp, Bdellovibrio bacteriovorus HD100
  CDS (1)..(1047): transl_table=11
atgtcacatatttacgactccattctggagaccatcggaaacacaccgattgtccgccttaaaaacgttaccaagggttcaaaacaccagttctttgcgaaaatcgagtatttcaatccaggtggcagcatcaaagatcgcgtcgctgtggcgatgattgaagaggcggaaaaacgcggcgatctgaaggcgggtggcactattgtcgaagccacttccggcaataccggtgtcggcctggctttggcggcggcggttaagggttataagtgcattttcgtgatgccagaaaagatgagtgaagaaaaaagagctattttgcgtgcctatggcgccaaagttgtcatcactccgatggtcgaccctgagcatccgctgagtcactattcagtgtctcagaaaattgcaaaagaaactcccggagcatttctaacgaaccagtatcacaatcctgacaaccctcagcgtcactatcaaaccacgggtccagaaatctggaagcagatggatggaaaagtggatgttgtggtcggcggggctggcactggaggcacactttccggggttgctaaatacctgaaagaaatgaatccaaacatcaaagcaatctgtgcagatccaattggaagcattctgtatgatctttattatcataagaagatcgtggatccaccgggctcttacaaagtggaaggtgtcggcgaagatatgctgccggacaacgttcacttgaatatttatgatggctttgaacgagtgtctgacccggaagcttttacgatgacccgtcgcctggtggcggaagaaggtcttcttgtggggccttccagtgctttggccctggtgggtgcgatgaaagctgcggaaaagatcgaaaagccatcaaatattgtggtggttttcccggacagcggacgagcgtatctgagcaaggccttcaatgatacatggatgattgaaaatgctcttctgaaaccggaagaagcgaaaaatgtctttaatcgcgtggtgaatgccgccgattttctggcagaactgaataagtag

SEQ ID NO: 319 - protein, 348 aa, Bdellovibrio bacteriovorus HD100
MSHIYDSILETIGNTPIVRLKNVTKGSKHQFFAKIEYFNPGGSIKDRVAVAMIEEAEKRGDLKAGGTIVEATSGNTGVGLALAAAVKGYKCIFVMPEKMSEEKRAILRAYGAKVVITPMVDPEHPLSHYSVSQKIAKETPGAFLTNQYHNPDNPQRHYQTTGPEIWKQMDGKVDVVVGGAGTGGTLSGVAKYLKEMNPNIKAICADPIGSILYDLYYHKKIVDPPGSYKVEGVGEDMLPDNVHLNIYDGFERVSDPEAFTMTRRLVAEEGLLVGPSSALALVGAMKAAEKIEKPSNIVVVFPDSGRAYLSKAFNDTWMIENALLKPEEAKNVFNRVVNAADFLAELNK

SEQ ID NO: 320 - DNA, 972 bp, Arabidopsis thaliana
  CDS (1)..(972)
atggaagaccgcgtcttgatcaagaacgatgtcactgaattgataggtaacacaccaatggtgtatctaaataaaattgtggatggttgtgtggctcgtattgctgccaagcttgagatgatggagccttgctctagcatcaaagatagaatcgcatatagtatgatcaaagatgctgaagacaaaggattgattactccgggaaagagtacattgattgaggcaacgggtggtaacaccgggattggtttagccagcatcggggcttcaagaggttataaagtgatccttttgatgccttcaacaatgagtttagaaaggagaatcattctaagagcattaggtgcagaggttcatctcactgacattagcataggcattaaaggacagttggagaaagctaaagagatattaagcaaaactcccggtggttacataccacaccagtttattaatcctgaaaatccagagattcattatagaaccacgggtccggagatttggagagattcagcagggaaagtagatatcttagtcgccggtgttggaactggtggaacggttactggaacagggaagtttcttaaagaaaagaacaaagatattaaggtttgtgtggtggaaccttccgaaagtgcggtactcagcggaggaaaaccaggtccacatttgatccaaggaataggctctggtgaaattccagccaatttggacttaagcattgttgatgaaatcattcaagtgactggtgaggaagctattgaaacaaccaagcttcttgctatcaaagaaggattattggttggaatatcctctggagcctcagctgcggctgcgttaaaggttgcaaagcggcctgaaaacgtagggaaactcattgtggttatttttcctagtggaggagaacgttatttatcgactgaattgttcgagtcagtcagatatgaagctgagaatttgccagttgaatga

SEQ ID NO: 321 - protein, 323 aa, Arabidopsis thaliana
MEDRVLIKNDVTELIGNTPMVYLNKIVDGCVARIAAKLEMMEPCSSIKDRIAYSMIKDAEDKGLITPGKSTLIEATGGNTGIGLASIGASRGYKVILLMPSTMSLERRIILRALGAEVHLTDISIGIKGQLEKAKEILSKTPGGYIPHQFINPENPEIHYRTTGPEIWRDSAGKVDILVAGVGTGGTVTGTGKFLKEKNKDIKVCVVEPSESAVLSGGKPGPHLIQGIGSGEIPANLDLSIVDEIIQVTGEEAIETTKLLAIKEGLLVGISSGASAAAALKVAKRPENVGKLIVVIFPSGGERYLSTELFESVRYEAENLPVE

SEQ ID NO: 322 - DNA, 924 bp, Bacillus cereus ATCC 10987
  CDS (1)..(924): transl_table=11
atgcgagtggcacaatcagtttcagaattaatcgggaaaacgccgatcgttaagttgaaccgcatcgtagaatcagacagcgcagatatatacttaaaattagaatttatgaatccagggagcagtgttaaagatcgtatcgcattagctatgattgaagatgctgagaaaaaaggattattaaaagaaggcgatacaatcattgaaccgacaagtggtaacacaggaattggtttagcgatggtagcagctgctaaaggatataaggcaattttagtaatgccagaaacaatgagtattgaacgtcgtaatttattacgtgcttacggtgcggaattagtattgactccaggtcctgaaggaatgggtggagcaattcgtaaagcgactgaattagcaaaagagaatggttacttcataccacaacagttcaaaaatcaatcgaatccagaaattcaccgtttaacaacaggtccagaaattgttgaacaaatgggcgaccaattagatgcgtttattgcaggtattggtacgggtggaacgattactggtgctggtgaagtgctgaaggaagcgtataaagatattaaaatttatgcagtagaacctgcggattcaccagtattatctggtgggaaaccaggtccacataaaatccaaggaattggggctggatttatcccagagacattggatgtagaagtatatgatgaaattgttcaagtgaaaacggagcaagcgtttgaatatgcaagaagagtggcgaaagaggaaggtattctagttggtatctcttctggagcagttatttatgcagcaacagaaattgcgaaaaagttaggcaaagggaaaaaggtacttgttattatcccaagtaacggtgaacgttatttaagtacaccactttatcaatttgagtcttaa

SEQ ID NO: 323 - protein, 307 aa, Bacillus cereus ATCC 10987
MRVAQSVSELIGKTPIVKLNRIVESDSADIYLKLEFMNPGSSVKDRIALAMIEDAEKKGLLKEGDTIIEPTSGNTGIGLAMVAAAKGYKAILVMPETMSIERRNLLRAYGAELVLTPGPEGMGGAIRKATELAKENGYFIPQQFKNQSNPEIHRLTTGPEIVEQMGDQLDAFIAGIGTGGTITGAGEVLKEAYKDIKIYAVEPADSPVLSGGKPGPHKIQGIGAGFIPETLDVEVYDEIVQVKTEQAFEYARRVAKEEGILVGISSGAVIYAATEIAKKLGKGKKVLVIIPSNGERYLSTPLYQFES

SEQ ID NO: 324 - DNA, 918 bp, Bacillus cereus ATCC 10987
  CDS (1)..(918): transl_table=11
atgaaattatgtgaaaacgtaacagaattaataggagatacacctgtcgtcagattatctaaatttattccagaagacgcagcagatgtgtatgtaaaactagaaatgtttaatccatcacgcagtgtgaaagaccgtgctgcctataatttactgcatgttgcagaagagaatggtcatatcaaaccaggagatacaattattgagccaacaagtggtaatacagggataggtttagcgatgaacgcggctgcaaaagggtataaaacgattttaattatgccggataatatgtctaaagaaagaattaacttattgaaagcatacggagcagaagtagttttaacaccagcagaacaaagaatgccaggagcaattgcgaaggcgttagaattgcaaaagcaaattccaaatagttttattccgcagcaatttgaaaatccagcaaacccgaatattcaccgttatacgactgcacttgaaatttatgaacaaatggatggagagcttgatgcttttgtagcaactgctggaacgggtggaactattacagggactggagaaacgttaaaagagaaactaccaaacttatatatcgcagtagtagaaccgaaaggatctcccgtactatcgggaggtgttccaggtcctcataaactagtaggaacaagtccgggatttatcccgaaaaacttaaatacagaagtgtataacgaaattattcaaattgcagacgaagaggctttaacgacaatgagaaacttagctagacaagagggattgttagttgggccgtcttcaggcgcttctgtttacgcagcgattatgatcgcaaaacgcttaggcgctggtaaaaaagttttatgtattgcacctgatacaggggagcggtatttgagtatgggattatttgaatga

SEQ ID NO: 325 - protein, 305 aa, Bacillus cereus ATCC 10987
MKLCENVTELIGDTPVVRLSKFIPEDAADVYVKLEMFNPSRSVKDRAAYNLLHVAEENGHIKPGDTIIEPTSGNTGIGLAMNAAAKGYKTILIMPDNMSKERINLLKAYGAEVVLTPAEQRMPGAIAKALELQKQIPNSFIPQQFENPANPNIHRYTTALEIYEQMDGELDAFVATAGTGGTITGTGETLKEKLPNLYIAVVEPKGSPVLSGGVPGPHKLVGTSPGFIPKNLNTEVYNEIIQIADEEALTTMRNLARQEGLLVGPSSGASVYAAIMIAKRLGAGKKVLCIAPDTGERYLSMGLFE

SEQ ID NO: 326 - DNA, 1080 bp, Chlamydomonas reinhardtii
  CDS (1)..(1080)
atgcagctccagcagaaggctctgcgtctgcagtcgacatttcctacccgggtttctcgagttgccctggtccccaaggccgtcgctgctcccgagaaggctgctgttaagatgaacatcgccaccgatgtcaccgagctgattggcaagacccctatggtctacctgaacaaggtggccacgggcacgcacgccaagatcgccgccaagctggagatcatggagccctgctgctccgttaaggacaggatcggctacagcatgatctcgagcgcggagaaggagggcctcatcaccccgggcaagactgtcctggtggagcccacctcgggtaacaccggcatcggtctggccttcatcgccgccgcccgcggctacaagctcatcctgaccatgcccgcctccatgtccctggagcgccgcatcctgctgcgtgccttcggcgccgagctggtgctgactgaccccgccaagggcatgaagggcgccgtggccaaggccgaggagatcctggcctccacgccggacgccttcatgctgcagcagttccagaaccccaacaaccccaaggtgcactacgagaccaccggccccgagatctggagcgccaccgacggcaaggtcgacatcctggtgtcgggcgtgggcaccggcggcaccatcaccggcaccggccgctacctgcgcgagaagaagtcggacgtgcagctggtggctgtggagccggccgagagccccgtgctcagcggcggcaagcccggcccccacaagatccagggcatcggcgccggctttgtgcccgcggtgctggacaccgcgctgatcagcgaggtggtgcaggtgtccagtgacgacgccatcgacatggctcgccgcctggcgctggaggagggcctcatggtgggcatcagctcgggcgccgcggtgcaggccgccatcaaggtggccagccgccccgagaacgagggcaagctggtggtggtggtgctgccctcgttcggcgagcgctacctgtcgtcggtgctgttccagcagctgcgcgacgaggcgtccaagatgaccttcgagccctccgcctga

SEQ ID NO: 327 - protein, 359 aa, Chlamydomonas reinhardtii
MQLQQKALRLQSTFPTRVSRVALVPKAVAAPEKAAVKMNIATDVTELIGKTPMVYLNKVATGTHAKIAAKLEIMEPCCSVKDRIGYSMISSAEKEGLITPGKTVLVEPTSGNTGIGLAFIAAARGYKLILTMPASMSLERRILLRAFGAELVLTDPAKGMKGAVAKAEEILASTPDAFMLQQFQNPNNPKVHYETTGPEIWSATDGKVDILVSGVGTGGTITGTGRYLREKKSDVQLVAVEPAESPVLSGGKPGPHKIQGIGAGFVPAVLDTALISEVVQVSSDDAIDMARRLALEEGLMVGISSGAAVQAAIKVASRPENEGKLVVVVLPSFGERYLSSVLFQQLRDEASKMTFEPSA

SEQ ID NO: 328 - DNA, 1059 bp, Chlamydomonas reinhardtii
  CDS (1)..(1059)
atgctttgcggttgcgggggcgcgaaacaggtttctcgagttgccctggtccccaaggccgtcgctgctcccgagaaggctgctgttaagatgaacatcgccaccgatgtcaccgagctgattggcaagacccctatggtctacctgaacaaggtggccacgggcacgcacgccaagatcgccgccaagctggagatcatggagccctgctgctccgttaaggacaggatcggctacagcatgatctcgagcgcggagaaggagggcctcatcaccccgggcaagactgtcctggtggagcccacctcgggtaacaccggcatcggtctggccttcatcgccgccgcccgcggctacaagctcatcctgaccatgcccgcctccatgtccctggagcgccgcatcctgctgcgtgccttcggcgccgagctggtgctgactgaccccgccaagggcatgaagggcgccgtggccaaggccgaggagatcctggcctccacgccggacgccttcatgctgcagcagttccagaaccccaacaaccccaaggtgcactacgagaccaccggccccgagatctggagcgccaccgacggcaaggtcgacatcctggtgtcgggcgtgggcaccggcggcaccatcaccggcaccggccgctacctgcgcgagaagaagtcggacgtgcagctggtggctgtggagccggccgagagccccgtgctcagcggcggcaagcccggcccccacaagatccagggcatcggcgccggctttgtgcccgcggtgctggacaccgcgctgatcagcgaggtggtgcaggtgtccagtgacgacgccatcgacatggctcgccgcctggcgctggaggagggcctcatggtgggcatcagctcgggcgccgcggtgcaggccgccatcaaggtggccagccgccccgagaacgagggcaagctggtggtggtggtgctgccctcgttcggcgagcgctacctgtcgtcggtgctgttccagcagctgcgcgacgaggcgtccaagatgaccttcgagccctccgcctga

SEQ ID NO: 329 - protein, 352 aa, Chlamydomonas reinhardtii
MLCGCGGAKQVSRVALVPKAVAAPEKAAVKMNIATDVTELIGKTPMVYLNKVATGTHAKIAAKLEIMEPCCSVKDRIGYSMISSAEKEGLITPGKTVLVEPTSGNTGIGLAFIAAARGYKLILTMPASMSLERRILLRAFGAELVLTDPAKGMKGAVAKAEEILASTPDAFMLQQFQNPNNPKVHYETTGPEIWSATDGKVDILVSGVGTGGTITGTGRYLREKKSDVQLVAVEPAESPVLSGGKPGPHKIQGIGAGFVPAVLDTALISEVVQVSSDDAIDMARRLALEEGLMVGISSGAAVQAAIKVASRPENEGKLVVVVLPSFGERYLSSVLFQQLRDEASKMTFEPSA

SEQ ID NO: 330 - DNA, 1245 bp, Chlamydomonas reinhardtii
  CDS (1)..(1245)
atgcccgtcgccgcgtttggctcccgcatacaaagccatgcttcggcaggaacgtcctcactgaggcactgcagcgattgtatagtacctcttcgactgagccctgtgactgcggctgggcggtgtcgcgggtccgtgacacggacggtgccagtgcgggcgcaggctcaggcgacgcaggctgcgacgccgtcgatcgccgtcagcgttcctgacccgcacgtcggcatccagccggatgcaacacgccttgtgggcaacacgccgatggttttcctcaactcggtcaccagggggtgtggcgcgcgcatcgctgcaaagctggagagctttgagccctgctgcagtgtcaaggaccgcattgcgctcaacatgattgagcgggcggagcaggctggtcagatcagcccaggcgtcaccaccctgatcgagcccaccagcggcaacacgggtgtggcgctggcctacgtggccgccgccaagggctaccgcctggcgctcaccatgcccgagaccatgtccatcgagcgccgcgtgctgctcaaggcctttggcgccgagctggtgctcacgcccggccgcctgggaatgaccggcgccatccgcaaggccgaggagatggtgcgctccacgcccaacgccttcatgctgcagcagttcgacaacccagccaacccggaggtgcacctgaagaccacgggccccgagatctggcgtgacacggcgggcaacatcgacatgttcgtggcgggcgtgggcacgggcggcaccatctcgggggtgggacagtacctgaaggagcagaagcccggtgtgcaggttgtggctgtggagccggctgagagcccggtcatcagcggcggcgcgcccggctaccaccagatccagggcattggcgccggcttcgtgcccaagaacctgcgggtggacctgctggacgaggtggtgaagatcaacagcaatgaggccattgaaatggcccggcggctggcggtggaggagggactgctatgcggcatctcgtcgggtgccgcggtggctgccgccatccgcatcgccaagcggcctgagaaccgcgacaagctcatcgtgacggtgctgcccagctttggcgagcgctacctgtccacggtgctgttcaacacgctgtggtctgtggacgccgaggaggaggtgtccatgcccgactcgtggcgcatggcgtcaggcgcggagcggcccgcaactcgcgagccgcgcctgtag

SEQ ID NO: 331 - protein, 414 aa, Chlamydomonas reinhardtii
MPVAAFGSRIQSHASAGTSSLRHCSDCIVPLRLSPVTAAGRCRGSVTRTVPVRAQAQATQAATPSIAVSVPDPHVGIQPDATRLVGNTPMVFLNSVTRGCGARIAAKLESFEPCCSVKDRIALNMIERAEQAGQISPGVTTLIEPTSGNTGVALAYVAAAKGYRLALTMPETMSIERRVLLKAFGAELVLTPGRLGMTGAIRKAEEMVRSTPNAFMLQQFDNPANPEVHLKTTGPEIWRDTAGNIDMFVAGVGTGGTISGVGQYLKEQKPGVQVVAVEPAESPVISGGAPGYHQIQGIGAGFVPKNLRVDLLDEVVKINSNEAIEMARRLAVEEGLLCGISSGAAVAAAIRIAKRPENRDKLIVTVLPSFGERYLSTVLFNTLWSVDAEEEVSMPDSWRMASGAERPATREPRL

SEQ ID NO: 332 - DNA, 1149 bp, Chlamydomonas reinhardtii
  CDS (1)..(1149)
atgcaggggcgggcctctccgatggtcggcgcggtgctggcacttgcgcttgctgcggggactggtgcagccctctgttggtggctgcttgagccacgaaagcgtcaaacaggagggacagtccggcagggagtgctggaccttattgggaacacgcccctggtgcgggtcgccagcctatcggaggagaccgggtgcgagatctgggtcaaggcagagatgctgaacccaggaggcagcgtgaaggatcgggtggcgctgcagattgtgtctgaggcgttggcggacggtcggttgcggcccggagggctcattacggagggcacagcgggcagcaccggcgtgtcactagccatggtggcggcggcgtacggctgccgctgctccatcaccatgccggacgatgcggccatcgagaaggccaacatgatccaggcttacggcgcctccgtgcggcgcgtgcggcccgtgtccattgtgcacccggagcaccccgtcaacgtggcacggcgggaggcggcgtcaacgccgggggccctgttcgcagaccagttcgagaacgaggccaacttccgcgcacacctcaagacgggggaggaaatatggcaacagacgcaggggcgcgtgcatgccttcgtgtcgggcgcgggcacgggcggcaccgttgccggcgtgtccaccgcactcaaggcccgcaaccctcgtgtacgggtgttcctggtggacccccctggcagctccctgttcaacaaggtgaagcgtggtgtcatgtacacgtcggaggaggcggagggcaagcggcttaagaacccgttcgacaccatcacagagggcatcggcatcaaccgtcttactgccaacttcaaccgcgccctaatcgatgacgcgttccggggcacggacagggaggctgtggagatggcggcgtacctgctgcggaacgagggcctgtgggtgggctcctcagccgccatgaattgcgtcggcgctgtcaaggcggctagggcgatgggacccggtcacaccatcgtgacgctgctgtgcgacggtggccatagacatctgtccaagttccacagcaaggagtacctggagagcatggacttggcgcctcgcgaaacggatcgctcgcttgccttcgtctcctaa

SEQ ID NO: 333 - protein, 382 aa, Chlamydomonas reinhardtii
MQGRASPMVGAVLALALAAGTGAALCWWLLEPRKRQTGGTVRQGVLDLIGNTPLVRVASLSEETGCEIWVKAEMLNPGGSVKDRVALQIVSEALADGRLRPGGLITEGTAGSTGVSLAMVAAAYGCRCSITMPDDAAIEKANMIQAYGASVRRVRPVSIVHPEHPVNVARREAASTPGALFADQFENEANFRAHLKTGEEIWQQTQGRVHAFVSGAGTGGTVAGVSTALKARNPRVRVFLVDPPGSSLFNKVKRGVMYTSEEAEGKRLKNPFDTITEGIGINRLTANFNRALIDDAFRGTDREAVEMAAYLLRNEGLWVGSSAAMNCVGAVKAARAMGPGHTIVTLLCDGGHRHLSKFHSKEYLESMDLAPRETDRSLAFVS

SEQ ID NO: 334 - DNA, 1164 bp, Chlamydomonas reinhardtii
  CDS (1)..(1164)
atgcagtcgcttgccaagcaactttctgcgacaccgcgcaaggcgggtcgcccgcagctgtgcgcgcgggagcggtgcgcgcgggtcgtgcgtgcacaggcggcagctgccgccgctgctgccgccaacagcgatgagcccaagtacgtcaaaaacgacaagatctgcaaggacgttaccgaggttatcggcaacacgcccatggtctacctgaaccgcgtcacccggggctgtgtggccaaggtggcggccaagctggagatcatgcagccctgcagcagcgtcaaggaccgcatcggccgcaacatgatcgaggacgcggagaagcgcggcatgatcaagcccggcgtcaccaccctggtggagcccaccagcggcaacaccggcatcggcctggccttcaccgccgccgcgcgcggctacaagctcatcctcaccatgcccgcctccatgtctctggagcgccgcgtgctgctgcgcgccttcggggcggagctggtgctcacggaccccgccaagggcatgcgcggcgccgtggagaagtgcaacgagattgcggccaagacgcccaactcctacatcctgcagcagttcgagaaccccgccaaccccgagatccaccgcctgaccacgggccccgagatctggcgcgacacggccggcaccgtagacatcttggtggcgggcgtgggcaccggcggcaccgtgaccggcaccggcgagttcctcaagtccaagaagccgagcctgcaggtgatcgccgtggagccgtccgagagccccgtgctcagcggcggcaagcccggcccccacaagatccagggcattggcgccggctttgtgcccgccatcctcaacaccaccgtgtatgacgaggtcatcaagatccccagcgacgacgcggtgcgcatggccagccgcctggcggtggaggagggcctgttctgcggcatcagctccggagccgcggtgttggcggcggtgcaggtggcggcgcgccccgagaacgccggcaagctggtggcggtggtgctgccgtccttcggcgagcgctacctgtcctcggtgctgttcaacgacctgcggttggagtgcgagcagctcaagcaggacgagcgggtcaaggtggtggacgctgcgggccgcgagcgctacgtgccgtga

SEQ ID NO: 335 - protein, 387 aa, Chlamydomonas reinhardtii
MQSLAKQLSATPRKAGRPQLCARERCARVVRAQAAAAAAAAANSDEPKYVKNDKICKDVTEVIGNTPMVYLNRVTRGCVAKVAAKLEIMQPCSSVKDRIGRNMIEDAEKRGMIKPGVTTLVEPTSGNTGIGLAFTAAARGYKLILTMPASMSLERRVLLRAFGAELVLTDPAKGMRGAVEKCNEIAAKTPNSYILQQFENPANPEIHRLTTGPEIWRDTAGTVDILVAGVGTGGTVTGTGEFLKSKKPSLQVIAVEPSESPVLSGGKPGPHKIQGIGAGFVPAILNTTVYDEVIKIPSDDAVRMASRLAVEEGLFCGISSGAAVLAAVQVAARPENAGKLVAVVLPSFGERYLSSVLFNDLRLECEQLKQDERVKVVDAAGRERYVP

SEQ ID NO: 336 - DNA, 1047 bp, Physcomitrella patens subsp. patens
  CDS (1)..(1047)
atgaggaccggacccaacgtggtggagagagccaagaggacgagtgtggtcagccaggccgtctccaccgagaaggagctggagttgaacatcgccgatgatgttacccagttgattggtaaaacgcctatggtatacctcaatacagtggtggaaggatgcaccgccaatattgcggccaagttggagataatggagccctgttgcagtgttaaggataggattggttttagcatgattactgatgcggagaataagggtgcaattactcccggaaagagcattcttgttgagccaaccagtgggaacaccggtattggtttggctttcattgcggctgccaaaggttacaagcttatccttaccatgcctgcatccatgagtttggagcggcgcattctgttgaaagcttttggagcggagcttgtccttaccgacccagctaagggaatgaaaggcgctgtccaaaaagcagaagaaattgtgaagaaaactcccaactcatacatgctccaacaattcgagaacccagcaaatcctaaggttcattttgagactactggaccagagatttgggaagatacagccggaaaaattgacattcttgttgctggcattggtaccggtggaactgtaactggagctggtcgttacttgaaaagcaagaatcccaacgttaagattattggagttgagccaagcgaaagtagtgtcctttcaggggggaagccaggacctcacaagattcaggggattggagcagggtttattccgggtattcttgatgtggagattctagatgaaatcatccaggtatctagtaacgatgctgtggagatggctaagcagcttgccctgaaggaaggtttgctggttggaatttcctcaggagctgctacagccgcagctgtcgaggtggccaagaggccagaaaatgccggaaaattgattgcggtgattcttcccagcttcggagaacggtatttgtcgtctgtgctgttccaatccatccgggaagaggctgaggccatgcagccagagatgtag

SEQ ID NO: 337 - protein, 348 aa, Physcomitrella patens subsp. patens
MRTGPNVVERAKRTSVVSQAVSTEKELELNIADDVTQLIGKTPMVYLNTVVEGCTANIAAKLEIMEPCCSVKDRIGFSMITDAENKGAITPGKSILVEPTSGNTGIGLAFIAAAKGYKLILTMPASMSLERRILLKAFGAELVLTDPAKGMKGAVQKAEEIVKKTPNSYMLQQFENPANPKVHFETTGPEIWEDTAGKIDILVAGIGTGGTVTGAGRYLKSKNPNVKIIGVEPSESSVLSGGKPGPHKIQGIGAGFIPGILDVEILDEIIQVSSNDAVEMAKQLALKEGLLVGISSGAATAAAVEVAKRPENAGKLIAVILPSFGERYLSSVLFQSIREEAEAMQPEM

SEQ ID NO: 338 - DNA, 1191 bp, Physcomitrella patens subsp. patens
  CDS (1)..(1191)
atggcggctctcatgcaagcgagcaatgtggccgtgggatgcgttgctgcgcctcaagttgtgaaggccggggactctacggccagaagggtgaagacggcggccgctttcaagtcagtgatggctggtggtcagttgaagactacgagaacgggacttagcactgtggacaggacaaggagagtgagtatcgtcagtcaggctgtgtctgtggagaaggagctggaaatgaacattgcggatgatgttactcagttgattggaaaaacacctatggtttatctcaatacagtggtggacggttgtgtcgccaacattgcggccaagttggagatcatggagccttgctgcagtgtcaaggataggattggattcagcatgatcactgacgcagagagcaagggtgcgattactccaggaaagagcatccttgtggagccgaccagtggcaacaccggcattggcttggctttcatcgctgctgccaaagggtacaagctcatcctcactatgcctgcatcaatgagtttggagcgacgtattctattgagggccttcggcgcggaactcattcttaccgacccagccaagggaatgaaaggcgctgttcagaaggcggaagaaattgtgaagaaaactcccaattcgtacatgctccaacaatttgagaatccagctaacccgaaggtgcattttgagaccaccgggccagagatctgggaagacacggctggtaaggttgatattctcgttgctggtattggtactggcggaactgtaactggagccggtcgcttcttgaaaagccaaaaccctggtgtgaaagttattggagttgagccaactgagagcagtgtactttctggaggcaagccaggacctcacaagattcagggtattggagcagggttcattcctggcattcttgacgtggagatccttgacgaaattatccagatttccagcaatgatgctgtggaaatggctaagcaacttgctttgaaggagggtttgctggtgggaatctcctcaggagctgctacagctgctgcaatcgaggttgccaagagaccagaaaataagggcaaattaattgctgtggttcttcctagctttggggagcggtatttgtcttcagttctgtttcaatccatccgggaagaagccgaggcgatgaagccagagacgtag

SEQ ID NO: 339 - protein, 396 aa, Physcomitrella patens subsp. patens
MAALMQASNVAVGCVAAPQVVKAGDSTARRVKTAAAFKSVMAGGQLKTTRTGLSTVDRTRRVSIVSQAVSVEKELEMNIADDVTQLIGKTPMVYLNTVVDGCVANIAAKLEIMEPCCSVKDRIGFSMITDAESKGAITPGKSILVEPTSGNTGIGLAFIAAAKGYKLILTMPASMSLERRILLRAFGAELILTDPAKGMKGAVQKAEEIVKKTPNSYMLQQFENPANPKVHFETTGPEIWEDTAGKVDILVAGIGTGGTVTGAGRFLKSQNPGVKVIGVEPTESSVLSGGKPGPHKIQGIGAGFIPGILDVEILDEIIQISSNDAVEMAKQLALKEGLLVGISSGAATAAAIEVAKRPENKGKLIAVVLPSFGERYLSSVLFQSIREEAEAMKPET

SEQ ID NO: 340 - DNA, 945 bp, Physcomitrella patens subsp. patens
  CDS (1)..(945)
atggtttatctgaacagggtttcctccaattgttgtgccaaaattgcttgcaaattggaggctcttgggccctgtaggagtgtgaaagatcgaatcgcgttggccatggttgaagacgcagagagacggggtttaatcaagcctggagtcagtacattgatagaaccaacgagtgggaatacgggcattggccttgcttttgtctgtgcgtccaaaggctacaagcttatccttacgatgccggaggatcagagcatggagcgtcgcatcctcgtgcaagcattcggaggccaggttgtgacgacaccagctaagagctcaatgacaggcgctatactgaaagctgaagcgttatgcagagagattcccaatgcttacatccttcagcaatttaggaatccagccaatcctcgtgtgcattttgaaacaacaggaccagaaatttggcgagacacgtgtggcaaggtagacttccttatttccggggtgggtacaggtggcactatcactggttgcggagagtatcttaaaagtaaaaacgaccagatcaagatcgttggagtagagcctgcggagtctgctgttctttcaggtgggcaacccgggtaccaccaaatccaaggaatcggtgcaggtttcattcctgcagtccttaatgtcaacattcttgatgaagtttttgaggtgcttagccgagacgcaatcctcatggcgaggaggctacatcttgaggagggtctgatggtgggtatctcatcgggcgctgctgcttttgcttcagttcaaatcggccaacgacctgaaaacgagggcaagcttttagtgtgcgtgctgccaagttttggagaacgttacctatcaacgcctctctttcagcatattcggaaggctaacatggaggatgataaaacattcaacacagcttgcctgctgaagacaacatga

SEQ ID NO: 341 - protein, 314 aa, Physcomitrella patens subsp. patens
MVYLNRVSSNCCAKIACKLEALGPCRSVKDRIALAMVEDAERRGLIKPGVSTLIEPTSGNTGIGLAFVCASKGYKLILTMPEDQSMERRILVQAFGGQVVTTPAKSSMTGAILKAEALCREIPNAYILQQFRNPANPRVHFETTGPEIWRDTCGKVDFLISGVGTGGTITGCGEYLKSKNDQIKIVGVEPAESAVLSGGQPGYHQIQGIGAGFIPAVLNVNILDEVFEVLSRDAILMARRLHLEEGLMVGISSGAAAFASVQIGQRPENEGKLLVCVLPSFGERYLSTPLFQHIRKANMEDDKTFNTACLLKTT

SEQ ID NO: 342 - DNA, 1338 bp, Gibberella zeae PH-1
  CDS (1)..(1338)
atggcgctcagcgaccatcccaaagcttacggctctgctgccgtcgcctttgctttcacaaccggtatcctcgtcactctgggcttcaaggacttttatccagatcttgagcgcaggttccagcgcaagaggcgcgcaaataccggcggcgggagaagatctagtgtcttctggggtgaccccgtggaactcgaggaccatgaatctctaccttcgtcgccaactttctacgatggcgcacgaaatggcttggctgatgggatagaagccaccatcggaaacactcctcttatcaaagtacaatctttatctgaagctacagggcggactatcatggcaaaggctgagttccttaacggtgctggaaactcccccaaggatcgtgtggcgcttaacatgattcgtgaggcagaagctcaaggtcttctcacaccacacaagggcgatactatctatgaaggaacagttggaagtacaggtatctctctggcaactcttgcgcgcgccatgggctacagggctcatatctgcatgcccagcgacatggctcttgagaaatccgacctactacttcatctcggcgcaacggtcgagcgagttacgcctgcgcctattaccagtcccgatcacttcgtcaaccttgcgcgacgaagggcggaggaacacgctagcaaggccaacgatggcagcaagggattctttgcgaatcagttcgagtccgaagctaactggaaagcgcacttcaacaccacgggccctgagatttggggacagacgaacggtgaactggatgcttttgtggcgggtgcaggcacaggaggaacagtatcaggcgtcgcaaagtatctcaaagaagaaaaggaaaagtcagatatcaaagtggtcctcgccgatcctcagggcagcggtctctacaacaaggttcgccatggtgtcatgtactcgtcgacagagcgcgaaggcactcgtcgcagacagcaggttgacaccatggtcgagggtattggcattacacgcttaactgagaactttgaagcaggccgtgaactcattgacgatgctgtgcgggtgacagatgagcaagcctgtcgtatggctcgctggctagttgagcacgacggtatctttgttggcagcagcagttccgtcaactgtgtcgccgccgtcgaaacagctatgagactgcccaagggaagccgtgtcgtgacaattctttgcgactctggaacaaggcatctcagcaagttctggaagcatatcaaggaaatgggaattgaaggcgaggaggaggcgactgatctgtttaccgagctaggcatacccggccacaaggcatga

SEQ ID NO: 343 - protein, 445 aa, Gibberella zeae PH-1
MALSDHPKAYGSAAVAFAFTTGILVTLGFKDFYPDLERRFQRKRRANTGGGRRSSVFWGDPVELEDHESLPSSPTFYDGARNGLADGIEATIGNTPLIKVQSLSEATGRTIMAKAEFLNGAGNSPKDRVALNMIREAEAQGLLTPHKGDTIYEGTVGSTGISLATLARAMGYRAHICMPSDMALEKSDLLLHLGATVERVTPAPITSPDHFVNLARRRAEEHASKANDGSKGFFANQFESEANWKAHFNTTGPEIWGQTNGELDAFVAGAGTGGTVSGVAKYLKEEKEKSDIKVVLADPQGSGLYNKVRHGVMYSSTEREGTRRRQQVDTMVEGIGITRLTENFEAGRELIDDAVRVTDEQACRMARWLVEHDGIFVGSSSSVNCVAAVETAMRLPKGSRVVTILCDSGTRHLSKFWKHIKEMGIEGEEEATDLFTELGIPGHKA

SEQ ID NO: 344 - DNA, 1554 bp, Gibberella zeae PH-1
  CDS (1)..(1554)
atggcgtctcaggttcctcacgtcttgcctcgcgctgctacagtccattccgcgactgaacttatcggcaacacccctcttgtccgactcaacaagatcccccagtcgctgggtatcgagtgcgatgtctacgtcaagccagagctcttcagcgctggtggtagcgtcaaggatagaatcgctctgcgcatgatcgaagaggccgagaagagcggccgcatcaagcctggtgatactttgatcgagcccaccagtggaaacactggtattggtttggctctcgtcggtgccatcaagggctacaagaccatcatcaccctccctgaaaagatgtcggccgaaaaggtttccgtcctccgtgcccttggcgccaccatcatccgtacccctacacaggctgcttgggacgcccccgagtctcacatcggtgttgctcgacgtctcgaaaaggagcttcccaacgcccacatcctcgaccagtacagcaacaaggacaaccccaacgcccatgagttcggtaccgcccaggagatctgggagcagactggtggtaaaatcactgctctcgttgctggcgctggtactggtggtaccatcactggtattgctcgcggtctcaagaagcacaaccaggacatcaaggttatcgctgccgatccccatggcagtatccttgctctgcctgagctcctgaaccaagagcacatcaacgaaggttacaaggtggagggtattggatacgactttatccccgatgtcctcgaccagcacatcgtcgacaagtggtacaagaccgatgaccgagagtccttccaccttgctcgccgactcatttccgaggagggtcttctcgtcggtggcagctctggttccgccatggctgctatgcttctcgccgtcaaggagtacggtttcaagaagggtgatgtcgtcgttgttgtcctgcccgacagcatccgaagctacctctccaagtttgccgatgacgactggctcgccgccaacaacctcctccccgtcaacggagtcgagtccaccgtcaacggcaacggcgacaagaagaactctgacccctacgagggcgccaccattgctgctctgcgcctcaagcccgtcacatccgtcggtgccacctccacctgctccgaggccatcgagaccatgcgcgacaagggtttcgaccagctccccgtcctctccgccagcggaaccaagctcgtcggtcttgttaccctcggtaacctcctgagctacatctccagcggccgcgccacgggccagagctccgtgtcagacgtcatgttcgatttcgcccgtctcgacgagatcgtcactgacccccgcgagttcgcctcccccatcaaccccggcaagcgcaggcagtttgtcgagatcacaaaggacacacccctcaccaccctcagcaagttcttcgagtggaacagtgctgctgttgtaaccgaaaagtcgggcgactccaagtctctgtccaagcccattgctgtcgtcacaaaggttgacctcctcacatggatgatcaacaagaagttgtag

SEQ ID NO: 345 - protein, 517 aa, Gibberella zeae PH-1
MASQVPHVLPRAATVHSATELIGNTPLVRLNKIPQSLGIECDVYVKPELFSAGGSVKDRIALRMIEEAEKSGRIKPGDTLIEPTSGNTGIGLALVGAIKGYKTIITLPEKMSAEKVSVLRALGATIIRTPTQAAWDAPESHIGVARRLEKELPNAHILDQYSNKDNPNAHEFGTAQEIWEQTGGKITALVAGAGTGGTITGIARGLKKHNQDIKVIAADPHGSILALPELLNQEHINEGYKVEGIGYDFIPDVLDQHIVDKWYKTDDRESFHLARRLISEEGLLVGGSSGSAMAAMLLAVKEYGFKKGDVVVVVLPDSIRSYLSKFADDDWLAANNLLPVNGVESTVNGNGDKKNSDPYEGATIAALRLKPVTSVGATSTCSEAIETMRDKGFDQLPVLSASGTKLVGLVTLGNLLSYISSGRATGQSSVSDVMFDFARLDEIVTDPREFASPINPGKRRQFVEITKDTPLTTLSKFFEWNSAAVVTEKSGDSKSLSKPIAVVTKVDLLTWMINKKL

SEQ ID NO: 346 - DNA, 1116 bp, Gibberella zeae PH-1
  CDS (1)..(1116)
atgttccgtcccaccgctagaaggctcgccgcctctgcggccaaagctgctgcagctcctacttcccatactctaaatgtcgctcgagctcaaggtgtctcccgaggtttgactggagccatcggaaacacacctctcatccgtcttaaccgtctctccgacgaaaccggctgcgaggttttgggcaaggccgagttcatgaaccctggtggctctgtcaaggaccgtgcagctctctatgtggtcaaggacgccgaagagcgtgggcttctcaagcccggtggtaccgtcgtcgaaggcaccgcaggaaatactggtattggtctcgcccacgtctgccggtctcgaggctacaagcttgtcatctacatgcccaacacccagtctcaaggcaagatcgatctcctgcgactcctcggcgctgaggtctaccctgttccagctgtcgctttcgacaaccccgagaactacaatcaccaggcccgtagacacgccgagcgattagacaatgccgtttggacgaaccagttcgataacacggctaaccgccgtgcgcacatcgagacgacaggtcctgagatctgggcgcaaacagatggaaaggttgatgccttcacatgtgctactggcaccgctggtacattagctggcattacaaggtatctgaaggatgtctccaacggccgggtcaagagcttcctcgccgatcctcctggcagtgtcctccactcctacgtatcctccggtggcaagcttaacgagcgcaccggctccagtattactgagggaatcggacagggtcgcatcactgacaacctccaaccagatattggcttggtggatggttcgcttcacatttcggacgagaagagcatcaagatggtctaccgctgcttggatgaggaaggtctctaccttggagccagctcttcccttaacgttgttgcagctaaggaggttgccgagaagctgggcaagggccacaccgttgttacggtcctctgtgacggcgcttacagatacgccgatagattgttctctcgcaagtggttgactgacaagaaacttcttggagctatccccaagcacttggagaagtacatcgttctaccatag

SEQ ID NO: 347 - protein, 371 aa, Gibberella zeae PH-1
MFRPTARRLAASAAKAAAAPTSHTLNVARAQGVSRGLTGAIGNTPLIRLNRLSDETGCEVLGKAEFMNPGGSVKDRAALYVVKDAEERGLLKPGGTVVEGTAGNTGIGLAHVCRSRGYKLVIYMPNTQSQGKIDLLRLLGAEVYPVPAVAFDNPENYNHQARRHAERLDNAVWTNQFDNTANRRAHIETTGPEIWAQTDGKVDAFTCATGTAGTLAGITRYLKDVSNGRVKSFLADPPGSVLHSYVSSGGKLNERTGSSITEGIGQGRITDNLQPDIGLVDGSLHISDEKSIKMVYRCLDEEGLYLGASSSLNVVAAKEVAEKLGKGHTVVTVLCDGAYRYADRLFSRKWLTDKKLLGAIPKHLEKYIVLP

SEQ ID NO: 348 - DNA, 1476 bp, Debaryomyces hansenii CBS767
  CDS (1)..(1476)
atgcctgtccctcccattgctgaagatgctttagatttaattggtaacacaccattaatcaagttgaatagaattccacaaagctttggtattaaagccaaggtttatgctaaggttgaattattcaatgcaggtggttctattaaggatagaatttccaaaaacatggttttagaagccgaaaagcaaggtagaatcaagccaggatataccttgatcgaacctacttcgggtaacaccggtattggtttggccttggtaggtgccgttagagggtacagaaccattattacattaccagaaaagatgtccaacgaaaaagtttcagttttgaaagctttaggtgctgaaattataagaactccaaccgaagcagcctgggatgccccagaatcgcatattggggtcgccagaaaattggaaaaggagatccctaattctgttatcttagaccagtattcgaatgaggctaaccctaatgctcattattacggtacaggttatgaaatttgggagcaaactaatggtaaggttacccacttaatagctggtgcgggtactggtggtactattaccggtatttccaagtacttgaaggaaaagaattcaaatattaaaattattggtgccgatccaaagggttctattttagctgtaccagaatctttaaatgatacaagtgaaggttacttagttgaaggtattggttacgactttatccctgatgttttaaagagagacagggttgactcctggatcaaaaccgatgattctgaatctttcaaattagcaagaagaattattagagaagaaggtattttagttggtggttcgtcgggttctgcattacaagccgcattagaagttgccaaggatttaactgaagacgataccgttgttgtcgttttccctgattcaatcagatcttacttaaccaagtttgccgatgatgaatggatgactactaacgggttccctatagaagaaaatgaaagtgcatcccacaaatctgatgaagtcttgaatacgacaactatcaaggatttggtttctggtaaggcaccagttgttactgttacattatctgatactgttggcaaaacttttgatttattacaaactaatggcttcgatcaattaccagttttgaacaactcaggtaaattagttggattaatcactttatctaagattttgaaatctctttctaccaagaaggtccaaatcactaattctatttcgtcaattattattgatttcagaaaattagctgattttgaaaaatccttcacaattaccaagaagtctggtttcactaagagaagttacgaaccaattacaatggatacatcgttagccttattaaacaaattcttcgaaaccaactccaacgccattgtgactgatgcggattacaagccagtccaaattgttacgaaggttgatttaatctcgtacttgacaaaaatcttataa

SEQ ID NO: 349 - protein, 491 aa, Debaryomyces hansenii CBS767
MPVPPIAEDALDLIGNTPLIKLNRIPQSFGIKAKVYAKVELFNAGGSIKDRISKNMVLEAEKQGRIKPGYTLIEPTSGNTGIGLALVGAVRGYRTIITLPEKMSNEKVSVLKALGAEIIRTPTEAAWDAPESHIGVARKLEKEIPNSVILDQYSNEANPNAHYYGTGYEIWEQTNGKVTHLIAGAGTGGTITGISKYLKEKNSNIKIIGADPKGSILAVPESLNDTSEGYLVEGIGYDFIPDVLKRDRVDSWIKTDDSESFKLARRIIREEGILVGGSSGSALQAALEVAKDLTEDDTVVVVFPDSIRSYLTKFADDEWMTTNGFPIEENESASHKSDEVLNTTTIKDLVSGKAPVVTVTLSDTVGKTFDLLQTNGFDQLPVLNNSGKLVGLITLSKILKSLSTKKVQITNSISSIIIDFRKLADFEKSFTITKKSGFTKRSYEPITMDTSLALLNKFFETNSNAIVTDADYKPVQIVTKVDLISYLTKIL

SEQ ID NO: 350 - DNA, 1287 bp, Aspergillus nidulans FGSC A4
  CDS (1)..(1287)
atgccagatcattcgcatatctacattggctctgccttcgtggcaggagttgtcctgactatagctttcaaggacctattctaccccgagatcgaggaacgcatcagagattatcgcgctcggcattcctcaaaatcataccagaacgcctcagtggattcgttagctgtgaggcatgggcctccagctattgtagatgggatcgagggctgtattgggaatacccctctacttcgaatcaaatccctgtccgaagcgaccgggtgcgaaatcctagcgaaggctgaatttctgaacggcgccggtcagagctcaaaggatcgagtagctctgagcatgatcgaattggctgaggagaggggattgatgactccgcattcaggagatacgatctacgaaggaacatctgggtcgacaggaatctcattggccacgctagctagggcaaagggctatcttgctcatatttgtatgccatcagaccaggctatcgaaaagtcgaacttactcctcaaactaggcgcaatagttgaccgcgtgcctccagcacctatagttgagaaggacaacttcgttaaccgggcaagagcacttgcgcaagcacataccaattcgacagcgtcagaatcatcagttggtacagcctcccaaaggggaaggggttactttgcggaccaattcgagaacgaggcgaactggcgagcccactacaatggcaccggcccggagatctacgcccagtgcaatgggtcccttgacgcctttgttgcaggggccgggaccggaggcacaatctctggcgtggctctatatctcaagccgaggatccccaacatgactgtggtagtagccgatccccaaggtagtgggctctataatcgggttcgttacggagttatgttcgacactaaggagaaggaagggacacgtcgtcggaggcaggttgatactatcgtggaaggcattgggatcaaccgcgttaccgcaaatttcgaggcgggacgggaacttgttgacgacgctgttagggttacggacgcgcaggcactggcaatggctagatggcttgttgaaaaggacggcatctttgcggggagtagcagtgctgtcaactgtttcgccgccgtcaaaactgctttgaaactggggcccggccacagaatcgtcacaatgctgtctgattcaggctcaagacatctctcaaggttctgggcaaaagctgggaatgtgggcggcgctgtggacacaaagttggaggacgtcctgaatgcgaaagaagaccaatag

SEQ ID NO: 351 - protein, 428 aa, Aspergillus nidulans FGSC A4
MPDHSHIYIGSAFVAGVVLTIAFKDLFYPEIEERIRDYRARHSSKSYQNASVDSLAVRHGPPAIVDGIEGCIGNTPLLRIKSLSEATGCEILAKAEFLNGAGQSSKDRVALSMIELAEERGLMTPHSGDTIYEGTSGSTGISLATLARAKGYLAHICMPSDQAIEKSNLLLKLGAIVDRVPPAPIVEKDNFVNRARALAQAHTNSTASESSVGTASQRGRGYFADQFENEANWRAHYNGTGPEIYAQCNGSLDAFVAGAGTGGTISGVALYLKPRIPNMTVVVADPQGSGLYNRVRYGVMFDTKEKEGTRRRRQVDTIVEGIGINRVTANFEAGRELVDDAVRVTDAQALAMARWLVEKDGIFAGSSSAVNCFAAVKTALKLGPGHRIVTMLSDSGSRHLSRFWAKAGNVGGAVDTKLEDVLNAKEDQ

SEQ ID NO: 352 - DNA, 1608 bp, Aspergillus nidulans FGSC A4
  CDS (1)..(1608)
atgtcttccaaaacgacacccaccgtcccgccggtggctctcgattctatcacgcaacatattggcaatactcctcttgtgaggttgaacaaactaccgcagaacctcgggataaatgcgacggtatatgcaaagctagaatacttcaatgcaggcggaagcgtcaaagatcggatagctcttcgcatgattgaggaagccgaacggtcaggccgtatcaagccaggcgacactctgattgaacctaccagtggtaacactggtattgggttagctctcgtcgcggccgtcaaaggctacaagaccatcatcacccttccagagaagatgtctgctgagaaggtttctgttttacgggctcttaacgcgaccatcatccggactcctaatgaagctgcatacgactcgcccgaatcccacatcggcgttgcgaagcgtcttgaaaaggagctaccaaatgcgcacatcctagatcaatatggtaacgaaaacaatccattggctcatgagctcggcactgcgcaagaaatctggagtcagactaaaggacaaattaaggcgatcgttgctggcgcgggtacgggtggcacgattacagggctctcgcgcggcctgaagaagcacaattccaacgttcaagtaattgcggcggatccccaagggtcaatactggctctcccagctgcactaaacgaggagcatgccaatgagccatacaaggtcgaaggtattgggtatgacttcattccacaggtgctagatcagcacgccgtcgacaagtggtacaagacggacgacaaagaatccttccagtatgctcgccgtttaatagctgaggagggccttctcgttggtgggagcagcggaagcgcaatcgcggccctggtaaaggccgctagggacaacatgtttaaagagggtgatgttgtcgttgtgattttgccagacagcatcagaagctacctcacaaagatacagttcgccgacgacgattggcttgccgccaacgatctcctaccttcgttaccgactgaagtcatcctccaatcctccaataagcagactcaaggacaagacgacgcttttgccggtagtaaggttagctcgctccggctcaaaccagtgacaaccgtccactccaacgtcccttgtgagactgccattgaagtcatgcgcgacaaagggttcgatcaacttcccgttctggcaccatcaggcagaaagcttgtcggcctggttacactcggaaacgttctcagtcgattgacgcacaaccgcgcaactggtaggagccccgttgccgacgtaatgtttgatttccgcaccatttccgaggtcgtcaccgatcctcgagacatgggtcttgcgagcttggagcccaatcagaacgggagggatgcccccaaaccacaaaccaggagcaggaaattcgtcgagattactatggatacatctttaagtgtactgaatcgcttttttgagtggaatagtgcggctattgttacggaaagagatgaaggtgggactctaaggcccgtggctgttgtcacgaaagttgatcttcttacctggatgctccatcataagaagaacggcgcatcggaatag

SEQ ID NO: 353 - protein, 535 aa, Aspergillus nidulans FGSC A4
MSSKTTPTVPPVALDSITQHIGNTPLVRLNKLPQNLGINATVYAKLEYFNAGGSVKDRIALRMIEEAERSGRIKPGDTLIEPTSGNTGIGLALVAAVKGYKTIITLPEKMSAEKVSVLRALNATIIRTPNEAAYDSPESHIGVAKRLEKELPNAHILDQYGNENNPLAHELGTAQEIWSQTKGQIKAIVAGAGTGGTITGLSRGLKKHNSNVQVIAADPQGSILALPAALNEEHANEPYKVEGIGYDFIPQVLDQHAVDKWYKTDDKESFQYARRLIAEEGLLVGGSSGSAIAALVKAARDNMFKEGDVVVVILPDSIRSYLTKIQFADDDWLAANDLLPSLPTEVILQSSNKQTQGQDDAFAGSKVSSLRLKPVTTVHSNVPCETAIEVMRDKGFDQLPVLAPSGRKLVGLVTLGNVLSRLTHNRATGRSPVADVMFDFRTISEVVTDPRDMGLASLEPNQNGRDAPKPQTRSRKFVEITMDTSLSVLNRFFEWNSAAIVTERDEGGTLRPVAVVTKVDLLTWMLHHKKNGASE

SEQ ID NO: 354 - DNA, 1491 bp, Candida albicans SC5314
  CDS (1)..(1491): transl_table=12
atgacatctacaaacaaaccaccagccttaaaagaagatattttagaacttattggtaatactccattagtcaaattgaacaaaattccacaatcgttgggaattaaagccaaggtctatgccaaagttgaattattcaatgccggaggatcaattaaagatagaattgccaaaaatatggtattggaagccgaaaaacaaggtaaaatcaaaccaggctatactttgattgaaccaacctcaggtaatactggtattggtttggctttggttggtgccgttcgtggatacagaaccatcattaccttaccagaaaaaatgtcaaacgaaaaagtttctgttttgaaagccttaggtgctgaaatcattagaactccaactgaagctgcatgggactctccagaatctcatattggtgttgctaaaaaattggaaaaagaaataccaaactctattattttggaccaatatggtaacccagccaacccagatgctcattattatggtactggttatgaaatttgggaacaaactgaaggtaaaattactcacttggttgctggtgctggtactggtggtaccatcactggtatttccaaatacttgaaagaaaaaaattctaagattcatgttactggtgctgacccaaaaggttctattttagctgaaccagaatctttaaataattccaccgaaggttacttggttgaaggtattggttatgattttattccagatgtgttgaacagaaaatatgttgatgattggatcaaaacagatgatgctgaatcttttaaattggctagaagaattattagagaagaaggtattttggttggtggttcttctggttctgccttacaagctgctttacaagtagctaaagacttgactgaagacgatactgtcgttgttgttttcccagattccatcagatcttacttgtctaaatttgccgatgacgaatggttaatctccaatggattcgaagttgaagattcaccgggtgctaacaaggctgacgaattcttgaatggtaagactatcaaggatttggttgctggcaaagctccagttgtcactgtcactttatctgacacagttgccaagacttttgatttattgcaatccaatgggtttgatcaattgccagttttgaataactctggaagattagttggtttgatcaccttatccaagatattgaaatctttatccactaaaaagattcaaacgaccaattcaatcagttcgatcatcattgatttcagaaagttggctgattttgaaaaatctttcaccatcactaaaaaatcaggattcactaagagaagttatgaaccaatcaagttggacaccccattagctgctttgaataaattctttgaaaccaattcaaatgctataatcacagatgatgaattgaaaccagttcaaattgttactaaggtcgatttgctttcgtatttgactaaaaacgctagtttttaa

SEQ ID NO: 355 - protein, 496 aa, Candida albicans SC5314
MTSTNKPPALKEDILELIGNTPLVKLNKIPQSLGIKAKVYAKVELFNAGGSIKDRIAKNMVLEAEKQGKIKPGYTLIEPTSGNTGIGLALVGAVRGYRTIITLPEKMSNEKVSVLKALGAEIIRTPTEAAWDSPESHIGVAKKLEKEIPNSIILDQYGNPANPDAHYYGTGYEIWEQTEGKITHLVAGAGTGGTITGISKYLKEKNSKIHVTGADPKGSILAEPESLNNSTEGYLVEGIGYDFIPDVLNRKYVDDWIKTDDAESFKLARRIIREEGILVGGSSGSALQAALQVAKDLTEDDTVVVVFPDSIRSYLSKFADDEWLISNGFEVEDSPGANKADEFLNGKTIKDLVAGKAPVVTVTLSDTVAKTFDLLQSNGFDQLPVLNNSGRLVGLITLSKILKSLSTKKIQTTNSISSIIIDFRKLADFEKSFTITKKSGFTKRSYEPIKLDTPLAALNKFFETNSNAIITDDELKPVQIVTKVDLLSYLTKNASF

SEQ ID NO: 356 - DNA, 1098 bp, Candida albicans SC5314
  CDS (1)..(1098): transl_table=12
atgttgggcagaatagctaaacggtcgatctccattactaccaacacaccactcaaactccccttcatcccattagtcagtgaaacagggtttcctggggcaattggaaacacaccattattgaagttaccaaggatttccgaatcaataaatcgtaacatctatgccaaagcagaatttatgaatcctggtggatcaattaaagaccgtgctgctttgtacattatcaaagatgctgaggaaaaagggttgatcaaaccagggggtacaattgttgaaggaactgctgggaatacgggtattggattagctcacgtctgtcgagctcgtggatacaaatgcatcatttacatgccaaacactcaatcgcaaaacaaaattgaaacattgagattgttgggtgcagaagtccacccggtgccagctgttgcatttaccgatccagaaaactataaccaccaggctaaaagacacgcagaaagattagacaatgccgtatggactaatcagtttgacaacgtggccaatagacaagcccatatagaaactacaggaccagaaatctgggcacagttagacggtaaggttgatgcattcacctgctcaaccggaactggtggaacatttgctggtacaacgagatacttgaaggacatttccaatggcaaagtaaaagcagtgttggctgatcctccaggttcagtattatactcgtatatcaagtctggcggtaaagaaatgattagaggcggatcatcattcacagaagggattggtcaaggtagagttaccgataacttgcaaccagacttggagttggttgacgatgcagtcaagatccccgacgaagattcaatcgccatggtctaccgtttgttagacgaagaaggattgtatctcggtggtactggagcattaaatgtagctgctgcagtagaagtggctaaactgttgcctgaaggcagtaatgtcgttactgtattagctgacctggcccataaatacgccgataggatcttctccaaaaaatggttagcagaaaaaggattatacgatgctattccaccacacttgcaaaagtacgctgtattagattag

SEQ ID NO: 357 - protein, 365 aa, Candida albicans SC5314
MLGRIAKRSISITTNTPLKLPFIPLVSETGFPGAIGNTPLLKLPRISESINRNIYAKAEFMNPGGSIKDRAALYIIKDAEEKGLIKPGGTIVEGTAGNTGIGLAHVCRARGYKCIIYMPNTQSQNKIETLRLLGAEVHPVPAVAFTDPENYNHQAKRHAERLDNAVWTNQFDNVANRQAHIETTGPEIWAQLDGKVDAFTCSTGTGGTFAGTTRYLKDISNGKVKAVLADPPGSVLYSYIKSGGKEMIRGGSSFTEGIGQGRVTDNLQPDLELVDDAVKIPDEDSIAMVYRLLDEEGLYLGGTGALNVAAAVEVAKSLPEGSNVVTVLADSAHKYADRIFSKKWLAEKGLYDAIPPHLQKYAVLD

SEQ ID NO: 358 - DNA, 1146 bp, Ustilago maydis 521
  CDS (1)..(1146)
atggcctcgacacttccaagatccttggtgggcatcgctcggtcgtcggtgcgagctctgcacagctctgttgccactgccgcttccacttcgacgctttcgcccgtcgctgccgcccacatgcggcctgtcaacggtttcgtcggtgcgatcggcaacacgccgctcatccgtctcaacaagatcagcgatgagactggctgcgaggtactcggaaaggccgagttcatggagccaggaggaagtgtcaaggatcgtgctgcactctacgtggtcaaggatgccgaggaacgcggtcttatcaagcctggtggcaccgttgtcgagggcacggcaggcaacaccggtatcggtctagctcacgtctgccgtagcaagggctacaggtgcgtcatctacatgcccaacacgcagtcgcaggagaagatcgacctgttgcgcatgctcggtgccgaagtgcaccctgttcccgccgttgcgtttgacaatccggacaactacaaccaccaggctaaacgtcatgccgaacgcctcgaaaatgcggtctggacgaatcagttcgacaacaccgccaatcgacgcgctcacatcgagactacaggccccgagatctgggatcagatcgacggaaacctcgacggcttcatttgcgccaccggaacaggaggcacactcgccggcatcaccagttacctcaagcaaaagagcaacggcaaagtccagtgctggcttgccgacccacctggctcagtgctccactcgtatatccagaccaagggcaagctcatggaccgcgaaggtggttccatcaccgaaggtattggtcaaggccgagttaccgaaaacctcaagccagacgttgagaagctcgacaactcggtccacgttcctgacgaggagagcatctcgatggtctacgacctgctccacgaggagggtatctacgtcggagcctcgtcggcgctcaatgtggtagctgccaaaaagatggcccaacagctcggtcccaacaagaccatcgtcaccattctctgcgacggtgcgtaccgttaccaggctcgacttttctcgcgcaagtggctcgagtccaagaagctcgataccgccatccccgagcatttgcaaaagtacattgtcttaccatga

SEQ ID NO: 359 - protein, 381 aa, Ustilago maydis 521
MASTLPRSLVGIARSSVRALHSSVATAASTSTLSPVAAAHMRPVNGFVGAIGNTPLIRLNKISDETGCEVLGKAEFMEPGGSVKDRAALYVVKDAEERGLIKPGGTVVEGTAGNTGIGLAHVCRSKGYRCVIYMPNTQSQEKIDLLRMLGAEVHPVPAVAFDNPDNYNHQAKRHAERLENAVWTNQFDNTANRRAHIETTGPEIWDQIDGNLDGFICATGTGGTLAGITSYLKQKSNGKVQCWLADPPGSVLHSYIQTKGKLMDREGGSITEGIGQGRVTENLKPDVEKLDNSVHVPDEESISMVYDLLHEEGIYVGASSALNVVAAKKMAQQLGPNKTIVTILCDGAYRYQARLFSRKWLESKKLDTAIPEHLQKYIVLP

SEQ ID NO: 360 - DNA, 1098 bp, Strongylocentrotus purpuratus
  CDS (1)..(1098)
atggcttcgtctttgcgtaaaatagggcaaaaaatattgttatcccactgcaaaagggattacaatatacttcaacgactactttctaatgatgtccgaaagggttttgttggcatggtcggcaggacaccgctgattcgattgaataaagtcagcgaggagacaggatgtgatattgtggtcaaagctgagtttgcaaatggagggggctccgtaaaagacagagctgccctctttctcattcaacaaggcattgatcaaggacgacttaagtctggtggcactgtggtagaaggaactgcaggaaatacaggcatcggtctagctcatttatgtaacgccatgggtttcaagtgtgtgatctacatgccaaacaatcagagtcaagaaaagattgatatgttgcggctccttggtgccgtagtgtttcccgtccccgttgtacctttcgacgatcccgataattacaaccaccaggcaaggagacatgctgaatcgttagataatgccgtttggacaaaccagtttgacaacacagccaacagacaagctcatatagagaccacaggaccagagatatggcaacagactgagggcaaggtgaatgctgtcacatttggcactggaacaggtggcactttggcaggagttgggatgtacatgaaggagatgagcaaggatgtgaaggtcatcctagctgaccctcagggcagcgtcctctacaactacttcacccatggcaagctggagaggtcaccggggtcatccatcacagagggcataggtcaaggtcgggtcacagataacctcaagggcgcccccattgatgaggccttgtgcattatggacaccgatgctgtcagtatgacgttccgtctcctaaaagatgaagggttctttgttggggcgtcatctggtctaaatgtagtagccgcagtgcaggttgctaagcaactcggacctggacatgtagtagcttcctgcctgtgtgacacaggtcaacgatattatgcaaggctcttcaacagaacttggctcaaagaaaagggtctatttgatagcgtaccagaagagtgccatggcttcctgcattcatga

SEQ ID NO: 361 - protein, 365 aa, Strongylocentrotus purpuratus
MASSLRKIGQKILLSHCKRDYNILQRLLSNDVRKGFVGMVGRTPLIRLNKVSEETGCDIVVKAEFANGGGSVKDRAALFLIQQGIDQGRLKSGGTVVEGTAGNTGIGLAHLCNAMGFKCVIYMPNNQSQEKIDMLRLLGAVVFPVPVVPFDDPDNYNHQARRHAESLDNAVWTNQFDNTANRQAHIETTGPEIWQQTEGKVNAVTFGTGTGGTLAGVGMYMKEMSKDVKVILADPQGSVLYNYFTHGKLERSPGSSITEGIGQGRVTDNLKGAPIDEALCIMDTDAVSMTFRLLKDEGFFVGASSGLNVVAAVQVAKQLGPGHVVASCLCDTGQRYYARLFNRTWLKEKGLFDSVPEECHGFLHS

SEQ ID NO: 362 - DNA, 969 bp, Prochlorococcus marinus str. MIT 9515
  CDS (1)..(969): transl_table=11
atggaaatcgcaagcgatatcacctccttagttggtaacacacctttagttaaattagatcgtattaaagattactgtaagtgtcatactgaaattatagctaaacttgaaagtttcaatccatcagcatctgttaaagatcgcatagcgtattctatgttaaattcagccgaagaagatggtttaatacttccaggaaaaacgaccttaattgaagcaacaagtgggaatactggcatagctttagcaatggttgcagcagctaaaggctatagattgatactaaccatgccagacaccatgagtattgagagaagggcaatgcttcgagcttatggtgcagaattgcaacttactccaggcacagagggaatgagaggggcattagaattagcgaatgaattatcttcaagtattccaaatagctttcaatttaaccagtttgaaaatctcgcgaatcctgagattcatgaaagaacaacagcaaaagaaatttgggatcaatctaatcaaaatattgatggattagtatctggggttggtactggaggaacaataactgggtgcgctagatttttaaaaaaagtgaatccaaattgcaaaatttacgcagttgagcctgcaaaaagtgcagttatatctggagaaaagccaagttctcactcgatccaaggaataggtgcaggcttcattcctaaagtcctcaatacccagttaatagacgaaataatcaagatagatgatgatgatgcattttattatgggagattattagctcgacttgagggtcttttatcaggaattagtagtggggctgctttagccgcagcaataaaaattggtaaaaggaaagaatttattaaaaaaagattaatagtaatccttccaagtttcggtgaaagatatttatcaacagcaatgtttgaatctaatactgtcgttcaggctagacaagacggttatttataa

SEQ ID NO: 363 - protein, 322 aa, Prochlorococcus marinus str. MIT 9515
MEIASDITSLVGNTPLVKLDRIKDYCKCHTEIIAKLESFNPSASVKDRIAYSMLNSAEEDGLILPGKTTLIEATSGNTGIALAMVAAAKGYRLILTMPDTMSIERRAMLRAYGAELQLTPGTEGMRGALELANELSSSIPNSFQFNQFENLANPEIHERTTAKEIWDQSNQNIDGLVSGVGTGGTITGCARFLKKVNPNCKIYAVEPAKSAVISGEKPSSHSIQGIGAGFIPKVLNTQLIDEIIKIDDDDAFYYGRLLARLEGLLSGISSGAALAAAIKIGKRKEFIKKRLIVILPSFGERYLSTAMFESNTVVQARQDGYL

SEQ ID NO: 364 - DNA, 987 bp, Prochlorococcus marinus str. MIT 9515
  CDS (1)..(987): transl_table=11
atggcaaaaatttatgaggacaacagctttgctattggaaacactccattagtaaaattaaagtcagttactaaaaatgctaaagctactgtactagcaaaaattgaaggaaggaatcctgcctatagtgttaaatgcagaattggtgcaaacatgatctgggacgctgagaaaagcgggaaactcacaaaagataaaacaattgttgagcctacatctggaaacactggaattgccctagcttttactgcttcagcaagaggttataagttaatccttactatgccagaatctatgtcgatagaaagaagaagagtgatggcagtattaggggctgaaattgttttaacagaggcttcaaaaggtatgccaggagcaattgctaaagccaaagagattgcggaaagcaatccctctcaatattttatgccaggtcagtttgataatccagcaaacccagaaattcattttaaaacaactgggcctgaaatttgggatgattgcgatggtgcaattgatgttttagttgcaggagttggaacaggtggaacaataacaggagtctcaagatacattaaacaagaaaagggtaaaaatattacttctgtagcagttgaaccatctcatagtcctgttattactcagacacttaatggagaggaagtgaaatcaggaccacataaaattcaaggaataggggcaggatttatccctaaaaatcttgatttatcaattgttgacaaagttgaacaggttacaaacgatgaatctatagaaatggctttaagattggctaaagaggaaggcttgctcgttggtatatcttgcggagctgctgctgctgctgctgttaaattagctgaacaagatgaatatgcaggcaagactattgtcgttgttcttcctgatttagcggaaagatatttatcatcaataatgtttactgaagtcccaagcggcataattgaggaaccaattaacgcttaa

SEQ ID NO: 365 - protein, 328 aa, Prochlorococcus marinus str. MIT 9515
MAKIYEDNSFAIGNTPLVKLKSVTKNAKATVLAKIEGRNPAYSVKCRIGANMIWDAEKSGKLTKDKTIVEPTSGNTGIALAFTASARGYKLILTMPESMSIERRRVMAVLGAEIVLTEASKGMPGAIAKAKEIAESNPSQYFMPGQFDNPANPEIHFKTTGPEIWDDCDGAIDVLVAGVGTGGTITGVSRYIKQEKGKNITSVAVEPSHSPVITQTLNGEEVKSGPHKIQGIGAGFIPKNLDLSIVDKVEQVTNDESIEMALRLAKEEGLLVGISCGAAAAAAVKLAEQDEYAGKTIVVVLPDLAERYLSSIMFTEVPSGIIEEPINA

SEQ ID NO: 366 - DNA, 987 bp, Prochlorococcus marinus str. MIT 9303
  CDS (1)..(987): transl_table=11
atgtcccgcatttacgaagacaacagccaggcaatcggcaacactccactggtcaaactgcacgccgtcagcaaaaacgccaaagcaactgttctcgcaaagattgaaggccgcaatcccgcctacagcgtgaaatgccgcattggcgccaacatgatctgggatgccgaaaagcgcggcttactgagcaaagaacgcacgatcattgagcccacctctggcaacacaggtatcgctctggccttcacagcagcagcccgcggctacaaactgatcctcaccatgcccgaatcaatgtcgctagaacggcggcgggtgatggcagtgcttggtgcagaactcatcctcacagaagcagccaaggggatgccaggcgccattgccaaggcaaaagagatcgccgaaagcgatccccagaaatacttcatgcccggtcagtttgagaatccggccaatcccgacatccacagcaaaacaaccggtccagaaatctggaacgactgtgatggcgccattgatgtgctcgtggctggcgtaggcaccggcggcacgatcaccggtgtgtcccgctacatcaagcaggagaaaggcaaatccatcgtttctgtagccgtcgaaccaacccatagcccggtcatcagccaaaccctcaacggggaagacgtcaaacctggtcctcacaaaatccagggcattggagccggctttattcccaaaaacctcgatcttgcgttagtggatcgtgttgagcaggtcagcaatgatgaatccatcgccatggccctgcgcttggcaaatgaagaaggtctactggtgggcatctccagtggtgcggcagttgcagcggctattcgtctggcagaacaacccgaatttgcaggcaaaaccatcgtggtagttctgccagacatggccgagcgttatctctcctcagtgatgtttgagagtgtgcccacaggcatcattcaggaccctgtagctgcctaa

SEQ ID NO: 367 - protein, 328 aa, Prochlorococcus marinus str. MIT 9303
MSRIYEDNSQAIGNTPLVKLHAVSKNAKATVLAKIEGRNPAYSVKCRIGANMIWDAEKRGLLSKERTIIEPTSGNTGIALAFTAAARGYKLILTMPESMSLERRRVMAVLGAELILTEAAKGMPGAIAKAKEIAESDPQKYFMPGQFENPANPDIHSKTTGPEIWNDCDGAIDVLVAGVGTGGTITGVSRYIKQEKGKSIVSVAVEPTHSPVISQTLNGEDVKPGPHKIQGIGAGFIPKNLDLALVDRVEQVSNDESIAMALRLANEEGLLVGISSGAAVAAAIRLAEQPEFAGKTIVVVLPDMAERYLSSVMFESVPTGIIQDPVAA

SEQ ID NO: 368 - DNA, 987 bp, Prochlorococcus marinus str. MIT 9303
  CDS (1)..(987): transl_table=11
atgacaatgacatcgcccatgcctatcgctgctgacattacggccttagttgggtgcactccgttggtgcgccttaatcgcttgccacaggtcagtggttgccatgcggaggtgctggccaagttggaaagcttcaaccccactgcctcggttaaagaccgcatcgcgggggccatgatccatgcagcggaggaagctggaaccattgctccggggcgcaccgtgctggtggaacccaccagtggcaacactgggatcgccttggccatggtggctgccgcccgaggctatcgcctcattctcaccatgccggacacgatgagtacagagcgtcgcgccatgcttagggcctatggcgctgaactgcaactcaccccaggcagcgatggaatgactggttccattgagttggcaaaggagttggtggcaaccatccctgaggcttatctgctgcagcagtttgataatcctgcgaatccgcaggtgcatgagcgcacaaccgcagaggagatctggaatgattgcgaggggcggttggatggtctgattactggagtaggaacggggggcacactcacaggttgtgcgcgtttgctcaagcaacgcaatccaagcctgcgagtgtttgcggtagagccagcgttaagccctgttttggcaggtgggagccctgctccccatcgcattcaggggattggtgctggcttcattcctagcgttcttgatctctctttgatcgatgagatcctgccggtctctgatgacgacgcgatggagatgggtcggcgcttggccagggaggagggcttgctaagtggggtaagcagtggcgctgctgttgcggctgcattgcaagtgggtagtagggctgagatggtgggcaagcgtcttgttgttgtcttggcaagttttggtgagcgttatctatcaacgccgatgtttagcgctgcttcggcggtgccggcgcagcgtgatggatacctttga

SEQ ID NO: 369 - protein, 328 aa, Prochlorococcus marinus str. MIT 9303
MTMTSPMPIAADITALVGCTPLVRLNRLPQVSGCHAEVLAKLESFNPTASVKDRIAGAMIHAAEEAGTIAPGRTVLVEPTSGNTGIALAMVAAARGYRLILTMPDTMSTERRAMLRAYGAELQLTPGSDGMTGSIELAKELVATIPEAYLLQQFDNPANPQVHERTTAEEIWNDCEGRLDGLITGVGTGGTLTGCARLLKQRNPSLRVFAVEPALSPVLAGGSPAPHRIQGIGAGFIPSVLDLSLIDEILPVSDDDAMEMGRRLAREEGLLSGVSSGAAVAAALQVGSRAEMVGKRLVVVLASFGERYLSTPMFSAASAVPAQRDGYL

SEQ ID NO: 370 - DNA, 909 bp, Clostridium thermocellum ATCC 27405
  CDS (1)..(909): transl_table=11
atgatatatgatgatatgcaacaacttataggaaacacacctcttgtacgtcttcgccattccggttttcctgacggtgtccgcgtatatgccaagcttgaactgtataaccccagtggcagtgtaaaagaccgaatcggaaaatatatgattgaagatgcggaaaaaagaggtgttttggttcccggcagcactatagtggaaggaactgcgggaaataccggactgggcattgcttttgccgcccttaaccggggttaccggttaattatggtggtaccaaccaaattttcacaagaaaaacaggctctgctccgcgccctcggtgcggaagtaattaacacaccccgtgaagaaggaatgttgggagcggaacgaaaagcggaagaattgcggcagtccattcctaaagccgtttcactggagcaattccgaaatccggcaaatccgttggctcattacgaaacaaccggtcctgaaatttgggaggacctgggagcggacatagattattttgtcgccggtgccggaagcggtggtacatatgcgggaatcgtgcgttacttaaaagaacaaaaaccggatatcaaaggtattcttgccgaccccatcggttccacaatgggaggaggagagcatggtgattatgacatagaaggcattggaaacgactttataccggaaacaatggatatgtcccttgtggacgaggttataaaagtcagtgatgatgaagcttttaccgagaccaggcttctggcgcgaaatgaaggtattattgccggctcgtcctccggagcaaatcttgcagcggtacgcaagcttgccatgcggattcaacgcggcaccattgttacagtgctgcctgacaggggtgaacgctatctatccaaaaacctgtttttgtga

SEQ ID NO: 371 - protein, 302 aa, Clostridium thermocellum ATCC 27405
MIYDDMQQLIGNTPLVRLRHSGFPDGVRVYAKLELYNPSGSVKDRIGKYMIEDAEKRGVLVPGSTIVEGTAGNTGLGIAFAALNRGYRLIMVVPTKFSQEKQALLRALGAEVINTPREEGMLGAERKAEELRQSIPKAVSLEQFRNPANPLAHYETTGPEIWEDLGADIDYFVAGAGSGGTYAGIVRYLKEQKPDIKGILADPIGSTMGGGEHGDYDIEGIGNDFIPETMDMSLVDEVIKVSDDEAFTETRLLARNEGIIAGSSSGANLAAVRKLAMRIQRGTIVTVLPDRGERYLSKNLFL

SEQ ID NO: 372 - DNA, 936 bp, Clostridium thermocellum ATCC 27405
  CDS (1)..(936): transl_table=11
atggctaaaatagctaagaatctgacggaactcataggaaataccccgcttttggagttgagcaattataacagagcaaacaatttggaagctgtcctgatagcaaagctcgaatacttcaatcctgcatccagtgtaaaggacaggattggttatgcaatgataaaggacgcagaagaaaaaggaataataaacaaagatacggttattatagagcccacaagcggaaatacaggtattgccctggcttttgtggcagctgcaagaggatacagggttatacttacaatgccagagaccatgagtattgaaagaaggaatcttttaaaggctttgggtgccgagttggtgctgacaccgggagccgacggaatgggaggagcgatcagaaaggctgaggagcttgcccgtgaaatacccaactcctttatccctcaacagttctccaatcctgcaaatccggagattcacagaaggaccacggcagaggaaatctggagagacaccgacggacaggtggatatatttgtggcgggagttggaacaggaggaacaatttccggtgtcggtgaagtgttaaagcagcgcaagccggatgtaaagattgttgcggtggagccttttgattcaccggttctgtccggaggaaccaaaggtcctcacaagatacagggaataggtgccggttttgtgccggataatttcaaccgcgcagtggtggatgaaatattcaaggttaaaaatgaagaggcctttgaaacatccagaaagcttgcaagaacggaaggtcttttggtgggaatatcctcgggagctgcagcttttgcagccacacagattgcaaaaaggcctgaaaacaaaggaaagaacattgtggttctgcttcccgatacaggagagagatatttgtccacggcattattccaggatgcatag

SEQ ID NO: 373 - protein, 311 aa, Clostridium thermocellum ATCC 27405
MAKIAKNLTELIGNTPLLELSNYNRANNLEAVLIAKLEYFNPASSVKDRIGYAMIKDAEEKGIINKDTVIIEPTSGNTGIALAFVAAARGYRVILTMPETMSIERRNLLKALGAELVLTPGADGMGGAIRKAEELAREIPNSFIPQQFSNPANPEIHRRTTAEEIWRDTDGQVDIFVAGVGTGGTISGVGEVLKQRKPDVKIVAVEPFDSPVLSGGTKGPHKIQGIGAGFVPDNFNRAVVDEIFKVKNEEAFETSRKLARTEGLLVGISSGAAAFAATQIAKRPENKGKNIVVLLPDTGERYLSTALFQDA

SEQ ID NO: 374 - DNA, 909 bp, Clostridium difficile 630
  CDS (1)..(909): transl_table=11
atgttatataataacgcattagagttgataggaaacacacctgtagtaaggctgaataatttaggctgtactaatgggtgttctaacatatatgtaaaattagaaaaagtaaatccagcaggaagtataaaagatagagctgtttatgaaatgttagagggcttagagcaaagaggagaattaaaaaagggagatgtactagttgaagcaactagtggaaatactggtattgcattatctatgataggaaaattaaaaggatatgaagtagtaatcgtaatgcccgaaacaatgagcgttgagagaagagatttaatgaaggcttatggagcaaatttggtgcttacagatggtaaagctggaatggcaggttccatagaaaaagcaaatgaacttttaaaagaaaatccaaactataaaagcctaaaacaatttgaaaataaagataatccaaatgcacattataaaacaacagcagttgaaattatgaatgatgtcaaagatttagatatattcgtatgtggagttggaacaggtggtactttaataggaactgcaagatatttaaaagaacaaaatccaaatataagagtaattgcacttgaaccaaaaaaatctccagctatatcagaaaacaagactggacctcataaaatacaaggaataggtgctaactttgttcctgaaaattatgattctagtgtagttgatgaagtaatattagtagatgatgaagatgcatttgatacagttaaattacttgcagcaaaagagggaattttagtagggatatcttctggagcaaatatatttggtgctatagagatggcaaaaaagtatccagataaaaagatagttacagtagctccagatggagttgataagtatatgtctatgggaatattttaa

SEQ ID NO: 375 - protein, 302 aa, Clostridium difficile 630
MLYNNALELIGNTPVVRLNNLGCTNGCSNIYVKLEKVNPAGSIKDRAVYEMLEGLEQRGELKKGDVLVEATSGNTGIALSMIGKLKGYEVVIVMPETMSVERRDLMKAYGANLVLTDGKAGMAGSIEKANELLKENPNYKSLKQFENKDNPNAHYKTTAVEIMNDVKDLDIFVCGVGTGGTLIGTARYLKEQNPNIRVIALEPKKSPAISENKTGPHKIQGIGANFVPENYDSSVVDEVILVDDEDAFDTVKLLAAKEGILVGISSGANIFGAIEMAKKYPDKKIVTVAPDGVDKYMSMGIF

SEQ ID NO: 376 - DNA, 963 bp, Clostridium difficile 630
  CDS (1)..(963): transl_table=11
atgcgtgtacttaataatgttacagaggctataggcaatactcatatgttacatttatccaaaatagcagatgaatttggagttcaaggtaatatttatgcaaagatggaatacttaaatccgggatttagtaaaaaggaccgtgtagcattacaaatgattaccgaagcagaaaatgcaggtttattagttccaggtcaagcagttgtggaattaacaagtggtaatactggaacaggactagcaatagcttgtgcatgtaaaggatataaatttatagcgtgtatgtcaaaaggaaattctatggaaagagcaagaatgatgaaagctttaggtgctgaagtagttcttgtagaccaaatgcctaattcagttcatggacaggtatctggtgaagatttggcacttgtagaaattgaggctcaaaaaatagcaaaagaaagaaatgcatttagagcagaccaatttaatttagaagcttgtaatcatgcacatgaaaagtatacagcagaagaaatgtgggaacaattggatggaaatattgatgtatttgtagattttcttggaagtggtagtacttttgcaggatgttcaaaaacacttaaaaaacataattcttctatcaaatgttatgttgttgaacctgaaacagcagcaatttattcaggtaaagaaataactgaccaagggcataaaatacaaggtggaggatattctatggatttgccattagtagacaagaaacttattgatggttatattcaagttacagacgaggaggcaactgatgtagcaagaaaattagctaaattagaaggtgtatttgcaggattttcttcaggggcaaatgtatgtgcagcaattaagttgttaaagagcagtgaaaaaggaaaaaatatagttttaactcttaatgatagtggtttaaaatatttaagtactgatttatatgaagaattgtaa

SEQ ID NO: 377 - protein, 320 aa, Clostridium difficile 630
MRVLNNVTEAIGNTHMLHLSKIADEFGVQGNIYAKMEYLNPGFSKKDRVALQMITEAENAGLLVPGQAVVELTSGNTGTGLAIACACKGYKFIACMSKGNSMERARMMKALGAEVVLVDQMPNSVHGQVSGEDLALVEIEAQKIAKERNAFRADQFNLEACNHAHEKYTAEEMWEQLDGNIDVFVDFLGSGSTFAGCSKTLKKHNSSIKCYVVEPETAAIYSGKEITDQGHKIQGGGYSMDLPLVDKKLIDGYIQVTDEEATDVARKLAKLEGVFAGFSSGANVCAAIKLLKSSEKGKNIVLTLNDSGLKYLSTDLYEEL

SEQ ID NO: 378 - DNA, 969 bp, Prochlorococcus marinus str. MIT 9301
  CDS (1)..(969): transl_table=11
atggaaatagcaaatgatataacttctcttgttggaaataccccattagttagattaaatcgaattagaaatcattttaattgctatccagaaataatagccaaattagaaagtttcaatccatcagcgtccgtgaaggatcgcatcgcttattcaatgttatgcaaagcagaagaagacggtttgataaaaccagataaaacaacattgattgaagctacaagtggtaatacgggcatcgcattagcaatggttgctgcagcaaaaggctataaattgatattaactatgccggatacgatgagtattgagaggagggcaatgttgagagcatatggagctgaattacagttaacgcctgggaaagaaggaatgaaaggagctttagatttagctaatgagttgtcttcaaccattgcaaatagctatcaatttaatcaatttgaaaactttgctaatccggatattcatgaaagaacaacggcacaagaaatatggtctcaatccaataacaatttagatggactcgttacaggagtaggaacaggaggaacaatcacgggttgcgcacgtttcctgaaaaaagttaatccaaattgcaaaatttatgctgtagagccccaaaaaagtgctgtgatttctggagaaaaagctggatctcattcgattcaaggaataggagcaggtttcgtgccgaaagtactggatactaaattaattgatgaaattataaaaatagatgacgatgaagcattttattatgggcgtttattagctcgattggaaggccttttatctggcataagtagcggtgcagctctagcagcaactattaaaatcggtgaaaggaaagaactaactaacaaaagattgatagttattcttccaagttttggtgaaagatatttatcaacagcaatgtttgaatctaatacttcaattcaagccagaaaagatggttatctctaa

SEQ ID NO: 379 - protein, 322 aa, Prochlorococcus marinus str. MIT 9301
MEIANDITSLVGNTPLVRLNRIRNHFNCYPEIIAKLESFNPSASVKDRIAYSMLCKAEEDGLIKPDKTTLIEATSGNTGIALAMVAAAKGYKLILTMPDTMSIERRAMLRAYGAELQLTPGKEGMKGALDLANELSSTIANSYQFNQFENFANPDIHERTTAQEIWSQSNNNLDGLVTGVGTGGTITGCARFLKKVNPNCKIYAVEPQKSAVISGEKAGSHSIQGIGAGFVPKVLDTKLIDEIIKIDDDEAFYYGRLLARLEGLLSGISSGAALAATIKIGERKELTNKRLIVILPSFGERYLSTAMFESNTSIQARKDGYL

SEQ ID NO: 380 - DNA, 987 bp, Prochlorococcus marinus str. MIT 9301
  CDS (1)..(987): transl_table=11
atggcaaaaatttatgaggacaacagttttgctattggaaacactccattagtaaaattaaaatcagttactaaaaacgcgaaagctacagtacttgcaaaaattgaaggtagaaaccccgcttatagtgtcaaatgtaggatcggcgcaaacatgatctgggatgccgagaaaagtgggaaacttacaaaagacaaaactattgttgagccaacttctggaaatacaggcatagctctagcttttactgcttcagcaagaggttataaactaatccttacaatgccagaatccatgtcaattgaaagaagaagggttatggcagtgttgggtgctgaaattgttttaacagaggcatctaaaggtatgcctggagcaatagctaaggctaaagaaattgcagaaagtaatccttctcaatatttcatgccaggtcaatttgataatccagcaaaccctgaaattcatttcaaaactactgggccagaaatctgggatgattgcgatggtgaaattgatgtcctagttgcaggggttggaactggcggcacaattacaggagtttcaagatacattaagcaagagaagggtaagaatattacttctgtagcagtagaaccatcacacagtcctgttattacacagacaatgaatggagaagaggttaaatccggaccacataaaatccaaggaattggagcaggatttattcctaagaaccttgacttatcaattgttgataaggtcgaacaagtaacaaatgacgaatcaattgagatggctcttaggttagctaaagaggagggtctattagtaggaatatcttgtggggctgccgctgctgccgctgttagattagctgaacaagatgaatatgcggggaagacaattgtagttgttctacctgatttagcagagaggtatttatcatcaattatgtttactgaagttccaagcggaatcattcaagaaccagtcaaagcctaa

SEQ ID NO: 381 - protein, 328 aa, Prochlorococcus marinus str. MIT 9301
MAKIYEDNSFAIGNTPLVKLKSVTKNAKATVLAKIEGRNPAYSVKCRIGANMIWDAEKSGKLTKDKTIVEPTSGNTGIALAFTASARGYKLILTMPESMSIERRRVMAVLGAEIVLTEASKGMPGAIAKAKEIAESNPSQYFMPGQFDNPANPEIHFKTTGPEIWDDCDGEIDVLVAGVGTGGTITGVSRYIKQEKGKNITSVAVEPSHSPVITQTMNGEEVKSGPHKIQGIGAGFIPKNLDLSIVDKVEQVTNDESIEMALRLAKEEGLLVGISCGAAAAAAVRLAEQDEYAGKTIVVVLPDLAERYLSSIMFTEVPSGIIQEPVKA

SEQ ID NO: 382 - DNA, 903 bp, Herminiimonas arsenicoxydans
  CDS (1)..(903): transl_table=11
atgcaatatttgactatcgaagacaccataggcaacacgccgctggtgcaactcaagcgcatggacggcgaagagtcggcgcgtcgcaacaacgtcattctcggaaagctggagggcaacaatcccgccggttcggtgaaagaccggcctgccttatccatgatcaagcatgcagaagaacgcggcaccatcaagccaggtgataccttgatcgaggcaaccagcggcaataccggcatcgcactggcgatggttgcggcgatgcgcggatacaagatgatcttgctgatgccggaaaatttaagtgaagagcgtcgccaggcgatggctgcgtatggtgcgaaaattgtgctgacgccgaaagctggcggcatggaatatgcacgcgatctggcggagcaaatgcagaaaaatggcgaaggtttgattctcgaccagtttgccaatcccgacaatccacgttcgcattatgaaactaccgggccggaaatctggcgtgataccggcgggaaaatcactcatttcattagtgcgatgggcactaccggcaccatcattggtgtgtccgaatacctgaaggaaaaaaatccggacatcagaatcattggcgtgcagccggaagagggttcacagattcccggtatcagaaaatggccggaagcctatctgcccaagatttatgatgcaagcaaggtcgatcagctggaatatgtcagccagggggttgccgagcgaatggcgcgacgtctggcaatggaagaagggattttctgcggaatttccgcggcaggcgcgtgcgaagtcgcgctgcgaatttctcaaacgactgaaaatgcgacgattgtattcgttgtctgcgaccgtggcgatcgctatctttcaacaggcgttttcccggcctga

SEQ ID NO: 383 - protein, 300 aa, Herminiimonas arsenicoxydans
MQYLTIEDTIGNTPLVQLKRMDGEESARRNNVILGKLEGNNPAGSVKDRPALSMIKHAEERGTIKPGDTLIEATSGNTGIALAMVAAMRGYKMILLMPENLSEERRQAMAAYGAKIVLTPKAGGMEYARDLAEQMQKNGEGLILDQFANPDNPRSHYETTGPEIWRDTGGKITHFISAMGTTGTIIGVSEYLKEKNPDIRIIGVQPEEGSQIPGIRKWPEAYLPKIYDASKVDQLEYVSQGVAERMARRLAMEEGIFCGISAAGACEVALRISQTTENATIVFVVCDRGDRYLSTGVFPA

SEQ ID NO: 384 - DNA, 1035 bp, Bradyrhizobium sp. ORS278
  CDS (1)..(1035): transl_table=11
atgaccattagaaacgacgtcgtcgcggcgatcggcaacacgcccctgatcaagctcacgcgcgcctcggaggcgaccggctgcaccatcctcggcaaggccgagttcatgaaccccggccagtcggtcaaggatcgcgccggcaaatggatgatcctggaggccgagaagcgcggcgatctcaagccgggcggcctcgtcgtggagtcaacggccggcaacaccggcatcggtcttgccgtggtcgccaatgcccgtggctatcgcacgctgatcgtgattccggagacgcagagccaggaaaagaaggacatgctgcggatgtgcggtgccgatctcgtcgaggtcccggctctgccgttcaacaacccgaacaattacgcccatgtcggccgccggcttgccgacgagttgcgcaagagcgagccgaacggcgtgctgttcgccgaccagtggaacaacctcgacaacgccaaggcgcattacgagtcgaccggtccggagatctgggagcagaccggcggcaaggtcgacggcttcgtctgcgcggtcggcaccggcggcacgctggccggcaccagccgctatctgaaggagaaaaacgccggcatcgtcacagcctgcgccgatccgcacggctttgcgatgtacaactggttcaagaaccgcgaggtcaagtccacgccgggcgattccatcaccgagggcatcggcatcggccgggtcacgccggtgatcgagaccgccaaggtcgataccgcgttcctgatctccgatgaggacgcggtcaacaccatctacgatctgctgcagcacgaaggcctgtgcctgggcggctcgagcggcgtcaatatcgccggcgcggtgcagctcgccaagcagcttgggcccggccacaccatcgtgaccatcctgtgcgacccgggcaaccgctatcagtcgaagctgtacaatccggagttcatgcggtcgaagaacctgcccgtgccggaatggctggagcggcgcagcggcatcaagccgccattcgtgtga

SEQ ID NO: 385 - protein, 344 aa, Bradyrhizobium sp. ORS278
MTIRNDVVAAIGNTPLIKLTRASEATGCTILGKAEFMNPGQSVKDRAGKWMILEAEKRGDLKPGGLVVESTAGNTGIGLAVVANARGYRTLIVIPETQSQEKKDMLRMCGADLVEVPALPFNNPNNYAHVGRRLADELRKSEPNGVLFADQWNNLDNAKAHYESTGPEIWEQTGGKVDGFVCAVGTGGTLAGTSRYLKEKNAGIVTACADPHGFAMYNWFKNREVKSTPGDSITEGIGIGRVTPVIETAKVDTAFLISDEDAVNTIYDLLQHEGLCLGGSSGVNIAGAVQLAKQLGPGHTIVTILCDPGNRYQSKLYNPEFMRSKNLPVPEWLERRSGIKPPFV

SEQ ID NO: 386 - DNA, 969 bp, Bradyrhizobium sp. ORS278
  CDS (1)..(969): transl_table=11
atggagtcgtcggctgcgacacagcgtcccggacgcgggcgcgtatttgattcaattatcgaggcattcggcaatacgccgattgtgcggctgcgaaagttgccggagcagcatggcgtcaaggcgaccatcctcgccaagctggaatacttcaatcctgccgcgagcgtgaaggaccgcattggcgtcggcatgatcctggcgatggagcaggccggtgtgctcaagccggactccgttctgatcgagccgacctcgggcaataccggcattgcgctcgccttcgtcgcggcggcgcgcggctacaagctgaagcttgtcatgccggagtcgatgtcggtggagcggcgcaagatgcttgccttcctcggcgccgagatcgtgctgacaccggcggcgcagggcatgaagggcgcgatcgcgaccgccgaggagctgttgcgaaccacgccgaactcggtgatgccgcagcagttcaagaacctcgccaatccggagatccatcgccgcacgacggcggaggagatctggaacgacaccgcggggaatatcgacctgttcgtcgccggcgtcggtaccggaggcaccattaccggcgtcggccaggtgctgaagtcgcgcaaacccggactcaaggtggttgctgtcgagccggaggagagcccggtcctgtcgggcggccagcattcgccgcacaagatccagggcatcggcgccggcttcgtcccggatattctcgaccggtccgtgatcgacgagatcgtcaagatcaacagcgccacggccatcgagacctcgcgcgcgctggcgcgcaacgagggcattcccggcggcatttcctcgggcgcggcgatcgcggcggcgatcgagctcggcaagcggccggagaatgccggcaagacgatcctggcgatcgtcccgtcgttctccgagcgctatctctccacggcgctgttcgaagggatctga

SEQ ID NO: 387 - protein, 322 aa, Bradyrhizobium sp. ORS278
MESSAATQRPGRGRVFDSIIEAFGNTPIVRLRKLPEQHGVKATILAKLEYFNPAASVKDRIGVGMILAMEQAGVLKPDSVLIEPTSGNTGIALAFVAAARGYKLKLVMPESMSVERRKMLAFLGAEIVLTPAAQGMKGAIATAEELLRTTPNSVMPQQFKNLANPEIHRRTTAEEIWNDTAGNIDLFVAGVGTGGTITGVGQVLKSRKPGLKVVAVEPEESPVLSGGQHSPHKIQGIGAGFVPDILDRSVIDEIVKINSATAIETSRALARNEGIPGGISSGAAIAAAIELGKRPENAGKTILAIVPSFSERYLSTALFEGI

SEQ ID NO: 388 - DNA, 972 bp, Klebsiella pneumoniae subsp. pneumoniae MGH 78578
  CDS (1)..(972): transl_table=11
atgagtaagatttttgaagacaactccctgactatcggtcatacgccgctggtacgactgaaccgcatcggtaatggccgtatcctggcaaaggtagaatctcgtaacccgagctttagcgtaaaatgccgtatcggcgccaatatgatctgggatgctgaaaagcgcggcgttctgaaacctggcgtggaactggtcgagccgaccagcggcaacaccggtatcgccctcgcctacgtggcggcggcccgcggctacaaactgacgctaaccatgccggaaaccatgagcatcgagcgtcgtaagctgctgaaagccctgggcgccaacctggtgctgaccgaaggcgccaaaggcatgaaaggcgctatccagaaagcggaagagattgtcgccagcaacccggaacaattcctgctgctgcagcagttcagcaacccggctaacccggaaatccacgagaagactaccggcccggaaatctgggaagataccgatggtcaggtggatgtgtttatctccggcgtaggtaccggcggaacgctgaccggcgtcagccgctatatcaaaaacaccaaaggtaaaaaagatctgatcaccgtcgccgttgaaccgaccgattccccggtgatcgcccaggcgctggcgggggaagagctcaagccgggtccgcacaaaattcagggtatcggcgccggcttcattcctggcaacctggatctgaagctggtcgacaaagtgatcggcattaccaacgaggaagctatctccacggcgcgccgcctgatggaagaagaaggcatcctggcgggtatctcttccggggccgccgttgccgccgcgctgaagctgcaggaagatgaggcctttaccaataagaatattgtggttatcctgccttcctcaggtgagcgttatttaagcaccgcgctgttcgccgatctcttcactgagaaagagctgcaacagtag

SEQ ID NO: 389 - protein, 323 aa, Klebsiella pneumoniae subsp. pneumoniae MGH 78578
MSKIFEDNSLTIGHTPLVRLNRIGNGRILAKVESRNPSFSVKCRIGANMIWDAEKRGVLKPGVELVEPTSGNTGIALAYVAAARGYKLTLTMPETMSIERRKLLKALGANLVLTEGAKGMKGAIQKAEEIVASNPEQFLLLQQFSNPANPEIHEKTTGPEIWEDTDGQVDVFISGVGTGGTLTGVSRYIKNTKGKKDLITVAVEPTDSPVIAQALAGEELKPGPHKIQGIGAGFIPGNLDLKLVDKVIGITNEEAISTARRLMEEEGILAGISSGAAVAAALKLQEDEAFTNKNIVVILPSSGERYLSTALFADLFTEKELQQ

SEQ ID NO: 390 - DNA, 912 bp, Klebsiella pneumoniae subsp. pneumoniae MGH 78578
  CDS (1)..(912): transl_table=11
gtgaatacactcgaacaaaccatcggcaatacccctctggtcaaacttcagcgtctgggaccggacaacggcagcgaagtctgggtcaaactcgaaggcaataatccggccggctcggtgaaagatcgcgccgcgctgtcaatgatcgttgaagcggaaaagcgcggcgaaattcagcccggagacgtgctgatcgaagcgaccagcggcaacaccggtattgcgctggcgatgatcgccgcgctgaaaggctaccggatgaagctgctgatgcccgacaacatgagccaggagcgtcgggccgcgatgcgcgcttacggcgccgagcttatcctggtcagcaaagagcaggggatggagggtgcccgcgacctggctctggagatggcccagcgcggcgaaggcaaactgctcgatcagtttaacaacccggataacccctacgcccactacaccaccaccggcccggaaatctggcagcagaccgcggggcgtatcacccactttgtctccagtatggggaccactggcaccattaccggcgtgtcacgttttctgcgtgaacagagtaaaccggtgaccattgttggcctgcagccggaggaggggagcagtattcccgggatccgccgctggccggcagagtatatgccggggatctttaacgcttcgctggtggatacggtgctggatattcatcagcaggatgccgagaacaccatgcgtcagctggcggtgcgggaaggcattttctgcggcgtcagttcgggcggcgcggtagcgggcgcgttacgcatagcccgcgaaaatcctggcgcggtggtggtggcgatcgtctgcgatcgcggcgatcgttacctttccaccggcgtgttcggcgaagaacactttagccagggggcgggcatttaa

SEQ ID NO: 391 - protein, 303 aa, Klebsiella pneumoniae subsp. pneumoniae MGH 78578
MNTLEQTIGNTPLVKLQRLGPDNGSEVWVKLEGNNPAGSVKDRAALSMIVEAEKRGEIQPGDVLIEATSGNTGIALAMIAALKGYRMKLLMPDNMSQERRAAMRAYGAELILVSKEQGMEGARDLALEMAQRGEGKLLDQFNNPDNPYAHYTTTGPEIWQQTAGRITHFVSSMGTTGTITGVSRFLREQSKPVTIVGLQPEEGSSIPGIRRWPAEYMPGIFNASLVDTVLDIHQQDAENTMRQLAVREGIFCGVSSGGAVAGALRIARENPGAVVVAIVCDRGDRYLSTGVFGEEHFSQGAGI

SEQ ID NO: 392 - DNA, 987 bp, Xanthobacter autotrophicus Py2
  CDS (1)..(987): transl_table=11
atggcaggacctgccgccaagatcgtgcccgccgcccagcctcgtccggggcgcggccgcgtctatgattccatcaccgagaccataggcaacacgccgctggtgcggctgaagcgcctcgccgagctgcgcggggccaaagccgagattctggccaagctcgaattcttcaatcccatctccagcgtcaaggaccgcatcggcgtcgccatgatcgaggcgatggaggcggccggcgtgctggaccaggacacggttctggtggagcccacttccggcaataccggcatcgcgctggccttcgtggcagcggcccgcggctaccggctgatcctggtgatgcccgagagcatgtcggtggagcgccgcaagatgctcgccattctcggcgccgagctggtgctgaccccggcgaacctgggcatgaagggcgccgtcgcccgcgccgagcagctcatcgccgagttgcccaaggcggccatgccccagcagttcaagaacaaggccaacccggacatccaccgccgcaccacggccgaggagatttggaacgacaccgacggcaaggtggacgcggtggtggccggtgtcggcaccggcggcaccatcaccggcatcggccaggtgctgaagccgcgcaaggcctcgctcaagatgatcgcggtggagcccgaggattccccggtgctgtccggcggctcccccggcccccacaagatccagggcatcggcgccggcttcgtgccggacgtgctcgaccgctccatcatcgacgaggtggtgacggtgggcaaccagaccgcgttcgacaccgcgcgggcgctggcccgctacgagggcatccccggcgggatctcctccggcgcggccgtggcggcggcgctggagatcgcggtgcgcgacgacatggccggcaagtccatcgtggtgatcgtgccgtccttcgccgagcgctatctctcgacggccctgttcgaaggcctctga

SEQ ID NO: 393 - protein, 328 aa, Xanthobacter autotrophicus Py2
MAGPAAKIVPAAQPRPGRGRVYDSITETIGNTPLVRLKRLAELRGAKAEILAKLEFFNPISSVKDRIGVAMIEAMEAAGVLDQDTVLVEPTSGNTGIALAFVAAARGYRLILVMPESMSVERRKMLAILGAELVLTPANLGMKGAVARAEQLIAELPKAAMPQQFKNKANPDIHRRTTAEEIWNDTDGKVDAVVAGVGTGGTITGIGQVLKPRKASLKMIAVEPEDSPVLSGGSPGPHKIQGIGAGFVPDVLDRSIIDEVVTVGNQTAFDTARALARYEGIPGGISSGAAVAAALEIAVRDDMAGKSIVVIVPSFAERYLSTALFEGL

SEQ ID NO: 394 - DNA, 1029 bp, Xanthobacter autotrophicus Py2
  CDS (1)..(1029): transl_table=11
atgatccgtaacggccttgtggactccatcggcaacacccccctcatccgcctgaagcgtgcctccgaagagaccggctgcgagatcctcggcaaggccgagttcctcaatcccggccagtcggtgaaggaccgcgcggccctcggcatcatcaaggacgctgtggcgcgcggggcactgaagcccggtggcgtcatcgtggaaggcaccgccggcaataccggcatcggcctcgcgctggtggccgctcccctcggcttccgtactgtcatcgtcattcccgagacccagtcccaggaaaagaaggacatgctgaagctcgccggcgccatcctggtggaggtgccggccgtggcctatgccaatccgaataattacgtgaaggtctccggccgcctcgccgaggcactcgccaagaccgagcccaacggcgccatctgggccaaccagttcgacaatgtggccaaccggcaggcccatatcgaaaccaccgggcccgagatctgggagcagacctgcggcaagctggacggcttcatctgcgcggtgggcaccggcggcacgctggccggcatcgccatcgcgctgaaggcgcgcaaccccaacatccgcatcggcctcgccgatcccatgggcgcggcgctctattcctactacaccaccggcgagctgaaggccgagggctcctccatcaccgagggcatcggccaggggcgcatcaccgccaacctcgtggacgcgcccatcgacaccgccttccagatcccggacgaggaagctttgcccgtggtgttcgacctgctgcagcacgagggcctgtgcctcggcggctcgtcgggggtgaacgtggccggcgccatccgcctcgcgaaggagatggggccgggccacaccatcgtgaccatcctgtgcgactacggcacccgctaccagtccaagctcttcaaccccgagttcctgcgctccaagaacctgccggtgccggaatggctggagcgcaaggtcgaggtgccgaacgtcctggtctga

SEQ ID NO: 395 - protein, 342 aa, Xanthobacter autotrophicus Py2
MIRNGLVDSIGNTPLIRLKRASEETGCEILGKAEFLNPGQSVKDRAALGIIKDAVARGALKPGGVIVEGTAGNTGIGLALVAAPLGFRTVIVIPETQSQEKKDMLKLAGAILVEVPAVAYANPNNYVKVSGRLAEALAKTEPNGAIWANQFDNVANRQAHIETTGPEIWEQTCGKLDGFICAVGTGGTLAGIAIALKARNPNIRIGLADPMGAALYSYYTTGELKAEGSSITEGIGQGRITANLVDAPIDTAFQIPDEEALPVVFDLLQHEGLCLGGSSGVNVAGAIRLAKEMGPGHTIVTILCDYGTRYQSKLFNPEFLRSKNLPVPEWLERKVEVPNVLV

SEQ ID NO: 396 - DNA, 969 bp, Prochlorococcus marinus str. MIT 9215
  CDS (1)..(969): transl_table=11
atggaaatagcaaatgatataacttctctagttggtaatacccctttagttaaattaaatcgaatcagaaattattttaattgttatccagaaataatagccaaactagaaagtttcaatccatcagcttccgttaaggatcgcatcgcttattcaatgttatgtaaagctgaagaagagggattgataaatccagataaaacaaccttaattgaagctacaagtgggaatactggcatcgcattagcaatggttgctgcagcaaaaggctataaattgatattaactatgccggatacgatgagtattgagagaagggcaatgttgagagcatatggagctgaattacagctaacaccgggtaaagacggaatgaaaggagctttagatttagctaatgagttgtcttcaaccattgtaaatagctatcaatttaatcagtttgaaaactttgccaatccagatattcatgaaagaacaacggctcaagaaatatggtcacaatccaataacaatttagatggactagttacaggagtaggcactggaggaacaattactggttgtgcacgttttttgaaaaaagttaatccaaattgcaaaatttatgccgtagagcccaaaaaaagtgctgtgatttccggagaaaaagcaggatctcattcgattcaaggaattggagcgggtttcataccaaaagttcttaatactaaattaattgatgaaattataaaaatagatgacgatgaagcattttattatgggcgtttattagctagattggaaggccttttatccggcataagcagcggtgcagctttagcagcaactataaaaatcggcaaaagaaaagaactaatgaataaaagattgatagttattcttccaagttttggagagagatatttatcaacagcaatgtttgaatctaatacttcaattcaagccagaaaagatggttatctttaa

SEQ ID NO: 397 - protein, 322 aa, Prochlorococcus marinus str. MIT 9215
MEIANDITSLVGNTPLVKLNRIRNYFNCYPEIIAKLESFNPSASVKDRIAYSMLCKAEEEGLINPDKTTLIEATSGNTGIALAMVAAAKGYKLILTMPDTMSIERRAMLRAYGAELQLTPGKDGMKGALDLANELSSTIVNSYQFNQFENFANPDIHERTTAQEIWSQSNNNLDGLVTGVGTGGTITGCARFLKKVNPNCKIYAVEPKKSAVISGEKAGSHSIQGIGAGFIPKVLNTKLIDEIIKIDDDEAFYYGRLLARLEGLLSGISSGAALAATIKIGKRKELMNKRLIVILPSFGERYLSTAMFESNTSIQARKDGYL

SEQ ID NO: 398 - DNA, 969 bp, Prochlorococcus marinus str. MIT 9211
  CDS (1)..(969): transl_table=11
atgccaattgcatctgatatcaccactttagtcggcaagactcctttggtaaggcttaatcgcttaccaaaagcatttggatgcgaagcagaattaatcgcaaaactagaaagctttaaccctacagcctcagtcaaagaccgtattgcaggtgcaatggttgctgctgcagaaaaagatagaactattgtgcctggtaaaaccgtcttagtagaacctactagcggaaatacaggcatagctcttgcaatggttgcggctgctaaaggttatcggttaatcctaacgatgcccgacacaatgagtatcgaaaggcgatcaatgcttagggcatatggtgcagagctacaactcacgccaggaaaagaaggaattcagggagctatcactttggctcaagaaattgtttcttcgctaccggatgcttatttactacaacaatttgataatccttctaaccctgaagtacatgaacaaacaaccgcagaagaaatttgggttgattgtgatggtcaaatcgacgggctggttgttggtgtaggaacaggaggaaccatcaccggttgtgcaaaattgctaaaacaaaggaatccaaaaattttaatttatgcagtagagccatctgctagtgccgttctctctggtaaaagcgctaatccacatcacattcaaggcattggtgcaggttttattccaagtgttttagatactgcattaatagatgaagttattgaagttgatgataatcaagcaatggaaattggtcggcaattagctcgtcaagaaggattacttagcgggattagtagtggagcagctgttgcagcagcacttaaagtaggttcacgaaaagaaatgaaaaacaaacgccttttagttgttcttcctagttttggcgaacgctatttatctacatctatgtttaatagtgtttcatccataccaccccggccagatggctacatctaa

SEQ ID NO: 399 - protein, 322 aa, Prochlorococcus marinus str. MIT 9211
MPIASDITTLVGKTPLVRLNRLPKAFGCEAELIAKLESFNPTASVKDRIAGAMVAAAEKDRTIVPGKTVLVEPTSGNTGIALAMVAAAKGYRLILTMPDTMSIERRSMLRAYGAELQLTPGKEGIQGAITLAQEIVSSLPDAYLLQQFDNPSNPEVHEQTTAEEIWVDCDGQIDGLVVGVGTGGTITGCAKLLKQRNPKILIYAVEPSASAVLSGKSANPHHIQGIGAGFIPSVLDTALIDEVIEVDDNQAMEIGRQLARQEGLLSGISSGAAVAAALKVGSRKEMKNKRLLVVLPSFGERYLSTSMFNSVSSIPPRPDGYI

SEQ ID NO: 400 - DNA, 987 bp, Prochlorococcus marinus str. MIT 9211
  CDS (1)..(987): transl_table=11
atgtctcgcatttacaaagataacagcttcgcgatcggcaacactcccttggtgaaactgaactctgtcaccaaaaataccaaagcaacagtcctagcaaaaatcgaagggcgtaatcctgcttacagtgttaagtgcaggattggcgcaaacatgatctgggatgccgagcaaaaaggcctcctcaagcaaggacaaaccattattgagccaacttcagggaatactggaatagctcttgcatttactgctgctgctagagggtacaagctagtgcttacgatgccagagtcaatgtcacttgaaaggcgtagagtaatggcagtgctcggtgcggagttaattcttactgaagcgtcaaaaggcatgccaggtgcaattgccaaagcaaaagagatcgctcaaagtgatccacagaaatatttcatgccaggacagtttgataatcctgctaatcctgaaattcatttcaaaacaactggaccggagatctggaatgactgcgatgggaacattgacgtgcttgttgcaggagtaggtactggtggaacaattactggtatctccaggtatataaagggagagaaaggtaagtcaatgctttccgttgcagtagagccctcacatagtcctgttatttcgcaaaccctcaatggccaagaagtaaagcctggtcctcataagattcagggaatcggagccggatttattcctaaaaatcttgatctctccgttgtagatcgagttgagcaagtgactaatgaagaatcaattgccatggctcttcgtcttgccaaagaagaaggcctactagttgggatctcctgtggagctgctgcagtcgctgcagtacggttggctgagcaagaagagtttgcggggaaaaccattgttgtagtcttacctgatctagcagaaagatacctctcttctgttttgtttgcagatgttccaactggaattattgaaggacccgaggcgacttag

SEQ ID NO: 401 - protein, 328 aa, Prochlorococcus marinus str. MIT 9211
MSRIYKDNSFAIGNTPLVKLNSVTKNTKATVLAKIEGRNPAYSVKCRIGANMIWDAEQKGLLKQGQTIIEPTSGNTGIALAFTAAARGYKLVLTMPESMSLERRRVMAVLGAELILTEASKGMPGAIAKAKEIAQSDPQKYFMPGQFDNPANPEIHFKTTGPEIWNDCDGNIDVLVAGVGTGGTITGISRYIKGEKGKSMLSVAVEPSHSPVISQTLNGQEVKPGPHKIQGIGAGFIPKNLDLSVVDRVEQVTNEESIAMALRLAKEEGLLVGISCGAAAVAAVRLAEQEEFAGKTIVVVLPDLAERYLSSVLFADVPTGIIEGPEAT

SEQ ID NO: 402 - DNA, 975 bp, Pseudomonas putida GB-1
  CDS (1)..(975): transl_table=11
atgagccgtatctttgcagacaacgcccattccatcggcaacacgccgttggtgcagatcaaccgcatcgcccctcgcggtgtgaccatccttgccaagatcgaagggcgcaacccaggttattcggtcaaatgccgcatcggcgcgaacatggtctgggacgccgagagcagcggcaagctcaagccgggcatgaccatcgtcgagcctacctcgggcaacaccggtatcggcctggccttcgttgccgctgcccgtggctacaagctgatgctgaccatgcccgcctcgatgagcctggagcgccgcaaggtgctgaaggcgctgggcgccgaactggtgctgaccgacccggccaagggcatgaagggcgccatcgagaaggccaacgaaatcgtcgcctccgaccccgcccagtacttcctgccgggccagttcgaaaacccggccaacccggccatccacgaaaagaccacaggaccggagatctggaacgataccgacggtgcggttgacgtgctggtggcgggcgtgggtaccggtggcaccatcaccggtgtatcgcgctacatcaagcacacccagggcaaggcgatcctctcggtggccgtggaacccgtttcgtcgccgctgattacccagaccctggccggcgaagaactcaagcccagcccgcacaaaatccagggcattggcgccggtttcgtgccgaaaaacctcgacttgtcgatcgtcgaccaagtggcgacggtgaccgacgaagagtccaaggccatggccattcgcctgatgcaggaagagggcatcctgtgcggcatttcttgcggtgcggccatggcggcggccgtgcgcctggccgaaaagccggaaatgcaaggtaagaccatcgtcgtaatcctgcccgattcgggcgagcgttacctgtcgagcatgctgttcagcgacctgttcagcgagcaggaaaaccagcaataa

SEQ ID NO: 403 - protein, 324 aa, Pseudomonas putida GB-1
MSRIFADNAHSIGNTPLVQINRIAPRGVTILAKIEGRNPGYSVKCRIGANMVWDAESSGKLKPGMTIVEPTSGNTGIGLAFVAAARGYKLMLTMPASMSLERRKVLKALGAELVLTDPAKGMKGAIEKANEIVASDPAQYFLPGQFENPANPAIHEKTTGPEIWNDTDGAVDVLVAGVGTGGTITGVSRYIKHTQGKAILSVAVEPVSSPLITQTLAGEELKPSPHKIQGIGAGFVPKNLDLSIVDQVATVTDEESKAMAIRLMQEEGILCGISCGAAMAAAVRLAEKPEMQGKTIVVILPDSGERYLSSMLFSDLFSEQENQQ

SEQ ID NO: 404 - DNA, 915 bp, Thermus thermophilus HB27
  CDS (1)..(915): transl_table=11
atgcgggtggagggcgccatcggcaagacccccgtggtccgcctcgccaaggtggtggagccggatatggccgaggtctgggtcaagctggaagggctgaaccctgggggctccatcaaggaccgccccgcctggtacatgatcaaggacgccgaggagcgggggatcctgaggccgggctcgggacaggtcatcgtggagcccacgagcggcaacaccggcatcggcctcgccatgatcgccgcaagccggggctaccgcctcatcctcaccatgcccgcccagatgtccgaggagcggaagcgggtcctcaaggcctttggcgccgagctcgtcctcaccgacccggaaaggcggatgctcgcggcgagggaggaggcgctaaggctcaaggaggagctcggggccttcatgccggaccagttcaaaaaccccgccaacgtccgggcccactacgagaccacggggcccgagctctacgaggccctggagggccgcatagacgccttcgtctacggctccggcaccgggggaacgatcacgggggtgggccgctacctcaaggaaaggatcccccacgtgaaggtcatcgccgtggagcccgcccgctccaacgtcctctccggggggaagatggggccgcaccagttccagggcatgggcccgggcttcatccccgagaacctggacctttccctcctggacggggtgatccaggtctgggaggaggacgcctttcccttggcccggcggctcgcacgggaggaggggcttttcctggggatgagctcgggggggatcgtctgggccgccctccaggtggcccgggagctcggccccgggaagcgggtggcctgcatcagcccggacggcggctggaagtacctctccacccccctttacgccgagccctag

SEQ ID NO: 405 - protein, 304 aa, Thermus thermophilus HB27
MRVEGAIGKTPVVRLAKVVEPDMAEVWVKLEGLNPGGSIKDRPAWYMIKDAEERGILRPGSGQVIVEPTSGNTGIGLAMIAASRGYRLILTMPAQMSEERKRVLKAFGAELVLTDPERRMLAAREEALRLKEELGAFMPDQFKNPANVRAHYETTGPELYEALEGRIDAFVYGSGTGGTITGVGRYLKERIPHVKVIAVEPARSNVLSGGKMGPHQFQGMGPGFIPENLDLSLLDGVIQVWEEDAFPLARRLAREEGLFLGMSSGGIVWAALQVARELGPGKRVACISPDGGWKYLSTPLYAEP

SEQ ID NO: 406 - DNA, 927 bp, Desulfovibrio vulgaris subsp. vulgaris str. Hildenborough
  CDS (1)..(927): transl_table=11
atggacatcgcatcaagcatgacggacctcgtgggcaagacgcccatggtgcgcctcaacaaggtcacactcggctgtgtcgccgaggtcgtcgccaaactcgagaatttcaacccgtgcagttccgtgaaggaccgcatcgccctcaacatggtggaagccgccatcgcacggggagagattgccccgggcgcggtgcttgtggaacccaccagcggcaacaccggagtgggccttgccttcgtatgcgccgtgcgcggcctcaagctggtgctgaccatgccggagagcatgagcgccgaacgccgggcactgctcaaggccttcggcaccacgctggtgctcacgcccgcagccaaggggatgcgtggcgcggtggaagaggccgagcgcatcgtggccgacacccccggtgcggtgatgctgcaacagttcgccaaccccgacaaccccgctgcccatgaggccaccaccggcccggagatatgggccgacaccgacggcatgatcgactgcttcgtggcgggggtcggcacgggcggcaccatcaccggtacgggacgctacctcaagggacgcaaccccgacatccgggtcatcgccgtcgaacccgcagaatcggccgtgctttccggcggtgcccccggcccccatgccattcagggcatcggtgcggggttcgtcccgcccgtgctcgacacgtcggtctatgacgaggtgatgcccgtccccggtgccgacgcgctgaccatggcccggcggctgcttcaggaggagggcatcctgtgcggcatctcttcgggtgccaacgtgcatgccgccatcgcctacgccagacgccccgagaatgcgggcaagcgcgtggtgtgcatcatctgcgacacgggcgaacgctacctttcgacaccgctcttcgcccccgagtag

SEQ ID NO: 407 - protein, 308 aa, Desulfovibrio vulgaris subsp. vulgaris str. Hildenborough
MDIASSMTDLVGKTPMVRLNKVTLGCVAEVVAKLENFNPCSSVKDRIALNMVEAAIARGEIAPGAVLVEPTSGNTGVGLAFVCAVRGLKLVLTMPESMSAERRALLKAFGTTLVLTPAAKGMRGAVEEAERIVADTPGAVMLQQFANPDNPAAHEATTGPEIWADTDGMIDCFVAGVGTGGTITGTGRYLKGRNPDIRVIAVEPAESAVLSGGAPGPHAIQGIGAGFVPPVLDTSVYDEVMPVPGADALTMARRLLQEEGILCGISSGANVHAAIAYARRPENAGKRVVCIICDTGERYLSTPLFAPE

SEQ ID NO: 408 - DNA, 951 bp, Picrophilus torridus DSM 9790
  CDS (1)..(951): transl_table=11
atgtcagatataaaagagaatgttctcaatgcaataggaaacacacctcttgtaaaattaaataaaatcaacgttaaaaatatagaaatatatgtaaagcttgagtattacagtcccggcatgagcataaaggacagaatagcccttggcatgatagaggatgccgagagaaagggtttgatcgagccgggtgacacaataataggcaaaacctcaggtaataccggcatagggcttgcgatagcctgtgctgtaaagggatacagatttgttgcggtcatgtccgctggaaattccgcagaaagacaaaaaatactaagggcccttggtgccgaggtcgttcttgtgccgcagcaacccggtgaggaacctggaagaatatcaagaaaggacaacgatgccgttgagaaaaagacacaggaattaacagaaaaattgaatgcatacaggccaaatcagtacataaattcaatgaactggaaggttcatcagcacacaacaggccaggagataataaggcagacttctggaaggctggacgcgtttgttgcatacataggcaccggtggaacctttgttggaatagcaagggccctgaaaagctttaacaatgatataaaatgctatcctgttgaaccagatgttgcagcatttctcgcaggcaaaaaggttataacgacgcagcatctgatccagggtggcggtcatgcagtgaaacctccgttctgggatgaatcaatagtggatggatatatacaggtttccgaggatgaggcaataaaaactgcaagggcacttgcaaaaaatgagggtatactaacaggtttttcaggcggtgcaaacgttgcagccgcagccaagctcgacgattcattaaggccgggcagcatcgtggttacggttttacctgatacaggacttaaatacctttcaacggttctctatgagtag

SEQ ID NO: 409 - protein, 316 aa, Picrophilus torridus DSM 9790
MSDIKENVLNAIGNTPLVKLNKINVKNIEIYVKLEYYSPGMSIKDRIALGMIEDAERKGLIEPGDTIIGKTSGNTGIGLAIACAVKGYRFVAVMSAGNSAERQKILRALGAEVVLVPQQPGEEPGRISRKDNDAVEKKTQELTEKLNAYRPNQYINSMNWKVHQHTTGQEIIRQTSGRLDAFVAYIGTGGTFVGIARALKSFNNDIKCYPVEPDVAAFLAGKKVITTQHLIQGGGHAVKPPFWDESIVDGYIQVSEDEAIKTARALAKNEGILTGFSGGANVAAAAKLDDSLRPGSIVVTVLPDTGLKYLSTVLYE

SEQ ID NO: 410 - DNA, 918 bp, Bacillus thuringiensis serovar konkukian str. 97-27
  CDS (1)..(918): transl_table=11
atgaaattatgtgaaaacgtaacagaattaataggagatacacctgtcgtccgattatctaaatttattccagaagacgcagcagatgtgtatgtaaaactagaaatgtttaatccatcgcgcagtgtgaaagaccgtgctgcctataatttactgcacgttgcagaagagaatggtcttatcaaaccaggagatacaattattgaaccgacaagtggaaatacagggataggcttagcaatgaatgcagcagctaaagggtataaagcgattttaattatgccagataatatgtcaaaagagcgtataaatttattaaaagcatacggtgcagaagtagttttaacaccagcagaacaaagaatgccaggagcaattgcgaaggcgttagaactgcaaaagcaaattccaaatagttttattccgcagcaatttgaaaatccagcaaacccgaatattcaccgttatacaactgcacttgaaatttatgaacaaatggatggagagcttgatgcgtttgtagcaacggcaggaacaggcggaactattacagggactggggaaacattaaaagagaaactaccaaacttatatattgcagtagtagaaccgaaaggatctcccgttttatcaggcggtgtgccaggtcctcataaactagtaggaacaagtccggggtttattccgaaaaatttaaatacagaagtgtataacgaaattattcaaattgcagatgaagaggctttaacgacaatgagaaacttagctagacaagaaggtttattagtagggccgtcttccggagcttctgtttatgccgcaattatgattgcaaaacgtttaggcactggaaaaaaagttttatgtgttgcacctgatacaggggaacgttatttgagtatgggattatttgaatga

SEQ ID NO: 411 - protein, 305 aa, Bacillus thuringiensis serovar konkukian str. 97-27
MKLCENVTELIGDTPVVRLSKFIPEDAADVYVKLEMFNPSRSVKDRAAYNLLHVAEENGLIKPGDTIIEPTSGNTGIGLAMNAAAKGYKAILIMPDNMSKERINLLKAYGAEVVLTPAEQRMPGAIAKALELQKQIPNSFIPQQFENPANPNIHRYTTALEIYEQMDGELDAFVATAGTGGTITGTGETLKEKLPNLYIAVVEPKGSPVLSGGVPGPHKLVGTSPGFIPKNLNTEVYNEIIQIADEEALTTMRNLARQEGLLVGPSSGASVYAAIMIAKRLGTGKKVLCVAPDTGERYLSMGLFE

SEQ ID NO: 412 - DNA, 999 bp, Acinetobacter sp. ADP1
  CDS (1)..(999): transl_table=11
atgtctaccgatcaagagtttaaagcaccagcaaatttgggcatagcagtatattcaaataatgcagaagcaattggaaatacgcctttagtacgcattaatcgtattattaaaactggtgcaacggttttaggtaaagttgagagtcgaaaccctgcattctcagtaaaatgccgcattggtgctgctttaattgcagatgcagagaaacgtggtgtattaaaatctggtatgcatattgttgaaccgactagtggcaatacagggattgctttagcttttgttgcagctgcaaaaggttacccgattaccttaaccatgccagcaagtatgagtcttgagcgccgaaaagtgcttaaagctttcggtgcaaacttggttttgacagaaccagcaaaaggaatgaaaggtgcagtggaggaagcagtacgattggcgacagaacagccagatatatatttcctgccacaacagttcgaaaatccagctaaccctaaaattcacgaacaaaccacagggccagaaatttgggatgcaaccaatgggcaagttgatattttagtcgctggagttggtacaggcggcacaatttcaggtatttcgcattattttgaaaaagttcagaataaacccatttattcagttgcagttgaacctgcagaatctccgattatcactcagaccaagcgtggtgaggagattacacctgcacctcataaaatccaaggtattggcgccaattttattccaaagaatctggacttagatattgtagatgaagtcatgcccatcactagtgatgaagcattggaatgggctcgtaaatgtgcgactcaagaaggaattttggggggtatttcatgtggtgcagccttagctgctgctgcaaaaattgcagaacgacctgaaaatgaaggtaaaactattgttgtgattttaccagatagcggtgaacgctacttatcttctgtattatttgaaggtatgtttgaggaatag

SEQ ID NO: 413 - protein, 332 aa, Acinetobacter sp. ADP1
MSTDQEFKAPANLGIAVYSNNAEAIGNTPLVRINRIIKTGATVLGKVESRNPAFSVKCRIGAALIADAEKRGVLKSGMHIVEPTSGNTGIALAFVAAAKGYPITLTMPASMSLERRKVLKAFGANLVLTEPAKGMKGAVEEAVRLATEQPDIYFLPQQFENPANPKIHEQTTGPEIWDATNGQVDILVAGVGTGGTISGISHYFEKVQNKPIYSVAVEPAESPIITQTKRGEEITPAPHKIQGIGANFIPKNLDLDIVDEVMPITSDEALEWARKCATQEGILGGISCGAALAAAAKIAERPENEGKTIVVILPDSGERYLSSVLFEGMFEE

SEQ ID NO: 414 - DNA, 924 bp, Acinetobacter sp. ADP1
  CDS (1)..(924): transl_table=11
atgaacacagtagaacctaattttttagctgatgagtttttgttagatcattatgttggaaagacgccattggtgcgattacagcgtttggcgtgtcatacacaatcggtagtattggcaaaattagaaggcaacaatccagcaggatccgttaaagatcgccctgcttataacatgatcatgcaagctgaaaagcgtggaaagattcgaccaggcgatacattgattgaagcaaccagcggaaatacaggaattgccttggcgatggttgcggccatgcgtggttataaaatgaagctgattatgcccaataacatgagccaagagcgtaaagatgcaatgttggcttatggtgcagagttgattgaagtgactcagcaacaaggcatggaaggcgctcgtgatttagccttgaaaatgcaatcagaaggtcaggggcttgttttaaaccagtttggtaatcctgataatgttgaagcacattatctcaccactggccctgaaatctggcagcagactaatggaaaaatcacgcattttgtgagttcgatgggaacgacgggcaccattatgggtgtatcaaaatatctaaaagagcaaaatccagatatccagattgtcggtttacaaccatctgaaggatcaagcattgcggggattcgacgttggccacaagaatatttgccaaccatttttgaaccgtcacgtgtcgatcgaattattgatattccgcaaatcgaagctgaaaaaaccatgcgccgtcttgccagagaagaaggaattagtgcaggaacttcttcggggggtgcagtgtgggcatctctcaagattgcggaagagcagcccgatgcagtcattgtttgtattatttgtgatcgcggtgatcgttacttgtcgactggactattttcggttcaagattga

SEQ ID NO: 415 - protein, 307 aa, Acinetobacter sp. ADP1
MNTVEPNFLADEFLLDHYVGKTPLVRLQRLACHTQSVVLAKLEGNNPAGSVKDRPAYNMIMQAEKRGKIRPGDTLIEATSGNTGIALAMVAAMRGYKMKLIMPNNMSQERKDAMLAYGAELIEVTQQQGMEGARDLALKMQSEGQGLVLNQFGNPDNVEAHYLTTGPEIWQQTNGKITHFVSSMGTTGTIMGVSKYLKEQNPDIQIVGLQPSEGSSIAGIRRWPQEYLPTIFEPSRVDRIIDIPQIEAEKTMRRLAREEGISAGTSSGGAVWASLKIAEEQPDAVIVCIICDRGDRYLSTGLFSVQD

SEQ ID NO: 416 - DNA, 882 bp, Pectobacterium atrosepticum SCRI1043
  CDS (1)..(882): transl_table=11
gtgacaacgcttgagcagtgtattggcaataccccgctggtgaaattacagcgcatgacgcaggggttgaagagtgaaatctggctgaagctggaagggaataatcccgccggttcggtaaaggatcgcgctgcattctctatgatcctgcaggcggaaaatcgtggtgacattactcccggtgaccggctgatcgaggcgaccagcggcaataccggtattgcgctggcaatgattgctgcgctaaaaggctaccggctgcgcttgctgatgccggacaacatgagctatgaacgccagactgcgatgcgtgcatatggcgcagagctggtgttggtcaatcgcaagctggggatggaaggggcacgagatcgggcgaaacagatggtactggcgggggaagggaagacgctcgatcagttcaataatccagacaactcgctggcgcactttctcacgacgggtccagaaatctggcagcagacggcaggcaagctgacgcactttatctccagtatgggaacgaccggtacgatctccggcgttagccgctacctgaagcagcagaatccggcaatctgtacggtagggttacagcctgcggaagggagccacattcccggtattcgccgttggacgccggactatatgccaggtattttccgcgccgatctggtcgatcgtattctggatatgacgcaagtggatgccgagaatacgctgcggcaactggcgcgtcaggaaggtattttctgcggtgtcagtaccggtggtgcggtggctggcgcgctgcggattgcggcggaaaaccccggcagcgtgattgtggcgatcgcctgcgatcgtggcgatcggtatctgtccaccggggtatttgattaa

SEQ ID NO: 417 - protein, 293 aa, Pectobacterium atrosepticum SCRI1043
MTTLEQCIGNTPLVKLQRMTQGLKSEIWLKLEGNNPAGSVKDRAAFSMILQAENRGDITPGDRLIEATSGNTGIALAMIAALKGYRLRLLMPDNMSYERQTAMRAYGAELVLVNRKLGMEGARDRAKQMVLAGEGKTLDQFNNPDNSLAHFLTTGPEIWQQTAGKLTHFISSMGTTGTISGVSRYLKQQNPAICTVGLQPAEGSHIPGIRRWTPDYMPGIFRADLVDRILDMTQVDAENTLRQLARQEGIFCGVSTGGAVAGALRIAAENPGSVIVAIACDRGDRYLSTGVFD

SEQ ID NO: 418 - DNA, 969 bp, Pectobacterium atrosepticum SCRI1043
  CDS (1)..(969): transl_table=11
atgagcaagatctacgaagacaattctttcacaatcggccatacgccgctggttcgcctgaaccgtatcggcaacggacgcattctggctaaagtggaatcccgcaaccccagcttcagcgtaaaatgccgtatcggctccaacctgatttgggatgcagaaaagcgtggcgttctcaaaccgggcatcgaactggttgaacctaccagcggaaacacagggatcgccctggcctacgtcgcggcggctcgcggctacaagctcactctcaccatgccggaaaccatgagcattgagcgtcgtaagctgctgaaagcgctgggggctaatctggtgctgaccgaaggcgccaaaggcatgaaaggggctatcgccaaagcagaagagattgtcgctagcgatccgagccgttatctgctgttacagcagttcagcaacccagctaacccagagattcacgaaaagaccaccggccctgaaatctgggaagatactgacggtgaggttgatgtctttatctctggcgtcggtacaggcggtacgctgactggcgtgagccgctacctcaagaacaccaaaggcaaggccataatcagcgtggcggttgaacctactgattcaccggtgatctctcaagcgcttgctggcgaagagctgaaacccggtccgcacaagattcagggcatcggcgcaggtttcattcctggaaacctagatctggaactgattgaccgcgtagaaaaagtgacgaacgaagaagcaatcagcaccgcacgccgtttgatggaagaagaaggcattctggctggtatttcttccggcgcagctgttgccgcagcactgaatttactcaaagagaaagagttcgacggtaaaactatcgtcgttattctgccctcttccggcgaacgctacctcagtaccgcactctttgccgacctgttcaccgaacaggaactgcaacaatag

SEQ ID NO: 419 - protein, 322 aa, Pectobacterium atrosepticum SCRI1043
MSKIYEDNSFTIGHTPLVRLNRIGNGRILAKVESRNPSFSVKCRIGSNLIWDAEKRGVLKPGIELVEPTSGNTGIALAYVAAARGYKLTLTMPETMSIERRKLLKALGANLVLTEGAKGMKGAIAKAEEIVASDPSRYLLLQQFSNPANPEIHEKTTGPEIWEDTDGEVDVFISGVGTGGTLTGVSRYLKNTKGKAIISVAVEPTDSPVISQALAGEELKPGPHKIQGIGAGFIPGNLDLELIDRVEKVTNEEAISTARRLMEEEGILAGISSGAAVAAALNLLKEKEFDGKTIVVILPSSGERYLSTALFADLFTEQELQQ

SEQ ID NO: 420 - DNA, 936 bp, Propionibacterium acnes KPA171202
  CDS (1)..(936): transl_table=11
atggcgaagatcgctaacgacgttaccgagctcatcggcaataccccgctggtcaagatcaataaactgttcccggactcccaggccaccgtattggccaagctcgagttctataacccggcctcgagcgtcaaggaccgtatcgctacgtcgatcgttgacgcggctgaggcttccggccagctcaatccgggaggcacgattgttgaagccacgtccggtaatacaggtgtcggtctggctctggttggtgcggctcgcggttacaaggtcatcatcactatgcctgagacaatgtcgaaggagcgccgcgccatcattcgtctgctgggtgccgagctggtgctcaccccaggcgctgacggcgtgccaggagccaacagcaaggctgccgagatcgtcgagaatacccccggtgccatcctggccagccagttcgataaccccgctaatcctgcgatccatcatgattgcactggtgaggagatctggaacgataccgagggcgaggtcgacgccatcgtcgccggtatcggtaccggtggcaccatctctggcgctggcaagtacctcaaggagaaggatcccgagatcaagatcttcggtgccgagcccgccgagtcccccgtcattactaaaggtgacaaggctccgcacaagatccagggctggggcccgggctttgtcccggataacctcgacaagtccgtcgttgacgggatcctgctggttcccggtgatgaggccatcgccttcgcccgtcgcgctgccgcagaagagggcattatcacgggtatctccggtggcggggccctgcaagctgccggtcaggtagtcgctcgtccagagtttgcgggaaagacgatcgtcgtcgttatcgctgacactggtgagcgctacctgtcgaccgctctcttcgaaggcctcctcgattga

SEQ ID NO: 421 - protein, 311 aa, Propionibacterium acnes KPA171202
MAKIANDVTELIGNTPLVKINKLFPDSQATVLAKLEFYNPASSVKDRIATSIVDAAEASGQLNPGGTIVEATSGNTGVGLALVGAARGYKVIITMPETMSKERRAIIRLLGAELVLTPGADGVPGANSKAAEIVENTPGAILASQFDNPANPAIHHDCTGEEIWNDTEGEVDAIVAGIGTGGTISGAGKYLKEKDPEIKIFGAEPAESPVITKGDKAPHKIQGWGPGFVPDNLDKSVVDGILLVPGDEAIAFARRAAAEEGIITGISGGGALQAAGQVVARPEFAGKTIVVVIADTGERYLSTALFEGLLD

SEQ ID NO: 422 - DNA, 921 bp, Desulfotalea psychrophila LSv54
  CDS (1)..(921): transl_table=11
atgaccacaacaattggacaatccattggcaacacccctttactcaagctaggtcgacttgacagggactgcgctgccaccattctcgttaaacaggaatcacgaaacccagcaggcagtgtaaaatgccgggttgccgtctccatgatcgaaacaggtctgcgagagggaaagatctctaagggaacaaccatcgtcgaaccaaccagtggcaacactggtattgggctcgcctttgtctgcgcagccaagggattacgcctcattctcaccatgcccgagagcatgagcatagagagacgtaaactcctggcgcatctgggcgccgagattgttcttaccccggcagccgagggaatgacaggagccatcaccaaagcagaggaactgctaacaggcctggctgatggctttatgccagatcagtttaataatccagccaacccagagatccatagacaaacaaccggcaaagagatcctgcgagataccgatggcagggtagatatctttgtcgccggagtgggcacaggcggcacccttaccggagtgggcagtgtacttaaggcaaaaaaccctagagtgcaggtgattgcggtagagcccgccacctctgccgttatttccggcgaagccccggggccccacggcatccagggtatcggggcaggattcatccccggtaatcttgatatcagtctcatcgacgaaaccatcaaggtaaacgacgaagatgcactcgtggcagctcaagagcttgccacccaagagggcattctctgtgggataagctcaggcgctgccttctgggcaagcctggaagttgccaaacgaccggaaaatataggaaaaaccattgtcaccattctaccggataccggggaaagatacctcagcaccaatctatttagcacctcttga

SEQ ID NO: 423 - protein, 306 aa, Desulfotalea psychrophila LSv54
MTTTIGQSIGNTPLLKLGRLDRDCAATILVKQESRNPAGSVKCRVAVSMIETGLREGKISKGTTIVEPTSGNTGIGLAFVCAAKGLRLILTMPESMSIERRKLLAHLGAEIVLTPAAEGMTGAITKAEELLTGLADGFMPDQFNNPANPEIHRQTTGKEILRDTDGRVDIFVAGVGTGGTLTGVGSVLKAKNPRVQVIAVEPATSAVISGEAPGPHGIQGIGAGFIPGNLDISLIDETIKVNDEDALVAAQELATQEGILCGISSGAAFWASLEVAKRPENIGKTIVTILPDTGERYLSTNLFSTS

SEQ ID NO: 424 - DNA, 969 bp, Yersinia pseudotuberculosis IP 32953
  CDS (1)..(969): transl_table=11
atgagcaagatatatgaagacaactctttaacaatcggccatacgccgctggttcgtctgaaccgtatcggcaacggacgtattttggcgaaagttgaatcgcgtaacccaagtttcagtgtgaagtgccgtatcggcgccaacatgatttgggatgctgaaaaacggggtattctgaccgcaggcaaagagctggttgaaccaaccagcgggaatacaggtgttgccctggcatttgtcgccgctgcacgtggctataaattaacccttaccatgcctgaaaccatgagcattgagcgccgcaagttgctgaaagcactgggggcaaatttggtgcttaccgaaggtgccaaagggatgaaaggcgcgattgccaaagcggaagaaattcaagcaaccgatccagaacgctaccttatcttgcaacaattcagtaacccggctaaccctgaaattcatgaaaaaaccaccggccctgaaatttgggaagataccgatggtgatgtagatgtctttgtctccggggtaggtaccggtggtaccctaaccggtgtcagccgctatattaaaaacaccaaaggcaaagccatcacgactgtggccgtcgaacccactgactcccccgtgattacccaagcgctggccggtcaagagatcaaacctggtccgcataaaattcaaggtattggtgcgggttttatccccggtaacctcgacttgagtctggttgatcgtgtagcgctggtcaccaatgaagaagctatttcgatggcccgccgtttgatggatgaagaaggcattctggcgggtatttcttcaggtgcagccgttgctgccgccgttaagctttcagaagaggaaggctttactgacaaaacaattgtggttatccttccctcctcgggtgaacggtatttaagtacagcattgttcgcagatttgttcacagagcaagagctgcaacagtag

SEQ ID NO: 425 - protein, 322 aa, Yersinia pseudotuberculosis IP 32953
MSKIYEDNSLTIGHTPLVRLNRIGNGRILAKVESRNPSFSVKCRIGANMIWDAEKRGILTAGKELVEPTSGNTGVALAFVAAARGYKLTLTMPETMSIERRKLLKALGANLVLTEGAKGMKGAIAKAEEIQATDPERYLILQQFSNPANPEIHEKTTGPEIWEDTDGDVDVFVSGVGTGGTLTGVSRYIKNTKGKAITTVAVEPTDSPVITQALAGQEIKPGPHKIQGIGAGFIPGNLDLSLVDRVALVTNEEAISMARRLMDEEGILAGISSGAAVAAAVKLSEEEGFTDKTIVVILPSSGERYLSTALFADLFTEQELQQ

SEQ ID NO: 426 - DNA, 894 bp, Yersinia pseudotuberculosis IP 32953
  CDS (1)..(894): transl_table=11
gtgacaaccctggaacactgcatcggccatacaccattggtgaaactacaacgcttaagccaagggctaaatgcggagatttgggtcaaactggaagggaacaatccggccggttcggttaaagatagagccgcgctggcgatgatccagcaggcagagttacgtggtgatattgcccccggtgatgtcctgattgaagcgaccagtggaaataccgggattgccttggcgatgattgccgccatgaaaggctatcacttgaagttactgatgccagaaaacatgagtcaggagcgtcaggcggcgatgcgggcttacggcgcggaactgattctggttagccgtgaacagggcatggaaggggcgcgtgatctggcgttaaccatgcaggagaacggcgaaggtaacgtgctggatcaatttaataatgcggataatccctatgcgcattttacggggaccgggccggaaatttggcagcaaacggcgggtaaagtgagccactttgtctccagtatggggaccaccggtacgatcaccggtgtcagccagtatctaaaaagccaaaatccgcaggtgaaggttatcggcctgcaaccagcagaaggcagcagtattccggggatccgccggtggtcagcggaatatataccgggtattttccgccccgagctggtggatcaggtgttggatatcacgcagagtgtcgcagagcaaaccatgcggcggctggcgaaagaagaggggatattctgtggcgtcagttctggtggtgcggtggctggggcgctgcggatcgcggtagataaccctgatgcggtgattgtggcgattatctgtgaccgtggtgaccgctatttatcaactggggtttttttaagtaaggggggctaa

SEQ ID NO: 427 - protein, 297 aa, Yersinia pseudotuberculosis IP 32953
MTTLEHCIGHTPLVKLQRLSQGLNAEIWVKLEGNNPAGSVKDRAALAMIQQAELRGDIAPGDVLIEATSGNTGIALAMIAAMKGYHLKLLMPENMSQERQAAMRAYGAELILVSREQGMEGARDLALTMQENGEGNVLDQFNNADNPYAHFTGTGPEIWQQTAGKVSHFVSSMGTTGTITGVSQYLKSQNPQVKVIGLQPAEGSSIPGIRRWSAEYIPGIFRPELVDQVLDITQSVAEQTMRRLAKEEGIFCGVSSGGAVAGALRIAVDNPDAVIVAIICDRGDRYLSTGVFLSKGG

SEQ ID NO: 428 - DNA, 936 bp, Symbiobacterium thermophilum IAM 14863
  CDS (1)..(936): transl_table=11
atggcccggatctacgacagcatcgccgacacgatcggacggacgcccctggtccggctgaaccgggtgaccgagggggcggtggcgaccgtgctcgccaaggtggaggccttcaacccggcgtcgtcggtgaaggaccgcatcggctacgcgatgatcaaggacgcggaggagaagggcatcctgaagcccggcatgaccatcgtcgaacccaccagcggcaacacgggcatcgccctggccttcgtggcggcggcgaaggggtatcgctgcatcctcacgatgccggacacgatgtcgctggagcggcggaagctgctcaaggccttcggcgcggagctggtgctgacgccgggcgcggagggcatgaagggggccatcgccaaggccaaggagatcctcgagaacacgcccggggcctggatgccccagcagttcgagaatccggccaatcctgagatccaccggaagaccacggccgaggagatctggcaggacaccgacggccaggtggacatcgtcgtcggcggcgtgggcaccggcggcaccctcacgggcgtcggcgaggtcatcaaggcccgcaagcccgacttcaaggtggtggcggtcgagccggccgagtcgccggtcatctcgggcggcaagcccggcccgcacaagatccagggcatcggcgccgggttcatcccgaagaacctgaacaccgaggtggtggacgaggtgatcacggtggccagcgaggacgccatcgcgactgcccgccgcatggcccgggaagaggggctcctcgtcggcatctcctccggcgccgcggcctttgccgcgctgcaggtggcccgccggccggagaatgccggcaagaccattgtggtggtgctgcccgacaccggcgaacgctacctctccagcgccctgtgggccgacatccaggtgtga

SEQ ID NO: 429 - protein, 311 aa, Symbiobacterium thermophilum IAM 14863
MARIYDSIADTIGRTPLVRLNRVTEGAVATVLAKVEAFNPASSVKDRIGYAMIKDAEEKGILKPGMTIVEPTSGNTGIALAFVAAAKGYRCILTMPDTMSLERRKLLKAFGAELVLTPGAEGMKGAIAKAKEILENTPGAWMPQQFENPANPEIHRKTTAEEIWQDTDGQVDIVVGGVGTGGTLTGVGEVIKARKPDFKVVAVEPAESPVISGGKPGPHKIQGIGAGFIPKNLNTEVVDEVITVASEDAIATARRMAREEGLLVGISSGAAAFAALQVARRPENAGKTIVVVLPDTGERYLSSALWADIQV

SEQ ID NO: 430 - DNA, 924 bp, Bacillus cereus E33L
  CDS (1)..(924): transl_table=11
atgcgagtggcacaatcagtttcagaattaatcgggaaaacgccgatcgttaagttgaaccgcatcgtagaatcagacagcgcagatatatacttaaaattagaatttatgaatccggggagcagcgttaaagatcgtatcgcattagctatgattgaagatgctgagaaaaaaggattattaaaagaaggcgatacaatcattgagccgacaagtggtaacacaggaattggtttagcgatggtagcagctgctaaaggatataaggcaattttagtaatgccagaaacaatgagcgttgagcgtcgcaatttattacgtgcttatggcgctgaattagtattgactccagggcctgaaggaatgggcggagcaattcgtcaagcgactgaattggcaaaagaacatggctactttataccgcaacagttcaaaaatcaatcaaatccagaaattcatcgtttaacaacaggtccagaaattgttgagcaaatgggtgatcaattagatgcatttattgcaggtattggtacaggtggaacgattactggtgctggtgaagtgctgaaggaagcatataaagatattaaaatttatgcagtagaacctgcggattcaccggtgttatctggtggaaaaccgggtccacataaaatccaaggaattggggctggatttgttccagaaacattggatgtagaagtatatgatgaaatcattcaagtgaaaacagagcaagcgttcgaatacgcaagaagagtggctaaagaggaaggtattttagttggtatctcttcaggagcggttatttatgcagcgacagaagttgcgaaaaagttaggtaaagggaaaaaggtacttgttattatcccaagtaatggtgaacgttatttaagtacaccactttatcaatttgagtcttaa

SEQ ID NO: 431 - protein, 307 aa, Bacillus cereus E33L
MRVAQSVSELIGKTPIVKLNRIVESDSADIYLKLEFMNPGSSVKDRIALAMIEDAEKKGLLKEGDTIIEPTSGNTGIGLAMVAAAKGYKAILVMPETMSVERRNLLRAYGAELVLTPGPEGMGGAIRQATELAKEHGYFIPQQFKNQSNPEIHRLTTGPEIVEQMGDQLDAFIAGIGTGGTITGAGEVLKEAYKDIKIYAVEPADSPVLSGGKPGPHKIQGIGAGFVPETLDVEVYDEIIQVKTEQAFEYARRVAKEEGILVGISSGAVIYAATEVAKKLGKGKKVLVIIPSNGERYLSTPLYQFES

SEQ ID NO: 432 - DNA, 918 bp, Bacillus cereus E33L
  CDS (1)..(918): transl_table=11
atgaaattatgtgaaaatataacagaattaataggagatacacctgtcgtcagattatctaaatttattccagaagacgcagcagatgtgtatgtaaaactagaaatgtttaatccatcgcgcagtgtgaaagaccgtgctgcctataatttactgcacgttgcagaagagaatggtcttatcaaaccaggagatacaattattgaaccgacaagtggaaatacagggataggcttagcaatgaatgcagctgcgaaagggtataaggcgattttaattatgccagacaatatgtcaaaagagcgtataaatttattgaaagcatatggagcggaagtagttttaacaccggcagaacaaagaatgccgggagcaattgcgaaggcgttagaactgcaaaaggaaattccgaatagttttattccgcagcaatttgaaaatccagcaaacccgaatattcatcgttatacaactgcacttgaaatttatgaacaaatggatggagagcttgatgcatttgtagcaacggctggaactggtggaactattacagggactggggaaacattaaaagagaagctaccaaacttatatattgcagtagtagaaccgaaaggatctcccgttttatcaggcggtgtgccaggtcctcataaactagtaggaacaagtccggggtttatcccgaaaaatttaaatacagaagtgtataacgaaattattcaaattgcagatgaagaggctttaacgacaatgagaaacttagctagacaagaggggttattagttgggccgtcttctggagcatctgtttatgcggcaattatgatagcaaaacgattaggtgcaggtaaaaaagttttatgtattgcacctgatacaggggaacgttatttgagtatgggattatttgaatga

SEQ ID NO: 433 - protein, 305 aa, Bacillus cereus E33L
MKLCENITELIGDTPVVRLSKFIPEDAADVYVKLEMFNPSRSVKDRAAYNLLHVAEENGLIKPGDTIIEPTSGNTGIGLAMNAAAKGYKAILIMPDNMSKERINLLKAYGAEVVLTPAEQRMPGAIAKALELQKEIPNSFIPQQFENPANPNIHRYTTALEIYEQMDGELDAFVATAGTGGTITGTGETLKEKLPNLYIAVVEPKGSPVLSGGVPGPHKLVGTSPGFIPKNLNTEVYNEIIQIADEEALTTMRNLARQEGLLVGPSSGASVYAAIMIAKRLGAGKKVLCIAPDTGERYLSMGLFE

SEQ ID NO: 434 - DNA, 924 bp, Bacillus cereus E33L
  CDS (1)..(924): transl_table=11
atgaatgtatatcgtggagttcatgagttaattggtcatacaccaattgtggaaattactcgtttttcacttccagaaggggtccgtttatttgcaaagcttgaattttataacccaggcggaagcgttaaggaccggctaggaagagaattaatcgaagatgcgctagaaaaagggcttgttacagagggcggaacaattattgaaccgactgccggaaatactggtattggactggcacttgcagcgttacaacatgatttacgcgttattgtttgtgtaccagagaaatttagtattgaaaaacaagaattaatgaaagcactaggtgcaacggtcgtgcatacaccgactgagcaaggaatgaccggtgcaattgcaaaagcgaaagagttagtaaatgaaataccaaattcatactctccaagtcagtttgcgaatgaagcaaaccctcgtgcttatttcaaaacattaggtcctgaactttggtcggcacttaacggagagattaacatatttgttgcaggagcaggaactggcggaacatttatggggactgcatcttatttgaaagaaaaaaatatagatataaaaacagttattgtggaaccagaaggatccattttaaatggtggtaaagctggctcacatgaaacagaagggattggccttgaattcatcccgccatttttgaaaacatcttattttgatgagattcatacaatttctgatcgaaatgcatttttacgagtgaaagaattagcacaaaaagaaggattgctcgttgggagctcttcaggagcagcgtttcatgcaagtttacttgaagcagagaaagcggcgccaggtacaaatattgtaacgatttttcctgatagtagtgagcgctatttaagtaaagacatatacaaaggatgggaataa

SEQ ID NO: 435 - protein, 307 aa, Bacillus cereus E33L
MNVYRGVHELIGHTPIVEITRFSLPEGVRLFAKLEFYNPGGSVKDRLGRELIEDALEKGLVTEGGTIIEPTAGNTGIGLALAALQHDLRVIVCVPEKFSIEKQELMKALGATVVHTPTEQGMTGAIAKAKELVNEIPNSYSPSQFANEANPRAYFKTLGPELWSALNGEINIFVAGAGTGGTFMGTASYLKEKNIDIKTVIVEPEGSILNGGKAGSHETEGIGLEFIPPFLKTSYFDEIHTISDRNAFLRVKELAQKEGLLVGSSSGAAFHASLLEAEKAAPGTNIVTIFPDSSERYLSKDIYKGWE

SEQ ID NO: 436 - DNA, 951 bp, Mannheimia succiniciproducens MBEL55E
  CDS (1)..(951): transl_table=11
atgacaatttttgcagataactcatattcaatcggtaatactccgttagttcgtttacataacttcggtcacaacggaaaccttgttgttaaaattgaaagccgtaacccaagtttcagtgtgaaatgccgtatcggtgcaaacatggtatggcaagcggaaaaagacggcgttttaactaaagacaaagaaattgttgacgctacaagcggtaacacaggtattgctcttgcttatgtagctgccgcccgcggttataaaattactctgactatgccggaaacaatgagccttgagcgtaaacgtttattacgcggtctaggcgtaaacctggtgttaacggaaggcgcaaaaggtatgaaaggcgctattgctaaagcggaagagatcgtcgcatcggatccgaaccgttatatcatgctaaaacaatttgaaaacccggcgaatccggcaattcaccaacaaaccacaggtgtcgaaatttggcaggcgaccgaaggtaaagtggatgtggttgttgcaggcgtgggtaccggcggtacaattacaggtatttcccgagcaattaagctggaccaaggcaaacaaattacttccgttgccgtagaacctgccgaaagcccggttattacacaaatcttagccggcgaagaaattaaaccgggtccgcataaaattcagggtatcggtgccggttttattccgaaaaacttagatctttcgcttatcgaccgcgttgaaaccgtagatagtgatacggcaataaaaaccgcccgccgtttaatggctgaagaaggtattcttgctggtatttcatccggtgcggcagttgcggcggcggatcgtttagcaaaattaccggaattccaagataaattaatcgtagcgattcttccttccgcttcagaacgttatttaagtacggcgttatttgaaggtatcgaaggctaa

SEQ ID NO: 437 - protein, 316 aa, Mannheimia succiniciproducens MBEL55E
MTIFADNSYSIGNTPLVRLHNFGHNGNLVVKIESRNPSFSVKCRIGANMVWQAEKDGVLTKDKEIVDATSGNTGIALAYVAAARGYKITLTMPETMSLERKRLLRGLGVNLVLTEGAKGMKGAIAKAEEIVASDPNRYIMLKQFENPANPAIHQQTTGVEIWQATEGKVDVVVAGVGTGGTITGISRAIKLDQGKQITSVAVEPAESPVITQILAGEEIKPGPHKIQGIGAGFIPKNLDLSLIDRVETVDSDTAIKTARRLMAEEGILAGISSGAAVAAADRLAKLPEFQDKLIVAILPSASERYLSTALFEGIEG

SEQ ID NO: 438 - DNA, 924 bp, Bacillus licheniformis ATCC 14580
  CDS (1)..(924): transl_table=11
atggttcgcgttgcaaactctgtttatgacttaatcggaaatacacctgtcgttaaattaaatcgactagttgatgaagacagtgctgaagtatatgtgaaactggagtatatgaaccctggaagcagcgtaaaagaccggattgcgcttgctatgatagaagacgctgaagagaaaggccttctgaaagaaggagatacactgattgaaccgacaagcggaaatacaggaatcggacttgccatggtcgctgcagcgaaaggcatcaaagcgattcttgttatgcctgatacaatgagttctgagcgccgcaaccttctgcgtgcatatggagctgagcttgtgctgactccaggtgctgagggaatgaaaggcgcgattaaaaaagcggaagaactggctgaggaacacggctattttatgcctcagcaatttaacaatcctgcgaacgcagaagttcaccgccgcacgacgggaaaagaaatcgctgaacaattcggagacggtttagatgctttcattgcaggtatcggaaccggcggaacgataacgggtgccggagaagttctgaaagaaaaaaatccgtccatcaagattttcgcggtggaaccgactgattctcctgttctttccggaggaaaaccagggccgcacaaaattcagggaatcggagcgggattcgttccgaaaatcttgaatacggaaatttacgatgaaatcatcacagtgaaaaacgaagaagcctttgaatttgcccgtaaagcggcgagagaggaaggaattctcggaggaatttcttcaggcgcagccatctgtgctgctcttcaagttgctaaaaagcttggaaaaggcaaaaaagttctcgctgtgcttcctagtaacggagagagatacttaagcacgcctctttaccaatttgaatag

SEQ ID NO: 439 - protein, 307 aa, Bacillus licheniformis ATCC 14580
MVRVANSVYDLIGNTPVVKLNRLVDEDSAEVYVKLEYMNPGSSVKDRIALAMIEDAEEKGLLKEGDTLIEPTSGNTGIGLAMVAAAKGIKAILVMPDTMSSERRNLLRAYGAELVLTPGAEGMKGAIKKAEELAEEHGYFMPQQFNNPANAEVHRRTTGKEIAEQFGDGLDAFIAGIGTGGTITGAGEVLKEKNPSIKIFAVEPTDSPVLSGGKPGPHKIQGIGAGFVPKILNTEIYDEIITVKNEEAFEFARKAAREEGILGGISSGAAICAALQVAKKLGKGKKVLAVLPSNGERYLSTPLYQFE

SEQ ID NO: 440 - DNA, 924 bp, Bacillus licheniformis ATCC 14580
  CDS (1)..(924): transl_table=11
atgaatgtgatcaaggatatcaccgaattgatcggcaaaacgccgcttctgcagattttggattttcgaatccctaaaggcgttaacatatatgcaaaacttgaaatgatgaatccgggaggcagcattaaagaccggctcggagaagtgctgattgctgaagcgatcggttcgggaaagctgaaacccggtggaacggtcattgaggcaacagcaggcaatacgggaatcggtctggctctcgccgccagaaagcacggcattcgacccgttttttgcgtacccgagcatttcagcatggaaaaacagtcgattatgaaagcgctcggcgctcggatagttcatacccccagaagtgccgggatgaagggtgcgattgaaaaagcacttgaacttgagaaggagattcccgattcttattgcgttttgcagtttaaaaacccagtaaatccattggcttactataaaacgattgccccggaaatatggaatgatcttggcggccggattgacgtcttcgtcgccggagcggggtcaggcggcacatttgcgggaaccgccaagtttctgaaagaaaaaaatccgtccattaaaacggttattgttgaaccggaaggctcgattttaaacggaggggaaccgcatgggcataagaccgaaggaatcggaatggaattcatcccggaatacatggaggaaagctatttcgatgagatttacacagtgcttgacgaagatgcgtttcgactcgtaaaagaagccgcggaaaaggaagggcttctgattggaagctcatcaggcgccgcgttgtttgccgcattgaaagaagccgaaaaagcgaaagccggcacaaacattgtgacgatttttcccgacagcagcgaccgctatttaagcaaaaaaatttacgaaggaggaatatga

SEQ ID NO: 441 - protein, 307 aa, Bacillus licheniformis ATCC 14580
MNVIKDITELIGKTPLLQILDFRIPKGVNIYAKLEMMNPGGSIKDRLGEVLIAEAIGSGKLKPGGTVIEATAGNTGIGLALAARKHGIRPVFCVPEHFSMEKQSIMKALGARIVHTPRSAGMKGAIEKALELEKEIPDSYCVLQFKNPVNPLAYYKTIAPEIWNDLGGRIDVFVAGAGSGGTFAGTAKFLKEKNPSIKTVIVEPEGSILNGGEPHGHKTEGIGMEFIPEYMEESYFDEIYTVLDEDAFRLVKEAAEKEGLLIGSSSGAALFAALKEAEKAKAGTNIVTIFPDSSDRYLSKKIYEGGI

SEQ ID NO: 442 - DNA, 933 bp, Bacillus licheniformis ATCC 14580
  CDS (1)..(933): transl_table=11
atgagagccgttcaaaatattgcagaattaatcggggaaacgccccttgtcaagttgaaccgcgttcagcccgaaaacgcggcccaagtttatatcaagcttgaatcttttaatccgagcggaagcgtaaaagaccgcgcggcctaccaaatgatcctggatgccgaagaaaaaggcctgctgaaaccgggttcaaccatcattgaaccgacgagcgggaacaccggcatcggccttgcgatgaacgcggcggcaagaggctacaaagccattcttgtcatgcctgatacgatgacgaaggagcggatcaatcttctgaaagcgtacggagccgaagtcgtcctgacgccgggggatgaaagaatgccgggcagcatcaaaaaagcgcaggagctcgctcggcaaatcccaggcagctttattccgatgcagtttgataatgaagccaatccggaggctcaccggagatcaaccgctctggaaattgcccgggcaatagaagaaatcggcaaacctctcgctgcatttgttgcaacagcagggacagggggaacgattaccggaacaggcgaaaagctgaaagctttatttccgggaataaccgttcacgtggcagaacctgcagggtcgcctgttttatccggcggcaaacccggaaaacacaagcttgtcgggacaagcccgggatttatcccaaacattttaaacgaaaacgtctatgacgaaatcttaaagatcaaggatgaagaagcctatgagatgacgcgcagattggcgcgggaagaaggaatccttgtcggcccttcttcaggagccgcttgcttcgctgctgttgaaacggccaagaagctccctcccgacaaagtggtcgtctgcatgacggccgatacaggggaacgctatttatcaagcgatttatttcaatttgattaa

SEQ ID NO: 443 - protein, 310 aa, Bacillus licheniformis ATCC 14580
MRAVQNIAELIGETPLVKLNRVQPENAAQVYIKLESFNPSGSVKDRAAYQMILDAEEKGLLKPGSTIIEPTSGNTGIGLAMNAAARGYKAILVMPDTMTKERINLLKAYGAEVVLTPGDERMPGSIKKAQELARQIPGSFIPMQFDNEANPEAHRRSTALEIARAIEEIGKPLAAFVATAGTGGTITGTGEKLKALFPGITVHVAEPAGSPVLSGGKPGKHKLVGTSPGFIPNILNENVYDEILKIKDEEAYEMTRRLAREEGILVGPSSGAACFAAVETAKKLPPDKVVVCMTADTGERYLSSDLFQFD

SEQ ID NO: 444 - DNA, 951 bp, Legionella pneumophila subsp. pneumophila str. Philadelphia 1
  CDS (1)..(951): transl_table=11
atgatttaccctaacatcctggccactataggccatactcccgttgtaaaaattaacaggcttggaaaagatctggaatgtgagctgtatgccaaatgcgaattctttaatcctggcggctccgtaaaagatcgtattggctatgaaatggtagtaaaagcagaaaaggaagggagaattaaaccgggagataccttgatcgagcctacttccgggaacaccggcataggtatagccctggcaggcgctgtattaggctacaaagtgattattaccatgccagaaaaaatgagccaggaaaagcaatccgtgctcgaacgcctgggagccatcatttatcgaacgccaacagaagcggcgtataatgatccagacagtcatatttctctggctaaaaaattacaagctgaaatccctaactcccatatccttgatcaatacgcgaaccccaataaccccaatgcccattattttgggaccgctcaggaaattattgacgacttcggaaaagatttacatatggttgttgctggcgttgggacaggcggaacaattacaggcattgccaaacgccttaaagaatttaaccctgccatcaaaatcattggagcagatcccgaaggctcaattctcggtggcggcacagaaatcaaatcttatcatgttgaagggataggttatgatttcttccctgatgtgctggataatacgttgattgatgcctacataaaaaccaatgatgcggattctttccgtactgccagacgcctcattaaagaagaaggactgttaattggcggctcatgtggagcagcgatgtgggccgcattgcaagcagccaaatccttaagcaaaggacaaaaatgtctggtgattttacccgactctatccgtaattacatgtccaaatttgccaatgatgaatggatgaaagaaatgggctttctttaa

SEQ ID NO: 445 - protein, 316 aa, Legionella pneumophila subsp. pneumophila str. Philadelphia 1
MIYPNILATIGHTPVVKINRLGKDLECELYAKCEFFNPGGSVKDRIGYEMVVKAEKEGRIKPGDTLIEPTSGNTGIGIALAGAVLGYKVIITMPEKMSQEKQSVLERLGAIIYRTPTEAAYNDPDSHISLAKKLQAEIPNSHILDQYANPNNPNAHYFGTAQEIIDDFGKDLHMVVAGVGTGGTITGIAKRLKEFNPAIKIIGADPEGSILGGGTEIKSYHVEGIGYDFFPDVLDNTLIDAYIKTNDADSFRTARRLIKEEGLLIGGSCGAAMWAALQAAKSLSKGQKCLVILPDSIRNYMSKFANDEWMKEMGFL

SEQ ID NO: 446 - DNA, 933 bp, Methylococcus capsulatus str. Bath
  CDS (1)..(933): transl_table=11
atgaaaatcgccaatagcgtcaccgatctcatcggcaatacccccctggtccgaatccaccggctcagcgcaggctgcggcgcggaggtcgtcgccaagctcgaattcttcaacccggcccacagcgtcaaggaccgcatcggcgcggcgatgatcgacgccgccgagcaagctggcctgatcggtccggacaccgtcatcgtcgaacccaccagcggcaacaccggcatcgccctggccatggtctgcgccgcgcgcggctaccgctgcgtgctgaccatgcccgaaaccatgagcaaggagcgtcgcatgctgctgcgggcctacggggcggagctcgttctgacaccgggcccggatggcatgggcggggcgatccgtaaggcggaggaactggcggcttccgatccgaaatatttcatgccccagcagttcaagaacgccgccaatccggaaatccaccgcaggacgacggccgaggaaatctggcgcgacaccgagggtcgggtcgacatcgtggtggcgggagtcggtaccggcggtaccatcaccggggtgggcgaagtcctgaagcagcgcaagccctcccttcggtgtgtcgcggtggagccagacgcttcgccggtgctgtccggcggcgagaagggaccgcacccgatccagggcattggcgccggcttcgtgccgccgatcctgaataccacgatttacgacgaggtcatccgggtgaagaacgacgatgctttcgaattcgcccggcgcgcggcccgggaggagggtctgctggtcggcatttcttccggtgcggcgctgtgggccgcgcggcaactggcatgccgtccggagaacgcagggaagctgatcgtgacgatcatcccctcgttcggcgaacgctacctcagtaccgccctgtttgcacatctggaggactaa

SEQ ID NO: 447 - protein, 310 aa, Methylococcus capsulatus str. Bath
MKIANSVTDLIGNTPLVRIHRLSAGCGAEVVAKLEFFNPAHSVKDRIGAAMIDAAEQAGLIGPDTVIVEPTSGNTGIALAMVCAARGYRCVLTMPETMSKERRMLLRAYGAELVLTPGPDGMGGAIRKAEELAASDPKYFMPQQFKNAANPEIHRRTTAEEIWRDTEGRVDIVVAGVGTGGTITGVGEVLKQRKPSLRCVAVEPDASPVLSGGEKGPHPIQGIGAGFVPPILNTTIYDEVIRVKNDDAFEFARRAAREEGLLVGISSGAALWAARQLACRPENAGKLIVTIIPSFGERYLSTALFAHLED

SEQ ID NO: 448 - DNA, 888 bp, Methylococcus capsulatus str. Bath
  CDS (1)..(888): transl_table=11
atgtttcccaccatcgaatccttcgtcggcaacacgccgctggtacgtttgcagcgcttgcccggcgacaccgccaacttcattctggccaagctggaaggcaacaaccccgcggggtccgtcaaggaccggccggccctcagcatgatccgctgcgccgaggcgcgcggcgacatccagccgggcgaccggttgatcgaggcgaccagcggcaacaccggcattgccctggccatggcggcggccatcaagggctaccgcatgaccctgatcatgcccgataacatgagcgccgagcgtcgggcgacgatgaaggctttcggggccgagatcatcctgacgccggcggcgggcggcatggaggcggccatcgacctggcacgggcgatggaggctcggggcgagggcaagatcctcgatcagttttccaactccgacaatccacgcgcccattacgaaggcacggggccggaaatctggcgagacagccaggggcgggtcacccacttcgtcagctccatgggcaccaccggcaccatcatgggcacggcacgctacctgaaagagcggaatcctgcgatccagatcatcggcgtccagcccaaggacgaggccaggatccccggcatccggcgttggccgcaggaatacctgccgaagatctacgatccctcgctggtggaccgcatcctcgacgtgacccaggaagaggccgagtcgaccacgcgggaactggcggcacaggaaggcatcttcgccggcatttcctccggcggtgcggtggcagccgccctgcgactgtcgcgggaggtggagaacgcggtgatcgccgtcatcatctgcgaccgcggcgaccgttatctctccacaggcgtatttccggaataa

SEQ ID NO: 449 - protein, 295 aa, Methylococcus capsulatus str. Bath
MFPTIESFVGNTPLVRLQRLPGDTANFILAKLEGNNPAGSVKDRPALSMIRCAEARGDIQPGDRLIEATSGNTGIALAMAAAIKGYRMTLIMPDNMSAERRATMKAFGAEIILTPAAGGMEAAIDLARAMEARGEGKILDQFSNSDNPRAHYEGTGPEIWRDSQGRVTHFVSSMGTTGTIMGTARYLKERNPAIQIIGVQPKDEARIPGIRRWPQEYLPKIYDPSLVDRILDVTQEEAESTTRELAAQEGIFAGISSGGAVAAALRLSREVENAVIAVIICDRGDRYLSTGVFPE

SEQ ID NO: 450 - DNA, 891 bp, Azoarcus sp. EbN1
  CDS (1)..(891): transl_table=11
atggactacaagacgctggaagactacgttggccacacgccgctggtgcgcctcaagcgcatcggcgcgggtcgcaacaacgtcattctcgcgaagctcgaaggcaacaacccggccggatcggtaaaggaccggccggcgctgtcgatgatcgtgcaggcggaagcgcgcggcgagatccgccccggcgatacgctgatcgaggcgaccagcggaaataccgggattgcgctggcgatggctgcggcgatgcgcggttaccagatgatcctcgtgatgccggaaaaccagagcgtcgagcggcgccagaccatgcgggcattcggcgccgagctcgtcctgactccgcgcgacggcggcatggaaatggcccgggacgtcgcggagcggatgcgcgatgaaggccggggcatcatccttgaccagttcgcgaatccggacaatccgctctctcattatgaagccactggtccggaaatctgggagcagacggacggccggatcacgcacttcgtcagcagcatgggcacgaccgggacgatcatgggctgctcgcgctttttgaaggaaagaaatccggcagtccggattatcggctgccagcccgacgagggctcgcagatcccgggcatccgcaagtggcccgaagcctatctgccgaagatctacgaaaaaccgcgggtcgatgcgctcgaaaacgtgagccaggccgacgccgaggagatgacacggcgcctggcgcgcgaggaaggcatttttgccggaatatcctccggcggcgcgatgcacgtcgccgtccgcattgctgccgaactggaaaatgcagtgatcgtgtccatcatctgcgatcgtggcgaccggtacctgtcgaccggcgtgtttccgggctga

SEQ ID NO: 451 - protein, 296 aa, Azoarcus sp. EbN1
MDYKTLEDYVGHTPLVRLKRIGAGRNNVILAKLEGNNPAGSVKDRPALSMIVQAEARGEIRPGDTLIEATSGNTGIALAMAAAMRGYQMILVMPENQSVERRQTMRAFGAELVLTPRDGGMEMARDVAERMRDEGRGIILDQFANPDNPLSHYEATGPEIWEQTDGRITHFVSSMGTTGTIMGCSRFLKERNPAVRIIGCQPDEGSQIPGIRKWPEAYLPKIYEKPRVDALENVSQADAEEMTRRLAREEGIFAGISSGGAMHVAVRIAAELENAVIVSIICDRGDRYLSTGVFPG

SEQ ID NO: 452 - DNA, 1065 bp, Silicibacter pomeroyi DSS-3
  CDS (1)..(1065): transl_table=11
atgatcttcaccaccacgggccgcgggcggctttatggctcgatcctggaaacggtgggcaatacgcccgtgatccgtttgaacaccatcgcccccggacatgtcaccatgtatgtgaagttcgaggcgttcaatccggcgggctcggtcaaggaccggctggcgctgaacatcatcgaggccgcagaacgcgagggccggttgcaaccggggcagaccgtggtcgaggcgaccagcggcaataccggtattggccttgccatggtctgcgccgccaagggctatccgctggtcatcaccatgcatgacgggttttcggtcgagcgccgccgcctgatgcggatgctgggcgccaaggtggtgctgacccgcaaggaggacaaggcggtcggcatggtggtgaaagccaaggaactggccgaggcgaacggctggttcctggcgcatcagttcgaaaccaaggacaacgccgatatccacgaggccaccacagcgcaagagatcctcggcgatttcgacggtgaacggctggatcacgtagtgctgggttatggcaccggcggcaccgtcgccgggttgggccgggtgctcaaagccgcgcggcctggactgaagatcaccctgagcgagcccgccaatgcagcgctggtacagtcgggcgaggcgcaacagcgcaatgccgagggtgaacccgccgcgacccatcccgccttcaacccgcatccgatccagggctggaccccggatttcatcccgctggtgctgcaagaggcgctggatcagggctatttcgacgcgctggagccggtgagcggcccggaaagcatcgcctggtccaaacgcctggcagccgaggaaggcatcctgaccggcatatcgggcggcgccagcctggcggcggcgatgaaagtggccgagaccgcgcccgagggctcggttcttctggtgatgctgcccgataccggcgagcgttacctctcgacgccgctgttcgaggacattgcggccgagatggacgaggccgaacaggcgctgtcggcctcgactcccggatatcagtactga

SEQ ID NO: 453 - protein, 354 aa, Silicibacter pomeroyi DSS-3
MIFTTTGRGRLYGSILETVGNTPVIRLNTIAPGHVTMYVKFEAFNPAGSVKDRLALNIIEAAEREGRLQPGQTVVEATSGNTGIGLAMVCAAKGYPLVITMHDGFSVERRRLMRMLGAKVVLTRKEDKAVGMVVKAKELAEANGWFLAHQFETKDNADIHEATTAQEILGDFDGERLDHVVLGYGTGGTVAGLGRVLKAARPGLKITLSEPANAALVQSGEAQQRNAEGEPAATHPAFNPHPIQGWTPDFIPLVLQEALDQGYFDALEPVSGPESIAWSKRLAAEEGILTGISGGASLAAAMKVAETAPEGSVLLVMLPDTGERYLSTPLFEDIAAEMDEAEQALSASTPGYQY

SEQ ID NO: 454 - DNA, 939 bp, Bacillus clausii KSM-K16
  CDS (1)..(939): transl_table=11
gtgaccgttgtaaacaacattacggaattgatcggcaataccccgcttgtaaaattaaaccgcctggcgactgctgaacatgcagacgtgtacttaaagcttgaataccaaaatccaggaagcagcgtaaaagatcggattgcactggcgatggtgaatgcagctgaagaatccggagaactaaagccaggagcgaccattgttgaaccaacaagtggcaacacgggcattggcctcgctatggttgcagcggccaaaggctataaaacaaaactggttatgcctgaaacgatgagtatggagcggcgtaacttgctgcgcgcttacggagctgagcttgtgttgaccccaggtccagaaggcatgggcggggcaatccgaaaagcgacagagttagctaaacaagacgggcattttatgccgcagcaatttgaaaacagcgccaatccgaaaatccaccgtgaaacgactggcaaagaactgcttaagcaagtcgatgggcagcttgacggctttgtcgccggcatcggcacaggcggcacgataactggagcaggcggcctattaaaagagcattttccagaattgaaaattgtcgcgattgagccgaaagactctcctgtgctgtcaggcggcaagcccggcccccataaactgcaaggcattggcccaggttttgtgccaggcatcttaaatacaaatgtgtatgattcggttttacaagtatcgactgaacaagcgtttgaatatgcacgtcgtgcggcaagggaagaaggcattttaggcggtatttcctcaggggcagccatttatggagcgttagaacttgcgaaagagctagggccaggtaaaaaagtggttgcgattattccttcaaacggagaacggtacttgagcacgccgctgtaccaatttgaggaagaaacgacccattcataa

SEQ ID NO: 455 - protein, 312 aa, Bacillus clausii KSM-K16
MTVVNNITELIGNTPLVKLNRLATAEHADVYLKLEYQNPGSSVKDRIALAMVNAAEESGELKPGATIVEPTSGNTGIGLAMVAAAKGYKTKLVMPETMSMERRNLLRAYGAELVLTPGPEGMGGAIRKATELAKQDGHFMPQQFENSANPKIHRETTGKELLKQVDGQLDGFVAGIGTGGTITGAGGLLKEHFPELKIVAIEPKDSPVLSGGKPGPHKLQGIGPGFVPGILNTNVYDSVLQVSTEQAFEYARRAAREEGILGGISSGAAIYGALELAKELGPGKKVVAIIPSNGERYLSTPLYQFEEETTHS

SEQ ID NO: 456 - DNA, 927 bp, Bacillus clausii KSM-K16
  CDS (1)..(927): transl_table=11
atggaagtgtaccgccatatccatgaactcataggttcaacccccatgcttgaactgacggcctttccgctcccgcgccgtgtgcgtttatttgcaaagttggagtataccaatcctggaggaagcattaaagaccgtttaggcatcaaactcctcaaggaagcaattgccaccggtaaaatcacaccgaagggcacattgattgagccaacggctggaaatacagggattgctcttgcgctcgcagcgattggcacggatgtaaaggtcatttgtgtcgtgccaaaggcatttagcatcgaaaagcagcagctgatgcgcgcccttggagctgtcattgtccatacaccgagtgaacatgggatgaagggagcaattgcaaaagcaaaagcgttagaacaagagcttgatgatgcttattgcccgcagcagttcagcaataaagcgaatccactcgcttattatgagacgcttggcccagaaatcgttcacgagcttgatggcaaagttgatgtttttgttgcaggcgctggaacaggagggacattttcaggaacagccgcttatttaaaagaagtgatccctggcattcgcactgttgtggtggaaccagagggttcgattttaaatggtggggagccaggaccgcaccggactgagggaattgggatggaattcatcccagactttgtaaacaggtctttatttgaagccatttatacgatttcagacaaccaagcgtttaagcggacacgcgaactcgctgaacatcaaggtgtgcttgtcggcagttcttcaggtgctgctcttgaagctgccttgcgagaggctgaaatggccgacgaaggtgcccatatcgtcactgtctttcctgacggggcggaacggtatttgagcaaaggcatttatgaggaggaacctttgtga

SEQ ID NO: 457 - protein, 308 aa, Bacillus clausii KSM-K16
MEVYRHIHELIGSTPMLELTAFPLPRRVRLFAKLEYTNPGGSIKDRLGIKLLKEAIATGKITPKGTLIEPTAGNTGIALALAAIGTDVKVICVVPKAFSIEKQQLMRALGAVIVHTPSEHGMKGAIAKAKALEQELDDAYCPQQFSNKANPLAYYETLGPEIVHELDGKVDVFVAGAGTGGTFSGTAAYLKEVIPGIRTVVVEPEGSILNGGEPGPHRTEGIGMEFIPDFVNRSLFEAIYTISDNQAFKRTRELAEHQGVLVGSSSGAALEAALREAEMADEGAHIVTVFPDGAERYLSKGIYEEEPL

SEQ ID NO: 458 - DNA, 933 bp, Bacillus clausii KSM-K16
  CDS (1)..(933): transl_table=11
atgcgagtagtagacaatatcgctgacttaattggacagacgcctttggtccgtttaaacaagctgcctgatagtgaaggcgcatctgtctatttaaaattagaaatgaataacccgagcggcagcgtgaaagaccgtgctgccttttccatgattattcaagcagaaaaggatggccatttgcaacctggttccaccattattgagccaacgagtggaaatactgggattggcttggctatgaacgctgcggcccgcggctatcgcgctattctcgtcatgcctgatacaatgagccaagaacggattaatttactaaaggcgtatggcgctgaagtcgtgctaacggaaggcgataaaaaaatgcctggggccatcgaaaaagccaaggagcttgccgaaagcattcctggctctttcatgccaatgcagtttgaaaatgaagcaaaccctgatgcccaccgccgtaccactgccatagaaattaaacaagacttagatgcaattggcgccacactttcagggtttgtcgcagcctctggtacgggcggcacgatcaccggcacaggagaagtgcttaaaacctattaccctgatgcccttattcatgtggtggagccagctggatcacctgttttgtcaggtggcaagcctggcccgcataagcttgtcggtacaagccctggatttgtaccgcctatactaaatacagctatctatgaccagattaggcggatcgaagatgaagatgcatacaagacagcaaaagacttggcacggcttgaaggcattcttgtcggcccttcttctggagcggcttgctttgcggcactggaaatggccaagacgcttgacaaaggcgatcacgtcgttgccatcgcctgtgatacaggcgagcgctatttatcgaccgacctgtatcaatccgaatag

SEQ ID NO: 459 - protein, 310 aa, Bacillus clausii KSM-K16
MRVVDNIADLIGQTPLVRLNKLPDSEGASVYLKLEMNNPSGSVKDRAAFSMIIQAEKDGHLQPGSTIIEPTSGNTGIGLAMNAAARGYRAILVMPDTMSQERINLLKAYGAEVVLTEGDKKMPGAIEKAKELAESIPGSFMPMQFENEANPDAHRRTTAIEIKQDLDAIGATLSGFVAASGTGGTITGTGEVLKTYYPDALIHVVEPAGSPVLSGGKPGPHKLVGTSPGFVPPILNTAIYDQIRRIEDEDAYKTAKDLARLEGILVGPSSGAACFAALEMAKTLDKGDHVVAIACDTGERYLSTDLYQSE

SEQ ID NO: 460 - DNA, 963 bp, Dehalococcoides ethenogenes 195
  CDS (1)..(963): transl_table=11
atggataatataacgcctgagcataataaacataccaaccaaaatatcgctccggatattactaaacttataggcaataccccgctggtgcgtctgaacaggataggcagcgggctgaaagccgaaattgtgctgaaactggaatcatttaatcccacccacagtgccaaagaccgccccgccctgcatatgatagaaaaggccgagcaggaaggcaagcttcgccccggaagcatcataatagaatccaccagcggcaataccggaatagcccttgccgcggtttgtgccgccagaggctaccgcctgatgctgaccatgcctgaaagcttctcactggaaagaaggcgtttgctccgcctgctgggggcggaactggtacttaccccgaaagaacttggtatgcagggggctctggaaaaagcagccgaactcaaaaacaagctcccagagacttttatacccggccagtttgtaaatccggctaatccggaaagccactgccagactactgccgcagaaatctggcgggatacaaacggcaaagtagatatactgatagcgggcgtaggcacaggcggcactctaagcggcacagccaaaggcctaaaagcagtcaaaccttcggtacagataatagcggtagaaccggtcgaatcaccggtactttcaggcggagaaccccacccccatcttattcagggcataggggcaggctttataccccgcatactttccgtggaactgatagacaaagtcatacaggtgcccggagaagaagcagtgaaaatggcactccgcctggcgcgtgaagagggtattatggcgggtatttcatccggggcagcactctgggcagcgctggaaacagctaaacagggcgaaaactgcggcaagcttattgtagccattatgcctgacagcggcgaacgctatttatccagcctgccgctgggtgactga

SEQ ID NO: 461 - protein, 320 aa, Dehalococcoides ethenogenes 195
MDNITPEHNKHTNQNIAPDITKLIGNTPLVRLNRIGSGLKAEIVLKLESFNPTHSAKDRPALHMIEKAEQEGKLRPGSIIIESTSGNTGIALAAVCAARGYRLMLTMPESFSLERRRLLRLLGAELVLTPKELGMQGALEKAAELKNKLPETFIPGQFVNPANPESHCQTTAAEIWRDTNGKVDILIAGVGTGGTLSGTAKGLKAVKPSVQIIAVEPVESPVLSGGEPHPHLIQGIGAGFIPRILSVELIDKVIQVPGEEAVKMALRLAREEGIMAGISSGAALWAALETAKQGENCGKLIVAIMPDSGERYLSSLPLGD

SEQ ID NO: 462 - DNA, 948 bp, Staphylococcus aureus subsp. aureus COL
  CDS (1)..(948): transl_table=11
ttgttagattctgtagggcaaacacctatggttcaacttcatcaactatttccgaaacatgaagtgtttgcaaagttagagtatatgaatcctggaggcagcatgaaagatcgacctgccaagtacatcattgaacatggtattaaacatggtttaatcactgagaatacacatttaattgaaagtacttctggtaatttaggcattgcgttggcaatgatagctaaaatcaagggattaaaactcacgtgtgttgttgatcctaaaatatcaccaacaaatttgaaaattattaaaagttatggtgccaatgtagaaatggttgaagaacctgatgcacatgggggttatttaatgactcgtattgcaaaggtgcaagaactgttagccactattgacgatgcatattggattaatcaatatgcgaatgagttaaattggcaatcccattatcatggtgcaggcacagagattgttgaaacaattaagcaacctatagattattttgtcgcgccagtcagcacgacaggtagcattatgggtatgagtagaaaaataaaagaagtgcatccaaacgcacaaattgttgctgttgatgcgaaagggtcagtcatttttggtgacaaacctattaatagagaattacctggtatcggtgctagtcgtgtacccgaaatattgaatagatcagaaattaatcaagtgatccatgtagatgattatcaatctgctttgggctgtcgaaaactgattgattatgaaggcatatttgccggaggttcaacaggttcgattattgcagcgattgagcagttgataacgtcaattgaagaaggtgcaacaattgtcacgattttaccagatcgaggcgatcgttacttagatttagtttattcagatacatggttagaaaaaatgaaatcaagacaaggagttaaatcagaatga

SEQ ID NO: 463 - protein, 315 aa, Staphylococcus aureus subsp. aureus COL
MLDSVGQTPMVQLHQLFPKHEVFAKLEYMNPGGSMKDRPAKYIIEHGIKHGLITENTHLIESTSGNLGIALAMIAKIKGLKLTCVVDPKISPTNLKIIKSYGANVEMVEEPDAHGGYLMTRIAKVQELLATIDDAYWINQYANELNWQSHYHGAGTEIVETIKQPIDYFVAPVSTTGSIMGMSRKIKEVHPNAQIVAVDAKGSVIFGDKPINRELPGIGASRVPEILNRSEINQVIHVDDYQSALGCRKLIDYEGIFAGGSTGSIIAAIEQLITSIEEGATIVTILPDRGDRYLDLVYSDTWLEKMKSRQGVKSE

SEQ ID NO: 464 - DNA, 909 bp, Staphylococcus epidermidis RP62A
  CDS (1)..(909): transl_table=11
atgattgcatacgatttgataggacaaactccattagttttattagaaagctttagtgacgagaatgttaaaatatacgccaaacttgagcaatttaatcctggtggtagcatcaaagaccgtctagggaagtacttaattgaaaaagcaatagatgaaggacgacttaaagaaggggatacaatagtcgaagcgactgctggtaatacaggcattggacttgctattgcttctaatcggcacaaagtaaaatgtatcatctttgctccagaaggatttgcagaagaaaaaatttcaattatgaaagcattgggtgcagatgttagacgtacccccaaagctgagggaatgactggcgcacagcaagaggcgttggcatacgcaacacgatatggatatttatatatgaatcaattcgaaactaaagataatcctggggcatatacacaaacacttgccaaacaactcacagatgaactttcacatattgattattttgtggcaggtgttgggtccggtggtacgtttacaggagttgcacaacacttaaaaacgtatgatgtaaaaaattatattgtagaaccagaaggctctgtcttaaatggtggtgtcagtcatcctcatgcaactgaagggattggttctgaaaagtggccatcatttttagaaaaagaattagtagatggtatttttactgttgccgataaagatgcttttaataatgttaaacttgtcgcgaataaagaaggattgttagttggtagttcttcgggagcggcattacaaggagcgttggaattaaaaaaaagcattcaaaatggtgtgattgttaccatctttccagatggaagcgatcgatacatgtccaaacaaatattcaactataaggagagttttaataatgaataa

SEQ ID NO: 465 - protein, 302 aa, Staphylococcus epidermidis RP62A
MIAYDLIGQTPLVLLESFSDENVKIYAKLEQFNPGGSIKDRLGKYLIEKAIDEGRLKEGDTIVEATAGNTGIGLAIASNRHKVKCIIFAPEGFAEEKISIMKALGADVRRTPKAEGMTGAQQEALAYATRYGYLYMNQFETKDNPGAYTQTLAKQLTDELSHIDYFVAGVGSGGTFTGVAQHLKTYDVKNYIVEPEGSVLNGGVSHPHATEGIGSEKWPSFLEKELVDGIFTVADKDAFNNVKLVANKEGLLVGSSSGAALQGALELKKSIQNGVIVTIFPDGSDRYMSKQIFNYKESFNNE

SEQ ID NO: 466 - DNA, 933 bp, Neisseria gonorrhoeae FA 1090
  CDS (1)..(933): transl_table=11
atgaaaattgcaaacagcatcaccgaattgatcggcaacacgcctttggtcaaactgaaccgtttgaccaaaggtttgaaggcagaggttgccgtgaaactggaattttttaatccgggcagcagcgtcaaagaccgcattgccgaagcaatgatcgaggccgccgaaaaagcgggaaaaatcaacaaaaacaccgtcattgtcgaagcaaccagcggcaatacgggtatcggtttggcaatggtatgtgccgcacgcggctacaaactggcgattaccatgccggaaagcatgagcaaagagcgcaaaatgctgttgcgcacgtttggcgcggaactgattctaacccccgccgccgaaggtatggcgggcgcgattgccaaagcgcaatccttggtggacgctcatccagacacttattttatgccgcgccagttcgacaatgaggcaaatcccgaagtccaccgcaaaacaaccgccgaggaaatttggaacgataccgacggtaaagtcgatgtcttcgttgccggcgtcggcacgggcggtacgattaccggcgtgggcgaagtgttgaaaaaatacaaacccgaaattgaagtgtgtgccgtcgaagctggcgcttcccccgtattgagcggcggcgaaaaaggtccgcacccgattcaaggtatcggcgcaggttttattccgaccgttttgaataccaaaatctacgacagcattgccaaagtgccgaacgaagcggcttttgaaaccgcccgtgcaatggcggaaaaagaaggcattttggcgggcatttcttccggtgcggcggtttggagcgcgttgcagcttgccaaacagcctgaaaacgaaggcaagctgatagtcgtgctgctgccttcttatggcgaacgctatctttctacgccactttttgcagatttggcataa

SEQ ID NO: 467 - protein, 310 aa, Neisseria gonorrhoeae FA 1090
MKIANSITELIGNTPLVKLNRLTKGLKAEVAVKLEFFNPGSSVKDRIAEAMIEAAEKAGKINKNTVIVEATSGNTGIGLAMVCAARGYKLAITMPESMSKERKMLLRTFGAELILTPAAEGMAGAIAKAQSLVDAHPDTYFMPRQFDNEANPEVHRKTTAEEIWNDTDGKVDVFVAGVGTGGTITGVGEVLKKYKPEIEVCAVEAGASPVLSGGEKGPHPIQGIGAGFIPTVLNTKIYDSIAKVPNEAAFETARAMAEKEGILAGISSGAAVWSALQLAKQPENEGKLIVVLLPSYGERYLSTPLFADLA

SEQ ID NO: 468 - DNA, 951 bp, Bacteroides fragilis NCTC 9343
  CDS (1)..(951): transl_table=11
atggcaaaaatcgcaaagaaacttaccgaactgataggccatactccattgatggagttgtccggttatagtcgtaaatacggccttcaagagaatatagttgctaaactggagtcgtttaaccctgccggaagcgtaaaggaccgcgtggcactttcgatgattgaggatgccgaagagagaggagtgctgcaacccggtgccactatcatcgagcctaccagtggcaataccggtgtgggacttgcgatggtggccactatcaaagggtatcgccttatactgaccatgcccgaaaccatgagcctggaacgtcgtaatctgttgaaggcattgggagcccagattgttttgactaacggacagaagggaatggccggttccattgccaaggcagaggaactgaaaaagtcgattccaggttcggtcattctgcaacagtttgagaatcctgcgaataccgaagtccatgctcggtctaccggtgaagaaatctggcaggatacggacggagaagtggctgtattcgtggcgggagtaggaaccggaggtactgtttgcggggtggcccgtgcattaaaaaaacataatccgaatgtatatatagtagctgtagagcctgcatcctctccggtactcgaaggcgggaaagcagcttcacaccgtatacaggggatcggagcgaatttcgtgcccggcatttatgatgcttcggttgtggacgaagtcatgcctgtgcccgatgatgaagcgattcgtggcggacgagaattggcctcgacagaaggattgttggtgggaatttcttccggagcagctgtttatgcagcccgtcaactggccggacgtccggaatttaaaggaaaaatgattgtgactctgttgccggataccggcgaacgctatctaaccaccgagctattcgcatttgacgcttatccgttggactga

SEQ ID NO: 469 - protein, 316 aa, Bacteroides fragilis NCTC 9343
MAKIAKKLTELIGHTPLMELSGYSRKYGLQENIVAKLESFNPAGSVKDRVALSMIEDAEERGVLQPGATIIEPTSGNTGVGLAMVATIKGYRLILTMPETMSLERRNLLKALGAQIVLTNGQKGMAGSIAKAEELKKSIPGSVILQQFENPANTEVHARSTGEEIWQDTDGEVAVFVAGVGTGGTVCGVARALKKHNPNVYIVAVEPASSPVLEGGKAASHRIQGIGANFVPGIYDASVVDEVMPVPDDEAIRGGRELASTEGLLVGISSGAAVYAARQLAGRPEFKGKMIVTLLPDTGERYLTTELFAFDAYPLD

SEQ ID NO: 470 - DNA, 948 bp, Bacteroides fragilis NCTC 9343
  CDS (1)..(948): transl_table=11
atgggaaagatagcaaagaaactgacagatttagtgggtaacaccccgttactggaactgagtaattacaatgcaagtaatgggctgaaggctcgtgtagtggcaaaactggaatatttcaacccggcggggagcgtgaaagaccgtatctctctggctatggttgaagatgccgaagcgaaagggacgttgaagtccggcgctactattattgagccgaccagtggaaatacaggtgtcggcctggcatttgtggcagctgccaaaggttacaaactgatattgaccatgcccgatacgatgagcatggaacgcaggaatctgctgaaagcactgggagcggagcttgtgcttactccgggagcgaacggaatgaaaggagccatcgccaaggccgaggaactgagggctgccactcccggatctgttatcctgcaacagttcgaaaatccggctaaccctgcagtccatgtccgtactacgggtcaggagatctggagagataccgatggaaaagtggatatctttgtagccggagtgggaacgggaggtactgtaagtggggtaggagctgctttaaaggagcataatcctgccgtacgaatcgttgccgtagagcctgtcgattcgccggtgctgtccggtggagctcccggtccgcacaagatacaggggattggtgccgggtttattcctaaaacttatcatgcagccgtagtagacgagatcaggcaggtgggaaatgacgatgccatccgcaccagtcgtgagttggctgctaaagaaggacttttggtcggcatttcttcgggagcagcagtatatgcggctacagagctggcaaaactgccggaaaatgaaggaaagctgatcgttgtattgctgccggatacgggagaacgctatctgtcgactatcttgtatgcgtttgaagagtatccgctttga

SEQ ID NO: 471 - protein, 315 aa, Bacteroides fragilis NCTC 9343
MGKIAKKLTDLVGNTPLLELSNYNASNGLKARVVAKLEYFNPAGSVKDRISLAMVEDAEAKGTLKSGATIIEPTSGNTGVGLAFVAAAKGYKLILTMPDTMSMERRNLLKALGAELVLTPGANGMKGAIAKAEELRAATPGSVILQQFENPANPAVHVRTTGQEIWRDTDGKVDIFVAGVGTGGTVSGVGAALKEHNPAVRIVAVEPVDSPVLSGGAPGPHKIQGIGAGFIPKTYHAAVVDEIRQVGNDDAIRTSRELAAKEGLLVGISSGAAVYAATELAKLPENEGKLIVVLLPDTGERYLSTILYAFEEYPL

SEQ ID NO: 472 - DNA, 1110 bp, Pseudomonas fluorescens Pf-5
  CDS (1)..(1110): transl_table=11
atgaactcggcgtcgctgatgtgtctcttgcataggcacgactggcccggctggcccgggtgttgcgcgactggacgctcaagggcgccaggcatacccttggggacttcttcactgctgcataaggacccagccatgagccgaatttttgctgataacgcccattccatcggcaatacgcccttggtgcagatcaaccgcatcgccccgcgcggggtgaccatcctggccaagatcgaaggacgcaacccgggctattcggtgaagtgccggatcggcgcgaacatgatctgggacgccgaaagcagcggcaagctcaagccgggcatgaccatcgtcgagcccacgtcgggcaacaccgggatcggcctggccttcgtcgccgccgcccgtggctacaagctgatgctgaccatgccggcgtccatgagcatcgagcggcgcaaggtgctcaaggccctgggcgccgagctggtgctcaccgagccggccaagggcatgaagggggcgatcgaaaaggcggcggaaatcgttgccagcgacccggccaggtacttcatgccgcagcagttcgataacccggccaacccggcgatccacgaaaagaccaccggtccggaaatctggaacgataccgacggcgcggtggacgtgctggtggccggggttggcacagggggcaccatcagcggtgtgtcgcgctacatcaagaagacccagggcaagccgattctctcggtggcggtggagccggcgacttctccggtgatcacccagaaactcgccggtgaagagatcaagcccagcccccacaagatccagggcatcggcgccggtttcgtgcccaggaacctggacctggcgatggtcgaccgggtggagctggtgaccgatgaagagtccaaggccatggccctgcggctgatgcaggaagagggcatcctctgcggcatctcctgcggcgcggcgatggcggtggcggtacgcctggcggaaaccccggaaatgcagggcaagaccatcgtggtgatcctgccggactccggtgagcgctacctgtcgagcatgcttttcagcgacctgttcaccgagcaggaaaaccagcagtaa

SEQ ID NO: 473 - protein, 369 aa, Pseudomonas fluorescens Pf-5
MNSASLMCLLHRHDWPGWPGCCATGRSRAPGIPLGTSSLLHKDPAMSRIFADNAHSIGNTPLVQINRIAPRGVTILAKIEGRNPGYSVKCRIGANMIWDAESSGKLKPGMTIVEPTSGNTGIGLAFVAAARGYKLMLTMPASMSIERRKVLKALGAELVLTEPAKGMKGAIEKAAEIVASDPARYFMPQQFDNPANPAIHEKTTGPEIWNDTDGAVDVLVAGVGTGGTISGVSRYIKKTQGKPILSVAVEPATSPVITQKLAGEEIKPSPHKIQGIGAGFVPRNLDLAMVDRVELVTDEESKAMALRLMQEEGILCGISCGAAMAVAVRLAETPEMQGKTIVVILPDSGERYLSSMLFSDLFTEQENQQ

SEQ ID NO: 474 - DNA, 957 bp, Psychrobacter arcticus 273-4
  CDS (1)..(957): transl_table=11
atgtccgctacagctccgttaaacgtcaactttatcacccagattactgaccttgctgattgcgtcggtcaaacgcccttggtcaaattgcagcgtttacctgagcaagagcagattgacaatggtgccatcatgcttgccaagcttgaaggtaataatcctgctggctctgtcaaagaccgccctgcgtttaatatgatctatcaagcggagcggcgcggtgatatcaagccaggtgacatgttgattgaggcaaccagtggcaataccggtattgctttagccatggtggcggcaatgcgcggctatccgattaccttgtttatgccaagtaactcaacccaagaacgtaaagatgccatgactgcttatggtgcaacgctgattcaggtagaagaagggatagaagcagcgcgcgatatggcattacaaatgcaagcagatggcaaaggtattgtattagatcaatttaataaccctgataataaacaagcgcattatctgactacagggcctgagctgtgggcgcaaactgagggtaaaatcactcattttatcagctctatgggcactactggcactattaccggtgtagcacagtatttaaaagagcaaaaccctgccatacaaatcatcggtctacaacctgatgaggaagcagctattgctggtatccgccgctggcctgccgcttatatgccaggaatttttgatgccgacctagtcgatgagattatggatatcgatcagcgcgtcgctgaggtctatatgcgtaagcttgccaaaactgaagggatatttgcgggtgtctcctccggtgcagcggcatgggccgccacacaagtcgctaaagcaaatcctgatgccgtcattgcctttatcgtctgtgatcggggtgatcgttatttatcgactggcttatataatgtcgatgacagcatagataatgcaaactaa

SEQ ID NO: 475 - protein, 318 aa, Psychrobacter arcticus 273-4
MSATAPLNVNFITQITDLADCVGQTPLVKLQRLPEQEQIDNGAIMLAKLEGNNPAGSVKDRPAFNMIYQAERRGDIKPGDMLIEATSGNTGIALAMVAAMRGYPITLFMPSNSTQERKDAMTAYGATLIQVEEGIEAARDMALQMQADGKGIVLDQFNNPDNKQAHYLTTGPELWAQTEGKITHFISSMGTTGTITGVAQYLKEQNPAIQIIGLQPDEEAAIAGIRRWPAAYMPGIFDADLVDEIMDIDQRVAEVYMRKLAKTEGIFAGVSSGAAAWAATQVAKANPDAVIAFIVCDRGDRYLSTGLYNVDDSIDNAN

SEQ ID NO: 476 - DNA, 981 bp, Colwellia psychrerythraea 34H
  CDS (1)..(981): transl_table=11
atgtctaaaatattcgaagacaacaccactgctataggtaatacacctttagttaaattaaaccgcgtgattgattctgaaaatggcgctaatgtttatgccaaaattgaagccagaaatccaagtttcagtgttaaatgtcgtatcggcgctagtatggtttgggatgctgaagaaaaaggtttattaacccctggaaaagaaattgtagaaccaacaagtggtaatacaggtatcgcattagcatttgttgctgcggcacgtggctacggcattaccttgactatgcctagcactatgagcttagaacgtcgtaagttattatctgcgttaggcgcaaaagttgaacttaccgatggtgctaaaggtatgggcggtgctattgctaaagcgcaagagcttaaagattcagatccagaaaagtatgtattattagggcaatttgataaccctgccaacccaaaaattcatgaagaaactactggtccagaaatctggaatgataccgatggaaatgttgatatctttgttgccggtgttggaacaggtggcactcttactggtacaagtcgctatcttaagttaactaaaggtaaagcaattaccacagtagccgttgaacctactgactctccagtgattactcaagcccttgctggtgaagaattaacacccggtcctcataagattcaaggtataggtgctggctttattcctggcaatttagatcttgatatggtcgatgctgttgaactggtttcaaatgaagatgcttttgctatggcacaccgtttgatgaaagaagaaggtattcttgctggcatctcatctggcgcagctgttattgcagcaaaacgtcttgctgaacgtcctgaaaataaaggtaaaaatatcgtagtgatattaccgagttcagctgagcgttacttatcaagtgcactttttactgaaacctttagcgataaagaacttgttcagtaa

SEQ ID NO: 477 - protein, 326 aa, Colwellia psychrerythraea 34H
MSKIFEDNTTAIGNTPLVKLNRVIDSENGANVYAKIEARNPSFSVKCRIGASMVWDAEEKGLLTPGKEIVEPTSGNTGIALAFVAAARGYGITLTMPSTMSLERRKLLSALGAKVELTDGAKGMGGAIAKAQELKDSDPEKYVLLGQFDNPANPKIHEETTGPEIWNDTDGNVDIFVAGVGTGGTLTGTSRYLKLTKGKAITTVAVEPTDSPVITQALAGEELTPGPHKIQGIGAGFIPGNLDLDMVDAVELVSNEDAFAMAHRLMKEEGILAGISSGAAVIAAKRLAERPENKGKNIVVILPSSAERYLSSALFTETFSDKELVQ

SEQ ID NO: 478 - DNA, 975 bp, Pseudomonas syringae pv. phaseolicola 1448A
  CDS (1)..(975): transl_table=11
atgagccgtatctacgctgataacgcccattccatcggtaatacgccgctggtgcagatcaatcgtattgcaccccgcggtgtcacgattctggccaagatcgaaggacgtaatccgggctactccgtcaagtgccgtatcggcgccaacatgatctgggacgctgaaagcagcggcaaactcaagcccggcatgaccatcgtcgaaccgacctcgggcaataccgggattggcctggcattcgttgccgccgcccgtggttacaaattgatgctcaccatgcccgcttccatgagcatagaacgtcgcaaggtactcaaggcgttgggtgccgaactggtgttgactgaaccggcaaaggggatgaaaggcgcgattgccaaggcagaagagctgctggcgggcgatccggaaaaatatttcatgctcgcacagttcgagaacccggccaacccggccatccatgaaaagaccaccggccctgaaatctgggcggacaccgacggcgctatcgacgtactggtggcaggcgtcgggactggcgggactatcaccggtatttcccgctatatcaagtacaccgcaggcaagccgatcctgtcggttgcggtcgagccagacggttcgccgattatcacccaggcgatggccggtgaagagatcaaacccagcccgcacaagattcaaggcatcggtgccggtttcattccgaaaaacctcgatctgtcgattgtcgaccgggtagagcgtgtcaccgatgaagagtccaaggccatggcccggcgtctgatgcaggaggagggcattctctgtggtatttcctgcggcgcggccatggcggcagccgttcgtctggctgaaaaaccggagatgcagggcaagactatcgtggtgatcctgcctgactctggcgaacgttacctgtccagcatgctgttcagcgacctgtttaccgatcaggagctttctcagtaa

SEQ ID NO: 479 - protein, 324 aa, Pseudomonas syringae pv. phaseolicola 1448A
MSRIYADNAHSIGNTPLVQINRIAPRGVTILAKIEGRNPGYSVKCRIGANMIWDAESSGKLKPGMTIVEPTSGNTGIGLAFVAAARGYKLMLTMPASMSIERRKVLKALGAELVLTEPAKGMKGAIAKAEELLAGDPEKYFMLAQFENPANPAIHEKTTGPEIWADTDGAIDVLVAGVGTGGTITGISRYIKYTAGKPILSVAVEPDGSPIITQAMAGEEIKPSPHKIQGIGAGFIPKNLDLSIVDRVERVTDEESKAMARRLMQEEGILCGISCGAAMAAAVRLAEKPEMQGKTIVVILPDSGERYLSSMLFSDLFTDQELSQ

SEQ ID NO: 480 - DNA, 942 bp, Pseudomonas syringae pv. phaseolicola 1448A
  CDS (1)..(942): transl_table=11
atgataggcaccccccgcagtctggattgcgaagacgccatgaccctgcagtatcaaaccattgccgattgcgtcggcaacaccccgctggtgcgtctgcaacgcatggcgggcaacaccagcaataccctcctgttgaaactcgaaggtaacaaccccgctggctcggtaaaagaccgcccggccttgtcgatgatcacccgcgccgagttgcgcggccagatccatccaggagacacgctgatcgaagcgacctccggcaataccggaatcgcgctggccatggccgcggcgatcaagggctaccggatgattctgatcatgccggacaactccagtgccgaacgcaaggccgccatgactgcctatggcgccgagctgatttcggtcagcaaggaccagggcatggaaggcgcccgtgatctggccgagcgcatgcaggccgaaggccgcggcaaagtgctcgatcagttcgccaatggcgacaatcccgaggcgcattacacgtccaccggtccggaaatctggcggcagacgggcggtaccgtgacccatttcgtcagctcgatgggcaccaccggcaccatcatgggcacctcgcgctacctcaaggagcaaaatcccgaggtgcagatcgtcggtctgcaaccgatggagggcgcttcgatccccggtattcgccgctggccgcatgaatacctgccgaaaatctatcagtcggaccgtgtcgaccgcatcatcgacatgggccagaccgaagccgaagacaccatgcgccgactggcgcgcgaagaaggcatcttctgtggcgtgtcgtccggtggctcggtcgccggggcgttgcgtatttcccaggaagtcgaaaacgccgtgattgtggcgatcatctgtgaccgaggcgaccgttacctgtcgaccggcgtctatgattcgcccaactga

SEQ ID NO: 481 - protein, 313 aa, Pseudomonas syringae pv. phaseolicola 1448A
MIGTPRSLDCEDAMTLQYQTIADCVGNTPLVRLQRMAGNTSNTLLLKLEGNNPAGSVKDRPALSMITRAELRGQIHPGDTLIEATSGNTGIALAMAAAIKGYRMILIMPDNSSAERKAAMTAYGAELISVSKDQGMEGARDLAERMQAEGRGKVLDQFANGDNPEAHYTSTGPEIWRQTGGTVTHFVSSMGTTGTIMGTSRYLKEQNPEVQIVGLQPMEGASIPGIRRWPHEYLPKIYQSDRVDRIIDMGQTEAEDTMRRLAREEGIFCGVSSGGSVAGALRISQEVENAVIVAIICDRGDRYLSTGVYDSPN

SEQ ID NO: 482 - DNA, 900 bp, Dechloromonas aromatica RCB
  CDS (1)..(900): transl_table=11
atgtataaaaccctgcaggattttgtcggaaacacgccactggtacgtctggtgcgtattcccggtgctgacaacgacaagcgaggcaatgtcatcctggccaagctggaggggaataatccggctggttcagtcaaggacagacctgcgctgtcgatgatcgtccatgccgaggcgcgtggcgacatcaagccaggcgatacgctgatcgaggcgacctcaggtaataccggcatcgcgctggccatggcagcggcgatcaaggggtaccggatgatccttgtcatgccggaaaaccagagtgtcgagcgtcggcagagcatgcgtgcctacggcgcggaactggttctgacgcccaaggatggcggtatggaactggcacgcgacgtggccgacaagatgcgcgacgaaggcaagggcatcatccttgaccagttcgccaaccctgataatccgctggcccattacgaaggtaccggcccggaaatctggcgcgatactgatggcaaaattacccatttcgtatccagcatgggaacgaccgggaccatcatgggaaccagtcgtttcttgaaggaggcgaacccggccatcgagatcgttggctgccagccggaagacggcagccagatccccggcatccgcaagtggccggaagcctatctgccgaaaattttcgacaagaccaatgtcgatcgcgtcgaatacgtcagtcaggctgatgctgaggcgatgacccggcgcctggcgatggaagagggaatttttgccggcatttcctcgggtggtgcgctcgccgtggccctgcgcctgtcgcagcaactggagaatgcggtgatcgtctcgatcatctgcgaccgtggtgaccgttatctctcgaccggtgttttcccggcatga

SEQ ID NO: 483 - protein, 299 aa, Dechloromonas aromatica RCB
MYKTLQDFVGNTPLVRLVRIPGADNDKRGNVILAKLEGNNPAGSVKDRPALSMIVHAEARGDIKPGDTLIEATSGNTGIALAMAAAIKGYRMILVMPENQSVERRQSMRAYGAELVLTPKDGGMELARDVADKMRDEGKGIILDQFANPDNPLAHYEGTGPEIWRDTDGKITHFVSSMGTTGTIMGTSRFLKEANPAIEIVGCQPEDGSQIPGIRKWPEAYLPKIFDKTNVDRVEYVSQADAEAMTRRLAMEEGIFAGISSGGALAVALRLSQQLENAVIVSIICDRGDRYLSTGVFPA

SEQ ID NO: 484 - DNA, 975 bp, Dechloromonas aromatica RCB
  CDS (1)..(975): transl_table=11
atgtccaaatggtttgcagataattcacagtcgatcggccgcacgccgctgatcaagctcaaccgtgtcatcgacggcgccaaggctaccgtgctcgccaagatcgaaggtcgcaacccggcctattcggtcaagtgccggatcggcgccgccctgatcaatgatgccgagaagcgtggcctgctcggtccgggcaaggagctggtcgagccgacttccggcaacaccggcatcgcgctggctttcgtcgccgccgccaagggtattccgctgacgctgaccatgcccgaaacgatgagtatcgaacggcgcaagctgctgacggcttttggtgccaagctggtgctgaccgaaggcgccaagggcatgtccggcgccatcgccaaggccgaggaaattgccgcttccgatgccaagtacgtgttgttgcagcagttcaagaacccggccaatccggccatccacgaactgaccaccggtccggaaatctgggacgacaccgatggcgccatcgacattctggtgtccggggtcggcactggcggcacgatcaccggtgtttcgcgttacatcaagaacaccaagggcaaggcgatccagtcggtcgccgtcgagccgaccgccagcccggtgctgacccaggctcgtgccggcgagccaatcaagcccggtccgcacaagattcaggggattggcgccggtttcgtgccggccgtgctcgatctgtcgctgctcgatgccgttgagcaagtgtctaatgaggatgccgtgctttacgcccgccgcctggccaaggaagagggcatcatctccgggatttccagcggtgctgcggttgcggcggccgctcgtctggcccggataccggaaaatgccggcaagaccattgtcgccatcctgcctgactccggcgagcgttacctcagctccatcctgttcgaaggcttgttcaacgaagccgggctggccgcatga

SEQ ID NO: 485 - protein, 324 aa, Dechloromonas aromatica RCB
MSKWFADNSQSIGRTPLIKLNRVIDGAKATVLAKIEGRNPAYSVKCRIGAALINDAEKRGLLGPGKELVEPTSGNTGIALAFVAAAKGIPLTLTMPETMSIERRKLLTAFGAKLVLTEGAKGMSGAIAKAEEIAASDAKYVLLQQFKNPANPAIHELTTGPEIWDDTDGAIDILVSGVGTGGTITGVSRYIKNTKGKAIQSVAVEPTASPVLTQARAGEPIKPGPHKIQGIGAGFVPAVLDLSLLDAVEQVSNEDAVLYARRLAKEEGIISGISSGAAVAAAARLARIPENAGKTIVAILPDSGERYLSSILFEGLFNEAGLAA

SEQ ID NO: 486 - DNA, 933 bp, Dechloromonas aromatica RCB
  CDS (1)..(933): transl_table=11
atgaaaatcgccaacaatgtgaccgaactggtcggcaacacgccgctggtcaagctcaaccgcgtcaccgcaggcgctggtgccaccatcgccgccaagctcgaattcttcaaccccggccacagcgtcaaggacaggattgccgtatccatgctcgatgcggccatcgccgccggcaaggtcggtccggataccgtcattctcgagccgacttccggcaataccggcatcggcctggcgatggtctgcgcggcgcgcggcatcaagtgcgctttcgtcatgccggaaacgatgagccgcgagcgcaagctgctgctcaaggcctacggcgctgaactgattctgacccccggccccgaaggcatgggcggtgcgattgccaaggccaaggcgctggccgaaagcgacccgaaatatttcgtgccgcaacagttcgaaaacccggccaatccggaagtgcaccgcaacacaacagccgaggaaatctggcgggataccgatggccaggtcgacattttcgtttccggtgtcggcaccggtggcacgatcactggcgtcggcgaagtgctcaaggcgaagaagccgggcatcaagatcgtcgccgtcgagccggatgcctcgccggtgctgtccggcggccagaagggcccgcacccgatccagggcattggcgccgggttcgtgcctggcgtgctgaacacggcggtttacgatgaggtgattcgcgtcaagaacgacgacgcctttgccattgcccgtcagatggccacggaagaggggctgctggtcggcatttcctccggtgccgccacctgggccgcgctggaactggccaggcgccccgaaaacgccggcaagctgatcgtcgtgattattccttcatttggcgaacgctatctgtccacccccttgtatcagcacctcgaagtttga

SEQ ID NO: 487 - protein, 310 aa, Dechloromonas aromatica RCB
MKIANNVTELVGNTPLVKLNRVTAGAGATIAAKLEFFNPGHSVKDRIAVSMLDAAIAAGKVGPDTVILEPTSGNTGIGLAMVCAARGIKCAFVMPETMSRERKLLLKAYGAELILTPGPEGMGGAIAKAKALAESDPKYFVPQQFENPANPEVHRNTTAEEIWRDTDGQVDIFVSGVGTGGTITGVGEVLKAKKPGIKIVAVEPDASPVLSGGQKGPHPIQGIGAGFVPGVLNTAVYDEVIRVKNDDAFAIARQMATEEGLLVGISSGAATWAALELARRPENAGKLIVVIIPSFGERYLSTPLYQHLEV

SEQ ID NO: 488 - DNA, 948 bp, Thermobifida fusca YX
  CDS (1)..(948): transl_table=11
atgaggttcgattcgcttctggattcgctcggcggtacccccctggtcgggctgcctaatctgtcgccctcccccgaagtgcggctctgggccaaactggaggaccgtaacccgaccgggtcgatcaaggaccgcgcggcgttctacatgatcgagcaggcagaaaaggacggcctgctcactccggggtgcaccattctggagccgacctcggggaacacggggatttccttggcgatggtcgcccggctgcgcggttacaagatggtctgcgtcatgccggagaacacttccgcggaacgcagccaactcctgcgcatgtggggcgccgagatctactactccccggcggaaggcggctccaacgaggcggtgcgcgtcgccaaacggatggccgccgagaaccccgactgggtgatgctctaccagtacggcaacccggcgaatgcccgggcccactacgagacgaccggcccggaactcctcgccgacctgccggagatcacccacttcgtcgctggactgggcacgaccggaaccctcatgggggtcggccgctacctgcgggagcaccgtccggacgtccagatcgtggccgctgaaccccgctacggggagctcgtctacggtctgcggaaccttgacgaagggttcgtgcccgagctttacgacgagacgatcctcagcagccgctactctgtcccctccgacgcggcactgcgccgcacccgggagctcctcgacaaagaggggatcttcgcgggcatctccaccggaggggtcctgcacgccgccctcggcgtggcacagaaggccgtcaaagcagggcagcgtgccgatatcgcattcgtcgtcgctgacgcaggctggaagtacctgtccaccggcgcctacgaaggcacgctggaagaggctgcgcagcggctcgaaggccagctctgggcctga

SEQ ID NO: 489 - protein, 315 aa, Thermobifida fusca YX
MRFDSLLDSLGGTPLVGLPNLSPSPEVRLWAKLEDRNPTGSIKDRAAFYMIEQAEKDGLLTPGCTILEPTSGNTGISLAMVARLRGYKMVCVMPENTSAERSQLLRMWGAEIYYSPAEGGSNEAVRVAKRMAAENPDWVMLYQYGNPANARAHYETTGPELLADLPEITHFVAGLGTTGTLMGVGRYLREHRPDVQIVAAEPRYGELVYGLRNLDEGFVPELYDETILSSRYSVPSDAALRRTRELLDKEGIFAGISTGGVLHAALGVAQKAVKAGQRADIAFVVADAGWKYLSTGAYEGTLEEAAQRLEGQLWA

SEQ ID NO: 490 - DNA, 969 bp, Prochlorococcus marinus str. NATL2A
  CDS (1)..(969): transl_table=11
atgcccattgctaatgacataacttatttagttggccaaacacctttggtcaaactgaatcgattgcctaatgaatttgattgtagggctgaaattatagccaaattagaaagttttaaccccacagcatccgtaaaagaccgcatagctggcgcaatggtgatgtcagcagaaaaagagggcactatcaaacctggacatactgttcttgttgaaccaactagcggaaacacaggaattgcattagcgatggttgcggcagcaaaaggttatcggctcatacttacaatgcctgacacaatgagtactgaacgtcgctccatgttaagagcatttggagcagagcttcaactaactcctggccaagagggaatccaaggcgctattcagctggcaaaggaattggtagcctctatacctaatgcatacttgcttcagcaattcgataatttatccaatcctgaaattcatgaaaaaacaaccgctgaagaaatatgggaagattgcgaaggcaaacttgatgcattaattgcaggagtgggaacaggaggaacaatcacaggttgtgccagattcttaaaacaaaaaaatccaaaaatcaaggtttttgcagtagaaccttcatcaagccctgttctgtccggagggaatcctggatctcatgcaatacaaggcattggggctggtttcattcctaatgtattagatatgaatcaaattgatgaagtcataagaatcaatgataatgaagcaatggacataggcagaagacttgccaaagaagagggattgctaagtggtgtcagcagtggtgctgcagtagccgctgctttaaaagtaggaaatcaacctgagtttgcgaataaacgcttgattgttattctgcctagttttggtgaaagatatctatcaacaacaatgtttacttccatccccgcaaagccagtaaaagggaatgagtatctctaa

SEQ ID NO: 491 - protein, 322 aa, Prochlorococcus marinus str. NATL2A
MPIANDITYLVGQTPLVKLNRLPNEFDCRAEIIAKLESFNPTASVKDRIAGAMVMSAEKEGTIKPGHTVLVEPTSGNTGIALAMVAAAKGYRLILTMPDTMSTERRSMLRAFGAELQLTPGQEGIQGAIQLAKELVASIPNAYLLQQFDNLSNPEIHEKTTAEEIWEDCEGKLDALIAGVGTGGTITGCARFLKQKNPKIKVFAVEPSSSPVLSGGNPGSHAIQGIGAGFIPNVLDMNQIDEVIRINDNEAMDIGRRLAKEEGLLSGVSSGAAVAAALKVGNQPEFANKRLIVILPSFGERYLSTTMFTSIPAKPVKGNEYL

SEQ ID NO: 492 - DNA, 987 bp, Prochlorococcus marinus str. NATL2A
  CDS (1)..(987): transl_table=11
atgtcaagaatctatgaagacaatagttttgctattggtcatacaccattggtcaaacttaattcgatcacaaaaaacgcaaaagcaacagtacttgcaaagatagaaggtcgtaaccctgcctacagtgttaaatgtagaataggagcaaatatgatctgggatgctgaaaagaaaggtttactcaataaagataaagtaattattgaaccaacatctgggaatactggaatagcacttgcttatacagccgctgctagaggttacaagttaatcctcacgatgcctgaatccatgtcaattgaacgtaggaggatgatggctgttcttggtgctgaattaatacttactgaagcagcaaaaggaatgcctggtgccattgcaaaagcgaaggaaatagcagatagcgaccctaaaaaatacttcatgccaggacaatttgataacccagccaatccagaaatacatttcaaaactacaggtcctgaaatttgggatgatacggacggtcaaattgatgttttagtctctggtgtcggaacaggtgggacaattacaggtgtttctcgtttcataaagcaagaaaaaaatcattcattattgtctgttgccgtagagcctactcacagcccagtaataacacaaactctcaatggagaagaagtaaaacccggccctcacaagatccaagggattggagctgggtttattcctcaaaaccttgacttatccgtagtcgatcaagttgagcaagtctccaatgatgagtctattgcaatggcattacgtttggcacaagaagaaggtctactagttggtatctcatgtggtgctgctgctgctgtggccttaaggctggccgaaaaagaggagttctcagggaagacaatcgttgtagttctacctgaccttgccgaaagatatatctcatccgtaatgtttgagaatgttcctacaggtgttattaaagaaccatcattagcttga

SEQ ID NO: 493 - protein, 328 aa, Prochlorococcus marinus str. NATL2A
MSRIYEDNSFAIGHTPLVKLNSITKNAKATVLAKIEGRNPAYSVKCRIGANMIWDAEKKGLLNKDKVIIEPTSGNTGIALAYTAAARGYKLILTMPESMSIERRRMMAVLGAELILTEAAKGMPGAIAKAKEIADSDPKKYFMPGQFDNPANPEIHFKTTGPEIWDDTDGQIDVLVSGVGTGGTITGVSRFIKQEKNHSLLSVAVEPTHSPVITQTLNGEEVKPGPHKIQGIGAGFIPQNLDLSVVDQVEQVSNDESIAMALRLAQEEGLLVGISCGAAAAVALRLAEKEEFSGKTIVVVLPDLAERYISSVMFENVPTGVIKEPSLA

SEQ ID NO: 494 - DNA, 1005 bp, Ralstonia eutropha JMP134
  CDS (1)..(1005): transl_table=11
atggatgtcagggatggttttgtcggcacggtcggacatacgccgctgatccggctcggcgggctgagcgccgagaccgggtgcgacatttacggcaaggcggaattcctgaaccctggcggttcggtcaaggaccgcgcggcgctctacatcatccgcgacgccgaacgacgcggcacgctgcgcccgggcggcacggtcgtggaaggcaccgccggcaacaccggcatcgggctggcgcacatctgcgcggcgcgcggctaccgctgcatcgtcgtcattcctgatacccaatcgcccgaaaaaatggagcgcctgcgcatgctgggagccgaggtacgggccgtccccgcaaagccgtacgccgaccccaacaactaccagaagatcgccggccggctcgcccaggaaacggcaaacgcgatctgggccaaccagttcgacaacctcgccaaccgccaggcccactacgaaaccacgggcccggaaatctggcacgacaccgccggccgcatcgatgccttcgtctgcgccaccggcaccgggggctcgctggcgggcatttcgcgcttcctgaaggagcatggcccgcatgtgcgtatcgtgctggccgacccgtacggcagcagcctgtacaacttcgtcaagcatcgcgaactgaagtccgaaggcaactcgatcacggagggcattggttcgagccgcatcacggcgaatctgcaggacaccgtgatcgacgacgccgtgcgggttgacgaccaggcctgcgtgaacatggtctaccgtctgctgcgcgaggaagggctgtttctcggcggatcgaccggcatcaacgttgccgccgccgtcgcgctcgcacgggagatggggccgggacacaccatcgtcacgctgctgtgcgatcgcggcgatctttacttcggccggctcttcaatcaggattggctcgccggaaaggggctgacgccaacgccatttgcgcgcatggcgccccgcgcgggctag

SEQ ID NO: 495 - protein, 334 aa, Ralstonia eutropha JMP134
MDVRDGFVGTVGHTPLIRLGGLSAETGCDIYGKAEFLNPGGSVKDRAALYIIRDAERRGTLRPGGTVVEGTAGNTGIGLAHICAARGYRCIVVIPDTQSPEKMERLRMLGAEVRAVPAKPYADPNNYQKIAGRLAQETANAIWANQFDNLANRQAHYETTGPEIWHDTAGRIDAFVCATGTGGSLAGISRFLKEHGPHVRIVLADPYGSSLYNFVKHRELKSEGNSITEGIGSSRITANLQDTVIDDAVRVDDQACVNMVYRLLREEGLFLGGSTGINVAAAVALAREMGPGHTIVTLLCDRGDLYFGRLFNQDWLAGKGLTPTPFARMAPRAG

SEQ ID NO: 496 - DNA, 918 bp, Ralstonia eutropha JMP134
  CDS (1)..(918): transl_table=11
atgaaggcagacaacatcctgcagaccatcggcaatacgccgcatatccgcatccgacggctgttcggaaacggccacgaagtctggatcaagtcggagcggtccaacccgggcggctcgatcaaggaccgtatcgcgctatcgatggtggaagacgccgaacgccgtggcgtgctcaaacccggtggcaccattgtcgagccgacctccggcaataccggcatcggcctggcgatggtggcggcagtcaagggctacaagctgatcctggtgatgccggacagcatgtcgatcgaacgccgccggctgatgctcgcctacggcgcgacctttgacctgaccccgcgcgagaaaggcatgaagggcgcgatcgcccgcgccgaggaattgatcgcctcgatccccggcgcgtggatgccgcagcaattcgagaatccggccaacatcgacgtccatgcgcgcaccacggcgcaggaaatcctggcggacttcccggaaggcctcgatgcactgattaccggcgtgggcacgggcggccatatctcgggctgcgcgcaggtgctcaagcagaaatggccgcaactgaaggtgttcgccgtggagccgacggcatcgccggtgatttcgggtggcgcgcccgcgccgcatccgatccagggcatcggcgccggttttatcccggagaacctgaaaaccgacctgctcgatggcgtgatccaggtcgatgccgaaccagcgcgcgagatggcgcgccgctgcgcgcgcgaagaaggcatcctggttggcatttcgtcgggcgcgacgctggccgcgatcgcgagcaagctgcctgaacttccggccggcgcccgcgtgctcgggttcaactatgacaccggcgagcgttacctgacggtcgagggcttcctgccggcctga

SEQ ID NO: 497 - protein, 305 aa, Ralstonia eutropha JMP134
MKADNILQTIGNTPHIRIRRLFGNGHEVWIKSERSNPGGSIKDRIALSMVEDAERRGVLKPGGTIVEPTSGNTGIGLAMVAAVKGYKLILVMPDSMSIERRRLMLAYGATFDLTPREKGMKGAIARAEELIASIPGAWMPQQFENPANIDVHARTTAQEILADFPEGLDALITGVGTGGHISGCAQVLKQKWPQLKVFAVEPTASPVISGGAPAPHPIQGIGAGFIPENLKTDLLDGVIQVDAEPAREMARRCAREEGILVGISSGATLAAIASKLPELPAGARVLGFNYDTGERYLTVEGFLPA

SEQ ID NO: 498 - DNA, 894 bp, Thiobacillus denitrificans ATCC 25259
  CDS (1)..(894): transl_table=11
atgagcacttacaagaccatcgaggatacggtcggcaatacgccgctggtgcgtctcaagcgtctgcccggcgagacgtcgaacatcgtgctggtcaagctcgaaggcaacaatccggccggttcggtgaaggaccgccccgcgctgtcgatgatcgagcaggccgaggcgcgcggcgagatccggcccggtgacacgctgatcgaggcgaccagcggcaacacgggcatcgcgctcgcgatggcggcggcgatgcgtggctacaagatggtgctcatcatgcccgagcatctgtcgatcgagcggcgccagaccatgcgtgccttcggcgcggagttgcggctcgtcagccgggaggcgggcatggagggggcgcgcgatctggcgatcgaactcgagaaacagggcgtcggccgcgtcctcgaccagttcaccaaccccgacaatccggccgcgcattaccgcagcaccggcccggagatctggcgcgacaccgaaggccggatcagccatttcgtctcgagcatgggcacgaccggcacgatcatgggctgctcgcgctacctcaaggagcagaaccccgcgatccagatcgtcggcgtgcagccgaccgaaggcgcgcagattcccggcatccgtaagtggccggccgaatacgtgccgaagatctgcgacccgagccgcgtcgaccgcatgatctacgtcggccagcaggacgccgaggagacgacccggcgcctcgcgcgcgaggaaggcatcttcgccggcatctcttcgggcggcgcgctgtgggccgcgctgcaactgtcgaaggaagtcgagaacgcgaccatcgtctcgatcgtctgcgaccgcggcgaccgctatctgtcgaccggcgtgttccccgcgtaa

SEQ ID NO: 499 - protein, 297 aa, Thiobacillus denitrificans ATCC 25259
MSTYKTIEDTVGNTPLVRLKRLPGETSNIVLVKLEGNNPAGSVKDRPALSMIEQAEARGEIRPGDTLIEATSGNTGIALAMAAAMRGYKMVLIMPEHLSIERRQTMRAFGAELRLVSREAGMEGARDLAIELEKQGVGRVLDQFTNPDNPAAHYRSTGPEIWRDTEGRISHFVSSMGTTGTIMGCSRYLKEQNPAIQIVGVQPTEGAQIPGIRKWPAEYVPKICDPSRVDRMIYVGQQDAEETTRRLAREEGIFAGISSGGALWAALQLSKEVENATIVSIVCDRGDRYLSTGVFPA

SEQ ID NO: 500 - DNA, 1386 bp, Anabaena variabilis ATCC 29413
  CDS (1)..(1386): transl_table=11
atggctacttatgaaaatattttacaagcaattggtcagactcctttagtgagattaaatcgagttactgccaatgttcaatctcctatttatgcaaaagtagagtatcttaatcctggtggcagtaccaaagatagaattgccctgtccatgattgaaaatgccgaaaaaacaggtcaaatacaaccaggaggaactattattgaggccaccgcaggtaataccggtgtgggattagcactcattgccgcagttaaaaaatatcgctgtatttttgtcatgcctgataaaatgagtcaggataaaattaacctgctcaaagcttatggtgcagaagttgttgttactcctacctctgtaccgcctgactctccagaaagttataacggtgtcgcggaaagactagctaaagaaattcccggtgcatatagaccaaatcaatttgaaaacccgaataatcctttagctcattatttaacaactgggccagaaatctgggcagatagtcaaggtaaaattgatgtttttgtcgctggtatgggtactggtgggacaatttctggagttgctaaatatctcaaagaacaaaacccaaatattattattgttggtgcagatccagaaggttctatcctctcaggagatagccctaaatcttataaagttgaaggaattggtgaagactttattccgaaaacttttaatcgtcaattagttgatgaaatgattcgcgtcagcgataaagaatcttttaatatggcgcgtcgtctagctagagaagaaggcttattagtgggaggttcttgtggtacagtagtagccgcagccctcaagtatgcagcacgattatcacagccaaaatatatcgtagttttgttaccagatacagggagaaactacattaataaaatttactctgatgtctggatgcaagagaatggtttttgggaaggtaaaacagttaaaactataaaagttggggaaattctgcaacaaaaaactgattttccttctttagttgctgttagtcctagtgatactttaagccaggcgacaaacttactacagaaactcaatatctctcagttgcctgtaattgataatcatcatgtagtaggtagcctcaatgaagcatctttgatgaaatttctctatgacgggattaatttctctaatcagcaagttttagctgtgatgggtaaaccacttccaattctcgatgaaaatgtagatgtttctgaagcttaccgagttcttttatcaggaacaacagggattattattactcgtaataatattcccgcaggattaattaccagagccgatttaattagatattggattagtcaaaaccaagaaaaatcaaaggtaaacaatggaatttga

SEQ ID NO: 501 - protein, 461 aa, Anabaena variabilis ATCC 29413
MATYENILQAIGQTPLVRLNRVTANVQSPIYAKVEYLNPGGSTKDRIALSMIENAEKTGQIQPGGTIIEATAGNTGVGLALIAAVKKYRCIFVMPDKMSQDKINLLKAYGAEVVVTPTSVPPDSPESYNGVAERLAKEIPGAYRPNQFENPNNPLAHYLTTGPEIWADSQGKIDVFVAGMGTGGTISGVAKYLKEQNPNIIIVGADPEGSILSGDSPKSYKVEGIGEDFIPKTFNRQLVDEMIRVSDKESFNMARRLAREEGLLVGGSCGTVVAAALKYAARLSQPKYIVVLLPDTGRNYINKIYSDVWMQENGFWEGKTVKTIKVGEILQQKTDFPSLVAVSPSDTLSQATNLLQKLNISQLPVIDNHHVVGSLNEASLMKFLYDGINFSNQQVLAVMGKPLPILDENVDVSEAYRVLLSGTTGIIITRNNIPAGLITRADLIRYWISQNQEKSKVNNGI

SEQ ID NO: 502 - DNA, 963 bp, Anabaena variabilis ATCC 29413
  CDS (1)..(963): transl_table=11
atgaaaattgccagaaatattacagagctagttggacgcacgccattggtgcggttaaataatattcctcaagcagagggatctgtagccgatatagtggtgaagttagaaagcatgaacccatctgcgtcggtgaaagacagaattggcgtaagtatggtggaaagtgcagaagaggcaggtctaattcatccaggtaagacaatattagtagaaccaacttcaggaaatacgggtattgctttggcaatggtggctgctgctaaaggctatcatttgattctgaccatgccggagacgatgagtacagaaagacggtcgatgttgcgagcttatggcgcacagttggaattaactccaggtctggaagggatgcggggagcgatcgccagagccgagcagattgtaacagaattgcctaatgcctatatgttgcaacagttccgtaacccagcgaatcccaaagtacatcgtcaaactactgctgaagaaatttggtcagataccgatggacaggtagatattgtggtgggtggagtcgggactggcggaacattaactggagtcgctcaggtacttaaagaacgtaaacccagttttcaagctattgctgtagaaccaagcaatagccaagtgctttccggaggaaaatcaggagcgcataaaattcaaggtatcggtgcaggatttatcccggcaatttgtcgtctggaattgattgatcagataattgccgtttcggatgaggatgcgatcgcctatagtcgcagattagcaagagaagaaggtttattatcaggtatctctacaggtgcagcgttgtatgcagctattcaggtggcaaagcgtccagaaaatagcggtaagttgattgttatggttcaacctagttttggcgaacgctatttgagtaccacgttgttcaaggatttatcagagttggaaatatctgcactcaattaa

SEQ ID NO: 503 - protein, 320 aa, Anabaena variabilis ATCC 29413
MKIARNITELVGRTPLVRLNNIPQAEGSVADIVVKLESMNPSASVKDRIGVSMVESAEEAGLIHPGKTILVEPTSGNTGIALAMVAAAKGYHLILTMPETMSTERRSMLRAYGAQLELTPGLEGMRGAIARAEQIVTELPNAYMLQQFRNPANPKVHRQTTAEEIWSDTDGQVDIVVGGVGTGGTLTGVAQVLKERKPSFQAIAVEPSNSQVLSGGKSGAHKIQGIGAGFIPAICRLELIDQIIAVSDEDAIAYSRRLAREEGLLSGISTGAALYAAIQVAKRPENSGKLIVMVQPSFGERYLSTTLFKDLSELEISALN

SEQ ID NO: 504 - DNA, 975 bp, Pseudomonas fluorescens PfO-1
  CDS (1)..(975): transl_table=11
atgagccgtatttttgctgacaacgcccattccatcggcaacacgccgctggtgcagatcaaccgcattgcgccccgtggcgtgaccattctggccaagatcgagggtcgcaacccgggctactcggtcaagtgccggattggcgccaacatgatctgggacgccgaaagcagcggcaaactcaagccgggcatgaccatcgtcgagccgacctccggcaacaccggcatcggtctggccttcgtggcggccgctcgcggttacaaattgctgctgaccatgccggcctcgatgagcatcgagcggcgcaaggtgctcaaggcgctgggtgccgagctggtgctgaccgaaccagccaaaggcatgaaaggcgctatcgaaaaggccaacgaaatcgtagccagtgacgcgggcaaatacttcatgccggcccagttcgataatccggccaacccagccattcatgaaaagaccaccggcccggaaatctggaatgacaccgatggcgccatcgatgtgctggtggcgggcgtcgggaccggcggaaccatcaccggcgtgtcgcggtatatcaagaatacggcaggcaaaccgattctgtcggtggcggtggaaccggtgtcttcgccggtgattacccaggcgctggcaggtcaagaaatcaagccgagcccgcacaagattcagggcatcggtgccgggttcgtgccgaagaaccttgatctgtcgatggttgaccgggtcgagttggtgacggatgacgagtccaaagccatggccctgcgcctgatgcaggaggaagggatcctgtgcggtatttcctgcggtgcggccatgtcggtggcggtgcgtctggcggagacgccggaaatgcagggcaagaccattgtggtggtgctgcccgactccggtgagcgttatctgtcgagcatgctgttcagtgatctgttcaccgatcaggagaaccagcagtaa

SEQ ID NO: 505 - protein, 324 aa, Pseudomonas fluorescens PfO-1
MSRIFADNAHSIGNTPLVQINRIAPRGVTILAKIEGRNPGYSVKCRIGANMIWDAESSGKLKPGMTIVEPTSGNTGIGLAFVAAARGYKLLLTMPASMSIERRKVLKALGAELVLTEPAKGMKGAIEKANEIVASDAGKYFMPAQFDNPANPAIHEKTTGPEIWNDTDGAIDVLVAGVGTGGTITGVSRYIKNTAGKPILSVAVEPVSSPVITQALAGQEIKPSPHKIQGIGAGFVPKNLDLSMVDRVELVTDDESKAMALRLMQEEGILCGISCGAAMSVAVRLAETPEMQGKTIVVVLPDSGERYLSSMLFSDLFTDQENQQ

SEQ ID NO: 506 - DNA, 942 bp, Pseudomonas fluorescens PfO-1
  CDS (1)..(942): transl_table=11
atgataggcgcccccgctgtccggattgcgaaaaacgccatgaccttgcagtacccaaccatcgccgattgcgtcggcaacacgccgctggtgcgtttgcagcgcctgcccggtgtcaccagcaacacccttttgctcaagcttgaagggaacaacccggcgggttcggtcaaggatcgtccggcgctgtcgatgatcacccgtgccgagttgcgcgggcagatccacgaaggcgatacgctgatcgaagcgacctcgggcaacaccgggatcgccttggcgatggccgccgcgatcaagggttacaagatgatcctgatcatgccggacaactccagcgccgaacgtaaagcggcgatgaccgcttacggcgcagagctgattctggtcagccaggaagagggcatggaaggcgctcgcgatctcgcccagcggatggaagccgaaggccgtggcaaggtgctggatcagttcgccaacggcgacaatcctgaagcgcactacaccaccaccggcccggaaatctggcgtcagacccagggctccatcacccatttcgtcagctccatgggtaccaccggcaccatcatgggcgtgtcgcgctacctcaaggagcagaacgacaacgtacagatcgtcggcctgcaaccgatggaaggctcggccattcccggcatccgccgctggccgcaggaatacctgccgaagatctatcaggccgaccgcgtcgaccgcatcgtcgacatggcgcaaagcgaggccgaaaacgttacccggcgtctggcccgcgaagaaggcatcttctgcggcgtgtcctcgggcggtgcagtggcagcgatgctgcgcctgtccaaagaagttgaaaacgcggtgatcgttgcgatcatctgcgaccgtggcgaccgttacctgtcgaccggcattttcgacgcgcccaactga

SEQ ID NO: 507 - protein, 313 aa, Pseudomonas fluorescens PfO-1
MIGAPAVRIAKNAMTLQYPTIADCVGNTPLVRLQRLPGVTSNTLLLKLEGNNPAGSVKDRPALSMITRAELRGQIHEGDTLIEATSGNTGIALAMAAAIKGYKMILIMPDNSSAERKAAMTAYGAELILVSQEEGMEGARDLAQRMEAEGRGKVLDQFANGDNPEAHYTTTGPEIWRQTQGSITHFVSSMGTTGTIMGVSRYLKEQNDNVQIVGLQPMEGSAIPGIRRWPQEYLPKIYQADRVDRIVDMAQSEAENVTRRLAREEGIFCGVSSGGAVAAMLRLSKEVENAVIVAIICDRGDRYLSTGIFDAPN

SEQ ID NO: 508 - DNA, 1077 bp, Rhodobacter sphaeroides 2.4.1
  CDS (1)..(1077): transl_table=11
atggatgctcagaagatccggacgaccgagggccgcggcaggctctacgacagcgtgctcgacacggtgggcaacacgcccgtcatccgcatcaacaacctctcgcccgaaggcgtgacgatctacgtcaaggccgagttcttcaacccggcggcctcggtcaaggaccggctcgcgctgaacatcatcgaggcggcggaacggtcgggcaagctcaagcccggcatgaccgtcgtcgaggcgacctcgggcaacaccggcatcgggctcgccatggtctgcgcccagaagggctatccgctggtcatcaccatgtccgaggccttctcggtcgagcggcggcggctgatgcggcttctgggcgcgaaggtcgtcctgaccccgcgcggcggcaagggcttcggcatgtatcgcaaggcgcaggagctggccgaggcgaacggctggttcctcgcgagccagttcgagaccgacgccaatgccgacatccacgaggccaccaccgcgcgcgagatcgtggcggatttcgcgggcgagcggctcgactggttcgtgaccggctacggcaccgggggcacggtcaccggcgtcgcgcgggtgctgcgccgcgagcgaccggaggtgaagatcgtgctctccgagcctgcgaatgcgcagctcgtggcctcgggcgtgccgcaggaccgcaacgccgacggcaccgcagcctcgggccacccggccttcgaggcgcatccgatccagggctggacgcccgacttcatcccgaaggtgcttcaggaggggctcgacgccggggcctatgacgagctgatcccggttgcgggcgaggacgggatgaaatgggcgcgcgagctggcggccaaagagggcatcctcaccggcgtctcgggcggctcgaccttcgcggtggcgcggcaggtggccgaacgggcgccgaagggctcggtgatcctcgcgatgctgcccgacacgggcgagcgctacatgtcgaccccgctcttccaggccatcggcgaggacatgaacgaggaggagaaggcgctctcggcctcgacgccgagcttccagctctga

SEQ ID NO: 509 - protein, 358 aa, Rhodobacter sphaeroides 2.4.1
MDAQKIRTTEGRGRLYDSVLDTVGNTPVIRINNLSPEGVTIYVKAEFFNPAASVKDRLALNIIEAAERSGKLKPGMTVVEATSGNTGIGLAMVCAQKGYPLVITMSEAFSVERRRLMRLLGAKVVLTPRGGKGFGMYRKAQELAEANGWFLASQFETDANADIHEATTAREIVADFAGERLDWFVTGYGTGGTVTGVARVLRRERPEVKIVLSEPANAQLVASGVPQDRNADGTAASGHPAFEAHPIQGWTPDFIPKVLQEGLDAGAYDELIPVAGEDGMKWARELAAKEGILTGVSGGSTFAVARQVAERAPKGSVILAMLPDTGERYMSTPLFQAIGEDMNEEEKALSASTPSFQL

SEQ ID NO: 510 - DNA, 921 bp, Carboxydothermus hydrogenoformans Z-2901
  CDS (1)..(921): transl_table=11
atgcgaatttatgaggatattacccagcttatcggcaagaccccgttattgaaattaaaaagagttaccagaggtgtgaaagcaacagttgtggccaagcttgagtattttaacccgggaggtagtgttaaggaccgtatcgcgtttaacatgattaaagctgctgaagaacaggggcttttagataaggataccgtcattattgagcctacttctggcaataccgggattggccttgcgatggtggccgcagcccggggttatcgtttaattattaccatgcccgaaaccatgagtgtggagcggcgaatgcttttaaaagcatacggggcggaaatagttctgactcccggagagcttgggatgaccggtgcggtaaacaaagctctggaactggctaaagaatttcccaaagcttttattccgcaacagtttgaaaacccggctaatccggaaatccaccggaaaacaacggcaatagaaatctgggaagatactgatggtcaggtggatattgtggttggtggtgttgggaccggaggtaccattaccggagtaggagaggttcttaaagccaaaaaaccggaagtaaaaattatagcggtggagccggcagattcaccggtattatcgggaggaaaacccggccctcataaaattcagggaattggtgcgggttttgtacctaaagtatttaacagggacgtggtggatgagattattcaggtagaaagtgatgatgcttttgctatggctaaaaaaattgcaaaagaagaaggggtactggtggggatttcttccggtgcggctctctgggcagcgttagaagtggccaaaagaccggaaaatgaagggaaacttatcgtggttgtcttacccgataccggcgaacgttacctgtccacacccctgtttagctaa

SEQ ID NO: 511 - protein, 306 aa, Carboxydothermus hydrogenoformans Z-2901
MRIYEDITQLIGKTPLLKLKRVTRGVKATVVAKLEYFNPGGSVKDRIAFNMIKAAEEQGLLDKDTVIIEPTSGNTGIGLAMVAAARGYRLIITMPETMSVERRMLLKAYGAEIVLTPGELGMTGAVNKALELAKEFPKAFIPQQFENPANPEIHRKTTAIEIWEDTDGQVDIVVGGVGTGGTITGVGEVLKAKKPEVKIIAVEPADSPVLSGGKPGPHKIQGIGAGFVPKVFNRDVVDEIIQVESDDAFAMAKKIAKEEGVLVGISSGAALWAALEVAKRPENEGKLIVVVLPDTGERYLSTPLFS

SEQ ID NO: 512 - DNA, 903 bp, Burkholderia sp. 383
  CDS (1)..(903): transl_table=11
atggcttacaaaactatcgaagacacgatcggcaatacgccgctcgtccaactggtccgcttgccggacgacgaaatccgcgcgcgcaacaacgtggtgctcgcgaagctcgaaggcaacaatccggccggttcggtgaaggatcgtccggcactgtcgatgatcagcaaggccgaggcgcgcgggcgcatcaagccgggcgatacgctgatcgaggcgaccagcggcaacacgggtatcgcactcgcgatggcagcggcgatccgcggctacaagatggtgctgatcatgccggaggacctgtcggtcgagcgccgccagagcatggccgcctacggtgccgagatcatcctgacgccggtgaagggcgggatggaactggcacgcgatctcgcggaccagatgcagcgcgaaggcaagggcgtgatcctcgaccagttcgcgaaccccgacaatccgattgcgcactacgaagcgacgggcccggaaatctggcgcgataccgaagggcgcatcacgcacttcgtatcggccatgggcacgacgggcacgatcatgggcacgtcgcactatctgaaggaacagaatccggcgatcgagatcgtcggtgcgcagccggaagacggttcgcgcattccgggcatccgcaagtggccggaagcgtacatgccgaccatcttcgatcgcagccgcgtcgaccgcgtcgagaacgtgagccaggccgcggcggaaacgatggcgcgccggctcgcgtcggtcgaaggcattttcgcgggcatttcgtcgggcggcgcatgtgaagtcgcgatgcgcatcgcgcgtcaggtcgagaatgcgacgatcgtgttcatcgtctgcgatcgcggcgaccgctacctgtccacgggcgtgtttcctgcctga

SEQ ID NO: 513 - protein, 300 aa, Burkholderia sp. 383
MAYKTIEDTIGNTPLVQLVRLPDDEIRARNNVVLAKLEGNNPAGSVKDRPALSMISKAEARGRIKPGDTLIEATSGNTGIALAMAAAIRGYKMVLIMPEDLSVERRQSMAAYGAEIILTPVKGGMELARDLADQMQREGKGVILDQFANPDNPIAHYEATGPEIWRDTEGRITHFVSAMGTTGTIMGTSHYLKEQNPAIEIVGAQPEDGSRIPGIRKWPEAYMPTIFDRSRVDRVENVSQAAAETMARRLASVEGIFAGISSGGACEVAMRIARQVENATIVFIVCDRGDRYLSTGVFPA

SEQ ID NO: 514 - DNA, 978 bp, Burkholderia sp. 383
  CDS (1)..(978): transl_table=11
atggacgtgcgacaaggcttcgtcgactgcgtcgggcgcacgccgctgattcgcttgacgaagctcagcgcggagacgggctgcgagatcctgggcaaggcggaattcatgaatccgggcgggtcggtgaaggaccgcgcggcactgtacatcatccgcgacgccgagcggcgtggcgtgctgaagccgggcggcaccgtcgtcgagggtacggcgggcaacaccggcatcggtctggcgcatatctgcgcggcgcgcggctatcgctgcgtgatcgtgattcctgacacacaatcgccggacaagctggcgatcctgcgcacgctcggcgccgaggtgcgcccggtgccggcggcgccttaccgtgacccgaacaactatcagaagattgccgggcggctcgcggacgaactcgacaacgcggtgtgggccaatcagttcgacaacgtcgtcaatcgtcaggcgcactacgagacgaccgggcccgaaatctggcgcgatacggcgggcacgatcgatgcgttcgtctgcgcgaccggaacgggcggcacgctggccggcgtgagccgctatctgaaagagcagaatccggacgtccggatcgtgctggccgacccgtgcggcagcgggctctatgggtacgtgaaaacgggcgacctcggcgcagaaggcagctcgatcaccgaaggcatcggatcgacgcgcgtcaccatgaacctcgcgggcacgccgatcgacgacgcggtgcggatcgacgatcagcagtgcgtgacgatggtctaccggctgctgcgcgaggaagggctgtatgtcggcggatcgagcggcatcaacgtcgcggcagcggtctggttggcccgccggatgggcccggggcacacgatcgtgaccttgctgtgcgatcgtggcgacatctatcgcgcgcggcttttcaatcgggaatggctgcgcgaaaagggcctggatccgggggactga

SEQ ID NO: 515 - protein, 325 aa, Burkholderia sp. 383
MDVRQGFVDCVGRTPLIRLTKLSAETGCEILGKAEFMNPGGSVKDRAALYIIRDAERRGVLKPGGTVVEGTAGNTGIGLAHICAARGYRCVIVIPDTQSPDKLAILRTLGAEVRPVPAAPYRDPNNYQKIAGRLADELDNAVWANQFDNVVNRQAHYETTGPEIWRDTAGTIDAFVCATGTGGTLAGVSRYLKEQNPDVRIVLADPCGSGLYGYVKTGDLGAEGSSITEGIGSTRVTMNLAGTPIDDAVRIDDQQCVTMVYRLLREEGLYVGGSSGINVAAAVWLARRMGPGHTIVTLLCDRGDIYRARLFNREWLREKGLDPGD

SEQ ID NO: 516 - DNA, 987 bp, Synechococcus sp. CC9605
  CDS (1)..(987): transl_table=11
atgtcccgcatttacgacgacaacagccaggccatcggcaacaccccgctggtcaagctgaacaacgtcaccaaaaactgcaaggccactgtgctggccaaggttgaggggcgcaaccccgcctacagcgtcaagtgccggatcggcgccaacatgatctgggacgccgagaagagcggaaagctcaccaagggcaaggtgattgttgagcccacctccggcaacaccggcatcgctttggccttcaccgccgcagcccgaggttacaagctgatcctgacgatgcccgagtcgatgtcgatcgagcgacgtcgggtcatggccgtgctcggagctgagctgatcctcaccgaggccgccaaaggcatgcccggtgcgatcgccaaggccaaagaaatctctgagagcgatccggccaagtacttcatgcctggccagttcgacaatcccgccaaccccgaaatccacttcaagaccaccggtcctgaaatctggaacgactgcgatggcgccattgacgtgctcgtggccggcgtcggcaccggtggcaccatcaccggcgtctcccgttacatcaaaaatgaagcgggcaaggcgatcgaatccgtggccgttgaacccaccaatagcccggtgatcacccagaccatgaacggtgaggccgtcaagcccggtccccacaagattcagggcatcggtgccggcttcatccccaaaaacctcgacctctccgtggtcgacaaggtggagcaggtgaccaacgaggagtccgttgccatggccctgcgcctggcacaggaggaaggcctgttggtgggcatctcctgcggtgctgccgccgccgccgccattcgtctggccgagaaagatgagtacgccggcaaaaccattgtggtggtgctgcccgacctggccgagcgttacctctcctcggtgatgttcgctgaggtgccgaccggcatcatcgagcaaccggtggctgtctga

SEQ ID NO: 517 - protein, 328 aa, Synechococcus sp. CC9605
MSRIYDDNSQAIGNTPLVKLNNVTKNCKATVLAKVEGRNPAYSVKCRIGANMIWDAEKSGKLTKGKVIVEPTSGNTGIALAFTAAARGYKLILTMPESMSIERRRVMAVLGAELILTEAAKGMPGAIAKAKEISESDPAKYFMPGQFDNPANPEIHFKTTGPEIWNDCDGAIDVLVAGVGTGGTITGVSRYIKNEAGKAIESVAVEPTNSPVITQTMNGEAVKPGPHKIQGIGAGFIPKNLDLSVVDKVEQVTNEESVAMALRLAQEEGLLVGISCGAAAAAAIRLAEKDEYAGKTIVVVLPDLAERYLSSVMFAEVPTGIIEQPVAV

SEQ ID NO: 518 - DNA, 969 bp, Synechococcus sp. CC9605
  CDS (1)..(969): transl_table=11
atgagcattgctcctgacatcacagccttgatcggtggcacgcccctcgtgcggttgaaccgtctgccccaggcctgcggctgccaggccgagatcctggccaagttggagagctttaatccctccgcctcggtgaaagaccgcatcgccagcgccatggtgttggaggcggagcaatccggcacgatcattccaggccgaacggtgctggtggagcccaccagtggcaacaccggcatcgccctggccatggtggcggcggcccgggggtaccggctgatcctcaccatgccggacactatgagcacggagcgtcgcgcgatgctgcgggcctatggggccgagttgcagctcaccgacggtgcccagggcatgaatggggcgatcgccctggccaaggagttggtggatgagattcccaatgcctatctgctgcagcagttcgacaaccccgccaatccagccgtgcatgaacgcaccacggcggaggagatctggcgcgataccgagggccagatcgatgcctttgtggcgggggtgggcaccggcggcaccatcaccggttgtgcccggctgttgaaacagcggcagccgcagcttcaggtaattgccgtagagcccgaggccagtgccgtgctgtctggcaagcctcctggggcccatcgcattcaggggatcggggctggttttgtgcctgcggtgttggaattggatcggatcgactcgatcctcacggtgagcgatgaggaggccatgcaagtgggccggcgcctggcccgtgaggaaggtctgctctgtggcatcagcagtggcgcggccatggctgcggctctgcgggtgggccaggaccccgccatggtgggcaaacgcctggtggtgatgctggctagttatggcgagcgctacctctccaccccgatgttcagtgctgcttcgcagctgccggcccggagggatggtcagctgtga

SEQ ID NO: 519 - protein, 322 aa, Synechococcus sp. CC9605
MSIAPDITALIGGTPLVRLNRLPQACGCQAEILAKLESFNPSASVKDRIASAMVLEAEQSGTIIPGRTVLVEPTSGNTGIALAMVAAARGYRLILTMPDTMSTERRAMLRAYGAELQLTDGAQGMNGAIALAKELVDEIPNAYLLQQFDNPANPAVHERTTAEEIWRDTEGQIDAFVAGVGTGGTITGCARLLKQRQPQLQVIAVEPEASAVLSGKPPGAHRIQGIGAGFVPAVLELDRIDSILTVSDEEAMQVGRRLAREEGLLCGISSGAAMAAALRVGQDPAMVGKRLVVMLASYGERYLSTPMFSAASQLPARRDGQL

SEQ ID NO: 520 - DNA, 927 bp, Geobacter metallireducens GS-15
  CDS (1)..(927): transl_table=11
atggaacatacccccttttccctgtcagggagcatcggctccacccccctcgtggagatcagaaagctgaaccccaacccgaaggtgagaattctcgccaagcttgaggggaataatgtggggggctcggtcaaggaccgccccgccctctacatgcttgccaaggccgaggctgccggggaactgtcccctgagaggacgatcctggagcccacctcgggaaacaccggcatcgccatcgccatgctcggcgcggccaaggggtaccgggtgaagctcgtcatgcctgcctgcgtgagccttgagcggcgggcggtgctggaggcctacggcgccgaactggttctctctccggcagaggaggccactgacggcgccatccgcctggcgcaccggattctcgacgaagaacccgaccgctactacatgcccaaccagtatgccaaccccaacaaccccctcgcccactacgagaccaccggtccggagatttaccgcggcaccgacggcaccgtcgactttttcgtggccgggatggggaccggcggaaccctcatgggggtaagccgctactttcgggaaaccaagccgtccgtgcgcatcgtcggcgtggagccccggctcggccacaaggtccaggggctcaagaacatgcaggaagccatcgtcccagccatctacaaccccgctgccctcgacctgaagctcaccgtccaggacgagcccgccttcgatacggcgcgggatctggccgtccgcgaggggctcttcgtggggatgtccagcggcgcggccatggctggcgccatccgggtggccaaggatgccccggccggaagcaccatcgtcgtccttctccccgacagaggggaccgttacctcagcacggtgctcttccggtccgtctgcggcaaatgccccccctaa

SEQ ID NO: 521 - protein, 308 aa, Geobacter metallireducens GS-15
MEHTPFSLSGSIGSTPLVEIRKLNPNPKVRILAKLEGNNVGGSVKDRPALYMLAKAEAAGELSPERTILEPTSGNTGIAIAMLGAAKGYRVKLVMPACVSLERRAVLEAYGAELVLSPAEEATDGAIRLAHRILDEEPDRYYMPNQYANPNNPLAHYETTGPEIYRGTDGTVDFFVAGMGTGGTLMGVSRYFRETKPSVRIVGVEPRLGHKVQGLKNMQEAIVPAIYNPAALDLKLTVQDEPAFDTARDLAVREGLFVGMSSGAAMAGAIRVAKDAPAGSTIVVLLPDRGDRYLSTVLFRSVCGKCPP

SEQ ID NO: 522 - DNA, 930 bp, Geobacter metallireducens GS-15
  CDS (1)..(930): transl_table=11
atggcacaaatttacgagaatcttactgacctgatcggcaaaactccgttgctgaggcttcgcaaagtggccgcgggaatcgaggcagacattgtagcgaagctggaatcgttcaaccccggcggcagcgtcaaggaccggatcggcgtgtccatgatccgtgatgccgaagggaggggactcatcaacaaagatacggtcattatcgagccgaccagtggcaacaccggcatcgctctggccttcgtctgcgcggcaagaggataccgcctggtcctcaccatgcccgataccatgagcgtcgagcggcgcaatctcctgaaggcctacggcgccgaactggttctcacccggggggcggaagggatgaagggtgcgatcaataaagccgaggaactggccgcggatatccccaactcgttcataccccagcagttccggaacccggctaacccccacatccatcgtttcaccaccgctgaggagatctggacggacaccgacggcaaagtcgacgttttcgtggccggcgtcggaaccggcggaaccgtgaccggtgtcggcgaggtgctcaaaaagagaaacccgggggtgaaaatcatcgccgtggagccgttcgattcaccggtcctttccggcggccatcccgccccacacaaaatccagggaatcggcgccggtttcgtgccggaggtattgaaccgtgaagccattgacgaaatcttcacggtgagaaacgaggaggcgctggaaaccgcccgccgtctggcccgagaagaggggctgcttgtggggatctccgcgggagcggcggctttcgccgccctggaggtggcgaggcgtcccgaaaacaaggggaagagaattgttgttgtccttcccgacaccggagagcggtatctcagtaccgttcttttccaggatcagtag

SEQ ID NO: 523 - protein, 309 aa, Geobacter metallireducens GS-15
MAQIYENLTDLIGKTPLLRLRKVAAGIEADIVAKLESFNPGGSVKDRIGVSMIRDAEGRGLINKDTVIIEPTSGNTGIALAFVCAARGYRLVLTMPDTMSVERRNLLKAYGAELVLTRGAEGMKGAINKAEELAADIPNSFIPQQFRNPANPHIHRFTTAEEIWTDTDGKVDVFVAGVGTGGTVTGVGEVLKKRNPGVKIIAVEPFDSPVLSGGHPAPHKIQGIGAGFVPEVLNREAIDEIFTVRNEEALETARRLAREEGLLVGISAGAAAFAALEVARRPENKGKRIVVVLPDTGERYLSTVLFQDQ

SEQ ID NO: 524 - DNA, 924 bp, Geobacter metallireducens GS-15
  CDS (1)..(924): transl_table=11
atgccggtatttgacagcgacaaggtaatcgagcagatcggcaacacgccgctgcagcgtctggcgaagcttgaggcgcccggttccgcggccgtgtatggcaaggcggagttctttaacccgggtggcagcgtgaaggaccgcatctgcctggcgatgatcgaggcggccgagaaagacggttccctcaagccggggatgaccgtggtggagcccaccagcggcaataccgggatcggcctctccatgatctgcgccatcaagggatacaagctcgttctcaccatgcccgacaccatgaccgtggagcggcgcaggctcctggccgcctacggggccgaactcgtcctgacccccggggcccaggggatgcgcggggccgtccagaaggccgaggaactggccgcccagccggggcacatcatgatgcagcagttcaagaacggggcgaaccccgaggcgcaccgcaggaccaccggccccgagatcgtcagggccctcagcggccagagcatcgacgccttcgtggccggggtcggaaccggcggcaccatcaccggcgtcggcgaggtgctgaaggaacacaacgccgctgtgcgaatcgtggcggtggagcccgatgcctctcccattctctccggcgggcagcccggtccccacaagattcaggggatcggtgccggcttcgtccccgacgtgctcaacacgaaggtctacgatgaggtgatccgggtgaccaacgaggacgcctacgaaaccgttcggcgcctggcccaggaagaaggggtcctcgtggggatatcctccggcgccaacgtctttgccgccctccaggtggcgaaaaggctcggccccggcaagaacgtggtgacgatcctctgcgataccggggagcggtacctttcgacgggcgtgttcgactag

SEQ ID NO: 525 - protein, 307 aa, Geobacter metallireducens GS-15
MPVFDSDKVIEQIGNTPLQRLAKLEAPGSAAVYGKAEFFNPGGSVKDRICLAMIEAAEKDGSLKPGMTVVEPTSGNTGIGLSMICAIKGYKLVLTMPDTMTVERRRLLAAYGAELVLTPGAQGMRGAVQKAEELAAQPGHIMMQQFKNGANPEAHRRTTGPEIVRALSGQSIDAFVAGVGTGGTITGVGEVLKEHNAAVRIVAVEPDASPILSGGQPGPHKIQGIGAGFVPDVLNTKVYDEVIRVTNEDAYETVRRLAQEEGVLVGISSGANVFAALQVAKRLGPGKNVVTILCDTGERYLSTGVFD

SEQ ID NO: 526 - DNA, 930 bp, Desulfovibrio desulfuricans G20
  CDS (1)..(930): transl_table=11
gtgaacatcgcagaaaacatggccgctctggtcggaaacaccccgctggtacgcctgaacaggctggcacggggttgtcacgccgaagttgtcgccaaactggaattttacaacccctgcgcctcggtaaaagacagaatcgcccgcagcatgatcgaatcggcactggagtcgggagaaatcaacgccgattcgctgctggtggaacccaccagcggcaataccggtgtggggctggcgttcatctgcgcggttcacgggctgcggctgaccctgaccatgccggaatccatgagcgacgaacgtaaaaaactgctgcgcagtttcggcaccacgctggtgctcacccccgcggcacagggtatgcgcggcgccattgcagaagccgagcgcatcgtgcgtgaaaccccgggagccgtcatgctgcagcagtttgccaatcccgccaaccccgcggcacattacgccacaacggctgaagaaatatggcgcgacacagacggcagggtggatgcgtttgtggccggtgtaggcaccggcggcaccatcaccggtaccggcagacgcctgcgcgagcttaatgcgggggtgcgcatcatcgccgtggaacctgaagcatcccccgtgctttcgggcggtgctcccgcaccccaccccattcagggcataggcgcaggctttgtccctgaagtgctggataccggaatctacgacgaagtattcaaggtttccggtgacgacgccatgaacaccgcacgcgacctgctgcgtcaggaaggtattctgtgcggcatttcctcgggggcaaatgcatttgccgcactggaagcggccagacggcccgaaatgaaaggcaagcgcatcgtattcattgtctgcgacaccggcgaacgctacctgagcacaccgcttttttccggccagagctag

SEQ ID NO: 527 - protein, 309 aa, Desulfovibrio desulfuricans G20
MNIAENMAALVGNTPLVRLNRLARGCHAEVVAKLEFYNPCASVKDRIARSMIESALESGEINADSLLVEPTSGNTGVGLAFICAVHGLRLTLTMPESMSDERKKLLRSFGTTLVLTPAAQGMRGAIAEAERIVRETPGAVMLQQFANPANPAAHYATTAEEIWRDTDGRVDAFVAGVGTGGTITGTGRRLRELNAGVRIIAVEPEASPVLSGGAPAPHPIQGIGAGFVPEVLDTGIYDEVFKVSGDDAMNTARDLLRQEGILCGISSGANAFAALEAARRPEMKGKRIVFIVCDTGERYLSTPLFSGQS

SEQ ID NO: 528 - DNA, 969 bp, Prochlorococcus marinus str. MIT 9312
  CDS (1)..(969): transl_table=11
atggaaatagcaaatgatatcacttctctagttggaaatactccattagttaaattaagtcgaatcagaaattactttaattgttatccagaaataatagccaaactcgaaagtttcaatccatcagcgtctgtaaaagatcgtattgcttattcaatgttatgcaaagctgaagaagaaggattgataacaccagacaaaacaacattgattgaagcaacaagtggaaatactggcatcgcattagcaatggttgctgcagctaaaggctataaattgatattaactatgcctgatacgatgagtattgaaagaagggcaatgttgcgagcatatggggctgaattacagctaacgccaggtcaagaaggaatgaaaggagccttagatttagctaatgagttgtcttctagcattgcaaatagctatcaatttaatcaatttgaaaactttgctaatccagatattcatgaaagaacaaccgctcaagaaatatgggcccaatccaataacaatttagatggactagttacgggagtaggcacaggaggcacaattactggttgcgcacgttttttgaaaaaagttaatccaaattgcaaaatttatgctgtagagcccagaaaaagtgctgtcatttccggagaaaaagcaggatctcattcgattcaaggaataggggcaggtttcgtaccgaaagtcctgaatactaaattaattgatgaaattataaaaattgatgacgacgaagcattttattatgggcgtttattagctcgattggaaggtcttttatcaggcatcagcagcggagccgctttagcagcaactataaaaattggtgaaaggaaagaactaattaataaaagattgatagtaattctgccaagttttggtgaaagatatttatcaaccgcaatgtttgaatccaatacctcaattcaagcaagaacagatggttatctttaa

SEQ ID NO: 529 - protein, 322 aa, Prochlorococcus marinus str. MIT 9312
MEIANDITSLVGNTPLVKLSRIRNYFNCYPEIIAKLESFNPSASVKDRIAYSMLCKAEEEGLITPDKTTLIEATSGNTGIALAMVAAAKGYKLILTMPDTMSIERRAMLRAYGAELQLTPGQEGMKGALDLANELSSSIANSYQFNQFENFANPDIHERTTAQEIWAQSNNNLDGLVTGVGTGGTITGCARFLKKVNPNCKIYAVEPRKSAVISGEKAGSHSIQGIGAGFVPKVLNTKLIDEIIKIDDDEAFYYGRLLARLEGLLSGISSGAALAATIKIGERKELINKRLIVILPSFGERYLSTAMFESNTSIQARTDGYL

SEQ ID NO: 530 - DNA, 987 bp, Prochlorococcus marinus str. MIT 9312
  CDS (1)..(987): transl_table=11
atggcaagaatttatgaggacaacagttttgctattggaaacactccattagtaaaattaaaatcagttactaaaaacgcaaaagctacagtacttgcaaaaattgaaggtagaaaccctgcttatagtgtcaaatgtaggattggcgcaaacatgatctgggatgcagagaaaagtgggaagcttacaaaagataaaacgattgttgagccaacttctggaaatacaggaattgctctagcttttactgcttcagcaagaggttataaactcatccttacaatgccagaatctatgtcaattgaaagaagaagggttatggcagtgttgggggctgaaattgttttaacagaggcttctaaaggtatgcctggagcaatagctaaagccaaagaaattgcagaaagtaatccttctcaatatttcatgcctggtcaatttgataatccagcaaaccctgaaattcatttcaaaacaactggaccagaaatctgggatgattgcgatggtgaaattgatgttttagttgcaggggttggaactggcggaacaattacaggggtttcaagatatattaagcaagagaagggtaaaaatattacttctgtagctgtagaaccatcgcatagtcctgttattacacagacaatgaatggggaagaggttaaatctggaccacataaaatccaaggaataggagcaggatttattcctaagaacctagacttatcaattgttgataaggttgaacaggtaacaaatgacgagtcaattgagatggctcttagattagcaaaagaagaaggtctattagttggaatatcttgtggagctgctgctgctgctgctgttagattagctgaacaagataaatatgcaggaaaaattattgtagttgttctacctgatttagcagagagatatttatcatcaattatgtttaatgaagttccaagcggaatcattcaagaaccagtcaaagcttaa

SEQ ID NO: 531 - protein, 328 aa, Prochlorococcus marinus str. MIT 9312
MARIYEDNSFAIGNTPLVKLKSVTKNAKATVLAKIEGRNPAYSVKCRIGANMIWDAEKSGKLTKDKTIVEPTSGNTGIALAFTASARGYKLILTMPESMSIERRRVMAVLGAEIVLTEASKGMPGAIAKAKEIAESNPSQYFMPGQFDNPANPEIHFKTTGPEIWDDCDGEIDVLVAGVGTGGTITGVSRYIKQEKGKNITSVAVEPSHSPVITQTMNGEEVKSGPHKIQGIGAGFIPKNLDLSIVDKVEQVTNDESIEMALRLAKEEGLLVGISCGAAAAAAVRLAEQDKYAGKIIVVVLPDLAERYLSSIMFNEVPSGIIQEPVKA

SEQ ID NO: 532 - DNA, 990 bp, Synechococcus elongatus PCC 7942
  CDS (1)..(990): transl_table=11
atgccgaaaattctcaaccgactaacggagtggatcggcaataccccgctggtacgcctccaagaaactgcacagcagtatggggcgatcgcagaagtgctgctcaagctggaatatttgaatccgctcgggagtgtcaaagaccgcaccgctttgagcttgatccagtcggcgcgatcgcagggtctgatcaccgccggcaccaccctaatcgaaccgaccacgggcaacaccggcattggcttagcctttgccgcggcggctgaacagttgcggctgattctggtcatgcccgatcgcgtcagtgcggagcggatccgcttggctaaactgctgggcgccaaggttgttctcacaccggctgctgaagcgatgctgggctgtattgccaaagctcaggctttgcaacagcagattccggacagcgttattctgcagcagtttcaaaatccggcaaatcccagcattcatcaagcgaccaccggccctgagatttggcgcgataccgatggagaagtcgatatcgtcgtcgccggtgtcggaacaggcggaactctcatgggcatttcccgctatctcaagcccttgcgacctcgcttgcagagcattgccgttcaaccggcgcgatcgcccgttctctctggaggtgcagcgggatcgcatcagctgactggaatggggccaaactttgtctcccccttggtcgatcgcagcctgattgatgaaattctctcagcctatgaagaagacgcgatcgcagtcattcgcacctgcgctgcccgtgaaggaattcccctcggcgtttccagtggcgcaattgtttgggccgccttacaagttgccaaacgaccagaaaatgctggcaagcgtatcgtagcggtttgtccttccggcagtgaacgctatctctctagcactctgctcgccgacatcagccttgagagcgatgacgtctctgattgggtcgcaattccccaaggtcaagcatga

SEQ ID NO: 533 - protein, 329 aa, Synechococcus elongatus PCC 7942
MPKILNRLTEWIGNTPLVRLQETAQQYGAIAEVLLKLEYLNPLGSVKDRTALSLIQSARSQGLITAGTTLIEPTTGNTGIGLAFAAAAEQLRLILVMPDRVSAERIRLAKLLGAKVVLTPAAEAMLGCIAKAQALQQQIPDSVILQQFQNPANPSIHQATTGPEIWRDTDGEVDIVVAGVGTGGTLMGISRYLKPLRPRLQSIAVQPARSPVLSGGAAGSHQLTGMGPNFVSPLVDRSLIDEILSAYEEDAIAVIRTCAAREGIPLGVSSGAIVWAALQVAKRPENAGKRIVAVCPSGSERYLSSTLLADISLESDDVSDWVAIPQGQA

SEQ ID NO: 534 - DNA, 1119 bp, Synechococcus elongatus PCC 7942
  CDS (1)..(1119): transl_table=11
atggcggcgcgagatatccacttcgctaatcgtgacaggagaccaagccccctcgttggggcttttttattgagggtgagagaaccaaagcaagttggtaggatcaaacccggctgcccaaccgaaaaacgcatggatatccgcaacggctttatcgacaccatcgggaatacgccgctgattcgcctcaacagcctgagcgaggcgactggctgtaacattctcggcaaagccgagttcctcaacccgggtggatcggtcaaggatcgggcggcgctgttcatcattgaagacgccgagcggcagggtaaattacggccgggcgggacggttgttgaaggaacggcgggcaatacgggcatcggtctagcacatatctgcaatgccaagggctaccgctgcctgattgtgattcctgagacgcaatcgcaggaaaagattgacctactacgaacactgggcgcggaagtgcgaactgtccctgcagtgccctatcgcgatcccaacaactacgtcaaagtctcggggcgcctcgcagaagaactggacaatgctatttgggcgaaccaattcgacaatttagccaaccgccaagcccactacgcgacaactggccccgaaatttggcagcagaccgaaggaactgttgatgcgtgggtggcggcaacgggtaccggtggaacctatgcgggtgttgcactctacctgaaagagcaaagttctaaggtgcgctgcgttgtggctgacccgatgggcagcggcctctacagctgggtcaaaaccggcgaaattcatctcgaaggtagctcagtcaccgaaggcatcggcaacagccggattacggccaacatgcaagatgtaccgatcgacgatgcgattcagattgctgaccctgaagccctggagatcatctatcaactgctgcaccgcgatggcctcttcatgggcggctccgtggggatcaatgtcgcggcggcctatcgcctcgccaaggaaatggggccgggccacacgatcgtgacggtactttgtgatggcggtgcccgctatcaatcgcgactcttcaacgccgagtggctggcctcaaaagggctgcaaatgccgcaggtgacaacatga

SEQ ID NO: 535 - protein, 372 aa, Synechococcus elongatus PCC 7942
MAARDIHFANRDRRPSPLVGAFLLRVREPKQVGRIKPGCPTEKRMDIRNGFIDTIGNTPLIRLNSLSEATGCNILGKAEFLNPGGSVKDRAALFIIEDAERQGKLRPGGTVVEGTAGNTGIGLAHICNAKGYRCLIVIPETQSQEKIDLLRTLGAEVRTVPAVPYRDPNNYVKVSGRLAEELDNAIWANQFDNLANRQAHYATTGPEIWQQTEGTVDAWVAATGTGGTYAGVALYLKEQSSKVRCVVADPMGSGLYSWVKTGEIHLEGSSVTEGIGNSRITANMQDVPIDDAIQIADPEALEIIYQLLHRDGLFMGGSVGINVAAAYRLAKEMGPGHTIVTVLCDGGARYQSRLFNAEWLASKGLQMPQVTT

SEQ ID NO: 536 - DNA, 1005 bp, Synechococcus elongatus PCC 7942
  CDS (1)..(1005): transl_table=11
atgattataaggacgccgtcttcacccgctaaccgctcagtcatgcgaatcgctcagaacatcacggaactcattggccggactcctctggtgcagctcaatcgcatccccgtcgcagatggctgcttggccagaattgtggtaaagctggaaagctttaatccttcagcgtcggtcaaagaccggatcggcatcagcatgattctagaggctgagcgcaaaggcctcattgctcctgatcgcacaacactggtagagccgacctctggcaacacagggattgccttagcgatggctgctgcagcaagaggctaccggctgattttgaccatgccagacacgatgagttcagagcgtcgggcgatgctgcgggcctatggggccacactggaattgacgcccgggattgaagggatggctggttgcattcagcgggcacaggaaattgttgcctcgcatcctgaagcctatatgctgcaacagttcaagaatcccgcgaatcccaaaattcaccgagaaactacagcagaagagatttgggcggacaccgatggcaccgtcgatattttgatttcaggggttggcacagggggaacaatcaccggggtagcggaggttttgaaggaacgcaaaccgtccttccaagcgttcgcagttgagccagctaatagtccggtgctatcgggagggcggcctggtccccacaagattcaaggcattggggcaggttttgtgccagaagtgctggcgactcaactgatcgatgaggttgtgacggtaagcgatgacgaagcgatcgcctacggccgtcgcttagctcgcgaggaagggttgctgtcggggatttccagtggcgctgcagtcgctgccgccgtccaagttgctcgccggcctgaaaataccgacaaactgatcgtggtcatcttgcccagttttggcgagcgctatctcagcacacctttgttccaagagccggaactggtttcagttagcagcaacggttag

SEQ ID NO: 537 - protein, 334 aa, Synechococcus elongatus PCC 7942
MIIRTPSSPANRSVMRIAQNITELIGRTPLVQLNRIPVADGCLARIVVKLESFNPSASVKDRIGISMILEAERKGLIAPDRTTLVEPTSGNTGIALAMAAAARGYRLILTMPDTMSSERRAMLRAYGATLELTPGIEGMAGCIQRAQEIVASHPEAYMLQQFKNPANPKIHRETTAEEIWADTDGTVDILISGVGTGGTITGVAEVLKERKPSFQAFAVEPANSPVLSGGRPGPHKIQGIGAGFVPEVLATQLIDEVVTVSDDEAIAYGRRLAREEGLLSGISSGAAVAAAVQVARRPENTDKLIVVILPSFGERYLSTPLFQEPELVSVSSNG

SEQ ID NO: 538 - DNA, 1365 bp, Rhodospirillum rubrum ATCC 11170
  CDS (1)..(1365): transl_table=11
atgacagcccccgtcgatctcctcgcccagatcggtcacacgccgatcgtccgcctcgatcacctcgataccgggccctgttcgctgtttgtgaagcttgaaagccagaacccctcgggttcgatcaaagaccgcatcgccgtgtcgatgatcgatgccgccgaacgcgatggccggttgaagcccaagggcaggatcgtcgaggcgacggcgggcaacaccggccttgccctggccctggtggcggcgcgccgcggctaccatttgaccctggtcatccccgataagatgagccgggaaaagatcgcccatgtgcgggcgatgggggccgaggtggtgctgacgcgctcggatatcggcaagggccatccggcctattaccaggatctggcccagcgcatcgccgacgagaccggggccttcttcaccgatcagttcaacaatcccgacaatccgatcgcccatgaaaccggcaccggccccgagatctgggagcagatggacggccgggtcgacgccgtggtcgccggcgtcggatcgggcggcaccctgaccgggttgtcgcggtttttcgcccgtgtctcgccgcagaccgatatcgttctggccgatcccaagggctcgatcctggccgattacgtgacatcggggcggatcggcgcggcgggatcctggctggtcgaaggcatcggcgaggatttcgtgccgccggtctcggatctgtcgcgggtgacccacgcctataccattcccgacggcgaaagcttcgccacggcgcgcggcgtgctgcgccaggaagggctgctgatcggctcgtcctcgggcaccttgctggccgcggccttgcgctattgccgcgaacagaccagcccgaagcgggtggtcagcttcgtctgcgacagtggcaataaatacctatcaaagatgtataatgatttctggatggccgatcagggtctgtccaaccgtccgcgctttggcgatctgcgcgacttgatcgcgcggcgccaggacgagggcgcggtggtctccgtcgcccccggcgataccctggccatcgcctatcagcgcatgaagctttacgacgtttcccaattgcccgttctcgacgggacccgctgcgtcgggttgatcgacgaatcggacgttttgctcagcctgcgcgagcgcggcgggctgttcgacgtcgccgtcagcgcggcgatgtcgaccgatttggaaaccgttggtcccgacgccgacgccgaccaccttgtcgggctgttcgatcgcggacgcgtcgccatcgttgtcgatgacagcggtttcctcgggctgatcacccgcatcgatttcctgaaccatctaaggggcaaagccgcatga

SEQ ID NO: 539 - protein, 454 aa, Rhodospirillum rubrum ATCC 11170
MTAPVDLLAQIGHTPIVRLDHLDTGPCSLFVKLESQNPSGSIKDRIAVSMIDAAERDGRLKPKGRIVEATAGNTGLALALVAARRGYHLTLVIPDKMSREKIAHVRAMGAEVVLTRSDIGKGHPAYYQDLAQRIADETGAFFTDQFNNPDNPIAHETGTGPEIWEQMDGRVDAVVAGVGSGGTLTGLSRFFARVSPQTDIVLADPKGSILADYVTSGRIGAAGSWLVEGIGEDFVPPVSDLSRVTHAYTIPDGESFATARGVLRQEGLLIGSSSGTLLAAALRYCREQTSPKRVVSFVCDSGNKYLSKMYNDFWMADQGLSNRPRFGDLRDLIARRQDEGAVVSVAPGDTLAIAYQRMKLYDVSQLPVLDGTRCVGLIDESDVLLSLRERGGLFDVAVSAAMSTDLETVGPDADADHLVGLFDRGRVAIVVDDSGFLGLITRIDFLNHLRGKAA

SEQ ID NO: 540 - DNA, 984 bp, Rhodospirillum rubrum ATCC 11170
  CDS (1)..(984): transl_table=11
atgaccattcgcgacggctttctgggcaccatcggtggaaccccgcttattcgtctgccctgggcctcgcggatcaccggtcgggaaattttaggcaaggccgagtttctcaatcccggcggttcggtcaaggaccgcgccgccctggccatcatcaccgacgccctggagcgcggcgccctcgcgcccggcggcaccatcgtcgaaggcacggccggcaatacgggaatcggcctgaccctggtcggcaacgccatcggctgcaagacggtgatcgtcatgcccgaaacccaaagccaggaaaaaaaggacgccctgcgcctgtgcggggccgatctgcggctggttgccgcccggccctataaggatcccggcaattacgtgcgctactccgaaaccctggccaaggaattgggcggcttttgggccaatcaattcgacaatacggccaatcgcgacgggcaccgcgccacgacgggacgggaaatcatcgagcaatgcgaagggcggctggatgccttcacctgcgccgtcggcaccggcggcaccctggccggcgtcgccctcgccctcaaggcccatgacccggccatcaaagtggtgctggccgaccctttcggctcggccctttatagctggatcaccagcggcgagttgaaggccgagggcggatcggtgaccgagggcatcggccagggacgggtgaccgccaatctgcgcgacgctccgcttgacgaggcggtgcggataggcgacgccgaagcgctggaggcgatcttcgccatggtccgtgaagacggcctgatgctaggcggatcgagtggcgtcaacgtcgcggcggcgatgaaggtcgcccttaccctgcccaagggcagccgggtggtcaccattctgtgcgacggcgcccaacgctaccaaagcaagctgttcaaccccgatttcctgcgctcgaaagccctgccggttcccgactggctggcctga

SEQ ID NO: 541 - protein, 327 aa, Rhodospirillum rubrum ATCC 11170
MTIRDGFLGTIGGTPLIRLPWASRITGREILGKAEFLNPGGSVKDRAALAIITDALERGALAPGGTIVEGTAGNTGIGLTLVGNAIGCKTVIVMPETQSQEKKDALRLCGADLRLVAARPYKDPGNYVRYSETLAKELGGFWANQFDNTANRDGHRATTGREIIEQCEGRLDAFTCAVGTGGTLAGVALALKAHDPAIKVVLADPFGSALYSWITSGELKAEGGSVTEGIGQGRVTANLRDAPLDEAVRIGDAEALEAIFAMVREDGLMLGGSSGVNVAAAMKVALTLPKGSRVVTILCDGAQRYQSKLFNPDFLRSKALPVPDWLA

SEQ ID NO: 542 - DNA, 921 bp, Moorella thermoacetica ATCC 39073
  CDS (1)..(921): transl_table=11
atgaagatagcccgggatgttacccagttgatagggcagacgccgatcctgcgcctgaaccgcctggtagaggacgggatggaggtatacttaaaaatcgagttttttaatcctggaggcagtgttaaggaccgcattgccctcagcatgattaccgctgcggaagccgacggccgcttgaaacccggggataccattgtcgagcccacaagtggtaatacgggtatcggcctggccatggtggcggccgtacggggttaccgcctgatcctggttatgccggaaacaatgagtattgagaggcgcaagctcctggcggcctatggggcggagttcgtcctgactccgggaaacctggggatgaagggggctgtagataaagcaaatgaactggtacgggagaaccccggttactttatgccccagcagtttgaaaatccggccaacccggccatccaccgccagaccacggccagggagatcctggagcaaatggacggtaaagtagacgcctttgtggccggcgtcgggaccgggggtaccctcaccggggtgggtgaggtcctgaaaaaggaaatcccgggggtaaggattgtagctgtggaaccggcggcttcaccggtcctttctggaggccagccaggaccccataagattcagggtataggtgccggctttgtcccgccggtcttgcgccgggaggtggttgacgagataatcaccgtcaccaacgaagacgctatggaaacggcccggcgcctggcacgggaggaaggcctgctggtgggcatctcttcgggcgccgctgcttttgccgccctccaagtggcccggcgcctgggccgggggaaaagggtactggccatcgcccccgacaccggcgagcgctacctgagtacggagttgttcaagataggctaa

SEQ ID NO: 543 - protein, 306 aa, Moorella thermoacetica ATCC 39073
MKIARDVTQLIGQTPILRLNRLVEDGMEVYLKIEFFNPGGSVKDRIALSMITAAEADGRLKPGDTIVEPTSGNTGIGLAMVAAVRGYRLILVMPETMSIERRKLLAAYGAEFVLTPGNLGMKGAVDKANELVRENPGYFMPQQFENPANPAIHRQTTAREILEQMDGKVDAFVAGVGTGGTLTGVGEVLKKEIPGVRIVAVEPAASPVLSGGQPGPHKIQGIGAGFVPPVLRREVVDEIITVTNEDAMETARRLAREEGLLVGISSGAAAFAALQVARRLGRGKRVLAIAPDTGERYLSTELFKIG

SEQ ID NO: 544 - DNA, 927 bp, Moorella thermoacetica ATCC 39073
  CDS (1)..(927): transl_table=11
gtgggtcgtatttaccagaacatcacccagcttatcggtggtaccccgatcgtcaagctccaccgtatgaatccaagcgaagcagaagttctggtcaagctggaactttttaaccccggcggaagtatcaaagatcgtatcgccttagccatgattgaagacgccgaagagcgggggctcctggacaaagacaccgttattattgaaccgaccagtggcaataccggcatcggcctggccatggtggccgcggcacggggatacaaattgatcctaaccatgccggaaaccatgagccaggaacggcgtcagcttctcaagggcttcggtgccgagctggtcctcacgccgggggccgaggggatgaagggggccatccgccgggccgaagagctggctgccacctatccccgggccttcatcccccagcagtttgaaaatcccgccaacccggccgcccatcgccatactaccgctgctgagatctatgacgctaccgacgggcagctggatatcctggtctgtggtgtcggtaccggcgggaccatcaccggcaccggcgaagttttaaaagaacggatacccggactgcaggtagtagctgtcgaaccggcttcatcccctgtcctttccggcggtatggccggaccccataaaatccagggtataggcgcggggtttgttccggaaattctcaatatcgacgttatcgacgagattatccaggttacggacgaggaagccattgatactgctcgacggctggccagggaagagggtattatggtcggcatatcttccggggccgcctgctgggcagccctgcgcctggccgcccgcccggaaaacgccggcaagcgtatcctggcagtgctacccgacaccggtgaacgctacctgtctacctcgcttttccaggagatttaa

SEQ ID NO: 545 - protein, 308 aa, Moorella thermoacetica ATCC 39073
MGRIYQNITQLIGGTPIVKLHRMNPSEAEVLVKLELFNPGGSIKDRIALAMIEDAEERGLLDKDTVIIEPTSGNTGIGLAMVAAARGYKLILTMPETMSQERRQLLKGFGAELVLTPGAEGMKGAIRRAEELAATYPRAFIPQQFENPANPAAHRHTTAAEIYDATDGQLDILVCGVGTGGTITGTGEVLKERIPGLQVVAVEPASSPVLSGGMAGPHKIQGIGAGFVPEILNIDVIDEIIQVTDEEAIDTARRLAREEGIMVGISSGAACWAALRLAARPENAGKRILAVLPDTGERYLSTSLFQEI

SEQ ID NO: 546 - DNA, 903 bp, Burkholderia thailandensis E264
  CDS (1)..(903): transl_table=11
atggcttacaaaactatcgaagacacgatcggcaatacgccgctcgtgcaaatcgtccgcttgccggacgacgagattcgcgcccgcaacaacgtgattctcgcgaagctggaaggcaacaatccggcgggctcggtgaaggaccgtcccgcgctgtcgatgatccgcaaggcggaagagcgaggcaggatcaagccgggcgatacgctgatcgaggcgacgagcggcaacaccgggatcgcgcttgcgatggtggcggcgatccgcggctacaagatggtgctgatcatgccggaggatctgtccgtcgagcgtcgtcagagcatggctgcgtacggcgcggaaatcgtgctgacgccggtgaagggcggcatggaattcgcgcgcgatctcgccgaccagatgcagcgcgaaggcaagggcgtgatcctcgatcagttcgcgaatccggataatccgcttgcgcattacgagggcaccggccccgaaatctggcgcgagaccgagggccgcatcacgcacttcgtgtccgcgatgggcacgacgggcacgatcatgggtacgtcgcagtatctgaaggagcggaatccggccgtcgagatcgtcggcgcgcagcctgaagagggctcgcggattccgggcatccgcaagtggccggaagcgtatctgccgaagattttcgatcgtagccgcatcgaccgcgtcgagaacgtgagccaggccgcgtccgaagcgatggcgcgcaagctcgcggccgtcgaaggcatcttctgtggcatctcgtcgggcggcgcatgcgaagtcgcgctgcgcgtcgcgcggcaggtcgagaatgcgacgatcgtgttcgtcgtctgcgaccgcggcgaccgttatctgtcgacgggggtgtttcccgcgtaa

SEQ ID NO: 547 - protein, 300 aa, Burkholderia thailandensis E264
MAYKTIEDTIGNTPLVQIVRLPDDEIRARNNVILAKLEGNNPAGSVKDRPALSMIRKAEERGRIKPGDTLIEATSGNTGIALAMVAAIRGYKMVLIMPEDLSVERRQSMAAYGAEIVLTPVKGGMEFARDLADQMQREGKGVILDQFANPDNPLAHYEGTGPEIWRETEGRITHFVSAMGTTGTIMGTSQYLKERNPAVEIVGAQPEEGSRIPGIRKWPEAYLPKIFDRSRIDRVENVSQAASEAMARKLAAVEGIFCGISSGGACEVALRVARQVENATIVFVVCDRGDRYLSTGVFPA

SEQ ID NO: 548 - DNA, 888 bp, Syntrophus aciditrophicus SB
  CDS (1)..(888): transl_table=11
atggacacacatgatgtaatggaactgataggaaacacgcctttaattcggctgagaaacgaaaatataatcgccaaggctgaatttcttaatcctggaggaagtataaaagaccgcattggcctggcaatgatcgaagcggcggaacgggatggaacactgaaaccgggaatgaaaattgtcgagccgacctcgggcaataccggaattggaataacgctcgtcggggctgcaaagggatatgaagtatttattgtcatgcccgaaggtatgagcgaggagagaaagcatatcattaaggttctgggcggaaatctcgttctgactccggacagtgagaacatagccggcgcgatcaaaaaggcggaagaacttgttgaagaattccatggatatatgccgaatcaattcaagaaccctgctaacgcactggcccacttcacacataccgcgccggaactctggaaacaggcggaacataaaatcgatgcctttatttcgggaattggaagcggcggaacgattcagggggttggctcttttctgaaggagaggaatccggacgtgaccattgtggccgtggagcccaaaaacgtatccgctcttctcggtcatgagccgggtttacaccagatccagggaatcggggatggattcatccctgaaattctcaacgtttccctgatcgacagaataattgaagtctctgatgacgatgcaatcaggacaacgcgtgagcttgcatcaaataattctcttttatgcggaacttcatccggggcaaacgtatgggccgcgaggcagatagccatggaacatccggaatggacgatagccacggttcttgcggaccgggcggaacggtatttcagcaccggcttactctga

SEQ ID NO: 549 - protein, 295 aa, Syntrophus aciditrophicus SB
MDTHDVMELIGNTPLIRLRNENIIAKAEFLNPGGSIKDRIGLAMIEAAERDGTLKPGMKIVEPTSGNTGIGITLVGAAKGYEVFIVMPEGMSEERKHIIKVLGGNLVLTPDSENIAGAIKKAEELVEEFHGYMPNQFKNPANALAHFTHTAPELWKQAEHKIDAFISGIGSGGTIQGVGSFLKERNPDVTIVAVEPKNVSALLGHEPGLHQIQGIGDGFIPEILNVSLIDRIIEVSDDDAIRTTRELASNNSLLCGTSSGANVWAARQIAMEHPEWTIATVLADRAERYFSTGLL

SEQ ID NO: 550 - DNA, 978 bp, Syntrophus aciditrophicus SB
  CDS (1)..(978): transl_table=11
atgcaggaggacagctccatgaaacgaatctacgaagacaactcccggtccatcggcaatacaccgctggtgaaacttaataatctcaccagggggttgcaggcgacggttcttgccaaggtggaaggtagaaatccttcttattcggtaaaatgccggatcggtgcagccatgatctgggatgctgaggaacggggggtgcttcagcccggcatggaaatcatcgaaccgacaagcggtaatacagggatcgcccttgcatatgtggcggcagcccggggatatgaactgaccctgaccatgcccgaaaccatgagcctcgaacgccgccgggttctggcagtcttcggcgccaatctgatcctgacccccggcgctgaagggatgaagggggcaattaaccgggcagaggctttggtggcttccgcgccggaacattatttcctgccccagcagttcaaaaacccggctaatcctgccatccacgagaaaaccaccggtcccgagatctggacggaaacggatggagaagtggatgtccttgtctccggcgtcgggacagggggaacgatttccggggtatcgcggtatatcaaaaaagctcaaggtaaaccgatcttgtctgtggcggtggagccgaaggaaagtccggtcatgactcagaagctggccggggaagaactgcgggcgggacctcataaaattcaaggaatcggcgccgggttcatcccggatacgctggatctttcccttgtggatcgtgtggaacaggtggaaagcgatgaagccgtgctgacagctcggaagctggctcgggatgagggcatccttgtgggcatctccagtggtgcggccgctgcagtcgcgctgcgtctggccgcacgggaagaatttgcagggaagatcttcgttgtaatcctcccggatgccggggaacggtacctgtccaccgtccttttcgaaggtatcggcgaatga

SEQ ID NO: 551 - protein, 325 aa, Syntrophus aciditrophicus SB
MQEDSSMKRIYEDNSRSIGNTPLVKLNNLTRGLQATVLAKVEGRNPSYSVKCRIGAAMIWDAEERGVLQPGMEIIEPTSGNTGIALAYVAAARGYELTLTMPETMSLERRRVLAVFGANLILTPGAEGMKGAINRAEALVASAPEHYFLPQQFKNPANPAIHEKTTGPEIWTETDGEVDVLVSGVGTGGTISGVSRYIKKAQGKPILSVAVEPKESPVMTQKLAGEELRAGPHKIQGIGAGFIPDTLDLSLVDRVEQVESDEAVLTARKLARDEGILVGISSGAAAAVALRLAAREEFAGKIFVVILPDAGERYLSTVLFEGIGE

SEQ ID NO: 552 - DNA, 948 bp, Frankia sp. CcI3
  CDS (1)..(948): transl_table=11
atgcgcttctcctccctggccgactccgtcggccggaccccgctggtcgggcttccgcgactgtcgccgtcgccggatgcccggctgtgggcgaagctggaacaggacaacccgaccggttcgatcaaggaccgggcggcgctgtggatgatcgccgacggcgagaagcgcggtctgctcactccgggcgcgaccgtgctcgaaccgacgtccggtaataccgggatctcgctggccatggcctgccgtcagcggggctaccggctgatctgtgtgatgccggagaacacctcgatcgagcgccgtcagctcctgcagatgtggggcgccgagatcaggttctcgcccgccgccggcggatcgaatgaggcggtcgccgtcgcgaagcggctggccgctgagaatcccgactgggtgatgctctaccagtacggcaatccggcgaacgcccaggcgcactatgagacgaccgggccggagattctcgaggacctgcccgaaatcacgcacttcgtggcgggcctcggcacgaccggaaccctcatgggaaccggtcgttacctcaaggaacgggtgccggacatctcgatcgtcgcggccgaaccgcgctacggcgagctggtgtacgggctgcgcaacatcgacgaggggttcgttcccgaactgtacgacccgtcggtgctcacctcgcgatactcggtcggtccgcgggaggcgctgcgccgtacccgcgagctggtgcaggaggagggcatcttcgccgggatctccaccggggccatcctgcacgcggcgcttgcgcaggccgagcgggcggtcaaggagggcaagtcggccgatatagtcctgatcgtctgtgacggtggctggaagtatctgtccaccggcgcctacgccggcaccctcgaagaagccgaagccgccctggaagggcagctgtgggcctag

SEQ ID NO: 553 - protein, 315 aa, Frankia sp. CcI3
MRFSSLADSVGRTPLVGLPRLSPSPDARLWAKLEQDNPTGSIKDRAALWMIADGEKRGLLTPGATVLEPTSGNTGISLAMACRQRGYRLICVMPENTSIERRQLLQMWGAEIRFSPAAGGSNEAVAVAKRLAAENPDWVMLYQYGNPANAQAHYETTGPEILEDLPEITHFVAGLGTTGTLMGTGRYLKERVPDISIVAAEPRYGELVYGLRNIDEGFVPELYDPSVLTSRYSVGPREALRRTRELVQEEGIFAGISTGAILHAALAQAERAVKEGKSADIVLIVCDGGWKYLSTGAYAGTLEEAEAALEGQLWA

SEQ ID NO: 554 - DNA, 930 bp, Frankia sp. CcI3
  CDS (1)..(930): transl_table=11
atgaggatcgcggaagacatcacgcaactgatcggcaacacgccgctggtccgattgcgtcgcgtcacggacggagtgggagcccaggtcgtggccaaactggagtccttcaacccggcgcacagcgtgaaggaccgtctcggtgtggccctgatcgacgccgtggagcgggccgggctgatcgggccggacaccgtcatcctcgaacccaccagtgggaacaccggcatcgccctggccatggtgtgcgccgcccgcggctaccgctgcgtcctgacgatgcctgagacgatgagcaccgagcggcggatgctgctgcgggccctcggcgcggagctcgtgctcacccccggtgccgagggcatgcccggcgccatcgcgaaggcggaggagctcgcgaagaacgacgaacggtacctcatcccgcagcaattcgagaacccggccaacccggcgatccaccgcgccacgaccgccgaggagatctggcgcgacaccgacgggcagatcgacgtgctcgtcgccggagtcggcaccggcgggaccatcaccggcgtcgcccaggtcatcaaggagcgcaggcccgaggcccggttcgtcgccgtggagccgtcggcatcgccggtgctctcgggcggcgtgaagggaccgcacccgatccagggcatcggcgccgggttcgtcccgccggtcctggagaccggcctcgtcgacgagatcatccaggtcgatggtgaggacgccttcgacctggcccgccggctggcccaggaggagggactcctggtgggcatctcctcgggcgcggcggtgtcggcggcgctgcaggtagcccgccgcccggagaacgccgggaagctggtcgtcgtcgtgcttccggacttcggcgagcgctacctgagcacaccgttgttcgccgggctcgggtga

SEQ ID NO: 555 - protein, 309 aa, Frankia sp. CcI3
MRIAEDITQLIGNTPLVRLRRVTDGVGAQVVAKLESFNPAHSVKDRLGVALIDAVERAGLIGPDTVILEPTSGNTGIALAMVCAARGYRCVLTMPETMSTERRMLLRALGAELVLTPGAEGMPGAIAKAEELAKNDERYLIPQQFENPANPAIHRATTAEEIWRDTDGQIDVLVAGVGTGGTITGVAQVIKERRPEARFVAVEPSASPVLSGGVKGPHPIQGIGAGFVPPVLETGLVDEIIQVDGEDAFDLARRLAQEEGLLVGISSGAAVSAALQVARRPENAGKLVVVVLPDFGERYLSTPLFAGLG

SEQ ID NO: 556 - DNA, 999 bp, Novosphingobium aromaticivorans DSM 12444
  CDS (1)..(999): transl_table=11
atgatggctcctgcgattgctcccgataccatttccctcatcggcaacacgcctctcgtccggctcaaggggccgagcgaggagaccggttgcgagatctacggcaagtgcgaattcaccaaccccggcgcttcggtgaaggatcgcgcggccctgtggatcgtccgcgacgccgaagagcgcggcattctcaagcccggcggcaccattgtcgagggcacggcgggtaacaccgggatcggcctggcactcgtcgccaatgcgcgcggctacaagtcggtcatcgtcatgcccgagacgcaatcgcgcgagaagatggacaccttgcgggcactgcgttcggagctggtgctggttccggccgcccccttctcgaaccccggccacttcgtgcacacttcgcgccgcattgccgaggagaccgaaggcgcggtctgggcgaaccagttcgacaacatcgccaaccgccgagcgcacatcgaaagcaccgcgcccgaaatctgggagcagatggagcatcgcatcgatggcttcacctgcgctgcgggtacgggtggcaccatcgcgggcgtgggcatgggcctcaaggccttcgacgagaacatcaccattgccctcaccgatccgcatggcgccgcgctgtacaattactatgcccacggcgaactgaaggcggaaggctcttcggttgccgaggggatcggtcaggggcgcatcacggcgaacctcgacggtgcgcccatcgacacccagttccgcatttcggacgaggaaggtctgcactgggtcgaacgcctgctggccgaggaaggcctctgtcttggcctgtcgagcggcatcaacgtggcgggcgcggttgcgctggcaaggcaactgggcaagggcagccgcgtggcgacgatcctgtgcgacacgggcttccgctatctctcctcgctctacaatccggaatggctcaagaccaagggcctgcgagtgttcccttggctggagcaatga

SEQ ID NO: 557 - protein, 332 aa, Novosphingobium aromaticivorans DSM 12444
MMAPAIAPDTISLIGNTPLVRLKGPSEETGCEIYGKCEFTNPGASVKDRAALWIVRDAEERGILKPGGTIVEGTAGNTGIGLALVANARGYKSVIVMPETQSREKMDTLRALRSELVLVPAAPFSNPGHFVHTSRRIAEETEGAVWANQFDNIANRRAHIESTAPEIWEQMEHRIDGFTCAAGTGGTIAGVGMGLKAFDENITIALTDPHGAALYNYYAHGELKAEGSSVAEGIGQGRITANLDGAPIDTQFRISDEEGLHWVERLLAEEGLCLGLSSGINVAGAVALARQLGKGSRVATILCDTGFRYLSSLYNPEWLKTKGLRVFPWLEQ

SEQ ID NO: 558 - DNA, 918 bp, Novosphingobium aromaticivorans DSM 12444
  CDS (1)..(918): transl_table=11
atgagagcggaatccatcctcgccacgatcggcaacaccccgcacattcgcctgtcccgcctgtttcccgaccacgaggtatgggtgaagtgcgagcgcgccaatccgggcggctccatcaaggacaggatcggcctcgccatgatcgaggccgcagaggccgacggcagcctgaagccgggcggcaccatcgtcgagcccacttccggcaataccggcatcggtcttgccatggcggcggcggtaaagggctacaagctcatcctcgtcatgcctgaatcgatgtcgcttgaacgccgccgcctgatgctggcctatggcgcgaccttcgacctgaccccgcgcgaaaagggcatgaagggcgcgatcgagcgcgcgaaggaaatcgtcgatcagaccgacggcgcatggatgccgcagcagttcgacaatccggccaacgtatcggttcacgtccgcacgaccgcccaggaaatcctcaaggacttcggcagcgaaccgatcgacgtgctcatcaccggcgtcggcaccggcggtcacctgaccggttgcgccgaggaactgaagaagcactggccctcgctcaaggcctatgccgtggaacccaccctttccccggtcatctcgggcggccaacccggcccgcacccgatccagggcatcggcgcgggcttcatccccggcaacctccacacccagtcgatcgacggcgcaatccaggtcgacccggcggacgccaaggaaatggcgcgcctttgcgcatcgaaggaaggcatgctggtcggcatctcgtccggcgcaacgctggcggccatcgcgcagaagctgccgagcctgcccgccggcagccgcgtgctgggcttcaactacgacaccggcgagcgctatctctcggtgccggacttcctgccggagtaa

SEQ ID NO: 559 - protein, 305 aa, Novosphingobium aromaticivorans DSM 12444
MRAESILATIGNTPHIRLSRLFPDHEVWVKCERANPGGSIKDRIGLAMIEAAEADGSLKPGGTIVEPTSGNTGIGLAMAAAVKGYKLILVMPESMSLERRRLMLAYGATFDLTPREKGMKGAIERAKEIVDQTDGAWMPQQFDNPANVSVHVRTTAQEILKDFGSEPIDVLITGVGTGGHLTGCAEELKKHWPSLKAYAVEPTLSPVISGGQPGPHPIQGIGAGFIPGNLHTQSIDGAIQVDPADAKEMARLCASKEGMLVGISSGATLAAIAQKLPSLPAGSRVLGFNYDTGERYLSVPDFLPE

SEQ ID NO: 560 - DNA, 915 bp, Staphylococcus aureus subsp. aureus NCTC 8325
  CDS (1)..(915): transl_table=11
atgattacttatgatttaattggcaatacaccattagtactgttagaacattatagtgatgataaagttaaaatttatgccaagcttgaacaatggaatcctggaggcagtgttaaagacagactcgggaaatatttagtagagaaggcaattcaagaagggcgtgtgcgtgcaggtcaaactattgttgaagcgactgctggtaatacaggcatagggttagctattgcagcgaatagacatcatttgaaatgtaagatctttgcgccgtatggtttttcagaagaaaagattaatattatgatagcgcttggtgcagaagtttcaaggacgagtcagtctgaaggtatgcatggggcacaattagctgcacgttcctatgctgaaaaatatggtgccgtttatatgaatcaatttgaatccgaacataatccggatacatattttcatacattgggacccgaattgacttcagcattacagcaaattgattattttgtggctggtattggctctggcggtacatttacaggtaccgcacgttatttaaagcaacatcacgtgcaatgttatgccgttgagccagaagggtccgtgttaaatggagggccagctcatgcacatgacactgaaggtatcggttctgagaaatggccgatatttttagagagacgtcttgtagatgggatatttacgattaaagatcaagatgcctttcgaaatgtcaaaagtttggctataaatgaagggttgttagtaggcagttcttcaggtgcagcattacaaggtgcattgaatttaaaagcgcaattatctgaaggtacgattgttgtcgtatttccagatggtagtgatcgatatatgtctaagcaaatatttaattatgaggagaataataatgaacaagaaaactaa

SEQ ID NO: 561 - protein, 304 aa, Staphylococcus aureus subsp. aureus NCTC 8325
MITYDLIGNTPLVLLEHYSDDKVKIYAKLEQWNPGGSVKDRLGKYLVEKAIQEGRVRAGQTIVEATAGNTGIGLAIAANRHHLKCKIFAPYGFSEEKINIMIALGAEVSRTSQSEGMHGAQLAARSYAEKYGAVYMNQFESEHNPDTYFHTLGPELTSALQQIDYFVAGIGSGGTFTGTARYLKQHHVQCYAVEPEGSVLNGGPAHAHDTEGIGSEKWPIFLERRLVDGIFTIKDQDAFRNVKSLAINEGLLVGSSSGAALQGALNLKAQLSEGTIVVVFPDGSDRYMSKQIFNYEENNNEQEN

SEQ ID NO: 562 - DNA, 954 bp, Desulfitobacterium hafniense Y51
  CDS (1)..(954): transl_table=11
atgccaaaaatcgcagataatctgacggatttaattggaaaaacgccgctgctgcgcttgaaccggtattcaaaaggcaaaaatctattcgctgaaatcatcgccaagctggaatacttcaatccgcagagcagtgttaaggacagaatcgcttacgccatgatcgaggatgccgaaaaacagggtgctatcgatcaggatacgacgattattgagccgaccagcggcaataccggcatcggccttgcctttgtggcggcagccaagggatacaggattgtcttggtcatgccagataccatgagcgtggaaagacggcggcttttacgggcgctgggcgcggacctggtgctgaggccgggcactcagggcatgggcggcgccatccgcaaggccgaagaattaaaagaacaaataagtaaatcgtttattccggatcagttcagcaatccggtcaacccttcctttcaccgggagacgacagccaaggaaatactggaggataccgaagggaaggtagacgtctttgtagccggagtaggtacaggcggaacggttaccggcgtgggagaagccctgaaggcggtaaatccaggaatcaaggttgtggctgttgagccttataattctcccgttctttcgggcggacagccgggcccacatgcgattcagggaattggcgccggctttattcccaaagtattcaattcaagcttcgtggatgaaatattccaggtcaaaaacgaggaagcctttgaagcctccagagaagtggcgaaattggaaggactcctggtcggagtctcatccggtgccgccctctatgcggccaccaggattgcggccagaagagagctggaaggcaagaaaatcgttgtgcttctgccggataccggtgaacgttacttgtcaacgccgctgtttccctacgatgagggatccaaccatttttaa

SEQ ID NO: 563 - protein, 317 aa, Desulfitobacterium hafniense Y51
MPKIADNLTDLIGKTPLLRLNRYSKGKNLFAEIIAKLEYFNPQSSVKDRIAYAMIEDAEKQGAIDQDTTIIEPTSGNTGIGLAFVAAAKGYRIVLVMPDTMSVERRRLLRALGADLVLRPGTQGMGGAIRKAEELKEQISKSFIPDQFSNPVNPSFHRETTAKEILEDTEGKVDVFVAGVGTGGTVTGVGEALKAVNPGIKVVAVEPYNSPVLSGGQPGPHAIQGIGAGFIPKVFNSSFVDEIFQVKNEEAFEASREVAKLEGLLVGVSSGAALYAATRIAARRELEGKKIVVLLPDTGERYLSTPLFPYDEGSNHF

SEQ ID NO: 564 - DNA, 891 bp, Saccharophagus degradans 2-40
  CDS (1)..(891): transl_table=11
atggaataccccacaatagaagcaattattgggaataccccccttgttcgtttacagcgccttcctggttgcgagaaaaatacagttttagttaagttggaaggtaataaccctggtgggtccgtcaaagatcggcctgcactctcgatgattcagcgcgcagaagccgctggggcaataaaaccaggcgatacgattattgaggctaccagtggtaatacaggcatagccttagcaatggtggctgctgttaagggctataatatgatccttattatgcccgatcatatgacagaagagcgcaaagcggcaatgacggcttatggtgctaagcttatcttggtgtccaaagccgagggcatggagggcgcaagggatttggcgcaggcgatggcatcacgcggtgaaggggtggtgttagatcaatttagtaatacagataatcctcttgctcattttactggcactggcccagaaatttggcagcaaaccggcggtacggttactcattttgtaagctcgatgggtactacgggcaccatagtgggcacctctaagttcttaaaaagccaaaacccgaatgtacaggtggtcggtttgcaacctgcagaaggagcggctattcccggtattagagcatggccacaagagtatatgccgactatttttaccgatgaaaatattgatagcgttgtgcaaatgtcacaacaaaaagccgaagaaaccatgcgccttttagcaaaaaaagaaggtgtgttttgtggtgtttcttcaggcggagccgttgcggcagcgttagatatcgccgcgagtacagagggcgccgttatagtagctataatttgcgatcgcggagatcgctacttatcgtcaggtgtgtttaattcttaa

SEQ ID NO: 565 - protein, 296 aa, Saccharophagus degradans 2-40
MEYPTIEAIIGNTPLVRLQRLPGCEKNTVLVKLEGNNPGGSVKDRPALSMIQRAEAAGAIKPGDTIIEATSGNTGIALAMVAAVKGYNMILIMPDHMTEERKAAMTAYGAKLILVSKAEGMEGARDLAQAMASRGEGVVLDQFSNTDNPLAHFTGTGPEIWQQTGGTVTHFVSSMGTTGTIVGTSKFLKSQNPNVQVVGLQPAEGAAIPGIRAWPQEYMPTIFTDENIDSVVQMSQQKAEETMRLLAKKEGVFCGVSSGGAVAAALDIAASTEGAVIVAIICDRGDRYLSSGVFNS

SEQ ID NO: 566 - DNA, 954 bp, Saccharophagus degradans 2-40
  CDS (1)..(954): transl_table=11
atgctatacgacaatatattagccaccataggcaacaccccaatcgttcgtttaaataagctcgccccagaagggcagaatatttacgttaaggttgaatcgtttaaccctatggcgtcggtaaaagaccgcttggcatttgccattatcgacgacgccgaaaagcgcggtgtgcttaagccaggccaaaccgtagtagaagctacctcgggcaatactgggattgcattagcaatggtttgcgctgctaaaggctacccatttgtggcgactatggtagaaaccttctcggtagagcgccgtaaattaatgaaggcactcggcgcaaaagtaatccttaccccagctgccgaaaaagggactggcatggttaaaaaagctgcagagcttgccgaaaagcacggttggtttttagctagccaatttgagaacgaagccaaccctgcctaccaccgcaatacaacaggcccagaaatactgcgcgattttgcaggtaaagatttagattactttgttagtggttggggtaccggcggcaccatgacaggcgcaggccaaatgctaaaactggcccgcccagacctaaaagtgattgtggccgaaccacaaaatgcagccatgctaagcggcaacccttggtcaccgcataaagtacaaggctggacacccgattttgtgcctgcagtgctagacaaaaccgttgcagatgaaatagtaaccgtaagcgacgatgacgctatagccaccgccaaagctctggctacacaagagggtatattctgtggaatttcttctggcgccaccttagcggcaacgattgcctacgctaagcaagcacctactggcagtacgtttgtagtaatgctaccggataccggtgagcgctatttatctacgccactgtttgcagatattactgaagagtctgacgacgagtggttaagccagcagtaa

SEQ ID NO: 567 - protein, 317 aa, Saccharophagus degradans 2-40
MLYDNILATIGNTPIVRLNKLAPEGQNIYVKVESFNPMASVKDRLAFAIIDDAEKRGVLKPGQTVVEATSGNTGIALAMVCAAKGYPFVATMVETFSVERRKLMKALGAKVILTPAAEKGTGMVKKAAELAEKHGWFLASQFENEANPAYHRNTTGPEILRDFAGKDLDYFVSGWGTGGTMTGAGQMLKLARPDLKVIVAEPQNAAMLSGNPWSPHKVQGWTPDFVPAVLDKTVADEIVTVSDDDAIATAKALATQEGIFCGISSGATLAATIAYAKQAPTGSTFVVMLPDTGERYLSTPLFADITEESDDEWLSQQ

SEQ ID NO: 568 - DNA, 888 bp, Methylobacillus flagellatus KT
  CDS (1)..(888): transl_table=11
atgtacaaaaccctggatgatttcgtaggcaacaccccactggtcaagctgcagcgcatggcgggcaagaccagcaacaccatcttgctcaagctcgaaggcaacaacccggcaggttcggtcaaggatcggccagcgctttccatgatcaagcgcgcggaagcgcgcggcgacatcaagcccggcgataccctgatcgaggccacgtccggcaataccgggatcgcactggccatggtggcggcgatgcgtggttacaaaatggtgctggtcatgccggacaaccagagcgtggagcgccgccaaagcatgaaggcctacggcgccgaactagtcttgacgccacgcgacggcggcatggaactggcgcgcgacgtggcgaccaagctgcaggcggagggtgagggcatcgtgcttgaccagttcgccaaccaggacaacccgctggcgcattacgaaggcactggcccggaaatctggcgcgacacagcaggcaagatcacgcatttcgtctccagcatggggacgactggcaccatcatgggtacctcgcgctacctcaaggagcagaaccgcgatatccgcatcgtcggcgtgcagcctgaagaaggcgcgcagattcctggcatccgcaaatggccagaagaatacctgcccaaaatttatgatgccaagcgcatcgacgagctggtgtacgtcaaccaggaaaatgcggaaaaaaccacgcgcaggctggcgcaggaagaaggcatctttgccggcatttcctctggcggcgccttgtatgcggcattgcaactctcaaagcgtgtggagaatgccgtgatcgtgacgattgtgtgtgatcggggtgatcggtatctttccaccggcgtgtttccatcttaa

SEQ ID NO: 569 - protein, 295 aa, Methylobacillus flagellatus KT
MYKTLDDFVGNTPLVKLQRMAGKTSNTILLKLEGNNPAGSVKDRPALSMIKRAEARGDIKPGDTLIEATSGNTGIALAMVAAMRGYKMVLVMPDNQSVERRQSMKAYGAELVLTPRDGGMELARDVATKLQAEGEGIVLDQFANQDNPLAHYEGTGPEIWRDTAGKITHFVSSMGTTGTIMGTSRYLKEQNRDIRIVGVQPEEGAQIPGIRKWPEEYLPKIYDAKRIDELVYVNQENAEKTTRRLAQEEGIFAGISSGGALYAALQLSKRVENAVIVTIVCDRGDRYLSTGVFPS

SEQ ID NO: 570 - DNA, 948 bp, Burkholderia xenovorans LB400
  CDS (1)..(948): transl_table=11
gtgagcaattttcgcggagttatctacgacagcatcgtcgacacgatcggcgccacaccgctggtgcggttgagcaaactggcggccgcctgcgactgccgggccgatgtggtcggcaagctcgagtttttcaatccacttgcctcggtgaaggaccggatcggcatcgctttgatcgagacggccgagcgggccggcaggatcaagccaggcaccttgctgatcgagccgacctccgggaacacgggcatcgggctcgcattcgtcgccgcggctaagggatatccgctcgtgctgtgcatgccggagtccgcgtcgatcgagcgccgcaagatggtgggcttgctcggcgccaaagtggagctgacgccggcttccgaagggatgggcggcgcgatccgtcgcgcggaggcactgaagcggaatcacccggattcgctgattctccagcagttcgacaatccggcgaatcccgatgcgcaccgccacacgaccgccgaggaaatctggaacgataccgccggacgcgtcgatattatcgtgtcgggcatcggcaccggcggcacgatcaccggaatcggccagacgctgaaggcgcgcaaaccggagttgcagatgatcggcgtggagccttcgggcagcgcggtactctcggggggcaagccggggccgcacaagcagcaggggatcggctccggtttcctgtccagcatcctcgatctcagtgtggtcgacgagattgtcaccgcgaccgatgaggacgcgatccagacagcccggcaggctgctgcgctggaaggcgtacccatcggcatcagttcgggggcggcgctatcggtcgcgttgcgggtcgggcggcgcccgggtaacgcgggcaagctgatcgtcgtgatcgtgcccagtttcgcggagcgttatctgtcgaccgaactgttcgccgacgtctag

SEQ ID NO: 571 - protein, 315 aa, Burkholderia xenovorans LB400
MSNFRGVIYDSIVDTIGATPLVRLSKLAAACDCRADVVGKLEFFNPLASVKDRIGIALIETAERAGRIKPGTLLIEPTSGNTGIGLAFVAAAKGYPLVLCMPESASIERRKMVGLLGAKVELTPASEGMGGAIRRAEALKRNHPDSLILQQFDNPANPDAHRHTTAEEIWNDTAGRVDIIVSGIGTGGTITGIGQTLKARKPELQMIGVEPSGSAVLSGGKPGPHKQQGIGSGFLSSILDLSVVDEIVTATDEDAIQTARQAAALEGVPIGISSGAALSVALRVGRRPGNAGKLIVVIVPSFAERYLSTELFADV

SEQ ID NO: 572 - DNA, 903 bp, Burkholderia xenovorans LB400
  CDS (1)..(903): transl_table=11
atggcttacaaaacgattgaagacacgatcggcaatacgccgctcgtgcagctcgtccggctccccgacgacgagatccgcagccgcaacaacgtgatccttgcgaagctcgagggcaacaaccccgcgggttcggtgaaggatcgcccggcgttgtcgatgatcaagaaagcggaagcgcgcgggcgcatcaagcccggcgacacgctgatcgaatcgaccagcggcaacaccggcatcgcgctggctatggcggccgcgatccgtggctacaagatggtgctgatcatgccggaagatctgtcggtggaacgccgtcagagcatggccgcatacggtgcgcagatcgtgctcacgccggtcacgggcggcatggagtacgcacgcgatctggccgagcagatgcagcgcgaaggcaagggcatcatcctcgaccagtttgccaatcccgacaatccggccgcgcacgtcgaaggcacggggccggaaatctggcgcgataccgaagggcgcattacccacttcgtgtcgtcgatgggcacgaccggcacgatcatgggcgtgtccacctatctgaaagaacagaaccaggcgatcgagatcatcggcgcgcagcccgaagagggttcgcgcattccgggcatccgcaaatggccggaagcctatctgccgaagattttcgatcgcagccgcgtggatcgtgtggagaacgtgagccaggccgccgccgaggctatggcgcgccgtatggcgtcggtggagggcatctttgccggcatctcgtcgggcggcgcgtgcgaagtggcgctgcgcgtcgcgcggcaggtcgagaacgcgaccatcgtgttcatcgtttgcgatcgcggcgaccgttatctgtccacgggtgtgtttcccgcttaa

SEQ ID NO: 573 - protein, 300 aa, Burkholderia xenovorans LB400
MAYKTIEDTIGNTPLVQLVRLPDDEIRSRNNVILAKLEGNNPAGSVKDRPALSMIKKAEARGRIKPGDTLIESTSGNTGIALAMAAAIRGYKMVLIMPEDLSVERRQSMAAYGAQIVLTPVTGGMEYARDLAEQMQREGKGIILDQFANPDNPAAHVEGTGPEIWRDTEGRITHFVSSMGTTGTIMGVSTYLKEQNQAIEIIGAQPEEGSRIPGIRKWPEAYLPKIFDRSRVDRVENVSQAAAEAMARRMASVEGIFAGISSGGACEVALRVARQVENATIVFIVCDRGDRYLSTGVFPA

SEQ ID NO: 574 - DNA, 930 bp, Methanococcoides burtonii DSM 6242
  CDS (1)..(930): transl_table=11
atggaaaatatttacgaagatataacaaaaactgttggaaagacaccgcttgtacggttgaacagaataactgtaggatgctatgctactgtccttgtgaaagtggaggcttttaatccactgggttcgatcaaagaccgtattgccttgaatatgatagagaccgcagaaaaggacggaatgctcaaaaagggagccatcgttattgagccaacttccggaaacacaggtatcggactggcttttgtttgtgctactaaaggttacaggctgatattgacaatgcctgagaccatgagcgttgagaggagaaatatattgaaggtccttggagctgagatcgtgctcacccctggcccaaatggtatgaaaggagctatcgaggaagcggaaagaattggaaaggagacacctgattcttttatcccgcatcagttcatgaatccggcaaatcctgatatccaccgctgcactacagctggggagatatgggatgataccggaggaaaggtcgatatactggtagcaggcgttgggaccggaggaactattacgggtgtttcagaagaactaaagtctcgtaagcccgggtttaaagcaatagctgtggaaccaaaggattcagctgtactttccggcggcagtccggggcctcatatgatacaggggattggtgccggtttcgtgccggatgtgctgaacgtggatattattgatgaaattataacggtcagtaatgaagatgcctttgagacgacacgtgaacttgccaaaaaggaagggatactcgcaggcatctcatctggtgcagctctttttgcggctttggatgttgcaagacggaaggagaatgaaggaaagatgatagttgttgtccttccagatacaggggagcgatatcttagtacaacaattgtggaaaaggagtga

SEQ ID NO: 575 - protein, 309 aa, Methanococcoides burtonii DSM 6242
MENIYEDITKTVGKTPLVRLNRITVGCYATVLVKVEAFNPLGSIKDRIALNMIETAEKDGMLKKGAIVIEPTSGNTGIGLAFVCATKGYRLILTMPETMSVERRNILKVLGAEIVLTPGPNGMKGAIEEAERIGKETPDSFIPHQFMNPANPDIHRCTTAGEIWDDTGGKVDILVAGVGTGGTITGVSEELKSRKPGFKAIAVEPKDSAVLSGGSPGPHMIQGIGAGFVPDVLNVDIIDEIITVSNEDAFETTRELAKKEGILAGISSGAALFAALDVARRKENEGKMIVVVLPDTGERYLSTTIVEKE

SEQ ID NO: 576 - DNA, 936 bp, Ralstonia metallidurans CH34
  CDS (1)..(936): transl_table=11
atggcctgcgaaaaaccgaccgactccgcacccatggcatataaaacgattgaagacaccattggcaacacgccgttggtcagactccaacgcattcccggcaccgcgatcgaggcacgcggcaatgtgattctcggcaagcttgaaggcaataacccggcaggttcggtcaaggaccgtccggcggtgtcgatgatccgccatgccgaggcccgtggccgcatcaagcccggcgatacgctgatcgaagcaacttccggcaataccggcatcgcgctggccatggccgcggctatccgcggctatcgcatggtcctgatcatgcccgaggatctgagtctcgagcgtcgccagagcatggcggcgtatggcgccgagatcatcctgacgccggtcaagggtggaatggaatacgcccgcgatctggccgatgccatggagcgtgacggcaagggcgtgatcctcgaccagttcgccaatccggacaatccgctggcgcactacgagacgactggcccggagatctggaaggacaccgacggtcgcgtgacccacttcgtttcggcgatgggcaccacgggcacgatcaccggcgtgtcacgctatctgaaggaaaagaatccgctgatccagatcattggcgcgcagccggcggaaggttcgcgtatcccgggtatccgcaaatggccggaagcgtatctgccgaagatctacgatccgaagttcattgatcgccaggagcccgtaacgcaggccgatgcggagcatatggctcgccgcatggcgcgtgaggaaggtatctttgcaggtatctctgccgcaggcgccctgtgcgtggcgctgaggattgccgaagaagtcgagaatgcgacgatcgtgttcgtcgtgtgcgatcgcggcgaccgctatctgtcgacgggcgtgttcccggcctga

SEQ ID NO: 577 - protein, 311 aa, Ralstonia metallidurans CH34
MACEKPTDSAPMAYKTIEDTIGNTPLVRLQRIPGTAIEARGNVILGKLEGNNPAGSVKDRPAVSMIRHAEARGRIKPGDTLIEATSGNTGIALAMAAAIRGYRMVLIMPEDLSLERRQSMAAYGAEIILTPVKGGMEYARDLADAMERDGKGVILDQFANPDNPLAHYETTGPEIWKDTDGRVTHFVSAMGTTGTITGVSRYLKEKNPLIQIIGAQPAEGSRIPGIRKWPEAYLPKIYDPKFIDRQEPVTQADAEHMARRMAREEGIFAGISAAGALCVALRIAEEVENATIVFVVCDRGDRYLSTGVFPA

SEQ ID NO: 578 - DNA, 972 bp, Acidobacteria bacterium Ellin345
  CDS (1)..(972): transl_table=11
atgaaaatcgccaatgacgttaccgaattgatcggaaaaacgcccctcgtcttcctgcataaggtgatcggcggcagccaagcgctgatcgcggccaaacttgagggcttcaacccgtgcgcgagtgtgaaggaccgcatcggcgtgagcatgatcgaagaggccgagaaggccggacgcatcacgccagggaaaactgtgctgatcgagccgaccagcggcaataccggcatcgggctggcgtttgtcgcggcagtgaagggctatcggctgatcatcgttatgcccgacaccatgagccaggagcgtcgtgtactgctacgcgcattcggagcggaactcatcctgacgcccggcgcgaagggcatgaaaggcgctatcgccaaagccgagcaactcgcgaaggaaattcccgacagcttgatacttcaacagtttcgaaaccctgcaaatccaaagatccacttcgaaaccacgggtcccgagatttggaacgacactgacggcaaggtggacatcctgatctccggtgttggcacgggcggcacgatcacgggcgtgtcggaatatatcaagccgaagaaggcgtcgttcaaggcgatcgccgtcgagccaacggagagccctgtgctttctggcggagcgcccgggccgcacaagatccaagggctcggcgcgggcttcatccccgaggtcctcgacaccaagacgattgacgaggtcgtgcaggtaaacagcgaggaatcggtcgccatggcgcggcgactggcgaaagaagaaggcctgctggtcggtatctcctcgggtgctgcggtggtggcggcggtgaaggtcggtagtcgtccggagaacgccgggaagttgattgtcgtggtgctgcccagttacggcgagcgctaccttagcagtatcctcttccagaacctgcgcgacgaagttgcggcgcagcaggcggtcgaggtgccggtctaa

SEQ ID NO: 579 - protein, 323 aa, Acidobacteria bacterium Ellin345
MKIANDVTELIGKTPLVFLHKVIGGSQALIAAKLEGFNPCASVKDRIGVSMIEEAEKAGRITPGKTVLIEPTSGNTGIGLAFVAAVKGYRLIIVMPDTMSQERRVLLRAFGAELILTPGAKGMKGAIAKAEQLAKEIPDSLILQQFRNPANPKIHFETTGPEIWNDTDGKVDILISGVGTGGTITGVSEYIKPKKASFKAIAVEPTESPVLSGGAPGPHKIQGLGAGFIPEVLDTKTIDEVVQVNSEESVAMARRLAKEEGLLVGISSGAAVVAAVKVGSRPENAGKLIVVVLPSYGERYLSSILFQNLRDEVAAQQAVEVPV

SEQ ID NO: 580 - DNA, 948 bp, Acidobacteria bacterium Ellin345
  CDS (1)..(948): transl_table=11
atgaatacatctgagatgtccactctccgcgtcgccgaagatatttctgaactcgttggccagaccccgatgcttcacctgcgcaagatggtgccgccggagatcgccgacatctacgtaaaactcgagtttcttaacccgggcggaagcattaaagaccgcgctgccctgggcatgatcctgcgcgcggaaaaggaaggcgtgctcaagccgggcgcgacgattctcgaggcgacagcgggtaacaccggcgtcggcttggcgctgatcggcgtaagccgcggatacaaggtcgtcctcgccgtcccgcagaaattcagcaaagagaaagtcatgctgatggaggctcttggtgctcaggtgtatcggacgccggacgccgaaggcatggaaggcgcaatccggctcgtcaagaaattcctgaccgagattccgaactcgtggctagcagggcagttcgagaaccaggcgaatcctgatttccactatgagacgaccggacgcgagttatgggaacagatgggcggcaagattgatgccatcgcactcggtgcaggcacggcagggacgttcacgggagtggcgcgctacttgaaggagcggtcgccgcagacgctgtgcgtgctggtggagtcgcaggcgtcggtgtacggcggcggcaagagcgggccgcacgccgtagaaggtatcggcgcgagcttcattcccgcaaccttcgatcgcagcgtttgcgatgaagtgatcgccgtgaaagacgtggatgcgttccggacaatcaaagatctggcggccaaagaaggcgtactggcggggtcgagctcgggagcggcagtgtttgcgagtttagagttggcaaaacgcctggggccggggaagcgggtcgtcacgattattccggactcggctgagcggtacctgtctaaggatccgtatcacttcaacgaataa

SEQ ID NO: 581 - protein, 315 aa, Acidobacteria bacterium Ellin345
MNTSEMSTLRVAEDISELVGQTPMLHLRKMVPPEIADIYVKLEFLNPGGSIKDRAALGMILRAEKEGVLKPGATILEATAGNTGVGLALIGVSRGYKVVLAVPQKFSKEKVMLMEALGAQVYRTPDAEGMEGAIRLVKKFLTEIPNSWLAGQFENQANPDFHYETTGRELWEQMGGKIDAIALGAGTAGTFTGVARYLKERSPQTLCVLVESQASVYGGGKSGPHAVEGIGASFIPATFDRSVCDEVIAVKDVDAFRTIKDLAAKEGVLAGSSSGAAVFASLELAKRLGPGKRVVTIIPDSAERYLSKDPYHFNE

SEQ ID NO: 582 - DNA, 1185 bp, Silicibacter sp. TM1040
  CDS (1)..(1185): transl_table=11
atggttttgcgggcaagtcagacgcagtggaaccacggtcgcgccgaaatcgtccccgacaggcgaaacgccagcctgcgcgcgctctggacccttgtgatcgcgccggtgcccagctacatcagaggggaacgagcgaaagggaatttcatgcgcattgcacgcgatctggccgatgcggtcggccatacccctctgatccgactgaacaaagtcagcgaagaaaccggttgcgaaattcttggcaaggcggagtttctgaaccccggccaatccgtgaaggaccgcgccgcgctctacatcatcaaggacgctatcgcccgcggggaactcaaacccggcggcacgattgtagaaggtacagcgggcaataccggcattgggcttgcgctggtcggcgcctccatgggcttcaagaccgtgatcgtgatccctgaaacccagtccgaagaaaagaaggacatgctgcgtctggcgggggcacagttggttcaggtgcctgcagcgccttacaagaaccccaacaactatgtgcgctactccgagcgcctggcaaacgagctggccaagacagagccgaatggcgccatctgggccaatcagtttgacaatgtggccaaccgtcaggcccatgtggaaaccaccggtcccgagatctgggagcagacgggcggcaaggtggatggtttcatctgtgctgttggctccggcgggacgcttgccgggattgccgaggcgctgcagcccaagggcgtgaagatcggccttgccgatcccaatggcgccgcgctttattcctactacaccactggcgagctgaagtccgagggctcctcgatcacagaagggatcggtcagggccggatcaccaagaacctcgaggggctcaccccagatttcaactaccagattccggacgcagaggcgctgccttatgtgtttgaccttctgcacgaagaggggctggtgcttggcggatcttccggcgtgaacattgccggcgcagtgcgtctggccaaggaactggggccggggcacaccatcgttaccatcctgtgcgactatggaacgcgctatcagtccaagctctttaatccggaattcctcaaagacaagggcttgccggtccccgactggatgacccatactcctgcttcaattcccggagtattcgaggacatctga

SEQ ID NO: 583 - protein, 394 aa, Silicibacter sp. TM1040
MVLRASQTQWNHGRAEIVPDRRNASLRALWTLVIAPVPSYIRGERAKGNFMRIARDLADAVGHTPLIRLNKVSEETGCEILGKAEFLNPGQSVKDRAALYIIKDAIARGELKPGGTIVEGTAGNTGIGLALVGASMGFKTVIVIPETQSEEKKDMLRLAGAQLVQVPAAPYKNPNNYVRYSERLANELAKTEPNGAIWANQFDNVANRQAHVETTGPEIWEQTGGKVDGFICAVGSGGTLAGIAEALQPKGVKIGLADPNGAALYSYYTTGELKSEGSSITEGIGQGRITKNLEGLTPDFNYQIPDAEALPYVFDLLHEEGLVLGGSSGVNIAGAVRLAKELGPGHTIVTILCDYGTRYQSKLFNPEFLKDKGLPVPDWMTHTPASIPGVFEDI

SEQ ID NO: 584 - DNA, 921 bp, Myxococcus xanthus DK 1622
  CDS (1)..(921): transl_table=11
atgaaggtgaacaacatcctggagaccatcggaaacacgccgcacgtgcgcatcaaccggctgtttccgtcccgcgtgacggtccatatgaagctcgagcgcgccaacccgggcggcagcatcaaggaccgcatcgcgttgtccatgattgaggacgcggagcagcgcggcctgctcaagaaggacagcgtcatcatcgagccgaccagcggcaacaccggcatcggcctggccatggtggcggcggtgaagggctacaagctggtgctcgtcatgccggagtccatgagcgtcgagcgccgccggctgatggccgcctacggcgccaccttcgagctgaccccgcgcgcgcagggcatgaagggcgccatcgctcgcgccaatgaactgctgtcgcaggtgcccaactcgtggatgccgcagcagttcgagaacgaggccaacatcgaggtccaccgccgcacgacggtgcaggaaatcctcaaggacttcccggaagggctggactacctcatcaccggcgtgggcaccggcgggcacatcaccgcgtgcgccgaggagctgaagaaggtctggccgaagctgaaggtcttcgccgtggagcccaccaagtcgcccgtcatcagcggcggccagccgggcccgcaccccatccagggcattggcgccggcttcatcccgaagaacctgcacaaggacgcgctggacggcgccattcaggtgaccgaggaggacgccttcgagttcacccgccgcgccgcgcgtgaggagggcatcttcgtgggcatctccaccggcgccgcgctgtccgccgtgaatcagaagctgggcgagatgaccgacggcagccgcgtgctcgccttcaactacgacacgggcgagcgctacctctccatcgagccgctcttcccggcccagtag

SEQ ID NO: 585 - protein, 306 aa, Myxococcus xanthus DK 1622
MKVNNILETIGNTPHVRINRLFPSRVTVHMKLERANPGGSIKDRIALSMIEDAEQRGLLKKDSVIIEPTSGNTGIGLAMVAAVKGYKLVLVMPESMSVERRRLMAAYGATFELTPRAQGMKGAIARANELLSQVPNSWMPQQFENEANIEVHRRTTVQEILKDFPEGLDYLITGVGTGGHITACAEELKKVWPKLKVFAVEPTKSPVISGGQPGPHPIQGIGAGFIPKNLHKDALDGAIQVTEEDAFEFTRRAAREEGIFVGISTGAALSAVNQKLGEMTDGSRVLAFNYDTGERYLSIEPLFPAQ

SEQ ID NO: 586 - DNA, 993 bp, Myxococcus xanthus DK 1622
  CDS (1)..(993): transl_table=11
atggcgcctcgcattggaacgctctgggactccgtcggaaacaccccgctgctgcgcatcggctcgctgagccggcagacggggtgtgaaatcctcgcgaaggccgagttcatgaaccccggcggcagcatcaaggaccgcgccgcgaaggggatgattcagtgcgccgaggcgcagggcctgctgaagccgggcggcgccatcttcgagggcaccgcgggcaacaccggcatcggcctggggctcttgggccgcgagcgcgggtaccgcgtggtcgtcaccatgccggacaaccaggcccgcgagaagtacgagctactggaggccatgggcgtggaggtccgaaaggtccccgcggtgcccttcgccaatccgaaccacttcttccaccaggcccgcgtgctggcggaagcgcagggcggcttctgggcgaaccagttcgagaacccggccaacggcgactaccactacgagacgacgggccctgaaatctgggagcagtgcgagggccgcgtggacgtgctggtggcgtccgtgggcagcggtgggacgatgggcggcgtcagccgttacctgaaggagaagaaccccgccgtgcgcgtggtgttggtggacccgccgggctcgggcctcttcacctacgtgcgcgaagggcgcatggaagggcccggttcttccatcaccgagggcattggcatcatgcgcctcacggagaacttccgccgggcccaggtggacgaggccatgcgcctgggggaccaggacatggtggagatgctctaccacctggcgcgcgaggacgcgctggtggtgggcacatcggcggccctcaacgtgcgcgccgcgtgggagctggcgcggcgtcatcggggcgaggggctgcgcatcgtcaccttcctgtgcgaccacggcagccgctacgcgtcgaaggtgttcaacccggagttcctcgcgtccaagcagttggaggtgaggccgcttcccgtggattga

SEQ ID NO: 587 - protein, 330 aa, Myxococcus xanthus DK 1622
MAPRIGTLWDSVGNTPLLRIGSLSRQTGCEILAKAEFMNPGGSIKDRAAKGMIQCAEAQGLLKPGGAIFEGTAGNTGIGLGLLGRERGYRVVVTMPDNQAREKYELLEAMGVEVRKVPAVPFANPNHFFHQARVLAEAQGGFWANQFENPANGDYHYETTGPEIWEQCEGRVDVLVASVGSGGTMGGVSRYLKEKNPAVRVVLVDPPGSGLFTYVREGRMEGPGSSITEGIGIMRLTENFRRAQVDEAMRLGDQDMVEMLYHLAREDALVVGTSAALNVRAAWELARRHRGEGLRIVTFLCDHGSRYASKVFNPEFLASKQLEVRPLPVD

SEQ ID NO: 588 - DNA, 972 bp, Mycobacterium sp. MCS
  CDS (1)..(972): transl_table=11
ttggcgcgttacgactcggtgctcgaggccctcggcaacaccccgctggtggggtgcccgcacctgtcgccgagatgggatgacgacgagaacggaccgcatgtgcggctgtgggccaaactcgaggaccgcaacccgaccggttcgatcaaggaccggcccgcgctgcggatgatcgaacaggccgagcgcgacgggctgctgcagcccggttcgacgatcctggaacccaccagcggcaacaccgggatctcgctggcgatggcagcgctgctcaagggctaccagatgatctgcgtgatgccggagaacacctcgatcgagcgcaggcagctgctcgaactctacggggcccgcatcatcttctcgccggccgaaggcggctccaacaccgccgtcgcgcacgccaaggaactggcggcggcaaacccggactgggtgatgctctaccagtacggcaaccccgcgaacgccgatgcgcactattacggcacgggacccgaactgctcgccgacctgcccgagatcacccacttcgtcgcgggtctgggcaccacggggacgctgatgggcaccggccggttcctgcgcgagaaggtgccgggtgtgcagatcgtggccgccgagccgcgctacggcgaaggcgtgtacgcgctgcgcaacatcgacgagggcttcatccccgagctgtacgaccccgacgtgctgaccacccggttctccgtggggtcgttcgacgcgatcaagcggacccgcgaactggtcaccaaagaggggatcttcgcgggtgtctcgaccggggcgatcctgcacgccgcgctggggatggccgccaaggcgatcaaggcgggcgaacgcgccgacatcgcgttcaccgtgtgtgacgccggctggaagtatctgtcgaccggtgcgtacaccggtagcctcgtcgacgcagaggacgcgttggaagggcagctatgggcgtga

SEQ ID NO: 589 - protein, 323 aa, Mycobacterium sp. MCS
MARYDSVLEALGNTPLVGCPHLSPRWDDDENGPHVRLWAKLEDRNPTGSIKDRPALRMIEQAERDGLLQPGSTILEPTSGNTGISLAMAALLKGYQMICVMPENTSIERRQLLELYGARIIFSPAEGGSNTAVAHAKELAAANPDWVMLYQYGNPANADAHYYGTGPELLADLPEITHFVAGLGTTGTLMGTGRFLREKVPGVQIVAAEPRYGEGVYALRNIDEGFIPELYDPDVLTTRFSVGSFDAIKRTRELVTKEGIFAGVSTGAILHAALGMAAKAIKAGERADIAFTVCDAGWKYLSTGAYTGSLVDAEDALEGQLWA

SEQ ID NO: 590 - DNA, 984 bp, Rubrobacter xylanophilus DSM 9941
  CDS (1)..(984): transl_table=11
atgcagacaagaaagctcgtaaaggaggtgagaatggctgcgccggggctctcggagagcgtgctggaggccataggggacacaccgctcatagaggtagaggagggcatctacgcaaagctggagtacctcaacccctcaggctccataaaggcgcgcatcgccaggtacatcgtggagaaggccgaaagagaagggctgcttttgcccggccacaccatcgtagaggccacaagcggcaacaccggcaacgccttctcgatggttgcggccataaagggctacaggatggttgtgctcatgcccgaaggcctgagcaccgagcgggttgccataagccgcgcctttggcgcccacatagagcacgttggagagttctacgtaacggaggcgctaaagcgggcgagggagcttggcaagaaagagggctacttctgtcctgcgcagtttgactcggagtggaacgtggaggagaacagggagtggctggggaaggagatccttgggcagctggaggagggaggggttggggcacccgatgcgctggtgatgggggtaggcacgggagggacgctcataggggtggggcaggccttcagggagaagaacgcagaggcgaagctcattgcggtggagcctgaggaatcgtgcacgcttctgtgcggggagagtggcgtccacaagatagagggcatctccgatgggtttgtgccgggcatctacgagcggcacgcagagcggctgggtgtggatgaggtgtatgcggttggctctgaggaggcgcttggagcgatgaggtggctggcgaggcggagggggctctttgtcggtccctcgagcggtgcgaacctagttgcggcgaggaggctcaaggaggcacatcctgagctaaagagcattgtgaccctcttctgtgacgagggggagaagtacatctcagagcacttcccggcgacgcgcgaggtggaggccgaagcgcgatga

SEQ ID NO: 591 - protein, 327 aa, Rubrobacter xylanophilus DSM 9941
MQTRKLVKEVRMAAPGLSESVLEAIGDTPLIEVEEGIYAKLEYLNPSGSIKARIARYIVEKAEREGLLLPGHTIVEATSGNTGNAFSMVAAIKGYRMVVLMPEGLSTERVAISRAFGAHIEHVGEFYVTEALKRARELGKKEGYFCPAQFDSEWNVEENREWLGKEILGQLEEGGVGAPDALVMGVGTGGTLIGVGQAFREKNAEAKLIAVEPEESCTLLCGESGVHKIEGISDGFVPGIYERHAERLGVDEVYAVGSEEALGAMRWLARRRGLFVGPSSGANLVAARRLKEAHPELKSIVTLFCDEGEKYISEHFPATREVEAEAR

SEQ ID NO: 592 - DNA, 918 bp, Rubrobacter xylanophilus DSM 9941
  CDS (1)..(918): transl_table=11
atgatcactaggattaagccggggaccggcataacggagcttgtagggaacacgcctctggtggagctctccaagatctctgcggagacgccgggggtaaggatctacgggaaggccgagtggtacaacccgggcgggtcggtcaaggaccgtccggcgttgtggatgatccgggacggggagcggagcggggcgctcacccccgagaagaccatcctcgacgccaccagcggcaacaccgggatagcctacgcctggataggggcggcgctcggctacagggtcaagctgtgcatgcccagcaacgccagcgaggagcgcaagaagatcctgcgggcctacggggtggacatcgtgctcaccgaccccggggagggctccgacggcgcgatccgggaggccaggaggctctacgccgaggatcccgagaggtacttctaccccgaccagtactccaacccggccaaccccagggcgcactacgagagcaccgggcccgagatctgggagcagaccggcggcgagataacgcacttcgtcgcgggcctgggcaccagcgggaccttcgtggggaccgcgcggcggctcaaggagttcaaccccgagataagggccatctccttcgagcccgactcccccttccacgggatagagggcatgaagcacatggagagcgccatcgtgcccgccatctacgaccccggcgtcgccgacgagaaccggcgggcctccacggaggaggcctacgccatggtcaagcgggtcgcccgcgaggagggcatcctcatcgggatctccgccggggctgcggtggctaccgccctgcgggtggcgagggagatagagtctggtaccatcgtgaccatcctgtgcgacggggcggacaagtacctctccgagagcttctgggaggaataa

SEQ ID NO: 593 - protein, 305 aa, Rubrobacter xylanophilus DSM 9941
MITRIKPGTGITELVGNTPLVELSKISAETPGVRIYGKAEWYNPGGSVKDRPALWMIRDGERSGALTPEKTILDATSGNTGIAYAWIGAALGYRVKLCMPSNASEERKKILRAYGVDIVLTDPGEGSDGAIREARRLYAEDPERYFYPDQYSNPANPRAHYESTGPEIWEQTGGEITHFVAGLGTSGTFVGTARRLKEFNPEIRAISFEPDSPFHGIEGMKHMESAIVPAIYDPGVADENRRASTEEAYAMVKRVAREEGILIGISAGAAVATALRVAREIESGTIVTILCDGADKYLSESFWEE

SEQ ID NO: 594 - DNA, 972 bp, Rubrobacter xylanophilus DSM 9941
  CDS (1)..(972): transl_table=11
atgcagggacagagcctgctccaccgggggctctcggagagcgtgctggaggccataggggacacaccgctcatagaggtagaggagggcatctacgcaaagctggagtacctcaacccctcaggctccataaaggcgcgcatcgccaagtacatcgtggagaaggccgaaagagaagggctgcttttgcccggccacaccatcgtagaggccacaagcggcaacaccggcaacgccttctcgatggttgcggccataaagggctacaggatggttgtgctcatgcccgaaggcctgagcaccgagcgggttgccataagccgcgcctttggcgcccacatagagcacgttggagagttctacgtaacggaggcgctaaagcgggcgagggagcttggcaagaaagagggctacttctgtcctgcgcagtttgactcggagtggaacgtggaggagaacagggagtggctggggaaggagatccttgggcagctggaggagggaggggttggggcacccgacgcgctggtgatgggggtaggcacgggagggacgctcataggggtggggcaggccttcagggagaagaacgcagaggcgaagctcattgcggtggagcctgaggagtcgtgcacgcttctgtgcggggagagtggcgtccacaagatagagggcatctccgatgggtttgtgccgggcatctacgagcggcacgcagagcggctgggtgtagatgaggtgtatgcggttggctctgaggaggcgcttggagcgatgaggtggctggcgaggcggagggggctctttgtcggtccctcgagcggtgcgaacctagttgcggcgaggaggctcaaggaggcgcatcctgagctaaagagcattgtgaccctcttctgtgacgagggggagaagtacatctcagagcacttcgccggtgagggccggaccctggagacaggggagagggcgtag

SEQ ID NO: 595 - protein, 323 aa, Rubrobacter xylanophilus DSM 9941
MQGQSLLHRGLSESVLEAIGDTPLIEVEEGIYAKLEYLNPSGSIKARIAKYIVEKAEREGLLLPGHTIVEATSGNTGNAFSMVAAIKGYRMVVLMPEGLSTERVAISRAFGAHIEHVGEFYVTEALKRARELGKKEGYFCPAQFDSEWNVEENREWLGKEILGQLEEGGVGAPDALVMGVGTGGTLIGVGQAFREKNAEAKLIAVEPEESCTLLCGESGVHKIEGISDGFVPGIYERHAERLGVDEVYAVGSEEALGAMRWLARRRGLFVGPSSGANLVAARRLKEAHPELKSIVTLFCDEGEKYISEHFAGEGRTLETGERA

SEQ ID NO: 596 - DNA, 1041 bp, Mesorhizobium sp. BNC1
  CDS (1)..(1041): transl_table=11
atgtaccagaccgtcatcgaagccattggcaatacgccacttatccgcctgaaacgggcttccgaggagaccggctgcgagatctatggtaaggcggagttcatgaatcccgggcagtccgtgaaggaccgggccgggctcttcatcattcgcgatgccgagaagcgtggcctgctgcggccgggcggcgtgatcgtggagggcacggccggaaatacggggattggccttaccgtcgtcgccaaggccctgggctatcgcaccgtaatcgtcattcccgatacgcaaagccaggagaagaaggatgcacttcgcatcctcggagcggagctgatcgaggtgccggctgtcccgtacaagaaccccaacaattacgtgaaggtttcgggccgcctcgccgaacagcttgcccgcaccgaggcgagcggcgccatctgggccaaccagtttgacaatgtggcgaaccgcgacggccacatccgcaccacagccgaagagatctggcgccagacgggcggcaaggtggacggcttcgtctccgccgttggtactggcggcacgcttgcgggcgtgtcggcgggcctcaaggccaggaacccggacgtcaaggtggcgctggccgatccgcttggcgctgcccttttcagctactacaccgctggcgaattgaaatcggaggggagttcgatcaccgaaggaatcgggcaggggcgcatcacggcgaatttggaagatttccagccggacttttcctttcagattcccgatgaggaggcgctgccgatcatcttttcgctcgtgcaggaagaagggctgtgcctgggcgggtcgaccggcatcaacatcgctggcgcgattcgaatggcaagggaactgggccccggccacacgatcgttacgattctggccgattacggcacgcgctatcagtcgaagctcttcaatcctgccttcctgcgtgaaaagaagcttcccgttcccgcctggatggaaggaagatcggaaataccggtgccattcgaacaggtggcggccagctaa

SEQ ID NO: 597 - protein, 346 aa, Mesorhizobium sp. BNC1
MYQTVIEAIGNTPLIRLKRASEETGCEIYGKAEFMNPGQSVKDRAGLFIIRDAEKRGLLRPGGVIVEGTAGNTGIGLTVVAKALGYRTVIVIPDTQSQEKKDALRILGAELIEVPAVPYKNPNNYVKVSGRLAEQLARTEASGAIWANQFDNVANRDGHIRTTAEEIWRQTGGKVDGFVSAVGTGGTLAGVSAGLKARNPDVKVALADPLGAALFSYYTAGELKSEGSSITEGIGQGRITANLEDFQPDFSFQIPDEEALPIIFSLVQEEGLCLGGSTGINIAGAIRMARELGPGHTIVTILADYGTRYQSKLFNPAFLREKKLPVPAWMEGRSEIPVPFEQVAAS

SEQ ID NO: 598 - DNA, 885 bp, Cytophaga hutchinsonii ATCC 33406
  CDS (1)..(885): transl_table=11
atggctaccctacttgattttattggcaatacgccccttgttgagattacccgcattttcaataaaccaaatgttaaaatatttgcaaagcttgaaggccataatccgggcggaagtgtaaaagaccgtgctgctttaggcatgatcaaaggtgcactggaacgcggcgagattaaacccggcatgaagctgatcgaagctacaagcggtaacacaggtattgccctggcgatgattgcccgtttatacaacctggatattgaactggtaatgcctgacaactctacgcgcgagcgtgtattaacgatggaagcatttggcgcaaaggttaccttaacacctgctgcggtaagtatagaaggttcgcgtgattatgccgaggcacaggtagcgaaaggcggcttctttatgctcaaccagtttgcaaacccggataattacatggcgcattatcactctaccggtccggagatctggagagatacaaatggcacggtaacacactttgtttcttctatgggaacaacaggaacgatcatggggacgtctaaatttttaaaagaaaaaaattcagcggtacagatcgttggtgtacagccaacggaaggctctaaaataccgggtatccgccgctggccggttgaatacctaccaaagatttacgacgattctcgtgtagacgtaaagatggacgtaagcgaagaagaatctgttgccatgacacgcaggcttgcccgtgaagaaggtatcttcggcggtatgagtagtggaggcgcaatggcagcagctataaaattaggaaacgaaattgaatccggcataattgtcagcatcgtatgcgaccgcggcgaccgttatttatccagcgatttatttggtgcgtag

SEQ ID NO: 599 - protein, 294 aa, Cytophaga hutchinsonii ATCC 33406
MATLLDFIGNTPLVEITRIFNKPNVKIFAKLEGHNPGGSVKDRAALGMIKGALERGEIKPGMKLIEATSGNTGIALAMIARLYNLDIELVMPDNSTRERVLTMEAFGAKVTLTPAAVSIEGSRDYAEAQVAKGGFFMLNQFANPDNYMAHYHSTGPEIWRDTNGTVTHFVSSMGTTGTIMGTSKFLKEKNSAVQIVGVQPTEGSKIPGIRRWPVEYLPKIYDDSRVDVKMDVSEEESVAMTRRLAREEGIFGGMSSGGAMAAAIKLGNEIESGIIVSIVCDRGDRYLSSDLFGA

SEQ ID NO: 600 - DNA, 963 bp, Rhodococcus sp. RHA1
  CDS (1)..(963): transl_table=11
gtggcgcggttcgattcgctgatcgacaccctcggcgacacacccctcgtcgggctgccccgcctgtcgccgagctggaacggcacagcgccggtccggctgtgggcgaagctcgaagaccgcaaccccaccggttcggtgaaggatcggcccgccctccgcatgatcgagcaggccgagaacgacggcaccctgacgcccggggcgacgatcctcgagccgaccagcgggaacaccgggatctcgctcgcgatggccgcgaaactcaagggctaccagctgatctgcgtgatgcccgagaacacgtccgtggaacgcaggcaactgctggcgatgttcggtgcgcagatcatcgactcacccgcgcgcggcggatcgaatcaggctgtggccgtggccaaggagctgtccgcggagcatcccgagtgggtgatgctgtaccagtacggcaatcccgcgaatgcgctggcccactacgagaccacaggccccgagatcctgcgcgaccttcccgagatcacccacttcgtcgcgggtctcggaaccaccggcaccctgatgggcgtggggcgctatctccgcgaacacgtcgacggcatcgagatcgtggcggccgagccccgctacggggaactcgtgtacggcctccgcaacatcgacgagggcttcgtccccgagttgtacgacgaatccgtcctcacctcgcggttctccgtcggccccgccgacgccgtccgccgcacccggcaactgatcgacaacgaaggcatcttcgcgggcatctcgaccggcgcgatcctccacgccgcgctgggggtcgcacgcaaggccgtcaaggccgaacgcgcggcgaacatcgcgttcatcgtcgccgacggcggatggaaatatctgtcgaccggcgcatacggcggtacggtcgaggaagcagaagaagcactggaagggcagttgtgggcatga

SEQ ID NO: 601 - protein, 320 aa, Rhodococcus sp. RHA1
MARFDSLIDTLGDTPLVGLPRLSPSWNGTAPVRLWAKLEDRNPTGSVKDRPALRMIEQAENDGTLTPGATILEPTSGNTGISLAMAAKLKGYQLICVMPENTSVERRQLLAMFGAQIIDSPARGGSNQAVAVAKELSAEHPEWVMLYQYGNPANALAHYETTGPEILRDLPEITHFVAGLGTTGTLMGVGRYLREHVDGIEIVAAEPRYGELVYGLRNIDEGFVPELYDESVLTSRFSVGPADAVRRTRQLIDNEGIFAGISTGAILHAALGVARKAVKAERAANIAFIVADGGWKYLSTGAYGGTVEEAEEALEGQLWA

SEQ ID NO: 602 - DNA, 951 bp, Haemophilus somnus 129PT
  CDS (1)..(951): transl_table=11
atgacaatttatgcagataattcctattctattggtaatacaccattagttcgtttaaaaaactttggtaataacggcaacattatagcgaaaattgaagggagaaaccccagctttagcgtgaaatgccgtattggtgccaacatggtatggcaagcagaaaaagatggtattttaaccaaagataaagaaattattgatgcaaccagtggtaatacaggtattgctttagcttatgttgctgcagcacgtggctataaaatcacgttaactatgccggagactatgagttccgaacgtaaacgcttattgcgaggtttaggggtaaatttagtgttgactgaaggtgtcaatggtatgaagggggctattgctaaagcggaagaaattgttgcttcaaatccaaatcactatgtaatgctaaaacagtttgaaaaccctgcaaatccagccattcatcaacaaacaacaggacctgaaatttggtcaggcactgaaggtaaaattgatgtattggtagctggtgttggtactggcggaacaattagtggaattagccgttacattaagcaagatcaaggcaaaaaaattattaccgtagccgttgaacctgaagaatcaccagtgataactcaaacgctggcaggtgaagaaaccaaaccgggtccacataaaattcaaggtattggtgcggggttcattccgaaaaacttagatttatctttagtagatcaagtagaaaaagtcagtagtgaaacagcgattataacggctcgtcgtctaatggcagaagaaggtattctcggagggatctcatccggtgcagcactcgctgtagccgatcgaattgcacaacgtccggaattttccgataaactcattgttgttatcttaccttctgcatcagaacgctatttaagcaccgccttgtttgacggcttcgaaggataa

SEQ ID NO: 603 - protein, 316 aa, Haemophilus somnus 129PT
MTIYADNSYSIGNTPLVRLKNFGNNGNIIAKIEGRNPSFSVKCRIGANMVWQAEKDGILTKDKEIIDATSGNTGIALAYVAAARGYKITLTMPETMSSERKRLLRGLGVNLVLTEGVNGMKGAIAKAEEIVASNPNHYVMLKQFENPANPAIHQQTTGPEIWSGTEGKIDVLVAGVGTGGTISGISRYIKQDQGKKIITVAVEPEESPVITQTLAGEETKPGPHKIQGIGAGFIPKNLDLSLVDQVEKVSSETAIITARRLMAEEGILGGISSGAALAVADRIAQRPEFSDKLIVVILPSASERYLSTALFDGFEG

SEQ ID NO: 604 - DNA, 963 bp, Trichodesmium erythraeum IMS101
  CDS (1)..(963): transl_table=11
atgcgtattgctcataatattacagaattagtaggtcgcactcccctggtacaattaaattctattcctaaagcagaaggttgtttagccaaaataatagtaaagctagaaggaatgaatcccgctgcctcagttaaggatcgtattggtgtaaatatgattaatgtagcggagcgcgaaggtttgattaaaccaggtaaaacaacattagttgaaccaacgtctggaaatacaggtattgctttggcaatggttgctgctgctagaggttacaagttaattttgactatgccagaaacaatgagcatggagcgtcgtgttatgttacgagcttatggggcagagttagtattaactccaggtagtgaaggtatgaaaggtgcaattaccaaagcacaagaaattgtggatttaagcagtaatggatattatatgttacagcaatttcagaatccagctaatccagaaattcatagcaaaactacagctctagaaatatgggaagatacggatggaaaggtagatattctggtggctggtgttggtactggtgggacagttacaggggtggcagagactattaaggcaagaaagcctgaatttcaagcgatcgctgttgaaccttctaatagcccagttttgtctgggggaaaaccaggaccacataaaattcagggaataggagctggttttgtgccagatgttttggatacgaagattattgatgaggtgatccaggttcctgatagtgaggcgatggtttatggtcgtcgtatagcaaaggaagaaggtattttatctggtatttctacgggagctgctctttgtgcggcgatcgaagtaggtaagcgtccagaaaatgatggtaagttaatagtcatgattcagcctagttttggggagcgttatttaagtactccattgtttcaagaactagggcctactctcgctgaagtcaggtag

SEQ ID NO: 605 - protein, 320 aa, Trichodesmium erythraeum IMS101
MRIAHNITELVGRTPLVQLNSIPKAEGCLAKIIVKLEGMNPAASVKDRIGVNMINVAEREGLIKPGKTTLVEPTSGNTGIALAMVAAARGYKLILTMPETMSMERRVMLRAYGAELVLTPGSEGMKGAITKAQEIVDLSSNGYYMLQQFQNPANPEIHSKTTALEIWEDTDGKVDILVAGVGTGGTVTGVAETIKARKPEFQAIAVEPSNSPVLSGGKPGPHKIQGIGAGFVPDVLDTKIIDEVIQVPDSEAMVYGRRIAKEEGILSGISTGAALCAAIEVGKRPENDGKLIVMIQPSFGERYLSTPLFQELGPTLAEVR

SEQ ID NO: 606 - DNA, 981 bp, Trichodesmium erythraeum IMS101
  CDS (1)..(981): transl_table=11
atggatattaaaccaggctttattggtacagttggtaatacaccattaattagattaaatagtttcagtgaagaaactggatgtgaaattttaggcaaagcagaatttcttaatccagggggttcggtaaaagatagagcagcactttatattattaaagatgcagaagaaaaaggtttattaaaacctggtggaacagttgtcgaaggaactgctggtaatacaggaataggtttggcgcatatttgtaatgcgaaaggttataagtgtttaattgttattcccgaaactcaatctgttgaaaaaatggatgctttgagaactttaggtgcagaagttaaacctgttccagcagttccctataaaaacccaaataactatgtaaaaatgtcaggtaaattagcatcaacaatagaaaatgctatttgggcaaatcagtttgataatttggcaaatagaatcgctcattatgaaacaaccggaccggaaatttgggaacaaactgatggaaaagtagatgcttgggtggctgctactggtacgggtggaacttttgctggtgtgtcattatttttaaaagaaaaaaatccgcaaattaaaactgttttagcagaccccatgggaagtggtctttatagttatgtgaaaactggagaaatttctagtgagggtaattctattactgagggtattggtaatagtcgaataactaaaaatatggaaaatgttatgattgatgatgcgattcgagttgatgataaagaggcggtaagagtagtttatcaactattaagaaaagacggtttatttatgggtggttctgtaggaattaatgttggtgcagcagtagctttagcaaaacaaatgggtcctggtcatactattgttactgtgttatgtgatagtggaactcgttatcaatcaaaattatttaatcgtgagtggttagctactaaaaatttattgccagatgaaagataa

SEQ ID NO: 607 - protein, 326 aa, Trichodesmium erythraeum IMS101
MDIKPGFIGTVGNTPLIRLNSFSEETGCEILGKAEFLNPGGSVKDRAALYIIKDAEEKGLLKPGGTVVEGTAGNTGIGLAHICNAKGYKCLIVIPETQSVEKMDALRTLGAEVKPVPAVPYKNPNNYVKMSGKLASTIENAIWANQFDNLANRIAHYETTGPEIWEQTDGKVDAWVAATGTGGTFAGVSLFLKEKNPQIKTVLADPMGSGLYSYVKTGEISSEGNSITEGIGNSRITKNMENVMIDDAIRVDDKEAVRVVYQLLRKDGLFMGGSVGINVGAAVALAKQMGPGHTIVTVLCDSGTRYQSKLFNREWLATKNLLPDER

SEQ ID NO: 608 - DNA, 1032 bp, Synechococcus sp. CC9311
  CDS (1)..(1032): transl_table=11
gtgccaatgctggcaattaaatttctagaaaataattccagcctcatgtctcgcgtctacgccgataacagccaagccatcggcaacaccccgctcgttcgcctcaaccacgtcaccaagggttgcaaggccaccgttttggccaaaatcgaaggtcgcaaccctgcttacagcgtgaagtgcaggatcggcgccaacatgatttgggacgctgaaaagcgtggtgttctctccgaagggaaaaccatcgtggagcccacctcaggcaatacaggcattgccctggccttcactgccgcggctcgtggttacaagctgatcctcacgatgccggaatcgatgtcgatcgaacgtcgacgggtgatggccgtgcttggcgctgaactgatcctgacggaagccgccaagggcatgcctggcgccatcgctaaggccaaggaaattgcagatagtgatccttccaagtacttcatgcctggacagttcgacaatcccgccaatccagagatccacgaaaagacaacaggtcctgagatctgggatgactgcgatggggcgatcgatgtgctcgtcgccggcgttggcaccggtggaaccattaccggtgtatcgcgttacatcaagcaggaaaaaggtaaggccatcacctcggtagccgttgagccaagccacagccctgtgatcacccaaaccatgaatggtgaagcgctcaagccaggcccacacaagattcaaggcatcggtgctggcttcattccgaacaacctcgacctctctgtggtcgatcgcgttgagcaagtcaccaatgaggagtcgattgaaatggccctacgtctggcccaggaggaaggcctcttagtagggatttcttgtggagcagcaaccgcagcggccattcgccttgcccaacaggatgaatttgctggcaaaacaatcgtggtggttctgcctgacctcgccgagcgttatctgtcctcagtgatgtttgcggacgtgccaacaggcatcatcgaacagcccgttcctgtctga

SEQ ID NO: 609 - protein, 343 aa, Synechococcus sp. CC9311
MPMLAIKFLENNSSLMSRVYADNSQAIGNTPLVRLNHVTKGCKATVLAKIEGRNPAYSVKCRIGANMIWDAEKRGVLSEGKTIVEPTSGNTGIALAFTAAARGYKLILTMPESMSIERRRVMAVLGAELILTEAAKGMPGAIAKAKEIADSDPSKYFMPGQFDNPANPEIHEKTTGPEIWDDCDGAIDVLVAGVGTGGTITGVSRYIKQEKGKAITSVAVEPSHSPVITQTMNGEALKPGPHKIQGIGAGFIPNNLDLSVVDRVEQVTNEESIEMALRLAQEEGLLVGISCGAATAAAIRLAQQDEFAGKTIVVVLPDLAERYLSSVMFADVPTGIIEQPVPV

SEQ ID NO: 610 - DNA, 969 bp, Synechococcus sp. CC9311
  CDS (1)..(969): transl_table=11
atgccaattgcatccgatatcaccgctctggtaggtcgcactcccttagtgcgccttaaccagctccctcagcgaagcggttgtttggctgaattggtggcaaagcttgagagcttcaatcccacagcttccgttaaagatcggattgcaggttcgatggttcaggccgctgaagaggccggcactatttctccagaacgaacagttctcattgagccaacaagtggaaatactggaattgccctagccatggttgctgcagctcgggggtaccggttgatcctcaccatgccagacacgatgagtaccgagcgtcgcgccatgctgagagcctatggagctgagcttcagctcaccccagggaatgaagggatgcagggggcgcttgatttagccgtagagctcgtttcagagatcccgcacgcctatctcctgcaacagtttgataacgctgccaatcctgcggtgcatgccgcgacgacggcagaagagatctggatggatactgatggtcagatcgatgcccttgtggctggtgttgggacaggtggcacgatcacaggctgtgccagggttctcaaacagcgcaatcctgatctgaaagtgattgcggtagaaccggctggaagtccagttttggcgggtggagcccctggcccccaccgcattcagggcattggtgctggttttgttcccgctgtctttgatcaaagcttgattgatgaaatccttggggtaagtgatcaggaagcgatggaagtggggcgccgtttggcccgggaagaaggcctgctctctggggtcagtagtggggctgctgttgctgctgccattcgtattggccaaaggcctgaaatggccgggaaacggatcgttgtgattctcgccagctttggtgagcgctatctgtccacacccatgttcagtgcatcggctgctacaccggcgtggcgggatggccagctttga

SEQ ID NO: 611 - protein, 322 aa, Synechococcus sp. CC9311
MPIASDITALVGRTPLVRLNQLPQRSGCLAELVAKLESFNPTASVKDRIAGSMVQAAEEAGTISPERTVLIEPTSGNTGIALAMVAAARGYRLILTMPDTMSTERRAMLRAYGAELQLTPGNEGMQGALDLAVELVSEIPHAYLLQQFDNAANPAVHAATTAEEIWMDTDGQIDALVAGVGTGGTITGCARVLKQRNPDLKVIAVEPAGSPVLAGGAPGPHRIQGIGAGFVPAVFDQSLIDEILGVSDQEAMEVGRRLAREEGLLSGVSSGAAVAAAIRIGQRPEMAGKRIVVILASFGERYLSTPMFSASAATPAWRDGQL

SEQ ID NO: 612 - DNA, 879 bp, Shewanella sp. MR-4
  CDS (1)..(879): transl_table=11
gtgtctgactttccgactattgaagcctgtattgggcaaactccgctggtacgtttgcagcgacttgattgtggtagctcaacggtattattaaagctggaggggaataaccccgcgggttcggtaaaggatcgcgcggcgctgaatatgattattcaggcggagcttcgccaagagattgcccctggggataccctgattgaagcgaccagtggcaataccggcatcgccttagccatggcggcggcgattaaaggctacaagatgatcctgatcatgccgtcgaattcgacccaagagcgtaaggatgccatgctggcctatggcgccgagctgctgctggtggacaatatggaagccgcgcgggatttagccttagagcttcaggcacaaggcaaaggtaaggtgctggatcagttcaataatcaagataacgccaacgcccatttccagaccactggccccgaaatttggcagcagagccaaggtaagatcacccactttgtctccagcatgggcaccacaggcactattatgggcgtgtcgaaatacctaaagagccgcaacccagatgtcaccattgtcgggctacaacccgccgatggcagttcgattccggggattcgtcgttggccgcaggaatatctaccgggtattttcgatgctgcccgtgtcgatgcggtgatggatattgaggagcaagatgcgaaagccatggcaagaaccttggcccgtgaagaaggcatttgtgctggcgtgagttctggcggcgcggtatttgcggcgctcgagattgcgaggcagaatccgggttcggttgtggtcgcgattgtgtgtgataggggcgaccgttatctgtcatctgggttattttcttaa

SEQ ID NO: 613 - protein, 292 aa, Shewanella sp. MR-4
MSDFPTIEACIGQTPLVRLQRLDCGSSTVLLKLEGNNPAGSVKDRAALNMIIQAELRQEIAPGDTLIEATSGNTGIALAMAAAIKGYKMILIMPSNSTQERKDAMLAYGAELLLVDNMEAARDLALELQAQGKGKVLDQFNNQDNANAHFQTTGPEIWQQSQGKITHFVSSMGTTGTIMGVSKYLKSRNPDVTIVGLQPADGSSIPGIRRWPQEYLPGIFDAARVDAVMDIEEQDAKAMARTLAREEGICAGVSSGGAVFAALEIARQNPGSVVVAIVCDRGDRYLSSGLFS

SEQ ID NO: 614 - DNA, 894 bp, Alkalilimnicola ehrlichei MLHE-1
  CDS (1)..(894): transl_table=11
atgtcataccccaccgtcgaggcctttgtaggcaacaccccgctggtgcgcctccagcgcatggtgccacccgagcgcaacaaccggatcctggccaagctggagggcaacaaccccgccggctcggtgaaggaccggccagctgtgcacatgatccgtcgcgccgaggaacggggccggatccggcccggcgacaccctgatcgaagccaccagtggcaataccggcatcgcgctggccatggcggccgccatcaagggctaccgcatggtcctgatcatgccggagaacatgagcaccgagcggcgtgcctccatggccgcctacggcgcggagctggtgctggtcagccaggaggagggcatggagggcgcacgggatctggccgcccgcatggccgaagagggccgggggctggtcctggaccagttcgccaaccctgataactcggccgcccactacgagagcaccggcccggagatctggcgcgacaccgagggcacgatcacccacttcgtcagctccatggggaccaccggcaccatcatgggctgctcccggttctttaaggagcagtcggaggcggtgcagatcgtcggtgtgcagccggaggacggctccagcatccccggtatccggcgctggccggaggcctacctgccgaagatctacgagccggcccgcgtggaccgcatcctcgatgtcagcagcgacgacgccatcaccaccacccgccggctggcggcggaggaggggatcatggcgggcatgtcgtccggtggttgcctgcacgcggccctgcgtctggagcgggaggtggagaacgccaccatcgtggtcatcatctgtgaccggggcgaccgttacctctccaccgggctgttcgaaggctga

SEQ ID NO: 615 - protein, 297 aa, Alkalilimnicola ehrlichei MLHE-1
MSYPTVEAFVGNTPLVRLQRMVPPERNNRILAKLEGNNPAGSVKDRPAVHMIRRAEERGRIRPGDTLIEATSGNTGIALAMAAAIKGYRMVLIMPENMSTERRASMAAYGAELVLVSQEEGMEGARDLAARMAEEGRGLVLDQFANPDNSAAHYESTGPEIWRDTEGTITHFVSSMGTTGTIMGCSRFFKEQSEAVQIVGVQPEDGSSIPGIRRWPEAYLPKIYEPARVDRILDVSSDDAITTTRRLAAEEGIMAGMSSGGCLHAALRLEREVENATIVVIICDRGDRYLSTGLFEG

SEQ ID NO: 616 - DNA, 1017 bp, Alkalilimnicola ehrlichei MLHE-1
  CDS (1)..(1017): transl_table=11
atgacagtgtgcgacggttttgccggggcggtgggcaacaccccactgatacgcctcaagcggctttccgaggagaccggctgcgagatcctgggcaaggccgagttcatgaacccgggcgggtcggtgaaggaccgcgccgcgctctacatcctcctggatgccgaacggcgcggcctgctgcgccccggtggcacggtggtggaggggaccgcgggcaataccgggatcggcttggcccacctgtgcaacgcccgcggctatcgctgtgtgatcgtcattcccgaaacccagacccaggagaagatcgacctcctgcgcaccctgggcgcggcggtgcacaccgtaccggcccggccctacaaggacccgaacaactaccagaaggtggccggccgcatggccgaggagatggacaacgcgatctgggccaaccagttcgacaacaccgccaaccgccaggcccactacgagaccaccgggcccgagatctggtcgcagaccggagggcggctggacggtttcgttgcggccaccggcaccggcggcaccctggccggcgtagcccgctacctcaaggcgcagtcgccggatgtgcgctgcgtactggccgacccgcacggcagcgcgctctacggctacgtcaagaccggtacgccggaggtgaccggcagcggctccatcaccgagggcatcggcagcacgcgggtcaccgccaatctggaggggacgcccatcgacgacgcctacagcatccccgaccaggaggccgtggatcgggtctatcaggcgctctaccaggaggggctgttcctgggcagctcctccggcatcaacctggctgccgctgtgcgcctggcccgcgagctggggccggggcacaccatcgccaccatcctctgcgacgggggcgcgcgctactactcgcggctgttcaacccggaatggttgcgcgagaaggggctgaccccggagactaaccgggaaacaggcagggatgacccggaggccccttga

SEQ ID NO: 617 - protein, 338 aa, Alkalilimnicola ehrlichei MLHE-1
MTVCDGFAGAVGNTPLIRLKRLSEETGCEILGKAEFMNPGGSVKDRAALYILLDAERRGLLRPGGTVVEGTAGNTGIGLAHLCNARGYRCVIVIPETQTQEKIDLLRTLGAAVHTVPARPYKDPNNYQKVAGRMAEEMDNAIWANQFDNTANRQAHYETTGPEIWSQTGGRLDGFVAATGTGGTLAGVARYLKAQSPDVRCVLADPHGSALYGYVKTGTPEVTGSGSITEGIGSTRVTANLEGTPIDDAYSIPDQEAVDRVYQALYQEGLFLGSSSGINLAAAVRLARELGPGHTIATILCDGGARYYSRLFNPEWLREKGLTPETNRETGRDDPEAP

SEQ ID NO: 618 - DNA, 984 bp, Hyphomonas neptunium ATCC 15444
  CDS (1)..(984): transl_table=11
atggccggaacagtgaaactcgagggcggcgtaacgctcgatggaccgcgcggccggatttacggctcgatccttgaaacggttggcgcgaccccgctcgttcgcgccgaaaagttcgccaaggccgagggcgttgacgccgacatcctcttcaagctggaattcttcaatcccctcgccagcgtcaaggaccggatcggcctcgcgatgatcctgggactggaggccgaaggcaagctgaagcccggcggtgtcctgattgagcctacctcgggcaataccggcattggcctcgccttcgtggcggccgccaaaggctaccgcctgatcctcaccatgccggagtccatgtctgtggagcggcgcaagatgctggcctatctcggcgccgagctggtgctgacgccgaaagaaaaaggcatgggcggggccatcgcgcgggccaatgaactgctcgccgaaatccctggcgccgtcagccccagccagttcgacaatccggcaaacccggcgatccatgagaagacaacggcagaggaaatctggtccgataccgccggcgctgtcgacgccattgtttcgggcatcggcacgggtggcacgttcacgggcgttgggcgcgtgctgaagccccgcaagccgagcctgaagatgtttgcgattgagcctgaagcctccccggtcttgtccggcggcgcacctggcccccatatgatccagggcatcggcgccggctttgtgccgggtaacgcggatacgagcctgattgacgagatcgtgaaagtctccaatgaggaatcctttgcgatggcccgtaagctcgccaagaccgaaggcattcccggtggtatttcttccggcgcggcagccgcggcagccgttcgcatcggcaagcggccggagatggcgggcaagacaatcgtggtcatcctggcaagctttgccgagcgctatctctcaacggctctgtttgacggcgtctga

SEQ ID NO: 619 - protein, 327 aa, Hyphomonas neptunium ATCC 15444
MAGTVKLEGGVTLDGPRGRIYGSILETVGATPLVRAEKFAKAEGVDADILFKLEFFNPLASVKDRIGLAMILGLEAEGKLKPGGVLIEPTSGNTGIGLAFVAAAKGYRLILTMPESMSVERRKMLAYLGAELVLTPKEKGMGGAIARANELLAEIPGAVSPSQFDNPANPAIHEKTTAEEIWSDTAGAVDAIVSGIGTGGTFTGVGRVLKPRKPSLKMFAIEPEASPVLSGGAPGPHMIQGIGAGFVPGNADTSLIDEIVKVSNEESFAMARKLAKTEGIPGGISSGAAAAAAVRIGKRPEMAGKTIVVILASFAERYLSTALFDGV

SEQ ID NO: 620 - DNA, 1074 bp, Hyphomonas neptunium ATCC 15444
  CDS (1)..(1074): transl_table=11
atgcctcagcccgcttccgctataacgccgcccgccgtttcgtccctcccttcggcgcgccagtgccaggaggcgcggctgaaggcgctctctgccctcatcggacgcacgccgatgctgtccattcggttacgcttcaggggccgggagcgtgttatccacgcaaaggcggagcattataatctgacgggctcgatcaaggatcgcatggcgctttcgatccttgcgtgcgcctatcgttcgggcgcccttcagcccggagacacgattgccgaagccaccagcggtaatgccggtattgccctcactgcgctgggccgcgcgcttggccatccggttgagattttcatgccagactggatgagcggtgaacgcaagaaccttctgcgcagccttggggcgaacctgaaccttctatcgagagaggcgggcggatttctgggcgccatcgccgcgaccgaaacccttgctgccagcaggaaggatgtatttctgccctgccagttttccaatggcgacaattccgccgcgcacgcccagaccactgcacgtgaactgatcaatcagctggccacgcttgatgcccgaccggatgcctttgtagccggtgttggaacaggtggcaccgtcatgggtgtcggacgtgcgttcaaatcggcatttccggacgtaaaggttcaccccctcgagccccaggaatctcccactttgtcgaccggctacaaggtgggccaacatcgcatccaggggatatccgatgactttatcccggccctcgtaaagctggaacaagtcgacgaggttattgccgtttcagacggggacgccatccggatggcgcaaaggctcgctcgtgagctcggcctgggagttggcatttcttcaggcgccaacctgatcggcgcgctgattgccgcagagaggctgggagacacagcttgcgtagcgacggtcttctgcgacgataacaagaagtatctctccggcgcactggcatgcgaagagccgcataaggagggccacctcacgccagagattgagttgctggacttcgaggcgacgatctgcggctag

SEQ ID NO: 621 - protein, 357 aa, Hyphomonas neptunium ATCC 15444
MPQPASAITPPAVSSLPSARQCQEARLKALSALIGRTPMLSIRLRFRGRERVIHAKAEHYNLTGSIKDRMALSILACAYRSGALQPGDTIAEATSGNAGIALTALGRALGHPVEIFMPDWMSGERKNLLRSLGANLNLLSREAGGFLGAIAATETLAASRKDVFLPCQFSNGDNSAAHAQTTARELINQLATLDARPDAFVAGVGTGGTVMGVGRAFKSAFPDVKVHPLEPQESPTLSTGYKVGQHRIQGISDDFIPALVKLEQVDEVIAVSDGDAIRMAQRLARELGLGVGISSGANLIGALIAAERLGDTACVATVFCDDNKKYLSGALACEEPHKEGHLTPEIELLDFEATICG

SEQ ID NO: 622 - DNA, 963 bp, Rhizobium leguminosarum bv. viciae 3841
  CDS (1)..(963): transl_table=11
atgtcgcacaagcccggccgcggccgcatctattcctcgatcaccgagaccatcggcgacacgccgctcgtgcgcttcgacaagctggcgcgggaaaaaggcgtcgtggcgaacctgatcggcaagctcgaattcttcaacccgatcgcctccgtgaaggaccgtatcggcgtcgcgatgatcgagggtctcgaagcgcaaggcaagatcacccccggcaagacggtgctgatcgagccgacctccggtaacaccggcatcgcgctcgcctttgccgccgccgccaagggttatcggctgatcctcaccatgccggagacgatgtcggtcgagcgccgcaagatgctggcgctgctcggcgccgaactggtgctgaccgagggcccgaagggcatgaagggcgccatcgccaaggccgaggaactggcctcatcgcttgacgatgccgtcattccgcagcagttcgagaaccctgataatccagagatccaccgcaagacgacggccgaggaaatctggaacgataccgacggaacggtcgatatcgtcgtctccggcatcggcaccggcggcacgatcaccggcgtcggacaggtgctgaagagccgcaagcccgagatcaagatcatcgccgtcgaaccggccgattcgccgatcctctccggcggcaatcccggcccgcacaagatccagggcatcggcgccggtttcgcgccgaagatcctcgataccggcatctatgacgaggtcgtcacggtgaccaatgacgaggccttcgaacaagcgcgcctggtcgcccggcttgaaggcgtgccggtcggcatctcctcgggtgctgcgctgaccgccgcaatcaaggtcggcatccgtcccgagaatgccggcaagaacatcgtcatcatcatcccctccttcgccgaacgctatctttcgacggcgctgtttgaggggctggggagctga

SEQ ID NO: 623 - protein, 320 aa, Rhizobium leguminosarum bv. viciae 3841
MSHKPGRGRIYSSITETIGDTPLVRFDKLAREKGVVANLIGKLEFFNPIASVKDRIGVAMIEGLEAQGKITPGKTVLIEPTSGNTGIALAFAAAAKGYRLILTMPETMSVERRKMLALLGAELVLTEGPKGMKGAIAKAEELASSLDDAVIPQQFENPDNPEIHRKTTAEEIWNDTDGTVDIVVSGIGTGGTITGVGQVLKSRKPEIKIIAVEPADSPILSGGNPGPHKIQGIGAGFAPKILDTGIYDEVVTVTNDEAFEQARLVARLEGVPVGISSGAALTAAIKVGIRPENAGKNIVIIIPSFAERYLSTALFEGLGS

SEQ ID NO: 624 - DNA, 975 bp, Pseudomonas aeruginosa UCBPP-PA14
  CDS (1)..(975): transl_table=11
atgagccgcatcttcgcagacaacgcgcagtccatcggcaacacgccgctggtccagatcaaccgcatcgccccgcgcggcgtcaccatcctggccaagatcgaagggcgcaaccccggctattcggtgaagtgccggatcggcgcgaacatgatctgggatgccgaagccagcggcagactgaagtccggcatgaccctggtcgagccgacctccggcaacaccggcatcggcctcgccttcgtcgccgccgcacgcggctacaaactgatcctgaccatgccggcgtcgatgagcctggagcgacgcaaggtgctcaaggcgctgggagcggagctggtcctgaccgaaccggcgaagggcatgaagggtgcgatccagaaggccgaggaactggtcgcgggggatcccgggaagtacttcatgccgcagcagttcgacaacccggccaacccggcgatccatgagaagaccaccggcccggagatctggaacgataccgagggcgcggtggacgtgctggtctccggggtcggcaccggcggcaccctcaccggcgtctcgcgctacatcaagaacacccggggcaagccgatcctcgccgtggcggtggagccggtgacctcgccggtgatcagccagaccctcgccggcgaggaggtcaagcccgccccgcacaagatccagggcatcggcgccggcttcgtgccgaagaacctcgacctgtcgttggtcgaccgggtcgagaagatcggcgacgacgaagcgaagaacatggcgctgcgcctgatgcaggaagaaggcatcctctgcggcatctcctccggcgcggcgatggccgccgcggtgcgcctggccgaggagccgaacatgcagggcaagaccatcgtggtgatcctccccgattccggcgagcgctatctttcgagcatgctcttcgacggcctgttcagcgaacaggaactgacccagtaa

SEQ ID NO: 625 - protein, 324 aa, Pseudomonas aeruginosa UCBPP-PA14
MSRIFADNAQSIGNTPLVQINRIAPRGVTILAKIEGRNPGYSVKCRIGANMIWDAEASGRLKSGMTLVEPTSGNTGIGLAFVAAARGYKLILTMPASMSLERRKVLKALGAELVLTEPAKGMKGAIQKAEELVAGDPGKYFMPQQFDNPANPAIHEKTTGPEIWNDTEGAVDVLVSGVGTGGTLTGVSRYIKNTRGKPILAVAVEPVTSPVISQTLAGEEVKPAPHKIQGIGAGFVPKNLDLSLVDRVEKIGDDEAKNMALRLMQEEGILCGISSGAAMAAAVRLAEEPNMQGKTIVVILPDSGERYLSSMLFDGLFSEQELTQ

SEQ ID NO: 626 - DNA, 912 bp, Oenococcus oeni PSU-1
  CDS (1)..(912): transl_table=11
atgttaattaataatctttaccagctaatcggcaagaccccactactgcgcctgaatatcgacgttccaaaccgtagtcgaatttatgccaaattggaaatgttcaatcccggcggtagtatcaaggaccgactgggaattgctttgatcgcttatggacggaagatcggcgccgtcaaagaaggcacaacaattatcgaaccaaccgccggaaacaccgggatcggtcttgctttggcagcccaacaatatcacttgccggtcaaattgattgtgccagaaaaattcagttttgaaaagcaaaccttgatgcgggccttaggggctgaagtgatcaatacaccggctgatgatgggatcaaaggggcgattgccaaagcccaatccttggcaaagacaatcaaaaattcttatgttccattacagtttcaaaatccagccaaccccgatatctactatcgaaccctgggtccggaaattttgcaggatttgtccgggcagaaaatcgatgcttttgttgccggttccggaagcggtggtacctttgtcggcacaacaaaattcctgcaggaacattatccgaaaatgcaggccgtgactgtcgaaccggaaggttcaattctaaacgggggaccagaacatccccaccgaatcgagggaatcggcgttgaatttgttccgcctttcttcgatcagattcgtgtggaccaggttaaaacaatcagtgacgatcgggcttttgaatatgttaaatggttggctgcgcacgtcggcctgttcgccggcagttcaagtggcgctgctttagcagcaagtttacagctggcaaaggagttgccgtccgattcaaccgttgtgactgtttttccggattcaagcgaacgttatttaagtaaaggtatctacgactaa

SEQ ID NO: 627 - protein, 303 aa, Oenococcus oeni PSU-1
MLINNLYQLIGKTPLLRLNIDVPNRSRIYAKLEMFNPGGSIKDRLGIALIAYGRKIGAVKEGTTIIEPTAGNTGIGLALAAQQYHLPVKLIVPEKFSFEKQTLMRALGAEVINTPADDGIKGAIAKAQSLAKTIKNSYVPLQFQNPANPDIYYRTLGPEILQDLSGQKIDAFVAGSGSGGTFVGTTKFLQEHYPKMQAVTVEPEGSILNGGPEHPHRIEGIGVEFVPPFFDQIRVDQVKTISDDRAFEYVKWLAAHVGLFAGSSSGAALAASLQLAKELPSDSTVVTVFPDSSERYLSKGIYD

SEQ ID NO: 628 - DNA, 915 bp, Leuconostoc mesenteroides subsp. mesenteroides ATCC 8293
  CDS (1)..(915): transl_table=11
atgctaatcaaaaacatacatcaattaattggccaaacaccgttaattgaactgcaaatacctgttccaaaccaaagtcgcatttttgcaaaactggagatgttcaatcctggtggtagcattaaagaccgtttaggacaattcttaatatcagatgcttggcagcgaaatctaattaatcaaaattcaacgattattgaaccgactgccggaaatactggtattggcttggcattagctgcgcaacaatataaattaccaaccattcttgttgtacctgagaaattcagcgctgaaaaacagcaactcatgaaagcattgggcgcaacaatcatcaacacaccttctaacgaaggtattaaaggtgccatttccaaagcaaaatcgatagcagcggaaattgaaaacagctacttgccaatgcaatttgctaatcctgctaatcctgaaacatattacaaaacgctagcaccagaaatcgttacagatttgaaaaacgaaaagattgatgcttttgttgctggtgctggtagtggtggaacttttgctggaattgccaaatatctgagtgaatatgatgcaactataaaaaatattgttgtagaacccgaaggatctattttaaatggtggcccagcacatgctcaccgtacagaaggtattggtgttgaatttgtaccaccattcttcgaatcaattcacattgacaaaacattaactattagcgatgacaatgcctttcagcaagttcgatatgctgccgagaacctaggactttttatcggtagttcaagtggcgcggccttggctgctagcctacagatggcagaaactttgccgccacaaagtaatattgtcacgatattcccagacagcagcgaacgttacatgagcacaaacatttatggaaactga

SEQ ID NO: 629 - protein, 304 aa, Leuconostoc mesenteroides subsp. mesenteroides ATCC 8293
MLIKNIHQLIGQTPLIELQIPVPNQSRIFAKLEMFNPGGSIKDRLGQFLISDAWQRNLINQNSTIIEPTAGNTGIGLALAAQQYKLPTILVVPEKFSAEKQQLMKALGATIINTPSNEGIKGAISKAKSIAAEIENSYLPMQFANPANPETYYKTLAPEIVTDLKNEKIDAFVAGAGSGGTFAGIAKYLSEYDATIKNIVVEPEGSILNGGPAHAHRTEGIGVEFVPPFFESIHIDKTLTISDDNAFQQVRYAAENLGLFIGSSSGAALAASLQMAETLPPQSNIVTIFPDSSERYMSTNIYGN

SEQ ID NO: 630 - DNA, 954 bp, Solibacter usitatus Ellin6076
  CDS (1)..(954): transl_table=11
atggccaacgcattgcccgtcccccatttggcgcgtacccaagcggagccgctgctcgccaccgtcggcaacacgcccttgctgcgtttggaaaggatcccccgggaattccccggcattgagatccttgcgaaggccgaatacttcaatcccggtggcagcgtgaaggaccgcgccgccgtcaacatggtgctggatggcgaacgctccggcaaactcaaccacacccgcacgatcctggattcgaccagcggcaacaccggcatcgcctatgccatgatcggggccaaccggggataccacgtcaaactagtgcttccaggcaacgccagcgaagagcgcaagcgcatcctgaaagcttacggcgccgagaccattttcagcgaccccggcgaaggcagcgacggagcgatcctgctctgccgccaaatttatcgcgaggatccggaccgctacttctacccggaccagtacaacaatccggccaactggaaggcccacttcgacggcacgggccccgagatcatcaaacagaccaacggcaccattacccactttgtttccgccatggggaccagtggaaccttcaccgggaccaccaggcgcctgcgccgcgatctgccggaggtgaagtgctactccgcccagccctccagcggcttccacggcctggaagggctcaagcacatgcccaccgccatccgcccgggcttttacgacgacaccctggccgatggcaatctgtggatcgaaaccgaggacgcctaccgcatggtccgccgcttggcgcgtgaggaagggctgctggtcggcatctcctcgggttgcaacgtccatgccgcgaccttgctggcgcgcgacatcgcggcccgcggtgaaaccgccacgatcgtgaccgtgctctgcgatagcgccgaaaaatatctcagcgaacacttctgggacgaagaatga

SEQ ID NO: 631 - protein, 317 aa, Solibacter usitatus Ellin6076
MANALPVPHLARTQAEPLLATVGNTPLLRLERIPREFPGIEILAKAEYFNPGGSVKDRAAVNMVLDGERSGKLNHTRTILDSTSGNTGIAYAMIGANRGYHVKLVLPGNASEERKRILKAYGAETIFSDPGEGSDGAILLCRQIYREDPDRYFYPDQYNNPANWKAHFDGTGPEIIKQTNGTITHFVSAMGTSGTFTGTTRRLRRDLPEVKCYSAQPSSGFHGLEGLKHMPTAIRPGFYDDTLADGNLWIETEDAYRMVRRLAREEGLLVGISSGCNVHAATLLARDIAARGETATIVTVLCDSAEKYLSEHFWDEE

SEQ ID NO: 632 - DNA, 1071 bp, Solibacter usitatus Ellin6076
  CDS (1)..(1071): transl_table=11
atgatgacagtggaaacgtcgagcttctgccacctgggacggctggtgggcaacacgccgatgctggccgtggaattccggtttcgcggacggcggcgagtgatttacgccaagagcgagcagttgaacatgacgggcagcatcaaggaccggatggcctttcatattctccggcaggggtacgctgacggcacgctgcggccggactgcacgatcgtggaggcgagcagcgggaattcagggatctcattcgcggcgctgggccgggcgctggggcacaaagtcaccattctgatgccggactggatgagccgcgagcggatggaactgatccatagctatggcgccacgatgattccggtgtcgcgcgaggagggcggctttatgggctgcatgcgacgcgcggaagacatggcacaggggcgcgccgacgtgtttctgccgaggcagttctccaatccggcggatgtgatggcgcacgaggtctcgacggggccggagatctgggcgcaactggcgcagcacgggctgacggccgacgcgttcgtggcgggggtggggacgggcggcaccgtgatgggcgtcggacgctatctgcggcggcgcaatccaaaggtgcgggtacacgcgctgcaaccggcggaatcgccgacactgaccgcgggacataaggtggggcggcatcgaatgcaagggctgacggatgaattcattccggagatcgtaaagctggacgaactggacgaggtcatcagcgtgagcgatggcgattcgatcttgatggcgcagaggctggcgagcgagttggggatcgcggtgggaatttcatcaggcgcgaattttctgggagcgatcgaggcgcagaaccggctgggcgcggatgctgtggtggccacggtcttcagcgacgacaacaagaagtacctgacgacggatttgctgcgcgaagagccggagaagcctggctatctgtcgccggacgtggagttgatctcgttcgatacctacaagcgagtgtgcgatacggcgtgcgagttcccggggtgcgagggtcacacaccccagaggtaa

SEQ ID NO: 633 - protein, 356 aa, Solibacter usitatus Ellin6076
MMTVETSSFCHLGRLVGNTPMLAVEFRFRGRRRVIYAKSEQLNMTGSIKDRMAFHILRQGYADGTLRPDCTIVEASSGNSGISFAALGRALGHKVTILMPDWMSRERMELIHSYGATMIPVSREEGGFMGCMRRAEDMAQGRADVFLPRQFSNPADVMAHEVSTGPEIWAQLAQHGLTADAFVAGVGTGGTVMGVGRYLRRRNPKVRVHALQPAESPTLTAGHKVGRHRMQGLTDEFIPEIVKLDELDEVISVSDGDSILMAQRLASELGIAVGISSGANFLGAIEAQNRLGADAVVATVFSDDNKKYLTTDLLREEPEKPGYLSPDVELISFDTYKRVCDTACEFPGCEGHTPQR

SEQ ID NO: 634 - DNA, 960 bp, Solibacter usitatus Ellin6076
  CDS (1)..(960): transl_table=11
ttgcgcgtctacgacgacaattcgctcagcattggccgcaccccgctggttcgtctgaaccgcgtcatcgatggcggaaaagccattgttctcgccaagatcgaaggtcgcaacccggcctacagcgtcaaatgccgcatcggcgccgccatggtctgggatgccgaaaaacgcggcgttctccacgccggcaaagagctggtggaacccacgagcggcaacaccggcattgctctcgccttcgtcgccgccgcccgcggctaccccatccacctcaccatgcccgaaaccatgtcggtggagcggcgcaaggtactgaaagccctcggcgccaacctcattctgacccccggctccgacggcatggccggctctatcgccaaggcagaggagatggtggccggcgatccccgccgttatattctcctgcaacaattcaaaaatcccgccaaccctgaaatccatttccgcactaccggacccgaaatctgggaagacaccgaaggtaccatcgacgtcctcgtctccggcatcggcaccggcggcaccatcagcggcgtctcccgttacataaagaaagatcgcggacgcaagatactcagcgtgggagtagaaccattcagcagtcaggtacttacccagcacatggcgggtaagcccctgaaacccggcccccacaagattcaaggcatcggcgcaggcttcattccggatacgctggatttgactatggtggaccgcgtcgagctgatcagcaacgaggaatccatcgaaatggcacgccgcctcgctaaggaggaaggtatcttgagtggtatctcctgcggcgccgccgccgcggtcgccgttcgccttggcaagctgccggagttcgccggcaaagtgatcgtcaccgtactgccagacgccgcggaacgttatctgagcacgacgttatttgaaggtatgttcgacgagtga

SEQ ID NO: 635 - protein, 319 aa, Solibacter usitatus Ellin6076
MRVYDDNSLSIGRTPLVRLNRVIDGGKAIVLAKIEGRNPAYSVKCRIGAAMVWDAEKRGVLHAGKELVEPTSGNTGIALAFVAAARGYPIHLTMPETMSVERRKVLKALGANLILTPGSDGMAGSIAKAEEMVAGDPRRYILLQQFKNPANPEIHFRTTGPEIWEDTEGTIDVLVSGIGTGGTISGVSRYIKKDRGRKILSVGVEPFSSQVLTQHMAGKPLKPGPHKIQGIGAGFIPDTLDLTMVDRVELISNEESIEMARRLAKEEGILSGISCGAAAAVAVRLGKLPEFAGKVIVTVLPDAAERYLSTTLFEGMFDE

SEQ ID NO: 636 - DNA, 891 bp, Magnetococcus sp. MC-1
  CDS (1)..(891): transl_table=11
atggccaccttggaatcattgatcggcaacacacctttggtagatcttgatcgtgtggtcaaggggtgtgtcgagggggttaagctgttggctaaggtggagggtaataatccgggggggtcggtcaaggatcgtgccgcctatggcatgttcatgggggcggagcagcggggtgtgctcaaccgggagacccgtatttttgaggccaccagtggcaataccggcatcgccttggcgatgatggcggcacgtcgcgggtaccagcttaccttggtcatgcccgagacgatgaccctggagcgccgcgccaccatggcggcttatggtgcggattttctgctggtcacggcggagcagggtatggagggggccattgatctggttaatgccaaggtcgccaatggcgaggggattaagctggaccaattttccaatgcggataattggggtgcccactaccgcaccacgggtccggaaatctggcgcgatacccaggggcagattacccattttgtgagcgccatggggaccacagggaccatcatgggggtttcgcgggccttaaaagagcgtaacccgcaaattcagattatcggtgtgcagccagatgaggggtcgcaaattgcgggcattcgtcgctggccacaagcctatatgccaaaaatctttgagccatcccgggtggataccattttggacgtcaacaccgccgaagcgcgagagatgacccgccgtttggcgcgggatgaagggcttttttgcggcctctcagcgggtggggcggtggcggcggcgctcaaggtttgccaggggttaagccagcccggcacggtggtggtgattattccagatcggggggatcgctacctttcgaccgatctgtttctctga

SEQ ID NO: 637 - protein, 296 aa, Magnetococcus sp. MC-1
MATLESLIGNTPLVDLDRVVKGCVEGVKLLAKVEGNNPGGSVKDRAAYGMFMGAEQRGVLNRETRIFEATSGNTGIALAMMAARRGYQLTLVMPETMTLERRATMAAYGADFLLVTAEQGMEGAIDLVNAKVANGEGIKLDQFSNADNWGAHYRTTGPEIWRDTQGQITHFVSAMGTTGTIMGVSRALKERNPQIQIIGVQPDEGSQIAGIRRWPQAYMPKIFEPSRVDTILDVNTAEAREMTRRLARDEGLFCGLSAGGAVAAALKVCQGLSQPGTVVVIIPDRGDRYLSTDLFL

SEQ ID NO: 638 - DNA, 936 bp, Magnetococcus sp. MC-1
  CDS (1)..(936): transl_table=11
atgggtcgaatctataacgatatcaccgaaaccatcggcaacacgccgctggtgcgcctgaatcgcatcagccaagggttggatgctgagattctggttaaattggagtatttcaaccccatggcttcgctcaaggaccgtattggtctggcgatgatccaagaggccgaggctaaggggctgatcactaaagatacgttgattattgagccaacctcgggcaataccggcatcgccctggcctttgtctgtgccgcgcggggttatcaattggtattaacgatgccagagtccatgtccatggagcggcgcaagctgtttgagttgctgggcgcgcaggtggtgttaacctcggccatggacggcatgaagggagccattgataaagcccaggagctgctggcggagaccgacaaagggtttatgcccaaccagtttgataatggcgccaacccagcggtccatgagaccaccaccgctgaggagatctggcgggataccgatggtcaattggacctgtttttggccggcgtgggcaccggtggttgtttaaccggggtggcgcgcacgctgaaaaaacgcataccccagttacgggtggtggcggtggagcccgaatcctctccggtgctctctgggggcatgcccggcccgcacaaaatccagggtattggggccggttttgtgccacgggtgctggatacccagttgatggatgaggtggtgcgggtgggggatcaagaagcctttgaagtggcccggcgcatggcccgagaagagggtatcgcctgtggtatctcctcaggggcggtggtggcggcggcgctgcaactggcccgtacaccccgctacgcaggcaaacggtttgtgctggtcttagccagctttgcggaacgctatctctccaccgagctgtttccctcacagctaccctaa

SEQ ID NO: 639 - protein, 311 aa, Magnetococcus sp. MC-1
MGRIYNDITETIGNTPLVRLNRISQGLDAEILVKLEYFNPMASLKDRIGLAMIQEAEAKGLITKDTLIIEPTSGNTGIALAFVCAARGYQLVLTMPESMSMERRKLFELLGAQVVLTSAMDGMKGAIDKAQELLAETDKGFMPNQFDNGANPAVHETTTAEEIWRDTDGQLDLFLAGVGTGGCLTGVARTLKKRIPQLRVVAVEPESSPVLSGGMPGPHKIQGIGAGFVPRVLDTQLMDEVVRVGDQEAFEVARRMAREEGIACGISSGAVVAAALQLARTPRYAGKRFVLVLASFAERYLSTELFPSQLP

SEQ ID NO: 640 - DNA, 969 bp, Shewanella sp. ANA-3
  CDS (1)..(969): transl_table=11
atgagcaaaattttcgaagacaattcatatactattggcaatactccgttagtgcgtttaaaccgcgtaagccaaggtaaagtgctggcaaaggtcgaagcacgtaatccaagtttcagtgtcaaatgccgtatcggtgccaatatgatttgggatgccgagaaaaaaggcctgctcaccaaagatcacgaactgattgagcctacctctggtaatacagggattgccttagcctatgtggcggccgcccgtggttataaactgacgttaactatgccaaatactatgagcttagagcgtcgtaaactgctgaaagccttaggtgcaaacctagtgctgaccgaaggcgcaaaaggcatgaaaggtgctatcgataaagcggaagaaatccgtcaatcggcgcctgaaaaatacattatgctgcagcagtttaataacccagcaaaccctgaaatccatgaaaaaaccactggtccagagatttggaacgataccgatggtgcagtggatgtgtttgttgcaggcgtgggtactggcggtactatcacaggtgtaagccgttacctgaagaaagtcgctggcaaagccattacttctgtcgcggtagaacctgctgattcaccagttatcacccaaaccttagcgggattaccagtgcaacctggtccacacaaaattcaaggtattggcgcaggttttatccctggtaacttagatcttgagttaatcgatcgcgttgaaaccgtcaccaacgatgaagccatcgacatggcgcgccgcttaatgcaagaagaaggcattttagtcggtatttcttctggcgctgctgtggttgcggcgaaccgcatcgcggctctgcctgaatttgcggataaaaacattgtggttatcctgccttcggctgccgagcgttacttatcttctgtactgttccaaggccagtttggcgacgaagagaacattcagtaa

SEQ ID NO: 641 - protein, 322 aa, Shewanella sp. ANA-3
MSKIFEDNSYTIGNTPLVRLNRVSQGKVLAKVEARNPSFSVKCRIGANMIWDAEKKGLLTKDHELIEPTSGNTGIALAYVAAARGYKLTLTMPNTMSLERRKLLKALGANLVLTEGAKGMKGAIDKAEEIRQSAPEKYIMLQQFNNPANPEIHEKTTGPEIWNDTDGAVDVFVAGVGTGGTITGVSRYLKKVAGKAITSVAVEPADSPVITQTLAGLPVQPGPHKIQGIGAGFIPGNLDLELIDRVETVTNDEAIDMARRLMQEEGILVGISSGAAVVAANRIAALPEFADKNIVVILPSAAERYLSSVLFQGQFGDEENIQ

SEQ ID NO: 642 - DNA, 879 bp, Shewanella sp. ANA-3
  CDS (1)..(879): transl_table=11
gtgtctgactttccgactattgaagcctgtattgggcaaactccgctggtacgtttgcagcggcttgattgtggtagctcaacggtattgttaaagctggaggggaataaccctgctggctcggtaaaggatcgcgcggcgctgaatatgattattcaggcggagcttcgccaagagatagcccccggggataccctgattgaagccaccagtggcaatacgggcatcgccttagccatggctgcggcgattaaaggctacaagatgatcctgatcatgccgtcaaattcgacccaagagcgtaaggatgccatgcaggcctatggcgccgagttgctgctggtggacaatatggaagccgcgcgggatttagccttagatcttcaggcacaaggcaaaggtaaggtgctggatcagttcaataatcaagataatgccaacgcccattttcagactactggccccgaaatttggcagcagagccaaggtaagatcactcactttgtctctagcatgggtaccacaggcactattatgggcgtgtctaaatacttaaagagtcgtaatcccgatatcactattgtcgggctacaacccgccgatggcagttcgattccggggattcgccgctggccgcaggaatatctaccgggtattttcgatgctgcccgtgtcgatgccgtgatggacattgaggagcaagacgccaaagctatggcgagaaccttggcccgtgaagaaggtatttgtgctggcgtgagttctggcggcgcggtatttgcggcgctcgagattgcgaggcagaatccggggtccgttgtagtcgcaattgtgtgtgataggggcgaccgttatctgtcatcagggttattttcttaa

SEQ ID NO: 643 - protein, 292 aa, Shewanella sp. ANA-3
MSDFPTIEACIGQTPLVRLQRLDCGSSTVLLKLEGNNPAGSVKDRAALNMIIQAELRQEIAPGDTLIEATSGNTGIALAMAAAIKGYKMILIMPSNSTQERKDAMQAYGAELLLVDNMEAARDLALDLQAQGKGKVLDQFNNQDNANAHFQTTGPEIWQQSQGKITHFVSSMGTTGTIMGVSKYLKSRNPDITIVGLQPADGSSIPGIRRWPQEYLPGIFDAARVDAVMDIEEQDAKAMARTLAREEGICAGVSSGGAVFAALEIARQNPGSVVVAIVCDRGDRYLSSGLFS

SEQ ID NO: 644 - DNA, 933 bp, Mycobacterium avium 104
  CDS (1)..(933): transl_table=11
atgagcatcgccgagaacgtcacgcagctgatcggaaacaccccgctggtccggttgaaccgggtcaccgaaggtgcggtcgccgacgtcgtcgccaagttggaattcttcaacccgggcaacagcgtgaaggaccgtatcggggtggccatgatcgatgcggccgagcaggcgggcctgatcaaaccggacaccatcattctcgagccgacgagcggcaacaccggtatcgcgctggcgctggtggccgcggcgcgcggctaccgctgcgtgctcaccatgccggagacgatgagcgtggagcggcgaatgttgttgcgcgccttgggcgccgagatcgtgctgacgccgggcgccgacggcatgccgggcgcgatcgccaaggccgaggaattggccaagagcgacgaccggtatttcgtgccgcagcagttcgagaacccggccaacccggcgattcaccgcagcaccaccgcggaggaagtgtggcgcgacaccgacggcaaggtcgacatcttcgtcgccggcgtcggcaccggcggcaccatcaccggtgtcgcccaagtcatcaaggaacgcaagccgtcggcgcagttcatcgccgtggagccggccgcgtcgccggtgttgtccggcggccagaaggggccgcatccgatccagggtctcggcgctgggttcgtgccgccggtgcttgccatggatctggtcgacgaggtcatcgccgtcggcaacgaggagtcgatcgcgctggcccgccggctggccgccgaggaggggctgctggtcggcatctcctcgggggcggcgctggtggccgccctgcaggtggcccgccggcccgagaacgccggcaagctggtggtcgtcgtgctccccgacttcggtgagcggtacctgagcacgccgctgttcgccgacctggccgattag

SEQ ID NO: 645 - protein, 310 aa, Mycobacterium avium 104
MSIAENVTQLIGNTPLVRLNRVTEGAVADVVAKLEFFNPGNSVKDRIGVAMIDAAEQAGLIKPDTIILEPTSGNTGIALALVAAARGYRCVLTMPETMSVERRMLLRALGAEIVLTPGADGMPGAIAKAEELAKSDDRYFVPQQFENPANPAIHRSTTAEEVWRDTDGKVDIFVAGVGTGGTITGVAQVIKERKPSAQFIAVEPAASPVLSGGQKGPHPIQGLGAGFVPPVLAMDLVDEVIAVGNEESIALARRLAAEEGLLVGISSGAALVAALQVARRPENAGKLVVVVLPDFGERYLSTPLFADLAD

SEQ ID NO: 646 - DNA, 972 bp, Mycobacterium smegmatis str. MC2 155
  CDS (1)..(972): transl_table=11
atgacgcgctacgactccctgctgcaggccctgggcaacaccccgctggtgggcctgcagaacctgtcgccccggtgggacgacgaggacgggaaaccccacgtgcggctgtgggccaagctcgaggaccgcaacccgaccggttccatcaaggaccgccccgcgctgcggatgatcgaacaggccgagcgcgacgggctgctgcagcccggcgccacgatcctggaacccaccagcggcaacaccggcatctcgctggccatggcggccctgctcaagggctacaacatgatctgcgtgatgccggagaacacgtcgatcgaacggcgccagatcctcgagctctacggcgcgcgcatcatcttcagccccgccgagggcggctccaacaccgcggtcgcgaccgcgaaagagcttgccgcgcagaacccgtcgtgggtcatgctgtatcagtacggcaacccggccaacagcgatgcgcactacttcggcaccggccccgaactgctcgcggacctgcccgagatcacccacttcgtcgcggggctcggcaccaccgggaccctgatgggcaccggacgtttcctgcgcgagcacgttcccggcgtgcagatcgtggcggccgaaccgcgttacggcgagggcgtgtacgcactgcgcaacatcgacgagggcttcatccccgagttgtacgacgccgacgtgctcaccacccggttctcggtgggctcgttcgacgccgtgcgccgcacccgtgaactcgtcacgcgcgagggcatattcgcgggcatctcgaccggcgcggtgctgcacgccgcgctggggatggccgccaaggccgtcaaggccggtgagcgtgccgacatcgcgttcgtcgtcgccgacgccggatggaagtatctgtcgaccggcgcgtacgccggtagcctggatgacgccgaggacgcgctggaagggcagctatgggcatga

SEQ ID NO: 647 - protein, 323 aa, Mycobacterium smegmatis str. MC2 155
MTRYDSLLQALGNTPLVGLQNLSPRWDDEDGKPHVRLWAKLEDRNPTGSIKDRPALRMIEQAERDGLLQPGATILEPTSGNTGISLAMAALLKGYNMICVMPENTSIERRQILELYGARIIFSPAEGGSNTAVATAKELAAQNPSWVMLYQYGNPANSDAHYFGTGPELLADLPEITHFVAGLGTTGTLMGTGRFLREHVPGVQIVAAEPRYGEGVYALRNIDEGFIPELYDADVLTTRFSVGSFDAVRRTRELVTREGIFAGISTGAVLHAALGMAAKAVKAGERADIAFVVADAGWKYLSTGAYAGSLDDAEDALEGQLWA

SEQ ID NO: 648 - DNA, 963 bp, Nocardioides sp. JS614
  CDS (1)..(963): transl_table=11
atgaggtacgacaacctcctcgcctccgtcgggaacaccccgctcgtcgggttgccgcggctctccgcccaactcgctggccccggtgccgacgtacggctctgggcgaagctggaggaccgcaacccgacgggctcgatcaaggaccgtccggccctgaagatgatcgaggaggccgagaaggacggcaccctgcggccggggtgcaccatcctcgagccgacctctggcaacaccggcatctcgctggcgatggcggcgaagctcaagggctaccggatcgtctgcgtgatgccggagaacacctccgaggagcgccgccagctgctgcggatgtggggggccgagatcgtgtcctcgccggccgccggcgggtccaacgaggccgtccgggtcgccaagcggatcgccaccgagcaccccgactgggtgatgctctaccagtacggcaacgccgccaacgcgctcgcccacgaggagggcaccggcccggagctgctcgccgacctgccgtcgatcacccacttcgtcgcggggctcgggaccacggggacgctgatgggtgtcagccgcttcttccgagcccacaaggcggacgtccggatcgtggcggcggagccgcgctacggcgagctcgtctacggcctgcgcaacctcgacgagggcttcgtgccggagctgtacgacgcggacctgatcgactcgcgcttctcggtcggcccccgcgacgccgtacgccgggtccgcgagctgctcgagctcgagggcatcttcgcgggtatctcgaccggcgcgatcctgcacgccgccctgggccaggccgcgaaggcggtcaaggccggggagagcgccgacatcgccttcgtcgtcgctgacggcggctggaagtacctctcgaccggtgcctacgagggcaccgtcgacgaggccgaggaccgcctcgagggccagctctgggcctga

SEQ ID NO: 649 - protein, 320 aa, Nocardioides sp. JS614
MRYDNLLASVGNTPLVGLPRLSAQLAGPGADVRLWAKLEDRNPTGSIKDRPALKMIEEAEKDGTLRPGCTILEPTSGNTGISLAMAAKLKGYRIVCVMPENTSEERRQLLRMWGAEIVSSPAAGGSNEAVRVAKRIATEHPDWVMLYQYGNAANALAHEEGTGPELLADLPSITHFVAGLGTTGTLMGVSRFFRAHKADVRIVAAEPRYGELVYGLRNLDEGFVPELYDADLIDSRFSVGPRDAVRRVRELLELEGIFAGISTGAILHAALGQAAKAVKAGESADIAFVVADGGWKYLSTGAYEGTVDEAEDRLEGQLWA

SEQ ID NO: 650 - DNA, 930 bp, Nocardioides sp. JS614
  CDS (1)..(930): transl_table=11
atgaacatctacgacgacgtcacccagctcgtcggcaacaccccgctcgtccggctcaaccgggtcgtcggcgatgccggcgccaccgtgctggccaagctcgagttctacaaccccgccaacagcgtcaaggaccggatcggcgtcgcgatgatcgacgccgccgaggccgccggggtgctcgccccgggcggcaccgtcgtcgaggccacctccggcaacaccggcatcgccctcgccatggtcggcgccgcccgcggctaccgcgtggtgctgaccatgcccgagacgatgtctcgcgagcgccgcgcgctgctgcgggccttcggcgccgagctggtgctgacccccggcagcgagggcatgaccggcgcggtgcgcaaggcagaggagatcgccgagacgaccggagcggtgccggtgcggcagttcgcgaacgccgccaacccggccatccaccgcgacaccaccgccgaggagatctggaaggacaccgacggcgaggtcgacatcctggtcgccggcatcggcaccggcggcaccatcaccggcgtcgggcagctgctcaaggagcgcaagcccgacgtgcaggtgatcggcgtcgagccggccgagtcgccgatcctcaacggcggcgccccgggcccgcacaagatccagggcctcggcgccaacttcgtccccgagatcctcgacaccaccgtgtacgacgaggtgctcgacgtacccgtcgaggaggccgtgacctgggcccggcgggcggcgaccgaggagggcctgctggtcggcctgtcgtcgggcgccgcgatctcggcggccgtccaggtggcgcagcgacccgagaacgccggccgcaccatcgtggtgatcgtgccgtccttcggcgagcgctacctctcgaccctgctgttcgaggggctggtggactga

SEQ ID NO: 651 - protein, 309 aa, Nocardioides sp. JS614
MNIYDDVTQLVGNTPLVRLNRVVGDAGATVLAKLEFYNPANSVKDRIGVAMIDAAEAAGVLAPGGTVVEATSGNTGIALAMVGAARGYRVVLTMPETMSRERRALLRAFGAELVLTPGSEGMTGAVRKAEEIAETTGAVPVRQFANAANPAIHRDTTAEEIWKDTDGEVDILVAGIGTGGTITGVGQLLKERKPDVQVIGVEPAESPILNGGAPGPHKIQGLGANFVPEILDTTVYDEVLDVPVEEAVTWARRAATEEGLLVGLSSGAAISAAVQVAQRPENAGRTIVVIVPSFGERYLSTLLFEGLVD

SEQ ID NO: 652 - DNA, 891 bp, Azoarcus sp. BH72
  CDS (1)..(891): transl_table=11
atggaattcaagacgctcgaggactacgtcggcaagaccccgctggtgcgcatgaagcggatcaccgcggggcataacaacgtcattctcgccaagctcgagggtaacaatccggcgggatcggtgaaggaccggccggcgttgtccatggtcgtccgcgcagaggcacggggcgacatcaagcctggcgacacgctcatcgaggcgaccagcggtaataccggcatcgcgcttgccatggcggcggcgatgcgcggctaccggatgatcctggtgatgcccgagaaccagagcgtcgagcgccggcagacgatgcgcgctttcggggccgaactcgtgctgacgcccaaggagggcggcatggagatggcgcgtgacgtcgccgagaagatgcgcgacgaaggcaagggcatcatccttgaccagttcgccaaccccgacaatccgctcgcccactacgaaggaaccgggcccgagttgtgggagcagacggcgggacgcatcactcatttcgtcagcagcatgggtacgacggggaccatcatgggtacgtcccgattcctcaaggagatgaacccggcgatccggatcgtcgggtgccagccggaggagggatcccagattccgggaatccgcaaatggcccgaagcctatcttccggcgatctatcaccgcgagtcggtggacagcctggagtacgtcagccaggccgatgcggaggagatgacccggcggttggcgcgcgaagaggggctctttgccggcatttcgtccggcggtgcgatgcatgtcgccctgcgtatcgcggcacaggtcgaaaacgcggtgatcgtttcggtgatctgcgaccgcggcgaccgctatctctccaccggggtgttccccgcctga

SEQ ID NO: 653 - protein, 296 aa, Azoarcus sp. BH72
MEFKTLEDYVGKTPLVRMKRITAGHNNVILAKLEGNNPAGSVKDRPALSMVVRAEARGDIKPGDTLIEATSGNTGIALAMAAAMRGYRMILVMPENQSVERRQTMRAFGAELVLTPKEGGMEMARDVAEKMRDEGKGIILDQFANPDNPLAHYEGTGPELWEQTAGRITHFVSSMGTTGTIMGTSRFLKEMNPAIRIVGCQPEEGSQIPGIRKWPEAYLPAIYHRESVDSLEYVSQADAEEMTRRLAREEGLFAGISSGGAMHVALRIAAQVENAVIVSVICDRGDRYLSTGVFPA

SEQ ID NO: 654 - DNA, 981 bp, Azoarcus sp. BH72
  CDS (1)..(981): transl_table=11
atgacccactggtacgaagacaacgcccgctccatcggccatacgccgctggtgcgcctcaaccgcgtcaccgacggcgcgcccgccaccatcctggccaagatcgagggccgcaaccccggctactcggtcaagtgccgccttggtgcggcgctgatctgggatgccgagaagcgtggcctgctcggccccggcaaggaactggtggagccgacctccggcaataccggcatcgcgctcgccttcgtcgccgccgcgcgcggcatccccatcacgctgacgatgccggaaacgatgagcatcgagcgccgcaagctgctgctcgcctacggcgccaagctggtgctgacggagggccccaagggcatgagcggcgcggtcgccaaggccgaggaaatcgccgcgtccgacccctcgcgctacgtgctgctgcagcagttcaagaacccggccaacccggccatccatgaagaaaccaccggcccggaaatctggaacgacaccgaaggggcggtggacatcttcgtctccggcgtcggcaccggcggcaccatcaccggcgtcagccgctacctgaagaagacgcgcggcaaggacgtgctgtcggttgcggtcgaacccgctgcgagccccatcctcacccaaaagcgcagcggccaggaactgaagcccgccccgcacaagatccagggtatcggcgccggcttcgtgcccgaggtgctggatctgtcgctggtcgaccaggtggaaaccgtgggcaacgaggaagcggtggactacgcccgccgcctcgcccgcgaagaaggcatcctgtccggcatctccagcggcgccgcggtggccgccgcggtgcgtctggcgcgcgacccgcagcatgccggcaagaccatcgtcgtcgtgctgcccgactccggcgaacgctatctcagctcggtgctgttcgaaggcgtgttcgacgccaccggcctgcccaccgcctga

SEQ ID NO: 655 - protein, 326 aa, Azoarcus sp. BH72
MTHWYEDNARSIGHTPLVRLNRVTDGAPATILAKIEGRNPGYSVKCRLGAALIWDAEKRGLLGPGKELVEPTSGNTGIALAFVAAARGIPITLTMPETMSIERRKLLLAYGAKLVLTEGPKGMSGAVAKAEEIAASDPSRYVLLQQFKNPANPAIHEETTGPEIWNDTEGAVDIFVSGVGTGGTITGVSRYLKKTRGKDVLSVAVEPAASPILTQKRSGQELKPAPHKIQGIGAGFVPEVLDLSLVDQVETVGNEEAVDYARRLAREEGILSGISSGAAVAAAVRLARDPQHAGKTIVVVLPDSGERYLSSVLFEGVFDATGLPTA

SEQ ID NO: 656 - DNA, 906 bp, Acidovorax sp. JS42
  CDS (1)..(906): transl_table=11
atgaagacctaccccaccattgaagacgcgatcggacacacgccgctggtcgcactgcagcgcatcggtgcacaggacaacgcggcacgcggcaatgtcattctgggcaagctagaaggcaataacccggcgggttcggtgaaggataggccggcactgtcgatgatccgccgggccgaagagcgcggcgagatcaaaaccggcgatacgctgatcgaggcgacgtcgggcaacaccggcattgccctggcgatggctgcggccatcaagggttaccgcatggtgttgatcatgccggaggatctgtccgtggagcgcgcgcagaccatgaaggccttcggcgcggagctggttctcacgcccaagagcggggggatggaatacgcgcgggatctggccgaccagatggtggcgcagggtaagggcgtggtgctggaccagtttgccaacccggacaacccccgcatccactacgagaccaccggccccgaactgtgggagcagaccgaggggcgcatcacccatttcgtgagcgccatgggcaccacgggcaccatcacgggcgtcgcgcgcttcctgcgcgagaagaaccccgcggtgcgcatcgtgggtgcgcagccgcaggaaggctcgcgtatcccgggcattcgcaagtggcccgaggaatacctgcccaagatctacgagccccagttggtggacgaattggtgctggtgagccaggacgatgccgaggacatggcacggcgcctggcgcgcgaagagggcatctttgccggcatctccgcagccggcgcctgctgggtggcgcagcagatcgcgcaacgcgaggaaaacgccaccatcgttttcgtggtgtgcgaccggggcgaccgctacctctccaccggcgtcttcccggcgtga

SEQ ID NO: 657 - protein, 301 aa, Acidovorax sp. JS42
MKTYPTIEDAIGHTPLVALQRIGAQDNAARGNVILGKLEGNNPAGSVKDRPALSMIRRAEERGEIKTGDTLIEATSGNTGIALAMAAAIKGYRMVLIMPEDLSVERAQTMKAFGAELVLTPKSGGMEYARDLADQMVAQGKGVVLDQFANPDNPRIHYETTGPELWEQTEGRITHFVSAMGTTGTITGVARFLREKNPAVRIVGAQPQEGSRIPGIRKWPEEYLPKIYEPQLVDELVLVSQDDAEDMARRLAREEGIFAGISAAGACWVAQQIAQREENATIVFVVCDRGDRYLSTGVFPA

SEQ ID NO: 658 - DNA, 918 bp, Acidovorax sp. JS42
  CDS (1)..(918): transl_table=11
atgcgagtcgacaacatcctgcacaccatcggcaacaccccccatgtgcgcatcaatcgcctgttcggcgcgggcgccaacgtgtgggtgaagtccgagcgcgccaaccccggcggttccatcaaggaccgcatcgccctggcgatggtcgaggcggccgagcgcagtggcgctctgcagccaggcggcaccatcatcgagcccacctcgggcaacaccggcattggcttggcgctggtagcggccgtcaagggctaccagctggtgctggtgatgcctgacagcatgtccatcgaacgccgccgcctgatgctggcctacggcgcccgcttcgacctcacgcccaaggaaaagggcatgaaaggcgccatcgcccgcgcgcaggaactggtggccgcgacacccggcagttggatgccccaacagttcgaaaacccggccaacgtcgaggtgcacatgcgcaccacggcgcaggaaatcgccgccgacttccccgacgggctggacgcactcgtcaccggtgtgggcacgggcgggcacatcacgggcgtggcgcgcgtgctcaaggcgcagtttccgcagctcaaggtgttcgcggtggagccttcgcaatcgcccgtgctgtcgggcggccagcccggcccgcaccccatccagggcctgggcgcgggcttcgtgccgcagatcatggacaccagcctgctggacggcgtgatccaggtcgaggccgagcccgcgcgtgaatacgcccgccgcgccgcgcgcgaggaagggctgctggtgggcatttcctccggcgccacactggccgccattgcccagaagctgcccgagttgcccgcgggcgcgcgggtgctgggcttcaactacgacaccggcgaacgctatctgtcggtcgagggtttcctgcccgcctga

SEQ ID NO: 659 - protein, 305 aa, Acidovorax sp. JS42
MRVDNILHTIGNTPHVRINRLFGAGANVWVKSERANPGGSIKDRIALAMVEAAERSGALQPGGTIIEPTSGNTGIGLALVAAVKGYQLVLVMPDSMSIERRRLMLAYGARFDLTPKEKGMKGAIARAQELVAATPGSWMPQQFENPANVEVHMRTTAQEIAADFPDGLDALVTGVGTGGHITGVARVLKAQFPQLKVFAVEPSQSPVLSGGQPGPHPIQGLGAGFVPQIMDTSLLDGVIQVEAEPAREYARRAAREEGLLVGISSGATLAAIAQKLPELPAGARVLGFNYDTGERYLSVEGFLPA

SEQ ID NO: 660 - DNA, 1047 bp, Magnetospirillum magnetotacticum MS-1
  CDS (1)..(1047): transl_table=11
atgtccgcacatcccgccgtctcgcccgacgtgctcgccgcggtcggcggcacgcccctgatccggctgcgccgcgcctccgaagagaccggctgcacgatcctcggcaaggccgagttcctcaatcccggcttgtcggtgaaggaccgggccgccctgtcgatcgtgcgggatgcggaggcgcgcgggctgatccggccgggcggcaccatcgtcgagggcacggccggcaataccggcatcggtctggcgctggtcgccgccgtgcgcggctaccgcacggtcatcgtcatccccgagacccagtcggcggagaagaaggagacgctgcgtctggccggcgcccgcctcgtcgaggtgcccgcggtccccttcgccaacccgaacaactacgtccatgccgcccgccgcctcgccgagcggctggcgcagacggaggaggccggcgccttcttcgccgaccagttcgacaacaccgccaaccgcgccgcccatatcgagacgaccggtcccgagatcgtggcgcagaccggcggcacggtcgacggcttcgtctgcgccgccggcaccggcggcacgctcgcgggcgtggccgaggccctgcgggcgcaaaagccgggggtgacgatcgccctgtccgatccggaagggtcggcgcttcacgcctactacaccaccggcacgctcaaggccgaaggctcctcgatcaccgaggggatcggccagggccgcatcacgaagaacctcgaaggcttcaagcccgatctctccttccggatcccggatgcggaggcgctcggcatcatcttccgcctgatgcgcgaggaggggctgtcgctcggcggctcgtcgggcatcaacgtggccggcgcgatccgcctcgcccgggaactcgggcccggccacaccatcgtgacgatcctctgcgacggggccgcgcgctacgcctcgaagctgttcaaccccgccttcctgacggagcgcggcctgccggtgccgggctggctcgggcaatccggcgaggccctgcccgattggcgggcctga

SEQ ID NO: 661 - protein, 348 aa, Magnetospirillum magnetotacticum MS-1
MSAHPAVSPDVLAAVGGTPLIRLRRASEETGCTILGKAEFLNPGLSVKDRAALSIVRDAEARGLIRPGGTIVEGTAGNTGIGLALVAAVRGYRTVIVIPETQSAEKKETLRLAGARLVEVPAVPFANPNNYVHAARRLAERLAQTEEAGAFFADQFDNTANRAAHIETTGPEIVAQTGGTVDGFVCAAGTGGTLAGVAEALRAQKPGVTIALSDPEGSALHAYYTTGTLKAEGSSITEGIGQGRITKNLEGFKPDLSFRIPDAEALGIIFRLMREEGLSLGGSSGINVAGAIRLARELGPGHTIVTILCDGAARYASKLFNPAFLTERGLPVPGWLGQSGEALPDWRA

SEQ ID NO: 662 - DNA, 975 bp, Nostoc punctiforme PCC 73102
  CDS (1)..(975): transl_table=11
atggatattaaaaatggcttcgtcggcgctgttggcaacacacccctgattcgcttaaacagcttcagtgaagaaacagggtgtgaaatcctcgcaaaagctgaatttctcaatcctggcggttccgtcaaagaccgcgccgcactttacatcatcgaagatgcagaaaagaaaggtttactcaaacccggtggtacggttgtagaaggaactgctggtaatactggcattggactggcgcatatttgcaacgccaaaggctacaaatgcctaattattattcccgatacccaatcacaagaaaaaatagacgcactgatcgcattaggcgcagaagtccgtcgcgttcctgccgtaccctacaaagacccaaataactacgtcaagctatctggaagagtcgctgctgagttggaaaatgctatttgggcgaatcagtttgataacctagccaatcgccacgcccactacgaaaccacagggccagaaatttggaaacagacagatggtaaaatagatgcatggacagcttcaactggtactggtggtacttatgctggtgtggcgttgtacttaaaagaacaaaatccaggaatcaaatgcgttgttgccgatccactgggtagcgcactttatagctatgtcaaaaccggcgaaatcaatataaaaggaaattccatcaccgaaggtatcggaaatggtcgtgtcacagccaatatggaaggcgcacctgctgatgatgccatccaaatcgatgacaaagaagctttacgagtagtttaccaactgctaaggaaagatgggctgctaatgggcggctcaacggggattaatgttggcgcagctgttgctctagcgaagcaattgggcccaggacataccattgtcaccatcttgtgtgatagtggttcacggtatcagtcgcggatattcaaccctgaatggctagcttcaaaaggactttcaatagattag

SEQ ID NO: 663 - protein, 324 aa, Nostoc punctiforme PCC 73102
MDIKNGFVGAVGNTPLIRLNSFSEETGCEILAKAEFLNPGGSVKDRAALYIIEDAEKKGLLKPGGTVVEGTAGNTGIGLAHICNAKGYKCLIIIPDTQSQEKIDALIALGAEVRRVPAVPYKDPNNYVKLSGRVAAELENAIWANQFDNLANRHAHYETTGPEIWKQTDGKIDAWTASTGTGGTYAGVALYLKEQNPGIKCVVADPLGSALYSYVKTGEINIKGNSITEGIGNGRVTANMEGAPADDAIQIDDKEALRVVYQLLRKDGLLMGGSTGINVGAAVALAKQLGPGHTIVTILCDSGSRYQSRIFNPEWLASKGLSID

SEQ ID NO: 664 - DNA, 963 bp, Nostoc punctiforme PCC 73102
  CDS (1)..(963): transl_table=11
atgcggatagcgaaagatatcacagagttaatcggacggactcctttagttcaattaaacaaaattccccaagcttcaggagcggttgctcggattgtggtgaagctagaaagcatgaatccggcatcttctgtgaaagatcggattggcgcgagtatggtggaaatggcggaagaagcaggcttgattcaccccggaaaaactgttttagtagagccgacttctgggaatacaggaattgcgctagcgatggtggcggccgctaaggggtaccatctcattctaacgatgcctgacacaatgagccacgaaagacgatcgatgctcaaagcttatggcgctcaattagagttaacgccaggggtagaagggatgcgaggagcgatcggtcgtgcagagcagattttagctcaaacgcccaatgcttatatgttgcagcagttccgcaaccccgccaacccgaaagttcacgccgaaaccacagcagaagaaatctggaatgataccgatggagaggtggatattctagtggcgggagtgggtactggtgggacgattacaggagttgcagaagttattaaaggacggaagccaagttttcaagcgatcgcagttgaaccaagcagcagtccggtattaacgggtgggaaatcagggcctcacaaaattcagggtatcggcgcgggatttgtcccagcaatttaccgtccagaattggtggatgaagtgattcaggtagcggatgagcaagcgatcgcttacagccgtcgcctagcaaaagaagaaggattgttatcgggcatttctactggcgctgctttatatgcggctattcaagtagcacaacgtccagaaaatgcaggtcgtctaatcgtcatgatccagcctagcttcggcgaacgctacctcagcacctcactatttaaagatccagaagagaatgagtggttgagtaaagtttga

SEQ ID NO: 665 - protein, 320 aa, Nostoc punctiforme PCC 73102
MRIAKDITELIGRTPLVQLNKIPQASGAVARIVVKLESMNPASSVKDRIGASMVEMAEEAGLIHPGKTVLVEPTSGNTGIALAMVAAAKGYHLILTMPDTMSHERRSMLKAYGAQLELTPGVEGMRGAIGRAEQILAQTPNAYMLQQFRNPANPKVHAETTAEEIWNDTDGEVDILVAGVGTGGTITGVAEVIKGRKPSFQAIAVEPSSSPVLTGGKSGPHKIQGIGAGFVPAIYRPELVDEVIQVADEQAIAYSRRLAKEEGLLSGISTGAALYAAIQVAQRPENAGRLIVMIQPSFGERYLSTSLFKDPEENEWLSKV

SEQ ID NO: 666 - DNA, 963 bp, Nostoc punctiforme PCC 73102
  CDS (1)..(963): transl_table=11
atgcgaattgctcgtaacattacagaacttgttggtcgtacacccctagttcagttgaaccgcattcctcaaacagaaggatgtgttgcggaaattgtggtgaaactggaaagtctcaacccatcggcatcagtcaaagaccggattggggtcagcatgattaacgctgccgaagaggaggcgctgattactcctgagaagacaatattagtagaacccacttctggaaatacgggaattgctctagcaatgacagcagcagctaagggttatcgattaattttgacaatgccagagaccatgagtggggaacgtcgggcaatgttgcgggcttatggagcagaactggaactaacgccaggtatggaaggcatgagtggggcaattagacgagcgcagcaaatagttaatagtacgccaaatacctatatgttgcagcagttccgcaatccagctaatgcaaaagtgcatcgggaaactacagctctggaaatttgggaagatactgatggacaagtagatatagttgtggcgggtgtgggcactggtggtacgatcactggggtagcagaagtgattaaagcacgcaaacctagttctaaagcgatcgcagttgaaccagccaatagccctgttttatctgggggacagccagggccacacaaaatccaaggaattggcgctgggtttattccccaagtactcaagctaaaattgatagatgaagtgattaccatcaccgatgaagaagcgatcacttatagtcggcgcttggcaaaagaagaagggctactatctggcatttccagtggggccgctttatgtgcagcaattcgcgttgctcaacgtgaagaaaacaaagagcgtttaattgtgatgattcagcccagctttggtgagaggtatctgagtacacccttgttccaagatctggaggcaaggttgcccgctagcgttggttaa

SEQ ID NO: 667 - protein, 320 aa, Nostoc punctiforme PCC 73102
MRIARNITELVGRTPLVQLNRIPQTEGCVAEIVVKLESLNPSASVKDRIGVSMINAAEEEALITPEKTILVEPTSGNTGIALAMTAAAKGYRLILTMPETMSGERRAMLRAYGAELELTPGMEGMSGAIRRAQQIVNSTPNTYMLQQFRNPANAKVHRETTALEIWEDTDGQVDIVVAGVGTGGTITGVAEVIKARKPSSKAIAVEPANSPVLSGGQPGPHKIQGIGAGFIPQVLKLKLIDEVITITDEEAITYSRRLAKEEGLLSGISSGAALCAAIRVAQREENKERLIVMIQPSFGERYLSTPLFQDLEARLPASVG

SEQ ID NO: 668 - DNA, 960 bp, Nostoc punctiforme PCC 73102
  CDS (1)..(960): transl_table=11
atgcggattgctcaagatataacagaactgatcggacgaactcctttagttcaactgaataagatacctcaagctgagggagtagtagcaaggatagttgtcaaattagaaggtatgaacccagcagcctcggtaaaagaccgcattgggttaagtatggtactttcagcagaagcggctggctcaattcagcctggaaagactattttagttgagcctacttcaggtaatacaggaattgctctagcgatggtagcagcagcacgtggctaccgtttaattttgacaatgccagagacgatgagccaagaacgacgggctatgttgagagcttatggcgcgtctttagagttaacaccaggcgcggaaggaatgcggggagctattcgcaaagccgaagagattgtggctaatactcctgatgcttttatgctgcaacagttccgcaaccctgccaatcctaaagttcaccaggaaactaccgccgaagaaatttggacagatacagacggagaagtcgatattgttattgctggggtaggtactggtgggacgattaccgggattgcagaggtacttaaaggtcgtaagaagacttttaaggcgatcgcagttgaacccagcaacagcccagttctctcaggtggtgaagccgggccacacagaattcaaggtattggtgccggatttatccccgatgttcttcgcctagaattggttgatgaagtaattagagtcagcgatgaacaagcgatcgcttacgggcgacgtttggcaaaagaagaaggcttattatctggcatatcctctggtgcagctttgtgtgctgccattcaagtaggtaaacgtccagaaaatgccggacgtttaatcgtaatgattcagccttccttcggcgaacgttacctcagcacccccatgtttcaagacttgtctttagaaactgctggcgtgcgttaa

SEQ ID NO: 669 - protein, 319 aa, Nostoc punctiforme PCC 73102
MRIAQDITELIGRTPLVQLNKIPQAEGVVARIVVKLEGMNPAASVKDRIGLSMVLSAEAAGSIQPGKTILVEPTSGNTGIALAMVAAARGYRLILTMPETMSQERRAMLRAYGASLELTPGAEGMRGAIRKAEEIVANTPDAFMLQQFRNPANPKVHQETTAEEIWTDTDGEVDIVIAGVGTGGTITGIAEVLKGRKKTFKAIAVEPSNSPVLSGGEAGPHRIQGIGAGFIPDVLRLELVDEVIRVSDEQAIAYGRRLAKEEGLLSGISSGAALCAAIQVGKRPENAGRLIVMIQPSFGERYLSTPMFQDLSLETAGVR

SEQ ID NO: 670 - DNA, 1227 bp, Bifidobacterium longum DJO10A
  CDS (160)..(1227): transl_table=11
gtggttaacatgaaaaaccgattcacttttcggattcaccgtacagtgagcgggaatactcgattttcaaaccaaagccacagtccattcgtctgggaacgtcggttcacgaacgcaacgcagcaaaacccccacaaccccagcaacgaaggacttcacatgaccatccacaacagcctcgcagaactcatcggcaacaccccgctcgtcaagctcaaccacattccgcaggcggccggcgtcaaagccaccatcgccgtcaaagtcgaatacttcaaccccggtggatcttccaaggaccgcattgccgaacgcatcatcgacgccgccgaacagtccggccaactgaagcccggcggcgtgatcgtcgaacccacctccggcaacaccggcgtcggcctggccctggtcgcccagcagcgcggctaccgcacgattttcaccctgccggacaaggtctccgaatccaagcgcgcggtgctgcgcgcctacggtgccgaagtcatcgtcacgccaaccgacgccggcccggacgacccgcgctcctactatcaggtcgccgaacgactggccaatacgattcccggcggcttccgcccgaaccagtacgacaatccgaacggcccgctgagccactactacaccaccggacctgagatctgggaggccacggaccacaaggtcacgcacttcgtggccggcatcggcaccggcggcaccatctccggcaccggcaagtacctcaaggaagcctccaacggcgcggtcaaggtcatcggctccgacccggaaggctccatctactccgcttcctcacgcgacgaagtccaccagtacgatatcgagggcgtaggggaggacttctatcccaaggccttcgaccggaacatcaccgacgacatcgtgcgcgtgtccgacgccgaagcctttgaaatgacccgccgtctggccggcgaggaggcgctgctggtcggcggctcgtccggcatggctgtggccagcgccatcaagtacgcgcttgccaatgatttggacgagaaccagatcgtggtggtgctcgcccctgattccggccgcagctacttggagaagatcttcaacgacgactggatgcgtgccaacggctacggcgacatcgtggagcgcaccagcaagccctccctcgccgagcagtaccttaacggagctccctctgatgagggagctggggacggactccataactag

SEQ ID NO: 671 - protein, 355 aa, Bifidobacterium longum DJO10A
MTIHNSLAELIGNTPLVKLNHIPQAAGVKATIAVKVEYFNPGGSSKDRIAERIIDAAEQSGQLKPGGVIVEPTSGNTGVGLALVAQQRGYRTIFTLPDKVSESKRAVLRAYGAEVIVTPTDAGPDDPRSYYQVAERLANTIPGGFRPNQYDNPNGPLSHYYTTGPEIWEATDHKVTHFVAGIGTGGTISGTGKYLKEASNGAVKVIGSDPEGSIYSASSRDEVHQYDIEGVGEDFYPKAFDRNITDDIVRVSDAEAFEMTRRLAGEEALLVGGSSGMAVASAIKYALANDLDENQIVVVLAPDSGRSYLEKIFNDDWMRANGYGDIVERTSKPSLAEQYLNGAPSDEGAGDGLHN

SEQ ID NO: 672 - DNA, 924 bp, Bacillus cereus G9241
  CDS (1)..(924): transl_table=11
atggaaataaaaaattcaattacagaattaatagggaaaacccctgttgttaaattaaatcatattgtaaagggaaatgttgcagatatttacttgaagttagaatttatgaatcccggaagcagtgttaaggatcgtattgcattagcgatgattgaagatgctgaaaaaaaaggggtactaaaaaagggagatacaattattgaagctacaagtggtaacacaggaattagtttagctatgatagctgctgcaaaaaattataaatctattcttgttatgccagatacaatgagtgtcgaaagacgtaatttattgagtgcttatggtgctaaattaatattaactccagggcatgaaggtatgagcggcgcaatccagaaagcaaatgaattagcaaagataaatggttactttattcctcagcaatttaaaaatcaaacgaatcctgaaatacatcgtttgacaacaggaccagaaattgttgagcaaatggggaatcaattagatgtatttatagcaggagttggtactggtggaacaattactggtgctggcagtttccttaaagaagtatataaagatataaaaatttgcgcggttgagccagcagattctcccgtattatctggtggaaaaccaaaaaaacaccaacttcaaggaatcggagctggatttgttcctgagactttagatgttagggtatatgatgaggttattcaagtgagagcagatcaggcatttgaatatgctagaaaagtagcttgtaaagaggggattttacttggaatttctgcaggtgcagcaatttatgcatcagttaaaattgcaaaaaagataggaagaggaaaaaagattttaaccattattccgagcaatggtgaaagatatttaagtaccatgttataccgatttgaacaataa

SEQ ID NO: 673 - protein, 307 aa, Bacillus cereus G9241
MEIKNSITELIGKTPVVKLNHIVKGNVADIYLKLEFMNPGSSVKDRIALAMIEDAEKKGVLKKGDTIIEATSGNTGISLAMIAAAKNYKSILVMPDTMSVERRNLLSAYGAKLILTPGHEGMSGAIQKANELAKINGYFIPQQFKNQTNPEIHRLTTGPEIVEQMGNQLDVFIAGVGTGGTITGAGSFLKEVYKDIKICAVEPADSPVLSGGKPKKHQLQGIGAGFVPETLDVRVYDEVIQVRADQAFEYARKVACKEGILLGISAGAAIYASVKIAKKIGRGKKILTIIPSNGERYLSTMLYRFEQ

SEQ ID NO: 674 - DNA, 924 bp, Bacillus cereus G9241
  CDS (1)..(924): transl_table=11
atgaatgtatatcgtggagttcatgagttaattggtcatacaccaattgtagaaattactcgtttttcacttccagaaggggttcgtttatttgcaaagcttgaattttataacccaggcggaagcgttaaggatcgcttaggaagagaattaattgaagatgcgctcgaaaaagggcttgttacccagggtggaacaattattgaaccgactgctgggaatactggtattggactggcacttgcagcgttacaacatgatttacgtgttattgtttgtgtaccagagaaatttagtattgaaaaacaagagttaatgaaagcactaggtgcaacggtcgtgcatacaccgactgagcaaggaatgaccggtgcaattgctaaagcaaaagagttagtaaatgaaataccgaattcatactctccaagtcagttcgcaaatgaggcaaatcctcgtgcatattttaaaacattaggacccgaactgtgggatgcattgaatggagagattgacatatttgttgctggagcaggaactggcggtacgtttatggggactgcatcttacttgaaagaaaaaaatatagatattaaaacagttatcgtagagccagaaggatctattttaaatggtggtaaagctggctcacatgaaacagaagggattggccttgaattcatcccgccatttttgaaaacatcttattttgatgaaattcatacaatttctgatcgaaatgcatttttacgagtgaaagaattagcgcagaaggaaggtcttctcgttggaagctcttcaggagcagcatttcatgcaagcttacttgaagcggagaaagcggcgccaggtacaaatattgtaacgatttttcctgatagtagtgagcgctatttaagtaaagacatatacaaaggatgggaataa

SEQ ID NO: 675 - protein, 307 aa, Bacillus cereus G9241
MNVYRGVHELIGHTPIVEITRFSLPEGVRLFAKLEFYNPGGSVKDRLGRELIEDALEKGLVTQGGTIIEPTAGNTGIGLALAALQHDLRVIVCVPEKFSIEKQELMKALGATVVHTPTEQGMTGAIAKAKELVNEIPNSYSPSQFANEANPRAYFKTLGPELWDALNGEIDIFVAGAGTGGTFMGTASYLKEKNIDIKTVIVEPEGSILNGGKAGSHETEGIGLEFIPPFLKTSYFDEIHTISDRNAFLRVKELAQKEGLLVGSSSGAAFHASLLEAEKAAPGTNIVTIFPDSSERYLSKDIYKGWE

SEQ ID NO: 676 - DNA, 975 bp, Crocosphaera watsonii WH 8501
  CDS (1)..(975): transl_table=11
atggatattaaagaaggttttgttggtactgtcgggaatacacctctcattcgactaaaaagctttagcgaagaaacaggctgtaatattttaggaaaggcggaatttcttaaccctggtggttccgtaaaagatcgggctgctttatatattatcaagaatgcagaggaaaaaggactacttaaacctggcggaaccgttgttgaaggaaccgcaggtaatacagggatcggattagcccatatttgcaatgctaaaggctataaatgcctgattatcatcccagaaacccagtcacaagagaaaattgaccttttaaggactttaggggctgaagttcgtactgttccggcggttccttacaaagatcccaataattatgttaaagtctcagggagactggccgaagagttggataatgcgatttgggctaaccaattcgataatttagccaaccgacaggcacattatgaaaccactggccccgaaatttggcagcaaactaacggcaaggtagacggttgggtatcagctacaggaaccggtggaacttatgctggtggggcattattctttaaggagaagaatcccaatattaaatgtattgtcgccgatcctatgggcagtggtctatacagttatgtaaaaactggagaaattaaacccgaaggcagttctatcaccgaaggcattggtaacagtcgcatcaccgccaatatgcaggatgttcctattgatgatgctattcaaatagatgaccatgaggcattacgcatagtttatcaattgttgtcccaagatggcttatttatggggggatcagtgggtattaatgtgggggcggccgtcgccttagctaaagaaatgggaccaggccataacattgttactatcttatgtgatggtggggcgcgctatcagtctcgtctttacaaccaagaatggttagcgtctaagggtttatctctgggctaa

SEQ ID NO: 677 - protein, 324 aa, Crocosphaera watsonii WH 8501
MDIKEGFVGTVGNTPLIRLKSFSEETGCNILGKAEFLNPGGSVKDRAALYIIKNAEEKGLLKPGGTVVEGTAGNTGIGLAHICNAKGYKCLIIIPETQSQEKIDLLRTLGAEVRTVPAVPYKDPNNYVKVSGRLAEELDNAIWANQFDNLANRQAHYETTGPEIWQQTNGKVDGWVSATGTGGTYAGGALFFKEKNPNIKCIVADPMGSGLYSYVKTGEIKPEGSSITEGIGNSRITANMQDVPIDDAIQIDDHEALRIVYQLLSQDGLFMGGSVGINVGAAVALAKEMGPGHNIVTILCDGGARYQSRLYNQEWLASKGLSLG

SEQ ID NO: 678 - DNA, 963 bp, Crocosphaera watsonii WH 8501
  CDS (1)..(963): transl_table=11
atgaaaattgctcacaatatcactgagttaattggccataccccccttgttcaattaaatcgcattcctcaagcagaaggttgtaaagcgcagatcgttgtcaaattagaaggcatgaacccggcagcatccgtcaaagatagaattggcgtgaatatgattaatgctgccgaaaaagaaggatttatcattcccggtaaaaccctcttagttgaacccacttccgggaatacaggtattgccctggcaatggcagcagcggccaaaggatacaagttaattttaaccatgcccgaaaccatgagccaagaacgccgggctatgttaaaagcttatggagcgcagctagaactaaccccaggtagcgaggggatgggcggttgtattcgtcggggccaagaattagcagaaaccctgcccaacgcctatatgttacaacaattcaataatccagctaaccccgaaattcaccgtttaaccaccggcgaggaaatttgggaagataccgatggacgggtagattttttgatcgctggcgtaggaaccggtggcacccttaccggtgtagctgaagtaattaagcagaaaaaacccagttttcaggcgatcgcagttgaacccaccagcagccccgttttatcaggaggcagcccaggaggacacaaaatacaagggatcggtgccggttttgtgcctggggtgttgaaagtggaattgatcgatgaagttgtcaccgtcaccgatgaggaagcaatgagttatgggcgacgtttagctaaagaagaaggactattatccggtatttctacgggggctgctttatgcgctgccattaaagttgggcaaagacccgaaaatatcggtaaactgatcgtaatggttcaacccagttttggagaacgttacttaagtacacctcttttccaagatgtcgaaccgcctcaactggctatggttcattaa

SEQ ID NO: 679 - protein, 320 aa, Crocosphaera watsonii WH 8501
MKIAHNITELIGHTPLVQLNRIPQAEGCKAQIVVKLEGMNPAASVKDRIGVNMINAAEKEGFIIPGKTLLVEPTSGNTGIALAMAAAAKGYKLILTMPETMSQERRAMLKAYGAQLELTPGSEGMGGCIRRGQELAETLPNAYMLQQFNNPANPEIHRLTTGEEIWEDTDGRVDFLIAGVGTGGTLTGVAEVIKQKKPSFQAIAVEPTSSPVLSGGSPGGHKIQGIGAGFVPGVLKVELIDEVVTVTDEEAMSYGRRLAKEEGLLSGISTGAALCAAIKVGQRPENIGKLIVMVQPSFGERYLSTPLFQDVEPPQLAMVH

SEQ ID NO: 680 - DNA, 954 bp, Exiguobacterium sibiricum 255-15
  CDS (1)..(954): transl_table=11
atggtcatgcgcattgcgaattcagtattggatttagtcggccgcacgccgattgttaaattaaatcatttgacaggaccggaagatgcggacgtgtatttgaaattggaatatatgaatccggggtcaagcgtcaaagaccggatcgctttagcgatgatcgaatcggcagaatcagcgggtcatttaaaagcaggcgataccatcattgagccgacaagtggaaacacgggaatcggactcgcaatggtcgctgctgctaaaggataccgttcgattcttgtcatgccggaaacgatgagcatggaacgtcgaactctacttcgtgcgtacggtgcggagttgattttaacagccggcccggaaggaatgaagggtgcgattgctcgagcgacggcagaagcggaagaacatggttatttcatgccgcaacagttcaataatgaatcaaaccctgttgttcatgaaaagacgactggaccggaaatcgttgaagcatttgaaggattgacacttgatgcgttcatcgccggtatcggtacgggcggtacgatcacaggggcgggaaaagtattgcgcgaggctttcccgggcatcgaaatcattgcggttgaaccaaccgattctcctgttctttcaggcggaaaaccgggaccgcataaactgcagggaatcggagccggatttgtcccgtcgattctcgatacgcagatttacgacagcgtcgagcaggtgacgacggaagaagcgtttgatcatgcccgtcgtgcagcgaaatcgaacggagttctcggaggtatttcttccggtgctgcgattgcggctgctttaaaaacagcgaagcgtctcggcaaaggaaaaacggttctggcgatcatcccgtcaaacggagaacgttatctcagtacgccactgtatcaagtggaagaagagacggacagttcgaaactgtaa

SEQ ID NO: 681 - protein, 317 aa, Exiguobacterium sibiricum 255-15
MVMRIANSVLDLVGRTPIVKLNHLTGPEDADVYLKLEYMNPGSSVKDRIALAMIESAESAGHLKAGDTIIEPTSGNTGIGLAMVAAAKGYRSILVMPETMSMERRTLLRAYGAELILTAGPEGMKGAIARATAEAEEHGYFMPQQFNNESNPVVHEKTTGPEIVEAFEGLTLDAFIAGIGTGGTITGAGKVLREAFPGIEIIAVEPTDSPVLSGGKPGPHKLQGIGAGFVPSILDTQIYDSVEQVTTEEAFDHARRAAKSNGVLGGISSGAAIAAALKTAKRLGKGKTVLAIIPSNGERYLSTPLYQVEEETDSSKL

SEQ ID NO: 682 - DNA, 927 bp, Prosthecochloris aestuarii DSM 271
  CDS (1)..(927): transl_table=11
atgaatgtctacgagagcataacagagacggtcggtcgcacacctcttgtgcgcattcgtcgtatggcggatcattcgtatgctgatgtctatgccaagctggaatccttcaatccgctttcaagcgtcaaagaccgcgtcggtgtcgccatgatcgaggatgcggaacgaaacggcctgataggcccggagacgaccattattgagccgaccagcggcaatacgggaatagcgcttgcgtttagctgtgcatcgaggggataccggcttattctcaccatgccggataccatgagcgtcgaacgtcgcaggcttctgaaaattctgggagccgaacttgttctgacggaaggtgcagcaggaatgaaaggcgccatagcggaagctgagcggcttgtcgattcgattcctcacagcctgatgctgcagcagttcaataaccctgccaacccggagacgcaccgcaggacaacagcgagagaaatatgggacgataccgacggtcaggttgatatatttattgccggagttggaacgggcggtactattaccggtgtcggcagcgtactcagggagctgaaaccaggggttcatattgtggctgtcgagccagacgattcgccggttatttccggaggcgaacccgggccgcataaaattcaggggatcggagccggttttgttcctggaaatcttgacccttcggttatagacgagatcataaccgtctcaaatcaggatgccgccgagacagcaagaaagcttgcccgcaaagagggtatcctttgcgggatctcttcgggagccgccatgtgggcggcaatgagcgttgctgcccgacctgctatggagggtaaaaatattgttgtacttttgcctgatacaggggagcgctatctttcaacctggttgtttgccgatgagtaa

SEQ ID NO: 683 - protein, 308 aa, Prosthecochloris aestuarii DSM 271
MNVYESITETVGRTPLVRIRRMADHSYADVYAKLESFNPLSSVKDRVGVAMIEDAERNGLIGPETTIIEPTSGNTGIALAFSCASRGYRLILTMPDTMSVERRRLLKILGAELVLTEGAAGMKGAIAEAERLVDSIPHSLMLQQFNNPANPETHRRTTAREIWDDTDGQVDIFIAGVGTGGTITGVGSVLRELKPGVHIVAVEPDDSPVISGGEPGPHKIQGIGAGFVPGNLDPSVIDEIITVSNQDAAETARKLARKEGILCGISSGAAMWAAMSVAARPAMEGKNIVVLLPDTGERYLSTWLFADE

SEQ ID NO: 684 - DNA, 978 bp, Croceibacter atlanticus HTCC2559
  CDS (1)..(978): transl_table=11
atgaacgctacacttacattacctataaccaaccacacagtatatgagtccatactaactacaattggccatacgccattagttaagttaaaaaaattatctgcggagttaggctttcaagtttatggaaagcttgagatgacaaatcctggtggaagtattaaagataggacatcattaaacattattgaagaagaaattgccaaagggaacattacaaaaaatactacacttgttgaaagtagtagtggcaatatggcgataggtttggcacaggtttgttcttatcataatatacctttagtaattgttgtagatccaaaagctaataagcatactttaaaaatattagatgcttatggagtaaaagtagatatggttgaaaaagctagccaaaatggaggttatcttggtgctcgcttacaaagagtacaagagcttgtggcacaacttccaaatgctatatggacaaatcaatatggaaataaagccaacccgaaagcacattggcaaactatgaaagagatttatgaagatttacctgatgtagattatgttttttctgccactagtacttgtgggacattaatgggttgtgcagattttattaactctgaacatttaaatacaaaacttattgcagtagatgctaagggaagtgtgatttttggagaacaaccagaagaacgacatattcctggtcatggtgctggtttaccatctcaatttttagataaaaatgccattcatgatgtggttcatactacagataaagaatgtgtaactggttgtcacaaactacttaaattagaaagtattttagctggcggatcttctggtgcagttacaacagctatagaaaaattaaaacataaaatccctaaacacagcacgtgtgttctcatactttgtgatcgcggcgaacgctatatagatactatttataataaagattgggtagctcaaaaactagggtaa

SEQ ID NO: 685 - protein, 325 aa, Croceibacter atlanticus HTCC2559
MNATLTLPITNHTVYESILTTIGHTPLVKLKKLSAELGFQVYGKLEMTNPGGSIKDRTSLNIIEEEIAKGNITKNTTLVESSSGNMAIGLAQVCSYHNIPLVIVVDPKANKHTLKILDAYGVKVDMVEKASQNGGYLGARLQRVQELVAQLPNAIWTNQYGNKANPKAHWQTMKEIYEDLPDVDYVFSATSTCGTLMGCADFINSEHLNTKLIAVDAKGSVIFGEQPEERHIPGHGAGLPSQFLDKNAIHDVVHTTDKECVTGCHKLLKLESILAGGSSGAVTTAIEKLKHKIPKHSTCVLILCDRGERYIDTIYNKDWVAQKLG

SEQ ID NO: 686 - DNA, 1035 bp, Sulfitobacter sp. EE-36
  CDS (1)..(1035): transl_table=11
atgcacgtcgcatctgatctggcgcaggccattggcaacacccctcttattcgtctgcgcaaggcgagcgaggaaaccggctgcgagatatacggcaaggcagaattcatgaaccccggccagtcggtcaaggaccgtgccgcgctgttcatcattcaggatgccattgccaagggcacgctgaaacccggcggtacgattgtcgaaggcacggcagggaacaccggtatcgggctggcacttgtcggcgcatcaatggggttcaaaaccgtgatcgtcattcctgaaacacaaagtcaggaaaaaaaggacatgctgcgccttgccggggccgagctggtgcaagtgcccgcggcaccctaccgcaaccccaacaactttgtgcgctactcggaacggctcgcgaatgaactggcgcgcaccacgaatgaaggggtgatctgggccaaccagttcgacaacgtcgccaaccgtcaggcgcatatcgaaaccaccggccccgagatctgggagcagaccggcggcaaggttgacggattctgctgtgcggtaggatctggcggcacgctggccgggatcggcatggcgttgcagcccaaaggcgtgaaaatcgcgattgccgacccggacggggccgcgctgcataactattacaccaagggtgaactggtcgccgaaggcggatcaatcgctgaaggtatcggtcaggtccgcatcaccaagaacctcgaagggttcacgcccgatttcagctacaacgtctcggacgcagaggcgctgccctatgtctttgatctgctgcaacacgaagggctttgccttggggcgtcgtcgggtgtgaacgtcgccggtgcggtgcgtctggccaaggatatggggccggggcatacaatcgtgacgatcctgtgcgactttggcacgcgctatcagtcgaaactgttcaaccccgacttcctgcgcgaaaaggatctgcccgtgcccgcttggctggaccgcgccccacaatccattcccggcgtattcgaagaccaatga

SEQ ID NO: 687 - protein, 344 aa, Sulfitobacter sp. EE-36
MHVASDLAQAIGNTPLIRLRKASEETGCEIYGKAEFMNPGQSVKDRAALFIIQDAIAKGTLKPGGTIVEGTAGNTGIGLALVGASMGFKTVIVIPETQSQEKKDMLRLAGAELVQVPAAPYRNPNNFVRYSERLANELARTTNEGVIWANQFDNVANRQAHIETTGPEIWEQTGGKVDGFCCAVGSGGTLAGIGMALQPKGVKIAIADPDGAALHNYYTKGELVAEGGSIAEGIGQVRITKNLEGFTPDFSYNVSDAEALPYVFDLLQHEGLCLGASSGVNVAGAVRLAKDMGPGHTIVTILCDFGTRYQSKLFNPDFLREKDLPVPAWLDRAPQSIPGVFEDQ

SEQ ID NO: 688 - DNA, 1053 bp, Sulfitobacter sp. EE-36
  CDS (1)..(1053): transl_table=11
atgaatattcgtactcaggtaaagacccactcccatacggcgacgccctttgcggccacgcggatcgcggacaatgtgctcgacctcatcggccagacgccgatggtgcgcctgccccgctatctcgaccgcgaggatgttaatctggtcgccaaagtcgaggcgctgaaccccgggggcagcgccaaggaccggcccgcgcggcatatgatcgaacgcgctttggcggacggtcgcctaaagcccggcgatacggtggttgaatcctcctccggcaacatgggcatcgggttggcacaagcttgtgcagtgcatgggctgcaattcatctgcgtcgttgaccccaatgcgcagtcccagaacgtggcgatcatccgcgccttggggggccagattgaactggtcgatcacgcgcctgacggtgatttcctcgccgcgcgtctggatcgggtcgccaagcttctggaggaaaattcccgccgtttctggcccaaccaatatgccaacctcgacaatccggagtcccacgagctcggcaccatcgccgagattgacgcggcgcttggcgggcagattgatgtgcttttcgtcgcttgttcgagcactggcacggcgcgaggatgtcgcgactatctgcgccggatggggcgcaaaaccaaggtcgtcgcggtggatgccatgggtagcacgctcttcaacggcaccgcaggcccgcgcaaaatctcgggcatgggcgcgggtcgtatcccagaactggccaatgggcaggagttcgacgatctcgtccgcgtttccgatgtgacctgcgtcgccgggtgtcgccgcgccgttgcgcgcgaagggctgctggtcggcggctccggcggtggcgtgcttgaagccgtgcgcggtatgcaggacgagctcgccggtctgaccgtcgccgcgattatccacgattccggctcgcgctatctgggcaccgtctttgatcccgagtgggtcgagcgcgagctggggatttgcgaggcggatgtgaccgcattagcaggattggcccccgcggattcatga

SEQ ID NO: 689 - protein, 350 aa, Sulfitobacter sp. EE-36
MNIRTQVKTHSHTATPFAATRIADNVLDLIGQTPMVRLPRYLDREDVNLVAKVEALNPGGSAKDRPARHMIERALADGRLKPGDTVVESSSGNMGIGLAQACAVHGLQFICVVDPNAQSQNVAIIRALGGQIELVDHAPDGDFLAARLDRVAKLLEENSRRFWPNQYANLDNPESHELGTIAEIDAALGGQIDVLFVACSSTGTARGCRDYLRRMGRKTKVVAVDAMGSTLFNGTAGPRKISGMGAGRIPELANGQEFDDLVRVSDVTCVAGCRRAVAREGLLVGGSGGGVLEAVRGMQDELAGLTVAAIIHDSGSRYLGTVFDPEWVERELGICEADVTALAGLAPADS

SEQ ID NO: 690 - DNA, 966 bp, Roseovarius nubinhibens ISM
  CDS (1)..(966): transl_table=11
atgatcctgccctcggtcatcgacgccatcggggacacgccgctcgtgtctctcgatcgtgtcgtgaccgagctggggctttcgggccgcattctggccaagctcgactatctcctgccgggcttttccaagaaagaccgcgccgcccgcaccatcatcgaggcggcccgcgcctcgggcgagctgcgcgacgggcagccggtgatcgaactgacctccggcaatatgggcaccgggctcgccatcgtctgtggcgtgctcggccatcccttcatcgcggtgatgagcgaaggcaattcccccgaacgcgcccgcatgatgcgcgcgctgggggccgaggtggtgctcgtcccgcaggccaagggcagccgcccgggcgaggtttcgggcgccgatctggcccgcgtcgaagaggccgcgcagaggatcacccgcgagcgcgccgcctttcgcgccgatcaattcgcccgccccggcaacccagcggcgcattttcacggaaccgccccggaaatctgggcgcaatccggtgaaacagtctctgtttttgccgatttcgcaggctccggcggcacgctcgcgggctgcgccgcctatctcgccccacgcggcgtacgctgctacgcggtcgaacctacgggcgccgaggccatcggcggcggcgaccgttccaccccggcccacccgatccagggtggcggctatgacatggacgcgctcgcccatctgaaatccacagattcggctggaacagtgactgtttccggcaacgaggcgcgcgatcacgcccggcttctcgcgcgccgcgaaggcatctttggcggcttttcctcgggcgccaatctcgccgccgccgtgcagctcctgcgcgggcccgaacgcggcggcaccattgccatcgtgatctgcgacagcggcctcaaatacctctcaaccgatctctgggacgatcccccaccccaatag

SEQ ID NO: 691 - protein, 321 aa, Roseovarius nubinhibens ISM
MILPSVIDAIGDTPLVSLDRVVTELGLSGRILAKLDYLLPGFSKKDRAARTIIEAARASGELRDGQPVIELTSGNMGTGLAIVCGVLGHPFIAVMSEGNSPERARMMRALGAEVVLVPQAKGSRPGEVSGADLARVEEAAQRITRERAAFRADQFARPGNPAAHFHGTAPEIWAQSGETVSVFADFAGSGGTLAGCAAYLAPRGVRCYAVEPTGAEAIGGGDRSTPAHPIQGGGYDMDALAHLKSTDSAGTVTVSGNEARDHARLLARREGIFGGFSSGANLAAAVQLLRGPERGGTIAIVICDSGLKYLSTDLWDDPPPQ

SEQ ID NO: 692 - DNA, 1032 bp, Roseovarius nubinhibens ISM
  CDS (1)..(1032): transl_table=11
atgcgtattgcacaggatttggccgctgcggtcggcaacacacccctcatccggctgcgccgggccagtgaagagacagggtgtaacatcctgggcaaggctgaatttctgaaccccggtcagtcggtcaaggaccgcgccgccctctatatcatcaaggatgcggtggcgcgcggcgatctcaagcccggtggcacgattgtcgaaggcaccgcgggcaacaccggcatcggtctggcgcttgtcggcgcgtcgatggggtttcgcacggtcatcgtgatccccgagacgcagagccaggaaaagaaggacatgatccggctggcgggggccgagctggtgcaagtgcccgccgcgccctatcgcaaccccaacaattatgtgcgctattccggccgtctggccgaagagatggcgcggcattccaatgagggcgtgatctgggccaaccagttcgacaatgtcgccaaccggcaggcccatatcgagaccaccggcccggaaatctgggaacagaccggcggcaaggtcgacgggttcgtctgtgccgtgggctcgggcgggacgctggcaggggtcggcatggcgctgcagcccaagggcgtcaagatcggcctcgccgatcccgatggcgcgacgctttataatttctacaaacatggcgagcataaatccgaagggtcttcgatcaccgaaggcatcgggcaggggcggatcactgccaatctcgaagggtttacgccggacatggcctggaacattcccgacagcgaagcgctgcccatcgttttcgacctgctggccgaagaggggctctgccttggcggatcgtcggggatcaacgtggccggggcgatccgcatggcccgcgaaatggggccgggccacacgatcgtgacgccgctgtgcgattacggcacgcgctatcagtcgaagctcttcaaccccgaattcctgcgcgagaaaggcctgccggtgcctggctggctctcggaagcgccgcgctcgatccccggggtgtttgaagaatga

SEQ ID NO: 693 - protein, 343 aa, Roseovarius nubinhibens ISM
MRIAQDLAAAVGNTPLIRLRRASEETGCNILGKAEFLNPGQSVKDRAALYIIKDAVARGDLKPGGTIVEGTAGNTGIGLALVGASMGFRTVIVIPETQSQEKKDMIRLAGAELVQVPAAPYRNPNNYVRYSGRLAEEMARHSNEGVIWANQFDNVANRQAHIETTGPEIWEQTGGKVDGFVCAVGSGGTLAGVGMALQPKGVKIGLADPDGATLYNFYKHGEHKSEGSSITEGIGQGRITANLEGFTPDMAWNIPDSEALPIVFDLLAEEGLCLGGSSGINVAGAIRMAREMGPGHTIVTPLCDYGTRYQSKLFNPEFLREKGLPVPGWLSEAPRSIPGVFEE

SEQ ID NO: 694 - DNA, 1032 bp, Oceanicola batsensis HTCC2597
  CDS (1)..(1032): transl_table=11
atgcttgtcgcgcaggatctggcccatgcggtcggcaacaccccgatgatcaaactgcgcaaggtgagtgaggccacgggctgcaccatcctcggcaaggccgaattcctcaatcccggccagtcggtcaaggaccgcgccgcgctgtggatcatccaggacgcgatcgagaaggggctgctggaacccggcggcaccatcgtcgaggggacggcgggcaacaccgggatcgggctggccctcgtcggcgcgtcgatggggttcaggacggtgatcgtcattcccgagacgcagagccaggaaaagaaggaaatgatccgcctggcgggcgcggaactcgttcaggtgccggcggtgccctacaagaatcccaacaactacgtgcgctattccgaacggctggcggcggaactggccaagaccgaacagcatggcgccatctgggccaatcagttcgacaatgtcgcgaaccggcaggcgcatatcgaatcgaccggccccgaggtctgggaacagaccggcggcaaggtcgacggctttgtcgccgcggtcggctccggcggcacgctggccggcgtgggcatggcgcttcagcccaagggcgtgaagatggcgctggccgatcccatgggctcgggcgtctattcgctctacaaggacggtgaatccaggcccgagggcgggtcgatcaccgaaggtatcgggcaggggcgaatcacgaagaacctcgaagggttccgacccgacatgctctaccagatccccgatgacgaggcgctgccctatgtcttcgacctgctggccgaagaggggctctgcgtgggcgggtcctcgggcatcaacatcgcgggcgccgtccggatggcgcgcgagatgggcccgggccataccatcgtcaccgtgctctgcgactacgggacccgctatcagtcgaaactgttcaacccggatttcctgaaggagaagggtcttcccgtgcccgactggctgaccgaggcgccgcgctccatccccggcgtgttcaccgagtga

SEQ ID NO: 695 - protein, 343 aa, Oceanicola batsensis HTCC2597
MLVAQDLAHAVGNTPMIKLRKVSEATGCTILGKAEFLNPGQSVKDRAALWIIQDAIEKGLLEPGGTIVEGTAGNTGIGLALVGASMGFRTVIVIPETQSQEKKEMIRLAGAELVQVPAVPYKNPNNYVRYSERLAAELAKTEQHGAIWANQFDNVANRQAHIESTGPEVWEQTGGKVDGFVAAVGSGGTLAGVGMALQPKGVKMALADPMGSGVYSLYKDGESRPEGGSITEGIGQGRITKNLEGFRPDMLYQIPDDEALPYVFDLLAEEGLCVGGSSGINIAGAVRMAREMGPGHTIVTVLCDYGTRYQSKLFNPDFLKEKGLPVPDWLTEAPRSIPGVFTE

SEQ ID NO: 696 - DNA, 1023 bp, Erythrobacter sp. NAP1
  CDS (1)..(1023): transl_table=11
atgaacatcactcaaccattcggcgacacgctcgccctgattggaaatacgccgctcgttcgccttgctggacccagcgaggcggcgggctgtgacatctggggcaagtgcgaattcgccaaccccggctcaagcgtgaaggatcgcgcggcgctctatatgatccgcgatgcggaaggccgcggcgagctgaagcccggcggaacggttatcgaaggcacggctggcaacaccgggatcggcattgcgcttgttgccaatgcgctgggctataagacgatcatcgtcatgcccgacaaccagtcgaaggagaagatggacacattgcgcgcattgggcgccgagctggtccttgttcctccgaccaaatacgctgatccctgccacttccagcacgtctcgcgccgcatggccgaagagaccgaaggcgcgatctgggcaggccagttcgacaacaccgccaaccgtcgcgctcatatcgaaggcactgcgatcgagctgtgggagcaaaccggcggcaagatttccggcttcacctgcgcggctggcaccggcggtacgattgcgggtgtgggtatggggctgaaggaaaaaaaccccgacatccgcattgcgctgaccgatccgcatggcgcggcgctctacaattattacgcgcatggcgaattgaagggcgaaggctcttcggtcgccgaagggatcgggcagggacgcatcaccgcgaacctcgaaggcgcgccaatcgacacgcaatttcgcatttcggacgaagaaggcctagtctgggtcgagcatctgctgcgcaaggaagggctgtgccttggtctttcgagcgggattaacgtcgcaggcgcgattgaactgggcaagcaactggtcgcggacggtgtcgagaacccgcaggtcgcgacgatcctgtgcgacactggcttccgctatctctcgacgctctacaacgccgagtggctcgcttcgaagaacctgccggtgttcgactggctcacccaaaaccaaagcgattaa

SEQ ID NO: 697 - protein, 340 aa, Erythrobacter sp. NAP1
MNITQPFGDTLALIGNTPLVRLAGPSEAAGCDIWGKCEFANPGSSVKDRAALYMIRDAEGRGELKPGGTVIEGTAGNTGIGIALVANALGYKTIIVMPDNQSKEKMDTLRALGAELVLVPPTKYADPCHFQHVSRRMAEETEGAIWAGQFDNTANRRAHIEGTAIELWEQTGGKISGFTCAAGTGGTIAGVGMGLKEKNPDIRIALTDPHGAALYNYYAHGELKGEGSSVAEGIGQGRITANLEGAPIDTQFRISDEEGLVWVEHLLRKEGLCLGLSSGINVAGAIELGKQLVADGVENPQVATILCDTGFRYLSTLYNAEWLASKNLPVFDWLTQNQSD

SEQ ID NO: 698 - DNA, 921 bp, Erythrobacter sp. NAP1
  CDS (1)..(921): transl_table=11
atgaaagccacgagcattctcgagaccatcggcaacaccccgcacattcgcctgtcgcgcatgttccccgatcacgaagtctggttgaaatcagagcgcgccaatcccggcggctcgatcaaggatcgcattgcgcttgccatggtggaggatgcagaggcttcgggagcactcaagccaggtggcaccatcgtcgaaccgaccagcggcaacaccggcatcggtcttgcgatggttgcggcggtcaagggctacacgctcgtgctcgtcatgcccgaatcgatgtcgatcgaacgtcgacgcctgatgctcgcatacggagcgaccttcgacctgacgcccaaggaaaagggcatgaagggcgcaatcgagcgcgcgaccgagatcgtcgagacaaccgaaggcgcatggatgccgagccagttcgataacggctcgaaccccgcggttcatgcgcgcacaacggccaaggaaatccttggcgacttcgccgacaaccccatcgatgtgatgatcaccggggttggaactggcggccatctcacaggctgcgcagaggagctcaagaaaagctggtccgacttcaaagcctatgcggtcgagcccgtcggctctcccgtcatcagcggcggagagcctggcccccacccgatccagggcattggcgctggcttcatccccggcaacctccacaccaacgcaatcgacggcgcgatcaaggtcgatcccgaagacgccaaggagatggcccgcagggcagcgcgcgaagaaggaatgctgatcgggatctctagcggtgccacgctcgcggcaattgcacagaagctgcctgacctcgccgccggcacccggatcatgggcttcaactacgacacgggcgagcgttacctgtccgtaccggacttcctgccggtggagtaa

SEQ ID NO: 699 - protein, 306 aa, Erythrobacter sp. NAP1
MKATSILETIGNTPHIRLSRMFPDHEVWLKSERANPGGSIKDRIALAMVEDAEASGALKPGGTIVEPTSGNTGIGLAMVAAVKGYTLVLVMPESMSIERRRLMLAYGATFDLTPKEKGMKGAIERATEIVETTEGAWMPSQFDNGSNPAVHARTTAKEILGDFADNPIDVMITGVGTGGHLTGCAEELKKSWSDFKAYAVEPVGSPVISGGEPGPHPIQGIGAGFIPGNLHTNAIDGAIKVDPEDAKEMARRAAREEGMLIGISSGATLAAIAQKLPDLAAGTRIMGFNYDTGERYLSVPDFLPVE

SEQ ID NO: 700 - DNA, 969 bp, Synechococcus sp. RS9917
  CDS (1)..(969): transl_table=11
atgccgatcgccgacgacatcactgcgctggtgggtcgcacccccttggtgcggctcaaccgtttaccggccgcctgcggttgccaggcggagatcctggcgaagctggaaagtttcaatcccaccgcctcggtgaaagatcggatcgccggggcgatggtgcaggcagcggaggccagtggcacgatccagcccgggcgcaccgtgctggtggagcccaccagtggcaacaccggcatcgctctggccatggtggccgccgcccgcggctaccggctgatcctcaccatgcccgacacgatgagcacggagcgccgttccatgctccgggcctacggcgccgaacttcagctcactccaggggtggagggaatgcagggggcgattgcccttgcgcgtcagctcgtggcggagatccccggggcctatctgctgcagcagttcgacaatccggccaaccctgccgtccatgcggccaccaccgctgaagaaatctgggctgacaccggccgcgccctggatgccttcgtggccggcgttggcaccggcggcaccctcaccggctgcgcccaggtgctcaagcgccgttgcccgggcctgcaggtggtggcggtggagcctgcggcgagccaggtgctggcgggtggggcccccggcccccaccggatacagggcatcggcgccggttttgtgcctccggtgctcgaggctgggttgatcgatgagattctggccatcagcgatgaggaggcgatggcgatgggtcgccgtctggcccgggaggagggactgctcagtggcgtcagcagtggtgcggcggtggcggcagcgctccggatcggccagcgtccggcgatggccggccgccgcatcgtggtgatcctcgccagcttcggggagcggtatctctccacgccgatgttcagcagcgcgcctgcgccaccagcccgtggggatggtcagttgtga

SEQ ID NO: 701 - protein, 322 aa, Synechococcus sp. RS9917
MPIADDITALVGRTPLVRLNRLPAACGCQAEILAKLESFNPTASVKDRIAGAMVQAAEASGTIQPGRTVLVEPTSGNTGIALAMVAAARGYRLILTMPDTMSTERRSMLRAYGAELQLTPGVEGMQGAIALARQLVAEIPGAYLLQQFDNPANPAVHAATTAEEIWADTGRALDAFVAGVGTGGTLTGCAQVLKRRCPGLQVVAVEPAASQVLAGGAPGPHRIQGIGAGFVPPVLEAGLIDEILAISDEEAMAMGRRLAREEGLLSGVSSGAAVAAALRIGQRPAMAGRRIVVILASFGERYLSTPMFSSAPAPPARGDGQL

SEQ ID NO: 702 - DNA, 987 bp, Synechococcus sp. RS9917
  CDS (1)..(987): transl_table=11
atgtctcgcgtttacgccgataacagccaggccatcggcaacacccccctggttcgcctcaaccacgtgaccaagggttgcaaagccaccgtgctcgccaaggttgagggccggaaccccgcctacagcgtcaagtgccggatcggcgccaacatgatttgggacgccgagaaacgcggcgtgctcagcgaaggcaaaacgatcgttgagcccacctccggcaacaccggcatcgccctggccttcaccgctgcagcccggggttacaaactcgtactcaccatgccggagtcgatgtcgatcgagcgtcgccgcgtgatggcggtgcttggcgccgagatcgtgctcaccgaagccgccaagggcatgccgggcgcgatcgccaaggccaagcagatcgccgagagcgatccggccaagtacttcatgcccggtcagttcgagaaccccgccaaccccgagattcacgagaaaaccaccggtcctgaaatctggaacgactgcgacggcgccatcgatgtgctcgtggccggtgtcggcaccggcggcacgatcaccggcgtgtcgcgctacatcaagaaccaggccggcaaggcgatcgaatccgtggcggtggaaccggcccacagccccgtgatcacccagaccctcaatggggaagaggtgaagcctggtccccacaaaatccagggcatcggcgccggcttcattcccaagaacctcgatctctccgtggtcgacaaggtggagcaggtcaccaacgaggaatcgattgcaatggcccttcgcctcgccaaagaagaaggtctgctggtgggcatctcctgtggtgctgccgctgcagccgccatccgcctcgcccagcaggacgcctacgccggcaaaacgatcgtggtggtgctgcccgacctggccgagcgctatctctcctcggtgatgttcgcggatgtgcccaccggcatcatcgagcagcctgtcgccgtctga

SEQ ID NO: 703 - protein, 328 aa, Synechococcus sp. RS9917
MSRVYADNSQAIGNTPLVRLNHVTKGCKATVLAKVEGRNPAYSVKCRIGANMIWDAEKRGVLSEGKTIVEPTSGNTGIALAFTAAARGYKLVLTMPESMSIERRRVMAVLGAEIVLTEAAKGMPGAIAKAKQIAESDPAKYFMPGQFENPANPEIHEKTTGPEIWNDCDGAIDVLVAGVGTGGTITGVSRYIKNQAGKAIESVAVEPAHSPVITQTLNGEEVKPGPHKIQGIGAGFIPKNLDLSVVDKVEQVTNEESIAMALRLAKEEGLLVGISCGAAAAAAIRLAQQDAYAGKTIVVVLPDLAERYLSSVMFADVPTGIIEQPVAV

SEQ ID NO: 704 - DNA, 1026 bp, Synechococcus sp. WH 5701
  CDS (1)..(1026): transl_table=11
atgggcatccgccagggaccctgcacccaggcaggcatcagccagggttttgttgaagccgtcggcaacacccccctgattcgtctgcgcctgctcagcgacctgaccggttgcgagatcctcggcaaggcggagttcatgaaccccgggggctccgtcaaagaccgcgctgccctcggcatcctgctggaagcggaggagtcgggcgctctgcaaccgggcggcaccgtggtcgaaggcacggccggcaacaccggcatcggcctcacccacctctgcaatgcccgcggctaccgcagcttgatcgtcatccccgacacccagtcggctgagaagatcgggctgctgcgcagccttggcgcggaggtgcgcaccgtcccggcggtgccctaccgcgaccccaacaactacgtgaagctctcgggccgcatcgccgccgaaatcccgggtgccatctgggccaatcagttcgacaacctggccaaccgccgcgcccattacgccagcaccggccctgagatctgggagcagaccggcggccgcatcgacgcctgggtgtcggccaccggcaccggcggcacctatgccggcgtggccctgttcctgaaggagcgctccgagcgggtgcgctgcgtgctggccgatccccacggcagcgccctccatgcctgggccaccggcgccgggctgaaggccgagggcagctcgatcaccgagggcatcggcaacagccgcgtcaccgccaacctcgagggggcaccgatcgacgatgcggtgcgcatcgacgaccagagcgccctcgagaccatctaccagttgctctggcgggaagggctgttcatgggcggctcggtgggcatcaacgtggcggcggcggtggaaacggcccgccggctcgggcccggccacacgatcgtcaccgtgctctgcgacagcggtgatcgctaccgctcccgcctctacgatgccgactggctcgcctcccgcggactgagccagccccgccgagagcgggttccggcctga

SEQ ID NO: 705 - protein, 341 aa, Synechococcus sp. WH 5701
MGIRQGPCTQAGISQGFVEAVGNTPLIRLRLLSDLTGCEILGKAEFMNPGGSVKDRAALGILLEAEESGALQPGGTVVEGTAGNTGIGLTHLCNARGYRSLIVIPDTQSAEKIGLLRSLGAEVRTVPAVPYRDPNNYVKLSGRIAAEIPGAIWANQFDNLANRRAHYASTGPEIWEQTGGRIDAWVSATGTGGTYAGVALFLKERSERVRCVLADPHGSALHAWATGAGLKAEGSSITEGIGNSRVTANLEGAPIDDAVRIDDQSALETIYQLLWREGLFMGGSVGINVAAAVETARRLGPGHTIVTVLCDSGDRYRSRLYDADWLASRGLSQPRRERVPA

SEQ ID NO: 706 - DNA, 987 bp, Synechococcus sp. WH 5701
  CDS (1)..(987): transl_table=11
atggcgtcgatttttgctgacagcagcctgagcatcggccgcacgcccctggtgaagctgaaccgggtggtcggcgacagccgcgccaccgttctcgccaagatcgagggccgcaatcccgcttattcggtcaagtgccgcatcggcgccgcgatgatctggcaggccgagaaagatggccggctcggtccgggcaaggagctgatcgagcccaccagcggtaacaccggcatcgccctggcctttgtggccgcatccagggggatccccctcaccctgacgatgccggaatcgatgagtctggagcggcgcaagctgctcacggcctacggcgccaagctcgtactcaccgagggcaaactcggcatgaccggtgcggtgggccgggcccatgagatcgccgcctccgatcccgagcgttacgtgctgctgcagcagttcgccaacccggccaacccccagatccaccacgacaccaccggcccggaaatctggaacgacaccgatggtcaggtggatgtgctggtggcgggggtgggcacaggtggcaccatcaccggcgtcagccgttatttcaagaccacccggggccagaagctgctctcagtggcggtggagcctgtgaacagcccagtgatcgcccaggccagggcaggcgagccaccccagcccgggccccacaagatccaggggatcggtgccggtttcgtccccgagaacctcgatctggatctggtggaccgggtcgaagcggtcagcgaccaggaggccgtggccatggccagacgcctgatgcgcgaagagggcatcctggctggcatctcctgcggggccgccaccgtggccgccctgcggctggccgccgaggaggaattcgccggcaagacgatcgtggtggtcctgccggactccggggagcgctatctgagctcggtgctgtttgagggggtgttcgatgcggccggtctggctccggtcgagcggtga

SEQ ID NO: 707 - protein, 328 aa, Synechococcus sp. WH 5701
MASIFADSSLSIGRTPLVKLNRVVGDSRATVLAKIEGRNPAYSVKCRIGAAMIWQAEKDGRLGPGKELIEPTSGNTGIALAFVAASRGIPLTLTMPESMSLERRKLLTAYGAKLVLTEGKLGMTGAVGRAHEIAASDPERYVLLQQFANPANPQIHHDTTGPEIWNDTDGQVDVLVAGVGTGGTITGVSRYFKTTRGQKLLSVAVEPVNSPVIAQARAGEPPQPGPHKIQGIGAGFVPENLDLDLVDRVEAVSDQEAVAMARRLMREEGILAGISCGAATVAALRLAAEEEFAGKTIVVVLPDSGERYLSSVLFEGVFDAAGLAPVER

SEQ ID NO: 708 - DNA, 951 bp, Synechococcus sp. WH 7805
  CDS (1)..(951): transl_table=11
atggcgattgccccaaacatcacaaccctggtggggagaactccaatggttcggctcaaccgcctgcctcaggcctggggatgcacggccgacatcgtggccaagttggagagtttcaatcccacggcgtcggtgaaggatcggattgccggcgccatggtggaagccgcagagaacgacggcacgattgcagcggagcggaccgttctggtggaacccactagtggcaacaccggaattgccttggcgatggtggccgcggctcgcggataccggttgatcctcacgatgcccgacaccatgagcaccgaacgtagggcgatgctcagagcctatggcgctgagcttcagctcacacctggtgagcagggcatgcaaggggcgatcgaacgggcccgggaactcgtgcaggagatccccggggcctatctgcttcagcagttcgacaatcccgctaatcctgcggtgcatgctgcatcaacggcggaggagatctgggcggatacagatggtgccttggatggactcgtggccggggtcggcaccgggggcaccatcaccggttgtgcccgggtcctcaagagtcgactcccaaagcttcgggtggtcgccgtggagccggccgccagtccggtgctgggcggcggcgtcgccggaccgcatcgtcttcagggaatcggcgctggattcattcctcctgtcttggatatggatctgatcgatgaggtcatcgcggtgagcgacgatgaagccatggaggttggtcggcgtctcgctcgtgaagaggggctgctttgcggcgttagcagcggtgccgtcgtcgctgctgctcttcagatcgggcagcgtccggttatggagggacggcgcattgtggtgatcctggccagctttggtgagcgctacctttccacaccgatgttcagcgcagcaggtgatcctgatgcctga

SEQ ID NO: 709 - protein, 316 aa, Synechococcus sp. WH 7805
MAIAPNITTLVGRTPMVRLNRLPQAWGCTADIVAKLESFNPTASVKDRIAGAMVEAAENDGTIAAERTVLVEPTSGNTGIALAMVAAARGYRLILTMPDTMSTERRAMLRAYGAELQLTPGEQGMQGAIERARELVQEIPGAYLLQQFDNPANPAVHAASTAEEIWADTDGALDGLVAGVGTGGTITGCARVLKSRLPKLRVVAVEPAASPVLGGGVAGPHRLQGIGAGFIPPVLDMDLIDEVIAVSDDEAMEVGRRLAREEGLLCGVSSGAVVAAALQIGQRPVMEGRRIVVILASFGERYLSTPMFSAAGDPDA

SEQ ID NO: 710 - DNA, 987 bp, Synechococcus sp. WH 7805
  CDS (1)..(987): transl_table=11
atgtcccgcgtttacgccgacaacagccaggccatcggcaacacacccctggtgcgtctgaatcacgtgaccaaaggctgcaaagccaccgtgctcgccaaggtagaagggcgcaaccccgcctacagcgtgaagtgccgcattggcgccaacatgatctgggacgctgaaaagcgtggggagctaacagatggcaaggtaattgttgagcccacctcagggaataccggaatcgccttagcgttcaccgcagcggcccgcggttacaagctcgtactcaccatgccggagtcgatgtcgatcgagcgtcggcgtgtgatggccgttctcggagctgagattgttctcaccgaagccgccaaaggtatgcccggggccatcgccaaggccaaggaaatcgctgacagcgatccagccaagtacttcatgcctggtcagttcgataatccggctaacccggatatccatttcaaaaccactggccctgaaatctggaacgactgcgacggagccattgatgtactggtgtcgggggtcggcaccggcggcacgatcaccggcgtgtcccgttacatcaagaatgaggctggcaaagccatcgaatctgtggctgtggaacccagtcacagccctgtgatcacccagaccctcaacggtgaggaagtgaagccaggtccccacaagatccagggcattggcgctggtttcatccccaaaaacctcgatctctccatcgtcgacaaggtggagcaggtcacgaacgaggaatcgatcgccatggctctgcgcttggccaaggaagaaggcttgcttgtcggcatctcctgcggcgcggcggcggccgccgccattcgtctggctcagcaagacgactacgccggcaaaactatcgtggtggtgctgcctgatctagccgagcgttacctgtcttcagtgatgttcgctgaagtccccgctggaatcatcgagcaacctgtccctgcctga

SEQ ID NO: 711 - protein, 328 aa, Synechococcus sp. WH 7805
MSRVYADNSQAIGNTPLVRLNHVTKGCKATVLAKVEGRNPAYSVKCRIGANMIWDAEKRGELTDGKVIVEPTSGNTGIALAFTAAARGYKLVLTMPESMSIERRRVMAVLGAEIVLTEAAKGMPGAIAKAKEIADSDPAKYFMPGQFDNPANPDIHFKTTGPEIWNDCDGAIDVLVSGVGTGGTITGVSRYIKNEAGKAIESVAVEPSHSPVITQTLNGEEVKPGPHKIQGIGAGFIPKNLDLSIVDKVEQVTNEESIAMALRLAKEEGLLVGISCGAAAAAAIRLAQQDDYAGKTIVVVLPDLAERYLSSVMFAEVPAGIIEQPVPA

SEQ ID NO: 712 - DNA, 969 bp, Pseudoalteromonas tunicata D2
  CDS (1)..(969): transl_table=11
atgtctaagatttttaatgataattcacttacgattggtaatacacctcttgtcaaattaaaccgcgttactactggtaatgtcttcgctaaaatcgaagcccgtaatccaagtttcagcgtgaagtgccgcattggcgcatcaatgatttgggaagctgagaaatcaggccaacttaccaaagataaagaaattattgagccaacatctggtaatacaggtatagcacttgcttttgttgcagcttcacgtggttacaagttaacactcacaatgccaagcaccatgagcttagaacgccgtaaattattaaaagcgttaggcgctaatttagtattaactgaagggccaaaaggaatgaaaggtgcaattgaaaaagcacaagaaatccaacaagccgagccaaataagtttgttttattacaacaatttgaaaatccagccaatcctaaaattcattttgaaacaactggacctgaaatctttgaagcaaccgatggcaacattgatttcttcgtagccggtgttggtactggtggtacgattacaggtgtaagccgttatcttaaacttgaaaaaggcttagccgttaaagctatcgctgttgaacctgttgattcaccagttatttctcaaaaattagcaggacaagaaatcaaacctggtccacacaaaattcaggggattggtgcaggttttattcctggcaaccttgatttagaaatgctggatggtgttgaacaagtatcaaatgaagaagcgattgctacggcgcatcgtttaatgaaagaagaaggcattttagctggtatttcatcaggcgctgctgttgctgctgcaatccgtattgctgaaaaaccggaaaatgcaggtaagaatattgtggttatattaccaagctctgcagagcgctatttatcttctccattattctcagaagagtttagcgatcaagaacttgtacagtaa

SEQ ID NO: 713 - protein, 322 aa, Pseudoalteromonas tunicata D2
MSKIFNDNSLTIGNTPLVKLNRVTTGNVFAKIEARNPSFSVKCRIGASMIWEAEKSGQLTKDKEIIEPTSGNTGIALAFVAASRGYKLTLTMPSTMSLERRKLLKALGANLVLTEGPKGMKGAIEKAQEIQQAEPNKFVLLQQFENPANPKIHFETTGPEIFEATDGNIDFFVAGVGTGGTITGVSRYLKLEKGLAVKAIAVEPVDSPVISQKLAGQEIKPGPHKIQGIGAGFIPGNLDLEMLDGVEQVSNEEAIATAHRLMKEEGILAGISSGAAVAAAIRIAEKPENAGKNIVVILPSSAERYLSSPLFSEEFSDQELVQ

SEQ ID NO: 714 - DNA, 969 bp, Neptuniibacter caesariensis
  CDS (1)..(969): transl_table=11
atgaacatttacgaagataactcccttacgattggtaacacgccactggttcacctgaagcgactggctccaggcctgaatattttcggtaagattgaatctcgcaacccagcaggctcggtaaaatgtcgtatcggtgcaaatatgatctggtcagccgagaaaagtggcgcccttaagccgggcatgaccatggttgagccaacaagtggcaacaccggtatcgcattggcatttgtcgctgcatcccgaggctatgacattgtattcacgatgccttcttccatgagcctggaacgacgtaagatcatgaaagcactgggggctacgattgttctgacagaacctgctaaaggcatgaaaggtgcaattgagaaagctcaggagatcgttgatcaaaaccctgacacccatatgatgctgcagcagttcgagaatcctgctaaccctgagatccatgagaaaacaacgggtcctgagatctggaatgataccgatggcaccgttgatattctggttgctggtgtaggtactggcggtactatcacgggtacctcccgctacattaagaaagaacagggtaaagcgatcacctctgttgctgttgaacctgtggactctcctgttatcacacaaacaattaatggcgatgaagttaaaccttctccgcacaagattcagggcattggggcaggctttgtaccaaagaaccttgatcttgagctcgtcgatcaggttgaacaggttagcaatgaagacgctattgctaccgcacgcctgctgatggaaaaagagggtattatggcgggtatctcttgtggcgcggctctgtgcgcagcccttcgtgtagcaaaacaaccgggtaacgaaggcaaaaacattgtcgttattttgccagactctggtgagcgatacctttcttccgctctgtttgaaggtatgttcagcgataacgagatggttcaataa

SEQ ID NO: 715 - protein, 322 aa, Neptuniibacter caesariensis
MNIYEDNSLTIGNTPLVHLKRLAPGLNIFGKIESRNPAGSVKCRIGANMIWSAEKSGALKPGMTMVEPTSGNTGIALAFVAASRGYDIVFTMPSSMSLERRKIMKALGATIVLTEPAKGMKGAIEKAQEIVDQNPDTHMMLQQFENPANPEIHEKTTGPEIWNDTDGTVDILVAGVGTGGTITGTSRYIKKEQGKAITSVAVEPVDSPVITQTINGDEVKPSPHKIQGIGAGFVPKNLDLELVDQVEQVSNEDAIATARLLMEKEGIMAGISCGAALCAALRVAKQPGNEGKNIVVILPDSGERYLSSALFEGMFSDNEMVQ

SEQ ID NO: 716 - DNA, 900 bp, Neptuniibacter caesariensis
  CDS (1)..(900): transl_table=11
atgagcacttacttcccgaccatcgaagattatgttggcaaaacgccgcttgtacgtttgcaacgtatcggtcaggccaatggcaatattattctctgtaaactggaagggaacaatccggccggatcggtaaaagaccgccctgcattgagtatgatccagcgagctgaggatcgtgggcaaataaagcctggtgatactttgatagaggctacttctgggaataccgggatcgctttggcgatggcagcagccattaaaggctacaagatgaaactgatcatgcctgacaatagcagcgaggagcgtaaggcttcgatgactgcttatggtgctgagctaattccagtcactaaagaagaaggtatggaaggtgcgcgtgatctggccttggcgatgcaggagcgtggtgaagggatcgtactggatcaattttccaatatggataacccagaggctcactattgtggaactgggcctgaaatctgggaacagacccaaggcaaagtaactcactttgtaagttcgatggggaccacaggcactattatgggcacttcgcgcttccttaaagagcaaaacccggatgtgcagattgtaggcctgcaacctagcgaaggtgctcaaataccggggattcgtcgctggccacaagaatatctccctaaaatattcgatgagaaccgagtggaccgcattttagatattaatcaggatgatgctgagaatacgatgcgtgctttggcacaggaagagggtattttctgtggtgtttcttccggagggtccgtagctggagccttacgcttagctgaagaggtagaaaatgcggttatcgtttgcattatctgtgatcgtggcgaccgttacctgtccacaggcgtgtttaatcagaactaa

SEQ ID NO: 717 - protein, 299 aa, Neptuniibacter caesariensis
MSTYFPTIEDYVGKTPLVRLQRIGQANGNIILCKLEGNNPAGSVKDRPALSMIQRAEDRGQIKPGDTLIEATSGNTGIALAMAAAIKGYKMKLIMPDNSSEERKASMTAYGAELIPVTKEEGMEGARDLALAMQERGEGIVLDQFSNMDNPEAHYCGTGPEIWEQTQGKVTHFVSSMGTTGTIMGTSRFLKEQNPDVQIVGLQPSEGAQIPGIRRWPQEYLPKIFDENRVDRILDINQDDAENTMRALAQEEGIFCGVSSGGSVAGALRLAEEVENAVIVCIICDRGDRYLSTGVFNQN

SEQ ID NO: 718 - DNA, 1017 bp, Flavobacteria bacterium BBFL7
  CDS (1)..(1017): transl_table=11
atggaatacgtagaaaatatattaggtacaatagggaatacacctctagttaagatgaataaactagtagaggatttaccatgtctagtacttgcaaagtatgaaacctttaacccaggtaactcgactaaagatcgcatgggattaaaaatggttgaagatgctgaagctgatggacgattaaaaccaggaggaaccatcatcgaaggaactagtggtaacactggtatgggacttgctctagcggcaattatgaaaggttataagctgatctgtgttcttgcagataagcagtctaaagaaaaaatggatattctacgagctgtaggagctgaggtttatgtgtgtccaactaatgtagagccagatgatccacggtcttattattctactagtaagcgattgagtgaagagatacctaattcatggtatgtgaatcaatatgataatccttcaaatgcacaagcgcattatgaaagtactggtccagaaatctggaaacagacagatggaaaaattacccattttgtggtaggtgtaggtaccggcggaacgattagtggagtaggaaaatatcttaaagagcaaaatcctaatataaaaattcacggtattgatacttatgggtcagtatttaaaaagtatcatgaaaccggaatctttgacgagaatgaaatttactcatatgtaactgaaggaataggagaagatatcttgcctaaaaacgtgaactttgagatcatagatcactttactaaagtgactgataaagacgcagcaatctacacgagaagattagcaaaagaagaaggaatgtttctagggaatagtgctgggtctgcaattaaaggtttaagacagattcataaagaatatggttttacaaaagatgatgtggtagtagtgttgtttcatgatcatggtagtcgttatgtagggaaatttttcaacgatgactggatgcttgaaaaaggatatattaatgaagatggctcatatcctcaagaggataactag

SEQ ID NO: 719 - protein, 338 aa, Flavobacteria bacterium BBFL7
MEYVENILGTIGNTPLVKMNKLVEDLPCLVLAKYETFNPGNSTKDRMGLKMVEDAEADGRLKPGGTIIEGTSGNTGMGLALAAIMKGYKLICVLADKQSKEKMDILRAVGAEVYVCPTNVEPDDPRSYYSTSKRLSEEIPNSWYVNQYDNPSNAQAHYESTGPEIWKQTDGKITHFVVGVGTGGTISGVGKYLKEQNPNIKIHGIDTYGSVFKKYHETGIFDENEIYSYVTEGIGEDILPKNVNFEIIDHFTKVTDKDAAIYTRRLAKEEGMFLGNSAGSAIKGLRQIHKEYGFTKDDVVVVLFHDHGSRYVGKFFNDDWMLEKGYINEDGSYPQEDN

SEQ ID NO: 720 - DNA, 1041 bp, Flavobacteria bacterium BBFL7
  CDS (1)..(1041): transl_table=11
atgaataaagacataaaagcttacgatagtgtgctagatcttataggtgaaactccacttattaaactatccactacaacagctaatttcactggagaattttttgcaaaagttgaagcattcaatccaggacactcctcaaaggatagaatagcacttcatataattgaagaagcagaacgtaaaggaatattaaaacctggtgatactattatcgaaactacatctggtaatacaggttttagtatagcaatggttagtcgtattaaaggatatgattgtattctagcggtaagttctaagtctagcgcagataaaatagatatgcttaaatctatgggtgcaaaggtttatgtatgtcctgcacatgtcagtgcagacgatccacgcagctactatgaagttgcaaagcgtttacatgaggaaattaaaaatagtatttatatcaatcaatacttcaatgagctcaatatagaagctcattataagagtactggtcctgaaatctgggaacaaacgggtggacagattacacacttagtagcttgtagcggtactggtggaactatatctggtacagcacgttttcttaaagagcaaaatcctgatattgaaatattaggtgtcgatgcatatggtagtgtattaaagaaatatcacgaaaccaaagaatttgattctgaagaaatatatccataccgtattgaaggactaggtaaaaacttaattcctacagctacagattttgatagcattgactactttgttaaagtaaaggatgaagatgccgcacatatggctcgcaaaatctcgcagactgaaggtcttttcgtaggttacaccagtggtgcagcgatgcaagcggtaaaacttctcaatgatgaaggacgttttgatgaaaattcaaaagtcgtaatcattttcccagatcatggttctcgatatatgagtaagatttataacgatcaatggatgcaagatcaaggcttctttgactcaaaatctactgctacaaagcaacctatcgaatatatcaagtaa

SEQ ID NO: 721 - protein, 346 aa, Flavobacteria bacterium BBFL7
MNKDIKAYDSVLDLIGETPLIKLSTTTANFTGEFFAKVEAFNPGHSSKDRIALHIIEEAERKGILKPGDTIIETTSGNTGFSIAMVSRIKGYDCILAVSSKSSADKIDMLKSMGAKVYVCPAHVSADDPRSYYEVAKRLHEEIKNSIYINQYFNELNIEAHYKSTGPEIWEQTGGQITHLVACSGTGGTISGTARFLKEQNPDIEILGVDAYGSVLKKYHETKEFDSEEIYPYRIEGLGKNLIPTATDFDSIDYFVKVKDEDAAHMARKISQTEGLFVGYTSGAAMQAVKLLNDEGRFDENSKVVIIFPDHGSRYMSKIYNDQWMQDQGFFDSKSTATKQPIEYIK

SEQ ID NO: 722 - DNA, 939 bp, delta proteobacterium MLMS-1
  CDS (1)..(939): transl_table=11
atgagcgcaagccctgaaatcccggccagcgtggccggcctggtgggcgacaccccgctgttacgactggaacatatgagccgggagtgcggcgccgagattctggtcaagctggagtcacacaacccgatcttcagtgtcaaggaccgcattgccctggccatgctgacggcggcccgtcggcaggggctgatccagcccaccaccaccatcatcgaacccaccagcggcaacaccggcattgccctggccatgctctgcgccgcccaaagcctgcgcctgactttgaccatgccggaaaccatgagcgtggagcggcgggccctgctgcgccatctgggcgccaaactggtactgacccccggcccggaagggatgaaaggggccattgcccgggccgaggagttggccgccgccgacaccgacaccttcatccccaaccagttcaccaaccccgccaatccggagatccaccgccggaccaccgccgaggagatctggcgggccaccggcggggagcttgacctgttcgtggccggggtcggcaccggcggcaccatcaccggggtgggcgaagtcatcaaggagcgcctgcccggcttcaaggccttcgccgttgaacccgccgcttccccggtgctctccggcggcgctccgggaccgcataagatccagggcatcggggccggctttatcccggcggtgctcaacaccggcatcatcgacgaggtcatccaggtcagcaacgaggacgccattgccagcgcccggttgctggcggcccgggaaggggtgctggccggaatttcctccggggccaatctttacgccgccatgcagatcgccgcccgccccgagtttaaaggcaaacggatcgtcaccgtggtctgcgacaccggcgagcgctatctgagcaccgatctattccttaccgagtaa

SEQ ID NO: 723 - protein, 312 aa, delta proteobacterium MLMS-1
MSASPEIPASVAGLVGDTPLLRLEHMSRECGAEILVKLESHNPIFSVKDRIALAMLTAARRQGLIQPTTTIIEPTSGNTGIALAMLCAAQSLRLTLTMPETMSVERRALLRHLGAKLVLTPGPEGMKGAIARAEELAAADTDTFIPNQFTNPANPEIHRRTTAEEIWRATGGELDLFVAGVGTGGTITGVGEVIKERLPGFKAFAVEPAASPVLSGGAPGPHKIQGIGAGFIPAVLNTGIIDEVIQVSNEDAIASARLLAAREGVLAGISSGANLYAAMQIAARPEFKGKRIVTVVCDTGERYLSTDLFLTE

SEQ ID NO: 724 - DNA, 894 bp, Oceanobacter sp. RED65
  CDS (1)..(894): transl_table=11
atggattatcccactattgccgactttgttggcaacaccccattagttaagcttcagcgattggggcgtcagtctagcaataccattcttctaaagcttgagggtaataacccggcaggttcagttaaggatagaccagcgttaagtatgatcacggaagctgaagcccgtggagacatccaacctggcgataacctaatagaatctactagtggtaatacgggtattgcgctagccatggcagcagcgatgaaaggttacaatatgacattgatcatgcccgataacctgagcatggagagacgctgggcaatggaagcatacggagcggagctcatattggtgaccaaagacgaaggtatggagggggctcgcgacctggccttgaagatgcaagaggaaggtaaggggaaggtgttggatcaattcggtaatcaagataacccgcttgcccattataagggcacgggtcccgagatctggcgagatacaaaaggtactattacccactttgttagttccatgggaacaactggcactatcatgggcaccagtcgttatttgaaagaacagaacccaaatattcagattgtcggcttgcagccaaaagaaggcgctgcaattcctggtattcgtcgttggccagaagcttatttgccaaaaatatttgacgctacccgtgttgaccaagtgttagacattggtcaagaagaagcagaagtcaccatgcgagaattggccatgaaagaaggtattttctgcggggttagttctggtggttcggtagcagcggcattaaagttagatgaagagttggaaaatgcggtgattgtttgcattatttgtgacagaggcgaccgttatttatccactggcgttttttctacagagtga

SEQ ID NO: 725 - protein, 297 aa, Oceanobacter sp. RED65
MDYPTIADFVGNTPLVKLQRLGRQSSNTILLKLEGNNPAGSVKDRPALSMITEAEARGDIQPGDNLIESTSGNTGIALAMAAAMKGYNMTLIMPDNLSMERRWAMEAYGAELILVTKDEGMEGARDLALKMQEEGKGKVLDQFGNQDNPLAHYKGTGPEIWRDTKGTITHFVSSMGTTGTIMGTSRYLKEQNPNIQIVGLQPKEGAAIPGIRRWPEAYLPKIFDATRVDQVLDIGQEEAEVTMRELAMKEGIFCGVSSGGSVAAALKLDEELENAVIVCIICDRGDRYLSTGVFSTE

SEQ ID NO: 726 - DNA, 936 bp, Desulfitobacterium hafniense DCB-2
  CDS (1)..(936): transl_table=11
atgtcgaaaatcgccagaagtttaactgacctaattggcaataccccattattggaactgtccaattacaataggaccactgaattagaggctaaggtcatagcaaaacttgaatactttaaccctctttccagcgtcaaagacagaattggctacgccatgatcaaagacgcggaagagaaaggattgctgaacaaggatacggtcattattgagcccaccagtggcaatacaggaattgccttggcttttgtatccgctgcccgtggctatcgcttgattttaaccatgcctgaaaccatgagcgtggaaagaaggaacctgctcaaggctttgggagcggagctggtgctgactccaggaccggccggcatgaaaggagctattcaaaaagctgaggaattagctgctgaatataagaattcctttataccacagcagttcaacaatccggctaacccggaaattcataggcaaaccaccgctgaagagatctggagagatacagatggagaagtggatatctttgtggccggagtgggcaccggcggaacggtaaccggtgtgggtgaagccctgaagcagaagaaaccgggggtaaaagttatcgcggtggaaccggcagattcaccggtgctgtcgggaggaactcccggagctcataagattcagggtattggtgccggatttgtccccggtgtctatagctcagaagtcatcgatgaaattttccaggtcaaaaatgaggaagcttttgagacctctcgaaaactttcgaagacggaaggtctgctggttgggatttcctcaggtgctgcggcttatgcggcgacccaaatcgccaagagaccggaaaataaaggaaagaacatcgtcgttctactcccggatacgggggaaagatatctctccacggtcttattccaagaaggttga

SEQ ID NO: 727 - protein, 311 aa, Desulfitobacterium hafniense DCB-2
MSKIARSLTDLIGNTPLLELSNYNRTTELEAKVIAKLEYFNPLSSVKDRIGYAMIKDAEEKGLLNKDTVIIEPTSGNTGIALAFVSAARGYRLILTMPETMSVERRNLLKALGAELVLTPGPAGMKGAIQKAEELAAEYKNSFIPQQFNNPANPEIHRQTTAEEIWRDTDGEVDIFVAGVGTGGTVTGVGEALKQKKPGVKVIAVEPADSPVLSGGTPGAHKIQGIGAGFVPGVYSSEVIDEIFQVKNEEAFETSRKLSKTEGLLVGISSGAAAYAATQIAKRPENKGKNIVVLLPDTGERYLSTVLFQEG

SEQ ID NO: 728 - DNA, 969 bp, Synechococcus sp. RS9916
  CDS (1)..(969): transl_table=11
atggtgattgcctccgacatcacggccctggtgggacgcacgcctttggtgcgtctcaatcgtttgcctgcagccagtggttgcagggctgagctggtggcaaagctggaaagtttcaaccccaccgcctcggtcaaagaccggatcgccggggccatggtgcaggcggcagaagaggcgggcacgatctcaccagggcgcacggtgctggtggagcccaccagcggcaacaccgggatcgccttggcgatggtggcagcagcccgggggtaccgcctgattctcaccatgcccgacaccatgagcaccgagaggcgggcgatgttgcgggcctacggggcagaactgcagctcactccgggtactgaagggattcagggggcgattgacctggctcgggaactggtggatgaaatccctgaggcctacctgctgcagcagttcgccaaccctgccaaccccgcgatccacgcccgcaccaccgctgaagagatctgggctgacaccgaaggccagctggatgtgctggtggcaggggtgggcactggaggcacgatcaccggttgcggacgtctgctgaagcagcgtcatccaggtttgaaggtggtggcggtggagcctgcgggcagcgcggtgctcagcggtcagcccccaggcccccatcgcattcagggcatcggtgccggttttgtccccccagtgctggaccgtgacctcattgatgaggtgatggctgtcagtgatgaggaggcgatggtgatcggtcgtcgcctggcccgggaggaagggttgctcagtggtgtcagcagtggtgcggccgtggcggctgctcttcaactcggtcagcggccggagctggaaggcaaacggattgtggtgatcctcgccagcttcggtgagcgctatctctccacaccgatgttcagctcggccctgccgttgcccccgcggctggatggtcagttgtga

SEQ ID NO: 729 - protein, 322 aa, Synechococcus sp. RS9916
MVIASDITALVGRTPLVRLNRLPAASGCRAELVAKLESFNPTASVKDRIAGAMVQAAEEAGTISPGRTVLVEPTSGNTGIALAMVAAARGYRLILTMPDTMSTERRAMLRAYGAELQLTPGTEGIQGAIDLARELVDEIPEAYLLQQFANPANPAIHARTTAEEIWADTEGQLDVLVAGVGTGGTITGCGRLLKQRHPGLKVVAVEPAGSAVLSGQPPGPHRIQGIGAGFVPPVLDRDLIDEVMAVSDEEAMVIGRRLAREEGLLSGVSSGAAVAAALQLGQRPELEGKRIVVILASFGERYLSTPMFSSALPLPPRLDGQL

SEQ ID NO: 730 - DNA, 987 bp, Synechococcus sp. RS9916
  CDS (1)..(987): transl_table=11
atgtctcgcgtttacgccgataacagccaggcgatcggcaacacccctctggtgcgcctgaacaatgtcaccaagggctgcaaagccaccgtgctggccaaaatcgaaggccgcaaccccgcctacagcgtcaagtgccgcatcggcgcgaacatgatctgggacgccgagaagcgtggcgcgctcacggctgacaaaaccatcgtcgagcccacctccggcaacaccggtatcgctctggcttacaccgcagcagcccggggttacaagctgatcctgacgatgcccgagtcgatgtcgatcgagcgtcgccgcgtgatggccgctctgggtgctcagctgatcctcactgaagctgccaaaggcatgcctggcgccatcgccaaggccaaggaaatcgctgaaagcgattcagccaaatacttcatgcccggtcagttcgagaatcccgccaaccccgagattcacgaaaagaccaccggccctgaaatctggaacgactgcgacggtgccatcgacgtgctcgtgtctggcgtgggcaccggcggcaccatcaccggcatctcccgctacatcaagaacagcgctggcaaagcgatcgaatcggtcgcggtggagcccagccacagcccggtgatcacccaaaccatgaatggtgaggaggtgaagcccgggccccacaagatccagggcatcggtgccggcttcatccccaaaaacctcgacctttccgtggtcgacaaggtggagcaggtgaccaacgaggagtcgattgagatggctctgcgcctcgcccaggaggaaggccttctagtgggtatctcctgcggtgccgctgctgctgctgccatccgcctcgcccagcaggacgcctacgccggcaaaaccatcgtggtgatcctgcccgacctggccgagcgttatctctcctccgtgctgtttgccgacgtacccgcaggcatcatcgaggagcctgttgccgtctga

SEQ ID NO: 731 - protein, 328 aa, Synechococcus sp. RS9916
MSRVYADNSQAIGNTPLVRLNNVTKGCKATVLAKIEGRNPAYSVKCRIGANMIWDAEKRGALTADKTIVEPTSGNTGIALAYTAAARGYKLILTMPESMSIERRRVMAALGAQLILTEAAKGMPGAIAKAKEIAESDSAKYFMPGQFENPANPEIHEKTTGPEIWNDCDGAIDVLVSGVGTGGTITGISRYIKNSAGKAIESVAVEPSHSPVITQTMNGEEVKPGPHKIQGIGAGFIPKNLDLSVVDKVEQVTNEESIEMALRLAQEEGLLVGISCGAAAAAAIRLAQQDAYAGKTIVVILPDLAERYLSSVLFADVPAGIIEEPVAV

SEQ ID NO: 732 - DNA, 969 bp, Alteromonadales bacterium TW-7
  CDS (1)..(969): transl_table=11
atgtctactatttttgaagataactcacttagtatcggtaatacaccactggtaaaacttaaacgtgttacaggtgggaatgtattcgctaaagtggaagcgcgtaacccaagctttagtataaaatgccgcattggtgcatcgatgatttgggaggctgaaaaagcaggtcagctaactgagggtaaagaacttatcgagcctacatcaggtaatacaggtattgcattggccttcgttgccgcagcacgtggttataaactaacgcttaccatgcctaacactatgagcttagagcgtcgtaaacttctaaaagcactgggtgccaaccttgtgcttacagacggcgctaaaggtatgaatggtgcaatccaaaaagcaaaagagattcaagccaccgatcctgaaaagtatatcttgctacagcagtttgagaatccagcaaacccaaaaatacactttgagactacaggtccagaaatttttgatgctcttgacggaaaagtagattactttgtagcaggcgtaggtactggcgggactataacaggtgttagtcgctaccttaaaacagagaaaggtctaaatgttaagtctattgctgttgagccaactaattcgccagtgatcagccaaacactcgccggtgaagaagttaagcctgggccacataaaatccaaggtattggcgcaggatttatccctggaaacctagacatgagcctaatagatgctgcagagcaagtatctaacgaagatgcaattgcaatggcacatgagctaatgaaaaaagaaggtatactagtgggtatttcatcgggcgctgctgtagtggcagcaaaacgtattgctgaaaaaccagaaaatgccgacaaaaatattgttgttattttaccaagtgccactgaacgttacttatcaagcccgctatttgatgaggaatttagtgaccaagagcttgttcaataa

SEQ ID NO: 733 - protein, 322 aa, Alteromonadales bacterium TW-7
MSTIFEDNSLSIGNTPLVKLKRVTGGNVFAKVEARNPSFSIKCRIGASMIWEAEKAGQLTEGKELIEPTSGNTGIALAFVAAARGYKLTLTMPNTMSLERRKLLKALGANLVLTDGAKGMNGAIQKAKEIQATDPEKYILLQQFENPANPKIHFETTGPEIFDALDGKVDYFVAGVGTGGTITGVSRYLKTEKGLNVKSIAVEPTNSPVISQTLAGEEVKPGPHKIQGIGAGFIPGNLDMSLIDAAEQVSNEDAIAMAHELMKKEGILVGISSGAAVVAAKRIAEKPENADKNIVVILPSATERYLSSPLFDEEFSDQELVQ

SEQ ID NO: 734 - DNA, 966 bp, marine gamma proteobacterium HTCC2143
  CDS (1)..(966): transl_table=11
atggccgcttttaatgacaacagtttagcaataggtcaaacccctttggtgcgattaaaccgaataggtgatggcaacattttcgccaaggtagagagccgcaaccccgccaactgcgtgaagtgccgtatcggctccaatatgatttgggaagccgaaaagtcaggcttactgaaacctggaatggaaatcgttgaacccaccagcggcaataccggcattgcactgtcatttgttggcgctgccagaggttacaaagtcacattggttatgcctcacacaatgagcctagagcgacgccagctgatgaaagctcttggtgccaatgttgttatcaccgacgctgcgaaaggcatcaaactttgcatcgataccgcccaacaattagtcgctgaggcacccgaccagcgctggatgcccagtcaatttgataatcctgccaatcccgctatccatgagcaaacaacggggcccgagatctgggaagatactgatggcggcgttgatgttctcatctgcggtgttggcacaggtggcacgctaaccggtatctcgcgctaccttaaaaacactcggggtaaagcgataacctcagttgctgttgaacctatgtcgacaacgatgatcaccgcagccaaagccggtgaagagcccgtacatggccctcacaaagtccagggcatcggtgccggatttgttcccgccaaccttgatctggacatggttgatcaagttgagcaggtcagcgacgaagacgctatcgagtatgcccatcgattaatgaaagaagaaggcatactcgccggcatatccagtggcgccgctgcggccatcgcccatcgcgtttcacagcagcccgaacacaaaggtaaaaccatcgttgtgatcttacccgactcagcagaacgctacctttcaacccccttatttgaaggtcagtttagtgacaatgaaacagttcaataa

SEQ ID NO: 735 - protein, 321 aa, marine gamma proteobacterium HTCC2143
MAAFNDNSLAIGQTPLVRLNRIGDGNIFAKVESRNPANCVKCRIGSNMIWEAEKSGLLKPGMEIVEPTSGNTGIALSFVGAARGYKVTLVMPHTMSLERRQLMKALGANVVITDAAKGIKLCIDTAQQLVAEAPDQRWMPSQFDNPANPAIHEQTTGPEIWEDTDGGVDVLICGVGTGGTLTGISRYLKNTRGKAITSVAVEPMSTTMITAAKAGEEPVHGPHKVQGIGAGFVPANLDLDMVDQVEQVSDEDAIEYAHRLMKEEGILAGISSGAAAAIAHRVSQQPEHKGKTIVVILPDSAERYLSTPLFEGQFSDNETVQ

SEQ ID NO: 736 - DNA, 1008 bp, marine gamma proteobacterium HTCC2143
  CDS (1)..(1008): transl_table=11
atgacaagtcataacacgttaccggatatgatcggcaatacaccgctggtctatttgcgcgaggtttcggaagcaaccggctgcgaaatttacgggaaggccgaattccttaatcccggcggatcaatcaaggaccgaaccgcactggggatcatccgcgatgctgaaaccaaaggacaattgcatcctggtggcactattgtcgagggcacagcgggtaatacaggcattgggttaacactaattgccaatgctttaggctacaaaagtgttgtcgttatgccgcaaactcagagcaaagaaaagatcgaaatactcgatttatatggtgccgacttacggctggtcaaagccgcccgttacgacgaccccaaacactatgttcaccaagcccaacgattggccgaaaagctaaataaaacctgtgaaaacggcgccatttgggcagggcagttcgacaacctggctaatatggacatacatagccgtacaaccggtgaagaaatatggcaacaaactaacggtaaagtggatggatttatctgcgccgctggcacgggaggaaccttagcaggtgtttctaatgcgctgaagactcatagttcagccatcaaaattggcattgccgacccaatgggctcgtctctttacaattactacaacagcggtgaactcaagtcagaggggcgttcaatatccgaagggatcggcatcagtattgttacggaaaacattaaacaggcaatcgttgacatggcctaccaaataagtgatgaagaagcgctaccctatatttacagccttcttaaacatgaaggtctctgtctcggtggctcttcagccatcaatattgcaggggcagtccatctcgccaatgaaatggggcccgggcacaccatagtcaccatactatgcgactacgggaatcgataccaaagcaaattatataaccctgcttttttgcgaagaatgaaattacccgtcccgcaatggctcgatgataaatag

SEQ ID NO: 737 - protein, 335 aa, marine gamma proteobacterium HTCC2143
MTSHNTLPDMIGNTPLVYLREVSEATGCEIYGKAEFLNPGGSIKDRTALGIIRDAETKGQLHPGGTIVEGTAGNTGIGLTLIANALGYKSVVVMPQTQSKEKIEILDLYGADLRLVKAARYDDPKHYVHQAQRLAEKLNKTCENGAIWAGQFDNLANMDIHSRTTGEEIWQQTNGKVDGFICAAGTGGTLAGVSNALKTHSSAIKIGIADPMGSSLYNYYNSGELKSEGRSISEGIGISIVTENIKQAIVDMAYQISDEEALPYIYSLLKHEGLCLGGSSAINIAGAVHLANEMGPGHTIVTILCDYGNRYQSKLYNPAFLRRMKLPVPQWLDDK

SEQ ID NO: 738 - DNA, 906 bp, marine gamma proteobacterium HTCC2143
  CDS (1)..(906): transl_table=11
atggaattcccaacgattgaagattatgtgggcggcagtcctcttgttagattgcagcgtattaacggcactacgtcctctaatactattctccttaaactagagggtaataacccggccggttcagttaaagatagacctgcgctcagtatgataaatcgggcggaagcgcgcggtgatattaaagcaggggacacgctaatagaggcgacaagcggcaatactggtattgcactagcgatggtggcagcaatcaaagggtacaacctaaagctgattatgccatcccacatgagccaggagagaaaattagcgatggctgcatacggtgcagagcttatcgatgtaacccagaaagagggcatggaaggagccagagatttggcgttgcagatgcaagctgatggtcagggcgtcgttttggaccagtttgctaatgtggataatccaatggcacattacgagggaacggggcctgaaatatggcgtcaatcgcaaaaaagagttacccattttgtcagttctatggggacaacaggcacgattatgggtgtgtcgaaatttttaaaagagcaaaatcccaacatcgaaattgtcggattgcagccctgtgacggatcaagtattccggggatacggcgctggccagaggcgtatcttcctagtattttcgaacgcacgcgtgttgaccgggttatagatgtcgatcagcgggatgctgaagtaatgatgaagcgacttgcggcagaagagggtgttttttgcggtgtgtcgtccggagggtccgttgttggtgctctgaagattgccgaacatgttgaaaatgcagtgattgttgcaattatctgcgatcgtggtgatcgctatctgtcaacgggtgtttttgattcaacgttacagaaatga

SEQ ID NO: 739 - protein, 301 aa, marine gamma proteobacterium HTCC2143
MEFPTIEDYVGGSPLVRLQRINGTTSSNTILLKLEGNNPAGSVKDRPALSMINRAEARGDIKAGDTLIEATSGNTGIALAMVAAIKGYNLKLIMPSHMSQERKLAMAAYGAELIDVTQKEGMEGARDLALQMQADGQGVVLDQFANVDNPMAHYEGTGPEIWRQSQKRVTHFVSSMGTTGTIMGVSKFLKEQNPNIEIVGLQPCDGSSIPGIRRWPEAYLPSIFERTRVDRVIDVDQRDAEVMMKRLAAEEGVFCGVSSGGSVVGALKIAEHVENAVIVAIICDRGDRYLSTGVFDSTLQK

SEQ ID NO: 740 - DNA, 1011 bp, marine gamma proteobacterium HTCC2080
  CDS (1)..(1011): transl_table=11
atgaatgcaatctgttcgaccgtgcttgatgctatcggcgatacacctatggtgtcgctagcagcatttggtaaagacacattgccgcacttgtacgccaagcttgagtgtacaaatccgggtggcagcatgaaggaccgtgctgcaaaaggtatgatcgagtgggcagagcgggagcacaacttaacctcgggtgccagaattgtcgtatgtacgtctggcaacatgggtgttggcatggcaatggtctgtgccgtaaagggttatcaactcatgtgtttggttgatgccaaaattaaccccgcaactgaaaattgcttgcgagtcttgggcgctgaggtcattaaagtttatcagcgtgatgaaaccgggggctatcacctcacacggctgagcaaacttgattcggttcttgcggagtatcccgacgcaatttacctagatcaatacgatagccctgcggcggtgatgtcgcacagcacgtcaacggggccggaaatctacaatgcgtttcaggggcaggtgcgagccattgtcatggtggctggtacgggcgggagctccatgggcattgcgcgtttttttaaagagcactctccccaaactgacatttggctggttgatgaggccggctctcttgcactgccgggtaatgggggtgcaagccctaggcatctcaatggcatgggtaccagtattgcaccggccaattacgggccagctgactttcacacgtttatcgatcatgttgtttacgtgaatgcagaagacagtattcgtgcggctattgaattggcacgctgtgagggtatcttggtcgggggctcgggcggtgctgctgtacaggtcatgcgcgacgttgctgccgcgcattatggtgctgacgacaatctagttgccttgttacctgatcatggtagtcgatacaccgaaacacagttcgatcctgattggcttgcggcacgaggtataaacgtgccagagattttcaatgtggaagatgagtcttaa

SEQ ID NO: 741 - protein, 336 aa, marine gamma proteobacterium HTCC2080
MNAICSTVLDAIGDTPMVSLAAFGKDTLPHLYAKLECTNPGGSMKDRAAKGMIEWAEREHNLTSGARIVVCTSGNMGVGMAMVCAVKGYQLMCLVDAKINPATENCLRVLGAEVIKVYQRDETGGYHLTRLSKLDSVLAEYPDAIYLDQYDSPAAVMSHSTSTGPEIYNAFQGQVRAIVMVAGTGGSSMGIARFFKEHSPQTDIWLVDEAGSLALPGNGGASPRHLNGMGTSIAPANYGPADFHTFIDHVVYVNAEDSIRAAIELARCEGILVGGSGGAAVQVMRDVAAAHYGADDNLVALLPDHGSRYTETQFDPDWLAARGINVPEIFNVEDES

SEQ ID NO: 742 - DNA, 1053 bp, marine gamma proteobacterium HTCC2080
  CDS (1)..(1053): transl_table=11
gtgtctgacatttatcaaacgcaaggccgagggcaactttacggagatataacacgtacggtaggcgacacaccctgcgtcaagctcaatcgcatagcacccgatcacgtcgaggtttacgtcaaggtcgaatccttcaacccgttgggctcagtgaaggaccggcttgcgctgaatataattgaggcggcagagcgcagcggccaactcaagccggggcaaactgttgtcgaggccacctcggggaataccggcatcggactggcgatggtttgtgccgcgcgaggttaccccctggtgatcaccatggcagacagcttttccattgagcgccgtcggcttatgcggttcctaggtgccaaagttgttctcaccccaaaggccgaaaaaggcattggcatgtatcgcaaagcgcgccagcttgcagccgacaatggctggttctttgcggcccagtttgaatcgaacgccaatgcggatattcatgaggcgacaacgggccccgagatcgtggctgattttgccgattcacgacttgattactgggtctcgggttatggcactggcgggacggtttcaggcgtcgcgcgggtacttcgcaaagagcggcccgaatgcaaaatcattctttccgagccccataccgcgaccttgataggatcaggagaggctcaggtgcgcaacgatgacggatcacccaacggcagtcaccccgcttggtctccccacctcattcagggctggacacccgactttattccactggtcctacaggaaagcattgatcacaacggcttcgatgagattcttccggtcgatgccgaagacgggatgacttgggccaaaaggctggccactgaagaaggcatactcaccggtgtctcggggggctccactttagcaaccgccatggaggttgctgctggtgccgaagccggctcagtcatgttggttatgttgcccgatacgggggaacgctatctctcaacaccactgtttgaagctatccccgctgaaatgacgccagaggagcaggcgctagccgacagctaa

SEQ ID NO: 743 - protein, 350 aa, marine gamma proteobacterium HTCC2080
MSDIYQTQGRGQLYGDITRTVGDTPCVKLNRIAPDHVEVYVKVESFNPLGSVKDRLALNIIEAAERSGQLKPGQTVVEATSGNTGIGLAMVCAARGYPLVITMADSFSIERRRLMRFLGAKVVLTPKAEKGIGMYRKARQLAADNGWFFAAQFESNANADIHEATTGPEIVADFADSRLDYWVSGYGTGGTVSGVARVLRKERPECKIILSEPHTATLIGSGEAQVRNDDGSPNGSHPAWSPHLIQGWTPDFIPLVLQESIDHNGFDEILPVDAEDGMTWAKRLATEEGILTGVSGGSTLATAMEVAAGAEAGSVMLVMLPDTGERYLSTPLFEAIPAEMTPEEQALADS

SEQ ID NO: 744 - DNA, 894 bp, Marinobacter sp. ELB17
  CDS (1)..(894): transl_table=11
atgtattttccaaccattgaagattatgttggtaaaaccccgctggttcgcctgcagcgcctgccaggcgataccagtaatgtcatccttgccaaactggaaggtaataatccggccggttcggtcaaagatcggcccgcgattagcatgatccaacaagccgaaatccgcggcgacatcaagcccggcgataccctgatcgaagccaccagcggtaataccggtattgccctggctatggcggcggcgataaagggttaccgcatggtgttgattatgccctccaatatgagcgaagagaggcgcgcgtccatgcgcgcttatggcgccgaaattattgcggtgagcaaggaagacggtatggaaggcgcccgcgatctggccgaacgcatgcaggccgaaggcaaaggcaaggttctggaccagttcgccaatgctgacaacccactggcgcactaccgcaccaccggccctgaaatctggcagcagaccaatggccgggtaacccatttcgtggcctctatgggcaccacgggcacggttatgggcgtgtcccgctatttgaaagagcgcaaccccgacgtccgcattgttggcctgcaaccgagcgagggcgcggccataccgggcattcggcgctggccagaagcctatatgcctaaaatttttgatgccaaggcggttgatcaggtaatggatattggtcaggtcgaggccgaaaccacgatgcgcgcgctggccgaaaaagaaggtattttttgcggtgtatcgtctggcggttccatcgccgcggcgctgcgactttcccaaacgcttgaaaacgccgttatcgtgggcattatctgtgaccgtggtgaccgctacctgtctaccggcgtatttcctggcgcctga

SEQ ID NO: 745 - protein, 297 aa, Marinobacter sp. ELB17
MYFPTIEDYVGKTPLVRLQRLPGDTSNVILAKLEGNNPAGSVKDRPAISMIQQAEIRGDIKPGDTLIEATSGNTGIALAMAAAIKGYRMVLIMPSNMSEERRASMRAYGAEIIAVSKEDGMEGARDLAERMQAEGKGKVLDQFANADNPLAHYRTTGPEIWQQTNGRVTHFVASMGTTGTVMGVSRYLKERNPDVRIVGLQPSEGAAIPGIRRWPEAYMPKIFDAKAVDQVMDIGQVEAETTMRALAEKEGIFCGVSSGGSIAAALRLSQTLENAVIVGIICDRGDRYLSTGVFPGA

SEQ ID NO: 746 - DNA, 855 bp, Bacillus sp. SG-1
  CDS (1)..(855): transl_table=11
atgggaattcctgagggtgtcaggttatttgcgaagctggaatactttaacccgggaggcagcattaaggaccgtttaggcgtcaaactgattgcgagtgctgaacagtcaggtgctcttcaagctggcggaacaattatagagccgacagccggaaatactgggataggcattgctcttgctgcagttggaaaaggctataaagtgatatttgtggtccctgaaaagttcagcgtggaaaaacaaacactcatgcgagcgttgggagcggaagtggttaatacaccaacagaactggggatgaagggcgctatccaaaaagcgaaagaactaagtcaagaaattgaaggttcatactgtccgcagcaatttgacaacccttccaatccggagacatactttgaaacacttggtccggaaatttacagtgccttgaatgggaaagtggatgtatttgttgctggaggaggaacaggcggcacctttatgggaacagcgagataccttaaagagaagaacccatccgtaaagacggtcatcgtcgaaccggaaggatccattctgaatggcggggaatcaggccctcataaaacagaagggatcgggatggaatttcttccatcctatatggatacaaactactttgatgaaatttatacaattagagatgcagatgcatttagagctttaaaagaacttgctcttaaggaaggcctgcttgtggccagttcatcaggtgcagcttttgtagcggcattggaggaagcgaaaaaagctgaaaaaggaacgaacattgtgaccatttttccggacagcagtgaacgttacttaagtcaaggaatttacgaggagtga

SEQ ID NO: 747 - protein, 284 aa, Bacillus sp. SG-1
MGIPEGVRLFAKLEYFNPGGSIKDRLGVKLIASAEQSGALQAGGTIIEPTAGNTGIGIALAAVGKGYKVIFVVPEKFSVEKQTLMRALGAEVVNTPTELGMKGAIQKAKELSQEIEGSYCPQQFDNPSNPETYFETLGPEIYSALNGKVDVFVAGGGTGGTFMGTARYLKEKNPSVKTVIVEPEGSILNGGESGPHKTEGIGMEFLPSYMDTNYFDEIYTIRDADAFRALKELALKEGLLVASSSGAAFVAALEEAKKAEKGTNIVTIFPDSSERYLSQGIYEE

SEQ ID NO: 748 - DNA, 930 bp, Bacillus sp. SG-1
  CDS (1)..(930): transl_table=11
atgaaagttgttcaaaatatagctgatttaatcggtgataccccgctcgtcaaactgaatcgcctcaatcctgagggtggagcggatatatacgtaaagcttgaattctacaatccaagtaaaagtgttaaagaccgtgccgcttttcaaatgatcttggaagcggaaaaagccggactattgaaagaaggttctaccattatagagccgacaagcgggaataccgggattgggcttgcgatgaatgcggctgctcgaggataccgctcaatccttgttatgccggacacgatgacacaagagagaatcaatctcctgaaagcctatggggctgaagttgtgctgacccctggcgacgagaaaatgccaggtgccatacagaaggcgaaagaactgacagctgaaattgaaaacagttttatgccgatgcagtttgaaaatgaatccaatccaaatgcacaccgcaagacaactgccgttgagatcattgaagcgatggatgaactcggcaagccattatccgcattcgtcgccactgccggtaccggcggaacgatcacagggacaggagaagtactaaaagagcattataacgatattgaggttcatgtagtagagcctgcgggttcaccggtcctttccggcgggcagccaggcaaacataaactagttggtacaagtccgggattcattccggaaatcttgaatcaggatgtttatgatgaaattcataaaatcgaggatgaagatgcttacgatatcgcacgccgcatggcaagcgaagaaggtatccttgttggcccttcttcaggtgctgcctgctatgctgccatccaggtagcgaaaaagctatcaccggatgacgtcgtggtttgtattgcttgtgacacaggtgaacgctacctttcaagtgacttgttccgattctaa

SEQ ID NO: 749 - protein, 309 aa, Bacillus sp. SG-1
MKVVQNIADLIGDTPLVKLNRLNPEGGADIYVKLEFYNPSKSVKDRAAFQMILEAEKAGLLKEGSTIIEPTSGNTGIGLAMNAAARGYRSILVMPDTMTQERINLLKAYGAEVVLTPGDEKMPGAIQKAKELTAEIENSFMPMQFENESNPNAHRKTTAVEIIEAMDELGKPLSAFVATAGTGGTITGTGEVLKEHYNDIEVHVVEPAGSPVLSGGQPGKHKLVGTSPGFIPEILNQDVYDEIHKIEDEDAYDIARRMASEEGILVGPSSGAACYAAIQVAKKLSPDDVVVCIACDTGERYLSSDLFRF

SEQ ID NO: 750 - DNA, 921 bp, Erythrobacter sp. SD-21
  CDS (1)..(921): transl_table=11
atgaaagcccagtccgtcctcgaaaccatcggcggcacgccgcacatccgcctctcgcgcctgttccccgaccacgaggtctgggtaaagagcgagcgcgccaaccccggcggatcgatcaaggaccgcatcggcctcgccatggtcgaggatgccgaaaaggccggcaagctgaagcccggcggcacgatcatcgagccgaccagcggcaacaccggcatcggcctcgccatggcggccgcagtcaagggttacaaactcgtgctcgtcatgcccgaaagcatgagcatggagcgccgccgtctgatgctggcctatggcgccaccttcgatctcacgcccaaggagggcggcatgaagggcgccatttcgcgcgcggccgaactggtcgagcagaccgacggcgcatggatgccgagccagttcgaaaatccgagcaacttcgaagtccacaagcgcaccaccgcaaaagaaatcctcgacgatttctccgacagtccgatcgacgtgatgatcaccggcgtcggcaccggcggccacctcaccggctgcgccgaggtgctgaaggaaacctggcccgaaatgctcgcctatgctgtcgagcccactctctcgcccgtcatcagcggcggcgatcccggcccgcacccgatccagggcatcggcgcaggcttcgtgcccgaaaacctccacacggacgctatcgacggcgcgatccaggtcgaaccggaagacgccaaggaatgggcacgccagtgcgccgcgaaggaaggcctcctagtcggcatttcgagcggcgcgacgctggcggcgattgcgaagaagctgccagagcttgaggctgggagccgggtgatgggcttcaattacgacacgggcgagcggtatttgtcagtgccggacttcctgccgaccgaataa

SEQ ID NO: 751 - protein, 306 aa, Erythrobacter sp. SD-21
MKAQSVLETIGGTPHIRLSRLFPDHEVWVKSERANPGGSIKDRIGLAMVEDAEKAGKLKPGGTIIEPTSGNTGIGLAMAAAVKGYKLVLVMPESMSMERRRLMLAYGATFDLTPKEGGMKGAISRAAELVEQTDGAWMPSQFENPSNFEVHKRTTAKEILDDFSDSPIDVMITGVGTGGHLTGCAEVLKETWPEMLAYAVEPTLSPVISGGDPGPHPIQGIGAGFVPENLHTDAIDGAIQVEPEDAKEWARQCAAKEGLLVGISSGATLAAIAKKLPELEAGSRVMGFNYDTGERYLSVPDFLPTE

SEQ ID NO: 752 - DNA, 1017 bp, Erythrobacter sp. SD-21
  CDS (1)..(1017): transl_table=11
atgacacagatccccgtacgcgagcgcacgctcgacctcatcggcaacaccccgctcgtccgtcttgccgggccgagcgaggaagccggctgcgatatctacggcaaatgcgaattcgccaaccccggcgccagcgtgaaggaccgcgccgcgctctatatcatccgtgatgccgaggcgcgtggcgagctgaaaccgggcggctgcgtggtggaaggcaccgcgggcaacaccggcatcggcatcgcgctggtcgctaacgcgctgggctatcgcacgatcatcgtgatgcccgacaaccagagccgcgagaagatgcagaccctgcgcgctctgggggcggagctggtgaccgtgccgccgaccaaatacgccgatccgcagcatttccagcacgtctcgcgccggatggcggaagaaaccgatggcgcgatctgggcgggccagttcgacaacattgccaatcgcaaggcgcatatcgaaggcaccgccaaggaactttgggagcagctggaaggccggatcgacggtttcacctgcgcagcgggcaccggcggcaccatcgccggtgtcggcatggggctgaaggaactggacgagaccgtcactatcgcgctgaccgatccgcatggtgcggcgctctacaattactacgccaatggcgaattgaagggcgagggctcctcggtcgcggagggaatcgggcagggccgcatcaccggcaatctcgaaggcgctccgatcgacacgcagttccgtatttcggacgaggaggggctgaactgggtctcccgcctgctgcgcgaggaaggtttgtgcctcggcctgtcgagcgggatcaacgttgccggcgcggtggcgctgggcagacatctggttgccgaggggcgcgagaactcgagggttgcaaccatcctgtgcgacacgggcttccgctatctctccacgctctataacgcggactggttgcgctcgaaggacttgccggtgttcgactggctcgaggacagcgattga

SEQ ID NO: 753 - protein, 338 aa, Erythrobacter sp. SD-21
MTQIPVRERTLDLIGNTPLVRLAGPSEEAGCDIYGKCEFANPGASVKDRAALYIIRDAEARGELKPGGCVVEGTAGNTGIGIALVANALGYRTIIVMPDNQSREKMQTLRALGAELVTVPPTKYADPQHFQHVSRRMAEETDGAIWAGQFDNIANRKAHIEGTAKELWEQLEGRIDGFTCAAGTGGTIAGVGMGLKELDETVTIALTDPHGAALYNYYANGELKGEGSSVAEGIGQGRITGNLEGAPIDTQFRISDEEGLNWVSRLLREEGLCLGLSSGINVAGAVALGRHLVAEGRENSRVATILCDTGFRYLSTLYNADWLRSKDLPVFDWLEDSD

SEQ ID NO: 754 - DNA, 894 bp, Moritella sp. PE36
  CDS (1)..(894): transl_table=11
atggaactgctagatttaattggtaatacgccgttaattaatctgagctttctaagcccacagcctgagcgtgtcagcttgtttgctaaagccgagtggatgaatcccggcggttcacttaaagaccgctcggtgaaactgatcctaacgcgcgccattgaagacggcctgttacaaccaggtaaaataattctcgattccagtagcggtaatgccggtatttcttacagcatgattggcgcagcgctcggctatgcggtcaacatcgtgatccccgacaatgccagcaacgaaagaaaaatgcgtctgcgagcccatggtgcgcagctgatcgagaccgatgcgttagaaggttacgatcaagccattcgtcatgtgcatgaattatatgccaactcaccagataaatatttctttgctgaccaatacagtaatcaagccaatgtgcttgcacattaccatggcacaggcgcggaactcatcgaacaggtatcaggtcccattacccattttgtctgtggtgtcggcactggcggctccttaacgggcatcgctaggcggctaaaagccaagtatccggcggttgtcatcgtgggtattcgccccgagcgttggccgggtatcgaaggcctgaaacccttgggcgaaaaagaagatatcttaccgaaaatttttgacggttctttggttgatcgttggcttgatgtgagcgccaatgaagccaaaagcatgtgtcttactatggcccgtcgaggttattttgtcgggcaatcgtcgggggcataccttgcgggctgctgtaaattaatggcggagctgtcagagggagtcgtgaccaccttaatgtgtgacagtggcgagcgttatttcagtacgggattgtggcaatcatga

SEQ ID NO: 755 - protein, 297 aa, Moritella sp. PE36
MELLDLIGNTPLINLSFLSPQPERVSLFAKAEWMNPGGSLKDRSVKLILTRAIEDGLLQPGKIILDSSSGNAGISYSMIGAALGYAVNIVIPDNASNERKMRLRAHGAQLIETDALEGYDQAIRHVHELYANSPDKYFFADQYSNQANVLAHYHGTGAELIEQVSGPITHFVCGVGTGGSLTGIARRLKAKYPAVVIVGIRPERWPGIEGLKPLGEKEDILPKIFDGSLVDRWLDVSANEAKSMCLTMARRGYFVGQSSGAYLAGCCKLMAELSEGVVTTLMCDSGERYFSTGLWQS

SEQ ID NO: 756 - DNA, 969 bp, Moritella sp. PE36
  CDS (1)..(969): transl_table=11
atgagccaaattttacaagacaacagtttttcaattggtaatacaccgctagtgcgtttaaaccgtgtgacgacaggcaacgtatttgcaaaagtagaaagccgtaatccaagtgcaagtgttaaatgccgtatcggtgccaacatgatctggcaagcagagaaagacggtctcttaaaagaaggcattgatatcgttgaaccaacaagtggtaataccggtattgcgttagcatttgttgccgctgctcgtggttataaactcacattaacaatgccaaacacgatgagccttgagcgtcgtaaactgcttaaagcattaggtgcgaacctcgtattaacagatggcgctaaaggcatgaaaggcgcgattgataaagccacagaaattcgtgacgcaaaccctgaaacaacgattttattacaacagtttgaaaacccggctaacccagcgatccatgagcaaacaacgggcccagaaatctgggaagcaactgacggtcaaattgacgtattagtatcaggtgtaggtactggtggtacgatcaccggtgtaagccgttacattaaactaaataaaggtaaagacttagtatctgttgccgttgagccaacgaactcacccgttattacccaagcgaaagccggtgaagcattaacgcctggtccacataagatccaaggtattggtgcgggcttcattcctggtaacctagatttagaaatggttgaccgtgtagagctagtatcaaacgaagactctatcgaaatggcacaacgtctaatgaaagaagaaggtatcttagcgggtatttcttctggtgcagctgttgttgccgcagcacgtttagctgcattaccagaattcgctgataaaaatatcgttgtaatcttaccatcgtcaggtgagcgttatttaactacagcgttatttgatggcgtatttactgagcaagagctccaacaatag

SEQ ID NO: 757 - protein, 322 aa, Moritella sp. PE36
MSQILQDNSFSIGNTPLVRLNRVTTGNVFAKVESRNPSASVKCRIGANMIWQAEKDGLLKEGIDIVEPTSGNTGIALAFVAAARGYKLTLTMPNTMSLERRKLLKALGANLVLTDGAKGMKGAIDKATEIRDANPETTILLQQFENPANPAIHEQTTGPEIWEATDGQIDVLVSGVGTGGTITGVSRYIKLNKGKDLVSVAVEPTNSPVITQAKAGEALTPGPHKIQGIGAGFIPGNLDLEMVDRVELVSNEDSIEMAQRLMKEEGILAGISSGAAVVAAARLAALPEFADKNIVVILPSSGERYLTTALFDGVFTEQELQQ

SEQ ID NO: 758 - DNA, 951 bp, Opitutaceae bacterium TAV2
  CDS (1)..(951): transl_table=11
atgtcagcccagttatttcccgacatcgtttccaccattggcaacacgcccctgatcaaactcggacggattgccgcgaagctgcctggaaaaatttacatcaaaaacgagttcatgaacccgtgttcgagcgtcaaagatcgcatcggacgcgccatgatcgaggccgcggaacgcgatggactcatcggacccgaaagcgtcatcgtcgagccgacctccggtaacaccggcatcgccctcgcctttgtgtgcgcccagcgcggatacaaactcatcctcaccatgcccgagacgatgtccctcgaacgccgcgtgctcctgcgcatgttgggcgccgaactcgttctcacgcccgcgtcggaaggcatgccgggggcgattgccaaggcgcacgacatcctctcccagcatggcgcgcgcggttacatgccccagcaattcgaaaaccccgccaaccccgaaatccaccgacgcaccacggcggaagagatttgggaggccaccggcggcaagatcgatgcctttgtttccggcgtcggcaccggcggcaccatcaccggcgtcgccgaagtcatcaaatcacgcgcccccctccgcgccatcgctgtcgaaccggccgccagcgcggtattgtccggcggcaagcccggacgtcacatgatccaagggatcggagccgggtttattcccaagaattgcaatacctccatcatcgacgagattatcaaggtaagcgacgacgacgccctcaacaccgcccgccagttggccgtggaggagggcatcctcggcggcatctcaacgggcgccaacgtctgggccgccttgcaagtggccgcccgcccggagttcgagggcaagaccattgtcaccattgcgtgcagttgcggcgagcgttacatctccaccagcctcgccgagcgcgcctggcaggaagtccgggtgtag

SEQ ID NO: 759 - protein, 316 aa, Opitutaceae bacterium TAV2
MSAQLFPDIVSTIGNTPLIKLGRIAAKLPGKIYIKNEFMNPCSSVKDRIGRAMIEAAERDGLIGPESVIVEPTSGNTGIALAFVCAQRGYKLILTMPETMSLERRVLLRMLGAELVLTPASEGMPGAIAKAHDILSQHGARGYMPQQFENPANPEIHRRTTAEEIWEATGGKIDAFVSGVGTGGTITGVAEVIKSRAPLRAIAVEPAASAVLSGGKPGRHMIQGIGAGFIPKNCNTSIIDEIIKVSDDDALNTARQLAVEEGILGGISTGANVWAALQVAARPEFEGKTIVTIACSCGERYISTSLAERAWQEVRV

SEQ ID NO: 760 - DNA, 978 bp, Opitutaceae bacterium TAV2
  CDS (1)..(978): transl_table=11
atgcccgaatccactgactccatctccgcgcccggttcctttcgctggcaaatctacgatgacatcaccgccgccattggccgcacgccgctcgtgcgcctgcgccgcctcgcgccgcccggcggtgcggaactcgttgccaaggtcgaggggaccaacccgctgggcagcgtgaaagaccgcatcggggccgccatgattgccgccgccgagcgcgacggcaaactgcaacccggcggcaccgtgatcgaaccgacctccggcaacaccggcatcggcctcgcctttgcctgcgccgcgcgcggctaccgactcatcctgaccatgccggaaagcatgtccatcgaacgccgcaagctcgtgcagatgctcggcgccgaactcgttctcacgcccgccgacaagggcatggccggctccgtggacaaggcgcgtgaactgcaccgtcgcatcaagggcagcttcctgcccatgcaattcgaaaacccggccaacccccaagcccaccgcgagacgaccgccgaggaaatctgggccgacacggcgggccgtgtggacctcttcgttgcgggcgtgggcacgggcggcacgatcaccggcgtcgccgaggtgctcaagtcccgcaagccctcggtgcgcgccatcgcggtcgaacccgaggcctcgcccgtgctctccggcggccgccccggtccgcatcgcatccagggcatcggcgcgggtttcgtgcccccggtgctcaaccgcaaaattgtcgatgaagtcattgcggtgcgcaacgaggacgccttcgccaccgcgcagcgcgtgggtctggaggagggcatcctctgcggcatctccagcggcgcggcggtgtgggcggcgctgcaactcgccgcacgcccggagaacacgggcaaactcatcgtcgtcatcctccccgactccggggaacgctacctcacgacccagctcgccgacgtgtctcgggagtga

SEQ ID NO: 761 - protein, 325 aa, Opitutaceae bacterium TAV2
MPESTDSISAPGSFRWQIYDDITAAIGRTPLVRLRRLAPPGGAELVAKVEGTNPLGSVKDRIGAAMIAAAERDGKLQPGGTVIEPTSGNTGIGLAFACAARGYRLILTMPESMSIERRKLVQMLGAELVLTPADKGMAGSVDKARELHRRIKGSFLPMQFENPANPQAHRETTAEEIWADTAGRVDLFVAGVGTGGTITGVAEVLKSRKPSVRAIAVEPEASPVLSGGRPGPHRIQGIGAGFVPPVLNRKIVDEVIAVRNEDAFATAQRVGLEEGILCGISSGAAVWAALQLAARPENTGKLIVVILPDSGERYLTTQLADVSRE

SEQ ID NO: 762 - DNA, 978 bp, Opitutaceae bacterium TAV2
  CDS (1)..(978): transl_table=11
atggctcgcatctataacgacatcaccgagacgattggcaatacaccgctcgtccgcctcaaccgcaccgccgccgctcatggcgcccaagccgagatccttctcaaactggagttctttaatccgctctcctccgttaaggaccgcatcggtttcgccatgatcgacgaggccctgaaatccggccgtatcaacaaggacacgatcctcatcgaacccacctccggcaacaccggcattgcgctcgcctttgtcgccgccgccaagggtctcaagcttatcctcaccatgcccgagacgatgtcgctcgaacgccgcaagctcttgaaagttctcggcgccaagctcgttctcaccgaaggcagcaagggcatgaagggcgccatcgccaaggccgaggaactcaacaagcagatcgccaacagcgtcgtgctccagcaatttgccaatcccgacaatcccgaaatccaccgcaagacgaccgccgaggaaatctggcgcgacaccgatggcgcagtcgattttgtcgtttcgggcgtcggcaccggcggcaccatcaccggcgtcggcgaagtgctcaaatcccgcaagcccggcgtcaaactcgtcgccgtcgaacctgccggctcccccgtcctttccggtggcaaccccggcccgcacaagcttcagggcatcggcgctggcttcattccctcggtgctcaacaccaagatcatcgacgaaatcatccaggtgaaggaagacgactcggggcccatttccaagcaagtgaacacccttgatggcattcccatcggcatttcgtccggcgcggccgtgtgggcggcgatccaactcgccaagcgtccggagaacaagggcaagaagatcgttgcgatcattccctctgccgccgagcgctacctgtcgtcctggctgtttgccgacgtcaacgtcgagagcgacaacatcgacgcccttctcgccgccaagtaa

SEQ ID NO: 763 - protein, 325 aa, Opitutaceae bacterium TAV2
MARIYNDITETIGNTPLVRLNRTAAAHGAQAEILLKLEFFNPLSSVKDRIGFAMIDEALKSGRINKDTILIEPTSGNTGIALAFVAAAKGLKLILTMPETMSLERRKLLKVLGAKLVLTEGSKGMKGAIAKAEELNKQIANSVVLQQFANPDNPEIHRKTTAEEIWRDTDGAVDFVVSGVGTGGTITGVGEVLKSRKPGVKLVAVEPAGSPVLSGGNPGPHKLQGIGAGFIPSVLNTKIIDEIIQVKEDDSGPISKQVNTLDGIPIGISSGAAVWAAIQLAKRPENKGKKIVAIIPSAAERYLSSWLFADVNVESDNIDALLAAK

SEQ ID NO: 764 - DNA, 876 bp, Thermotoga sp. RQ2
  CDS (1)..(876): transl_table=11
atgatggaaagactgatagggagcactcctatagtgaggctcgattcgatagactcgagaatattcttgaaactggaaaagaataatcccggtggcagtgtaaaggacaggcccgccctcttcatgattctcgatgcggaaagaagagaccttctcaggaacggcatcgtggagccaacgagcggcaacatgggaatcgccatagcgatgattggagcaaagagaggacacagagtgatcctcacgatgcccgagaccatgagtgttgagagaagaaaggtcctgaaaatgctcggggcggaactcgttctcacaccaggggaactgggaatgaagggtgccgtggaaaaagcgatagagatatccaaagaaaccggtgcacacatgctcaaccagttcgaaaatccctacaacgtctactctcaccagttcaccacaggtccggagatcctcaaacagatggactatcggatagacgccttcgttgcgggagtgggaacgggaggtacgatcagcggagtgggaagggttttgaaaggcttttttggaaacgaagtgaagatagtagcggtggaaccagcgaaatctcccgttctctctggaggccagccgggaaaacacgccatccagggcataggagcgggctttgttccgaagatcctggacagatccgtgattgacgaagtgatcaccgtggaggacgaagaggcctacgagatggcaaagtacctcgcaaagaaagagggaatccttgtgggaatctcctccggtgccaacgtcgcagccgctctgaaggtagcccagaaactcgggccagacgcgagggtcgtgaccgttgcaccggaccacgcggaaagatacctgagtatcctatga

SEQ ID NO: 765 - protein, 291 aa, Thermotoga sp. RQ2
MMERLIGSTPIVRLDSIDSRIFLKLEKNNPGGSVKDRPALFMILDAERRDLLRNGIVEPTSGNMGIAIAMIGAKRGHRVILTMPETMSVERRKVLKMLGAELVLTPGELGMKGAVEKAIEISKETGAHMLNQFENPYNVYSHQFTTGPEILKQMDYRIDAFVAGVGTGGTISGVGRVLKGFFGNEVKIVAVEPAKSPVLSGGQPGKHAIQGIGAGFVPKILDRSVIDEVITVEDEEAYEMAKYLAKKEGILVGISSGANVAAALKVAQKLGPDARVVTVAPDHAERYLSIL

SEQ ID NO: 766 - DNA, 993 bp, Gemmata obscuriglobus UQM 2246
  CDS (1)..(993): transl_table=11
atggccaccgataccacctttcgcggtcacgtttacgacgacatcacgcagacgttcgggaacactccgtgcatccgccttcggaaggtagtgggtgacgcgaaagccacggtgatcggtaagctggagaacttcaacccgttgtggtcggtgaaggaccgcatcggggtggcgatgatcgacgccgcggagaaagccggcaagatcgggccgaacacgctcatcgttgaaccgacgagcggtaacaccggtatcggtctcgcgttcacgtgcgctgcacggggttacaaactcgcggtggcgatgcccgaaagcatgtcgttggagcgccagcgcctcctgaaggcgctcggcgccacactcgtcctgacgccacgcgagctgggaatgaaaggcgccgtgtcgaaggcgatggaaatgttccaggaagcgggcggcgagccgaaggcgttcatcccgcagcagttcaagaacccggcgaaccccgatgtccaccgccgcacgacggccgaggagatctggcgcgcgaccggcggaacgatcgacattttggtgtcgggcgtcggtaccggcgggacgatcaccgggtgcggcgaggtgctgaagtcgcgcaagccgtcggtgaagtgtatcgccgtcgaaccgacgcaaagcccggttctgacgcagcacatcgttcaaggggtgccgaaggaccaggtgaagccgctggggccgcacaagatccagggcatcggcgccgggttcgtgccggacgtgctgaacaccgcgatcatcgacgaggtcgttcaggtgaccgacgacgaagctttcgagatgggccggcggctcgcgaaagaagaagggatgctgtgcggcatctcgtgcggcgccgcggcccacgcggcggtgaaaatcgcccaccgccccgagaacgccgggaaggtgatcgtggtggtgctgccggacctcggcgagcggtacctcagcaccgcgctgtacccgcaggattga

SEQ ID NO: 767 - protein, 330 aa, Gemmata obscuriglobus UQM 2246
MATDTTFRGHVYDDITQTFGNTPCIRLRKVVGDAKATVIGKLENFNPLWSVKDRIGVAMIDAAEKAGKIGPNTLIVEPTSGNTGIGLAFTCAARGYKLAVAMPESMSLERQRLLKALGATLVLTPRELGMKGAVSKAMEMFQEAGGEPKAFIPQQFKNPANPDVHRRTTAEEIWRATGGTIDILVSGVGTGGTITGCGEVLKSRKPSVKCIAVEPTQSPVLTQHIVQGVPKDQVKPLGPHKIQGIGAGFVPDVLNTAIIDEVVQVTDDEAFEMGRRLAKEEGMLCGISCGAAAHAAVKIAHRPENAGKVIVVVLPDLGERYLSTALYPQD

SEQ ID NO: 768 - DNA, 891 bp, Thauera sp. MZ1T
  CDS (1)..(891): transl_table=11
atggaattcaggacgctggaagactacgtcggccgcacgccgctggtgcgcctcaagcgcatcgacgccggccgcaacaacgtgatcctcgccaagctcgagggcaacaacccggccggctcggtcaaggatcgcccggcgctgtcgatggtgatgcgcgccgaggcgcgcggccagatcaagccgggcgacaccctgatcgaggccaccagcggcaacaccgggatcgcgctcgcgatggccgcggcgatccgcggctaccgcatgatcctggtgatgccggagaaccagagcgtcgagcgccgtcagaccatgcgcgcgttcggcgccgagctcgtgttggtgccgagttcgggcggcatggagatggcgcgcgacatcgccgagaagatgcgcgacgagggccgcggcatcatcctcgaccagttcgccaacccggacaacccggtggcgcactacgagggtaccggccccgagctgtgggagcagactggcggccgcatcacccactttgtcagctcgatgggcaccaccggcaccatcatgggcacctcgcgcttcctcaaggagcgcaatcccgacatctgcatcgtcggctgcgagccggaggagggctcgtccatccccggcatccgcaagtggcccgaagcgtacttgccgaagattttcgagcgcccgcgggtcgatcgcttcgagcgcgtcagccaggctgacgccgaggagatgacccgccggctcgcgcgcgaggagggcatcttcgcgggcatctcctcgggtggcgcgatgcatgtcgcgctgcgcatcgccgctcaggtcgagaacgcggtgattgtctccatcgtctgcgaccgcggcgaccgttacctgtcgacgggtgtgttcccggcctga

SEQ ID NO: 769 - protein, 296 aa, Thauera sp. MZ1T
MEFRTLEDYVGRTPLVRLKRIDAGRNNVILAKLEGNNPAGSVKDRPALSMVMRAEARGQIKPGDTLIEATSGNTGIALAMAAAIRGYRMILVMPENQSVERRQTMRAFGAELVLVPSSGGMEMARDIAEKMRDEGRGIILDQFANPDNPVAHYEGTGPELWEQTGGRITHFVSSMGTTGTIMGTSRFLKERNPDICIVGCEPEEGSSIPGIRKWPEAYLPKIFERPRVDRFERVSQADAEEMTRRLAREEGIFAGISSGGAMHVALRIAAQVENAVIVSIVCDRGDRYLSTGVFPA

SEQ ID NO: 770 - DNA, 978 bp, Thauera sp. MZ1T
  CDS (1)..(978): transl_table=11
atgtccacctggtaccccgacaatgcagaatccatcggccgcaccccgctcgtgcgcctgaaccgcgtgctcgacggcgcgcaggccaccgtgctggcgaagatcgagggccgcaacccggcctactcggtcaagtgccgcatcggcgcggcgatggtcaaggacgcgatcgcccacggccgcctcggccccggccaggagatcgtcgagcccaccagcggcaacaccggcatcgcgctcgccttcgtgtgcgccgcgcgcggcatcccgctgaccctgaccatgcccgagaccatgagcgtggagcgccgcaagctgctcgtcgcctatggcgccagactggtgctgaccgaaggccccaagggcatgaacggcgccatcgccaaggccaaggagatcgtcgacagcgaccccggccgctacgtgctgctgcagcagttcgagaaccccgccaacccggcgatccacgagaccaccaccggcccggagatctggaacgacaccgacggcggcatcgacatcctggtgtcgggcgtgggcaccggcggcaccatcaccggcatctcgcgctacatcaagcgcgtgcgcggcaaggacatccgctcgatcgcggtcgagcccgccgccagcccggtgatcagccagaccctcgccggccagccgctgacccctgcgccgcacaagatccagggcctgggcgcgggcttcgtgccgaaagtgctcgacctctcgctgatcgacgcggtcgagcaggtgagcaacgaagacgcggtgctctacgcccgccgcctggcgcgcgaggagggcatcctcgccggcatctcctgcggcgcggcggtggccgccgcggcgcgcgtcgcgaagcagcccgagaacgccggcaagaccatcgtggtgatcctgcccgactcgggcgagcgctacctgagctcgatcctattcgagggcctgttcgacgagaagggcatggcgatctga

SEQ ID NO: 771 - protein, 325 aa, Thauera sp. MZ1T
MSTWYPDNAESIGRTPLVRLNRVLDGAQATVLAKIEGRNPAYSVKCRIGAAMVKDAIAHGRLGPGQEIVEPTSGNTGIALAFVCAARGIPLTLTMPETMSVERRKLLVAYGARLVLTEGPKGMNGAIAKAKEIVDSDPGRYVLLQQFENPANPAIHETTTGPEIWNDTDGGIDILVSGVGTGGTITGISRYIKRVRGKDIRSIAVEPAASPVISQTLAGQPLTPAPHKIQGLGAGFVPKVLDLSLIDAVEQVSNEDAVLYARRLAREEGILAGISCGAAVAAAARVAKQPENAGKTIVVILPDSGERYLSSILFEGLFDEKGMAI

SEQ ID NO: 772 - DNA, 918 bp, Sporosarcina halophila
  CDS (1)..(918): transl_table=11
atgagttatgtcaggaatgttcaatcgttaatcggtcatacaccgatgatcgagcttactcactcggacatcccgaatcaagcgcgtatttttgctaagcttgaattcatgaacccaggcggtagtataaaagaccgtctgggtttaaaactgattgaggacgccttgaatagagggctactaaagccgggcggaacgattattgaagctaccgcaggcaacacaggcattggagttgcccttgctgctgttggaaaaggataccgcgttgtgtttgtcacccctgaaaagttcagtcaagagaaacagacactgatgagggctctcggcgcagaagtgattaacactcccacagaagaagggatgcgcggagccatcaaaaaagcggatgaattggttaatgacattccagattcatttaatctgcagcagtttaataatcaagcaaaccccgatgcatactacgaaacgttaggacctgagatacacacagatttgaatggagaaattgacattttccttgctggtgctggaacaggtggaacctttatgggaacttcccgctatttaaaagagcagaatccagcgatcaagacagtaattgtcgaaccagaaggctctgtcattaatggagggaaggctggtccgcatgatacagaagggattggcatggaattcctgcctttttatatggacacctcttattttgatgctattcatacgattccggattccattgcctttcaacgtgtaaaggaactggcattaaatgaagggctgcttgtagccagctcatccggagcagcttttgaagcggctctgcgtgaagcggagcaagctgaacctggtgccagaattgtaacggtctttccggatagcagtgaacgatacttaagccaagggatatatgaggagtga

SEQ ID NO: 773 - protein, 305 aa, Sporosarcina halophila
MSYVRNVQSLIGHTPMIELTHSDIPNQARIFAKLEFMNPGGSIKDRLGLKLIEDALNRGLLKPGGTIIEATAGNTGIGVALAAVGKGYRVVFVTPEKFSQEKQTLMRALGAEVINTPTEEGMRGAIKKADELVNDIPDSFNLQQFNNQANPDAYYETLGPEIHTDLNGEIDIFLAGAGTGGTFMGTSRYLKEQNPAIKTVIVEPEGSVINGGKAGPHDTEGIGMEFLPFYMDTSYFDAIHTIPDSIAFQRVKELALNEGLLVASSSGAAFEAALREAEQAEPGARIVTVFPDSSERYLSQGIYEE

SEQ ID NO: 774 - DNA, 1200 bp, Oryza sativa subsp
  CDS (1)..(1200)
atggccatggcgatggcgtcgccgcccgcttgcccattcctcctctcgctctcggccggcgccaccgccatttccaccgtgtccgccgcctacggttccgtttccgccccgcgcgcgcctctcttcctcctcgcctccccgcgtcccgtcccgcctcgccgacccctcgccgcgggctcctcatctcccaaggccgcggcacccgccgccgtcgagatccccgaggagtacgtggacgatgttgatgcggtgaacattgcgcaggacgtcacccagctgattgggaaaaccccaatggtgtatctgaataatgttgtcgacggatgtgttgctaatatcgctgcaaaacttgagtacatgggaccttgcaggagcgtcaaagacaggattggattaagcatgattaatgatgctgaagagaaaggattaatttttccaaacaagaccattttggttgaaccaactactggaaatactggtataggcctagcttctgtggctgctgctaggggatacaagctaatagcaactgtaccttcatcaatagatgttgagagatgtgttcttctacgtgcatttggagctgagattgtgttaactgatcctaacaagggactaaaaggagctcttgataaagcagaggaaattgtttcgaagacaccaaatgcatacatgtttcagcagtttaacaattccgctaatagtgagatccactttcaaaccacaggcccagaaatatgggaagacaccttgggtactgttgacatactagttgcaagcattggcacaggtggcaccattacaggcactgggcgttatctgaaaatgatgaacaaagatattaaggttattggggtagaacctgctgaaactagtgtaatctctggtgataatgctggttatattccaagcatattagatgttcagctgcttgatgaagttgtgaaggttaccaccacagaggcagtcgatgttgcaagggaacttgcactaaaagagggcctgctggttggcatttcgtcaggtgctgccacagttgctgctattaacgtcgctaaaagacctgaaaatgctggaaaattgattgcgattttgaagggtgaggttccaggtagattacaacgagtagtgcctgaaattttgaaacgccataggcactggtcagcctcacagaaggttgaaattgcgcacggttgctga

SEQ ID NO: 775 - protein, 399 aa, Oryza sativa subsp
MAMAMASPPACPFLLSLSAGATAISTVSAAYGSVSAPRAPLFLLASPRPVPPRRPLAAGSSSPKAAAPAAVEIPEEYVDDVDAVNIAQDVTQLIGKTPMVYLNNVVDGCVANIAAKLEYMGPCRSVKDRIGLSMINDAEEKGLIFPNKTILVEPTTGNTGIGLASVAAARGYKLIATVPSSIDVERCVLLRAFGAEIVLTDPNKGLKGALDKAEEIVSKTPNAYMFQQFNNSANSEIHFQTTGPEIWEDTLGTVDILVASIGTGGTITGTGRYLKMMNKDIKVIGVEPAETSVISGDNAGYIPSILDVQLLDEVVKVTTTEAVDVARELALKEGLLVGISSGAATVAAINVAKRPENAGKLIAILKGEVPGRLQRVVPEILKRHRHWSASQKVEIAHGC

SEQ ID NO: 776 - DNA, 1161 bp, Oryza sativa subsp
  CDS (1)..(1161)
atggagagggctctgatgagcctcatgaggcggcgctccctcctccagagcggcggacgagcaccgccggcgatggccgccgccgccggtggctcaccattcttctccaccctgcagcaagcagccgccgcagacccggtccagtcgcctggcatcttgccagggctcaagatcagggactctgcgtcacagctgattgggaggacacccatggtttacctgaacaaggtcactgaaggatgtggggcccggattgctgctaagctcgagttcttgcagccgtccttcagcgtcaaggacagaccagcaatttcaatgttggaagatgctgaaaagaaggggttgatcaccccaggtaagaccacactgatcgagccgacatcagggaacatgggtattggcctggcattcatggctgctcttaaagggtatgaactcatactcacaatgccttcatacaccagccttgagaggagggtgaccatgagggccttcggcgcaaaactcgtccttaccgacccaacaaaaggtatgggaggcacggtgaggaaggccgccgagctgtatgagaaccatcctagcgcgttcatgctgcagcagtttgagaatcctgcaaatgtcaaggtacactatgagacaactggtccagaaatctgggaggatacacttgggcaggttgatatttttgtcatgggaatcgggagcggcggcaccgtcactggtgttggcaagtatcttaaggagaagaaccccaatgcaaagatctatggagttgaacctgctgaagcaaatgttttgaatggtggcaaaccagataatgaagatttatccttttgtagtaggtctcacctcatcactggaaatggagtgggatttaagccggaaattttgaatatggatataatggaaaaggttattgaggtgaaaggtgaggatgctgttaagatggctcgagaattggcactgaaggagggtcttctggttggaatatcatcaggagctaacacagttgctgctcttgaactagcaaagaagccagaaaacaaagggaagctcattgtgactgttcttccgagtttaggggagagatacctgtcatctgcattgtttgaggaattgagagcggaggctgaggccatgcagccagtgccagtggactaa

SEQ ID NO: 777 - protein, 386 aa, Oryza sativa subsp
MERALMSLMRRRSLLQSGGRAPPAMAAAAGGSPFFSTLQQAAAADPVQSPGILPGLKIRDSASQLIGRTPMVYLNKVTEGCGARIAAKLEFLQPSFSVKDRPAISMLEDAEKKGLITPGKTTLIEPTSGNMGIGLAFMAALKGYELILTMPSYTSLERRVTMRAFGAKLVLTDPTKGMGGTVRKAAELYENHPSAFMLQQFENPANVKVHYETTGPEIWEDTLGQVDIFVMGIGSGGTVTGVGKYLKEKNPNAKIYGVEPAEANVLNGGKPDNEDLSFCSRSHLITGNGVGFKPEILNMDIMEKVIEVKGEDAVKMARELALKEGLLVGISSGANTVAALELAKKPENKGKLIVTVLPSLGERYLSSALFEELRAEAEAMQPVPVD

SEQ ID NO: 778 - DNA, 1374 bp, Oryza sativa subsp
  CDS (1)..(1374)
atgccgccgggtagcgactctcctctcctccttgtccgtctcgatctggtcggattcggagcagcggtgctgcggtggttgaggaggccgaggcggtggcgtggatccggagcggcgagggtcaaggaggccgaggtggattggtctctcttctcctcccttggcggtgaatgtggagaaagaggaggaggcaaggcgttaactgagctcgtacggccggcgctggcgaagaaggcgacggaagaagatatcaccgaattccacaagataaatgccgctttctgcagcagctgggttgagatgggggaagaaatcaagaacggagaggagggaccagacatggctgcaccgggcgaggaggagcaggagcaggggaggaaaggcatcccgtctctgctctcctccagggaggagaacatcgcctctaacatcactcagctgattggatggacaccgcttgttgagatgaagaacatcgcgaagaacgaaggcgtacaggctcgattggttgggaagatggaagcataccagccactctgctctgtcaaggacaggagtgccctcagaatgattgaagatgcagaggagaaagggttgatcacacctggtgttaccacgctgattgagccaacgagtggtaatctcggtatcggtttggtgctggttgctgttcagaaaggctacaggtttattgctgtcatgcctgctaaatattcgcttgacaagcagatgctactgaggtttttgggtgctgaattgatattgacagatcctgcaattgggtttaatggtatgatggacaaggtggaagagctcatgaagagcataccaaattctcattgtctcaatcaagtaacaaacccagcaaatccagaggcacactttatgtggactggacctgaaatatggaaagacacagccggcaaagtggatgtgtttgtggcctctgttggttcaggtggcacattgacaggtgtagggaggtatctgaagatgaaaaatccatctataaatattgtgtgcgtggaaccttcagaaagccctgtaatttcaggtggttcaccagggccacacaagattcaaggcactggggcaggtttcatacctgaaattttggacaaatctgtcatcgatgaagtagtgacagtaaacacagaggaatccatggcaatggcgaggaggctggcgaaggaggaaggattgcttgttggcatatcttctggtgcaaatgtagctgcttgcatcaagattgcagacagagaggagaacaaggggaaaatgattgtgacaatgttcccgagcggcggtgaaagatacatgaactctgatctctttgcacctgttagagaggaatgtgataatatgaccttctga

SEQ ID NO: 779 - protein, 457 aa, Oryza sativa subsp
MPPGSDSPLLLVRLDLVGFGAAVLRWLRRPRRWRGSGAARVKEAEVDWSLFSSLGGECGERGGGKALTELVRPALAKKATEEDITEFHKINAAFCSSWVEMGEEIKNGEEGPDMAAPGEEEQEQGRKGIPSLLSSREENIASNITQLIGWTPLVEMKNIAKNEGVQARLVGKMEAYQPLCSVKDRSALRMIEDAEEKGLITPGVTTLIEPTSGNLGIGLVLVAVQKGYRFIAVMPAKYSLDKQMLLRFLGAELILTDPAIGFNGMMDKVEELMKSIPNSHCLNQVTNPANPEAHFMWTGPEIWKDTAGKVDVFVASVGSGGTLTGVGRYLKMKNPSINIVCVEPSESPVISGGSPGPHKIQGTGAGFIPEILDKSVIDEVVTVNTEESMAMARRLAKEEGLLVGISSGANVAACIKIADREENKGKMIVTMFPSGGERYMNSDLFAPVREECDNMTF

SEQ ID NO: 780 - DNA, 993 bp, Oryza sativa subsp
  CDS (1)..(993)
atggccgtccagattcctgacgggataatgggtgagaccatcgccaaggatgtcaccgagttgattgggaacacgccgttggtgtacctcaaccgggtgacggatgggtgcgtcgggcgcgtcgcggccaagctcgagtccatggagccatgctccagcgtcaaggataggattggatacagtatgatcactgatgcagaggagaaggggctgatcactccaggcaagagtgtgctgattgagccaactagtggcaacacaggcattggactggccttcatggctgctgcaaagggttacaggcttgtactcacgatgccggcctccatgagcatggagaggagaatcatattgaaggcttttggtgctgaattgatacttactgacccactcttgggaatgaaaggagctgtccaaaaggcagaagaactggcagcgaagacaaacaactcatttatcctccaacaattcgagaaccctgctaacccaaagatccattacgagaccactggacctgaaatctggaaaggaacaggaggtaaagttgatggtttagtttctggtattgggacaggtggcactattactggagctggacgatacctcagagagcaaaatcctgatatcaagatctatggtgtggagccagtcgagagcgctgtcttatctggtggaaagcctgggccacacaagattcaaggaattggagctggttttgttcctggggtcctggatgttgacctcatcaatgaaactgtacaagtttcaagtgatgaagctatcgagatggcaaaggctcttgcattgaaagaagggttgctggttggaatatcttcaggtgcagctgcagcagcagctgttaggctcgctcagaggccggaaaatgaaggaaaactttttgttgttgtcttcccaagctttggtgagcggtacctttcgtcggtgctcttccagtccatcaagaaggaagctgaaaacatggtggttgaatga

SEQ ID NO: 781 - protein, 330 aa, Oryza sativa subsp
MAVQIPDGIMGETIAKDVTELIGNTPLVYLNRVTDGCVGRVAAKLESMEPCSSVKDRIGYSMITDAEEKGLITPGKSVLIEPTSGNTGIGLAFMAAAKGYRLVLTMPASMSMERRIILKAFGAELILTDPLLGMKGAVQKAEELAAKTNNSFILQQFENPANPKIHYETTGPEIWKGTGGKVDGLVSGIGTGGTITGAGRYLREQNPDIKIYGVEPVESAVLSGGKPGPHKIQGIGAGFVPGVLDVDLINETVQVSSDEAIEMAKALALKEGLLVGISSGAAAAAAVRLAQRPENEGKLFVVVFPSFGERYLSSVLFQSIKKEAENMVVE

SEQ ID NO: 782 - DNA, 978 bp, Glycine max
  CDS (1)..(978)
atggcagttgaaaagtctggaatagccaaagatgtttttttactgattggcaaaaccccaatagtatatctgaataaaatcgcagacggttctgttgcccgggttgctgccaaactggaattgatggagccatgctctagtgtaaaagacaggattgcctatagtatgattgctgatgcagagaagaagggacttatcacacctggacagagtatcctcattgagccaacaagtggtaatactggtattggattagcattcctggcagcagccaagggctacaagcttataattacaatgcctgcttcaatgagtcttgaaagaagaaccattcttctgtcttttggagctgagttggttctgacagatcctgcaaagggaatgaaaggggcagttccaaaagcagaagagatattagataagactcccaacgcctacatacttcagcaatttgaaaaccctgccaatcctaaggtacattatgaaaccactggtccagagatatgggaaggcacaagagggaaagttgatgcacttgttagtggtataggcactggtggtaccataacaggtgcagggaaatttcttaaagagaagaatcctaatataaagctctatggtgtggaaccagttgaaagtccagtactctctggaggaaaacctggtccacacaagattcaagggattggtgctggttttgtccctggagtattggaagttagccttgtagatgaagtagttcaaatatcaagtgatgaagcaatagaaactgcaaagcttcttgcacttcaagaaggcctatttgttggaatatcatctggagctgcagctgcagctgccattaagatagcaaaaagaccagaaaatgctggaaagcttattgttgttattttcccaagctttggtgagagatacctatcctctgtgctgtttgagtcagtcagacgggaagctgaaagcctgacttttgaatcctga

SEQ ID NO: 783 - protein, 325 aa, Glycine max
MAVEKSGIAKDVFLLIGKTPIVYLNKIADGSVARVAAKLELMEPCSSVKDRIAYSMIADAEKKGLITPGQSILIEPTSGNTGIGLAFLAAAKGYKLIITMPASMSLERRTILLSFGAELVLTDPAKGMKGAVPKAEEILDKTPNAYILQQFENPANPKVHYETTGPEIWEGTRGKVDALVSGIGTGGTITGAGKFLKEKNPNIKLYGVEPVESPVLSGGKPGPHKIQGIGAGFVPGVLEVSLVDEVVQISSDEAIETAKLLALQEGLFVGISSGAAAAAAIKIAKRPENAGKLIVVIFPSFGERYLSSVLFESVRREAESLTFES

SEQ ID NO: 784 - DNA, 972 bp, Glycine max
  CDS (1)..(972)
atggagccacagtgtgcaatcaagaaagatgccactgaattgataggtaataccccaatggtatacctgaacaacatagtggaggggtgtatggcccgcattgctgctaagttagagtccatgcaaccttgcttcagtatcaaagataggacagcatttagcatgatcaaagatgctgaggataaaggcctcattacaccgggaaagagtgttcttgttgaggctacaagtgggaacacgggcattggaatggcattcgtagcaacattgaaggggtataaagtcatagtggctatgccagcttctgtgagtcttgagagaaaaattgtacttcgagcctttggagctgaagtctatctcactgaccctgccaaaggaaccgatgcagttcttaggaaggccgaggagatagtgaataacacgcccggaagttacatgctccgccagatagataatcctgctaatccaaaaattcattacgagaccactggtcctgagatttggagagactccggagggaaagttgatgctttggttgcaggggtaggaaccgggggtaccataacgggtgctggcagattcctcaaggagagaaaccccaatgtcaagctgtacggcatagaaccggttgaaagtacagtcctcagtggaggaccgccaggtgatcacctaatccaagggattggtaatggtctcattccaagtgtactggattttaatctcctagatgaagttattcagatatcaagtgaagaagctatagaaactgctaagcttcttgctttaaaagaaggtttgttgatgggaatttcatcaggagccgcagctgcagctgccataaaattggggaagagaccagaaaatgccggaaaactcatcgttgtggtatttcctagttacggggagcgttatttatcttcaccattgtttgaatccattcggcatgaagctgaacatatgacatttgattaa

SEQ ID NO: 785 - protein, 323 aa, Glycine max
MEPQCAIKKDATELIGNTPMVYLNNIVEGCMARIAAKLESMQPCFSIKDRTAFSMIKDAEDKGLITPGKSVLVEATSGNTGIGMAFVATLKGYKVIVAMPASVSLERKIVLRAFGAEVYLTDPAKGTDAVLRKAEEIVNNTPGSYMLRQIDNPANPKIHYETTGPEIWRDSGGKVDALVAGVGTGGTITGAGRFLKERNPNVKLYGIEPVESTVLSGGPPGDHLIQGIGNGLIPSVLDFNLLDEVIQISSEEAIETAKLLALKEGLLMGISSGAAAAAAIKLGKRPENAGKLIVVVFPSYGERYLSSPLFESIRHEAEHMTFD

SEQ ID NO: 786 - DNA, 975 bp, Glycine max
  CDS (1)..(975)
atggaggagcctcaatgtgcaatcaagaaggatgccactgaattggtagggaataccccaatggtatttctgaacaacattgttgtcgggtgtgtagcccgtattgctgctaaactggagtacatgcaagcgtgctgtagtgtcaaagataggattgctttgagcatgattgaagatgctgagaaaaaaggccttattacacctggaaagactgttctggttgagtatacaagtggtaacaccggcataggattggcattcatagcagcattgaggggttataaacttcaggtgactatgccgtcttacgtgagtcttgagaggaaaattatactgcgagcctttggagctgaggtatatcttacagaccctgccaaaggaattgatggggttattcagaaggcagaagaactaatagccaagacgcctgatagttttatgctcaaccaatttgaaaatcctgccaatccaaatattcattacgagacaacaggccctgagatttggagggactcgggagagaaaattgatgctttggtttcaggaataggaactgggggttcaatagcaggagctggaagattcctcagggagaaaaacccggatattaagctgtatggtgtggagccagctgaaagtccagttttgaatggaggacagccaggtaagcacctgattcaaggaattggtgctggtatcattcccaaagttctggatgtaaatctcctagatgaagttattcaggtttcaagtgaagaggctatagaaactgttaagctgcttgccttgaaagaaggtttgctgatgggaatttcatcaggagctgctgcagcagcggcaataaaggtggggaagagaccagaaaatgcaggaaagctcattgttgtgattttccccagttttggagaacgttacttatcttcaccactgtttgaatccattaggaaagaagctgaacaaatgacatttgattaa

SEQ ID NO: 787 - protein, 324 aa, Glycine max
MEEPQCAIKKDATELVGNTPMVFLNNIVVGCVARIAAKLEYMQACCSVKDRIALSMIEDAEKKGLITPGKTVLVEYTSGNTGIGLAFIAALRGYKLQVTMPSYVSLERKIILRAFGAEVYLTDPAKGIDGVIQKAEELIAKTPDSFMLNQFENPANPNIHYETTGPEIWRDSGEKIDALVSGIGTGGSIAGAGRFLREKNPDIKLYGVEPAESPVLNGGQPGKHLIQGIGAGIIPKVLDVNLLDEVIQVSSEEAIETVKLLALKEGLLMGISSGAAAAAAIKVGKRPENAGKLIVVIFPSFGERYLSSPLFESIRKEAEQMTFD

SEQ ID NO: 788 - DNA, 942 bp, Magnetospirillum gryphiswaldense
  CDS (1)..(942): transl_table=11
atgggcgagttccgcggccgcatctacgattccatcgtcgacaccatcggcgccaccccgttggtgcgcatggacaagttggccgccgaggtcggggccaaggccagcatcgtcggcaagtgcgagttcttcaatccgctggccagcgtcaaggaccgcatcggtctggccatgatcgaagccgccgagcgtgaaggccggctgaagccgggcgccaccctgatcgagccgacctcgggcaataccggtatcgccctggccttcgtctgcgccgccaaggggtatcgcctgatcctgaccatgccggaaagcatgagcctggagcggcgcaagatgctggcccatctgggggcggaaatcgtgctgaccccggcggccatgggcatgaccggcgccgtcaaggaagccgagcggctggtggcggaaacccccggcgccgtcatgtgccagcaattcgagaacccggccaacccggccatccacgaatcgaccaccgccatcgagatttggaacgacaccgacggcaaggtcgatgcggtcatcgccggtgtcggtaccggcggcaccatttccggtatcggtcgggtgctgaaggccaagaaccccaacatcaagatcatcgccgtcgagcccgaggacagcccggtgctgtccggtggcgcgccggggccgcacaagatccagggtatcggcgccggcttcgtgcccggcaacctggaccgttcggtggtcgacgagatcttgcagatcagcaacgaaaccgccttcgccaatgcccgcaaggcggccaaggtggaaggcctgccggtgggcatctcgtcgggcgcggccatcgccgccgctttggaagtgggggcgcgccccgacatggcgggcaagttgatcgtcgtcattctgcccagcttcgccgaacgctatctgtccaccgcattgttcgagtaa

SEQ ID NO: 789 - protein, 313 aa, Magnetospirillum gryphiswaldense
MGEFRGRIYDSIVDTIGATPLVRMDKLAAEVGAKASIVGKCEFFNPLASVKDRIGLAMIEAAEREGRLKPGATLIEPTSGNTGIALAFVCAAKGYRLILTMPESMSLERRKMLAHLGAEIVLTPAAMGMTGAVKEAERLVAETPGAVMCQQFENPANPAIHESTTAIEIWNDTDGKVDAVIAGVGTGGTISGIGRVLKAKNPNIKIIAVEPEDSPVLSGGAPGPHKIQGIGAGFVPGNLDRSVVDEILQISNETAFANARKAAKVEGLPVGISSGAAIAAALEVGARPDMAGKLIVVILPSFAERYLSTALFE

SEQ ID NO: 790 - DNA, 1005 bp, Magnetospirillum gryphiswaldense
  CDS (1)..(1005): transl_table=11
atggccaagattcgtgccgatttcaacgacaccatcggcaacacccccctgatcaagctgaagcgggcgtcggagatcaccggttgcaccatcctgggcaaggcggaattcctcaatcccggcggttcggtcaaggaccgcgcagccctggccatcatcaccgacgccgaggacaaaggcctgctgaagcccggcggggtgatcgtcgagggcacggcgggcaataccggtatcggcctggccctggtcgccaatgcgcgcggctatcgcaccgtcatcgtcatgccggaaacccaaagtcaggaaaaaaaggacatgctgcggctggtgggcgccgatctgcggctggtccccgccctgccctacgccaatcccggcaattacgtgcgctattcggaaaccctggccaaggaactggcggccaatgagccggcgggggtgttgtgggccaaccagttcgacaacacggccaaccgtatgggccattatcgcacgacgggaccggaaatctgggagcagaccgacggcaaggtcgacgccttcacctgcgcggtgggcaccggcggcaccctggccggcatcgggttggcgctgaaggagcgcaacaaggatatccgtatcgtgctggccgaccccatgggctctacgctttacaattactatgccaatggcgaattgaaggccgagggaacgtccatcaccgaaggcatcggccagggccgcatcacccaaaatctggtgggtgcccccatcgacggtcaagtccaggtgaccgacgaggaagccttaccggtgattttcgacctgatcaaggaagagggtttggtggtcggcgggtcgagcggcatcaacatcatggccgccatcaaggtggctcgcgacctcggtccggggcatacggtggtgacagtgctgtgcgattatggtacgcgctatcaaagtaaattgttcaacccggccttcctgcgggaaaagaacctacccgtaccggaatggctggcataa

SEQ ID NO: 791 - protein, 334 aa, Magnetospirillum gryphiswaldense
MAKIRADFNDTIGNTPLIKLKRASEITGCTILGKAEFLNPGGSVKDRAALAIITDAEDKGLLKPGGVIVEGTAGNTGIGLALVANARGYRTVIVMPETQSQEKKDMLRLVGADLRLVPALPYANPGNYVRYSETLAKELAANEPAGVLWANQFDNTANRMGHYRTTGPEIWEQTDGKVDAFTCAVGTGGTLAGIGLALKERNKDIRIVLADPMGSTLYNYYANGELKAEGTSITEGIGQGRITQNLVGAPIDGQVQVTDEEALPVIFDLIKEEGLVVGGSSGINIMAAIKVARDLGPGHTVVTVLCDYGTRYQSKLFNPAFLREKNLPVPEWLA

SEQ ID NO: 792 - DNA, 978 bp, Vitis vinifera
  CDS (1)..(978)
atggccgaggagaagtgtttcattgccaaagatgttacagaattaattgggaaaacaccattagtatatctgaacaatgtggtagatggctgtgtagctcgtattgctgcaaagcttgaaatgatggagccttgctctagtgtcaaggacaggatcgggtacagtatgatcacagatgcagaagagaagggcctcattacgccaggggagagtgtcctcattgagcctaccagtggtaatactggcatagggttggcatttatggcggcagctaagggttataagctcatcattacaatgcctgcttcgatgagtcttgagagaagaataattctccgagcttttggggctgaattggttctcacagatccagccaagggcatgaagggggctgttcagaaagctgaagagatactggcaaagacacctaattcctatattcttcagcaatttgaaaaccctgccaatccgaagattcattatgaaaccactggacccgagatctggagaggcactggtgggaaagttgatgcttttgtctctgggatagggactggaggtaccataacaggtgcagggaagttcctcaaagagcaaaattctgacattaagctgtatggtgtagaacctgtggaaagtgcagtactgtctggaggaaaacctggcccgcataagatccaaggaattggcgctggtttcatccctggagttttagatgtcaatttgcttgatgaagttgttcaagtttcaagtgaagaagctattgaaactgccaagcttcttgcattgaaagaaggtttgctggttgggatatcatctggtggtgctgcagctgctgcaataaagttagcaaagaggccagaaaatgctgggaaactcattgttgtggttttccccagctttggagagcgttatctgtcctcggtgttgttcgactctgtgaagcgggaggcagagaatatgctgtttgaaccctga

SEQ ID NO: 793 - protein, 325 aa, Vitis vinifera
MAEEKCFIAKDVTELIGKTPLVYLNNVVDGCVARIAAKLEMMEPCSSVKDRIGYSMITDAEEKGLITPGESVLIEPTSGNTGIGLAFMAAAKGYKLIITMPASMSLERRIILRAFGAELVLTDPAKGMKGAVQKAEEILAKTPNSYILQQFENPANPKIHYETTGPEIWRGTGGKVDAFVSGIGTGGTITGAGKFLKEQNSDIKLYGVEPVESAVLSGGKPGPHKIQGIGAGFIPGVLDVNLLDEVVQVSSEEAIETAKLLALKEGLLVGISSGGAAAAAIKLAKRPENAGKLIVVVFPSFGERYLSSVLFDSVKREAENMLFEP

SEQ ID NO: 794 - DNA, 972 bp, Vitis vinifera
  CDS (1)..(972)
atggaagagaagtgtgcaattgcaaaagatgttactgaactaatagggaataccccaatggtatatctgaacaatgtagtggatggttgtgtagcccgtattgctgctaagctagaggtgatggaaccctactcaagtgttaaagacaggattgggtatagcatgatcagtgatgcagaagagaagggcctgattacccctgggaagactgttcttattgaggttaccagtggcaatactggcattgggttggcattcattgctgcagctaagggttacaaacttatctttgtcatgccgagtgtagcgactcttgagaaaaaaatggtcctcctggcttttggagcagagctgcatctcatagatatggccaaaggcgttcaggcgctttttgataaagctgatgagatactgcaaaacacacccaatggttattttcttaaccaatttgaaaatcctgccaatccaaagattcattatgagaccacaggaccagagatttggaaaggcacaggaggaaaagttgatatcctggttgcaggaatagggactgggggtacaattactggtgcagggcaattcctcaaggagaaaaaccccgagattaaggtttatggtgtagaaccagctgaaagtgcagttcttaatggaggaaagcctggttcacatcagatccaaggaattggtgcgggtatcatccctaaaattttggataccgaacttcttgatgaagttattcaaatttcaagtgatgaggccattgaaactgctaggcttcttgcattaaaagaaggtttgctggtagggatatcatctggtggtggtgctgctgctgcaataaagctagcaaagagaccagaatatgcgggcaacctcatcacggtgattttccccagctttggagagcgttatctatcttcagtactctttgattccataagggttgaggctgaaaacatgaactttgattga

SEQ ID NO: 795 - protein, 323 aa, Vitis vinifera
MEEKCAIAKDVTELIGNTPMVYLNNVVDGCVARIAAKLEVMEPYSSVKDRIGYSMISDAEEKGLITPGKTVLIEVTSGNTGIGLAFIAAAKGYKLIFVMPSVATLEKKMVLLAFGAELHLIDMAKGVQALFDKADEILQNTPNGYFLNQFENPANPKIHYETTGPEIWKGTGGKVDILVAGIGTGGTITGAGQFLKEKNPEIKVYGVEPAESAVLNGGKPGSHQIQGIGAGIIPKILDTELLDEVIQISSDEAIETARLLALKEGLLVGISSGGGAAAAIKLAKRPEYAGNLITVIFPSFGERYLSSVLFDSIRVEAENMNFD

SEQ ID NO: 796 - DNA, 978 bp, Glycine soja
  CDS (1)..(978)
atggctgttgaaaggtccggaattgccaaagatgttacggaattgattggtaaaaccccattagtatatctaaataaacttgcggatggttgtgttgcccgggttgctgctaaactggagttgatggagccatgctctagtgtgaaggacaggattgggtatagtatgattgctgatgcagaagagaagggacttatcacacctggaaagagtgtcctcattgagccaacaagtggtaatactggcattggattagccttcatggcagcagccaggggttacaagctcataattacaatgcctgcttctatgagtcttgagagaagaatcattctattagcttttggagctgagttggttctgacagatcctgctaagggaatgaaaggggctgttcagaaggctgaagagatattggctaagacgcccaatgcctacatacttcaacaatttgaaaaccctgccaatcccaaggttcattatgaaaccactggtccagagatatggaaaggctccgatgggaaaactgatgcatttgtttctgggataggcactggtggtacaataacaggtgctggaaaatatcttaaagagcagaatccgaatataaagctgattggtgtggaaccagttgaaagtccagtgctctcaggaggaaagcctggtccacacaagattcaagggattggtgctggttttatccctggtgtcttgggagtcaatcttcttgatgaagttattcaaatatcaagtgatgaagcaatagaaactgcaaagcttcttgcgcttaaagaaggcctatttgtgggaatatcttccggagctgcagctgctgctacttttcagattgcaaaaagaccagaaaatgccgggaagcttattgttgccgtttttcccagcttcggggagaggtacctgtcctccgtgctatttgagtcagtgagacgcgaagctgaaagcatgacttttgagccctga

SEQ ID NO: 797 - protein, 325 aa, Glycine soja
MAVERSGIAKDVTELIGKTPLVYLNKLADGCVARVAAKLELMEPCSSVKDRIGYSMIADAEEKGLITPGKSVLIEPTSGNTGIGLAFMAAARGYKLIITMPASMSLERRIILLAFGAELVLTDPAKGMKGAVQKAEEILAKTPNAYILQQFENPANPKVHYETTGPEIWKGSDGKTDAFVSGIGTGGTITGAGKYLKEQNPNIKLIGVEPVESPVLSGGKPGPHKIQGIGAGFIPGVLGVNLLDEVIQISSDEAIETAKLLALKEGLFVGISSGAAAAATFQIAKRPENAGKLIVAVFPSFGERYLSSVLFESVRREAESMTFEP

SEQ ID NO: 798 - DNA, 1170 bp, Glycine max
  CDS (1)..(1170)
atggcttctgcttccttaatcaactcgttgacttgttcttcgcgtgctcccactcagcactgttccactttcacccgcaccaccgccgccacgtcactgagacaatttaacagccactgtcggagaccactcgcgacgaggatctcgccgccttccaccgttgtctgcaaagctgtctccgttaagccccaaaccgaaatcgaaggtctcaacattgctgaagatgtcacccagctcatagggaaaacgccaatggtttacctgaacaatatcgtgaagggttctgtggccaatattgctgccaagcttgagattatggagccctgttgtagtgtaaaggacaggattggttttagtatgataaatgatgctgagcagagaggagctataacacctgggaagagtatattggtggaacctactagcggcaacaccggaattggtcttgcctttatagcagcttcaagaggttataaactcattttgacaatgcctgcttcaatgagtttagaaagacgagttctcttgaaagcatttggggccgagcttgttttgactgatgcagcaaagggcatgaatggagcagtacaaaaagctgaagaaattttaaaaagtacccccaattcatacatgcttcaacaatttgataatccttcagatcctaaggttcattatgagacaactggcccggagatatgggaagatactaaaggaaagatagatattttagttgcaggaattggaaccggtggaactgtttctggagctggccaattcttaaaacaacaaaatcggaaaatacaggttattggcgtagagcctctggaaagcaacatacttacaggtggaaagccaggacctcacaaaattcagggtattggggctggttttgtgcccaggaatttggatcaagatgtgcttgatgaagttatagcgatatcaagtgatgaagcagttgaaactgcaaagcaattagcactccaggaaggcttgctggtgggaatctcttcaggagctgcagctgcagctgctttgaaggttggaaagaggcctgagaatgcaggaaagcttattggggttgtcttcccaagctttggtgaaagatatttgtcaactattcttttccagtcaatacgggaagagtgcgagaaaatgcaacctgagccatga

SEQ ID NO: 799 - protein, 389 aa, Glycine max
MASASLINSLTCSSRAPTQHCSTFTRTTAATSLRQFNSHCRRPLATRISPPSTVVCKAVSVKPQTEIEGLNIAEDVTQLIGKTPMVYLNNIVKGSVANIAAKLEIMEPCCSVKDRIGFSMINDAEQRGAITPGKSILVEPTSGNTGIGLAFIAASRGYKLILTMPASMSLERRVLLKAFGAELVLTDAAKGMNGAVQKAEEILKSTPNSYMLQQFDNPSDPKVHYETTGPEIWEDTKGKIDILVAGIGTGGTVSGAGQFLKQQNRKIQVIGVEPLESNILTGGKPGPHKIQGIGAGFVPRNLDQDVLDEVIAISSDEAVETAKQLALQEGLLVGISSGAAAAAALKVGKRPENAGKLIGVVFPSFGERYLSTILFQSIREECEKMQPEP

SEQ ID NO: 800 - DNA, 1116 bp, Vitis vinifera
  CDS (1)..(1116)
atggcggctctctcgagcttcttcaagagaaaatcgtcgataccctttaccagtctcgctatacgcagatggttctccactcaacctatcctcgattctccgtctttttcccagagaatcagagatctgcccaaggatcttccagggaccaacatcaaaaaagaagtttctcagcttattgggaagactcctctggtttttctgaacaaagtcacagaagggtgtggagcttatgtagctgtcaagcaagagatgatgcaacccactgctagcatcaaagacaggccagcactagccatgatcacagatgcagaagacaaacagttgatcactcctgggaagactgtgctgattgagcccacatcgggaaatatggggattagcatggcgtttatggcggccatgaaagggtacaagatggttctgaccatgccttcctacacaagcttggagaggagagtgaccatgagagcatttggggctgatttgattctcactgatcccaccaaggggatgggaggaacagttaaaaaggcttatgagcttttggaatccaccccagatgctttcatgcttcaacaattttcaaatcctgccaatacccaggtgcattttgaaactacaggtccagagatatgggaggatactcgtggacaagttgacatatttataatgggaattggtagcggtggcactgtctctggggttggacgttatctgaaatcccagaatcctaatgttaagatatatggacttgagccaactgaaagcaacgtactgaatggtggtaagccaggtcctcatcatattacaggcaatggggttggattcaaaccagatatcctggacatggatgtaatggaagaagttctcatggtttctagtgaagatgcagtcaacatggcccggcagttggcactgaaggaagggcttatggtggggatatcatcaggagctaacacagttgcagcactaaggctagcaagaaggccagagaacaaaggcaaactgatagtgactattcatccaagtttcggggagcggtacttgtcatctgtcctgtttcaagaactgaggaaagaagccgaaaacatgcaacctgtttctgttgattga

SEQ ID NO: 801 - protein, 371 aa, Vitis vinifera
MAALSSFFKRKSSIPFTSLAIRRWFSTQPILDSPSFSQRIRDLPKDLPGTNIKKEVSQLIGKTPLVFLNKVTEGCGAYVAVKQEMMQPTASIKDRPALAMITDAEDKQLITPGKTVLIEPTSGNMGISMAFMAAMKGYKMVLTMPSYTSLERRVTMRAFGADLILTDPTKGMGGTVKKAYELLESTPDAFMLQQFSNPANTQVHFETTGPEIWEDTRGQVDIFIMGIGSGGTVSGVGRYLKSQNPNVKIYGLEPTESNVLNGGKPGPHHITGNGVGFKPDILDMDVMEEVLMVSSEDAVNMARQLALKEGLMVGISSGANTVAALRLARRPENKGKLIVTIHPSFGERYLSSVLFQELRKEAENMQPVSVD

SEQ ID NO: 802 - DNA, 972 bp, Vitis vinifera
  CDS (1)..(972)
atggaagagaagtgtgcaattgcaaaagatgttactgaactaatagggaataccccaatggtatatctgaacaatgtagtggatggttgtgtagcccgtattgctgctaagctagaggtgatggaaccctactcaagtgttaaagacaggattgggtatagcatgatcagtgatgcagaagagaagggcctgattaccccagggaagactgttcttattgaggttaccagtggcaatactggcattgggttggcattcattgcagcagctaagggttacaaacttatctttgtcatgccgagtgtagcgactcttgagaaaaaaatggtcctcctggcttttggagcagagctgcatctcatagatatggccaaaggcgttcaggcgctttttgataaagctgacgagatactgcaaaacacacccaatggttattttcttaaccaatttgaaaatcctgccaacccaaagattcattatgagaccacaggaccagaggtttggaaaggcacaggaggaaaagttgatatcctggttgcaggaatagggactgggggtacaattactggtgcagggcagttcctcaaggagaaaaaccccgagattaaggtttatggtgtagaaccagctgaaagtgcagttcttaatggaggaaagcctggttcacatcagatccaaggaattggtgcgggtatcatccctaaaattttggatactgaacttcttgatgaagttattcaaatttcaagtgatgaggccattgaaactgctaggcttcttgcattaaaagaaggtttgctggtagggatatcatctggtgctgctgctgctgctgcaataaagctagcaaagagaccaggaaatgcaggcaaactcatcacggtgattttccccagctttggagagcgttatctatcttcagtactctttaattccataagggttgaggctgaaaacatgaagtttgattga

SEQ ID NO: 803 - protein, 323 aa, Vitis vinifera
MEEKCAIAKDVTELIGNTPMVYLNNVVDGCVARIAAKLEVMEPYSSVKDRIGYSMISDAEEKGLITPGKTVLIEVTSGNTGIGLAFIAAAKGYKLIFVMPSVATLEKKMVLLAFGAELHLIDMAKGVQALFDKADEILQNTPNGYFLNQFENPANPKIHYETTGPEVWKGTGGKVDILVAGIGTGGTITGAGQFLKEKNPEIKVYGVEPAESAVLNGGKPGSHQIQGIGAGIIPKILDTELLDEVIQISSDEAIETARLLALKEGLLVGISSGAAAAAAIKLAKRPGNAGKLITVIFPSFGERYLSSVLFNSIRVEAENMKFD

SEQ ID NO: 804 - DNA, 972 bp, Vitis vinifera
  CDS (1)..(972)
atggaagagaaatgtgcaattgcaaaagatgttactgaactaatagggaataccccaatggtatatctaaacaatgtagtggacggttgtgtagcccatattgctgctaagctagagatgatggaaccctgctcaagtgttaaagacaggattgggtatagcatgatcaatgatgcagaagagaagggcctgattacgcctgggaagactgtccttatcgagcctaccagtggcaatactggcattggattggcattcattgcagcagctaagggttacaaacttatccttgtcatgccaagtgtagtgactcttgagagaaaaatggttgtcctagcttttggagcagagctgtatctgacagatatagccaaaggcattcagggggtttttgataaagctgacgagatactgcaaaacacacccaatggttatattcttaaccaatttgaaaatcctgccaatccaaagattcattatgagaccacaggaccagagatttggaaaggcacggggggaaaagttgatatcctggttgcagggatagggactgggggtacagttaccggtgcagggcacttcctcaaggagaaaaaccctgagattaaggtttatggtatagaaccagctgaaagtgcagttctaaatggaggaaaccctggctcacataagatccaaggaattggtgccggtatcatcccccaagttttggatactgaactacttgatgaagttattcaaatttcaagtgatgaggccattgaaactgctgggcttcttgcattaaaagaaggtttgctggtagggatatcatctggtgctgctgcagctgcagcaattaagctagctgagagtccagaaaatgcaggcaaactcatcacggtgattttccccagcttcggagagcgctatctgtcttcagtactgtttgattccataagggatgaggctgaaaacatgaagtttgattga

SEQ ID NO: 805 - protein, 323 aa, Vitis vinifera
MEEKCAIAKDVTELIGNTPMVYLNNVVDGCVAHIAAKLEMMEPCSSVKDRIGYSMINDAEEKGLITPGKTVLIEPTSGNTGIGLAFIAAAKGYKLILVMPSVVTLERKMVVLAFGAELYLTDIAKGIQGVFDKADEILQNTPNGYILNQFENPANPKIHYETTGPEIWKGTGGKVDILVAGIGTGGTVTGAGHFLKEKNPEIKVYGIEPAESAVLNGGNPGSHKIQGIGAGIIPQVLDTELLDEVIQISSDEAIETAGLLALKEGLLVGISSGAAAAAAIKLAESPENAGKLITVIFPSFGERYLSSVLFDSIRDEAENMKFD

SEQ ID NO: 806 - DNA, 972 bp, Vitis vinifera
  CDS (1)..(972)
atggaggacaagtctgcaattgcaaaagacattactgaattaatcggcaagacccctatggtatacctcaataagattgtggatggatgtgtagcccgtattgctgctaagctggagatgatggaaccctgctccagtgttaaagacaggattgggtatagcatgatcaaggatgctgaagataagggcctgattacaccaggaaagactgtcctcatagagcctactagtggtaatactggcatagggctggcattcattgctgcagttaagggttacaagcttgttattgtcatgccagcttcatttagtcttgagagaagaatcattcttcgagcttttggagctgagttgatcatcacagatcctgccaaaggatttaaggagcaacttcggagaattgaggaactattgaaaaagataccaaatggttatgttcttcagcaatttgaaaatcctgctaatcctcggattcattatgaaaccactggaccagagatatgggaaggatctggagggaaagtagatgcccttgtctctggaatagggactgggggtacagcatctggtgcggggaagttcctcaaggagaaaaatcctgagattaaggtatatggtgtagagccagtggaaagtgcagttttgagtggtggagagcatgccccgcataagatccaaggaattggtgctggtttcatccccgctgttttgaatgtcagcatactcgatgaagttattcaaatatcaagtgatgaagccattgacactgccagggctcttgctttgaaggaaggtttgctggtaggcatatcatctggtgctgctgctgctgctgcaataaagatagcaaagagagcagaaaatgctggaaaactcattgttgtggttttccccagctttggagagcgttatctgtctaccgcactgtttgattctctgaggcatgaagcagaaaacatggtctttgagtga

SEQ ID NO: 807 - protein, 323 aa, Vitis vinifera
MEDKSAIAKDITELIGKTPMVYLNKIVDGCVARIAAKLEMMEPCSSVKDRIGYSMIKDAEDKGLITPGKTVLIEPTSGNTGIGLAFIAAVKGYKLVIVMPASFSLERRIILRAFGAELIITDPAKGFKEQLRRIEELLKKIPNGYVLQQFENPANPRIHYETTGPEIWEGSGGKVDALVSGIGTGGTASGAGKFLKEKNPEIKVYGVEPVESAVLSGGEHAPHKIQGIGAGFIPAVLNVSILDEVIQISSDEAIDTARALALKEGLLVGISSGAAAAAAIKIAKRAENAGKLIVVVFPSFGERYLSTALFDSLRHEAENMVFE

SEQ ID NO: 808 - DNA, 972 bp, Vitis vinifera
  CDS (1)..(972)
atggaggacaagtgtgcaattgcaaacgatgttactgaactaataggcaataccccattggtatatctaaacaacatagctgatggttgtgtagcccgtatcgctgctaagctagagataatggaaccctgctccagtgttaaagacaggattgggtatagcatgattaacgacgctgaagagaagggtctaattacccctgggcagactgtcctcattgaggctaccagtggcaatactggcattgggttggcattcattgcagcagctaagggatacaaacttatactagtcatgccaagtatagtgaatcttgagagaaaaattgttgtgcgggcttttggagcagagttgtacctcacagatatagccaaaggcattaagggggtttttgataaagctgatgagatactgaaaaacacacccaatggttatcttcttaaccaatttgaaaatcctgccaaccccaagattcattatgaaacaacaggaccagagatttggaaaggcacaggaggaaaagttgatgccctggtttcaggcataggaactggtggtacagctactggtgcagggcacttcctcaaggagaaaaaccccaagattaaggtttatggtgtagaaccatgtgaaagtgcagttcttaatggaggaactcctggcccacataagatccttggaattggtactggtatcatccctaaggttttggatgtcaaactacttgatgaagttgttcaaatatcgagtgatgaagcatttgaaaccgctaaacttcttgcattgaaagaaggtttgctggttgggatgtcatctggtgctgctgctgcagcagcaataaaggtagcaaagagaccagaaaatgcaggaaaactcatcacagtgattttccccagctttggagagcgttatctgtcttcaatgctgtttgaatccattaagaaagaggctgaaaatatgaagtttgattga

SEQ ID NO: 809 - protein, 323 aa, Vitis vinifera
MEDKCAIANDVTELIGNTPLVYLNNIADGCVARIAAKLEIMEPCSSVKDRIGYSMINDAEEKGLITPGQTVLIEATSGNTGIGLAFIAAAKGYKLILVMPSIVNLERKIVVRAFGAELYLTDIAKGIKGVFDKADEILKNTPNGYLLNQFENPANPKIHYETTGPEIWKGTGGKVDALVSGIGTGGTATGAGHFLKEKNPKIKVYGVEPCESAVLNGGTPGPHKILGIGTGIIPKVLDVKLLDEVVQISSDEAFETAKLLALKEGLLVGMSSGAAAAAAIKVAKRPENAGKLITVIFPSFGERYLSSMLFESIKKEAENMKFD

SEQ ID NO: 810 - DNA, 933 bp, Vitis vinifera
  CDS (1)..(933)
atggaggacattgcaaaagatgttaccgaattaattaggaataccccattggtatatttgaacaaagttgtggatggttgtttagccagtattgcagtgaagctagaggcaatggagccctgctctagtgtcaaagatagaattgctttgagcatgatcaaagatgtagaagataagggactgattcaacttgggaagactgtcctaattgagcctaccagtggtaattctggcatagagttggcatacattgcagcagttaaaggctacaaacttatccttgccatgcctgcttcaatgagtagagaaagaagaattgttctcagagcttttggagatgaactgcacctcacagatccagtgaagggtattaagggaattcatgagaaggctgagttactggaaaagaccccttatggctatatgcttaagcaatttgcaaatcctgccaacccaaagattcattatgaaactacagggacagagatttggagaggctgcggaggaaaagttgatgtctttgtttctggggtggggactgggggaacagtcactggagtaggaaggttcctcaaggagaaaaacccagatatcaaggtatacggtgttgaaccagcggaaagcgcagttctgaatggaggagagcctggccttcataagatccaaggaattgaccctggtttcatcactcctattttggatgtcagcatacttgatgaagttgttccaatatcaagtgaagaagcaattgaaactgctaagctccttgcattgaaggaaggcttgctggtggggaaaccttctggagtagctgcagctgctgcaataaagatagcaaagagacctgaaaatgctgggaaactcatagtggtgattttccccagcttcggagagcggtacttgtccacagtcctgtttgattccatcaggtag

SEQ ID NO: 811 - protein, 310 aa, Vitis vinifera
MEDIAKDVTELIRNTPLVYLNKVVDGCLASIAVKLEAMEPCSSVKDRIALSMIKDVEDKGLIQLGKTVLIEPTSGNSGIELAYIAAVKGYKLILAMPASMSRERRIVLRAFGDELHLTDPVKGIKGIHEKAELLEKTPYGYMLKQFANPANPKIHYETTGTEIWRGCGGKVDVFVSGVGTGGTVTGVGRFLKEKNPDIKVYGVEPAESAVLNGGEPGLHKIQGIDPGFITPILDVSILDEVVPISSEEAIETAKLLALKEGLLVGKPSGVAAAAAIKIAKRPENAGKLIVVIFPSFGERYLSTVLFDSIR

SEQ ID NO: 812 - DNA, 1173 bp, Vitis vinifera
  CDS (1)..(1173)
atggcggtttctggtctccttcctcacattcactcattcccaagcacctaccaacctcttcgcgttgcattcagatctcccaaatccccatttcccaatggtggatttgccaccagactcacagtaaaggccgaggccaaagccaaagccaaagccgaagccaaagccaaagccaaagccaaaaccaaaaccaaaaccacatccacagccacagctacctccgtgttcgaagacatccacaccgtcaacattgccgacgacgtcactcagttgatcgggagaacaccaatgatttatctcaacaaggtaacacaaggctgtgtggcaaatattgctgctaaactcgaatctatggaaccttgccgaagtgtcaaagacagaattggttatagtatgatatcagatgctgaagaaactggagcaatttctccagggaggagtatattagttgaaccaacaagtggtaatacaggacttggtattgcatttgttgcggccactaagggatacaaacttatagtcaccatgcctgcatccatagacattgaaaggcggattctcttacgtgcatttggagcagagattgttttgacggatcccatgaaaggtataaaaggggctgttgataaagctgaagaaattgttcagagtatgccaaacgcatacatgtttcaacagtttgataatatggccaatgcaaagatacactttgaaactacaggtccagaaatatgggaggatactgtgggtagtgttgacatatttgttgctggaattgggactggtggtactgttacaggcactggacgctacttgaaaatgatgaaaagagatatcaaggtagttggagtagaacctgcagataggagtgtaatatctggagataacccaggttatgttccaagcattttggatgttaaattgcttgatgaggttctaaaggttacaaatgatgaagctgttgaaatggcaagaaaattggcattggaggaaggcttgctggttggtatttcttcaggagctgctgctgctgctgccataagcatagccaaaaggccagaaaatgcaggaaaactcattgcggttgtatttccaagttttggtgaaaggtatatccccaccattcttttccattctatccatgaagaggtccgaaaaatggaacatagatag

SEQ ID NO: 813 - protein, 390 aa, Vitis vinifera
MAVSGLLPHIHSFPSTYQPLRVAFRSPKSPFPNGGFATRLTVKAEAKAKAKAEAKAKAKAKTKTKTTSTATATSVFEDIHTVNIADDVTQLIGRTPMIYLNKVTQGCVANIAAKLESMEPCRSVKDRIGYSMISDAEETGAISPGRSILVEPTSGNTGLGIAFVAATKGYKLIVTMPASIDIERRILLRAFGAEIVLTDPMKGIKGAVDKAEEIVQSMPNAYMFQQFDNMANAKIHFETTGPEIWEDTVGSVDIFVAGIGTGGTVTGTGRYLKMMKRDIKVVGVEPADRSVISGDNPGYVPSILDVKLLDEVLKVTNDEAVEMARKLALEEGLLVGISSGAAAAAAISIAKRPENAGKLIAVVFPSFGERYIPTILFHSIHEEVRKMEHR

SEQ ID NO: 814 - DNA, 918 bp, Vitis vinifera
  CDS (1)..(918)
atggtgtacctgaataatattgtaaaggggtccgttgcaaacattgctgccaagctggagatcatggagccatgttgcagtgtcaaggacaggatcggttacagtatgatagctgatgctgaacagagaggagctataacacccggaaagagtactctggtggaacctacaagtggaaacacgggcattggtctcgcatttatagctgcttcaaaaggatataaactcatattgacaatgccagcatcaatgagtatggaaagaagggttctcttaaaagcatttggagctgaacttgttttaactgatccggctaagggcatgaaaggagctgttcaaaaagctgaagagattttgaagagcacaccaaatgcttacatgcttcagcaatttgacaatccagcaaatcctaaggtacactatcaaacaactggtccagagatctgggaagatacaagaggcaaggtggatatttttattgccgggattggaaccggtggaaccatttctggggttgggaagttccttaaaaaacaaaaccctaacatcaaggttattggtgtggaacctttagagagcaacattctttccggtggaaagcctggtcctcacaagattcagggaattggagctggttttgtaccctcaaatttggatcaggatgtggtcgatgaagtcatagagatatccagtgatgaagctgttgaaactgcaaaacaattagcactccaggaaggcttgttggtgggaatttcttctggagcagcagctgcagctgcaatgaaggttggaaaaagacctgagaatgcaggaaagcttattgcggttgtcttcccaagctttggtgaacggtacctctccactgctcttttccaaacaattcgagatgaatgtgagaaaatgcaacctgagccttga

SEQ ID NO: 815 - protein, 305 aa, Vitis vinifera
MVYLNNIVKGSVANIAAKLEIMEPCCSVKDRIGYSMIADAEQRGAITPGKSTLVEPTSGNTGIGLAFIAASKGYKLILTMPASMSMERRVLLKAFGAELVLTDPAKGMKGAVQKAEEILKSTPNAYMLQQFDNPANPKVHYQTTGPEIWEDTRGKVDIFIAGIGTGGTISGVGKFLKKQNPNIKVIGVEPLESNILSGGKPGPHKIQGIGAGFVPSNLDQDVVDEVIEISSDEAVETAKQLALQEGLLVGISSGAAAAAAMKVGKRPENAGKLIAVVFPSFGERYLSTALFQTIRDECEKMQPEP

SEQ ID NO: 816 - DNA, 948 bp, Microcystis aeruginosa PCC 7806
  CDS (1)..(948): transl_table=11
atgctgatcgcaagagacatcacccaattggtaggacggacacccctagtccaactgaatcgaatcccagtagcagagggagtaaaagcccgcatcgtcgtcaaactggaaagtatgaaccccgccgcctcggttaaggatcgcattggtgtcagtatggtggaggacgcggaagccgccggactaattcaccccgataaaacaattctggtggaacccacttccggcaataccggcatcgccctggccatggtggcggcggccaaaggctatcgcttagtcctgactatgcccgaaaccatgagtttagaacgacgggcaatgttaaaagcttacggggcgcaattagaattaaccccgggtagccaaggcatggaaggagcgatcacccgggccgaggaaatagtcgaaaacacccccaacgcctatagtttgcaacagttccgcaacccagccaacccgaaaattcaccgagaaaccaccgccgaagaaatctgggccgataccgacggactggtagatatcgttattggtggcgtgggaaccgggggaaccattaccggtattgccgaaaccattaaaccccgtcgtccccaatttcaagcgatcgcagttgaaccctctaatagtcccgtcttatcgggaggacaaccgggaccacacaaaatccaaggcatcggggccggttttatcccggcaattttccgaccggaattaatcgatgaggtgattatcgtcgatgatacggaggctttcgcctacgcgcgacggttagctcgtcaggagggactactatcgggcatctcggccggggccgctttatgggcggcgattcaggtgggaaaaagacccgaaaacgaagataaattaatcgtcatgattcagcctagtttcggggaacgttacctcagcacggccctgtttaaagacctcgaagatatcgactaa

SEQ ID NO: 817 - protein, 315 aa, Microcystis aeruginosa PCC 7806
MLIARDITQLVGRTPLVQLNRIPVAEGVKARIVVKLESMNPAASVKDRIGVSMVEDAEAAGLIHPDKTILVEPTSGNTGIALAMVAAAKGYRLVLTMPETMSLERRAMLKAYGAQLELTPGSQGMEGAITRAEEIVENTPNAYSLQQFRNPANPKIHRETTAEEIWADTDGLVDIVIGGVGTGGTITGIAETIKPRRPQFQAIAVEPSNSPVLSGGQPGPHKIQGIGAGFIPAIFRPELIDEVIIVDDTEAFAYARRLARQEGLLSGISAGAALWAAIQVGKRPENEDKLIVMIQPSFGERYLSTALFKDLEDID

SEQ ID NO: 818 - DNA, 960 bp, Microcystis aeruginosa PCC 7806
  CDS (1)..(960): transl_table=11
atgcgtatcgctcacgatgtcaccgaattggttggccgcacacctttagtacaattgaatcggattccccaagcggagggctgtcttggccgaattgtgatgaaattagaagggatgaatcccgctgcttccgtcaaagaccgcattggcactcacatgattaatagcgccgaaaaagcgggtttaatcaatccagaaaccacggttttagtggaacccacctctggcaatacgggaattgccctcgcgatgactgcggcagctaagggttatcgcttgattttaactatgccagaaacgatgagtttagagcgccgggcgatgttaaaagcctacggtgctaccctagaacttactcccggttcccaaggcatgaaaggggcaattttacgcgctcaacaaattgtcgatagtatccccggggcttatatgttgcaacaatttcgcaacccttctaacccggaaattcaccgtctcaccactgctgaggaaatttggcaagatacggagggacaggtagattttattgttgcgggtgtgggtactggaggcacgattacgggagtcgctgaagtgattaaatctcgtaaacctagttttcaagtagtcgcggtggaacctttcaatagtccggtgatttccgggggtaatcccggtccccataaaattcagggtatcggtgcgggttttattccagaagttttacgcacagatctgattgatgaggtaattactgtcagtgatgaggaagcttttcaatttggtcgtcgtctggcaaaagaggaagggttgctttcggggatttcttccggtgccaatctttgtgccgcaattcaactagcccaacgaccggaaaatgagggtaaattaattgtggtgattcagcctagttttggagaacgttatctgagtacgctgatgttccaaaatatcgaggagcgcgagttaactttggtgtaa

SEQ ID NO: 819 - protein, 319 aa, Microcystis aeruginosa PCC 7806
MRIAHDVTELVGRTPLVQLNRIPQAEGCLGRIVMKLEGMNPAASVKDRIGTHMINSAEKAGLINPETTVLVEPTSGNTGIALAMTAAAKGYRLILTMPETMSLERRAMLKAYGATLELTPGSQGMKGAILRAQQIVDSIPGAYMLQQFRNPSNPEIHRLTTAEEIWQDTEGQVDFIVAGVGTGGTITGVAEVIKSRKPSFQVVAVEPFNSPVISGGNPGPHKIQGIGAGFIPEVLRTDLIDEVITVSDEEAFQFGRRLAKEEGLLSGISSGANLCAAIQLAQRPENEGKLIVVIQPSFGERYLSTLMFQNIEERELTLV

SEQ ID NO: 820 - DNA, 969 bp, Microcystis aeruginosa PCC 7806
  CDS (1)..(969): transl_table=11
atggatattaaacatggtttcgtcgatgcggtgggtaatactcccctaattcgtctcaatagttttagcgaggaaactggctgcgagattctcggtaaggccgaatttcttaaccccggtggttcggtcaaggatcgcgccgctttatatattatccaagaagcggaaaaagccggtactctccaaccggggggaaccgttgtcgaaggaaccgccggcaatactggcatcggtttggcccatatctgcaatgctaaaggttataaatgcctgattatcattcccgatacccaatcccaagagaaaatcgacctcttaagaacccttggtgcggaagtgcgtactgttcccgccgttccctaccgagatgccaataattacgttaaattatcggggagattggccagtgagatggaaaatgctatctgggccaatcaattcgataatctggctaatcgtcgcgctcactacgaaaccaccggccgggaaatctgggaacaaaccgacggtaaaattgatgcttgggtggctgccacgggaaccgggggaacctacgcgggggtggcgatgtttttaaaagaccaaaatccccaggtgcgttgtgtggtggcggatccgatgggtagcggtttatatagttatgtgaaaaccgggacaattaccctggaaggtagttcaattacggaaggaattggtaatagtcgtattacggctaatatggaaggcgcacccatagatgatgccattcaaattgatgatcccactgccattaaagttgtttatcaactattacaaaaagatggtttatttatggggggttctgtgggtattaatgttggtgctgcggtagctttagctaaacaaatgggaccaggccacactattgttactgttctttgtgatggtgggtctcgttatcaatctcgtttatataatcctcaatggttggctgagaaaggattggcttaa

SEQ ID NO: 821 - protein, 322 aa, Microcystis aeruginosa PCC 7806
MDIKHGFVDAVGNTPLIRLNSFSEETGCEILGKAEFLNPGGSVKDRAALYIIQEAEKAGTLQPGGTVVEGTAGNTGIGLAHICNAKGYKCLIIIPDTQSQEKIDLLRTLGAEVRTVPAVPYRDANNYVKLSGRLASEMENAIWANQFDNLANRRAHYETTGREIWEQTDGKIDAWVAATGTGGTYAGVAMFLKDQNPQVRCVVADPMGSGLYSYVKTGTITLEGSSITEGIGNSRITANMEGAPIDDAIQIDDPTAIKVVYQLLQKDGLFMGGSVGINVGAAVALAKQMGPGHTIVTVLCDGGSRYQSRLYNPQWLAEKGLA

SEQ ID NO: 822 - DNA, 924 bp, Picea sitchensis
  CDS (1)..(924)
atggtatatctgaacaaagtaaccgagggctgtggggcttacgtcgctgccaaactggaaatgatgcaaccttgttgcagtatcaaggatagggttggatatgccatgattctcgacgctgaggagaaaggacttatttcgccagagaagagtgtactggtggagccaacatctggaaatatgggaattgcgttgtcttatattgctgcgagtagaggatacaaactcgtactcacaatgccctcttacacaagcctggaaagacgagtgaccatgcgtgcctttggctctgagcttgttctcacagatcctgtaaagggcatggggggtgctgtcaagaaggccgctgaccttctacagtcaacccccaatgccttcatgcttcagcagtttgataatcctgctaatgtcaaggcccattttgagacaacgggacctgagatctgggaagacactgctggccaagttgatattttcgtgatgggaattgggagcggtggtactgtctcgggagttggaagatacctcaaaagcaaaaatcccaatgtgaagatatatggacttgagccagcggaaagcaacattttaaatggtggaaagccaggtccacaccagataacaggtactggagttgggttcacacctaagattttggatctagatattcttgatggagtgatagaggtgtcaagtgatgatgccttaaaaatggcacgagagctagcttggaaagaaggccttatggttggaatttcttcaggggccaatactgttgcagcacttcaattagcaagaagaccagagaataaaaacaaacttattgtgactgttcatccaagtttcggggaaagatatctatcatctatgttgttccaagaattgaggcaagaggcagaaatgatgcaacccgtgtcagtggattga

SEQ ID NO: 823 - protein, 307 aa, Picea sitchensis
MVYLNKVTEGCGAYVAAKLEMMQPCCSIKDRVGYAMILDAEEKGLISPEKSVLVEPTSGNMGIALSYIAASRGYKLVLTMPSYTSLERRVTMRAFGSELVLTDPVKGMGGAVKKAADLLQSTPNAFMLQQFDNPANVKAHFETTGPEIWEDTAGQVDIFVMGIGSGGTVSGVGRYLKSKNPNVKIYGLEPAESNILNGGKPGPHQITGTGVGFTPKILDLDILDGVIEVSSDDALKMARELAWKEGLMVGISSGANTVAALQLARRPENKNKLIVTVHPSFGERYLSSMLFQELRQEAEMMQPVSVD

SEQ ID NO: 824 - DNA, 1206 bp, Picea sitchensis
  CDS (1)..(1206)
atgatgacgatgagcatgcaagcccaatttcagtccaatacttcagtcaggcttggccttggagtggccgaagctgcctcaattcccagggccagccctattattaagggctatccaatccacaaacgggaggccaggaaacggttgggtctgaaggcagcagtgggtgaaaatggaaggaagaggttcactaccctgtgcaagacggtttcttctgttgaacctcagacgaacgtgcaacccctcaatattgcagaagatgttactcagctgattgggaagacacccatggtgtatctcaacaatgttgtgaaaggatgcgttgcaaacattgctgcaaagctagaaatcatggaaccttgctgcagcgtgaaagacagaataggctacagtatgataactgatgctgaagccaagggtgccattactcctggcaagagcatccttgtagagccaactagtggcaatacagggattggtctagcgttcattgctgcagctaagggttataaacttattctaactatgccggcatctatgagtctggaacggcgagttctgctacgagcttttggagcagagctcgttctcacagaagctgctaagggcatgaagggagctgttcagaaagctgaggaaattttgaataaaacacctaatgcatacatgcttcaacagtttgacaatcctgcaaatcccaaggtccattatgagaccactggtcctgaaatttgggaagacacagaggggaaggttgacatatttgttgctggaataggaactggagggacagttactggtgttggtcgatatttaaaaggcaaaaatccaaatatcaagattattggtgtggagccaactgagagcaacatactgtctggaggaaagccaggccctcacaaaattcaaggcattggtgcaggctttattccacgtaatttggatgtagacatacttgatgaggtcatacagatatctagtgatgaagctgttgagatggcaaagcaattggcacttcaggaaggcttgatggttggaatttcatcgggagctgctgctgctgcagcgattgaagtagcaaaaagatcagggaactcagggaaactgattgcagttgtttttccaagttttggtgagcgatatctttcaactgttctgttccagtccatacgggaggaatgtgagaagatgcaacctgaagcatga

SEQ ID NO: 825 - protein, 401 aa, Picea sitchensis
MMTMSMQAQFQSNTSVRLGLGVAEAASIPRASPIIKGYPIHKREARKRLGLKAAVGENGRKRFTTLCKTVSSVEPQTNVQPLNIAEDVTQLIGKTPMVYLNNVVKGCVANIAAKLEIMEPCCSVKDRIGYSMITDAEAKGAITPGKSILVEPTSGNTGIGLAFIAAAKGYKLILTMPASMSLERRVLLRAFGAELVLTEAAKGMKGAVQKAEEILNKTPNAYMLQQFDNPANPKVHYETTGPEIWEDTEGKVDIFVAGIGTGGTVTGVGRYLKGKNPNIKIIGVEPTESNILSGGKPGPHKIQGIGAGFIPRNLDVDILDEVIQISSDEAVEMAKQLALQEGLMVGISSGAAAAAAIEVAKRSGNSGKLIAVVFPSFGERYLSTVLFQSIREECEKMQPEA

SEQ ID NO: 826 - DNA, 978 bp, Populus trichocarpa
  CDS (1)..(978)
atggcagaggagaagggttcaattgccaaagatatcactgaacttattggtaaaacaccattggtgtatctcaacaatgttgtggatggttgtgtggcgcgaattgctgccaagctggagatgatggaaccttgctcgagtgtcaaagacaggattgggtatagtatgatcacagatgcagaggagaaggggcttatcaaggcgggtgagagtgtcctgattgagcctacgagtggcaatactggcatagggctggcattcatggcagctgctaagggctacagattgataattaccatgcctgcttcgatgagtctagagagaagaatggttctccttgcttttggagctgagttggtccttactgatccagccagaggtatgaagggggctgttcagaaggcagaagagatatcggcaaagacacctaattcttatattctgcaacaatttgaaaatcctgccaacccaaaggttcactatgagacaactggaccagagatctggaaaggctcaggtgggaaagttgatgcctttgtttctgggatagggaccgggggtacaataactggagcagggaagtatctcaaggagcaaaaccctgatataaagctttatggtgtagaaccggttgaaagtgcagtgctgtctggagggaaacctggtccacataagatccagggaattggtgctggctttatacctggagttttgaatgtcgatttacttgatgaaactgttcaaatatcaagtgaagaagcaattgaaactgcaaagcttctcgccttgaaagaaggactgctggtagggatatcatctggagctgctgcagctgctgcaattaagatagcaaagaggcctgaaaatgctggaaaactcattgttgcgatcttccctagttttggagagcgttacctatcctctgtgctttttgaatcagtgaagaaggaggccgagaacatggtttttgagccttga

SEQ ID NO: 827 - protein, 325 aa, Populus trichocarpa
MAEEKGSIAKDITELIGKTPLVYLNNVVDGCVARIAAKLEMMEPCSSVKDRIGYSMITDAEEKGLIKAGESVLIEPTSGNTGIGLAFMAAAKGYRLIITMPASMSLERRMVLLAFGAELVLTDPARGMKGAVQKAEEISAKTPNSYILQQFENPANPKVHYETTGPEIWKGSGGKVDAFVSGIGTGGTITGAGKYLKEQNPDIKLYGVEPVESAVLSGGKPGPHKIQGIGAGFIPGVLNVDLLDETVQISSEEAIETAKLLALKEGLLVGISSGAAAAAAIKIAKRPENAGKLIVAIFPSFGERYLSSVLFESVKKEAENMVFEP

SEQ ID NO: 828 - DNA, 1125 bp, Populus trichocarpa
  CDS (1)..(1125)
atggctgctttaaggagcttattgaagaaaaactcatcatcaatcccaacatgtaacgagctggtgatgattagaagattgttctcttcggaagctgctgctgcttccccttcttttgctcaaagactcagagatttgcctaaagatcttcctggcactaaaatcaagacacaagtttcccaactcattgggaaaactccaattgtgtatctgagcaaagtgactgaaggatgtggagcttatatagccgccaagcaagagatgtttcagcccacttctagcatcaaagacagaccggcattggcaatgatagaagatgcagaaaagaagaacttgattgctcctgggaagacgactttgatagagcccacatctggtaatatggggatcagcatggcatttatggcagccatgaaagggtacaagatgattctaaccatgccttcttatactagtttggagagaagggtgaccatgagagcttttggagctgagttaattctgactgaccccgctaagggaatgggaggaacagttaagaaggcttatgaacttttggaatccactccaggtgctttcatgcttcaacagttctcaaatcctgccaatacccagatccatttcgaaactacaggcccggaaatatgggaggattcacttggaaaagttgacatctttgtaatgggaataggcagtggagggactgtctctggcgtcgggaagtatctcaaatcccaaaatcctaacgttaagatttatggagtagagcctgcggagagtaatgtacttaatggtggtaaaccaggtcctcatgacattactggcaatggggttggattcaaaccagatatattggacatggatgtaatggaaaaggtccttgaggttagtagcgaagatgctgtgaatatggctaggaggttggcactggaagaaggtcttatggtgggaatatcatccggagccaacacagttgccgcacttagacttgcgagaatgccagaaaataaaggcaaacttatagtgactattcatgcaagttttggggagcgatacttgtcatctgttctctttcaagatctgaggaaagaagccgagaacatgcagccagttcctgtggactaa

SEQ ID NO: 829 - protein, 374 aa, Populus trichocarpa
MAALRSLLKKNSSSIPTCNELVMIRRLFSSEAAAASPSFAQRLRDLPKDLPGTKIKTQVSQLIGKTPIVYLSKVTEGCGAYIAAKQEMFQPTSSIKDRPALAMIEDAEKKNLIAPGKTTLIEPTSGNMGISMAFMAAMKGYKMILTMPSYTSLERRVTMRAFGAELILTDPAKGMGGTVKKAYELLESTPGAFMLQQFSNPANTQIHFETTGPEIWEDSLGKVDIFVMGIGSGGTVSGVGKYLKSQNPNVKIYGVEPAESNVLNGGKPGPHDITGNGVGFKPDILDMDVMEKVLEVSSEDAVNMARRLALEEGLMVGISSGANTVAALRLARMPENKGKLIVTIHASFGERYLSSVLFQDLRKEAENMQPVPVD

SEQ ID NO: 830 - DNA, 1209 bp, Populus jackii
  CDS (1)..(1209)
atggcgtcctcctcgtctctaatgatgaatccgttgacctcaccattccacaaatccctaaaaccagagtctctcctcttggtgggccctacagcatcaccaacagcaactcaactgtggttgctgacacaaaacaagaagctcaaacagaagccaaagtcagtgtctttctctgcttcttcttcgtcttctcctgtggtgtgcaaggcagtgtctgttaagcaaccagagactgagattgaaggtctcaacattgccgggaatgttactcagcttattgggaaaactcctatggtttacctaaataatatcgtaaagggttctgttgcaaacattgctgccaagcttgagatcatggaaccatgttgcagtgtcaaagacaggataggtcatagtatgatagctgatgctgagcaaagaggacttataactcctggaaagagtgttcttgtggaacctacaagtggaaacacaggcattggccttgcatttatagctgcttcaaaaggatataaactcatcttgaccatgccagcatcaatgagtttagagagaagagttctttttaaagcgtttggagctgagcttgttttaactgatgcagcaaagggcatgaagggtgcagttcagaaagctgaagaaattgtgaaaagaacacccaacgcttacatgcttcaacaatttgataatcctgcaaatcctaagatacactatgaaacaactggaccagaaatctgggaagatacaagaggcaaggtagatatttttgttgctggtattggaactggtggtaccatttctggagttggtcggttcctcaaggagaagaatcccaaaattaaggttattggtatagaaccttcagaaagcaacattctctcaggtggaaagcctggtcctcacaagattcaagggattggagctggttttgtaccaaggaatttggatcgagatgtggttgatgaagtaattgagatatcaagtgatgaagctgttgaaactgcaaagcaagtggcgctccaggaaggcttattggtcggcatatcttctggagcagctgcagctgctgcaattaaggtcggaaagagacctgagaatgcagggaagctgattgcagttgtgtttccaagcttcggcgagcggtacctctccactgttcttttccagtcaattcgagaagaatgtgagaaaatgcagcctgagccatga

SEQ ID NO: 831 - protein, 402 aa, Populus jackii
MASSSSLMMNPLTSPFHKSLKPESLLLVGPTASPTATQLWLLTQNKKLKQKPKSVSFSASSSSSPVVCKAVSVKQPETEIEGLNIAGNVTQLIGKTPMVYLNNIVKGSVANIAAKLEIMEPCCSVKDRIGHSMIADAEQRGLITPGKSVLVEPTSGNTGIGLAFIAASKGYKLILTMPASMSLERRVLFKAFGAELVLTDAAKGMKGAVQKAEEIVKRTPNAYMLQQFDNPANPKIHYETTGPEIWEDTRGKVDIFVAGIGTGGTISGVGRFLKEKNPKIKVIGIEPSESNILSGGKPGPHKIQGIGAGFVPRNLDRDVVDEVIEISSDEAVETAKQVALQEGLLVGISSGAAAAAAIKVGKRPENAGKLIAVVFPSFGERYLSTVLFQSIREECEKMQPEP

SEQ ID NO: 832 - DNA, 978 bp, Sesamum indicum
  CDS (1)..(978)
atggccgaagaaaatgttggaattgcaaaggatgttactgagttgattggtaaaactccattggtgtacttgaacaatattgttgatggttgtgttgggcgtgttgcggctaagctggagtcaatggagccgtgctctagcgtcaaggataggattggttatagtatgattacagatgctgaagcacagggcctcatcacacctggacagagtgtcctcattgaaccaacgagtggcaacacgggtataggcttggcattcatggctgctgctaaaggctacaagctcattatcaccatgccttcttctatgagtcttgagcgcagaattattctccgtgcttttggtgctgagttggtgctaacagatcctgctaagggaatgaaaggtgctgttcagaaggctgaagagataagggataagacacctaattcctacatcctgcagcaattcgaaaaccctgccaatcctaagatacactatgaaaccaccggacctgagctctggaaaggagcgaatggaaaaattgatgcgtttgtttccgggattggtactggaggcacaatcactggtgcaggaaagtttcttaaagaacacaaccctaacataaagctttatggggtggaaccagttgaaagtcctattctctctggaggaaagcctggtccacacaagattcaagggatcggggctggtttcatccctggcgttttggatgttaatctcattgatgaagtaattcaggtttcaagcgacgaggccatagagactgcgaagcttcttgcattgaaagaggggttgttggtgggaatatcatctggcgctgctgctgctgctgctattaggattgcaaagcggcctgaaaatgctggaaaactcattgttgttatcttcccaagctttggtgagcggtacctttcctctgtactctttgaatctgtcagacgagaggctgaaagcatgactgtcgagccatga

SEQ ID NO: 833 - protein, 325 aa, Sesamum indicum
MAEENVGIAKDVTELIGKTPLVYLNNIVDGCVGRVAAKLESMEPCSSVKDRIGYSMITDAEAQGLITPGQSVLIEPTSGNTGIGLAFMAAAKGYKLIITMPSSMSLERRIILRAFGAELVLTDPAKGMKGAVQKAEEIRDKTPNSYILQQFENPANPKIHYETTGPELWKGANGKIDAFVSGIGTGGTITGAGKFLKEHNPNIKLYGVEPVESPILSGGKPGPHKIQGIGAGFIPGVLDVNLIDEVIQVSSDEAIETAKLLALKEGLLVGISSGAAAAAAIRIAKRPENAGKLIVVIFPSFGERYLSSVLFESVRREAESMTVEP

SEQ ID NO: 834 - DNA, 1134 bp, Manihot esculenta
  CDS (1)..(1134)
atggctactcttacatcaatggctactcttaggaacttgttcacgaaaaaatcttttgcctcaaacgagcttgctatgcggaggttcttcacaccgcaggccgctgctgctgaagctccttcttttgctcaaagagtcagggatctgcccaagaatctccctgcaactaagatcaggactgaagtttctcatctcattgggagaactccccttgtttttcttaacaaagtgaatgaaggatgtggagcttacatagccgtcaagcaagagatgatgcaaccaactgccagcatcaaagacaggccggctttttcaatgttcaatgatgcagaaaagaagaatttaatctctcctgggaagacggtcttgatagagccaacttctggtaatatggggattagtatggcttttatggcagccatgaaaggatacaagatgattttaaccatgccctcttacacaagcttggaaagaagggtgactatgagggcatttggagctgagctaattctcactgatcccaccaaggggatgggaggaacagttaagaaggcctatgatcttttggaaaccacaccaaatgcttacatgctacaacagttttcgaatcctgcaaatagtaagatccattttgaaacgacagggcctgaaatatgggaggatactcttggacaagttgatatctttgtaatgggaataggcagtggaggaacagtcactggcgttggacagtaccttaaatcccaaaatcctaatgttaagatatatggagtggagcctgctgaaagtaatgtgctgaatggtggtaaaccaggtcctcatcaaattactggaaatggagtaggatttaaaccagacatattggacatggacgttatggaaaaagttcttgaggttagcagtgaagatgcgataaaaatggctaggaggttggcattggaggagggacttatggtgggaatttcatctggagccaacacagttgctgcacttagacttgcaaggatgccagagaacaaaggcaaactcatcgtgactgttcatccaagtttcggggagcgatacttgacttctgtgctgtttgaacaactgagaaatgaggctgcaaacatgcaaccagttccagttgactaa

SEQ ID NO: 835 - protein, 377 aa, Manihot esculenta
MATLTSMATLRNLFTKKSFASNELAMRRFFTPQAAAAEAPSFAQRVRDLPKNLPATKIRTEVSHLIGRTPLVFLNKVNEGCGAYIAVKQEMMQPTASIKDRPAFSMFNDAEKKNLISPGKTVLIEPTSGNMGISMAFMAAMKGYKMILTMPSYTSLERRVTMRAFGAELILTDPTKGMGGTVKKAYDLLETTPNAYMLQQFSNPANSKIHFETTGPEIWEDTLGQVDIFVMGIGSGGTVTGVGQYLKSQNPNVKIYGVEPAESNVLNGGKPGPHQITGNGVGFKPDILDMDVMEKVLEVSSEDAIKMARRLALEEGLMVGISSGANTVAALRLARMPENKGKLIVTVHPSFGERYLTSVLFEQLRNEAANMQPVPVD

SEQ ID NO: 836 - DNA, 1035 bp, Rhodobacter sphaeroides
  CDS (1)..(1035): transl_table=11
atgcgcatccaacgtgaccttgccgaagcgatcggcaacacccccctcatccgcctccgcaaggcgtcggagctcacgggctgcgagatcctcgggaaatgcgagttcctgaacccgggccagtcggtcaaggaccgcgccgcgctctacatcatccgcgatgcggtggcgaaggggctcctgcaaccgggcggcaccatcgtcgaggggacggccggcaacaccgggatcggcctgtcgctggtgggcgcctcgatgggcttccgcacggtcatcgtcatccccgagacccagagccaggagaagaaggacatgctgcgccttgcgggcgcgcatctcgttcaggttccggcggggccctaccgcaatccgaacaactacgtccgctattcgggccgcctcgccgaggcgctggcccgcaccgaagagcgcggggcgatcttggccaaccagttcgacaataccgcgaaccgtcaggcccatgtcgagacgaccgggcccgagatctgggagcagaccgacggcaaggtcgacggcttcatctgtgccgtgggctcgggcggcacgctcgcgggcgttgccatggcgcttcagcccaggggcgtgaagatcggcctcgccgatcccgagggcgcggcgctgcacagcttctacaccgaaggcaccttcgaggcgcccggcagctcgatcaccgaaggcatcgggcagggccggatcaccgccaacctcgaggggctgacccccgacttcagctaccgcatccccgatgccgaggcgctgccgatcatcttcgacctgatgcaggaagagggcctctgcctcggcggctcgtcgggcgtgaacatcgccggcgcgatccgcatggcgcgcgagatggggccgggccaccggatcgtgaccgtgctctgcgactacggcaaccgctaccagtccaaactcttcaatccgcagttcctgcgcgacaaggggctgcccgtgccgcaatggctcgacgaggcgcccccggcgatccctgcggtgttcgaggatctctga

SEQ ID NO: 837 - protein, 344 aa, Rhodobacter sphaeroides
MRIQRDLAEAIGNTPLIRLRKASELTGCEILGKCEFLNPGQSVKDRAALYIIRDAVAKGLLQPGGTIVEGTAGNTGIGLSLVGASMGFRTVIVIPETQSQEKKDMLRLAGAHLVQVPAGPYRNPNNYVRYSGRLAEALARTEERGAILANQFDNTANRQAHVETTGPEIWEQTDGKVDGFICAVGSGGTLAGVAMALQPRGVKIGLADPEGAALHSFYTEGTFEAPGSSITEGIGQGRITANLEGLTPDFSYRIPDAEALPIIFDLMQEEGLCLGGSSGVNIAGAIRMAREMGPGHRIVTVLCDYGNRYQSKLFNPQFLRDKGLPVPQWLDEAPPAIPAVFEDL

SEQ ID NO: 838 - DNA, 1038 bp, Ostreococcus tauri
  CDS (1)..(1038)
atgaagagtactatctcggtgcgcgcgaagcgctcgagcgcgcgggcgtcgcgggtggcgacgcgggcggcgaacgcggtgaacatcgcggacaacgtgacgcagctcgtcgggtgcacgcctatggtgtacctgaacaaagtctcggaaggatgcggagcagagatcgcggccaagctagagattatggaaccgtgctgcagcgtgaaggatcgcatcggttggagcatgatcgccgcggcggaacaagaggggaagatcactccgggtaagacgacgctcgtggagccgacgagtggaaacacgggcattggcttggcgttcatcgccgccgcgaagggatacaagctcacgctcacgatgccggcgtccatgtcgcttgaacgtcgcatcttgttgaaggcgttcggggcgaacttggtgttgacggacccggcaaaaggtatgaagggtgcggtcggcaaggctgaggaaatcgccgccaagacggcggactcttacattctgcaacagttcgaaaacccggccaacccaaaggtgcactttgaaacgacggggccggagatctgggaagataccgcgggtcaaatcgacatttttgtcgcgggcgtcggcaccggcggtaccatcacaggcacgggtcgctacctcaagagcaagaacccaaactgcaagatcgttgccgtcgaaccgactgagtctccggtgctctcgggtggcggaccgggcccgcacaagattcaaggtatcggtgcgggcttcatcccgggtattctcgacgtggacatcatcgacgaaattgtgcaagtggcgagtgacgacgccatcgcgatggcaaagcagttggcgttgcaagagggcttgatggtcggtatctcctccggtgcggcggcagtcgcggcgattcaactcgctaagcgcccggaaaatgccggcaagctcatcgggacagtgttcccgtcctttggtgaacgttacctctcttccgctctcttcagcaccatccgggacgaagccgaggcgatggttgccgaataa

SEQ ID NO: 839 - protein, 345 aa, Ostreococcus tauri
MKSTISVRAKRSSARASRVATRAANAVNIADNVTQLVGCTPMVYLNKVSEGCGAEIAAKLEIMEPCCSVKDRIGWSMIAAAEQEGKITPGKTTLVEPTSGNTGIGLAFIAAAKGYKLTLTMPASMSLERRILLKAFGANLVLTDPAKGMKGAVGKAEEIAAKTADSYILQQFENPANPKVHFETTGPEIWEDTAGQIDIFVAGVGTGGTITGTGRYLKSKNPNCKIVAVEPTESPVLSGGGPGPHKIQGIGAGFIPGILDVDIIDEIVQVASDDAIAMAKQLALQEGLMVGISSGAAAVAAIQLAKRPENAGKLIGTVFPSFGERYLSSALFSTIRDEAEAMVAE

SEQ ID NO: 840 - DNA, 1323 bp, Ostreococcus tauri
  CDS (1)..(1323)
atgcatcggcgagaccgcatccatcgacggccgcggtcgagcgacgcgcgcgcgtcggtgcgtcgcgggcgcgacgggcgcgtcgacggcgtcataccgctcgaatcgatcgtcgatcgcatcgtcaccgcgctcgtgacgatggtgggcgtgttgtcggcgcaacgatggctcggggggacggcggtgcgcgcgaacgatcgcgcgcgcgcgcggcgcgcgggcgcgcggcgagggatcgcgcccgaggcgaggatttacgagaacatcctggagacggtgggggatacgccggtgattaaaattaaccgtctcgccccggagggggtggagatgtacgtcaaggcggagtactttaacccgttgagcagcgtgaaggatcgattggcggtggcggtgatcacggatgctgaaagacgcggattgctcaagcccggggacaccgtcgtggaggcgacgagcgggaacacgggcatcgcggtggcgatggcgtgcgcgcagcgaggctatcgctgcgtcatctgcatggccgaaccgttctccgtcgagcggagaaagatcatgcgcatgctcggggcgaaggtgatcgtgaccccgaaagcgggcaagggcaccggcatggtggcaaaggctgaggaactcgcggctaagcacgggtggttcctgtgccgacaattcgagaacgaagcgaatccggcgtaccacgcctcgacgacgggcccggagatcgttcgagacttcgccggtaagaagctcgattactttgtcaccggttacggtaccgggggtacgttccagggcgtctctcgcgtgctcagggagtcccgtccggacacgaagatcgtgttgctcgaacccgaagccgcggcgctcgtgtcgagcggcatcaagacggagcgcaaggacactggtgctcccgccggatcgcatccggcgttcgcggcgcacccggtgcagggctggaccccggatttcatcccgctcgttctcgaaaacggtttgaacatgaacctgtacgacgaactcgtcaagattgaaggcggcgacgccgtccagacggcgcaggcgctcgcgagaaacgaaggcatctttaccggtatctccggcggcgccacgttcgccggcgcgctcaccgtcgccaagaaggcgccgaagggttccgtcatcctcgccatgctcccggatacgtccgagcgctacatgagcacccctctgtacgagaccatcgacgccgagatgaacgacgaagagcttgagatcgccaagagcacgccgtcgtttcaactcattccaggacaagacccgactcttctggtgcaataa

SEQ ID NO: 841 - protein, 440 aa, Ostreococcus tauri
MHRRDRIHRRPRSSDARASVRRGRDGRVDGVIPLESIVDRIVTALVTMVGVLSAQRWLGGTAVRANDRARARRAGARRGIAPEARIYENILETVGDTPVIKINRLAPEGVEMYVKAEYFNPLSSVKDRLAVAVITDAERRGLLKPGDTVVEATSGNTGIAVAMACAQRGYRCVICMAEPFSVERRKIMRMLGAKVIVTPKAGKGTGMVAKAEELAAKHGWFLCRQFENEANPAYHASTTGPEIVRDFAGKKLDYFVTGYGTGGTFQGVSRVLRESRPDTKIVLLEPEAAALVSSGIKTERKDTGAPAGSHPAFAAHPVQGWTPDFIPLVLENGLNMNLYDELVKIEGGDAVQTAQALARNEGIFTGISGGATFAGALTVAKKAPKGSVILAMLPDTSERYMSTPLYETIDAEMNDEELEIAKSTPSFQLIPGQDPTLLVQ

SEQ ID NO: 842 - DNA, 1464 bp, Arabidopsis thaliana
  CDS (1)..(1464)
atgcataccctccccaacaaagaattggaagtcactgagcctggggagcaaaaacttggtagctccctcaatacccttcttgaagacagcttgatcttcttcgctgagcttgggtgtcaaaagcttaatgtatttcttaatgtaagcgatgaatcccttcttgtcataagttggttgctcctgaagtctgaaggtgtcgacaatgtcaacaaccttttgagtagagtcatcaacaccttcatcctcaccaccttcttcagcagatggattggcaccaatgttaacatctacagctcccacagtaacccactttccttctacttcccagaggattccattctcaatctccttgtaagggaaagagtcagacagaagctcatcaccggtgagaagatcttggtacaccaacatggtcgcttattgattgttttctctctccgatggatgcgaataaacgaaaatcgaaggttgcgggagagagacgcagcgacgaggcggttctcgagaattgctaaagatgtgactgaattgattgggaacactccattggtgtatttgaacaatgttgctgaaggatgtgttggtcgtgttgctgctaagcttgagatgatggaaccgtgctctagcgtcaaagacaggattggttttagcatgatttctgatgcagaaaagaagggtcttatcaaaccaggagagagtgtgctgattgagccaacaagtggaaacactggagttgggttagcattcacggcagctgccaaaggctacaagcttattattacaatgccagcttctatgagtactgagagaagaatcattctcttagcttttggagttgagttggttttaactgacccagctaagggcatgaaaggagctatcgcaaaggcggaagagattttggcgaaaacacccaatggttacatgcttcagcagtttgagaaccctgccaaccctaagatccactatgagactacgggacctgagatatggaaaggcactggtggcaaaatcgatggctttgtttctgggattggtactggtggtaccattacaggtgctgggaagtatcttaaagaacagaacgcaaacgtcaagctgtatggagtggagccagttgaaagtgctattctatccggtgggaagccaggtcctcacaagattcaagggataggagctggttttataccaagtgtattgaatgttgatcttattgacgaagttgttcaggtttcaagtgatgaatccattgacatggcaaggcagcttgctcttaaagaaggtcttcttgtgggaatatcatccggtgcagcagctgctgcagcaattaaacttgcacagaggccagaaaacgctgggaagctatttgtggcgatattcccgagtttcggggagaggtatctatcaacggtacttttcgatgcgacaaggaaagaagcggaagccatgaccttcgaggcttga

SEQ ID NO: 843 - protein, 487 aa, Arabidopsis thaliana
MHTLPNKELEVTEPGEQKLGSSLNTLLEDSLIFFAELGCQKLNVFLNVSDESLLVISWLLLKSEGVDNVNNLLSRVINTFILTTFFSRWIGTNVNIYSSHSNPLSFYFPEDSILNLLVRERVRQKLITGEKILVHQHGRLLIVFSLRWMRINENRRLRERDAATRRFSRIAKDVTELIGNTPLVYLNNVAEGCVGRVAAKLEMMEPCSSVKDRIGFSMISDAEKKGLIKPGESVLIEPTSGNTGVGLAFTAAAKGYKLIITMPASMSTERRIILLAFGVELVLTDPAKGMKGAIAKAEEILAKTPNGYMLQQFENPANPKIHYETTGPEIWKGTGGKIDGFVSGIGTGGTITGAGKYLKEQNANVKLYGVEPVESAILSGGKPGPHKIQGIGAGFIPSVLNVDLIDEVVQVSSDESIDMARQLALKEGLLVGISSGAAAAAAIKLAQRPENAGKLFVAIFPSFGERYLSTVLFDATRKEAEAMTFEA

SEQ ID NO: 844 - DNA, 1131 bp, Malus domestica
  CDS (1)..(1131)
atggcggctttaaggagctttctgaagaaaaggtcctctgtgctctgcaatggagccatgagacggaaactgttctccaccgaggtgtcccaacccctcactgattctccatcttttgctcagagaatcagaaatctccccaaggatcttcctggcacccaaatcaaaacccaagtttcccaactcattggtagaactcctattgtttatcttaacaaagtcactgagggatgtggagcgtatattgccgtcaagcaagagatgttccaacccaccgccagcatcaaggacagaccggcactttctatgatcaacgatgcagaagagaagggcttgataactcctggggagacaatactgatcgagccaacatcaggaaatatgggaatcagcatggcgtttatggcggccatgagagggtataaaatggttttaaccatgccatcttacacaagcttggagagaagggtgtgtatgagatgctttggagctgatttgattctcactgatccaaccaaggggatgggaggaactgttaagaaggcgtatgatcttctggaatccacgcccaatgcctatatgctgcaacaattctcaaatcccgccaatactaaggtacattttgaaactacaggccctgagatatgggaggataccaacggacaagttgacatcttcgtaatgggaatcggtagtggaggcactgtctctggagtcgggcagtatctcaaatctaaaaatcctaatgttcagatatatggagtggagcctgctgaaagtaatgtgctgaatggcggtaaaccaggtcctcattcaatcatgggcaacggggttgggttcaaaccagatatattggacttggatatgttggaaagagttattgaggttaccagtgaagatgcagtaaacatggcaagacaattggcattgaaagaagggcttatggttggaatatcgtctggagccaacactgtggcagcaatggagcttgctaaaaagccagaaaacaaaggcaaactcattgtgactgttcacccgagctttggggagcgatacttgtcatccgttctatttcaagagctgaggcaggaagccgaaaacatgcaaccagttgccgtcgactatccctaa

SEQ ID NO: 845 - protein, 376 aa, Malus domestica
MAALRSFLKKRSSVLCNGAMRRKLFSTEVSQPLTDSPSFAQRIRNLPKDLPGTQIKTQVSQLIGRTPIVYLNKVTEGCGAYIAVKQEMFQPTASIKDRPALSMINDAEEKGLITPGETILIEPTSGNMGISMAFMAAMRGYKMVLTMPSYTSLERRVCMRCFGADLILTDPTKGMGGTVKKAYDLLESTPNAYMLQQFSNPANTKVHFETTGPEIWEDTNGQVDIFVMGIGSGGTVSGVGQYLKSKNPNVQIYGVEPAESNVLNGGKPGPHSIMGNGVGFKPDILDLDMLERVIEVTSEDAVNMARQLALKEGLMVGISSGANTVAAMELAKKPENKGKLIVTVHPSFGERYLSSVLFQELRQEAENMQPVAVDYP

SEQ ID NO: 846 - DNA, 930 bp, Candidatus Kuenenia stuttgartiensis
  CDS (1)..(930): transl_table=11
atgacaaagatatacgatgacatcactgctacaattggcaacacgccattagtcagattgaataaaatatcaaaagggctggactgcattatcactgctaagatggagtctttcaaccccatggcgagtgtaaaagaccgcattggaatcgccatgattgaggccggcgaaaaggcaggattgataaaaaaagacacagttctgatagaacctacctctggcaatacaggaattgccttggcttttgtagctgccgccagagattataaattaattttaacaatgccagatacgatgagcctggaacgccgggagcttttgaaggcttttggggccgaaattgtattaacaccaggatcggaaggtatgaagggggcgattaataaagcagaagaaatgcttcaaaatattcccaattcattcatgccgcaacaatttaaaaatgatgcaaatccggaaatacaccgcaaaacgactgcagaagaaatttggaatgataccgatggacaaatcgatatttttgtaggtggtgttggcacagggggcaccattaccggggttggcgaggtcattaaaaaaagaaaaccttcattaaaagtaatcgccgtggaaccctcaggttctgctgtactttccggtggaaaaccgggacctcacaaaatacagggacttggtgcaggctttgtacctgaaattcttaatacaaaaataatcgatgaaattgttaaggtggaaaacgaacaggcgtttgccttatcgcgccaacttgcacgtgatgaaggaattttagtgggtatttcttcaggcgccgcagcgtatgccgcactgcaggtcgcagcaaggcctgaaaacaaaggaaagctattggtggtagtattccctgacaccggcgaaagatatctatccaccgtattgtttaaggaactttaa

SEQ ID NO: 847 - protein, 309 aa, Candidatus Kuenenia stuttgartiensis
MTKIYDDITATIGNTPLVRLNKISKGLDCIITAKMESFNPMASVKDRIGIAMIEAGEKAGLIKKDTVLIEPTSGNTGIALAFVAAARDYKLILTMPDTMSLERRELLKAFGAEIVLTPGSEGMKGAINKAEEMLQNIPNSFMPQQFKNDANPEIHRKTTAEEIWNDTDGQIDIFVGGVGTGGTITGVGEVIKKRKPSLKVIAVEPSGSAVLSGGKPGPHKIQGLGAGFVPEILNTKIIDEIVKVENEQAFALSRQLARDEGILVGISSGAAAYAALQVAARPENKGKLLVVVFPDTGERYLSTVLFKEL

SEQ ID NO: 848 - DNA, 945 bp, Candidatus Kuenenia stuttgartiensis
  CDS (1)..(945): transl_table=11
atgcaggttgggatattaaaagataacgatatgccccgaaaagtacgttgcaattcaattttggagagaattggaaacacgccgcttatcaggattaacaaaattacaaaggaattgcagaaaaggaacgtagaaatttacgttaaagcagaatggtttaaccctggaggctctgtaaaggatcgtcccgcgttacgaattgtcgaagatgctgaaaaatcggggaagttgggcggtgataaaatattgatagattcgacttcgggtaataccggcatagcgtatgcgtttatcggtgcagtaaaaggatacgaggttaatttggtaatgcccttaaatgttagtgaggaaagaaaacgaatcgtatctgctttcggaacaaaaaccatatacacggatccattattaggttctgacggcgctatgaatgaagccaagagactggtcaacgaaacccctgcaaaatatttttatggcaatcagtacaataacccttcaaattggatgtcgcactatgaaacaaccggtgttgaaatatggaagcagacagagggtaacttaacccattttattgcttgtttgggaacgagtggcacattaatgggtacgggaaaaaggttgaagaaatttaactctaatattcaggtaatatcggttgaacccgacacgtccattcacggactggaaggaatgaagcatatggaaacttcgattactcctggcatttacaatgaggattttcccgacaggaaaatgtatgttgaaacggaagatgcgtataaattggtaaagaggcttgccgcagaggagggattttttgtcgggtattcttctggcgccgcccttgcagcatcgttaaaggtagcggatgaaattaaaaatgggatgattgtgacaatatttcccgacaggggtgatagatatcttagtacaagtttttggtaa

SEQ ID NO: 849 - protein, 314 aa, Candidatus Kuenenia stuttgartiensis
MQVGILKDNDMPRKVRCNSILERIGNTPLIRINKITKELQKRNVEIYVKAEWFNPGGSVKDRPALRIVEDAEKSGKLGGDKILIDSTSGNTGIAYAFIGAVKGYEVNLVMPLNVSEERKRIVSAFGTKTIYTDPLLGSDGAMNEAKRLVNETPAKYFYGNQYNNPSNWMSHYETTGVEIWKQTEGNLTHFIACLGTSGTLMGTGKRLKKFNSNIQVISVEPDTSIHGLEGMKHMETSITPGIYNEDFPDRKMYVETEDAYKLVKRLAAEEGFFVGYSSGAALAASLKVADEIKNGMIVTIFPDRGDRYLSTSFW

SEQ ID NO: 850 - DNA, 960 bp, Azospirillum brasilense
  CDS (1)..(960): transl_table=11
atgccgggttccgagtttcgcggtaagatctacgacagcattctcgacaccgtcggcgccacgccgctggtgcgcgtcaaccggctggccgaggacgccggggccaaggcccagatcgtcggcaagctggagttcttcaacccgctggccagcgtgaaggaccgcatcggcttcgcgatgatcgacgcggcggagcgcgccggcaccatcgagcccggccgcaccaccctggtcgagccgacgtcgggcaacaccggcatcgcgctggccttcgtcgccgccgccaagggctaccggctgatcctgaccatgccggaaagcatgtcggtcgagcgccgcaagatgctgaagctgctgggcgccgagctggtgctgaccccggcggcggagggcatgaagggcgccatccgccgggccgacgagatcgtcgccaccgatccgaacgcctacatgctccagcagttcaagaacgccgccaacccggagatccaccgcaacacgacggcggaggagatctggaaggacaccgacggcaaggccgatttcctgatttccggcgtcggcaccggcggcacgctgaccggcgtgtcggaggtcctgaaggcccgcaagccgggcttccgcaccatcgcggtggagccggaggacagccccgtcctgtccggcggcatgcccggcccgcacaagatccagggcatcggcgccggcttcgtgccggacgtcctgaagaaggacctgatcgacgaggtcgtgcgcatctccaaccagcgcgccttcgagacggcccgcaaggtggcgaagctggaaggcatcccggtcggcatctcctcgggcgcggcgctggccgcggcgctggagatcggctcccgtccggagaacgagggcaagctgatcgtcgtgatcctgccatccttcgccgagcgctatctctccaccgccctgttcgaggggctggaataa

SEQ ID NO: 851 - protein, 319 aa, Azospirillum brasilense
MPGSEFRGKIYDSILDTVGATPLVRVNRLAEDAGAKAQIVGKLEFFNPLASVKDRIGFAMIDAAERAGTIEPGRTTLVEPTSGNTGIALAFVAAAKGYRLILTMPESMSVERRKMLKLLGAELVLTPAAEGMKGAIRRADEIVATDPNAYMLQQFKNAANPEIHRNTTAEEIWKDTDGKADFLISGVGTGGTLTGVSEVLKARKPGFRTIAVEPEDSPVLSGGMPGPHKIQGIGAGFVPDVLKKDLIDEVVRISNQRAFETARKVAKLEGIPVGISSGAALAAALEIGSRPENEGKLIVVILPSFAERYLSTALFEGLE

SEQ ID NO: 852 - DNA, 1020 bp, Allium sativum
  CDS (1)..(1020)
atgggagaaagaacgggacttgcttcttttattgctgcacacaacgaagatgcctccgaaaatattgttcaagacataactcagcttgttggatggacaccactgatagaaatcaaaagcataacaaaagctgacagcgttggtgcccgaatcattgcaaagctggagtcatatcagccttctaattccgttaaagaccgcagtgctctcagaatgattgaagaggctgaagagaaaggtttaatcaaaccaggtgttaccactctattagagccaactagcggaaaccttgggattgctttggcttacattggtttgaaaaaaggttacaagttccttggagttatgccctcccattattcgatcgaacgaaggatgttgctcaagtatttgggcgctgatcttgcgttaactgatactaatcttgggttcaagggagtgcttgacaaggtagcagagctgagtgcaagtgatccaaatttttacgttctcaatcagttttctaactcagcaaaccctggagcacattatgccaccactggacctgaaatatggaaagatacagctggcaaggtcgatatttttgtagtgggttctggatcaggaggtacggtttccggtgctggcaagtatctcaaagagaagaatccaaatgtgaaagtagtctgtgttgaaccagccgaaagtgctgtcattgcaggtgggccacctggtccccatggcatccaaggatttggtcctggttttgttcctgataatgttgattattctgtgatcgatgaatttttgtctgtcacaacccaagaggctctggcttgtgcaagaaggatagcaaaagaagaaggtttacttatgggcatttcctctggtgctaacttagttgcttgcttgagggtaggagcaaggcctgaaaacaaaggcaaaatgattgtgacaaccttctcaagtggaggagaaagatacatgagcacccagttgtctgatgaggtcagggaagaatgcattaacatgacattttaa

SEQ ID NO: 853 - protein, 339 aa, Allium sativum
MGERTGLASFIAAHNEDASENIVQDITQLVGWTPLIEIKSITKADSVGARIIAKLESYQPSNSVKDRSALRMIEEAEEKGLIKPGVTTLLEPTSGNLGIALAYIGLKKGYKFLGVMPSHYSIERRMLLKYLGADLALTDTNLGFKGVLDKVAELSASDPNFYVLNQFSNSANPGAHYATTGPEIWKDTAGKVDIFVVGSGSGGTVSGAGKYLKEKNPNVKVVCVEPAESAVIAGGPPGPHGIQGFGPGFVPDNVDYSVIDEFLSVTTQEALACARRIAKEEGLLMGISSGANLVACLRVGARPENKGKMIVTTFSSGGERYMSTQLSDEVREECINMTF

SEQ ID NO: 854 - DNA, 972 bp, Allium sativum
  CDS (1)..(972)
atgggttccgactcgatcgcgcaaaatgtcaccgagttgattgggaacactccattggtgtatctgaaccatgtagttggtggatgtagagcgcgaattgctgctaagttagagatcatggagccctgttctagtgtcaaagataggattgcgttgagcatgatcaatgatgcagaggagaaaggcctcattacacctggagtgagtactttgattgagcctacaagcggtaacacagggatcgggctggcattcatagcagctgcgaagggttataagcttataattacaatgcctgcatcatttagtcttgaaagaaggatcatcataaaagcctttggtggtcagttggttcttaccgatccattgttgggaatcaaaggttgcattcaaaaggcggaggaaattgctgcaaaaacacctaactcgtatgttcttcaacaattttcaaacccagccaatccaaagattcactatgagacaactggccccgagatctggaatgggtctggggggaaaattgatgcttttgttgctggtattggaactggtggtacgattactggaacggggagatatttaaaagagcaaaatcccaatataaaggtgtatggtgtggagccggctgaaagtgcagttttaaatggaggaaaacctggtccacataagatccaagggatcggtgctggttatattcctccagttttggatgtcagcctcattgaagaaactcttccgatttcaggtgatgaatctattgaaatggcaaagctccttgccgtgaaagaaggcttgctggttgggatatcatcaggagcagctgccgtagcagctgttaggattgccaagaggccagaaaatgaggggagactaattgtggttgtttttccgagttttggcgagcgctacctttcttccgtactgtttgaatccataaagaaagaagctgaaaacatgatttatgaatcctga

SEQ ID NO: 855 - protein, 323 aa, Allium sativum
MGSDSIAQNVTELIGNTPLVYLNHVVGGCRARIAAKLEIMEPCSSVKDRIALSMINDAEEKGLITPGVSTLIEPTSGNTGIGLAFIAAAKGYKLIITMPASFSLERRIIIKAFGGQLVLTDPLLGIKGCIQKAEEIAAKTPNSYVLQQFSNPANPKIHYETTGPEIWNGSGGKIDAFVAGIGTGGTITGTGRYLKEQNPNIKVYGVEPAESAVLNGGKPGPHKIQGIGAGYIPPVLDVSLIEETLPISGDESIEMAKLLAVKEGLLVGISSGAAAVAAVRIAKRPENEGRLIVVVFPSFGERYLSSVLFESIKKEAENMIYES

SEQ ID NO: 856 - DNA, 1152 bp, Allium sativum
  CDS (1)..(1152)
atggctgctctctctcaagctctcttacctcgattcactctttctcaatccatcaagccaaaatctcgcagctcagctttcttctcctgtaatcaatattcaactgcgataaagatcacaccttgtgctagcagttcgcggattctgtgtaaagccgtgtccattaaacctgatactgagatagaggggcttaacatagctgaagatgtcactcagcttattggaaaaacacccatggtctatttaaatagtattgcgaagggttgcgttgcaaacgtcgctgccaagcttgaaagcatggagccatgctctagtgttaaagacagaataggatatagtatgatatcagatgccgaacaaaaggggcttataactcccggaaagagtgtattggtggaacctacaagtggaaatactggcattgctcttgcatttgtagctgcttcgaaaggatataaactaatcctgacgatgcctgcatcaatgagcatggaaagaagagttttgtttaaagcttttggtgcagaacttgtacttactgatgctgctaagggcatgaagggagctattcaaaaggccgaagatatcgtaaagaagacaccaaatggttacatgcttcaacaatttgacaatcctgctaatccaaagatacactttgagacaactggaccagaaatttgggaagatacaaatgggaagatcgatatttttattgcgggaattggaactggtggaaccatcactggtgttggccgctttctaaagagcaaaaacccaaggataaaggtaattggtattgggccaactgaaagcaatgtactctcgggaggaaagcctggcccacacaagattcaaggcattggtgcgggattcataccaagtattctagacagtaaagttattgatgaaattttagaggtgtccagcgaggaagcaattgaaactgcaaagcagctggcacttcaagaagggttattagttggaatttcttctggagcagcagctgctgctgctatgaaagtcgcaaaaagacctgaaaatgcagggaaactcataacggttgtcttcccaagctttggtgaaagatatctttctactgctctcttccagtcgatacgcgaagaatgtgagaagatggaacctgagccttga

SEQ ID NO: 857 - protein, 383 aa, Allium sativum
MAALSQALLPRFTLSQSIKPKSRSSAFFSCNQYSTAIKITPCASSSRILCKAVSIKPDTEIEGLNIAEDVTQLIGKTPMVYLNSIAKGCVANVAAKLESMEPCSSVKDRIGYSMISDAEQKGLITPGKSVLVEPTSGNTGIALAFVAASKGYKLILTMPASMSMERRVLFKAFGAELVLTDAAKGMKGAIQKAEDIVKKTPNGYMLQQFDNPANPKIHFETTGPEIWEDTNGKIDIFIAGIGTGGTITGVGRFLKSKNPRIKVIGIGPTESNVLSGGKPGPHKIQGIGAGFIPSILDSKVIDEILEVSSEEAIETAKQLALQEGLLVGISSGAAAAAAMKVAKRPENAGKLITVVFPSFGERYLSTALFQSIREECEKMEPEP

SEQ ID NO: 858 - DNA, 978 bp, Nicotiana tabacum
  CDS (1)..(978)
atggcgggagaaaagaatggaattgccaaggatgtaactgaattgatcggtaacactcctttggtgtacctgaataatgttgtggatgggtgtgttgctcgcgttgctgccaagctcgaaagcatggagccgtgctctagtgttaaggataggattggttatagtatgattacggatgctgaggagaaaggcctgatcaaacctggcgagagtgtcctcattgaacctacaagtggaaacactggagtaggattggcatttatggctgctgctaaaggctacaaactcatcataacgatgccttcttcaatgagtcttgagaggagaattattctgcgtgcttttggtgctgagttggtgcttacagatccagcaaaagggatgaaaggttctattcagaaggctgaagagattaaggccaaaacacctaactcctttattcttcagcaatttgaaaaccctgcaaacccaaaggtacactatgagaccactggtcctgagatctggaaaggctcaaacgggaaagtagatgctctcgtctctggaattggaacaggaggcacaataacaggttcaggcaagtatttaagagagcagaaccccgacataaagctctatggtgtggaaccagttgaaagtgctattctttctggaggaaagcctggtccgcataagattcaggggattggtgctggtttcattcctggtgttttggaagttggtcttattgatgaagtaattcaagtttcaagtgaagaagccatagaaactgcaaagcttctggcattgaaggaaggtttgcttgtgggcatatcatctggtgcttctgctgctgcagcaatcaaacttgctaagcgccctgaaaatgctgggaagctcattgttgttgttttcccaagcttcggggagcgatatctttcctctgtgctctttgaatctgttagacgggaagcagagaacatgaccgtggagccttga

SEQ ID NO: 859 - protein, 325 aa, Nicotiana tabacum
MAGEKNGIAKDVTELIGNTPLVYLNNVVDGCVARVAAKLESMEPCSSVKDRIGYSMITDAEEKGLIKPGESVLIEPTSGNTGVGLAFMAAAKGYKLIITMPSSMSLERRIILRAFGAELVLTDPAKGMKGSIQKAEEIKAKTPNSFILQQFENPANPKVHYETTGPEIWKGSNGKVDALVSGIGTGGTITGSGKYLREQNPDIKLYGVEPVESAILSGGKPGPHKIQGIGAGFIPGVLEVGLIDEVIQVSSEEAIETAKLLALKEGLLVGISSGASAAAAIKLAKRPENAGKLIVVVFPSFGERYLSSVLFESVRREAENMTVEP

SEQ ID NO: 860 - DNA, 1107 bp, Spinacia oleracea
  CDS (1)..(1107)
atggcaactgtgtcaagctgtttgctgaggagatcaagaacagcctcacggatctttaaaacatcactcagatgtttctccaccacttcttcttctgcacaaactgtttctggttcatctccctttccttttactgggactaatattaaaaccaatgtttcccaacttattgggagaactcccctagtttatctaagcaaaattagtgaaggatctggagcttacatagccgtcaagcaagagatgatgcagcctactgctagtgttaaagatagacctgcattggctatgattgaagatgcagagaaaaagggattaatttctccaggaaagacggtgttgatcgagccaacatcaggaaacatgggaataagcatggcgttcatggcggctatgaagggatacaaaatggtattgacaatgccatcatacacaagcatggaaagaagggtagtaatgagggcttttggtgctgatcttattctcactgaccctgacaaaggaatggggggaactgtcaaaaaggctaaccagcttttagactccacccctgatggtttcatgcttcaacaatttaataatcctgctaatactcaggttcattttgagacgacaggtcctgaaatatgggaggatactcaagggaaagtggacatctttgtcatgggaatcggaagtggaggcactgtttctggtgttggacgctatctcaaatctcaaaatcctaatgtgaagatctatggagttgaaccagctgaaagcaacatactcaatggaggcaaaccaggtcctcaccttataactggaaacggggttgggtttaaaccagagattttagacatggatgtaatggatgcagttctcgaggttaaaagtgacgatgctgttaagatggccaggcagttggcattacaggaaggacttttggttgggatatcatcaggggctaatacaattgctgcccttgatcttgctaagaggccagaaaacaagggcaaactaattgtgacgattcacccgagttttggagagcgatatctgtcgtctgccttgttcaaggagctgagggaagaggctgaaaacatgcaaccagtccctgttgaatga

SEQ ID NO: 861 - protein, 368 aa, Spinacia oleracea
MATVSSCLLRRSRTASRIFKTSLRCFSTTSSSAQTVSGSSPFPFTGTNIKTNVSQLIGRTPLVYLSKISEGSGAYIAVKQEMMQPTASVKDRPALAMIEDAEKKGLISPGKTVLIEPTSGNMGISMAFMAAMKGYKMVLTMPSYTSMERRVVMRAFGADLILTDPDKGMGGTVKKANQLLDSTPDGFMLQQFNNPANTQVHFETTGPEIWEDTQGKVDIFVMGIGSGGTVSGVGRYLKSQNPNVKIYGVEPAESNILNGGKPGPHLITGNGVGFKPEILDMDVMDAVLEVKSDDAVKMARQLALQEGLLVGISSGANTIAALDLAKRPENKGKLIVTIHPSFGERYLSSALFKELREEAENMQPVPVE

SEQ ID NO: 862 - DNA, 975 bp, Arabidopsis thaliana
  CDS (1)..(975)
atggcctcgagaattgctaaagatgtgactgaattgattgggaacactccattggtgtatttgaacaatgttagcctgaagggatgtgttggtcgtgttgctgctaagcttgagatgatggaaccgtgctctagcgtcagcgtcaaagacaggattggttttagcatgatttctgatgcagaaaagaagggtcttatcaaacaaggagagagtgtgctgattgagccaacaagtggaaacactggagagttgctgttagcattcacggcagcctgcaaaggctacaagcttattattacaatgccagcttctatgagtactgagagaagaatcattctcttagcctttggagttgaagttgttttaactgacccagctaagggcatgaaaggaagctatcgcaaagcgcaagagattttggccaaaacacccaatggttacatgcttcagcagtttgagaacccggccaacccagaaatccactatgagccgacgggacctgagatatggaaaggcactggtgctaaaatcgatggctttgtttctgggattggtactggtggtaccattacaggtgctgggaagtatcttaaagaacagaacccaaacttcaagctgtatggagtggagccagttgaaagtgctattctatccggtgggaagccaggccctaccaagattcaagggataggagctggttttataccaagtgtattgaatgttgatcttattgacgaagttgttcaggtttcaagtgatgaatccattgacatggcaaggcagcttgctcttaaagaaggtcttcttgtgggaatatcatccggcgctgctgcagcaattaaacttgcacagaggccagaaaacgctgggaagctatttgtggccatattcccgagtttcgggagaaggtatctatcaacgtaccttttcgatgccgacaaggaaagaagtcggaacatgccttcaaggccttga

SEQ ID NO: 863 - protein, 324 aa, Arabidopsis thaliana
MASRIAKDVTELIGNTPLVYLNNVSLKGCVGRVAAKLEMMEPCSSVSVKDRIGFSMISDAEKKGLIKQGESVLIEPTSGNTGELLLAFTAACKGYKLIITMPASMSTERRIILLAFGVEVVLTDPAKGMKGSYRKAQEILAKTPNGYMLQQFENPANPEIHYEPTGPEIWKGTGAKIDGFVSGIGTGGTITGAGKYLKEQNPNFKLYGVEPVESAILSGGKPGPTKIQGIGAGFIPSVLNVDLIDEVVQVSSDESIDMARQLALKEGLLVGISSGAAAAIKLAQRPENAGKLFVAIFPSFGRRYLSTYLFDADKERSRNMPSRP

SEQ ID NO: 864 - DNA, 1068 bp, Salmonella choleraesuis
  CDS (1)..(1068): transl_table=11
ttgttggactgcaaaaagcgcgtctgtataacggcgaccagcgtattgaaacgcgtgaagaggaacttgctctggcgcaatcggcctgataggttaatttgtatagttatcgcccggtggcgctacgcataccgggcttttttacgagctgaaaacgtgaatacattagaacaaaccatcggcaatacgccgctggtcaaattacaacgtctggcgccggataacggcagtgaaatctgggttaagctggaaggcaataatccggcaggatcggtgaaagatcgcgcggcgctatcgatgattgtcgaggcggaaaagcgcggggaaattaaaccgggcgatgtcctgattgaagcgaccagcggcaacacgggcattgcgctggcgatgatcgccgcgctgaaaggttatcgcatgaagctgttgatgccggacaacatgagccaggagcgtcgggcggcaatgcgggcctatggcgcagagctgattctggtcactaaagagcagggaatggaaggggcgcgcgatttagcgctcgctatgtctgaacgtggagaaggtaaactgctcgatcagtttaataaccccgataacccatatgcgcactacaccaccaccggcccggaaatctggcggcaaacgtcaggtcgcatcacccattttgtctccagcatgggcacgaccggcaccattaccggcgtgtcgcgttttctgcgcgagcaggaaaaaccggtcactatcgttggcctacagccggaagagggcagcagtattccgggcattcgccgctggccagcggaatatatgccgggcattttcaacgccagcctggtggatcaggtgctggatattcatcagaatgatgccgaaaacaccatgcgtgaactggcagttcgtgaagggattttctgcggcgtcagctctggcggcgcggtagcgggtgcgttacgcgtcgcacgtgccacgcccggcgcgatagtggtggcgatcatctgcgatcgcggcgaccgttacttgtctaccggcgtgtttggtgaagagcatttcagccagggggcagggatttaa

SEQ ID NO: 865 - protein, 355 aa, Salmonella choleraesuis
MLDCKKRVCITATSVLKRVKRNLLWRNRPDRLICIVIARWRYAYRAFLRAENVNTLEQTIGNTPLVKLQRLAPDNGSEIWVKLEGNNPAGSVKDRAALSMIVEAEKRGEIKPGDVLIEATSGNTGIALAMIAALKGYRMKLLMPDNMSQERRAAMRAYGAELILVTKEQGMEGARDLALAMSERGEGKLLDQFNNPDNPYAHYTTTGPEIWRQTSGRITHFVSSMGTTGTITGVSRFLREQEKPVTIVGLQPEEGSSIPGIRRWPAEYMPGIFNASLVDQVLDIHQNDAENTMRELAVREGIFCGVSSGGAVAGALRVARATPGAIVVAIICDRGDRYLSTGVFGEEHFSQGAGI

SEQ ID NO: 866 - DNA, 1113 bp, Hevea brasiliensis
  CDS (1)..(1113)
atggctactcttaggaacttgttgaagaaaaaatctttaacgtccaacgagcttgctataaggaggttcgtctcttccgaggctgctgctgaatctccttcttttgctcaaagaatcagggatctgcccaagaatctccctggaactaaaatcaagactgaagtttctcaacttattgggagaactccccttgtttatcttaacaaaatgagtgaaggatgtggagcttacatagccgtcaagcaagagatgatgcaaccaactgccagcatcaaagacaggccggcgttttcaatgatcaatgatgcagaaaagaagaatttaatcactcccgggaagacggtcttgatagagccaacatctggtaatatggggattagtatggcttttatggcagccatgaaaggatacaagatggttctaaccatgccctcttacacaagcttggagagaagggtgactatgaaggcatttggagctgagctaattgtcactgatcccaccaaggggatgggtggaacagttaagaaggcctatgatcttttggaatccacaccaaatgctttcatgctacaacaattttcaaatcctgcaaattctaagatccattttgaaacgacaggtcctgaaatttgggaggatacacttggtcatgttgacatctttgtaatgggaataggcagtggaggaacagtctctggcgttgggcagtaccttaaatctcaaaatcctaatgttaagatatatggggtggagcctgctgaaagtaatgtgctcaacggtggtaaaccaggtcctcatcaaattatgggtaacggagttggatttaaaccagacatattggacatggatgtaatggaaaaggttcttgaggttagcagtgaagatgcagtaaaaatggctaggagattggcattggaggaggggcttatggtgggaatatcatctggagccaacacagttgctgcacttagacttgctagaatgccagagaacaaaggaaaactcatcgtgactgttcatccaagttttggggagcgatacttgtcatctgtcctgtttgaagaactgagaaatgaggctgcaaccatgcaaccagttccagttgactaa

SEQ ID NO: 867 - protein, 370 aa, Hevea brasiliensis
MATLRNLLKKKSLTSNELAIRRFVSSEAAAESPSFAQRIRDLPKNLPGTKIKTEVSQLIGRTPLVYLNKMSEGCGAYIAVKQEMMQPTASIKDRPAFSMINDAEKKNLITPGKTVLIEPTSGNMGISMAFMAAMKGYKMVLTMPSYTSLERRVTMKAFGAELIVTDPTKGMGGTVKKAYDLLESTPNAFMLQQFSNPANSKIHFETTGPEIWEDTLGHVDIFVMGIGSGGTVSGVGQYLKSQNPNVKIYGVEPAESNVLNGGKPGPHQIMGNGVGFKPDILDMDVMEKVLEVSSEDAVKMARRLALEEGLMVGISSGANTVAALRLARMPENKGKLIVTVHPSFGERYLSSVLFEELRNEAATMQPVPVD

SEQ ID NO: 868 - DNA, 999 bp, Spinacia oleracea
  CDS (1)..(999)
atggagggagagtgcagcattgcaaaagatgtgactgaactggtgggaaacacacctgtagtttatcttaatcatgtcgcagagggttgtgttgcacgcattgcagccaagcttgaaatgatggaaccatactccagtgttaaagacaggattgcagttagtatgatcaaagatgctgaagaaaaaggcttgatttctcctgagaagactgttctcatagaaatgacaagtggtaatactggcattggattggcgtttattgctgctgcaaagggctataagctaatcattgtaatgccttcgtatgtgagtcttgagagaagagtaatccttctagccttgggagcagagttgcacctcatgggtccaacaaaaagctttcctgatttcgtggccaaagctagagaattattggacaaaactccaggcggctattacattaatcaattcgaaaaccctgggaatccaaagactcattttgaaactacggggccagagatctggagagccacggaagggaaagtggatgcatttgtctctggcatagggactggtggtaccgtcactggggcaggaagattccttaaggagaaaaattctgctatcaaggtctatggtgtagagccaactgaaagtgcagtcctaaatggagaaaagcctggcaagcataaaatccaagggattggtgctggtgtcatccctccattactggactttgacataattgaggaagttgtaaaggtatctagtgacgaagcctttgaaactgctaagcttcttgcattgaaagaaggtttgctggttgggatatcgtcgggagctgccgttgctgctgctattaagctagcaaaaaagcctgagtttgctgagaaattgattgttgtgcttatccctagctttggagagcgttatttatctaccgagttgtttgcttcagagaggcaagaagtggaggctttgacttatgaaagggccgatttgccactttcccccttgtga

SEQ ID NO: 869 - protein, 332 aa, Spinacia oleracea
MEGECSIAKDVTELVGNTPVVYLNHVAEGCVARIAAKLEMMEPYSSVKDRIAVSMIKDAEEKGLISPEKTVLIEMTSGNTGIGLAFIAAAKGYKLIIVMPSYVSLERRVILLALGAELHLMGPTKSFPDFVAKARELLDKTPGGYYINQFENPGNPKTHFETTGPEIWRATEGKVDAFVSGIGTGGTVTGAGRFLKEKNSAIKVYGVEPTESAVLNGEKPGKHKIQGIGAGVIPPLLDFDIIEEVVKVSSDEAFETAKLLALKEGLLVGISSGAAVAAAIKLAKKPEFAEKLIVVLIPSFGERYLSTELFASERQEVEALTYERADLPLSPL

SEQ ID NO: 870 - DNA, 1056 bp, Solanum tuberosum
  CDS (1)..(1056)
atggcgtccttactaaggagaaggttttattcgagtgaatcatcatttgctcagaggctaagagatctgccaaagtatcttcctggtaccaacatcaaaactcaagtttctcaactcattgggaaaacaccattggtgtatcttaacaaagtgagtgaaggatgtggtgcttatattgctgttaaacaagaaatgatgcaacctacttctagtatcaaagatagaccagcatttgctatgataaacgatgcagaaaagaaaggattaatcacccctgggaaaacaacactaatcgagccaacatcagggaatatgggaataagtatggcatttatggctgccatgaaaggctacaaaatgattttgacaatgccatcctatacaagcttggagaggagggtgaccatgagagcattcggagctgatttagtgaccactgatccaactaaaggaatgggaggaactattaagaaagcgtatgatcttttggaatctacacctaatgcttatatgcttcaacaattctccaatccagccaatactcaagctcattttgagactactggccctgaaatttgggaagatactcaaggtaatgttgacatctttgtcatgggaataggaagcggaggcacagtctctggtgttggacagtatctgaaatcgaaaaatcctaatgtcaagatatatggaattgagccaactgaaagcaatgtattgaatggtggaaacccaggtcctcacgaaataactggcaatggggttggattcaagccggatatccttgacatggatgtaatggaagaagttctgatggtttcgagcgaagaatcggtaaacatggctagggaattggcgttgaaggaaggccttatggttggtatatcatcaggagcaaatacagtagctgcacttagactcgccaacaggccagaaaacaaaggaaaactcatagtgacaatacatccaagttttggagagaggtacttgtcatctgttctgtatgaagatatcaggaaagaggcacagaatatgcaacctgtatcagttgattaa

SEQ ID NO: 871 - protein, 351 aa, Solanum tuberosum
MASLLRRRFYSSESSFAQRLRDLPKYLPGTNIKTQVSQLIGKTPLVYLNKVSEGCGAYIAVKQEMMQPTSSIKDRPAFAMINDAEKKGLITPGKTTLIEPTSGNMGISMAFMAAMKGYKMILTMPSYTSLERRVTMRAFGADLVTTDPTKGMGGTIKKAYDLLESTPNAYMLQQFSNPANTQAHFETTGPEIWEDTQGNVDIFVMGIGSGGTVSGVGQYLKSKNPNVKIYGIEPTESNVLNGGNPGPHEITGNGVGFKPDILDMDVMEEVLMVSSEESVNMARELALKEGLMVGISSGANTVAALRLANRPENKGKLIVTIHPSFGERYLSSVLYEDIRKEAQNMQPVSVD

SEQ ID NO: 872 - DNA, 969 bp, Propionibacterium freudenreichii subsp
  CDS (1)..(969): transl_table=11
atgtctgcaatccacgattccatcaccgaactcatcttcaacacgccgctggtgcgcgcaccccattacctgaaggcagccggcgcccctgatgccgacatcgtcctcaagctggagtacttcaacccggccggttcggtgaaggaccgcattgccctggcaatgattaccgacgccgagaagcgcggcgtcctgaagcccggcggcaccatcatcgagcccagctcgggcaacaccggcatcggcctggccgccgtgggcaccgcccgcggctacaaggtgaaggtcgtgcttcccgccagcctgtcggttgagcgccgcgcgctgatccaggcctacggcggcgaggtcatcctcacccccggaccgctggccatcaagggctccatcgcctacgccaagcagctgcacgacgccgacccctcctcggtgatcctcggccagttcgacaacccggccaacccggagatccactacaagaccaccggcccggagatctggaaggacaccgacggcaccgtcgacgtcttcattgccggaatcggcaccggcggcaccctgtcgggcgccggcaagtacctggaggagcagaagcccgacctcaaggtgatcggcatcgagcccgccaagagcccgatcctcgagggtggcaagcccggcccgcacggaatccagggcattggcaccggcttcgtccccaacacgcttgaccgttcggtctacgacgaggttgtgggcatcaccgacgaggactccatcgcccaggcccgcctgctcggcaccgccgagggcatcttcgtgggcatcagctccggcgctgccctgaccgccgccctgcagatcgccgcccgcgacgagtacaagggcaagcgcatcgtggccctgctccccgattcgggcgaccgctacctgtccaccgccctcggccagttccccgagctcaccgtgcacgaggacgtcgagctctga

SEQ ID NO: 873 - protein, 322 aa, Propionibacterium freudenreichii subsp
MSAIHDSITELIFNTPLVRAPHYLKAAGAPDADIVLKLEYFNPAGSVKDRIALAMITDAEKRGVLKPGGTIIEPSSGNTGIGLAAVGTARGYKVKVVLPASLSVERRALIQAYGGEVILTPGPLAIKGSIAYAKQLHDADPSSVILGQFDNPANPEIHYKTTGPEIWKDTDGTVDVFIAGIGTGGTLSGAGKYLEEQKPDLKVIGIEPAKSPILEGGKPGPHGIQGIGTGFVPNTLDRSVYDEVVGITDEDSIAQARLLGTAEGIFVGISSGAALTAALQIAARDEYKGKRIVALLPDSGDRYLSTALGQFPELTVHEDVEL

SEQ ID NO: 874 - DNA, 927 bp, Propionibacterium freudenreichii subsp
  CDS (1)..(927): transl_table=11
atgatctaccacgatgtcaccgaggtagtgggacgcactccgcttgtgcggctcaaccatgtgaacgacacggacgccgtcgtgctggccaaacttgagttctacaacccggcgaactccgtcaaggaccgcatcggggtgtccatcgtggacgccgcggagaaatcgggcgcgctgggggccggcggcaccatcgtcgaggccaccagcgggaacaccgggatcgcgctcgcgatggtgggcgccgcccgcggctaccacgtggtgatcaccatgccggcgtcgatgagcagggaacgccgcgccgtgttgcacgccctgggcgccgagctcgtgctcacccccgccgtggaggggatgcggggtgcggtcacggccgccgagcgcatcgccgccgagcgtggtggcgtgctggccagccagttcgccaacgccgcgaaccccgcggcacaccacgcgaccaccggcccggagatctggaatgacaccgacggcgaggtggcggcactggtgtccggcgtcggaaccggtggcaccgtcagtggtgcgggacgctatctgaaggagcaggatccgcgcgtcgacgtgtacgccgtggagcccgacgagtcgcccctgctgtcgcgcggcagggccgcggcccatggcatccagggcatcggcgccaacttcgtgcccgacacctatgacgccgctgtggtcgatgaggtgctgtcggtgaccaccgaccaagccctcgcgatggcgaggcgtctggccgccgaggaaggcatcctggcaggcatctcatcgggcgccgcggtagcggcagcactcgaagtcggggcacgtccgcagtatcgcggccggacgatcgtggcaatcatccctgatttcggtgaacgctatttgtccacgcccctgtttgccggtttgatggactcgtga

SEQ ID NO: 875 - protein, 308 aa, Propionibacterium freudenreichii subsp
MIYHDVTEVVGRTPLVRLNHVNDTDAVVLAKLEFYNPANSVKDRIGVSIVDAAEKSGALGAGGTIVEATSGNTGIALAMVGAARGYHVVITMPASMSRERRAVLHALGAELVLTPAVEGMRGAVTAAERIAAERGGVLASQFANAANPAAHHATTGPEIWNDTDGEVAALVSGVGTGGTVSGAGRYLKEQDPRVDVYAVEPDESPLLSRGRAAAHGIQGIGANFVPDTYDAAVVDEVLSVTTDQALAMARRLAAEEGILAGISSGAAVAAALEVGARPQYRGRTIVAIIPDFGERYLSTPLFAGLMDS

SEQ ID NO: 876 - DNA, 1059 bp, Betula verrucosa
  CDS (1)..(1059)
atgaagaggatgctctccacccaaccccttgctgattctgatccgtcttttgctcaaagaatcagggatctccctaaacatgttcctggaaccaacatcaaaaatgaagtttctcaactcattgggagaactcctcttgtatatcttaacaaagtcactgaaggctgtggagcttatattgctgtcaagcaagagatgatgcaacccactgctagcatcaaagacagaccagcatatgccatgatgatggatgcagaaaagagaaacttaattactcctgggaagacaacactcatagagcccacatcaggaaatatggggatcagtttggcatttatggcagccatgaaaggatacaaaatggttctaacaatgccctcttacacaagcttggagaggagggtgacaatgagagcatttggagctgatttagttctcaccgatcccaccaaggggatgggtggaacagttaagaaggcatacgaccttttggaatctacaccaaatgctttcatgctccaacaattttcaaatcccgtcaacacccagggtgcatttgaaactacgggtcctgagatatgggaggatacaaatggacaagttgacatttttgtcatgggaataggtagtggaggcactgtctctggggtcggacagtaccttaaatcccaaaatcctaatgttaagatatatggagtggagcctactgaaagtaatgttttgaatggtggtaaaccaggtcctcatcaaattactggcaatggggttggattcaaaccagatattttggacatggatgttatggaaagagttcttgaggttagtagtgaagattcagtaaatatggcaaggcaattagcactgaaggagggacttctggtgggaatatcatctggagccaatacaattgcagcactcagactcgctagaatgccagagaacaaaggcaaactcattgtgactgtgcatccaagtttcggggagcgatacttgtcatctgtcctgtttgaggagctgaggaaagaggctgaaaacatgcaaccagtttcagttgactga

SEQ ID NO: 877 - protein, 352 aa, Betula verrucosa
MKRMLSTQPLADSDPSFAQRIRDLPKHVPGTNIKNEVSQLIGRTPLVYLNKVTEGCGAYIAVKQEMMQPTASIKDRPAYAMMMDAEKRNLITPGKTTLIEPTSGNMGISLAFMAAMKGYKMVLTMPSYTSLERRVTMRAFGADLVLTDPTKGMGGTVKKAYDLLESTPNAFMLQQFSNPVNTQGAFETTGPEIWEDTNGQVDIFVMGIGSGGTVSGVGQYLKSQNPNVKIYGVEPTESNVLNGGKPGPHQITGNGVGFKPDILDMDVMERVLEVSSEDSVNMARQLALKEGLLVGISSGANTIAALRLARMPENKGKLIVTVHPSFGERYLSSVLFEELRKEAENMQPVSVD

SEQ ID NO: 878 - DNA, 975 bp, Arabidopsis thaliana
  CDS (1)..(975)
atggaggaggaccggtgttcgatcaaggatgatgcaactcaattgataggtaacaccccaatggtatatctgaacaacattgtggatggttgtgtagctcgtattgcagctaagcttgaaatgatggagccttgctctagtgtcaaggagcgaattgcttatggtatgattaaagatgcagaagacaagggattgattactcctgggaagagcacactgattgaggctacctctggtaacaccgggattggtttagccttcatcggtgcagctaaaggttacaaagtggtcctcacaatgccctcatcaatgagccttgagagaaaaatcattcttttagcattaggtgcggaggttcacctcacagatcctagtaaaggcgttcaaggaataatcgacaaagctgaagagatatgtagcaaaactccagatagtatcatgctagaacagttcaaaaatccttcaaacccgcaaactcattatcgaaccacgggtccagagatatggagagactctgcaggggaagtagacatattggttgccggtgttggaactggtggaacgctttccggatcaggaagattcctcaaggagaagaataaagactttaaggtttatggtgtggaacctacagaaagtgcggtaataagtggaggcaaaccgggtacacatttgatccaaggtattggggctggactcatcccagacaatttggatttcaacgttcttgatgaagtcatccaagtgacaagtgtggaagcaattgaaacagccaaacttcttgccctgaaagaaggattactggtgggaatatcttctggagctgctgcagccgctgcgataaaggtggcaaagcggccagaaaacgccggcaaactcatagttgtgattttccctagcggtggggaacgttacctatcgacctcattgttcgaatcagtcagacatgaagcagagaatttgccaattcaatga

SEQ ID NO: 879 - protein, 324 aa, Arabidopsis thaliana
MEEDRCSIKDDATQLIGNTPMVYLNNIVDGCVARIAAKLEMMEPCSSVKERIAYGMIKDAEDKGLITPGKSTLIEATSGNTGIGLAFIGAAKGYKVVLTMPSSMSLERKIILLALGAEVHLTDPSKGVQGIIDKAEEICSKTPDSIMLEQFKNPSNPQTHYRTTGPEIWRDSAGEVDILVAGVGTGGTLSGSGRFLKEKNKDFKVYGVEPTESAVISGGKPGTHLIQGIGAGLIPDNLDFNVLDEVIQVTSVEAIETAKLLALKEGLLVGISSGAAAAAAIKVAKRPENAGKLIVVIFPSGGERYLSTSLFESVRHEAENLPIQ

SEQ ID NO: 880 - DNA, 972 bp, Arabidopsis thaliana
  CDS (1)..(972)
atggaagatcggtgcttgatcaagaacgatgtcactgaattggttggtaacacaccaatggtgtatctgaacaatgttgttgatggttgcgtggctcgtatcgctgcaaagcttgagatgatggagccttgttctagcgtcaaagacagaatcgcgtatagtatgatcaaagatgcagaagaaaaaggattgattactcccggaaagagtacattgatagagccaactgctggtaacaccgggattggtttagcttgcatgggagctgcaagaggctataaagtgatccttgtgatgccttcaactatgagcttagagagaagaatcattctgagggcactaggtgcagaccttcatctctcggaccagcgcataggccttaaaggaatgttggagaaaactgaagcgattttaagcaaaactcctggtggttacattccacaacaatttgaaaatcctgcaaaccccgagattcattaccgaaccacgggaccggaaatatggagagattcagccgggaaagtagatatattggtcgctggcgtagggactggtggaactgctactggagtagggaagttcctcaaggagcagaacaaagacatcaaggtttgtgtggtggaaccagtagaaagtccggtacttagcggaggtcaaccaggtccacatttgattcagggaattggctctggtatcgtcccattcaatttggacttaaccattgttgatgaaattattcaagtggcaggtgaagaggctattgaaacagccaagcttcttgccctcaaagaaggattactggtgggaatatcctctggagccgcagcagcggctgcgttaaaggttgcaaagcggccagaaaacgcggggaaactcattgtggtggtttttcctagtggaggagaacgttatttatcgactaaactgttcgattcgattagatatgaagcagagaatttgcctattgaatga

SEQ ID NO: 881 - protein, 323 aa, Arabidopsis thaliana
MEDRCLIKNDVTELVGNTPMVYLNNVVDGCVARIAAKLEMMEPCSSVKDRIAYSMIKDAEEKGLITPGKSTLIEPTAGNTGIGLACMGAARGYKVILVMPSTMSLERRIILRALGADLHLSDQRIGLKGMLEKTEAILSKTPGGYIPQQFENPANPEIHYRTTGPEIWRDSAGKVDILVAGVGTGGTATGVGKFLKEQNKDIKVCVVEPVESPVLSGGQPGPHLIQGIGSGIVPFNLDLTIVDEIIQVAGEEAIETAKLLALKEGLLVGISSGAAAAAALKVAKRPENAGKLIVVVFPSGGERYLSTKLFDSIRYEAENLPIE

SEQ ID NO: 882 - DNA, 927 bp, Corynebacterium glutamicum
  CDS (1)..(927): transl_table=11
gtgtacaacaacatcaccgaaaccatcggccacaccccactggtaaagctgaacaagctcaccgaaggcctcgacgcaactgtcctggtcaagcttgagtcattcaacccagcaaactccgtcaaggaccgtatcggtctggccatcgttgaagatgcagagaagtccggtgcactgaagccaggcggcaccatcgttgaagcaacctccggcaacaccggtatcgcactggcaatggtcggcgctgcacgcggatacaacgttgttctcaccatgccggagaccatgtccaacgagcgtcgcgttctcctccgcgcttacggtgcagagatcgttcttaccccaggtgcagcaggcatgcagggtgcaaaggacaaggcagacgaaatcgtcgctgaacgcgaaaacgcagtccttgctcgccagttcgagaacgaggcaaacccacgcgtccaccgcgacaccaccgcgaaggaaatcctcgaagacaccgacggcaacgttgatatcttcgttgcaagcttcggcaccggcggaaccgtcaccggcgttggccaggtcctgaaggaaaacaacgcagacgtacaggtctacaccgtcgagccagaagcgtccccacttctgaccgctggcaaggctggtccacacaagatccagggcatcggcgcaaacttcatccccgaggtcctggaccgcaaggttctcgacgacgtgctgaccgtctccaacgaagacgcaatcgcattctcccgcaagctcgctaccgaagagggcatcctcggcggtatctccaccggcgcaaacatcaaggcagctcttgaccttgcagcaaagccagagaacgctggcaaaaccatcgtcaccgttgtcaccgacttcggcgagcgctacgtctccaccgttctttacgaagacatccgcgactaa

SEQ ID NO: 883 - protein, 308 aa, Corynebacterium glutamicum
MYNNITETIGHTPLVKLNKLTEGLDATVLVKLESFNPANSVKDRIGLAIVEDAEKSGALKPGGTIVEATSGNTGIALAMVGAARGYNVVLTMPETMSNERRVLLRAYGAEIVLTPGAAGMQGAKDKADEIVAERENAVLARQFENEANPRVHRDTTAKEILEDTDGNVDIFVASFGTGGTVTGVGQVLKENNADVQVYTVEPEASPLLTAGKAGPHKIQGIGANFIPEVLDRKVLDDVLTVSNEDAIAFSRKLATEEGILGGISTGANIKAALDLAAKPENAGKTIVTVVTDFGERYVSTVLYEDIRD

SEQ ID NO: 884 - DNA, 1371 bp, Xanthomonas campestris pv
  CDS (1)..(1371): transl_table=11
atggcgatccattcctccgtactcgaactgattggcaatacgccgatcgtcaaggcccagcgcctggacaccggtgtctgcgaactgttcctcaagctggaggcatccaatccgggcggctcgatcaaggaccgtatcggcttgtcgatgatcgaagcggccgaacagcgcggcgacctgaggccgggcgccaccctggtggaaggcacggccggcaacactggcctgggcctggcgctggtcgcgcagcagaagggctaccgcctgatcctggtggtgccggacaagatgagccgcgagaagatcttcaatctcaaggcgatgggcgccgatgtggtgctgacccgctcggacgtggccaaggggcacccggagtattaccaggacctggccgccaagatcgcctcggagaccccgggcgcctacttcatcaaccagttcggcaacccggacaacccggccgcgcatgagttcggtaccgggccggaaatcctggcgcagatggacggccagctggacgcgatcgtgtttggctgcggcagctccggcaccatgaccggcctgtcgcgcgccttcgccactgcttcgccgcagaccgagctggtgctggctgacccggtgggctcgatcctgacccagtacatcgaagaaggtacggtgagcgagaagtccggcagctggctggtcgaaggcatcggcgaggacttcctgccggatatctccgatttctcgcgggtcaagaaggcctattcgatcagcgatgcggaaagcttccacaccgcgcgcgagctgctggccaaggagggcatcctcggcggctcgtccactggtacgttgctggccgcggcgctgaagtactgccgcgagcagaccacgcccaagcgcgtgctggtgttcgtctgcgataccggcaacaagtacctgtcgaagatgtacaacgactactggatgctggacaacggcttcctggagcgcgaacagcacggcgacctgcgtgacctgatcctgcgcccatacaacaagcgcgacaccgtggtggtcgggccgaaagatctgctgaccaccgcctaccagcgcatgaagctgtacgacgtgtcgcagttgccggtgatcgacgatggcgagctggtcggcatcgtcgatgagagcgatgtgctgctgcatgtgtatggcgacgaagcacggttccgcgacccgatctccaccgcgatggtcagcaagctcgaccgtctggacgtggcctcgccgatcgaagcgctgctgccggtattcgatcgcggccaggtcgccatcgtcatggacggcaaccagttcctgggcctgatcacccgtatcgacctgctcaactacctgcgccgccgcgtgcagtaa

SEQ ID NO: 885 - protein, 456 aa, Xanthomonas campestris pv
MAIHSSVLELIGNTPIVKAQRLDTGVCELFLKLEASNPGGSIKDRIGLSMIEAAEQRGDLRPGATLVEGTAGNTGLGLALVAQQKGYRLILVVPDKMSREKIFNLKAMGADVVLTRSDVAKGHPEYYQDLAAKIASETPGAYFINQFGNPDNPAAHEFGTGPEILAQMDGQLDAIVFGCGSSGTMTGLSRAFATASPQTELVLADPVGSILTQYIEEGTVSEKSGSWLVEGIGEDFLPDISDFSRVKKAYSISDAESFHTARELLAKEGILGGSSTGTLLAAALKYCREQTTPKRVLVFVCDTGNKYLSKMYNDYWMLDNGFLEREQHGDLRDLILRPYNKRDTVVVGPKDLLTTAYQRMKLYDVSQLPVIDDGELVGIVDESDVLLHVYGDEARFRDPISTAMVSKLDRLDVASPIEALLPVFDRGQVAIVMDGNQFLGLITRIDLLNYLRRRVQ

SEQ ID NO: 886 - DNA, 1506 bp, Pichia pastoris
  CDS (1)..(1506)
atgtcagacaacaaccaacctttgccaccggtttccaactccattctggagcacattggaaagactccacttgttaaacttaacagaatacccaaaattcttaatttgaaaccacaggtttatgctaaagttgaactgttcaactcaggtggttccatcaaggaccgtattgctctgagaatggttgagcaagctgagaaagagggtagaatcaagccagggtacacgctaattgagccaacgtcaggtaacactggtattggtctggcattagtaggtgcagtcaagggctacagaactattatcactcttccagagaaaatgtctaatgaaaaagttgctgtgctgaaagctctcggggctgaaattataagaactccaaccgaggctgcttgggattccccagagtctcacattggtgttgcaagaaggttggagaaagaaattccaaatgctgtaatcttagaccagtatggtaatgttaacaatccagatgcccatttctacaccactggtgcggaaatctgggatcagactaatggtaaagttacccacggtgttgctggtgcaggaactggaggtacgattacaggtattgccaaatttttgaagtctaaaaaccctaatattcaaattatcggtgctgatcctcatggttccattctagctcttcctgaatcattgaacactagtaatgagcaatacaaagttgaaggtattgggtatgactttatcccagaagttttggatagagaaattgtggacacttggtacaaaacagatgataaggatttcttcaagctggccaggcaattgatttctgaagaaggaattctagttggaggatcttccggctctgcgctttctgctgctgttaaaataatcaatgatgccaagcttgatgaaagtgctgtagttgttgtcgtttgtccagacagtatcagatcttatctaaccaagttcgctgatgatgactggatgaaactcaatggattcactgaagacgagcctgcacctctcaaaaggaagtccagcttttcaaaggacactctgtcgtcctatacgatcaaagatttggcgctcaaacctgtggtctctgtcaccattgacgattcaattgaatccacaattaatatccttcaaaccaagggttttgatcagttaccagtgttgaagaacgataagcttgctggtattgtcactctgtctcaattgttacgattactttctaataagaagattcatcttacttccaaggtagaatctgcctactttgatttttccaagcttgaaaactttgaaaaatcttacaacattaacaaggagtcaacaaacaagagaagagaataccagaagatcactactagcaccacgctggccaaattgaacaagttttttgagaccagttcagctgctatagtagaaaatgataagggtcaaccgatccacatcgtttccaaggttgatctgctttctttcttagcctccaaaggagagtttaattaa

SEQ ID NO: 887 - protein, 501 aa, Pichia pastoris
MSDNNQPLPPVSNSILEHIGKTPLVKLNRIPKILNLKPQVYAKVELFNSGGSIKDRIALRMVEQAEKEGRIKPGYTLIEPTSGNTGIGLALVGAVKGYRTIITLPEKMSNEKVAVLKALGAEIIRTPTEAAWDSPESHIGVARRLEKEIPNAVILDQYGNVNNPDAHFYTTGAEIWDQTNGKVTHGVAGAGTGGTITGIAKFLKSKNPNIQIIGADPHGSILALPESLNTSNEQYKVEGIGYDFIPEVLDREIVDTWYKTDDKDFFKLARQLISEEGILVGGSSGSALSAAVKIINDAKLDESAVVVVVCPDSIRSYLTKFADDDWMKLNGFTEDEPAPLKRKSSFSKDTLSSYTIKDLALKPVVSVTIDDSIESTINILQTKGFDQLPVLKNDKLAGIVTLSQLLRLLSNKKIHLTSKVESAYFDFSKLENFEKSYNINKESTNKRREYQKITTSTTLAKLNKFFETSSAAIVENDKGQPIHIVSKVDLLSFLASKGEFN

SEQ ID NO: 888 - DNA, 1200 bp, Arabidopsis thaliana
  CDS (1)..(1200)
atgttttctgctgttcgatttttttttttctctgatttatattcgagtttgaacttaaatcatggttttggtttcactttacaattttggatctcatgcagtttcaaaacactcttcgatttatatgaatgttttatattattagggacattgcttgcagactgtgtcttaaatctttttgattttcttgtgatcttcagaactcaaattgggaagaattttgacatggaggaggaccggtgttcgatcaaggatgatgcaactcaattgataggtaacaccccaatggtatatctgaacaacattgtggatggttgtgtagctcgtattgcagctaagcttgaaatgatggagccttgctctagtgtcaaggagcgaattgcttatggtatgattaaagatgcagaagacaagggattgattactcctgggaagagcacactgattgaggctacctctggtaacaccgggattggtttagccttcatcggtgcagctaaaggttacaaagtggtcctcacaatgccctcatcaatgagccttgagagaaaaatcattcttttagcattaggtgcggaggttcacctcacagatcctagtaaaggcgttcaaggaataatcgacaaagctgaagagatatgtagcaaaaatccagatagtatcatgctagaacagttcaaaaatccttcaaacccgcaaactcattatcgaaccacgggtccagagatatggagagactctgcaggggaagtagacatattggttgccggtgttggaactggtggaacgctttccggatcaggaagattcctcaaggagaagaataaagactttaaggtttatggtgtggaacctacagaaagtgcggtaataagtggaggcaaaccgggtacacatttgatccaaggtattggggctggactcatcccagacaatttggatttcaacgttcttgatgaagtcatccaagtgacaagtgtggaagcaattgaaacagccaaacttcttgccctgaaagaaggattactggtgggaatatcttctggagctgctgcagccgctgcgataaaggtggcaaagcggccagaaaacgccggcaaactcatagttgtgattttccctagcggtggggaacgttacctatcgacctcattgttcgaatcagtcagacatgaagcagagaatttgccaattcaatga

SEQ ID NO: 889 - protein, 399 aa, Arabidopsis thaliana
MFSAVRFFFFSDLYSSLNLNHGFGFTLQFWISCSFKTLFDLYECFILLGTLLADCVLNLFDFLVIFRTQIGKNFDMEEDRCSIKDDATQLIGNTPMVYLNNIVDGCVARIAAKLEMMEPCSSVKERIAYGMIKDAEDKGLITPGKSTLIEATSGNTGIGLAFIGAAKGYKVVLTMPSSMSLERKIILLALGAEVHLTDPSKGVQGIIDKAEEICSKNPDSIMLEQFKNPSNPQTHYRTTGPEIWRDSAGEVDILVAGVGTGGTLSGSGRFLKEKNKDFKVYGVEPTESAVISGGKPGTHLIQGIGAGLIPDNLDFNVLDEVIQVTSVEAIETAKLLALKEGLLVGISSGAAAAAAIKVAKRPENAGKLIVVIFPSGGERYLSTSLFESVRHEAENLPIQ

SEQ ID NO: 890 - DNA, 927 bp, Bacillus stearothermophilus
  CDS (1)..(927): transl_table=11
atggcgagaacagtaaactccatcacggaattaatcggtgatacaccggcagtgaaactaaatcgtattgtcgatgaagacagtgccgatgtctatctaaaacttgagtttatgaacccaggaagcagcgtcaaagaccggattgccttggcgatgattgaagcggcggaaaaagaagggaaattaaaaccaggcgatacgattatcgagccgacaagtggaaacacgggaattggcttggccatggttgccgccgcaaaaggctataaagcgattttagtcatgccagatacgatgagtttagagcgccgcaatttattgcgtgcatatggcgctgaattagtgcttacgccgggaagccaagggatgcggggcgccattgaaaaggcagaagaattagtcagagaacatggctattttatgccccaacagtttaaaaatgaggctaacccagaaattcaccgcttaacgacagggaaggaaattgttgaacaaatgggcgatcaattagatgcgttcattgccggcgtcggtacgggcggaacgattaccggagcaggacaagttcttcgtgaaaaatatccaaatattaaaatttatgccgtagagcctgctgattcaccggtattatcgggtggaaaaccaggcccgcacaaaattcaaggaattggagccggatttgtgccagacgttttagatacaaacatttacgatgaagtcattacggtgacaacggaggaagcgtttgccgctgctcgccgcgctgcccgcgaagaaggaatccttggcggaatttcttctggtgctgccattcatgccgcgttgaaagtggcgaaacaacttggaaaaggaaagaaagtattggccattattccaagtaatggcgaacgctacttaagcacgccgctttaccaattcgaagactaa

SEQ ID NO: 891 - protein, 308 aa, Bacillus stearothermophilus
MARTVNSITELIGDTPAVKLNRIVDEDSADVYLKLEFMNPGSSVKDRIALAMIEAAEKEGKLKPGDTIIEPTSGNTGIGLAMVAAAKGYKAILVMPDTMSLERRNLLRAYGAELVLTPGSQGMRGAIEKAEELVREHGYFMPQQFKNEANPEIHRLTTGKEIVEQMGDQLDAFIAGVGTGGTITGAGQVLREKYPNIKIYAVEPADSPVLSGGKPGPHKIQGIGAGFVPDVLDTNIYDEVITVTTEEAFAAARRAAREEGILGGISSGAAIHAALKVAKQLGKGKKVLAIIPSNGERYLSTPLYQFED

SEQ ID NO: 892 - DNA, 933 bp, Selenomonas ruminantium
  CDS (1)..(933): transl_table=11
atggcaaagatttacaacagtgtaacagaacttatcggcaatacgccgctcttaaaagcaaataatttcatcgaggcaaatgacctgcaggctaatattctggttaagctggaatatctgaatcctgccggcagcgtcaaagatcgcattgccaaagccatgattgagcaggcggaaaaggaaggcaaaatcaccaaagacacggtgattattgagccgaccagcggcaacacgggcattggcctggcaagttttgcggcagcccgcggctataaggcaatcctgaccatgccggaaaccatgagcgtggagcgccgcaatctcctgaaggcctatggtgcacagattgtgctgactgatggcgctaagggcatgaagggggccattgccaaggccgaagaactggcaaaagagacgccgaatgcgttcatcccatcccagtttacgaatcaggcaaacccggctattcacgaagcaacgaccggcccggaaatctggcaggatgcggaaggcaaagtcgatgtctttatcgctggtgtcggcacgggcggcacgcttacaggtgtaggccgttatctcaaaaagcaaaacgctgctgtgcatatcgtagctgtagagccggaaagttcgccggtactcagccagggcacggccggcccgcacaagattcagggcattggtgcaggttttgtgccggaaacactcgataccaaggtctacgatgaagtcctgccaatcagcaacgaagatgccttcaaatatggccgtcagtttgcccatagcgaaggtgtgctggtcggtatctccgccggtgcagcactagcggcagccgttcagctggccaagcgtccggaatttgcgggcaagaacatcgtggctctgctgcctgacacgggtgaccgctatctttccacagaactctttaatgactaa

SEQ ID NO: 893 - protein, 310 aa, Selenomonas ruminantium
MAKIYNSVTELIGNTPLLKANNFIEANDLQANILVKLEYLNPAGSVKDRIAKAMIEQAEKEGKITKDTVIIEPTSGNTGIGLASFAAARGYKAILTMPETMSVERRNLLKAYGAQIVLTDGAKGMKGAIAKAEELAKETPNAFIPSQFTNQANPAIHEATTGPEIWQDAEGKVDVFIAGVGTGGTLTGVGRYLKKQNAAVHIVAVEPESSPVLSQGTAGPHKIQGIGAGFVPETLDTKVYDEVLPISNEDAFKYGRQFAHSEGVLVGISAGAALAAAVQLAKRPEFAGKNIVALLPDTGDRYLSTELFND

SEQ ID NO: 894 - DNA, 1131 bp, Solanum tuberosum
  CDS (1)..(1131)
atggcatctttcatcaacaatcccttaacttctctctgtaacactaagtctgaagctaataatctcttcaaaatttcccctttaagagctcaatcactgggtttttccaagcttaatggcagcagaaaagttgctttcccttctgttgtttgcaaagcggtgtctgtaccaacgaaatcgagtacagagattgaagggcttaacatcgctgaagatgttacacagcttattgggaacacaccaatggtttaccttaacaccatcgctaagggttgtgtagcaaacattgctgctaaacttgagattatggagccatgttgcagtgttaaggacaggatagggttcagtatgatagttgatgcagaggagaagggacttatatctccggggaagactgttctagttgagcctacaagtggaaacacaggcattgggcttgccttcattgctgcttccagaggatataagctcatcttaacgatgcctgcatcaatgagtcttgaaagaagggtcattctaaaagcttttggagctgaacttgttttaactgacccagccaaagggatgaaaggagctgtttcaaaggctgaagaaatattgaataacacaccagatgcctatatccttcaacaatttgacaatcctgccaacccaaagatacactatgaaacaacgggtccagagatctgggaagacacaaaaggcaagattgacatacttgttgctggcattggaactggcggaaccattacaggaacaggccgattccttaaagagcaaaatccaaacattaagattattggtgtggagcccacagaaagtaacgttctatcagggggcaaacctggttttattccaggaaacttggatcaagatgtcatggatgaagtgatagagatatcgagtgacgaagctgttgaaactgcaaagcaattagcgctacaagaagggttgttggttgggatttcttccggagcagctgcccttgctgccattcaggttgggaagagacctgagaatgcaggaaagcttattggggttgtatttccaagctatggggaacgatacctctcctctatccttttccagtcaatacgtgaggaatgcgagaaaatgaagccagaattgtga

SEQ ID NO: 895 - protein, 376 aa, Solanum tuberosum
MASFINNPLTSLCNTKSEANNLFKISPLRAQSLGFSKLNGSRKVAFPSVVCKAVSVPTKSSTEIEGLNIAEDVTQLIGNTPMVYLNTIAKGCVANIAAKLEIMEPCCSVKDRIGFSMIVDAEEKGLISPGKTVLVEPTSGNTGIGLAFIAASRGYKLILTMPASMSLERRVILKAFGAELVLTDPAKGMKGAVSKAEEILNNTPDAYILQQFDNPANPKIHYETTGPEIWEDTKGKIDILVAGIGTGGTITGTGRFLKEQNPNIKIIGVEPTESNVLSGGKPGFIPGNLDQDVMDEVIEISSDEAVETAKQLALQEGLLVGISSGAAALAAIQVGKRPENAGKLIGVVFPSYGERYLSSILFQSIREECEKMKPEL

SEQ ID NO: 896 - DNA, 1161 bp, Solanum tuberosum
  CDS (1)..(1161)
atggcatctttcatcaacaatcccttaacttctctctgtaacactaagtctgaagctaataatctcttcaaaatttcccctttaagagctcaatcactgggtttttccaagcttaatggcagcagaaaagttgctttcccttctgttgtttgcaaagcggtgtctgtaccaacgaaatcgagtacagagattgaagggcttaacatcgctgaagatgttacacagcttattgggaacacaccaatggtttaccttaacaccatcgctaagggttgtgtagcaaacattgctgctaaacttgagattatggagccatgttgcagtgttaaggacaggatagggttcagtatgatagttgatgcagaggagaagggacttatatctccggggaagactgttctagttgagcctacaagtggaaacacaggcattgggcttgccttcattgctgcttccagaggatataagctcatcttaacgatgcctgcatcaatgagtcttgaaagaagggtcattctaaaagcttttggagctgaacttgttttaactgacccagccaaagggatgaaaggagctgtttcaaaggctgaagaaatattgaataacacaccagatgcctatatccttcaacaatttgacaatcccgccaaccccaagatacactatgaaacaacgggtccagagatctgggaagacacaaaaggcaagattgacatacttgttgctggcattggaactggtggaaccattacaggaacaggccgattccttaaagagcaaaatccaaacattaagattattggtgtggagcccacagaaagtaacgttctatcagggggcaaacctggccctcacaaaattcaagggattggagcaggttttattccaggaaacttggatcaagatgtaatggatgaagtgatagagatatcgagtgacgaagctgttgaaactgcgaagcaattagcgctacaagaagggttgttggttgggatttcttccggagcagctgctcttgctgccattcaggttgggaagagacctgagaatgcaggaaagcttattggggttgtatttccaagctatggggaacgatacctctcctctattcttttccagtcaatacgagaggaatgcgagaaaatgaagccagaattgtga

SEQ ID NO: 897 - protein, 386 aa, Solanum tuberosum
MASFINNPLTSLCNTKSEANNLFKISPLRAQSLGFSKLNGSRKVAFPSVVCKAVSVPTKSSTEIEGLNIAEDVTQLIGNTPMVYLNTIAKGCVANIAAKLEIMEPCCSVKDRIGFSMIVDAEEKGLISPGKTVLVEPTSGNTGIGLAFIAASRGYKLILTMPASMSLERRVILKAFGAELVLTDPAKGMKGAVSKAEEILNNTPDAYILQQFDNPANPKIHYETTGPEIWEDTKGKIDILVAGIGTGGTITGTGRFLKEQNPNIKIIGVEPTESNVLSGGKPGPHKIQGIGAGFIPGNLDQDVMDEVIEISSDEAVETAKQLALQEGLLVGISSGAAALAAIQVGKRPENAGKLIGVVFPSYGERYLSSILFQSIREECEKMKPEL

SEQ ID NO: 898 - DNA, 1044 bp, Solanum tuberosum
  CDS (1)..(1044)
atggcaactttaagcagattcttaaagaaaagatcattagctagcaacagattgttctctacacaacttcctcatactaacatcaagtctgaagtttctcaattaattgggaaaacaccaatggtttatcttaaaaaagtgacagaaggatgtggagcatatatagctgtgaaacaagagatgtttcagcctacttctagcatcaaagacagaccagcattggcaatgatcaatgatgcagaaaagaaaggcttaatatcacctgaaaagacgacgttgattgagccaacatcaggaaatatggggattagtatggcatttatggcagcaatgaaaggctacaaaatggttttgactatgccatcgtacacgagcatggagaggagagtgacaatgagagcatttggagccgatttaatcctcaccgatccaaccaaaggaatgggaggcactgttaagaaggcttatgagcttttggaatctacacctaatgctttcatgcttcaacaattttccaaccctgcaaacactcaggttcatttcgacacaactggccctgaaatatgggaagaaactctaggtaatgttgacatatttgtcatgggaataggaagtggaggcactgttactggtgttggactatatcttaaatccaaaaatcctaatgtcaagatatatggactcgagccaactgaaagcaatatactgaatggtggaaaaccaggtcctcatcatataacgggaaatggggtcggatccaagccagatatcgttgatatggatctaatggaggaagtactaatggtttctagcgaagacgctgtaaacatggctagggagttggcagtgaaggaaggactcatggttgggatatcgtcaggagctaatacagtagcagctctaagacttgctcaaaaaccagaaaacaaaggcaaactcatagtgactgtacatgcaagttttggagagcgatacttatcatctgtgttgtatcaagatctgaggaaagaagctgagaatatgcaacctgtttcagtcgattaa

SEQ ID NO: 899 - protein, 347 aa, Solanum tuberosum
MATLSRFLKKRSLASNRLFSTQLPHTNIKSEVSQLIGKTPMVYLKKVTEGCGAYIAVKQEMFQPTSSIKDRPALAMINDAEKKGLISPEKTTLIEPTSGNMGISMAFMAAMKGYKMVLTMPSYTSMERRVTMRAFGADLILTDPTKGMGGTVKKAYELLESTPNAFMLQQFSNPANTQVHFDTTGPEIWEETLGNVDIFVMGIGSGGTVTGVGLYLKSKNPNVKIYGLEPTESNILNGGKPGPHHITGNGVGSKPDIVDMDLMEEVLMVSSEDAVNMARELAVKEGLMVGISSGANTVAALRLAQKPENKGKLIVTVHASFGERYLSSVLYQDLRKEAENMQPVSVD

SEQ ID NO: 900 - DNA, 975 bp, Nicotiana tabacum
  CDS (1)..(975)
atggaagagaagagtgatattgcaaaggatgtcacagagcttatcgggaacacccctatggtatatctcaacaaaatcgttgaaggttgcgctgcccaaattgcagccaagttggagtcaatggaaccatgctcaagtgtcaaagacaggatggcatacagtatgatcaaagatgcagaagataagggcctgattactcctggaaagacagtcctccttgaggtgaccagtggtaataccggcattggtcttgcatttattgcagcagctcgtggctacaagctcgtgacagtgatgccagcatcatacagtcttgagagaaggattgttcttaaagctttgggttctgagttatacatcacagatccagccaaaggtatagatggtgtgcttcagaaggctgaagaaatactagataggacgccaaactgtcatttctttcgtcagtttgagaaccctgccaatccaaagatccattatgaaacaactggaccagaaatatggaagtgcacaggagggaaaattgatatttttattgccgggattggaactggaggcacagtgacgggagctggaaggttccttaaggagaagaatccagaaataaaggtatatggtatggaaccagcccgaaaatgcaattctgaatggaggacaaaagggccacataaaatccaaggaattggtgctggttttgtcccagtcgttctcgatctcagcatcctggatgaagttcttcaagtatctagtgatgaagctattgaaatgacaaagcttcttgcattgaaagaaggtttgctggtaggaatatcgtcgggggctgcagctgctgcagcgataaaagtagcaaaaaagccagaaaatgctgggaaactcattgcggttatcttccctagttttggggaacgttatctctccaccgtgctgtttgattctattcgagaagaggtggctaacatgacttttgaacaatag

SEQ ID NO: 901 - protein, 324 aa, Nicotiana tabacum
MEEKSDIAKDVTELIGNTPMVYLNKIVEGCAAQIAAKLESMEPCSSVKDRMAYSMIKDAEDKGLITPGKTVLLEVTSGNTGIGLAFIAAARGYKLVTVMPASYSLERRIVLKALGSELYITDPAKGIDGVLQKAEEILDRTPNCHFFRQFENPANPKIHYETTGPEIWKCTGGKIDIFIAGIGTGGTVTGAGRFLKEKNPEIKVYGMEPARKCNSEWRTKGPHKIQGIGAGFVPVVLDLSILDEVLQVSSDEAIEMTKLLALKEGLLVGISSGAAAAAAIKVAKKPENAGKLIAVIFPSFGERYLSTVLFDSIREEVANMTFEQ

SEQ ID NO: 902 - DNA, 927 bp, Methanosarcina thermophila
  CDS (1)..(927): transl_table=11
atgggtcggatattttctgatataacctggacaattggcaatactcctcttgtcaggctaaaccgcataaccaaaggactgcatgcggatgtgctggcaaaagtcgaatccttcaatcccatgggcagtgtgaaggacagaatagggctggcaatgatcgaagaagccgaacgtgaagggagaatcaaagaaggcaccactattattgaagcaaccagcggcaataccggcatcgcacttgcatgcgtttgtgctgcccgcggctacaatcttatactggttatgcctgaaactatgactgtagaacgaagaaaactgcttaaagctctgggagcggaacttgtcctgacctcgggagcggaaggaatgaggggggcagtcaataaagccgaacagatggctgccgacgattctgcactttatttcataccccagcaattccagaaccccgcaaaccctgagattcacagaaggacaacagccgaagagatctggagagatactgacggcaaagccgatgttattgtagcgggcgtgggaactggcggaactattacagggattgccagtgctatcaaaaaacggaggccttcttttaaggcgattgcagtcgagcctgccgaatctcctgtactcagcggaggaagccctggcccgcacaggatccagggaatcggtgcaggttttgttcctgatgttctccagctagagctgattgatgaaattatcaaagttacaggagatgaagccgctgccacagcccgaaggctggcaaaggaagaaggtattcttgcagggatatcttcaggggctgctacctgggctgcacttcaggtcgcatccagagaagaaatgcgcggaaagacgattgttgtaattctgccggatacgggagagcgttatttgagcactgacctgtttgactga

SEQ ID NO: 903 - protein, 308 aa, Methanosarcina thermophila
MGRIFSDITWTIGNTPLVRLNRITKGLHADVLAKVESFNPMGSVKDRIGLAMIEEAEREGRIKEGTTIIEATSGNTGIALACVCAARGYNLILVMPETMTVERRKLLKALGAELVLTSGAEGMRGAVNKAEQMAADDSALYFIPQQFQNPANPEIHRRTTAEEIWRDTDGKADVIVAGVGTGGTITGIASAIKKRRPSFKAIAVEPAESPVLSGGSPGPHRIQGIGAGFVPDVLQLELIDEIIKVTGDEAAATARRLAKEEGILAGISSGAATWAALQVASREEMRGKTIVVILPDTGERYLSTDLFD

SEQ ID NO: 904 - DNA, 972 bp, Salmonella enterica subsp
  CDS (1)..(972): transl_table=11
atgagtaagatttttgaagacaactccctgactatcggtcacacgccgctggtacgactgaaccgcattggtaacggccgtatcctggcaaaggtagaatctcgtaacccgagctttagcgtaaaatgccgtatcggcgccaatatgatctgggatgctgaaaagcgcggcgttttgaaacctggcgtggaactggtcgaaccgaccagcggcaacaccggtatcgccctcgcctacgtggcggcgggccgcggctacaagctaacgctaaccatgccggaaaccatgagcattgagcgccgcaaactgctgaaagcgctgggcgccaacctggtactgaccgaaggcgcaaaaggcatgaaaggcgctattcaaaaagcggaagaaatcgtcgccagcaaccgggaaaaattcctgctgctgcagcagttcaacaacccggctaatccggaaatccacgaaaagaacaccgggccggaaatctggggagagaccgatggtcaggttggactctttatctctggggtaggcgccgggggtacgctgaacggggtcggccgcttcttaaaaagcccaagggggaaaaaaaatcttatcaccgtcgcgggcgaaccgaccgattcgccggtcataccccaggcgctggcaggagaagagctcaagccgggcccgcacaaaattcagggtatcggcgccggcttcattcctggcaacctggatctaaagctggtggacaaagtgatcggcattaccaacgaggaagctatctccacggcgcgccgtctgatggaagaagaaggcatcctggcgggtatctcttccggggccgccgttgccgccgcgttgaagctgcaggaagatgaggcctttaccaataagaatattgtggttactctgccttctccaggtgagcgttatttaagcaccgcgctgttcgccgatctcttcactgagaaagaactgcaacagtaa

SEQ ID NO: 905 - protein, 323 aa, Salmonella enterica subsp
MSKIFEDNSLTIGHTPLVRLNRIGNGRILAKVESRNPSFSVKCRIGANMIWDAEKRGVLKPGVELVEPTSGNTGIALAYVAAGRGYKLTLTMPETMSIERRKLLKALGANLVLTEGAKGMKGAIQKAEEIVASNREKFLLLQQFNNPANPEIHEKNTGPEIWGETDGQVGLFISGVGAGGTLNGVGRFLKSPRGKKNLITVAGEPTDSPVIPQALAGEELKPGPHKIQGIGAGFIPGNLDLKLVDKVIGITNEEAISTARRLMEEEGILAGISSGAAVAAALKLQEDEAFTNKNIVVTLPSPGERYLSTALFADLFTEKELQQ

SEQ ID NO: 906 - DNA, 915 bp, Clostridium sticklandii
  CDS (1)..(915): transl_table=11
atgatttatgaaaatatcatgcaaacaataggaaaaactccaatagttaagcttaaaaatttaacagatgagaatatggcagagctttatgtaaagctggaattttttaatccaggaggttcagtaaaagatagagctgcattaaatatgatagaaaacatggaaaaagagggtaagcttaagcttggtgatattattgtagagcctacaagtggaaatactggaataggaatagcgatggtaggctcggcaaagggctacaaagtaattttatgcatgccagagactatgagtatagaaagaagaaaaatcttaaaagcctatggagctgagctggttttaactgaaggagctaaaggcatgaaaggtgctatagcaaaagctgaagaaatggcacaagaagatggctatattatcctaagacagtttgacaatagctataacgtagatgctcactataaaaacacagctaaggaaataataagtgacctacctgatttagatgctctagtcgtaggagtaggaacaggaggaacacttactggagttgctaaagcatttaaagaaagctctataaatgcagaaattgttgctgtagagccagtagattcagcagttttatctggaaatgctccagggccgcataagcttcaagggataggcgcaggatttgtgcctagtattttagatactgagtatataagcaagatagaacaaattcaaacgcaggaagcttttaatgcatctagacttatggcttcaaaagaaggaatcctccttggaatttcagggggagcagcattagaggctgcgattagaacagctaaacgtcttggaaaagggaaaaaagtctgtttgttgctccctgataacggagaaagatatctaagcacagctttatatggagatgaataa

SEQ ID NO: 907 - protein, 304 aa, Clostridium sticklandii
MIYENIMQTIGKTPIVKLKNLTDENMAELYVKLEFFNPGGSVKDRAALNMIENMEKEGKLKLGDIIVEPTSGNTGIGIAMVGSAKGYKVILCMPETMSIERRKILKAYGAELVLTEGAKGMKGAIAKAEEMAQEDGYIILRQFDNSYNVDAHYKNTAKEIISDLPDLDALVVGVGTGGTLTGVAKAFKESSINAEIVAVEPVDSAVLSGNAPGPHKLQGIGAGFVPSILDTEYISKIEQIQTQEAFNASRLMASKEGILLGISGGAALEAAIRTAKRLGKGKKVCLLLPDNGERYLSTALYGDE

SEQ ID NO: 908 - DNA, 918 bp, Arabidopsis thaliana
  CDS (1)..(918)
atggcttcagtggctcctaaaatcgctaaagatgtaactgaactaatagggaacactccattagtgtatctaaacaaagtagctaaagattgtgttggtcatgttgctgctaagcttgagatgatggaaccatgttctagcgtcaaagacaggattggttatagtatgattgctgatgcagaagctaaaggacttattaaaccgggagagagtgtgttgattgagccaacaagtgggaacactggagttggtttagcatttactgcagctgcaaagggctataagcttgttataacaatgccagcttcaatgagtatagagagaagaatcattctcttagcttttggagctgagttgattcttactgatccggctaaaggtatgaaaggtgctgttgcaaaggcggaggagattttggcgaaaacacctaatggttatatgcttcaacagtttgagaatcctgctaatccaaagatccattatgagactactggacctgagatatggaaaggtgctgggaagtatctcaaggaacagaacacaaacataaagctgtatggtgtcgagcctgttgaaagccctattctgtccggtggaaagccaggtccccacaaaattcaaggtataggtgctggttttattccaggcattttggatgttgatcttatagatgaagttgttcaggtttcaagtgaagaatccattgacatggcaaggcttcttgctagggaagagggtctgttagtgggaatctcatctggagcagcagctactgcagcaatcaaacttgcaaagaggccagaaaatgctgggaagcttatagtggcggtgtttccgagtttcggggaaagatatctatcgactgtactgtttgatgcagcaaggaaagaggcagagactatgacctttgagccctga

SEQ ID NO: 909 - protein, 305 aa, Arabidopsis thaliana
MASVAPKIAKDVTELIGNTPLVYLNKVAKDCVGHVAAKLEMMEPCSSVKDRIGYSMIADAEAKGLIKPGESVLIEPTSGNTGVGLAFTAAAKGYKLVITMPASMSIERRIILLAFGAELILTDPAKGMKGAVAKAEEILAKTPNGYMLQQFENPANPKIHYETTGPEIWKGAGKYLKEQNTNIKLYGVEPVESPILSGGKPGPHKIQGIGAGFIPGILDVDLIDEVVQVSSEESIDMARLLAREEGLLVGISSGAAATAAIKLAKRPENAGKLIVAVFPSFGERYLSTVLFDAARKEAETMTFEP

SEQ ID NO: 910 - DNA, 978 bp, Allium tuberosum
  CDS (1)..(978)
atgggtgaagttggacctgcaattgcaaaggatgttactgaattgattggtaaaactccattggtatatctcaacaaagttacagctggctgcaaggctcgtattgctgccaagcttgaaatgatggagccttgttctagtgttaaggacaggattgggtacagcatgattactgaggcagagaaacaaggccttattactcctggggtgagtgttcttattgaaccaactagtggcaatacgggcatagggctggcgttcatggcagcagctaaaagctataagctcattttgacaatgcctgcttctatgagtcttgagagaaggattattctcaaagcttttggtgctgaattggtcctaactgatcctgttaagggtatgaaaggagcatgtgagaaagctgaggagatagctgcaaaaacaccaaattcttatgttcttcaacagtttgaaaacccctctaacccaaagattcattatgagacaaccggccctgaaatatggaaggcaactgatgggaaaattgatggacttgtatctggtattggaacgggaggtacaattactgggagtggcaaatatctcaaagaacaaaaccccagtgtcaagctctatggggttgaaccagtggaaagtgctattttatctggtggaaagccaggaccgcataaaattcaagggataggagcaggttttattcctggtgttttagatgtcaatcttatagatgaaactcttcaggtttcaagtgaggaagcaatagaaatggcgaaacaacttgccctacaagaagggcttttggtaggaatttcgtctggagctgctgcaattgctgctattagagttgcacagcgtccggagaatgaaggaaaactgattgtggttgtcttccccagctttggcgagcgatatctttctaccgtgctcttccagtcaattaagaaagaggccgagagcatggtgtttgaaccttaa

SEQ ID NO: 911 - protein, 325 aa, Allium tuberosum
MGEVGPAIAKDVTELIGKTPLVYLNKVTAGCKARIAAKLEMMEPCSSVKDRIGYSMITEAEKQGLITPGVSVLIEPTSGNTGIGLAFMAAAKSYKLILTMPASMSLERRIILKAFGAELVLTDPVKGMKGACEKAEEIAAKTPNSYVLQQFENPSNPKIHYETTGPEIWKATDGKIDGLVSGIGTGGTITGSGKYLKEQNPSVKLYGVEPVESAILSGGKPGPHKIQGIGAGFIPGVLDVNLIDETLQVSSEEAIEMAKQLALQEGLLVGISSGAAAIAAIRVAQRPENEGKLIVVVFPSFGERYLSTVLFQSIKKEAESMVFEP

SEQ ID NO: 912 - DNA, 1014 bp, Zymomonas mobilis
  CDS (1)..(1014): transl_table=11
atgaacattgcatcttcttctgtgcctaaaaaggccgaaaatattctttccatgattggcaacacatcgcttgttaggctggaaggccccagcgagctgacagggtgtaatatatatgccaaatgtgaatttactaatcctgggggatctatcaaagatagagccgctttgtcgattattgaagatgcagaagagcaggggattattgaacccggcggcgtaattgttgaaggcacaaccggcaataccggaattgggttaactttggtcggagcagccaaaggctatcataccattattgtcatgccggaaacccaaagttcggaaaagattgcgacccttcaggccttgggggctgaattggtcttggtgccggaaacctcttattccaatagcgcccattatgttcatatgtcgcggcggctggcgcaggagacagataacgcgatctgggcgaatcagtttgacaatctggcaaaccgaatggcgcatattaaaacaacttcgcaggaaatctgggcgcagacagaagggcatattgacggctttatctgtgcagccggaacgggcggtacctttgccggaaccggattaggtctgatagagcataatcccgatattgtggtggcgttggctgacccatatggggccgtttatataattattatactagcggtgaattgcgggcagaggggcattctatttgccgaaggatttggtcaaagtcgggttacaggcaatcttgatggcgcaccggttgataaccagtttttaattagcgatcaggaaggtttgcgcaaatctatcagttgcttcaaaaagagggattgtctgttgggctgtcgtcggggatcaatatcagcaggcgctattaaactcgcaaaagaattaggccccggaaaaacgattgttactattttggccgattctggattacgctatctctcgactttatataatcgccattggctgattgcgcatgatctgcctgttccagaatggctggctaaatag

SEQ ID NO: 913 - protein, 337 aa, Zymomonas mobilis
MNIASSSVPKKAENILSMIGNTSLVRLEGPSELTGCNIYAKCEFTNPGGSIKDRAALSIIEDAEEQGIIEPGGVIVEGTTGNTGIGLTLVGAAKGYHTIIVMPETQSSEKIATLQALGAELVLVPETSYSNSAHYVHMSRRLAQETDNAIWANQFDNLANRMAHIKTTSQEIWAQTEGHIDGFICAAGTGGTFAGTGLGLIEHNPDIVVALADPYGAVYIIIILAVNCGQRGILFAEGFGQSRVTGNLDGAPVDNQFLISDQEGLRKSISCFKKRDCLLGCRRGSISAGAIKLAKELGPGKTIVTILADSGLRYLSTLYNRHWLIAHDLPVPEWLAK

SEQ ID NO: 914 - DNA, 927 bp, Streptococcus suis
  CDS (1)..(927): transl_table=11
atggctatttatcaaaacattactcaattagttggaaaaacacctgttattaaactgaataatatcgttccagagggggcagcggaggtctatgtgaaattagaggcctttaacccaggatcttctgtaaaagaccgtatcgccttggctatgattgaagatgctgagaaggctggtacaatcaaacctggagatactattgttgagccaacaagtggtaacactggtatcggtcttgcttgggttggagcagcaaaaggttataatgtgattatcgtcatgcctgaaaccatgagtgttgagcgtcgtaagattatccaagcttatggagctgaacttgtcttgactcctggtagcgaagggatgaagggggctatcgccaaagcaaaagagattgctgaagaaaaaaatggctgggttcctttccagtttgctaatccatccaatccaaaagttcacgaagatacaacaggacaggaaattttggaagactttggcacaactggtttagatgcctttgtatctggcgttggtactggtggtaccgtttcaggtgtttcgcatgttttaaagacagcaaatccagatattgctatctatgctgttgaagctgatgaatcagctgtcttatctggtgaagcacctggtccgcacaagatccaaggtatttcggcaggttttattccagatactttggacactagcgcctatgatggcattattcgtgtcaaatccgatgatgccttagctacaggtcgtgctatcggtggaaaagaaggattcttagttggtatttcttcaggtgcagcaattcacgctgctatcgaagtcgctaaggagttgggaactggaaaaaaagtgttggcaatcttgcctgataacggtgagcgttacttgtcaacagctctttatgagttcaatgattaa

SEQ ID NO: 915 - protein, 308 aa, Streptococcus suis
MAIYQNITQLVGKTPVIKLNNIVPEGAAEVYVKLEAFNPGSSVKDRIALAMIEDAEKAGTIKPGDTIVEPTSGNTGIGLAWVGAAKGYNVIIVMPETMSVERRKIIQAYGAELVLTPGSEGMKGAIAKAKEIAEEKNGWVPFQFANPSNPKVHEDTTGQEILEDFGTTGLDAFVSGVGTGGTVSGVSHVLKTANPDIAIYAVEADESAVLSGEAPGPHKIQGISAGFIPDTLDTSAYDGIIRVKSDDALATGRAIGGKEGFLVGISSGAAIHAAIEVAKELGTGKKVLAILPDNGERYLSTALYEFND

SEQ ID NO: 916 - DNA, 966 bp, Oryza sativa subsp
  CDS (1)..(966)
atgggtgagaccatcgccaaggatgtcaccgagttgattgggaacacgccgttggtgtacctcaaccgggtgacggatgggtgcgtcgggcgcgtcgcggccaagctcgagtccatggagccatgctccagcgtcaaggataggattggatacagtatgatcactgatgcagaggagaaggggctgatcactccaggcaagagtgtgctgattgagccaactagtggcaacacaggcattggactggccttcatggctgctgcaaagggttacaggcttgtactcacgatgccggcctccatgagcatggagaggagaatcatattgaaggcttttggtgctgaattgatacttactgacccactcttgggaatgaaaggagctgtccaaaaggcagaagaactggcagcgaagacaaacaactcatttatcctccaacaattcgagaaccctgctaacccaaagatccattacgagaccactggacctgaaatctggaaaggaacaggaggtaaagttgatggtttagtttctggtattgggacaggtggcactattactggagctggacgatacctcagagagcaaaatcctgatatcaagatctatggtgtggagccagtcgagagcgctgtcttatctggtggaaagcctgggccacacaagattcaaggaattggagctggttttgttcctggggtcctggatgttgacctcatcaatgaaactgtacaagtttcaagtgatgaagctatcgagatggcaaaggctcttgcattgaaagaagggttgctggttggaatatcttcaggtgcagctgcagcagcagctgttaggctcgctcagaggccggaaaatgaaggaaaactttttgttgttgtcttcccaagctttggtgagcggtacctttcgtcggtgctcttccagtccatcaagaaggaagctgaaaacatggtggttgaatga

SEQ ID NO: 917 - protein, 321 aa, Oryza sativa subsp
MGETIAKDVTELIGNTPLVYLNRVTDGCVGRVAAKLESMEPCSSVKDRIGYSMITDAEEKGLITPGKSVLIEPTSGNTGIGLAFMAAAKGYRLVLTMPASMSMERRIILKAFGAELILTDPLLGMKGAVQKAEELAAKTNNSFILQQFENPANPKIHYETTGPEIWKGTGGKVDGLVSGIGTGGTITGAGRYLREQNPDIKIYGVEPVESAVLSGGKPGPHKIQGIGAGFVPGVLDVDLINETVQVSSDEAIEMAKALALKEGLLVGISSGAAAAAAVRLAQRPENEGKLFVVVFPSFGERYLSSVLFQSIKKEAENMVVE

SEQ ID NO: 918 - DNA, 1056 bp, Schizosaccharomyces pombe
  CDS (1)..(1056)
atggctactagcggtattcaaacgaaggttccaggaatcgttagcggattcattggggcaattggtcgtactcctttaattagactgaatacgctgtcgaacgagacgggatgcaatatccttgccaaagctgaattccaaaatcccggaggaagcgtcaaggatagagctgcttactacgtggtacgcgatgccgagaaaaaaggaaaactctctagaggtggcacaattgtcgaggggactgccggtaacactggtattggtcttgctcacattgctagagcaagaggttataaatgcgtgatttacatgccaaatacccaatctcaagctaaaatcgatacccttaagtttttgggtgccgaggttcatcccgtacctgttgctcccttttccaaccctctcaattataaccatcaggcccgtcgtcacgctgagtctactccgaatgcttcttggactgatcagttcgataacgtcgctaacttactgtctcactacgaaaccactggtcctgaaatttgggatcaaaccaaaggtaccgttgacggctttacctgctctactggtactggtggtacttttgccggcgttaccaagtatttgaaggagaagtccgacggtcgtgttgcttctttcgtggctgatccccctggaagtgttttgtatagccatatcaaaacgaagggtaagcatcctgacaacaagggttcttcatttaccgaaggcattggtcaaggtcgtattactggaaatgtccaacctgtttacgatctcattgacgatgctatgaaaatccctgacgaaaaatctattaacatgttctttcgtttgttagaccaagaaggtcttttcttgggcggctcttcttgcttaaatgtggtcgctgctgttgaaatggctaaaatattaggtcctggcaagacggtggttacaattctttgtgattctggtcacaagtatgccactcgtttattcagtcgctcattccttgaaagtaaaaaattatttgatgtaattgagccacaatacaagaagtatattgtacttccttaa

SEQ ID NO: 919 - protein, 351 aa, Schizosaccharomyces pombe
MATSGIQTKVPGIVSGFIGAIGRTPLIRLNTLSNETGCNILAKAEFQNPGGSVKDRAAYYVVRDAEKKGKLSRGGTIVEGTAGNTGIGLAHIARARGYKCVIYMPNTQSQAKIDTLKFLGAEVHPVPVAPFSNPLNYNHQARRHAESTPNASWTDQFDNVANLLSHYETTGPEIWDQTKGTVDGFTCSTGTGGTFAGVTKYLKEKSDGRVASFVADPPGSVLYSHIKTKGKHPDNKGSSFTEGIGQGRITGNVQPVYDLIDDAMKIPDEKSINMFFRLLDQEGLFLGGSSCLNVVAAVEMAKILGPGKTVVTILCDSGHKYATRLFSRSFLESKKLFDVIEPQYKKYIVLP

SEQ ID NO: 920 - DNA, 975 bp, Brassica juncea
  CDS (1)..(975)
atggcctctcgtattggtattgctaatgatgtgaccgaattgattgggaacactccgttggtgtatctgaacagtgttgctgaaggatgtgttggtcgcgttgccgctaagcttgagatgatggaaccctgctccagcgtcaaagacaggattggttttagcatgatctctgatgcagagaaaaagggtctgattaaaccaggagagagtgtgttgattgagccaacgagtggaaacacgggagttgggttggcattcacggcggctgccaagggctacaagcttattattaccatgccagcttcaatgagtattgagagaagaatcattctcttagcctttggtgttgagttggttttaactgacccggccaagggcatgaaaggcgctatcgcaaaggcggaagagattttggccaaaacacccaatggttacatgctccaacagtttgagaaccctgctaacccaaagatccactatgagactactggacctgagatttggaaaggcactgagggtaaaatcgatggctttatttctgggattggtactggtggtaccataacaggtgctgggaagtatctcaaggaacagaacccgaacgttaagctgtatggtgtggagccagtcgaaagcgctattctatctggtggaaagccaggccctcacaagattcaagggataggtgctggttttataccaaatgtattggagactaatcttattgatgaagttgttcaagtttcaagtgatgaatccatcgacatggcaaggcttcttgctcgcgaagaaggtcttcttgtgggaatatcatccggtgcagcagctgcagcagcaatcaaacttgcaaagaggccagaaaacgccgggaagcttttcgtggcagtgttcccaagtttcggagagaggtacctgtcgaccgtactgttcgatgccacaaggaaagaagcagaatccatgaccttcgaggcttga

SEQ ID NO: 921 - protein, 324 aa, Brassica juncea
MASRIGIANDVTELIGNTPLVYLNSVAEGCVGRVAAKLEMMEPCSSVKDRIGFSMISDAEKKGLIKPGESVLIEPTSGNTGVGLAFTAAAKGYKLIITMPASMSIERRIILLAFGVELVLTDPAKGMKGAIAKAEEILAKTPNGYMLQQFENPANPKIHYETTGPEIWKGTEGKIDGFISGIGTGGTITGAGKYLKEQNPNVKLYGVEPVESAILSGGKPGPHKIQGIGAGFIPNVLETNLIDEVVQVSSDESIDMARLLAREEGLLVGISSGAAAAAAIKLAKRPENAGKLFVAVFPSFGERYLSTVLFDATRKEAESMTFEA

SEQ ID NO: 922 - DNA, 1188 bp, Schizosaccharomyces pombe
  CDS (1)..(1188)
atggcgaaaaaatatcaggatctagctagtggaatcgccatgggtgcagttttcatgtaccttttacgtcgtttgtacgagtctcttcgcgtcaaatcgtcagccgattcgttggaagaagacatcgtaaatggagtagaaggactaattggaaatactaaaatggtcaggataaaatctctttcgcaagcgacgggctgcgatatcctcgccaaagcggaatttctgaaccctggaaattctcctaaagatcgtgttgctttgcagatgattcgcacagcagaagaaaatggagatttagtaccttatcaatcgaatgctgtttatgaaggaaccgccggttctactggtatttcgatagctatgctctgttgttcacttggctatgactctcgtatatatatgcctagtgaccaatctaaagaaaaaagtgacatacttgaattgttgggtgctcatgttcaaagagtaactccagctcccatcgtcgatccaaatcattttgtaaatacggctcgtcgtaatgctgccaatcataccgtcgacgagtccattcctggcaaaggatactttgctaatcaatttgagaatccggcgaattggcaagctcatttcaattctaccggtcctgaaatatggcgtcaatgtgctggaaaattagatgcatttattgccggttctggtacgggtggcactatcgctggtatttctcgctacctaaagtccaaagatccttccatcaccgtctgtcttgctgatcctcccggaagtggcctatatcataaagttcttcacggtgtgatgtttgatttggctgaacgagaaggaactcgtcggcgacatcaggttgataccatcgttgaaggagtgggtattaatcgaatgacacgcaacttttctatcgctgaaccccttattgatatggcttacagagtaactgatgagcaggccgtagctatgtctcgatacttagtcacccatgatggtttatttgtcggcagttcttctgctgttaattgcgtcgctgctgtccgtcttgctaaaaagttgggccctggtcatcgaattgttactcttctttgcgatcctggatctcgccatttttcaaaactgtataacgaagagttcttgcgaaaaaaaaacattgttccacaagttccttcttccttagattttgttgaagcttag

SEQ ID NO: 923 - protein, 395 aa, Schizosaccharomyces pombe
MAKKYQDLASGIAMGAVFMYLLRRLYESLRVKSSADSLEEDIVNGVEGLIGNTKMVRIKSLSQATGCDILAKAEFLNPGNSPKDRVALQMIRTAEENGDLVPYQSNAVYEGTAGSTGISIAMLCCSLGYDSRIYMPSDQSKEKSDILELLGAHVQRVTPAPIVDPNHFVNTARRNAANHTVDESIPGKGYFANQFENPANWQAHFNSTGPEIWRQCAGKLDAFIAGSGTGGTIAGISRYLKSKDPSITVCLADPPGSGLYHKVLHGVMFDLAEREGTRRRHQVDTIVEGVGINRMTRNFSIAEPLIDMAYRVTDEQAVAMSRYLVTHDGLFVGSSSAVNCVAAVRLAKKLGPGHRIVTLLCDPGSRHFSKLYNEEFLRKKNIVPQVPSSLDFVEA

SEQ ID NO: 924 - DNA, 1215 bp, Arabidopsis thaliana
  CDS (1)..(1215)
atggctttcgcgtctccttcgctccgtcttcttcctcagtctccgttaggtcgaataacatctaaactacaccgtttcagtactgcgaaactctcactcttctcctttcaccatgattcttcatcttctttggctgtcagaactccggtatcttccttcgtcgtcggcgctatctccggaaaatcctctaccggaacgaaatcgaaatccaaaaccaaacggaaaccacctcctcctccgccagtcactactgtggctgaagagcaacacattgctgagtcagagacagtcaacattgccgaagatgtcactcaattgattggaagcacaccaatggtctatctcaatagagtcacagatggttgtttggctgacattgctgccaagctcgaatcaatggagccctgtagaagcgtcaaagataggatcggtctgagcatgatcaacgaggcagaaaacagcggagctataactccgaggaagactgtattagtagaaccaacaaccggaaacactggccttgggattgcatttgtggctgcagctaaaggctacaagcttatagtgacaatgccagcttctatcaatattgaaaggaggatgcttttacgtgcactaggagcagagattgtgctaacgaatccagagaagggtctcaaaggagcagtggataaagccaaagagattgttctcaagacaaagaacgcatatatgtttcagcaattcgacaatacagcaaatacaaagatccactttgaaactacaggaccagaaatctgggaagatacaatgggtaatgtcgatatattcgttgccggaataggaactggtggtactgtaactggtactggaggtttcttgaaaatgatgaacaaggatattaaggtagttggcgttgaaccatcagaaagaagtgtgatttctggagacaaccctggttacttaccgggaatcttggatgttaaattacttgatgaagtgtttaaggttagcaacggggaagcgattgagatggcgaggagactagctttagaggaaggattgctggttgggatttcatctggagctgctgcagtagcagcagtcagcttggctaaaagagcagagaatgccggtaaactaatcacggttctgtttccaagccatggcgagcggtatatcacaacggctctgtttagttccatcaacagagaagtccaagagatgagatattag

SEQ ID NO: 925 - protein, 404 aa, Arabidopsis thaliana
MAFASPSLRLLPQSPLGRITSKLHRFSTAKLSLFSFHHDSSSSLAVRTPVSSFVVGAISGKSSTGTKSKSKTKRKPPPPPPVTTVAEEQHIAESETVNIAEDVTQLIGSTPMVYLNRVTDGCLADIAAKLESMEPCRSVKDRIGLSMINEAENSGAITPRKTVLVEPTTGNTGLGIAFVAAAKGYKLIVTMPASINIERRMLLRALGAEIVLTNPEKGLKGAVDKAKEIVLKTKNAYMFQQFDNTANTKIHFETTGPEIWEDTMGNVDIFVAGIGTGGTVTGTGGFLKMMNKDIKVVGVEPSERSVISGDNPGYLPGILDVKLLDEVFKVSNGEAIEMARRLALEEGLLVGISSGAAAVAAVSLAKRAENAGKLITVLFPSHGERYITTALFSSINREVQEMRY

SEQ ID NO: 926 - DNA, 1293 bp, Arabidopsis thaliana
  CDS (1)..(1293)
atggtggcgatgatcatggcttcaaggtttaaccgggaagctaagctcgcatctcaaatcttgtctacacttttgggaaaccgaagctgctacacatccatggccgccacatcttcctctgctttacttcttaatccgttgacttcttcttcttcttcttctactctccgtcgtttcagatgctcgccagagatctcttctctctccttctcctccgcttctgatttctctctagcgatgaagaggcagagtcggagttttgctgatggttcggaacgagatccgtctgttgtgtgtgaggctgttaagcgcgagactggacctgatggactcaacatcgctgacaatgtgtctcagctcattgggaaaactcctatggtgtacttgaacagtatagcaaaaggttgtgtagcaaatattgctgccaaactcgagatcatggagccatgttgcagtgtcaaggataggattgggtacagtatggttactgatgctgagcaaaaaggatttatatcacctggaaagagtgttcttgtggaacctacaagtggaaacacgggtattggcctagcattcatcgctgcttcaaggggctatagacttatcttgacaatgccagcatccatgagtatggaaagaagggttcttttaaaggcatttggagctgagcttgtattaacagatcctgctaaaggcatgactggagcggttcagaaggctgaagagatcttgaaaaacactcctgatgcatacatgctccaacagtttgacaaccctgcaaatccaaagattcattacgagactactggtcctgagatctgggatgatacaaagggcaaggtggatatctttgttgcaggaattggaactggtggaactatcactggtgttggtcgatttattaaagagaaaaatcccaaaacgcaggttattggtgtagaacccaccgaaagcgatatactttctggtggcaaaccgggacctcacaagattcaaggaattggagctggatttatacctaagaatttggatcagaaaattatggatgaagtcatagcgatttcaagtgaggaagctatagaaaccgcaaagcaactagctcttaaggaaggcttgatggttggtatatcatctggagctgcagctgctgctgcaatcaaggtggctaagagacctgagaatgctggaaaactcatagctgttgttttcccgagcttcggggagagatatctatcgaccccgctgttccagtctatccgggaagaggtggagaaaatgcagcctgaggtatga

SEQ ID NO: 927 - protein, 430 aa, Arabidopsis thaliana
MVAMIMASRFNREAKLASQILSTLLGNRSCYTSMAATSSSALLLNPLTSSSSSSTLRRFRCSPEISSLSFSSASDFSLAMKRQSRSFADGSERDPSVVCEAVKRETGPDGLNIADNVSQLIGKTPMVYLNSIAKGCVANIAAKLEIMEPCCSVKDRIGYSMVTDAEQKGFISPGKSVLVEPTSGNTGIGLAFIAASRGYRLILTMPASMSMERRVLLKAFGAELVLTDPAKGMTGAVQKAEEILKNTPDAYMLQQFDNPANPKIHYETTGPEIWDDTKGKVDIFVAGIGTGGTITGVGRFIKEKNPKTQVIGVEPTESDILSGGKPGPHKIQGIGAGFIPKNLDQKIMDEVIAISSEEAIETAKQLALKEGLMVGISSGAAAAAAIKVAKRPENAGKLIAVVFPSFGERYLSTPLFQSIREEVEKMQPEV

SEQ ID NO: 928 - DNA, 1179 bp, Arabidopsis thaliana
  CDS (1)..(1179)
atggcggcgacatcttcctctgcttttctccttaatccgttgacttctcgccaccgtcctttcaaatactcgccagagctctcttctctctccttatcctctcgaaaggctgctgctttcgatgtttcctcagctgctttcacgctcaagagacagagccggagtgatgttgtgtgcaaggctgtatctatcaagccagaagctggtgttgaagggctcaatatcgccgataacgccgctcagcttattgggaaaactccgatggtgtacttgaacaatgtagtcaagggctgtgttgcaagtgttgctgctaagcttgagatcatggaaccatgttgcagtgtcaaggataggattgggtacagtatgattactgatgctgaagagaaaggacttataacacctggaaagagtgttcttgtggaatctacgagtgggaacacagggattggccttgcattcattgctgcttcaaaaggctataaacttatcttgacgatgcctgcgtccatgagtttggaaaggcgggttcttttgagggcatttggagctgagcttgtgttaactgaacctgcaaaaggtatgactggagcaattcagaaggctgaagaaatcttgaaaaaaactcccaattcctacatgctccaacagtttgacaaccctgccaatcccaagattcattatgagacgactggtcctgagatttgggaagatacaagaggcaaaatcgatatattggttgcggggattggaactggtggaactatcactggtgttggtcgattcattaaagaaagaaaacctgaattgaaggttattggtgtcgaacccacggaaagtgctatactttctggtggaaaacccggacctcacaagattcaaggaattggagctggatttgtacccaagaatttggatctggctattgtagatgaatacatagcgatttccagtgaggaagctattgaaacctcgaagcaactagctctccaggaaggcttgttggttggtatatcttctggagctgctgctgctgctgcaatccaggttgcaaagagacctgaaaatgccgggaaactcatagccgttgtgttcccgagcttcggggaacgttacctctcgacccagcttttccagtcgattcgagaagagtgcgagcaaatgcagcccgagctttga

SEQ ID NO: 929 - protein, 392 aa, Arabidopsis thaliana
MAATSSSAFLLNPLTSRHRPFKYSPELSSLSLSSRKAAAFDVSSAAFTLKRQSRSDVVCKAVSIKPEAGVEGLNIADNAAQLIGKTPMVYLNNVVKGCVASVAAKLEIMEPCCSVKDRIGYSMITDAEEKGLITPGKSVLVESTSGNTGIGLAFIAASKGYKLILTMPASMSLERRVLLRAFGAELVLTEPAKGMTGAIQKAEEILKKTPNSYMLQQFDNPANPKIHYETTGPEIWEDTRGKIDILVAGIGTGGTITGVGRFIKERKPELKVIGVEPTESAILSGGKPGPHKIQGIGAGFVPKNLDLAIVDEYIAISSEEAIETSKQLALQEGLLVGISSGAAAAAAIQVAKRPENAGKLIAVVFPSFGERYLSTQLFQSIREECEQMQPEL

SEQ ID NO: 930 - DNA, 1125 bp, Capsicum annuum
  CDS (1)..(1125)
atggcatctatcatcaacaatcccttcacttctctctgctgcaacaccaacaaatgtgaacctaatagaatttgctctttaaggtctcagcagtcattggtgtttgacaacgtcaacagaaaagttggtttcccttctgttgtttgcaaagcagtgtctgtgcaaacgaaatcacctacagaaattgaaggccttaacattgctgaagatgttacacagcttattgggaacacaccaatggtttaccttaacaccattgttaagggttgtgttgcaaatattgctgctaaacttgagattatggagccatgttgcagtgttaaggacaggatagggttcagtatgatatctgatgctgaggagaagggacttatatctccagggaagactgttctagttgagcctacgagtggaaacacaggcattggtcttgccttcattgctgcttccagaggatataagctcatcttaacgatgcctgcctcaatgagtcttgaaagaagggttattctaaaagcttttggagctgaacttgttttaactgacccagccaaagggatgaaaggagctgtttcaaaggctgaagaaatattgaataacacaccagatgcctatatccttcaacaatttgacaatcccgccaaccccaagatacactatgaaacaacgggtccagaaatctgggaagacacaaaaggcaaaatcgacatacttgttgctggcattggaactggcggaaccatttctggaacgggccgataccttaaagagaaaaatccaaacattaagattattggtgtggagcccacagaaagtaacgttctatcagggggcaagcctggttttattccaggaaacttggatcaagatgtcatggatgaagtgatagagatatcaagtgacgaagctgttgaaactgcaaagcaattagccctacaagaagggttgttggttgggatttcttcgggggcagctgctcttgctgccattcaggttgcgaagaggcctgagaatgcagggaaacttattgcggttgtatttccaagttttggggaacggtacctctcctctatacttttccagtcaatacgagaggaatgcgagaaaatgaagccagaattgtga

SEQ ID NO: 931 - protein, 374 aa, Capsicum annuum
MASIINNPFTSLCCNTNKCEPNRICSLRSQQSLVFDNVNRKVGFPSVVCKAVSVQTKSPTEIEGLNIAEDVTQLIGNTPMVYLNTIVKGCVANIAAKLEIMEPCCSVKDRIGFSMISDAEEKGLISPGKTVLVEPTSGNTGIGLAFIAASRGYKLILTMPASMSLERRVILKAFGAELVLTDPAKGMKGAVSKAEEILNNTPDAYILQQFDNPANPKIHYETTGPEIWEDTKGKIDILVAGIGTGGTISGTGRYLKEKNPNIKIIGVEPTESNVLSGGKPGFIPGNLDQDVMDEVIEISSDEAVETAKQLALQEGLLVGISSGAAALAAIQVAKRPENAGKLIAVVFPSFGERYLSSILFQSIREECEKMKPEL

SEQ ID NO: 932 - DNA, 1161 bp, Solanum tuberosum
  CDS (1)..(1161)
atggcatctttcatcaacaatcccttaacttctctctgtaacactaagtctgaacgtaataatctcttcaaaatttccctttacgaagctcaatcactgggtttttccaagcttaatggcagcagaaaagttgctttcccttctgttgtttgcaaagcagtgtctgtaccaacgaaatcgagtacagaaattgaagggcttaacatcgctgaagatgttacacagcttattgggaacacaccaatggtttaccttaacaccatcgctaagggttgtgtagcaaacattgctgctaaacttgagattatggaaccttgttgcagtgttaaggacaggatagggttcagtatgatagttgatgccgaggagaagggacttatatctccggggaagactgttctagttgagcctacaagtggaaacacaggcattgggcttgccttcattgctgcttccagaggatataagctcatcttaacgatgcctgcatcaatgagtcttgaaagaagggtcattctaaaagcttttggagctgaacttgttttaactgatccagccaaagggatgaaaggagctgtttcaaaggctgaagaaatattgaataacacaccagatgcctatatccttcaacaatttgacaatcccgccaaccccaagatacactatgaaacaacgggtccagagatctgggaagacacaaaaggcaagattgacatacttgttgctggcattggaactggcggaaccattacaggaacaggccgattccttaaagagcaaaatccaaacattaagattattggtgtggagcccacagaaagtaacgttctatcagggggcaaacctggccctcacaaaattcaagggattggagcaggttttattccaggaaacttggatcaagatgtcatggatgaagtgatagagatatcgagtgacgaagctgttgaaactgcgagaaccttagcgctacaagaagggttgttggttgggatttcttccggagcagctgctcttgctgccattcaggttgggaagagacctgagaatgcaggaaagcttattggggttgtatttccaagctatggggaacgatacctctcctctattcttttccagtcaatacgagaggaatgcgagaaaatgaagccagaattgtga

SEQ ID NO: 933 - protein, 386 aa, Solanum tuberosum
MASFINNPLTSLCNTKSERNNLFKISLYEAQSLGFSKLNGSRKVAFPSVVCKAVSVPTKSSTEIEGLNIAEDVTQLIGNTPMVYLNTIAKGCVANIAAKLEIMEPCCSVKDRIGFSMIVDAEEKGLISPGKTVLVEPTSGNTGIGLAFIAASRGYKLILTMPASMSLERRVILKAFGAELVLTDPAKGMKGAVSKAEEILNNTPDAYILQQFDNPANPKIHYETTGPEIWEDTKGKIDILVAGIGTGGTITGTGRFLKEQNPNIKIIGVEPTESNVLSGGKPGPHKIQGIGAGFIPGNLDQDVMDEVIEISSDEAVETARTLALQEGLLVGISSGAAALAAIQVGKRPENAGKLIGVVFPSYGERYLSSILFQSIREECEKMKPEL

SEQ ID NO: 934 - DNA, 927 bp, Bacillus subtilis
  CDS (1)..(927): transl_table=11
atggtacgtgtagcaaactccattactgaattaattgggaatacgccaatcgttaaattaaatcgccttgcagatgaaaacagtgcggatgtatatctaaaacttgaatacatgaaccctggaagcagtgtaaaagaccgtatcggtttagctatgattgaagcggctgaaaaagaaggaaaattaaaagccggtaatacaatcattgaaccgacaagcggaaatactggaatcgggcttgcaatggttgctgctgctaaaggattaaaagccattttggttatgcctgatacaatgagcatggagcgccgcaaccttcttcgcgcatatggtgctgagcttgtgctgactcctggtgcggaaggcatgaaaggtgctattaagaaagctgaagagcttgctgaaaagcacggatactttgtgccgcagcagtttaacaacccttctaaccccgaaattcaccgccaaacaacgggtaaagaaatcgttgagcaattcggtgatgatcagcttgacgcatttgtagccggaatcggaacgggcggaacgattacgggagcgggcgaagtgctgaaggaagcatacccttccatcaagatttatgctgttgaaccgtcagattccccagtgctttcaggaggaaaaccaggcccccacaaaattcagggaatcggagcaggattcgtgccggacatcttaaacactgaagtatatgatgaaatcttccctgtgaagaatgaagaagcattcgaatatgcccgcagagctgcacgtgaagaaggaattctcggaggcatctcatcaggtgcggcaatttatgctgctcttcaagtagcaaaaaaactcggaaaaggcaaaaaagtattggccatcattccaagtaacggcgaacgttatctaagcacgccgctgtaccaattcgattaa

SEQ ID NO: 935 - protein, 308 aa, Bacillus subtilis
MVRVANSITELIGNTPIVKLNRLADENSADVYLKLEYMNPGSSVKDRIGLAMIEAAEKEGKLKAGNTIIEPTSGNTGIGLAMVAAAKGLKAILVMPDTMSMERRNLLRAYGAELVLTPGAEGMKGAIKKAEELAEKHGYFVPQQFNNPSNPEIHRQTTGKEIVEQFGDDQLDAFVAGIGTGGTITGAGEVLKEAYPSIKIYAVEPSDSPVLSGGKPGPHKIQGIGAGFVPDILNTEVYDEIFPVKNEEAFEYARRAAREEGILGGISSGAAIYAALQVAKKLGKGKKVLAIIPSNGERYLSTPLYQFD

SEQ ID NO: 936 - DNA, 948 bp, Buchnera aphidicola subsp
  CDS (1)..(948): transl_table=11
atgagtaaaatatatcaagataattctttaactattggtaatacacctctagttcgtttaaatagaattggaaatggaaatattttagtaaaaatagaatctagaaatccaagttttagtgttaaatgtagaattggtgctaatatgatatggcacgccgaaaaaaataataatataaataaaaatgtaaaactaatcgaggcgactagtggtaatacaggaatagcattagcttatgttgcagcttctagaaattatcgattaactctaactatgcctgaaaccatgtctattgagcggaaaaaaatattaaaatctttaggtgcagaattgattttaaccgatggaagatatggcatgaagggagctatttctaaggcaaatgatattatatctcgcaatccaagtaaatattttttattaaaacaatttgagaatccagctaatcctgaaattcatcaaattactactggaccagaaatatggaacgatactaatggcaatttagatattttaatttctgctgtaggaacgggtggcacaattactggtatcacaagatatatcaaaaaaataaaaagaaaaaaaaatttaatcagtatagctgttgaaccttctgaatcacctgtaatcacacaatttttagcaggaaaagcaatcgagcctggaccacataaaattcaaggaattgggcctggttttatacccaaaaacttagatttaacaataatcgatcaagttattactgtttctagtgaagaagcaatattaacggctaaagaattaatgaaaaaagaaggtatactagcaggaatctcttctggtgctgcgttatatgcagcaataaaaatccaacagcaaaaaaaattttcagacaaaaaaatagttgttattttaccttcttcaggagaacgttatttaagtacagaattattttctgaactataa

SEQ ID NO: 937 - protein, 315 aa, Buchnera aphidicola subsp
MSKIYQDNSLTIGNTPLVRLNRIGNGNILVKIESRNPSFSVKCRIGANMIWHAEKNNNINKNVKLIEATSGNTGIALAYVAASRNYRLTLTMPETMSIERKKILKSLGAELILTDGRYGMKGAISKANDIISRNPSKYFLLKQFENPANPEIHQITTGPEIWNDTNGNLDILISAVGTGGTITGITRYIKKIKRKKNLISIAVEPSESPVITQFLAGKAIEPGPHKIQGIGPGFIPKNLDLTIIDQVITVSSEEAILTAKELMKKEGILAGISSGAALYAAIKIQQQKKFSDKKIVVILPSSGERYLSTELFSEL

SEQ ID NO: 938 - DNA, 969 bp, Buchnera aphidicola subsp
  CDS (1)..(969): transl_table=11
atgaataaaatatatgaagataattctttcactattggaaatacaccacttgttcgtttaaacaatataggaaacggaaacattttagcaaaaatagaatctagaaatccaagttttagtgtgaaatgtagaattggtgctaatatgatatgggacgcagaaaaaaagggacgtttaaataaaaacatagaaataattgaagcaactagtggtaatacaggaatagctttagcatatgttgcagcggcgagaaattattcattaactcttataatgcctgattctatgtctatagaaagaagaaaattattaaaatctttaggtgcacatttaatactaacaaatggaaaacacggtatgaaaggtgctatatctaaagcaaatgaaattgtatctttaaatacaaaacgttatcttttattaaaacaatttgaaaatccagccaatccagaaatacatcaaaaaaccactggtccagaaatttggaaagacaccaaaggcaatatagacatattaatttcaggcgtaggtacaggaggaactattacaggaattacaaaatatataaaaataaaagaagggaaaaaagacttaattagcgttgccgttgaacctttagaatcacctgtaattacacaatttttatcaggaaaaaaaataaaaccaggattacataaaatacaaggaataggagcaggttttattcctaaaaatttagatttatcattaattgacagaatcattacagtatccagcgaagaagcaatatttaatgctaaaaaaataatgaaaaaggaaggaatattatcaggaatttcttcaggtgcagctatagcagcggctttaaaaatacaaaaagaaaatgattttaaaaataaaaatatagtagttatattaccttcttcaggagagcgttatttaagtacagagttattttctagatcatttaaaaatgaaaacaattattaa

SEQ ID NO: 939 - protein, 322 aa, Buchnera aphidicola subsp
MNKIYEDNSFTIGNTPLVRLNNIGNGNILAKIESRNPSFSVKCRIGANMIWDAEKKGRLNKNIEIIEATSGNTGIALAYVAAARNYSLTLIMPDSMSIERRKLLKSLGAHLILTNGKHGMKGAISKANEIVSLNTKRYLLLKQFENPANPEIHQKTTGPEIWKDTKGNIDILISGVGTGGTITGITKYIKIKEGKKDLISVAVEPLESPVITQFLSGKKIKPGLHKIQGIGAGFIPKNLDLSLIDRIITVSSEEAIFNAKKIMKKEGILSGISSGAAIAAALKIQKENDFKNKNIVVILPSSGERYLSTELFSRSFKNENNY

SEQ ID NO: 940 - DNA, 1113 bp, Emericella nidulans
  CDS (1)..(1113)
atgtttcgccaaagcgtccggcgatttgccacagctgccctgcgcagcgctgctgagagcccatacaatgtccgggtttcccaggcgcaaggtttcgtcaacggactgaccgaagcaattggcaacacgccccttatccgccttaagcgtctctctgaagaaaccggttccaacatcctcgccaaagctgagtttcagaaccccggcggcagcgtcaaggacagagccgcattatacgttgtcaaagatgccgaggaacggggccttctaaagcccggcggcaccgtcgttgaaggaacagcgggcaacacgggtattggactcgcccacgtctgccggtccaaggggtataagcttgtcatctacatgccgaacacgcagtctcagggcaagattgatcttctgcgattgctgggtgcggaagtgtacccagtccccgcagtggcgtttgacaaccctgagaactacaaccacaaggcgcggcggcatgcggagtcgctagacaatgcggtgtggacaaatcagttcgataacacggctaaccgccgagctcatattgagacgacgggcccggagatttgggcgcagacgggcggaaagctggatgcatttacgtgctcgactgggacaggtggtacgctcgcgggaatcacatattacctgaagcaggctagcggcggccgtgtcaaatctttccttgcggatccccctggtagtgttcttcacagctacattcagagcggtgggaaattggtggagcggtctggtagcagtatcactgaggggattggccagggtcgtattacggataatctgcagcctgatgtcggcactttggatggatcgctcaatattagcgacgagaaaaccattgagatgatctaccgctgcttggatgaggaaggcctctacctaggcgccagctctgccctcaatgttgttgctgctaaggaagttgccgagaagctgggcaagggcagcaccgtcgtgaccatccttgctgatggtgcgtaccggtatgcggacaggctcttctccaagtcatggcttgagagcaagggtctgcggaacgctatccctaagcatctagagaagtacattgttcttccttga

SEQ ID NO: 941 - protein, 370 aa, Emericella nidulans
MFRQSVRRFATAALRSAAESPYNVRVSQAQGFVNGLTEAIGNTPLIRLKRLSEETGSNILAKAEFQNPGGSVKDRAALYVVKDAEERGLLKPGGTVVEGTAGNTGIGLAHVCRSKGYKLVIYMPNTQSQGKIDLLRLLGAEVYPVPAVAFDNPENYNHKARRHAESLDNAVWTNQFDNTANRRAHIETTGPEIWAQTGGKLDAFTCSTGTGGTLAGITYYLKQASGGRVKSFLADPPGSVLHSYIQSGGKLVERSGSSITEGIGQGRITDNLQPDVGTLDGSLNISDEKTIEMIYRCLDEEGLYLGASSALNVVAAKEVAEKLGKGSTVVTILADGAYRYADRLFSKSWLESKGLRNAIPKHLEKYIVLP

SEQ ID NO: 942 - DNA, 951 bp, Haemophilus influenzae
  CDS (1)..(951): transl_table=11
atggcaatttatgcagacaattcttattctatcggaaatacgccgcttgtgcgtttaaaacactttggccataacggtaatgtggtggtaaaaattgaaggtcgtaacccaagctacagcgtaaaatgccgtattggggcgaatatggtgtggcaagcagaaaaagatggcacgctcacaaaagggaaagagattgtagatgcaacgagtggtaacacgggcattgctttggcttatgttgcggcggctagaggttataaaatcacgctcactatgccagaaacaatgagtcttgaaagaaaacgcttattgtgcggattgggtgtaaatttagtgcttaccgaaggcgcaaaaggaatgaaaggtgctattgcgaaagcagaagaaattgttgcttctgatccaagccgctatgtcatgcttaaacaatttgaaaatccagccaacccacaaattcatcgagaaacaacagggcctgaaatttggaaagatacggatggcaaagtcgatgttgttgttgctggcgtaggaacaggtggttcgattacgggcatttctcgcgcgattaaattagattttggtaaacaaatcacttctgttgccgttgagccagtggaatctccggtcattagtcaaactttagcgggtgaagaagtaaaaccaggcccacacaaaattcaaggtatcggtgcgggtttcattcccaaaaatttagatttatctattattgatcgcgtagaaactgttgatagtgataccgcacttgccacagctcgtcgcttaatggcggaagaaggaattcttgcaggtatttcatctggtgcagctgtcgcggctgcagatcgcttagctaaattaccagaatttgctgataaactcattgttgttattttgccttcagcgtctgaacgctacttaagcacagcactgtttgaagggattgagggataa

SEQ ID NO: 943 - protein, 316 aa, Haemophilus influenzae
MAIYADNSYSIGNTPLVRLKHFGHNGNVVVKIEGRNPSYSVKCRIGANMVWQAEKDGTLTKGKEIVDATSGNTGIALAYVAAARGYKITLTMPETMSLERKRLLCGLGVNLVLTEGAKGMKGAIAKAEEIVASDPSRYVMLKQFENPANPQIHRETTGPEIWKDTDGKVDVVVAGVGTGGSITGISRAIKLDFGKQITSVAVEPVESPVISQTLAGEEVKPGPHKIQGIGAGFIPKNLDLSIIDRVETVDSDTALATARRLMAEEGILAGISSGAAVAAADRLAKLPEFADKLIVVILPSASERYLSTALFEGIEG

SEQ ID NO: 944 - DNA, 978 bp, Zea mays
  CDS (1)..(978)
atgggagaggcctcgccgtcgatcgccaaggacgtcaccgagttgatcgggaacacgccgctggtgtacctcaacaaggtgaccgatgggtgcgtcggccgcagtcgcgccaagctcgagtccatggagccctgctccagcgtcaaggataggattggctacagcatgatcacggacgcagaggagaaagggctgattactccaggcgtgagtgttctgattgaaccaactagcggcaacacaggcattggactggcctttatggctgctgccaagggctacaaacttacactcacaatgcctgcctccatgagcatggagaggaggatcatattgaaggcttttggtgctgaacttgtccttactgacccactcttgggaatgaaaggagctgtcaagaaagcggaagagatacaagcaaagacacccaactcgtacattcttcaacaatttgaaaatccagctaacccaaagattcactatgagactactgggcctgaaatctggaaagctacagcaggaaaaattgatggccttgtatctggtatcgggacaggaggtaccatcaccggtactgggcgatacctcagagagcaaaatcctaatgtcaagctctatggtgtggagccagtggagagtgctgttttgaatggtggaaaacctggaccacacaagattcaaggaattggagctggttttatccctggagtcttggatgttgatctccttgatgaaactctacaggtttcaagtgatgaagctatcgagactgccaaggctcttgctctgaaagaagggttgttggttggaatctcttctggtgcagctgcagctgcggcagttaggcttgctaagaggccagaaaacgccggaaagctatttgttgtcgtgttcccgagcttcggcgagcgctacctctcatcggtgctgttccagtccatcaagaaggaagcggagagcatggtggtcgagccctag

SEQ ID NO: 945 - protein, 325 aa, Zea mays
MGEASPSIAKDVTELIGNTPLVYLNKVTDGCVGRSRAKLESMEPCSSVKDRIGYSMITDAEEKGLITPGVSVLIEPTSGNTGIGLAFMAAAKGYKLTLTMPASMSMERRIILKAFGAELVLTDPLLGMKGAVKKAEEIQAKTPNSYILQQFENPANPKIHYETTGPEIWKATAGKIDGLVSGIGTGGTITGTGRYLREQNPNVKLYGVEPVESAVLNGGKPGPHKIQGIGAGFIPGVLDVDLLDETLQVSSDEAIETAKALALKEGLLVGISSGAAAAAAVRLAKRPENAGKLFVVVFPSFGERYLSSVLFQSIKKEAESMVVEP

SEQ ID NO: 946 - DNA, 933 bp, Mycobacterium bovis
  CDS (1)..(933): transl_table=11
atgagcatcgccgaggacatcacccaactcatcgggcgcacaccgctggtccgactgcgccgagtcaccgacggcgccgttgccgacatcgtcgccaagctggaattcttcaacccggccaacagcgtaaaagaccgtatcggggttgccatgctccaagcggccgagcaggcaggtttgatcaagccggacacgatcattctcgaacccacgagcggtaacaccggcatcgccctggccatggtttgcgcggcacgcggctaccggtgcgtgctgaccatgcccgagacgatgagtctggagcgccggatgttgctgcgcgcatacggtgctgaactcatcctcactccgggtgcggacggcatgtcaggtgccatcgccaaggctgaggagctggccaagaccgatcaacgctacttcgtgccccagcaattcgagaacccggcgaacccggccatccatcgcgtcacgaccgccgaggaggtctggcgtgacaccgacggcaaggtcgacatcgtcgtcgcgggagtcggcaccggtggcaccatcaccggcgtcgcgcaggtcatcaaggaacgcaagccgtcggcccggttcgtggccgtagagccggccgcgtcgccggtcctttctggtggccagaagggaccgcacccgatccagggcatcggcgccgggttcgtcccgccggtactcgaccaggacctagtcgacgagatcattaccgtcggtaacgaagacgcgctcaacgtggcgcgccggctggcccgggaagagggcttgctggtcggcatctcctcgggcgccgccacagtggccgctcttcaggtggcccgccggccagagaacgccgggaagctaatcgtcgtagtgctccccgacttcggcgaacgatatctgagcacaccgttgttcgccgacgtggctgactaa

SEQ ID NO: 947 - protein, 310 aa, Mycobacterium bovis
MSIAEDITQLIGRTPLVRLRRVTDGAVADIVAKLEFFNPANSVKDRIGVAMLQAAEQAGLIKPDTIILEPTSGNTGIALAMVCAARGYRCVLTMPETMSLERRMLLRAYGAELILTPGADGMSGAIAKAEELAKTDQRYFVPQQFENPANPAIHRVTTAEEVWRDTDGKVDIVVAGVGTGGTITGVAQVIKERKPSARFVAVEPAASPVLSGGQKGPHPIQGIGAGFVPPVLDQDLVDEIITVGNEDALNVARRLAREEGLLVGISSGAATVAALQVARRPENAGKLIVVVLPDFGERYLSTPLFADVAD

SEQ ID NO: 948 - DNA, 933 bp, Mycobacterium leprae
  CDS (1)..(933): transl_table=11
atgagcattgctgaagacgtcacacaactagttggtaacacgccactggtccggctacgccgagttaccgaaggtgcgctggctgacgttgtcgccaagctggaatccttcaatcccgccaacagcgtgaaggacaggataggcgtggccatgatcgacacggccgaggaagcgggtttgatcaagccggacaccgtcatccttgagccgacgagcgggaacaccggcatcgcactagctatggtatgcgcagcacgtggctaccactgcgtgctgaccatgcccgagacaatgagcatcgaacgacgaatgttgttgcgagcgtacggcgccgaactcatcttgactccgggcgccgatggcatgtcaggagccatcgccaaggctgaggaattagccaagtccgataaaaggtattttataccacagcaattcgagaacccagcgaacccagccatccacgccgccacaaccgccgaggaagtgtggcgcgacaccgatggcaaggtagacatcttcgtttctggaatcgggaccggaggcactatcactggtgttgcccgaatcattaaagaacgccggcccgccacgcagttcgtcgccgtagagcccgccgcgtcgccggtgttatccggtggccagaagggtcctcaccccattcagggcatcggtgctggattcgtcccgtcggtgctggtcctggacctggtggacgagatcgttaccgtcggcaacgaagaagcgctcgacctagcccgcagactggctaaggaagagggactgctggtcggcatctccgcaggggcggccgtttgcgccgccctgcacgtggcccgccggccagagaatacaggaaaactgatcgtcgtcgtgctgcccgatttcggcgagcgatatttaagcacgatgctattcgcggacttagccaactag

SEQ ID NO: 949 - protein, 310 aa, Mycobacterium leprae
MSIAEDVTQLVGNTPLVRLRRVTEGALADVVAKLESFNPANSVKDRIGVAMIDTAEEAGLIKPDTVILEPTSGNTGIALAMVCAARGYHCVLTMPETMSIERRMLLRAYGAELILTPGADGMSGAIAKAEELAKSDKRYFIPQQFENPANPAIHAATTAEEVWRDTDGKVDIFVSGIGTGGTITGVARIIKERRPATQFVAVEPAASPVLSGGQKGPHPIQGIGAGFVPSVLVLDLVDEIVTVGNEEALDLARRLAKEEGLLVGISAGAAVCAALHVARRPENTGKLIVVVLPDFGERYLSTMLFADLAN

SEQ ID NO: 950 - DNA, 933 bp, Neisseria meningitidis serogroup B
  CDS (1)..(933): transl_table=11
atgaaaattgcaaacagcattaccgaactaatcggcaacacgcctttggtcaaactgaaccgtctgaccgaaggtttgaaggcagaggttgccgtgaaactggaatttttcaatccgggcagcagcgtcaaagaccgcattgccgaagcaatgattgagggtgccgaaaaagcgggcaaaatcaacaaaaacaccgtcattgtcgaagcaaccagcggcaatacgggtgtcggtttggcaatggtatgtgccgcacgcggctacaagctggcgattaccatgccggaaagcatgagtaaggagcgcaaaatgctgttgcgcgcgtttggtgcggagctgattctgacccctgccgccgaaggtatggcgggcgcgattgccaaagcgaaatccttggtggacgcgcatcccgacacttattttatgccgcgccagttcgacaatgaggcaaaccccgaagtccaccgcaaaacaaccgccgaggaaatttggcgggatacggacggcaaagtcgatgtcttcgttgccggcgtcggcacgggcggtacgattaccggcgtgggcgaagtgttgaaaaaatacaaacccgaagttaaagtggttgccgtcgagcctgaagcttcacccgtattgagcggcggcgaaaaaggcccgcacccgattcaaggcatcggcgcaggctttattccgaccgttttgaataccaaaatttacgacagcattaccaaagtgtcgaacgaagcggcttttgaaaccgcccgcgcaatagcggaaaaagaaggcattttggtgggtatttcttccggtgcggcggtttggagtgcgttgcagcttgccaaacagcctgaaaacgaaggcaagctgatagtcgtgctgctgccttcttatggcgaacgctatctctctacgccactttttgcagatttggcataa

SEQ ID NO: 951 - protein, 310 aa, Neisseria meningitidis serogroup B
MKIANSITELIGNTPLVKLNRLTEGLKAEVAVKLEFFNPGSSVKDRIAEAMIEGAEKAGKINKNTVIVEATSGNTGVGLAMVCAARGYKLAITMPESMSKERKMLLRAFGAELILTPAAEGMAGAIAKAKSLVDAHPDTYFMPRQFDNEANPEVHRKTTAEEIWRDTDGKVDVFVAGVGTGGTITGVGEVLKKYKPEVKVVAVEPEASPVLSGGEKGPHPIQGIGAGFIPTVLNTKIYDSITKVSNEAAFETARAIAEKEGILVGISSGAAVWSALQLAKQPENEGKLIVVLLPSYGERYLSTPLFADLA

SEQ ID NO: 952 - DNA, 972 bp, Salmonella typhi
  CDS (1)..(972): transl_table=11
atgagtaagatttatgaagataactcgctgactatcggtcatacgccgctggttcgactgaatcgtatcggtaatggacgcattctggcgaaggtggagtcgcgcaacccgagcttcagcgtcaagtgccgtatcggcgccaatatgatttgggatgccgaaaagcgtggcgtactgaaacctggcgtggaactggtggagccgaccagcggcaataccggtattgcgctggcgtatgtcgccgccgcgcgcggttacaaactcaccctgaccatgccggaaaccatgagcattgaacgccgcaagctactcaaagcattaggcgcgaatctggtgctgaccgaaggggcgaaagggatgaaaggcgctattcagaaagccgaagaaattgtcgccagcgatccgcaaaaatatctcctgctccagcagttcagcaaccctgccaacccggaaatccatgaaaaaaccaccggcccggaaatctgggaagacaccgatggtcaggtggatgtgtttatctccggcgtcggcactggcggtacgttaaccggcgtcacgcgttatatcaaagggacgaagggtaaaaccgatcttatcaccgttgcggtagaacccactgactccccggttatcgcccaggcgctggctggtgaagagatcaaaccgggcccacataaaattcagggcatcggcgcaggcttcatcccgggcaacctggatctgaaactgattgataaagtggttggcatcaccaatgaagaagccatttctaccgcgcgccgtctgatggaagaggaaggtattctggcgggaatttcttccggcgccgcggttgctgcagcgcttaagctgcaggaagatgaaagctttaccaataagaatattgtggttatcctaccctcatcaggtgagcgttatctgagcaccgcgttgttcgccgatctctttactgagaaagaactgcaacagtga

SEQ ID NO: 953 - protein, 323 aa, Salmonella typhi
MSKIYEDNSLTIGHTPLVRLNRIGNGRILAKVESRNPSFSVKCRIGANMIWDAEKRGVLKPGVELVEPTSGNTGIALAYVAAARGYKLTLTMPETMSIERRKLLKALGANLVLTEGAKGMKGAIQKAEEIVASDPQKYLLLQQFSNPANPEIHEKTTGPEIWEDTDGQVDVFISGVGTGGTLTGVTRYIKGTKGKTDLITVAVEPTDSPVIAQALAGEEIKPGPHKIQGIGAGFIPGNLDLKLIDKVVGITNEEAISTARRLMEEEGILAGISSGAAVAAALKLQEDESFTNKNIVVILPSSGERYLSTALFADLFTEKELQQ

SEQ ID NO: 954 - DNA, 978 bp, Solanum tuberosum
  CDS (1)..(978)
atggcgggggaaaagattggaattgccaaggatgtaactgaattgattggtaacactcctttggtatacctgaataatgttgtggatgggtgtgttgcacgtgttgctgccaagctggaaagcatggagccatgctctagtgttaaggataggatcggttatagtatgattacagatgctgaggagaagggtctcatcaaacccggcgagagtgtcctcatcgaacctacgagtggaaacaccggtgtaggattggcattcatggctgctgctaaaggctacaaactcatcattacgatgccttcttcaatgagtcttgagagaagaattattctgcgtggctttcggtctgagttagtgcttaccgatccagcaaaagggatgaagggtgctatttcaaaggctgaagagataaaggccaaaacacccaactcctatattcttcagcaatttgaaaaccctgctaacccaaagatacactatgagaccactggtcctgagatctggaaaggctcaaacgggaaagtggatgctctagcctctggaattggaacaggaggcacgataactggttcaggcaagtatttgagagagcagaaccccaacgttaagctgtatggcgtggaaccagttgaaagtgctatcctttctggtggaaagcctggtccacataagattcaggggattggtgctggtttcattcctggtgttttggaagttaaccttattgatgatgtagttcaggtttcaagtgaagaatccatagaaatggctaagcttctggcattgaaggaaggattgctagtgggaatttcatctggtgctgctgcggcggcggcaattaaagttgctaagcgccctgaaaatgctgggaagctcattgttgttattttcccaagcttcggagagcgatatctttcctctgtactcttcgaaactgtcagacgagaagcagagaacatgactgtggagccttga

SEQ ID NO: 955 - protein, 325 aa, Solanum tuberosum
MAGEKIGIAKDVTELIGNTPLVYLNNVVDGCVARVAAKLESMEPCSSVKDRIGYSMITDAEEKGLIKPGESVLIEPTSGNTGVGLAFMAAAKGYKLIITMPSSMSLERRIILRGFRSELVLTDPAKGMKGAISKAEEIKAKTPNSYILQQFENPANPKIHYETTGPEIWKGSNGKVDALASGIGTGGTITGSGKYLREQNPNVKLYGVEPVESAILSGGKPGPHKIQGIGAGFIPGVLEVNLIDDVVQVSSEESIEMAKLLALKEGLLVGISSGAAAAAAIKVAKRPENAGKLIVVIFPSFGERYLSSVLFETVRREAENMTVEP

SEQ ID NO: 956 - DNA, 978 bp, Spinacia oleracea
  CDS (1)..(978)
atggttgaggagaaggccttcattgctaaagatgtgactgaattgattgggaaaacgccattggtatatctcaacactgtcgccgatggttgtgttgctcgtgttgctgcaaagctggaaggaatggaaccttgctctagtgttaaagacaggattgggttcagtatgattactgatgctgaaaaaagcgggcttattacacctggagagagtgtcctgattgagcccaccagtggaaatactggcattggattagccttcatcgcagcagctaaaggttacaagctcatcattacgatgccagcatcaatgagtcttgagcggaggactattctcagggcctttggtgctgagcttatccttactgatccagcaaaaggtatgaaaggggctgttcagaaggctgaggagatccgtgacaaaactcctaattcatatatactacaacagtttgaaaaccctgccaacccaaaggttcattatgaaacaactggaccagaaatttggaaaggcacaggtggaaaaattgatatattcgtctctggaatagggactggaggtacaataacaggtgcaggaaaatacctaaaggaacaaaacccggatgttaagctaattggcctggaaccagtggaaagtgctgtattgtctggaggaaaacctggcccacataagattcaaggacttggagctggattcatacctggtgttctggatgtgaatattatcgatgaagtggttcagatatccagtgaagaatctattgaaatggccaaattgctcgccctcaaggaaggtctactggttgggatttcatctggtgctgctgctgccgctgccattaaagtggcaaagaggcctgaaaatgctggaaaactcatcgtcgctgtctttcccagctttggcgaacgatatttatcctcggtgttgtttgattcagtgaggaaggaggcagagagcatggttattgagtcctaa

SEQ ID NO: 957 - protein, 325 aa, Spinacia oleracea [sequence omitted]

SEQ ID NO: 958 - DNA, 933 bp, Staphylococcus aureus
  CDS (1)..(933): transl_table=11
atggcacaaaaaccagtagataatattactcaaattattggcggtacaccggtagtcaaattgagaaatgtagtagatgataatgcagcagatgtttatgtaaaattggaatatcaaaatccaggtggttctgtaaaggatagaattgctttagcaatgattgaaaaagcagagcgagaaggcaaaattaaacctggcgatacaattgtagaaccaacaagtggtaatacaggtatcggtttagcatttgtatgtgctgctaaaggatataaagcagtatttactatgcccgaaacaatgagccaagagcgtcgtaatttattaaaagcatacggtgcggaattagttttaacgcctggatcagaagcgatgaaaggtgcaattaaaaaagctaaagaattgaaagaagaacatggttacttcgagccacaacaatttgaaaaccctgcgaaccctgaagttcatgagttaactacaggtcctgagttattacaacaatttgaagggaaaactatcgatgcgttcctagctggtgttggtactggtggtacgttatctggtgtaggtaaagttctgaaaaaagaatatcctaacatcgaaattgttgctatagagcctgaggcttctccagtattgagcggtggtgagccaggtccacataaattacaaggtttaggtgctggatttattccaggcactttgaatacagaaatctatgacagtattattaaagtaggaaatgatacagcgatggaaatgtctcgtcgagttgctaaagaggaaggtattttagcaggtatttcatcaggtgctgcgatttatgctgccattcaaaaagcaaaagaattaggaaaaggtaaaacagtagtaacagtattgccgagtaatggtgaacgctacttatcaacacctttatattcattcgatgactaa

SEQ ID NO: 959 - protein, 310 aa, Staphylococcus aureus
MAQKPVDNITQIIGGTPVVKLRNVVDDNAADVYVKLEYQNPGGSVKDRIALAMIEKAEREGKIKPGDTIVEPTSGNTGIGLAFVCAAKGYKAVFTMPETMSQERRNLLKAYGAELVLTPGSEAMKGAIKKAKELKEEHGYFEPQQFENPANPEVHELTTGPELLQQFEGKTIDAFLAGVGTGGTLSGVGKVLKKEYPNIEIVAIEPEASPVLSGGEPGPHKLQGLGAGFIPGTLNTEIYDSIIKVGNDTAMEMSRRVAKEEGILAGISSGAAIYAAIQKAKELGKGKTVVTVLPSNGERYLSTPLYSFDD

SEQ ID NO: 960 - DNA, 933 bp, Staphylococcus epidermidis
  CDS (1)..(933): transl_table=11
atggcacaaaaacctgtagattatgttacacaaattattgggaatacacctgtagtcaaattaagaaacgttgttgatgatgatgcagctgatatttatgttaagttagaatatcaaaatccaggtggttcggtaaaagatcgtatcgctttagcgatgattgaaaaagctgagcgtgaagggaaaattaaacctggtgatacaatcgttgagcctacgagtggtaacactggtataggtctagcatttgtatgtgctgccaaggggtacaaagcagtttttacaatgcctgaaacaatgagccaagagcgccgtaacttattaaaagcttatggtgctgaactagtattaacaccaggatctgaagctatgaaaggtgcaataaaaaaagctaaagaattaaaagaagagcacggctattttgaaccacaacaattcgaaaatccagcaaatcctgaaattcatgaacttacaactggaccagaattagttgaacaatttgaaggtcgacaaattgatgcatttttagctggtgtaggaactggtggtacgttatctggtgttggtaaagtattgaagaaagaatatccaaatgtggaaatagtagctattgaacctgaagcttctccagtattaagcggtggtgaaccaggccctcataaattacaaggattgggagcaggtttcgtacctgatactttaaatacagaagtttatgacagcatcatcaaagtaggtaatgatactgctatggatatggcacgtcgtgttgctagagaagaaggtatattagcaggtatttcatctggtgctgcaatatatgctgctattcaaaaagcaaaagaattaggtaaaggtaaaacagttgtaacagtattaccaagtaatggggaacgttacttatcaacaccattatattcatttgataattaa

SEQ ID NO: 961 - protein, 310 aa, Staphylococcus epidermidis
MAQKPVDYVTQIIGNTPVVKLRNVVDDDAADIYVKLEYQNPGGSVKDRIALAMIEKAEREGKIKPGDTIVEPTSGNTGIGLAFVCAAKGYKAVFTMPETMSQERRNLLKAYGAELVLTPGSEAMKGAIKKAKELKEEHGYFEPQQFENPANPEIHELTTGPELVEQFEGRQIDAFLAGVGTGGTLSGVGKVLKKEYPNVEIVAIEPEASPVLSGGEPGPHKLQGLGAGFVPDTLNTEVYDSIIKVGNDTAMDMARRVAREEGILAGISSGAAIYAAIQKAKELGKGKTVVTVLPSNGERYLSTPLYSFDN

SEQ ID NO: 962 - DNA, 1182 bp, Saccharomyces cerevisiae
  CDS (1)..(1182)
atgtcctgttctcaaaataagacttctgtcagtctggcctggcgtgaatgcatatccatcgcttccgtcctaattggcgcgtatgcatcatacaaatactataagctgttcaaaacacgcgatattccacgtccaaaagaaggcgttgaagaactcataggaaacactcctctggttaagatcagatctcttaccaaggctactggagttaacatttacgctaagttggagttatgcaacccagcaggaagtgctaaggatagagtggctttaaacatcataaagacggctgaggaattaggcgagctcgtcagaggtgaacctggctgggtatttgaaggaacaagtgggtcgactggtatctctatagcagtggtctgtaatgcgttgggttatagggcacacatttctttgcccgatgacacatcgctagaaaaattggcattactagaaagcctcggtgctactgttaataaggttaagcccgctagtattgtcgatccaaaccaatacgtaaatgccgccaaaaaggcatgtaatgaactaaagaagagtggtaatggaataagagcagtttttgccgatcagttcgaaaacgaagccaactggaaagtacattaccagaccacaggcccagaaattgcccatcaaactaagggaaatattgacgcattcattgctggctgcggtactggtggcaccataactggtgtggcaaaattcttaaaggaaagagcaaagataccttgccatgtcgttctagcggatccacaaggatctggcttttataatagagtcaactatggcgtgatgtatgactatgtagagaaggaaggtactagaagaaggcatcaagttgacactatcgtagaagggattgggttaaacagaatcactcataattttcatatgggcgaaaagtttattgatgaatcaatacgagtcaacgataatcaagccattagaatggcaaaatacctatcggtaaacgacgggctattcgtggggagtagtacagctattaatgcggtagccgctattcaggttgcaaaaacgcttcctcacggctcaaacattgtgattattgcatgcgacagcggttcaagacacctaagtaaattctggaaagaagctaaagaaatcgatcacgacgtgtcattagaagaagtaataaatatctaa

SEQ ID NO: 963 - protein, 393 aa, Saccharomyces cerevisiae
MSCSQNKTSVSLAWRECISIASVLIGAYASYKYYKLFKTRDIPRPKEGVEELIGNTPLVKIRSLTKATGVNIYAKLELCNPAGSAKDRVALNIIKTAEELGELVRGEPGWVFEGTSGSTGISIAVVCNALGYRAHISLPDDTSLEKLALLESLGATVNKVKPASIVDPNQYVNAAKKACNELKKSGNGIRAVFADQFENEANWKVHYQTTGPEIAHQTKGNIDAFIAGCGTGGTITGVAKFLKERAKIPCHVVLADPQGSGFYNRVNYGVMYDYVEKEGTRRRHQVDTIVEGIGLNRITHNFHMGEKFIDESIRVNDNQAIRMAKYLSVNDGLFVGSSTAINAVAAIQVAKTLPHGSNIVIIACDSGSRHLSKFWKEAKEIDHDVSLEEVINI

SEQ ID NO: 964 - DNA, 984 bp, Aquifex aeolicus
  CDS (1)..(984): transl_table=11
ttgtcgttaaaatcatgtttaatgtgggttttgggtgaacacgacgagccttacagaaaagcgcgtgaaacaatactaaaactcgtaggaaacacacccctcgtaagagtaaaaaagtgtcttccagaagatatacccgaggacgtagaaatctgggcaaagttagagagtttcaatcccggcggttcggtaaaggacagacctgctctcagtatgtttctggacgccttaaaaagggggcttattaaagagggaaaagttgtaatagacgcaacttccggaaatacgggaatagccctcgccatggttggtgcagctctcggcgttcccgtggaacttgccatgccagcaaacgtaagtgaagagaggaagaagataataaaagccttcggagcgaaactttaccttaccgatccccttgagggtaccgatggagctatcctctttgtaagggaacttgttcagaagtaccctgaaaagtacgtgtacctcgaccaatacaacaatccagcaaactggaaagctcacttttactctaccggtatagagatatggaatcaaactaaggggaggataactcacttcgtcgcagggataggaacaggcggaacgataatgggaacgggaaggagactaaagatttacaacccgaatattcaagtaataggagtccagcctgcgtatccttttcacggaatagaaggtttaaaacacatagagagttcaataaagccgggaatatttgacgagacctttctggacaggactatcttcgtagagacggaagacgcctactactgggcaagggagcttgcaaaaaaggacgctatattcgtaggacagtcatcgggagcggctctctgggcatgcattcaactcgcaagggaacttgcgaaaaaaggtgaaaagggcgtaatagttaccgtttttccggacggaggggagaagtacctcaccacggctcttttctctgacaaggattaa

SEQ ID NO: 965 - protein, 327 aa, Aquifex aeolicus
MSLKSCLMWVLGEHDEPYRKARETILKLVGNTPLVRVKKCLPEDIPEDVEIWAKLESFNPGGSVKDRPALSMFLDALKRGLIKEGKVVIDATSGNTGIALAMVGAALGVPVELAMPANVSEERKKIIKAFGAKLYLTDPLEGTDGAILFVRELVQKYPEKYVYLDQYNNPANWKAHFYSTGIEIWNQTKGRITHFVAGIGTGGTIMGTGRRLKIYNPNIQVIGVQPAYPFHGIEGLKHIESSIKPGIFDETFLDRTIFVETEDAYYWARELAKKDAIFVGQSSGAALWACIQLARELAKKGEKGVIVTVFPDGGEKYLTTALFSDKD

SEQ ID NO: 966 - DNA, 936 bp, Bacillus subtilis
  CDS (1)..(936): transl_table=11
atgttgaaaatcgttgcaaacacagctgatctgataggagatacaccgctagtgagattgaatcggcttcagccggaaaatgcggcacaagtctatttaaagcttgaatttttcaatccgagcggcagtgtgaaagacagagccgcttatcaaatgatcatagaagctgaacaaaacggtttactcaagccgggatcagttattatagagccgacaagcggaaataccggcatcgggctcgccatgaatgcggcagcacgcggatataaagcaatcttagttatgcctgatacgatgacgaaggaacggatcaacctacttaaagcttacggtgcagaggttgtattaactcccggagaggaaagaatgccgggcagcatcaaaaaagcgaaggagcttgccgaacaaattccgaacagctatattccaatgcagttcgataacactgctaatcctgatgcgcaccgaaaaacaacagcgcctgaaatcgcccgggcaatagaggaaatcggaaaaccgctcggcgcttttgtagcctcctctggaacgggcggaaccattaccggaacaggtgaggcgctcaaagagctttttccggatatcacggttcatgttgttgagccagcgggttcgcctgtattatccggcggaaaacctggcgcgcataaacttgtaggaacgagcccaggctttataccgccgattttaaatgaagacgtttatgatgaaattatcaaaatctctgatgaagacgcgtatacgacgacaagacggcttgctgctgaagaaggaattcttgtcggtccttcatcaggcgctgcctgcttcgcggcaatcgaaacagcgaaacgcctctctcctgacaaagttgtggtctgcatgacagctgatacaggagaacggtacttatcaactgatttatggtcatttatttaa

SEQ ID NO: 967 - protein, 311 aa, Bacillus subtilis
MLKIVANTADLIGDTPLVRLNRLQPENAAQVYLKLEFFNPSGSVKDRAAYQMIIEAEQNGLLKPGSVIIEPTSGNTGIGLAMNAAARGYKAILVMPDTMTKERINLLKAYGAEVVLTPGEERMPGSIKKAKELAEQIPNSYIPMQFDNTANPDAHRKTTAPEIARAIEEIGKPLGAFVASSGTGGTITGTGEALKELFPDITVHVVEPAGSPVLSGGKPGAHKLVGTSPGFIPPILNEDVYDEIIKISDEDAYTTTRRLAAEEGILVGPSSGAACFAAIETAKRLSPDKVVVCMTADTGERYLSTDLWSFI

SEQ ID NO: 968 - DNA, 900 bp, Campylobacter jejuni
  CDS (1)..(900): transl_table=11
atgaaagtacatgaaaaagtaagtgagcttataggaaatactcctattatacatttgaaaaaatttggtatcaatgtttttgctaaatgtgaatttttaaatcctagtcattctataaaagatagagcagcttttgaaatgattaaagatgctttagatagtaaaaaaattaatcaagatactacaatagttgaagcaactagtggaaatactggaatttctttggctatgatttgtgcagatttgggacttaaatttattgctgtaatgcccgaatctatgagtttagaaagaagaaaaatgataacactctttggcgctaggttagaattaactcctgcaaatttaggaatgaaaggagcggttgataaagcaaatgaaatattattaaatactccaaattcttttatggtttctcaatttgaaaatatttcaaataaaaatgcgcatcgtaagaatacggctttagaaattttaagagatttggataatgaacttgatatttttgtagctggttttggaactggcggtactattagtggagttggggaaatactaaaagaaaaattagaaaaagtgcatattgttggagtcgagcctctaaattctccattgcttagcaaaggtgaagcgggaagccataaaatacaaggaataggggcgaattttatacctgctattttaaataaagaagttatagatgaagtgatcacagtaagtaatgaagatgctataaatacagccaaagaacttgccaaaagtggtttaatggtaggtatatcaagtggagcaaatgtatttgccgcaagtatgctagcaaagaaatttccagataaaagaattttaactatgctaaacgatacggctgaaagatacctctcaaccgatctttttgcttaa

SEQ ID NO: 969 - protein, 299 aa, Campylobacter jejuni
MKVHEKVSELIGNTPIIHLKKFGINVFAKCEFLNPSHSIKDRAAFEMIKDALDSKKINQDTTIVEATSGNTGISLAMICADLGLKFIAVMPESMSLERRKMITLFGARLELTPANLGMKGAVDKANEILLNTPNSFMVSQFENISNKNAHRKNTALEILRDLDNELDIFVAGFGTGGTISGVGEILKEKLEKVHIVGVEPLNSPLLSKGEAGSHKIQGIGANFIPAILNKEVIDEVITVSNEDAINTAKELAKSGLMVGISSGANVFAASMLAKKFPDKRILTMLNDTAERYLSTDLFA

SEQ ID NO: 970 - DNA, 921 bp, Helicobacter pylori
  CDS (1)..(921): transl_table=11
atgatgattatcaccacaatgcaagacgccataggccgcactcccgtttttaaattcactaacaaggattaccccattccgttaaattccgccatttacgccaaactggagcatctaaacccaggggggagcgttaaagatcgcttaggccaataccttataggagaagggtttaaaacgggcaaaatcacttctaaaacaaccatcattgagcctaccgcaggcaataccggcatcgctctagctttagtggcaatcaagcaccatctcaaaaccatctttgttgtcccggaaaaattcagcacagaaaaacaacaaatcatgagggctttgggggctttagtaatcaacacgcctactagcgaggggatttctggcgccattaaaaaaagtaaagagttagccgaaagtatccctgatagctatttgcccttacaatttgaaaaccctgataatcccgccgcttactaccacaccctagcccctgagattgtccaagaattaggcacaaaccttacgagctttgtagccgggatagggagtggtggcacttttgcgggcacggctaggtatttgaaagaacgcatccctgcgattcgcttgattggggtggagccggagggttctattttgaatgggggtgagcctgggcctcatgagattgagggcattggcgtggagttcatccctcctttttttgaaaacttggatattgatggctttgaaacgatctcagatgaagagggttttagctacactaggaagttagccaagaaaaacggcttattagtggggagctctagcggggcagcttttgtggcagcattgaaagaagcgcaacgcctccccgaaggcagccaggttttaaccattttcccggatgttgccgatcgttatctctcaaaaggtatttatttataa

SEQ ID NO: 971 - protein, 306 aa, Helicobacter pylori
MMIITTMQDAIGRTPVFKFTNKDYPIPLNSAIYAKLEHLNPGGSVKDRLGQYLIGEGFKTGKITSKTTIIEPTAGNTGIALALVAIKHHLKTIFVVPEKFSTEKQQIMRALGALVINTPTSEGISGAIKKSKELAESIPDSYLPLQFENPDNPAAYYHTLAPEIVQELGTNLTSFVAGIGSGGTFAGTARYLKERIPAIRLIGVEPEGSILNGGEPGPHEIEGIGVEFIPPFFENLDIDGFETISDEEGFSYTRKLAKKNGLLVGSSSGAAFVAALKEAQRLPEGSQVLTIFPDVADRYLSKGIYL

SEQ ID NO: 972 - DNA, 972 bp, Mycobacterium bovis
  CDS (1)..(972): transl_table=11
atgacacgatacgactcgctgttgcaggccttgggcaacacgccgctggttggcctgcagcgattgtcgccacgctgggatgacgggcgagacggaccgcacgtgcggctgtgggccaagctcgaggaccgcaatccgaccgggtcgatcaaggaccgcccggctgtgcggatgatcgagcaggccgaggccgacgggttgttgcggccgggcgccaccatcctggagcccaccagcggaaacaccggcatttcgctggcgatggcggcccggttgaaggggtaccgattgatctgcgtgatgccggagaacacatcggttgaacggcggcagctgctcgagctctacggcgcgcagattatcttctcggcggccgaaggcgggtccaacactgcggtggccaccgccaaagagctggccgcgaccaacccgtcatgggtgatgctgtaccagtacggcaatcccgccaacaccgactcgcactactgcggcaccggccccgagctgctggccgacctgcccgaaatcacgcacttcgtcgccggcctaggcaccacgggcacgctgatgggcactggccgtttcctgcgcgagcacgttgccaacgtcaagatcgtggcggccgaaccccgctacggtgagggggtatacgccctgcgcaacatggacgaaggctttgtgcccgagctgtatgacccggaaatactgaccgcgcgatattctgtcggcgcggtggacgcagtgcgccgcacccgcgagttggtgcacaccgaaggcatctttgcgggcatctcaaccggcgcggtgctacacgccgcactcggagtcggggccggcgccctggcggccggcgagcgggccgacattgcgttggtggtcgccgacgccgggtggaagtatctgtccaccggcgcctacgccggtagcctggatgacgccgagaccgctctggaagggcaactatgggcatga

SEQ ID NO: 973 - protein, 323 aa, Mycobacterium bovis
MTRYDSLLQALGNTPLVGLQRLSPRWDDGRDGPHVRLWAKLEDRNPTGSIKDRPAVRMIEQAEADGLLRPGATILEPTSGNTGISLAMAARLKGYRLICVMPENTSVERRQLLELYGAQIIFSAAEGGSNTAVATAKELAATNPSWVMLYQYGNPANTDSHYCGTGPELLADLPEITHFVAGLGTTGTLMGTGRFLREHVANVKIVAAEPRYGEGVYALRNMDEGFVPELYDPEILTARYSVGAVDAVRRTRELVHTEGIFAGISTGAVLHAALGVGAGALAAGERADIALVVADAGWKYLSTGAYAGSLDDAETALEGQLWA

SEQ ID NO: 974 - DNA, 900 bp, Pseudomonas aeruginosa
  CDS (1)..(900): transl_table=11
atgaccgtgcagtacccgactatcgccgactgcgttggcaatacccctctggtgcgtctgcagcgccttcccggggaaacctccaataccctgctggtgaagctcgaaggcaacaacccggcgggatcggtgaaggaccgcccggccctgtcgatgatcacccgtgccgaactgcgcggcgacatccgccccggcgatacgctgatcgaggctacttccggcaacaccggcatcgccctggccatggcggcggcgatcaagggttacaagatgatcctgatcatgccggacaactccacggccgaacgcaaggcggcgatgaccgcctatggcgccgagctcattctggtcagcaaggaagagggcatggagggcgcgcgcgatctggccgacaagctgcagcgcgaaggccgcggcaaggtcctcgaccagttcgccaatggcgacaacccggaagcccattaccacagcaccggcccggaaatctggcagcagaccggcggcagcatcacccatttcgtcagctccatgggcaccaccgggaccatcatgggcgtctcgcgctacctcaaggagcagaacccggcggtgcagatcgtcggcctgcaacccatggagggctcggccatcccgggaatccgacgctggccgcaggaatacctgccgaagatctatgacgccagtcgcgtcgaccgggtcgtcgacatgcaccaggacgaagccgaggacatcatgcgccggctggcccgcgaggaaggcatcttctgcggcgtgtcctccggtggggcggtggcggcgatgctgcgcctgtcccgcgaactggagaatgccgtgctggtggcgatcatctgcgaccgcggcgaccgctacctgtcttccggcgtctatgacccgcgctga

SEQ ID NO: 975 - protein, 299 aa, Pseudomonas aeruginosa
MTVQYPTIADCVGNTPLVRLQRLPGETSNTLLVKLEGNNPAGSVKDRPALSMITRAELRGDIRPGDTLIEATSGNTGIALAMAAAIKGYKMILIMPDNSTAERKAAMTAYGAELILVSKEEGMEGARDLADKLQREGRGKVLDQFANGDNPEAHYHSTGPEIWQQTGGSITHFVSSMGTTGTIMGVSRYLKEQNPAVQIVGLQPMEGSAIPGIRRWPQEYLPKIYDASRVDRVVDMHQDEAEDIMRRLAREEGIFCGVSSGGAVAAMLRLSRELENAVLVAIICDRGDRYLSSGVYDPR

SEQ ID NO: 976 - DNA, 912 bp, Salmonella typhimurium
  CDS (1)..(912): transl_table=11
gtgaatacattagaacaaaccatcggcaatacgccgctggtcaaattacaacgtctggggccggataacggcagtgaaatctgggtcaagctggaaggcaataatccggcaggatcggtgaaagatcgcgcggcgctatcgatgattgtcgaggcggaaaagcgcggggaaattaaaccgggcgatgtcctgattgaagcgaccagcggcaacactggcattgcgctggcgatgatcgccgcgctgaaaggttatcgcatgaagctgttgatgccagacaacatgagtcaggagcgtcgggcggcaatgcgggcctatggcgcggaactgattctggtcactaaagagcagggaatggaaggggcgcgcgatttagcgctcgctatgtctgaacgaggcgagggcaaactgctcgatcagtttaataatcctgataatccctacgcccactacacgaccaccggcccggaaatctggcggcaaacgtcaggtcgcatcacccattttgtctccagcatgggcacgaccggcaccattaccggcgtgtcgcgttttctgcgcgagcaggaaaaaccggtcaccatcgttggcctacagccggaagagggcagcagtattccgggcattcgacgctggcctgcggaatatatgccgggcatttttaacgcctcgctggtagatgaggtgctggatattcatcagaatgatgccgaaaacaccatgcgtgaactggccgttcgtgaaggcattttctgcggcgtgagttccggcggcgcggtagcgggcgcgttacgggtcgcacgagccacgcccggcgcgatagtggtggcgatcatctgcgatcgcggcgaccgttacctttcgaccggcgtgtttggtgaagagcatttcagccagggggcagggatttaa

SEQ ID NO: 977 - protein, 303 aa, Salmonella typhimurium
MNTLEQTIGNTPLVKLQRLGPDNGSEIWVKLEGNNPAGSVKDRAALSMIVEAEKRGEIKPGDVLIEATSGNTGIALAMIAALKGYRMKLLMPDNMSQERRAAMRAYGAELILVTKEQGMEGARDLALAMSERGEGKLLDQFNNPDNPYAHYTTTGPEIWRQTSGRITHFVSSMGTTGTITGVSRFLREQEKPVTIVGLQPEEGSSIPGIRRWPAEYMPGIFNASLVDEVLDIHQNDAENTMRELAVREGIFCGVSSGGAVAGALRVARATPGAIVVAIICDRGDRYLSTGVFGEEHFSQGAGI

SEQ ID NO: 978 - DNA, 990 bp, Synechococcus sp
  CDS (1)..(990): transl_table=11
atgagtacttctggaaccttttttgctgataatagccaaaccatcggcaagacccctttggttcgccttaatcgaattgtgaaaggggctcctgcaacagttttggcgaaaattgaagggcgtaatcccgcctattccgttaaatgtcggattggtgcagccatgatttgggatgcagagcagcgaggcttgctcggccccggtaaggaattgattgaacccactagtggtaataccggcattgccttagcgtttgtggccgcagcgcgggggattccactcaccctgacgatgccagaaacgatgagcttggaacgtcgcaagttgctggcggcctatggggccaagttggtgctgaccgaaggcgtcaagggcatgaccggagccgtgcggcgagccgaagacattgcggcctcagatcctgatcgctatgtgttgctgcagcagttccgtaacccggccaatccagcgattcatgagcagacgacagggccagaaatttgggaggacactggcggcgcgatcgatattttggtttccggcgttggcacaggtggcacgattacgggcgtctcgcgctacatcaagcaaacccaaggcaagcccattctgtctgtagcagtggaacctgaagccagtccggtgattagccaacagcgatcggggttgccgctgaaaccagggccgcacaagattcaaggcattggggcagggttcatccctgaaaacctggatctgtcgctggtcgatcaggtagagcgagtttccaatgaagaagcgatcgcctatgcccggcgccttgctcaagaggaaggactgatttcggggatttcctgtggtgctgccgtggcagcggcagttcggctagcccagcaatcagaacatgcgggcaaaacgatcgtggtagtgttgcccgattccggtgagcgctatctcagtacggctttgttcgacggcattttcaatgagcaggggctggccgttgtatga

SEQ ID NO: 979 - protein, 329 aa, Synechococcus sp
MSTSGTFFADNSQTIGKTPLVRLNRIVKGAPATVLAKIEGRNPAYSVKCRIGAAMIWDAEQRGLLGPGKELIEPTSGNTGIALAFVAAARGIPLTLTMPETMSLERRKLLAAYGAKLVLTEGVKGMTGAVRRAEDIAASDPDRYVLLQQFRNPANPAIHEQTTGPEIWEDTGGAIDILVSGVGTGGTITGVSRYIKQTQGKPILSVAVEPEASPVISQQRSGLPLKPGPHKIQGIGAGFIPENLDLSLVDQVERVSNEEAIAYARRLAQEEGLISGISCGAAVAAAVRLAQQSEHAGKTIVVVLPDSGERYLSTALFDGIFNEQGLAVV

SEQ ID NO: 980 - DNA, 1011 bp, Rhizobium sp
  CDS (1)..(1011): transl_table=11
atgctgcacacgaccgtaacacaattgatcggccagacgccggtcatgtcgatcgacgtgccgggccgcaacgccaccttggttctgaagatcgagaagaacaatcccggcggctcgatgaaggatcgtatggctcgcagcatggtgattgcggcccttcaggatgggcgcctccctccgggcggcacgatcgttgaatcatcgtcgggaaatactggcacggggctggcgctcgcagcgctggaattcgggctgcgcttcattgccgtggtggaccaccatgcagcgcccgacaagatccgcatgatgcgggcgctaggggctgagatccgctatgtcgaaggcgactttcgcgaagacgaggtcgcagtcgtcgagcgccagcgcctcgcagcgcaactcggcgcgcagcttccgggcgcgctgttcatgaaccagtccgacaacccggcaaatccggaaggctataccggcctcgtggacgaactggttgcccagcttcccgacggcatcgacgcctttgtcggctgcgtcgggaccggcggctcgatgaccggaatctcccagcgtctgaagcgtaacaatccggccgtacgcactattgccgtggagccggccggctcgatcgttttcggcaagccggggcacccctattaccagtcaggaacgggcacgcccgccggcgatgaggtcggcaaggtgctggactatggctgcatcgacgaaggcgtgcaggtgaccgatacgcaagccttcgagacggcgcgctacatcgcccgccgcaagggactgctcgttggcggctcgaccggcggcgccatctacaaggcgctggagttcattggcgccggcaagctcaccggcaccgtcgtcacgacggttgccgatggcggcgagaaatatcttggcacgattttcgatgaggaatggatggcgaagcgccgcctgctcgacccggcaatcgctgcccagttggatggctggctattcggaaaggcgcgggcagcatga

SEQ ID NO: 981 - protein, 336 aa, Rhizobium sp
MLHTTVTQLIGQTPVMSIDVPGRNATLVLKIEKNNPGGSMKDRMARSMVIAALQDGRLPPGGTIVESSSGNTGTGLALAALEFGLRFIAVVDHHAAPDKIRMMRALGAEIRYVEGDFREDEVAVVERQRLAAQLGAQLPGALFMNQSDNPANPEGYTGLVDELVAQLPDGIDAFVGCVGTGGSMTGISQRLKRNNPAVRTIAVEPAGSIVFGKPGHPYYQSGTGTPAGDEVGKVLDYGCIDEGVQVTDTQAFETARYIARRKGLLVGGSTGGAIYKALEFIGAGKLTGTVVTTVADGGEKYLGTIFDEEWMAKRRLLDPAIAAQLDGWLFGKARAA

SEQ ID NO: 982 - DNA, 1179 bp, Oryza sativa
  CDS (1)..(1179)
atggccatggcgatggcgtcgccgcccgcttgcccattcctcctctcgctctcggccggcgccaccgccatttccaccgtgtccgccgcctacggttccgtttccgccccgcgcgcgcctctcttcctcctcgcctccccgcgtcccgtcccgcctcgccgacccctcgccgcgggctcctcatctcccaaggccgcggcacccgccgccgtcgagatccccgaggagtacgtggacgatgttgatgcggtgaacattgcgcaggacgtcacccagctgattgggaaaaccccaatggtgtatctgaataatgttgtcgacggatgtgttgctaatatcgctgcaaaacttgagtacatgggaccttgcaggagcgtcaaagacaggattggattaagcatgattaatgatgctgaagagaaaggattaatttttccaaacaagaccattttggttgaaccaactactggaaatactggtataggcctagcttctgtggctgctgctaggggatacaagctaatagcaactgtaccttcatcaatagatgttgagagatgtgttcttctacgtgcatttggagctgagattgtgttaactgatcctaacaagggactaaaaggagctcttgataaagcagaggaaattgtttcgaagacaccaaatgcatacatgtttcagcagtttaacaattccgctaatagtgagatccactttcaaaccacaggcccagaaatatgggaagacaccttgggtactgttgacatactagttgcaagcattggcacaggtggcaccattacaggcactgggcgttatctgaaaatgatgaacaaagatattaaggttattggggtagaacctgctgaaactagtgtaatctctggtgataatgctggttatattccaagcatattagatgttcagctgcttgatgaagttgtgaaggttaccaccacagaggcagtcgatgttgcaagggaacttgcactaaaagagggcctgctggttggcatttcgtcaggtgctgccacagttgctgctattaacgtcgctaaaagacctgaaaatgctggaaaattgattgcggttattttccccagctttggagaaagatatatctctagcattttattccgtccgatatatgactcggtccgaagaatgaggaagagataa

SEQ ID NO: 983 - protein, 392 aa, Oryza sativa
MAMAMASPPACPFLLSLSAGATAISTVSAAYGSVSAPRAPLFLLASPRPVPPRRPLAAGSSSPKAAAPAAVEIPEEYVDDVDAVNIAQDVTQLIGKTPMVYLNNVVDGCVANIAAKLEYMGPCRSVKDRIGLSMINDAEEKGLIFPNKTILVEPTTGNTGIGLASVAAARGYKLIATVPSSIDVERCVLLRAFGAEIVLTDPNKGLKGALDKAEEIVSKTPNAYMFQQFNNSANSEIHFQTTGPEIWEDTLGTVDILVASIGTGGTITGTGRYLKMMNKDIKVIGVEPAETSVISGDNAGYIPSILDVQLLDEVVKVTTTEAVDVARELALKEGLLVGISSGAATVAAINVAKRPENAGKLIAVIFPSFGERYISSILFRPIYDSVRRMRKR

SEQ ID NO: 984 - DNA, 1185 bp, Oryza sativa
  CDS (1)..(1185)
atggcgtcgtggtcgtcgcccgtcgccgccgccgccttgcaggtccatttcgggtcctcctgcttcttctccgcccgatcgccacgacagaccctcctcctaccacctctcgcccgcaaccctacactgaccatccagccccggccccatcccttccggaacatcaactcctcctcctcctccagctggatgtgccacgccgtcgccgccgaggtcgagggcctcaacatcgccgacgacgtcacccagctcatcggcaagactccaatggtatatctcaacaacatcgtcaagggatgtgttgccaatgtcgctgctaagctcgagattatggagccctgttgcagtgtcaaggacaggataggatacagtatgatttctgatgcggaagagaaaggcttgataactcctggaaagagtgttttggtggaaccaacaagtggaaatacaggcattggtcttgccttcattgctgcttccagaggatataaattaatattgaccatgcctgcatcaatgagcatggagagaagagttctactcaaagcttttggcgctgaacttgtccttactgatgccgcaaaagggatgaagggggctgtagataaggctacagagattttaaataagacacctgatgcctatatgctgcagcagtttgacaaccctgccaacccaaaggtacattatgagactactgggccagaaatctgggaggattctaaagggaaggtggatgtattcattggtggaattggaacaggtggaacaatatctggtgctggccgtttcctgaaagagaaaaatcctggaattaaggttattggtattgagccttctgagagtaacatactctctggtggaaaacctggcccacataagattcaaggcattggggcaggatttgttccaaggaacttggatagtgaagttctcgatgaagtgattgagatatctagtgatgaggctgttgagacagcaaagcaattggctcttcaggaaggattactggttggaatttcatctggggcagcagcagcagctgccattaaagttgcaaaaagaccagaaaatgctggaaagttggtagtggttgtgtttccaagctttggtgagaggtacctttcatctatcctttttcagtcgataagagaagaatgtgagaagttgcaacctgaaccatga

SEQ ID NO: 985 - protein, 394 aa, Oryza sativa
MASWSSPVAAAALQVHFGSSCFFSARSPRQTLLLPPLARNPTLTIQPRPHPFRNINSSSSSSWMCHAVAAEVEGLNIADDVTQLIGKTPMVYLNNIVKGCVANVAAKLEIMEPCCSVKDRIGYSMISDAEEKGLITPGKSVLVEPTSGNTGIGLAFIAASRGYKLILTMPASMSMERRVLLKAFGAELVLTDAAKGMKGAVDKATEILNKTPDAYMLQQFDNPANPKVHYETTGPEIWEDSKGKVDVFIGGIGTGGTISGAGRFLKEKNPGIKVIGIEPSESNILSGGKPGPHKIQGIGAGFVPRNLDSEVLDEVIEISSDEAVETAKQLALQEGLLVGISSGAAAAAAIKVAKRPENAGKLVVVVFPSFGERYLSSILFQSIREECEKLQPEP

SEQ ID NO: 986 - DNA, 1023 bp, Oryza sativa
  CDS (1)..(1023)
atgcaggaaggaaggaaaggggtgccatctctgctctcatctcagggagaatgcattgcatccaacatcacacagctgattggttggacaccactgatagaattgaagaatattgctaagaaagatggcatagctgctcggctggttgggaagattgagccataccaacccctttcctctgtgaaggatcggagtgctctcagattgatcgaagatgcagaggagagaggcttaatctcacctggcatcacaacactagcaggggtcacaagcggcaatcttggtatcggagtggcgtttgttgctgctcagaaaggttacaaattcattgctgtcatgcctgctaaactctcgatagataaacaaatcctgttgagatacctgggagttgaagtgattttggttgaccctgcactgaatggattcaaggggctacttgatagagttgaacagctgaagaaggatatggagaatgtgtttgttatagatcaattcaccaatcctgctaatcctgatgcgcacttcagatggacaggacctgaaatatggaaagatacagcaggcaaagtggatatatttgtagctgcatctggttcaggaggcacagtgacaggcgtagggaggtatctcaagatgaagaatccatccataaagctgatatgtgttgaaccagctgaaagtgcagtaatttcaggaggtgaaccagcattccataacatccaaggcataggtccaggatttatcccagaaatattggacagatcacaaatagatgagatagtaacagtgaccactcaagaagctatggacatggcaagaaggttggcaagggaagaaggattgctcgttggaatatcttcaggagccaacgcagctgccatcttgaaggttgcagcaagggaggagaacaagggaaagatgatcgtgacgatgttctccagtggtggggagagatacctgaattcggagctatttgcgcaggtgaaggaggaatgcatcaacatcaacaaggcattctgctga

SEQ ID NO: 987 - protein, 340 aa, Oryza sativa
MQEGRKGVPSLLSSQGECIASNITQLIGWTPLIELKNIAKKDGIAARLVGKIEPYQPLSSVKDRSALRLIEDAEERGLISPGITTLAGVTSGNLGIGVAFVAAQKGYKFIAVMPAKLSIDKQILLRYLGVEVILVDPALNGFKGLLDRVEQLKKDMENVFVIDQFTNPANPDAHFRWTGPEIWKDTAGKVDIFVAASGSGGTVTGVGRYLKMKNPSIKLICVEPAESAVISGGEPAFHNIQGIGPGFIPEILDRSQIDEIVTVTTQEAMDMARRLAREEGLLVGISSGANAAAILKVAAREENKGKMIVTMFSSGGERYLNSELFAQVKEECININKAFC

SEQ ID NO: 988 - DNA, 978 bp, Oryza sativa
  CDS (1)..(978)
atggcggaatcaggccaatcgattgcgagtgatgtgactgcactgatcggcaatactcccctggtgtacctgaacaaggtggtggatggatgtgaggcccaaatcgctgccaagcttgagatcatggagccctgctccagtgtcaaggataggattggttatagcatgattacagatgcagaagagaagggtctcattactccaggaaagagtgttttgattgagcctactagtggaaatactggtattggccttgctttcatggctgctgccaagggttataagctaatcctgacaatgccagcatccatgagcatggaaaggaggatcattcttaaggccttcggtgccgagttggtccttaccgatccacttctgggcatgaaaggtgcaatccagaaggcagatgagctggcagcaaagatgcctaactcttacattctccagcagtttgagaaccctgcaaacccaaagatccactatgagacaactggacctgagatttggaaggccactgctgggaaagttgatatccttgtctctggcattggaaccggtggtacagtaaccggaacaggaaagtacctcaaggagcagaaccctgagatcaagatctatggtgttgaaccgacagaaagtgcaattttatctggaggaagacctggtccacacaaaatccaaggtataggtgctggttttgttcctggtgtacttgatgtcaatctcctggatgaagtggtccaagtctcaagtgatgaagccatcagcatggcgaagcagctagcgttgaaagaagggctgctggttgggatctcatctggtgctgctgcagtcgctgccatcagggtcgcgcagcggcccgagaacaaagggaagctcgtagttgtggtcttcccgagcttcggtgagcgctacctgtcgtctgtcctcttcgaatcgatcaagagggaggccgaaaacatggtgttcgagccatga

SEQ ID NO: 989 - protein, 325 aa, Oryza sativa
MAESGQSIASDVTALIGNTPLVYLNKVVDGCEAQIAAKLEIMEPCSSVKDRIGYSMITDAEEKGLITPGKSVLIEPTSGNTGIGLAFMAAAKGYKLILTMPASMSMERRIILKAFGAELVLTDPLLGMKGAIQKADELAAKMPNSYILQQFENPANPKIHYETTGPEIWKATAGKVDILVSGIGTGGTVTGTGKYLKEQNPEIKIYGVEPTESAILSGGRPGPHKIQGIGAGFVPGVLDVNLLDEVVQVSSDEAISMAKQLALKEGLLVGISSGAAAVAAIRVAQRPENKGKLVVVVFPSFGERYLSSVLFESIKREAENMVFEP

SEQ ID NO: 990 - DNA, 1134 bp, Oryza sativa
  CDS (1)..(1134)
atggagagggctctgatgagcctcatgaggcggcgctccctcctccagagcggcggacgagcaccgccggcgatggccgccgccgccggtggctcaccattcttctccaccctgcagcaagcagccgccgcagacccggtccagtcgcctggcatcttgccagggctcaagatcagggactctgcgtcacagctgattgggaggacacccatggtttacctgaacaaggtcactgaaggatgtggggcccggattgctgctaagctcgagttcttgcagccgtccttcagcgtcaaggacagaccagcaatttcaatgttggaagatgctgaaaagaaggggttgatcaccccaggtaagaccacactgatcgagccgacatcagggaacatgggtattggcctggcattcatggctgctcttaaagggtatgaactcatactcacaatgccttcatacaccagccttgagaggagggtgaccatgagggccttcggcgcaaaactcgtccttaccgacccaacaaaaggtatgggaggcacggtgaggaaggccgccgagctgtatgagaaccatcctagcgcgttcatgctgcagcagtttgagaatcctgcaaatgtcaaggtacactatgagacaactggtccagaaatctgggaggatacacttgggcaggttgatatttttgtcatgggaatcgggagcggcggcaccgtcactggtgttggcaagtatcttaaggagaagaaccccaatgcaaagatctatggagttgaacctgctgaagcaaatgttttgaatggtggcaaaccaggtcctcacctcatcactggaaatggagtgggatttaagccggaaattttgaatatggatataatggaaaaggttattgaggtgaaaggtgaggatgctgttaagatggctcgagaattggcactgaaggagggtcttctggttggaatatcatcaggagctaacacagttgctgctcttgaactagcaaagaagccagaaaacaaagggaagctcattgtgactgttcttccgagtttaggggagagatacctgtcatctgcattgtttgaggaattgagagcggaggctgaggccatgcagccagtgccagtggactaa

SEQ ID NO: 991 - protein, 377 aa, Oryza sativa
MERALMSLMRRRSLLQSGGRAPPAMAAAAGGSPFFSTLQQAAAADPVQSPGILPGLKIRDSASQLIGRTPMVYLNKVTEGCGARIAAKLEFLQPSFSVKDRPAISMLEDAEKKGLITPGKTTLIEPTSGNMGIGLAFMAALKGYELILTMPSYTSLERRVTMRAFGAKLVLTDPTKGMGGTVRKAAELYENHPSAFMLQQFENPANVKVHYETTGPEIWEDTLGQVDIFVMGIGSGGTVTGVGKYLKEKNPNAKIYGVEPAEANVLNGGKPGPHLITGNGVGFKPEILNMDIMEKVIEVKGEDAVKMARELALKEGLLVGISSGANTVAALELAKKPENKGKLIVTVLPSLGERYLSSALFEELRAEAEAMQPVPVD

SEQ ID NO: 992 - DNA, 1020 bp, Oryza sativa
  CDS (1)..(1020)
atggaggaaggaggcaggagagggatcccttctctgctaaattcatcgtcatcagatgaacatatcgccactgatatcactcagcttgtaggatggacgccactgatagagctgaaccggatcgtccgaaaagacggggtaaatgcccggattgttggcaaattggagtcataccaacccctctgctctgtcaaggatcgcagtgctctgagaatgattgaggatgcagaggagaaaggtctgatctcaccaggcgttacgacgctagtcgagccgacaagtggtaatcttggaataggtgtggcatacaatgctctgctcaaaggttacaggttcgttgcagtcatgcctgctgagtattcacttgataagcaaatgttgttgacgtatctaggggccgaggttattttaactgatcctacacttggttttcagggacaattagacaaagttgaacagatcaagaatgatatgcctaacgtacatcatcttgatcagtttaaaaatgcagcaaatcctgaagcacactttgtatggacagggcctgagatttggaaggatacggcaggcaaagtagatatctttgtggctggttctggcacaggaggaacaatttcaggtgtagggaaatatttgaagatgaaaaacccagcagttaaagtaatttgtgttgagcctgcggaaagccctgtaatttcaggtggtaagccttcgcggcataaaattcagggaatgggtccaggctttgtaccaaaaaacctggatatctcaatcgtcgatgagatcatcacagtaactgcacaagatgcaatggctaatgcaaagaggctggcaagagaagagggtttacttgtgggcatatcatccggagctaatttggcagcttgtctgaaggtggcatcgaggaaagaatatgagggaaagatgattgtaaccattttccctagtggtggtgaaagatacatgaactctgacctctttgcacaagcaagggaggagtgcagcgccatgaccttttga

SEQ ID NO: 993 - protein, 339 aa, Oryza sativa
MEEGGRRGIPSLLNSSSSDEHIATDITQLVGWTPLIELNRIVRKDGVNARIVGKLESYQPLCSVKDRSALRMIEDAEEKGLISPGVTTLVEPTSGNLGIGVAYNALLKGYRFVAVMPAEYSLDKQMLLTYLGAEVILTDPTLGFQGQLDKVEQIKNDMPNVHHLDQFKNAANPEAHFVWTGPEIWKDTAGKVDIFVAGSGTGGTISGVGKYLKMKNPAVKVICVEPAESPVISGGKPSRHKIQGMGPGFVPKNLDISIVDEIITVTAQDAMANAKRLAREEGLLVGISSGANLAACLKVASRKEYEGKMIVTIFPSGGERYMNSDLFAQAREECSAMTF

SEQ ID NO: 994 - DNA, 1044 bp, Oryza sativa
  CDS (1)..(1044)
atggagggagaggggattgggaggagaggccttccttcactgctcggttcctcttccagcgaaagcggcggaatcgggcaagaacacattgcctctgacatcacgcagctcataggatggacgccactggtcgagctgaagcgaatcgccagcaaggacggaatagatgcccggatcgtcggcaaggtcgaggcctatcagcccctctgctccgtcaaggatcgcagcgctttgagaatgatcgaggatgcagaagagaaagggctgattactcctggtgtcacaactctagtcgagccgacgagtggcaatctgggtttaggattggtgcttgttgctcttcgcaaaggttacaggttcgttgcagttatgccgggccagtattcgtttgataagcagatcttgctgaaatacatgggagctgaattgtttctatcagatccaacactcgggtttcaaggcttagtcgacaaggtcgaacagctcaagaaagaattacccaatgtgcacgttcttaatcaattctcaaatccagcaaatcaggaggcacacatgagattgactggacctgagatttggaaggatactgctggcaaggtagacatatttgttaccggttcgggctcaggaggtacggtatctggcgttggaaagtatctcaagctgcaaaatccagcggtgaagatcatttgtgtggagcctgcagagagcccagtcatttcaggtggggagccaggtaaacataaaattcagggaatagggccaggactcatacctgatatgttggacacctcggtcatcgatgaagtcgtcacggtaaacactgatgaagcaatggtgaatgcaaggaggctggcaatggaagagggcctccttatgggcatttcttctggggcaaacctggcagcttgcttgaaggtcgcgtcgagagaggaaaacaaggggaagatgattgtcaccatgttcccaagcgggggtgagaggtacatgaactctgacctctttgcagctgtgagagaggaatgcaatgccatgacattttaa

SEQ ID NO: 995 - protein, 347 aa, Oryza sativa
MEGEGIGRRGLPSLLGSSSSESGGIGQEHIASDITQLIGWTPLVELKRIASKDGIDARIVGKVEAYQPLCSVKDRSALRMIEDAEEKGLITPGVTTLVEPTSGNLGLGLVLVALRKGYRFVAVMPGQYSFDKQILLKYMGAELFLSDPTLGFQGLVDKVEQLKKELPNVHVLNQFSNPANQEAHMRLTGPEIWKDTAGKVDIFVTGSGSGGTVSGVGKYLKLQNPAVKIICVEPAESPVISGGEPGKHKIQGIGPGLIPDMLDTSVIDEVVTVNTDEAMVNARRLAMEEGLLMGISSGANLAACLKVASREENKGKMIVTMFPSGGERYMNSDLFAAVREECNAMTF

SEQ ID NO: 996 - DNA, 1074 bp, Oryza sativa
  CDS (1)..(1074)
atgggggaagaaatcaagaacggagaggagggaccagacatggctgcaccgggcgaggaggagcaggagcaggggaggaaaggcatcccgtctctgctctcctccagggaggagaacatcgcctctaacatcactcagctgattggatggacaccgcttgttgagatgaagaacatcgcgaagaacgaaggcgtacaggctcgattggttgggaagatggaagcataccagccactctgctctgtcaaggacaggagtgccctcagaatgattgaagatgcagaggagaaagggttgatcacacctggtgttaccacgctgattgagccaacgagtggtaatctcggtatcggtttggtgctggttgctgttcagaaaggctacaggtttattgctgtcatgcctgctaaatattcgcttgacaagcagatgctactgaggtttttgggtgctgaattgatattgacagatcctgcaattgggtttaatggtatgatggacaaggtggaagagctcatgaagagcataccaaattctcattgtctcaatcaagtaacaaacccagcaaatccagaggcacactttatgtggactggacctgaaatatggaaagacacagccggcaaagtggatgtgtttgtggcctctgttggttcaggtggcacattgacaggtgtagggaggtatctgaagatgaaaaatccatctataaatattgtgtgcgtggaaccttcagaaagccctgtaatttcaggtggttcaccagggccacacaagattcaaggcactggggcaggtttcatacctgaaattttggacaaatctgtcatcgatgaagtagtgacagtaaacacagaggaatccatggcaatggcgaggaggctggcgaaggaggaaggattgcttgttggcatatcttctggtgcaaatgtagctgcttgcatcaagattgcagacagagaggagaacaaggggaaaatgattgtgacaatgttcccgagcggcggtgaaagatacatgaactctgatctctttgcacctgttagagaggaatgtgataatatgaccttctga

SEQ ID NO: 997 - protein, 357 aa, Oryza sativa
MGEEIKNGEEGPDMAAPGEEEQEQGRKGIPSLLSSREENIASNITQLIGWTPLVEMKNIAKNEGVQARLVGKMEAYQPLCSVKDRSALRMIEDAEEKGLITPGVTTLIEPTSGNLGIGLVLVAVQKGYRFIAVMPAKYSLDKQMLLRFLGAELILTDPAIGFNGMMDKVEELMKSIPNSHCLNQVTNPANPEAHFMWTGPEIWKDTAGKVDVFVASVGSGGTLTGVGRYLKMKNPSINIVCVEPSESPVISGGSPGPHKIQGTGAGFIPEILDKSVIDEVVTVNTEESMAMARRLAKEEGLLVGISSGANVAACIKIADREENKGKMIVTMFPSGGERYMNSDLFAPVREECDNMTF

SEQ ID NO: 998 - DNA, 1029 bp, Oryza sativa
  CDS (1)..(1029)
atggcggctgaggtggaggaggggaggacgggtatcccgtctctgctctcctccgccgtgggggaggagaccatcgcctccaacatcgcccagctgataggctggacgccactgattgagatgaagaacatccccaagaaagaaggcatccaaactcgtttgatcgggaagatggaaacataccaacccctgttctcggtcaaggacagaactgctctcagtatgattgaagatgcagaggagaaaggcctcattactcccggtgttacgacactgattgaaccaaccagtggcaatcttggtatcggtttggtattggttgctattcagaaaggctacaggtttattgctgttatgcccgctagatattcacctgacaagcagatgctattgaggtttttgggtgctgaactgatattaacagatcctgcaggtgggtacaagggtgcgatggacaaagtggaagatctcatgaagatcatgcctaattatcattgttttaatcaagcaaccaacccagcaaatccagaggcacatttcaaatggactggacctgaaatttggaaggacacagccggcaaagttgatttctttgtaaccgcagctggaacaggaggcacattgtcaggtgtaggaaggtacctgaagatcaaaaatccatctataaatatagtgtgcgtggaaccttcagaaagtgctgtaatttcaggtggttcaccaggatcacacaagattcaaggcactgggccaggtttcataccgaaaactttggacaggtccatcatcgatgaagttgtgaccgtaagctcagaggaatccatggcaatggcaagaaggcttgcaaaggaagaggggcttcttgttggcatatcttctggtgcaaatgtagctgcttgcatcaagattgcagctagagaggagaacaagggtaagatgattgttacgatgttcccgagtggtggtgaaagatacatgagctctgatctctttgcagatgtaagggaggaatgtgctaatatgaccttctaa

SEQ ID NO: 999 - protein, 342 aa, Oryza sativa
MAAEVEEGRTGIPSLLSSAVGEETIASNIAQLIGWTPLIEMKNIPKKEGIQTRLIGKMETYQPLFSVKDRTALSMIEDAEEKGLITPGVTTLIEPTSGNLGIGLVLVAIQKGYRFIAVMPARYSPDKQMLLRFLGAELILTDPAGGYKGAMDKVEDLMKIMPNYHCFNQATNPANPEAHFKWTGPEIWKDTAGKVDFFVTAAGTGGTLSGVGRYLKIKNPSINIVCVEPSESAVISGGSPGSHKIQGTGPGFIPKTLDRSIIDEVVTVSSEESMAMARRLAKEEGLLVGISSGANVAACIKIAAREENKGKMIVTMFPSGGERYMSSDLFADVREECANMTF

SEQ ID NO: 1000 - DNA, 1227 bp, Oryza sativa
  CDS (1)..(1227)
atggccgtccaggttcaacgaacgcccctcccccggtccacgtacaccggccatcgggtctatctcctgcgggccccacctgcagtgacacggtgcaccgtggaccgcgcctttccgcgcagtcatggacctccccttcctcctctcctgtataaaacctcgcgtcctgatgcttcctcctccaactccacgagccgccatttcccaaggaggagcaaggattgttgttgtttcgctgtcagatcgattcctgacgggataatgggtgagaccatcgccaaggatgtcaccgagttgattgggaacacgccgttggtgtacctcaaccgggtgacggatgggtgcgtcgggcgcgtcgcggccaagctcgagtccatggagccatgctccagcgtcaaggataggattggatacagtatgatcactgatgcagaggagaaggggctgatcactccaggcaagagtgtgctgattgagccaactagtggcaacacaggcattggactggccttcatggctgctgcaaagggttacaggcttgtactcacgatgccggcctccatgagcatggagaggagaatcatattgaaggcttttggtgctgaattgatacttactgacccactcttgggaatgaaaggagctgtccaaaaggcagaagaactggcagcgaagacaaacaactcatttatcctccaacaattcgagaaccctgctaacccaaagatccattacgagaccactggacctgaaatctggaaaggaacaggaggtaaagttgatggtttagtttctggtattgggacaggtggcactattactggagctggacgatacctcagagagcaaaatcctgatatcaagatctatggtgtggagccagtcgagagcgctgtcttatctggtggaaagcctgggccacacaagattcaaggaattggagctggttttgttcctggggtcctggatgttgacctcatcaatgaaactgtacaagtttcaagtgatgaagctatcgagatggcaaaggctcttgcattgaaagaagggttgctggttggaatatcttcaggtgcagctgcagcagcagctgttaggctcgctcagaggccggaaaatgaaggaaaactttttgttgttgtcttcccaagctttggtgagcggtacctttcgtcggtgctcttccagtccatcaagaaggaagctgaaaacatggtggttgaatga

SEQ ID NO: 1001 - protein, 408 aa, Oryza sativa
MAVQVQRTPLPRSTYTGHRVYLLRAPPAVTRCTVDRAFPRSHGPPLPPLLYKTSRPDASSSNSTSRHFPRRSKDCCCFAVRSIPDGIMGETIAKDVTELIGNTPLVYLNRVTDGCVGRVAAKLESMEPCSSVKDRIGYSMITDAEEKGLITPGKSVLIEPTSGNTGIGLAFMAAAKGYRLVLTMPASMSMERRIILKAFGAELILTDPLLGMKGAVQKAEELAAKTNNSFILQQFENPANPKIHYETTGPEIWKGTGGKVDGLVSGIGTGGTITGAGRYLREQNPDIKIYGVEPVESAVLSGGKPGPHKIQGIGAGFVPGVLDVDLINETVQVSSDEAIEMAKALALKEGLLVGISSGAAAAAAVRLAQRPENEGKLFVVVFPSFGERYLSSVLFQSIKKEAENMVVE

SEQ ID NO: 1002 - DNA, 1179 bp, Brassica napus
  CDS (1)..(1179)
atggcactctcctctccttcgctcctccgtcttcttcctcaccaccccttcactctaacaacctcaaaacgacaccgtttcttatccttaaaccatgaaccttcatcatcctccctcgtcgtagccgccgtctcttcaaaaccctccacccggacaaaacaaaagtctaaatccaaatccaaacctcctcctcctccgccgcctccagttactactgtttctcatgaagtgggaacagaggactcagaaacggtcaacattgctgaagacgtcactcaattgattggaagcacaccgatggtgtatctcaacagagtcactgacgggtgtgttgctgacgttgctgcaaagctagagtcaatggagccttgtagaagcgtcaaagacaggattggtctcagcatgattaacgaggcagaagacagaggagacataactccgaggaagagtgtgttagtagagccgacgaccggaaacactggcctagggatagcttttgtggctgcggctaaagggtacaagcttatagtgactatgccggcttctataaacgttgaaagaaggatgcttttacgcgcactaggagcggagatcgtgctgacgagtccagagaagggacttaaaggtgcggtggagaaagccaaagagattgttctcaagaccaagaacgcatatatgtttcagcagtttgataatacggctaatacaaagatccattttgagactacaggaccagagatttgggaagacacaatgggtaatgtagatatatttgttgctgggattggaactggtgggactgtaacaggtacaggaagtttcttgaagatgatgaaccctgacattaaggtagttggcgttgaaccatcagaaagaagtgtgatctctggagacagtcctggttatgtaccgggaatcttggatgttaagctacttgatgaagtgtttaaggtaagcaacgaggaagcaattgagatggcaagaagactagctttggaggaaggattactggtcggaatatcgtctggagcagctgcagtagcagcaataagcttggctaaaagagctgagaacactgggaaacttatcacggttctgtttccgagccatggggagcggtatatcacaacagctctgtttagttccatcaacaaagaggttcaagagatgagccattag

SEQ ID NO: 1003 - protein, 392 aa, Brassica napus
MALSSPSLLRLLPHHPFTLTTSKRHRFLSLNHEPSSSSLVVAAVSSKPSTRTKQKSKSKSKPPPPPPPPVTTVSHEVGTEDSETVNIAEDVTQLIGSTPMVYLNRVTDGCVADVAAKLESMEPCRSVKDRIGLSMINEAEDRGDITPRKSVLVEPTTGNTGLGIAFVAAAKGYKLIVTMPASINVERRMLLRALGAEIVLTSPEKGLKGAVEKAKEIVLKTKNAYMFQQFDNTANTKIHFETTGPEIWEDTMGNVDIFVAGIGTGGTVTGTGSFLKMMNPDIKVVGVEPSERSVISGDSPGYVPGILDVKLLDEVFKVSNEEAIEMARRLALEEGLLVGISSGAAAVAAISLAKRAENTGKLITVLFPSHGERYITTALFSSINKEVQEMSH

SEQ ID NO: 1004 - DNA, 1179 bp, Brassica napus
  CDS (1)..(1179)
atggctgctgcgacatcttcctctgcttttctccttaatccgttgacttctcgccaccgtcctctcaaatactcccctgagctatcttctctctccttatcctccagaaaggcggctgctttcgatgttctcccggctcctctctccctcaagagccagaggtgtagtagccgtgttgtgtgcaaggctgtgtccgtcaagcctggggttgaaggtctcaatatcgccgagaacgccgctcagcttattgggaaaactccaatggtgtacttgaacaatatagttaaaggttgtgttgcaagtgttgctgctaagcttgagatcatggagccttgttgcagtgtcaaggataggattgggtatagtatgattacagatgctgaggaaaaaggacttatcacacctggaaagagtgttcttgtggaatctacaagtggaaacacagggattggacttgcgtttattgctgcttcaaaagggtataagcttattttaactatgccagcgtccatgagtttggaaagaagggttcttttgagggcgtttggagctgagcttgtgttgactgaacctgcaaagggtatgactggagctattcagaaggctgaagagatcttgaagaacactcctgactcatacatgctccaacagtttgacaacccagccaatcccaagattcattacgagactactggtcctgagatttgggaagatacaagaggcaaggtggatatattggttgcgggaattggaactggtggaaccatcactggtgttggccggtacattaaagaaaggaaacctgaactgaaggtcattggtgttgaacccacggaaagtgctatactttctggaggaaaacctggacctcacaagattcaagggattggagctggatttattcctaagaatttggatcagactgttgtagatgaatacatagcgatttcgagtgaggaagctattgaatttgcaaagcaactagctctccaagaaggcttgttggttggtatatcttctggagctgctgctgctgctgcaatccaggtcgcaaagagacctgaaaatgccgggaaactcatagctgttgtgttcccgagctttggggaacgttacctctcgaccctgctttttcagtctatccgagatgagtgcgagaatatgcagcctgagctttga

SEQ ID NO: 1005 - protein, 392 aa, Brassica napus
MAAATSSSAFLLNPLTSRHRPLKYSPELSSLSLSSRKAAAFDVLPAPLSLKSQRCSSRVVCKAVSVKPGVEGLNIAENAAQLIGKTPMVYLNNIVKGCVASVAAKLEIMEPCCSVKDRIGYSMITDAEEKGLITPGKSVLVESTSGNTGIGLAFIAASKGYKLILTMPASMSLERRVLLRAFGAELVLTEPAKGMTGAIQKAEEILKNTPDSYMLQQFDNPANPKIHYETTGPEIWEDTRGKVDILVAGIGTGGTITGVGRYIKERKPELKVIGVEPTESAILSGGKPGPHKIQGIGAGFIPKNLDQTVVDEYIAISSEEAIEFAKQLALQEGLLVGISSGAAAAAAIQVAKRPENAGKLIAVVFPSFGERYLSTLLFQSIRDECENMQPEL

SEQ ID NO: 1006 - DNA, 978 bp, Glycine max
  CDS (1)..(978)
atggcggttgagaagttgagcattgcaaaagatgtgactgaattaattggcaaaactccattggtatatctcaaccgcatcgtggatggctgtgttgccaaagttgctgcgaagctagaaatgatggaaccttgctccagtgtcaaagacaggatagggtatagcatgattgtagatgctgaggagaaaggactcatcacaccgggtgaaagtgtcctcattgagcctactagtggaaacactggcataggtttggcattcatggcagctgctaagggttataaacttattataaccatgccttcttcgatgagtctcgaaagaagaaccattcttcgagcttttggagctgagttagtcctcactgatcccgccaaaggtatgaaaggagctgttcagaaggcagaagagattcgggataagactccaaattcttatattcttcagcaatttgaaaatcctgccaacccaaagatccattatgaaaccactggaccggagatctggaagggctctagtgggaaggttgatgctcttgtctctgggattgggactggaggtacaataacaggtgctggaaaatatctgaaagatcagaaccctgatataaagctatatggcattgaaccagtagaaagtccaatactgtctggaggaaaacctggccctcataagatccaaggaattggtgctggcttcatccctggtgttctggatgtcgatttacttgatgaagttgttcaaatttcaagtgaagaagccattgaaactgctaaacttcttgctttgaaagaaggtttgctggtgggaatatcatctggtgcagctgcagctgctgcaattaagatagcaaagaggccagaaaatgctggaaaactcattattgcggtcttcccaagctttggagagcgttatttatcatctgtgctctttgaatccgtgaagcgagaagcagagagcatggtcttcgagccttga

SEQ ID NO: 1007 - protein, 325 aa, Glycine max
MAVEKLSIAKDVTELIGKTPLVYLNRIVDGCVAKVAAKLEMMEPCSSVKDRIGYSMIVDAEEKGLITPGESVLIEPTSGNTGIGLAFMAAAKGYKLIITMPSSMSLERRTILRAFGAELVLTDPAKGMKGAVQKAEEIRDKTPNSYILQQFENPANPKIHYETTGPEIWKGSSGKVDALVSGIGTGGTITGAGKYLKDQNPDIKLYGIEPVESPILSGGKPGPHKIQGIGAGFIPGVLDVDLLDEVVQISSEEAIETAKLLALKEGLLVGISSGAAAAAAIKIAKRPENAGKLIIAVFPSFGERYLSSVLFESVKREAESMVFEP

SEQ ID NO: 1008 - DNA, 1197 bp, Zea mays
  CDS (1)..(1197)
atggcgtcgtggtcgtcgccctcagccgccgccaacgccgcctcgggcgcccgattcggccccttcccgagcggagggcagcggctcgcgccgtgtccgtcgctcgtccgcggaactcccgccccgacgctcgtcctcaggccccacccggacggccgtggccatggcctcctcgcgcacaccgcctcccctccctccttgcggtgccgcgccgtcgccgccgaggtcgggggcctcaacatcgccaacgacgtcacccagctcatcggcaacacaccaatggtgtatctcaacaacgtcgtcaagggctctgtcgccaatgtcgctgctaagctcgagattatggagccctgctgtagcgtcaaggacaggatagggtacagtatgataaatgatgctgaacagaagggcttgattactcctggaaagagtgttttggtggaagcaacaagtggaaacacaggcattggtcttgctttcattgctgcttccaaaggatataagctgatactaacaatgccttcatcaatgagcatggagagaagagtcctccttagagcttttggtgccgaacttgtccttactgatgctgcaaaagggatgaaaggggccttagataaggctacagagattttaaacaagacaccaaattcttacatgcttcaacagttcgataaccctgccaaccctcaggtacattatgagactactggtccagagatctgggaggattcaaaggggaaggtggatatattcattggtggaattggaacaggggggacaatatctggtgccggccgttttctcaaggagaaaaatcctggaattaaggttattggtattgagccttctgaaagtaacatactctccggtggaaaacctggtccacataagatccagggaatcggcgcaggatttgttccaaggaacttggatagcgatattcttgatgaagtaattgagatatcaagtgatgaagctgttgagacagcaaaacagttggctgttcaggaaggattactggttggaatctcctctggagcagccgccgctgctgccataaaggttgccaaaagaccagagaatgctggaaagctgatagtggttgtgtttccgagcttcggcgagaggtacctttcatctgtcctctatcagtccataagagaagaatgtgagaacatgcaacctgagccatga

SEQ ID NO: 1009 - protein, 398 aa, Zea mays
MASWSSPSAAANAASGARFGPFPSGGQRLAPCPSLVRGTPAPTLVLRPHPDGRGHGLLAHTASPPSLRCRAVAAEVGGLNIANDVTQLIGNTPMVYLNNVVKGSVANVAAKLEIMEPCCSVKDRIGYSMINDAEQKGLITPGKSVLVEATSGNTGIGLAFIAASKGYKLILTMPSSMSMERRVLLRAFGAELVLTDAAKGMKGALDKATEILNKTPNSYMLQQFDNPANPQVHYETTGPEIWEDSKGKVDIFIGGIGTGGTISGAGRFLKEKNPGIKVIGIEPSESNILSGGKPGPHKIQGIGAGFVPRNLDSDILDEVIEISSDEAVETAKQLAVQEGLLVGISSGAAAAAAIKVAKRPENAGKLIVVVFPSFGERYLSSVLYQSIREECENMQPEP

SEQ ID NO: 1010 - DNA, 1140 bp, Hordeum vulgare
  CDS (1)..(1140)
atggcgatggcgtcgccgccagcctgctccctcctcctcccggccatttcttgcgcgccggcctacgctagtgtcccacgagcaccccggttcctcacctgcccacgcgctgtaacagcccaccgaccccttcccacgacctcctctcctaaggtcgcggcgccccccgccgtcgagatcccggaggagtacgcggatgatgtcgaagcggtgaacattgcggtggacgtcactcagctaattggaaagaccccaatggtatatctcaataatgttgtcgaaggttgtgccgctaatattgccgcaaagcttgagtacatgggaccttgccggagcgtcaaagacaggattgcattaagcatgattagtgacgcagaagagaaaggattaatttctccaaacaagaccattttggtagaaccaactactgggaatactggtataggactagctgcagtagctgctgctagaggatacaaaatgatagcaactatgccttcatcgatagatgttgagagacgcattcttgtacgcgcatttggagcagatattgtgttaactgatcctacaacaggactaaaaggagctgttgacaaagctgaggaaatagtttcaaagacaccgaatgcgtacatgtttcagcaattcgacaatacagctaacagtgagatccactttcaaaccacaggcccagaaatatgggaggacacactgggtactgttgacatacttgttgcgagcatcgggactggtggcactatcactggcaccgggcgctacttaaaaatgatgaatagagatattaaggtcatcggggtagagcctgctgaaactagtgtgatttctggcgacaagccaggttatattccaagcatactagatgttcagctccttgatgaggttgtgaaggttaccactgcagaggcagttgatgttgcgaggctgcttgcactaaaagagggcttgctggttggcatttcgtcaggtgctgcagcaattgctgctataaacgtggccaaaagacctgaaaatgctggaaagctgattgccgttatcttccccagctttggagagagatatatctctagcattttgttccgtccgatatacaactccgttcgaaggatgaggaagcgatga

SEQ ID NO: 1011 - protein, 379 aa, Hordeum vulgare
MAMASPPACSLLLPAISCAPAYASVPRAPRFLTCPRAVTAHRPLPTTSSPKVAAPPAVEIPEEYADDVEAVNIAVDVTQLIGKTPMVYLNNVVEGCAANIAAKLEYMGPCRSVKDRIALSMISDAEEKGLISPNKTILVEPTTGNTGIGLAAVAAARGYKMIATMPSSIDVERRILVRAFGADIVLTDPTTGLKGAVDKAEEIVSKTPNAYMFQQFDNTANSEIHFQTTGPEIWEDTLGTVDILVASIGTGGTITGTGRYLKMMNRDIKVIGVEPAETSVISGDKPGYIPSILDVQLLDEVVKVTTAEAVDVARLLALKEGLLVGISSGAAAIAAINVAKRPENAGKLIAVIFPSFGERYISSILFRPIYNSVRRMRKR

SEQ ID NO: 1012 - DNA, 1137 bp, Helianthus annuus
  CDS (1)..(1137)
atggcttccttaatcaacaccaacaacctgctacctcttcacaaatcaagctccaacctttacacacaccatgctcgtgttcttcccttttccctccatttcaagaaaccctctttttcttcagccgctatcgtatgtaaggccgtttctgtgaagccagaagtcgaagaagcccttaacatcgccgatgatgttactcagctcatagggaacactccaatggtgtacttgaatagcattgcaaaggaatccgttgctaatatcgcagccaagcttgaaattatggagccatgttgcagtgtcaaagacaggattggaaacagtatgataactgatgctgaagagaaaggacttataacaccggggaagagtatattggttgagcctacaagtgggaacactggtatcggtctcgcatttatcgctgcttcaaaagggtataagctgatattgacgatgccagcgtcaatgagtcttgagagaagggttcttctaaaggcatttggagctgatcttgttctaacagactcttcaaagggcatgaaaggagcggttcagaaagctgaagaaatcgtcaacagcacacccaatgcttacatgcttcaacagtttgataatcctgctaacccaaagatacattttgagacaactggcccggagatctgggaagacacaaatggaaaagttgatatatttgttgcgggaattggaaccggtggaactatttcaggggctggtcgatttctcaaaactcaaaatcctgatattaaggtgattggcgtggaacctacggagagcaatattctgtctggtggaaagcctggccctcacaaaattcaagggattggagcaggttttatacccgggaacttgcatcaagacgtgctcgatgaagtgatagagatttcaagtgatgaagctgttgagactgcaaaacaattggcactgcaagaagggctgttggtgggcatctcttctggagcggcggctgctgctgctatcaaggttggaaagagacctgagaatgctggaaaacttattgcggttgtgtttccaagctttggggagcgatacctgtccacaattcttttccagtcaatccgggaagagtgcgaggcaatgcaagcttcagcctga

SEQ ID NO: 1013 - protein, 378 aa, Helianthus annuus
MASLINTNNLLPLHKSSSNLYTHHARVLPFSLHFKKPSFSSAAIVCKAVSVKPEVEEALNIADDVTQLIGNTPMVYLNSIAKESVANIAAKLEIMEPCCSVKDRIGNSMITDAEEKGLITPGKSILVEPTSGNTGIGLAFIAASKGYKLILTMPASMSLERRVLLKAFGADLVLTDSSKGMKGAVQKAEEIVNSTPNAYMLQQFDNPANPKIHFETTGPEIWEDTNGKVDIFVAGIGTGGTISGAGRFLKTQNPDIKVIGVEPTESNILSGGKPGPHKIQGIGAGFIPGNLHQDVLDEVIEISSDEAVETAKQLALQEGLLVGISSGAAAAAAIKVGKRPENAGKLIAVVFPSFGERYLSTILFQSIREECEAMQASA

SEQ ID NO: 1014 - DNA, 1050 bp, Zea mays
  CDS (1)..(1050)
atggatggcgaggaggttggcaggaggggtattcctactctgctgaagccgtcttcctcctccagcgacggcagtgccggggaacaagagcacatcgcttctgacgtcactcagctcataggatggacgccgctggtcgaattgaagcgaatcgccagcgaggctgggatcgatgcgcggatcgtcggcaagatggaggcttaccagccactttgctccatcaaggaccgctctgctttgagaatgatagaggatgctgaggagaggggattgatttcgcctggagtcacaacactggtggagccgacgagtggtaacatggggttagggttggtcctcttcgctattcagagaggttacaggctcattgcagtcatgccggctaaatactcgcttgacaagcagatcttgctgaggttcatgggcgcggagctatacttaactgatccggcccttggctttccgggcatgtttgacaaagttgaacagctccgaaaacagctgccaaatgtacatgttctgaaccaagtcacgaacaaagcgaattctgaagcccacttcagattgaccgggcctgagatctggaaggacacggcaggcaaggtggatgtattcgtagccggttcaggcacaggaggcactgtttctggcgtcgggaagtatctgaagatgcaaaagccaggcgtcaagatcatctgcgttgagcctgcagaaagcccagtgatttcaggtggcgcgcctggcaagcataaaatccagggagtaggcccagggtttctacctgaagttctggacacctcggtcatcgacgagaccgtcaccgtgagcaccgaggaggccatggcgaatgcgaggaggctggccagggaagagggcctgctcgtgggcatttcttccggagcaaacctggcagcttgtttgaaggtcgcttcgagacaggagaacaagggcaagatgatcgtcactgtgttcccaagtggcggcgagagatacatcaactccgacctctttgcagatgtgcgagaggagtgcattgccatgacattttga

SEQ ID NO: 1015 - protein, 349 aa, Zea mays
MDGEEVGRRGIPTLLKPSSSSSDGSAGEQEHIASDVTQLIGWTPLVELKRIASEAGIDARIVGKMEAYQPLCSIKDRSALRMIEDAEERGLISPGVTTLVEPTSGNMGLGLVLFAIQRGYRLIAVMPAKYSLDKQILLRFMGAELYLTDPALGFPGMFDKVEQLRKQLPNVHVLNQVTNKANSEAHFRLTGPEIWKDTAGKVDVFVAGSGTGGTVSGVGKYLKMQKPGVKIICVEPAESPVISGGAPGKHKIQGVGPGFLPEVLDTSVIDETVTVSTEEAMANARRLAREEGLLVGISSGANLAACLKVASRQENKGKMIVTVFPSGGERYINSDLFADVREECIAMTF

SEQ ID NO: 1016 - DNA, 1047 bp, Brassica napus
  CDS (1)..(1047)
atggagtactcaatcaaggatgacgtgactcaattgataggtaacactccaatggtgtacctaaacaacattgtagatggctgcgttgcacgtatcgccgctaagcttgagatgatgcagccttgctctagtgtcaaggacagaattgcttatggaatgattaaagatgctgaagacaagggactcatttctcccggcaagaacatattgattgagccaacatctggtaacaccgggattggtatagcaatggtcggagcagctagaggttacaaagttgtgattacaatgcctgcatcagtgagcattgagagaagaatcattcttctagcattaggtgcagagcttcacctcacggatccaagcaaaggcgttataggagtcattgtcaaagctgaagagatattaagcaaaactccagatggtttcatgctagagcaattcagaaacccttcaaacccacaatctcattacgaaaccactggtccagagatatggagagactgtgcagagaaagtagatatgttggttgttggtgttgggactggtggaacgatctctggagcagggaagttcctcaaggagaagaataaagactttaaggtttatggggtggaacctgcagagagtgctgtactcaagcttacaactcttgttcttgagcattcaactctaatatttaaacaaaaaaaaattattaatattagaatcaaagttaatattagaaggcaacctggtccacatgggatccaaggtattggagctggaatcatcccagacaatttggattttagcgttcttgatgaagtcattcaagtgacaagtgtggaagcaattgaaacagccaaacttcttgccctgaaagaaggattattggttggaatatcatccggagctgctgcagccgctgctataaaagtggcaaaacggccagaaaacgccgggaagctcatagttgtggttttcccgagtggcggggaacgttacttatcgactccaatgttcgactcgatcagatgcgaagcagagaatttggcaattgaatga

SEQ ID NO: 1017 - protein, 348 aa, Brassica napus
MEYSIKDDVTQLIGNTPMVYLNNIVDGCVARIAAKLEMMQPCSSVKDRIAYGMIKDAEDKGLISPGKNILIEPTSGNTGIGIAMVGAARGYKVVITMPASVSIERRIILLALGAELHLTDPSKGVIGVIVKAEEILSKTPDGFMLEQFRNPSNPQSHYETTGPEIWRDCAEKVDMLVVGVGTGGTISGAGKFLKEKNKDFKVYGVEPAESAVLKLTTLVLEHSTLIFKQKKIINIRIKVNIRRQPGPHGIQGIGAGIIPDNLDFSVLDEVIQVTSVEAIETAKLLALKEGLLVGISSGAAAAAAIKVAKRPENAGKLIVVVFPSGGERYLSTPMFDSIRCEAENLAIE

SEQ ID NO: 1018 - DNA, 969 bp, Brassica napus
  CDS (1)..(969)
atggcatctcgtattgctaaagatgttaccgaattgattgggaacactccattggtgtatctgaacaatgtggctgaaggatgtgttggtcgtgtcgctgctaagctcgagatgatggagccttgctccagtgtcaaagacaggattggttttagcatgatctctgatgcagagaaaaagggtctgataaagccaggagagagtgtgctgattgagccaacgagtggaaacaccggagttgggttagcgttcacggcggctgctaagggctacaagctcatcattacaatgccagcttcaatgagtgtggagagaaggatcattctcttagcttttggagttgagttggtcttaactgaccctgctaagggcatgaaaggcgctatcgcaaaggccgaagagattttagccaaaacacccaatggttacatgctccaacagtttgagaaccctgccaacccaaagatacactatgagactactggacctgagatatggaaaggcactgatggaaaaatcgatggatttgtttctgggattggtactggtggtaccatcacaggtgcagggaagtatctcaaggaacagaaccctaacgttaagctgtatggagtggagccaattgaaagtgctattctatccggtgggaagccaggccctcacaagattcaagggattggtgctggctttataccaagtgtgttggaggttgatcttatagatgaagttgttcaagtttcaagtgatgaatccatcgacatggcaaggcttcttgctcgtaaagaaggtcttcttgtgggaatatcatctggtgcagcagctgccgcagcaatcaaacttgcaaagaggccagaaaacgccgggaagcttttcgtggcggtgttcccgagtttcggagagaggtacctgtcgaccgtactattcgatgccacaaggaaagaagcagaatccatgaccttcgaggcttga

SEQ ID NO: 1019 - protein, 322 aa, Brassica napus
MASRIAKDVTELIGNTPLVYLNNVAEGCVGRVAAKLEMMEPCSSVKDRIGFSMISDAEKKGLIKPGESVLIEPTSGNTGVGLAFTAAAKGYKLIITMPASMSVERRIILLAFGVELVLTDPAKGMKGAIAKAEEILAKTPNGYMLQQFENPANPKIHYETTGPEIWKGTDGKIDGFVSGIGTGGTITGAGKYLKEQNPNVKLYGVEPIESAILSGGKPGPHKIQGIGAGFIPSVLEVDLIDEVVQVSSDESIDMARLLARKEGLLVGISSGAAAAAAIKLAKRPENAGKLFVAVFPSFGERYLSTVLFDATRKEAESMTFEA

SEQ ID NO: 1020 - DNA, 1290 bp, Brassica napus
  CDS (1)..(1290)
atggcgatgctcatggcttcaaggtttaacagtgaagctaagatcgcgtctcgatgcctgtcaacactcttgagaaaccaaagagtcctgacagcctcaccatcatcatcatccatggcatccgcatcttcttcctctgctctcctccttaacccgttgacttcctccactctccgtcacttcagatcctctccggagatctcttctctctccttctctgcttccggcttccctctagcgatgaagagccagcagagtcggagctatggagatgtctcgaaacgagatccgtgcgaggccgttaagcgtgagaatggagctgatgggctcaacatcgctgagaatgtgtctcagctcattgggaaaactcctatggtgtacttgaacagtatggcaaagggttgtgtagcgaacattgctgctaagctcgagatcatggagccttgttgcagtgtcaaagataggattgggtacagtatggttactgatgctgagcaaaaaggattcatatcacctggaaagagtgttcttgtggaacctacaagtggaaacacgggtattggacttgcgtttatcgctgcttcaagaggctacagacttatcttgacaatgccctcatccatgagtatggagagaagagttcttttgaaggcgtttggagctgagcttgtgctaactgatcctgcaaaaggcatgaccggtgcagttcagaaggctgaagaaatcttgaaatcaactcctgatgcttacatgctccaacagtttgacaaccctgccaatccaaagatccattatgagactactggtcctgagatatgggaagatacaaagggaaaggtggatatattcgttgcagggattggaactggtgggactatcactggtgttggtcggttcattaaagagaaaaaccccaaagtgcaggttattggtgttgaaccaactgaaagcgacatactttctggtggcaaaccgggacctcacaagattcaagggattggagctggatttatacctaagaatttggatcgggcaattatggatgaagtcatagcgatttcaagtgaggaagctatagaaactgcaaagcaactagctctcaaagaaggcttgatggttggaatatcatctggagctgctgctgctgctgcaatcatggtagcaaagagacctgagaatgcagggaaactcattgctgttgtcttcccgagctttggagagcgatatttatcaacccctctgttccagtctatccgggaagaggttgagaaaatgcagcctgagatatga

SEQ ID NO: 1021 - protein, 429 aa, Brassica napus
MAMLMASRFNSEAKIASRCLSTLLRNQRVLTASPSSSSMASASSSSALLLNPLTSSTLRHFRSSPEISSLSFSASGFPLAMKSQQSRSYGDVSKRDPCEAVKRENGADGLNIAENVSQLIGKTPMVYLNSMAKGCVANIAAKLEIMEPCCSVKDRIGYSMVTDAEQKGFISPGKSVLVEPTSGNTGIGLAFIAASRGYRLILTMPSSMSMERRVLLKAFGAELVLTDPAKGMTGAVQKAEEILKSTPDAYMLQQFDNPANPKIHYETTGPEIWEDTKGKVDIFVAGIGTGGTITGVGRFIKEKNPKVQVIGVEPTESDILSGGKPGPHKIQGIGAGFIPKNLDRAIMDEVIAISSEEAIETAKQLALKEGLMVGISSGAAAAAAIMVAKRPENAGKLIAVVFPSFGERYLSTPLFQSIREEVEKMQPEI

SEQ ID NO: 1022 - DNA, 1107 bp, Brassica napus
  CDS (1)..(1107)
atggctactatctggaggaggttgctgaagacagagaccatcccccgcatcagccaaagcacgaggaagctcttctccaccgacggatcttcctctttcgctgaaagactcagaaaccttcccaaagagttccctgcaactcaggccaaacgcgatgcttctctgctcatcggaagaactccactcgtgttcctcaacagagtcactgaaggctgtggagcttatattgctgccaagcaagaacattttcagcctacttgtagcgtcaaagacagaccagctttagctatggttgcagatgcagagaagaaaaaccttatcactcctggaaaaacaacattgatagagccaacttcaggaaacatgggaataagtatggctttcatggcggctttgaaagggtacaagattataatgacaatgccttcttacacaagtttggagaggagagtgactatgagatcctttggtgcagagcttgtcctcactgatccagccaaaggaatgggtggaaccgttaagaaagcttatgatctccttgagagtactcctgatgctcatatgttgcaacagtttgctaatccagcaaacactcagattcattttgatacaactggtcctgagatttgggaagatacacttgggaacgttgatatctttgtgatgggaattggcagtggaggcactgtctctggtgttggccaataccttaaatctaaaaacccaaatgtcaagatatatggagtggagcctgctgaaagcaacatactcaacggtggcaagccaggtccacatgctatcacagggaatggggttggatttaaaccggatatcttggatatggatgttatggagagcgttcttgaggttagtagtgaggatgctataaaaatggctagagaattggcattaaaagaaggtctcatggttgggatatcatcgggggctaacaccgtggcagcaattagactggcgaaaatgccagagaacaaaggcaaactcattgtgacgattcatgcgagctttggagagagatatctgtcgtctattctgtttgatgagctgaggaaagaagcagaagcaatgaagccagtttcagtggactga

SEQ ID NO: 1023 - protein, 368 aa, Brassica napus
MATIWRRLLKTETIPRISQSTRKLFSTDGSSSFAERLRNLPKEFPATQAKRDASLLIGRTPLVFLNRVTEGCGAYIAAKQEHFQPTCSVKDRPALAMVADAEKKNLITPGKTTLIEPTSGNMGISMAFMAALKGYKIIMTMPSYTSLERRVTMRSFGAELVLTDPAKGMGGTVKKAYDLLESTPDAHMLQQFANPANTQIHFDTTGPEIWEDTLGNVDIFVMGIGSGGTVSGVGQYLKSKNPNVKIYGVEPAESNILNGGKPGPHAITGNGVGFKPDILDMDVMESVLEVSSEDAIKMARELALKEGLMVGISSGANTVAAIRLAKMPENKGKLIVTIHASFGERYLSSILFDELRKEAEAMKPVSVD

SEQ ID NO: 1024 - DNA, 1191 bp, Brassica napus
  CDS (1)..(1191)
atggctgctgcgacatcttcctctgctttcctccttaacccggggacttctcgccaccgtcctctcaaatactcccctgagctctcttctctctccttatcctccagaaaggccgctactttcgatgttctcccgtctcctctctccctcaagagacagagccagagatgtagtaacggtgttgtgtgcaaggctgtgtctgttaagcccgaagctggggtcgaaagtctcaacatcgccgagaatgccgctcagcttattgggaaaactccaatggtgtacttgaacaatatagtcaaaggctgtgttgcaagtgttgctgctaagcttgagatcatggagccttgttgcagtgtcaaagataggattgggtatagtatgatcacagatgctgaggaaaaaggacttatcacacctggaaagagtgttcttgtggaatctacaagtggaaacacagggattggacttgcgtttattgctgcttcaaaagggtataagcttatcttgacaatgccagcgtccatgagtttggaaagaagggttcttctgagggcgtttggagctgagcttgtgttgactgaacctgcaaagggtatgactggagctattcagaaggctgaagaaatcttgaagaacactcctgactcatacatgctccaacagtttgacaacccagccaatcccaagattcattacgagactactggtcctgagatttgggaagatacaagaggcaaggtggatatactggttgcgggaattggaactggtggaaccatcactggtgttggccggtacattaaagaaaggaaacctgaactgaaggtcattggtgttgaacccacagaaagtgcaatacttgctggaggaaaacctggacctcacaaaattcaagggattggagctggatttattcctaagaatctggatcagactgttgtagatgaatacatagcgatttcgagtgaggaagctattgaatttgcaaagcaactagctctccaagaaggcttgttggttggtatatcttctggagctgctgctgctgctgcaatccaggtcgcaaagagacctgaaaatgccgggaaactcatagctgttgtgttcccgagctttggggaacgttacctctcgaccctgctttttcagtctatccgagatgagtgcgagaatatgcagcctgagctttga

SEQ ID NO: 1025 - protein, 396 aa, Brassica napus
MAAATSSSAFLLNPGTSRHRPLKYSPELSSLSLSSRKAATFDVLPSPLSLKRQSQRCSNGVVCKAVSVKPEAGVESLNIAENAAQLIGKTPMVYLNNIVKGCVASVAAKLEIMEPCCSVKDRIGYSMITDAEEKGLITPGKSVLVESTSGNTGIGLAFIAASKGYKLILTMPASMSLERRVLLRAFGAELVLTEPAKGMTGAIQKAEEILKNTPDSYMLQQFDNPANPKIHYETTGPEIWEDTRGKVDILVAGIGTGGTITGVGRYIKERKPELKVIGVEPTESAILAGGKPGPHKIQGIGAGFIPKNLDQTVVDEYIAISSEEAIEFAKQLALQEGLLVGISSGAAAAAAIQVAKRPENAGKLIAVVFPSFGERYLSTLLFQSIRDECENMQPEL

SEQ ID NO: 1026 - DNA, 969 bp, Brassica napus
  CDS (1)..(969)
atggcatctcgtattgctaaagatgttaccgaattgattgggaacactccattggtgtatctgaacaatgtggctgaaggatgtgttggtcgtgtcgctgctaagctcgagatgatggaaccttgctccagtgtcaaagacaggattggttttagcatgatctctgatgcagaggaaaagggtctgataaagccaggagagagtgtgctgattgagccaacgagtggaaacaccggagttggtttagccttcacggctgctgctaaggggtacaagctcatcattactatgccagcttcaatgagtgtggagagaaggatcattctcttagcttttggagttgagttggtcttaactgaccctgctaagggcatgaaaggagctatcgcaaaggccgaagagattttagccaaaacacccaatggttacatgctccaacagtttgagaaccctgccaacccaaagatacactatgagactactggacctgagatatggaaaggcactgatggaaaaatcgatggatttgtttctgggattggtactggtggtaccatcacaggtgcagggaagtatctcaaggaacagaaccctaacgttaagctgtatggagtggagccaattgaaagtgctattctatccggtgggaagccaggccctcacaagattcaagggattggtgctggctttataccaagtgtgttggaggttgatcttatagatgaagttgttcaagtttcaagtgatgaatccatcgacatggcaaggcttcttgctcttaaagaaggtcttcttgtgggaatatcatctggtgcagcagctgccgcagcaatcaaacttgcaaagaggccagaaaacgccgggaagcttttcgtggcggtgttcccgagtttcggagagaggtacctgtcgaccgtactattcgatgccacaaggaaagaagcagaatcaatgaccttccaggcttga

SEQ ID NO: 1027 - protein, 322 aa, Brassica napus
MASRIAKDVTELIGNTPLVYLNNVAEGCVGRVAAKLEMMEPCSSVKDRIGFSMISDAEEKGLIKPGESVLIEPTSGNTGVGLAFTAAAKGYKLIITMPASMSVERRIILLAFGVELVLTDPAKGMKGAIAKAEEILAKTPNGYMLQQFENPANPKIHYETTGPEIWKGTDGKIDGFVSGIGTGGTITGAGKYLKEQNPNVKLYGVEPIESAILSGGKPGPHKIQGIGAGFIPSVLEVDLIDEVVQVSSDESIDMARLLALKEGLLVGISSGAAAAAAIKLAKRPENAGKLFVAVFPSFGERYLSTVLFDATRKEAESMTFQA

SEQ ID NO: 1028 - DNA, 1293 bp, Brassica napus
  CDS (1)..(1293)
atggcggtgctcatggcttcaaggtttaacagtgaagctaggatcgcgtctcgatgcctttcaacactcttgagaaatcaaagagtcctgatagcctcaccatcatcatcatccatggcatccgcatcttcttcctcttctctcctccttaacccgttgacttcttccactctccgtcacttcagatcctctccggagatctcttctctctccttctctgcttccggcttccctctagcgatgaagagccagcagcagagtcggagctatggagatgtctcgaaacgagatccgtgcgaggccgttaagcgtgagaatggagctgatgggctcaacatcgctgagaatgtgtctcagctcattgggaaaactcctatggtgtacttgaacagtatggcaaagggttgtgtagcgaacattgctgctaagctcgagatcatggagccttgttgcagtgtcaaagataggattgggtacagtatggttactgatgctgagcaaaaaggattcatatcacctggaaagagtgttcttgtggaacctacaagtggaaacacgggtattggacttgcgtttatcgctgcttcaagaggctaccgacttatcttgacaatgccctcatccatgagtatggagagaagagttcttctaaaggcgtttggagctgagcttgtgctgactgatcctgctaaaggcatgaccggtgcagttcagaaggctgaggaaatcttgaaatcaactcctgatgcttacatgctccaacagtttgacaaccctgccaatccaaagatccattatgagactactggtcctgagatatgggaagatacaaagggaaaggtggatatatttgttgctgggattggaactggtgggactatcactggtgttggtcggttcattaaagagaaaaaccccaaagtgcaggttattggtgttgaaccaactgaaagcgacatactttctggtggcaaaccgggacctcacaagattcaagggattggagctggatttatacctaagaatttggatcgggcaattatggatgaagtcatagcgatttcaagtgaggaagctatagaaactgcaaagcaactagctctcaaagaaggcttgatggttggaatatcatctggagctgctgctgctgctgcaatcatggtagcaaagagacctgagaatgcagggaaactcattgctgttgttttcccgagctttggagagcgatatttatcaacccctctgttccagtctatccgggaagaggttgagaaaatgcagcctgagatatga

SEQ ID NO: 1029 - protein, 430 aa, Brassica napus
MAVLMASRFNSEARIASRCLSTLLRNQRVLIASPSSSSMASASSSSSLLLNPLTSSTLRHFRSSPEISSLSFSASGFPLAMKSQQQSRSYGDVSKRDPCEAVKRENGADGLNIAENVSQLIGKTPMVYLNSMAKGCVANIAAKLEIMEPCCSVKDRIGYSMVTDAEQKGFISPGKSVLVEPTSGNTGIGLAFIAASRGYRLILTMPSSMSMERRVLLKAFGAELVLTDPAKGMTGAVQKAEEILKSTPDAYMLQQFDNPANPKIHYETTGPEIWEDTKGKVDIFVAGIGTGGTITGVGRFIKEKNPKVQVIGVEPTESDILSGGKPGPHKIQGIGAGFIPKNLDRAIMDEVIAISSEEAIETAKQLALKEGLMVGISSGAAAAAAIMVAKRPENAGKLIAVVFPSFGERYLSTPLFQSIREEVEKMQPEI

SEQ ID NO: 1030 - DNA, 1119 bp, Glycine max
  CDS (1)..(1119)
atggcttccctcatgagcaccatcctcatgcaaaggtcttcttctacttcacttgctgctgggaggttgttctccacaacaacagcaaccattattgattccccttcacttgctcagagaatcagagatttgcctaaggacctccctggaaccaacatcaagaaacatgtttctcagctcattgggaggactccacttgtttatcttaacaaagtcactgaaggatgtggagcttatgttgctgtcaagcaagagatgatgcaacctactgccagcatcaaagacagaccagcatatgcaatgatcacagatgctgaggaaaagaatctgataactcctggaaagacaactctgattgagcccacgtcaggcaatatgggtatcagcatggcatttatggccgccatgaagggatacaagatggttttgaccatgccctcttacacaagcttggaaagaagggtgaccatgagagtgtttggagctgaattaatcctcactgatccagccaaaggaatgggaggaacagtaaagaaggcttatgaacttttggaaaacacaccaaatgcccacatgctgcaacaattttcaaaccctgccaatactcaggtgcattttgaaacaacaggtcctgagatatgggaggatacaaatggacaagttgacatatttgttatgggaataggtagtggaggcacagtctctggggttggacaatatcttaaatccaaaaatcctaatgttaagatatatggagtggagccaagtgaaagcaatgtgctgaatggtggtaaacctggtcctcatcatataactggcaatggagttggattcaaaccagacatattggacatggatgttatggaaaaagttcttgaagttagcagtgaagatgcagttaacatggctagggtgttggcattgaaggaaggactcatggtagggatatcatctggagctaacacagttgcagctctcagattggctcagctgcctgagaacaaaggcaaacttattgtgactgttcatccaagtttcggcgaacgatacctgtcatctgtcctgttccaagagcttcgtcaagaagctgaaaacatgcagccagtagcagttgattaa

SEQ ID NO: 1031 - protein, 372 aa, Glycine max
MASLMSTILMQRSSSTSLAAGRLFSTTTATIIDSPSLAQRIRDLPKDLPGTNIKKHVSQLIGRTPLVYLNKVTEGCGAYVAVKQEMMQPTASIKDRPAYAMITDAEEKNLITPGKTTLIEPTSGNMGISMAFMAAMKGYKMVLTMPSYTSLERRVTMRVFGAELILTDPAKGMGGTVKKAYELLENTPNAHMLQQFSNPANTQVHFETTGPEIWEDTNGQVDIFVMGIGSGGTVSGVGQYLKSKNPNVKIYGVEPSESNVLNGGKPGPHHITGNGVGFKPDILDMDVMEKVLEVSSEDAVNMARVLALKEGLMVGISSGANTVAALRLAQLPENKGKLIVTVHPSFGERYLSSVLFQELRQEAENMQPVAVD

SEQ ID NO: 1032 - DNA, 1170 bp, Glycine max
  CDS (1)..(1170)
atggcttctgcttccttaatcaactcgttgacttgttcttcgcgtgctcccactcagcactgttccactttcacccgcaccaccgccgccacgtcactgagacaatttaacagccactgtcggagaccactcgcgacgaggatctcgccgccttccaccgttgtctgcaaagctgtctccgttaagccccaaaccgaaatcgaaggtctcaacattgctgaagatgtcacccagctcatagggaaaacgccaatggtttacctgaacaatatcgtgaagggttctgtggccaatattgctgccaagcttgagattatggagccctgttgtagtgtaaaggacaggattggttttagtatgataaatgatgctgagcagagaggagctataacacctgggaagagtatattggtggaacctactagcggcaacaccggaattggtcttgcctttatagcagcttcaagaggttataaactcattttgacaatgcctgcttcaatgagtttagaaagacgagttctcttgaaagcatttggggccgagcttgttttgactgatgcagcaaagggcatgaatggagcagttcaaaaagctgaagaaattttaaaaagtacccccaatgcatacatgcttcaacaatttgataatccttcaaatcctaagattcattatgagacaactggcccagagatatgggaagatacaagaggaaagatagatattttagttgcaggaattggaaccggtggaactgtttctggagctggccaattcctaaaacaacaaaatccgaaaatacaggttattggcgtagagcctctggaaagcaacatacttacaggtggaaagccaggacctcacaaaattcagggtattggggctggttttgtgcccaggaatttggatcaagatgtgcttgatgaagttatagcgatatcaagtgatgaagcagttgaaactgcaaagcaattagcactccaggaaggcttgctggtgggaatttcttcaggagctgcagctgcagctgctttgaaggttggaaagaggcctgagaatgcaggaaagcttattggggttgtcttcccaagctttggtgaaagatatttgtcaactattcttttccagtcaatacgggaagaatgcgagaaaatgcaacctgagccatga

SEQ ID NO: 1033 - protein, 389 aa, Glycine max
MASASLINSLTCSSRAPTQHCSTFTRTTAATSLRQFNSHCRRPLATRISPPSTVVCKAVSVKPQTEIEGLNIAEDVTQLIGKTPMVYLNNIVKGSVANIAAKLEIMEPCCSVKDRIGFSMINDAEQRGAITPGKSILVEPTSGNTGIGLAFIAASRGYKLILTMPASMSLERRVLLKAFGAELVLTDAAKGMNGAVQKAEEILKSTPNAYMLQQFDNPSNPKIHYETTGPEIWEDTRGKIDILVAGIGTGGTVSGAGQFLKQQNPKIQVIGVEPLESNILTGGKPGPHKIQGIGAGFVPRNLDQDVLDEVIAISSDEAVETAKQLALQEGLLVGISSGAAAAAALKVGKRPENAGKLIGVVFPSFGERYLSTILFQSIREECEKMQPEP

SEQ ID NO: 1034 - DNA, 1122 bp, Hordeum vulgare
  CDS (1)..(1122)
atggagaggatggtgatgaggctcatgaggaataagtctcttctcgccggagcctctagccgcggcggcggaggactagcctcctcctccattgtcgactcttcccccttctccaccctgcagcaacagcagcagcaggaagaccccggtgtgctcaacatcagggacaccgccgcccacctcatcgggcggacgccgctggtgtacctgaacaaggtgacggaggggtgcggcgcacgggtcgccgccaagctcgagttcctccagccctccttcagcgtcaaggacaggccggcaatctccatgattgaagatgcggagaagaagggattgatcaccccgggcaagacgacgctgatcgagcctacgtccggcaacatgggcatcggcctggcgttcatggcggcgctcaaagggtacgagctcgtgctgacgatgccgtcctacaccagcctcgagcggagggtggtcatgaaggccttcggcgcgcagctcgtgctcaccgacccggccaaagggatggggggcaccgtgaggaaggccacccagctctatgacaaccatcctagcgcattcatgctccagcagttcgagaaccctgccaacgtacaggtgcactacgagaccaccggtccagagatatgggaggacacgcttgggcaggtcgacatcttcgtcatgggcatcgggagcggcggtactgtcaccggcgtcggcaagtacctcaaggagaagaaccccaatgccaagatctatggagttgaaccagccgaagcaaatgttctcaatggtggcaagccagggcctcacctcatcactggaaatggagtgggattcaagccagacattttggacatggatataatggagaaggttcttgaggtgaaaggtgaggatgctgtcaagatggcacaacaattggcgctgcaagagggtctgctggtggggatatcatcaggagccaacacggtggcagcgattgaacttgcaaagaggcccgaaaacaaagggaagctcatcgtgactgttcatccaagcgcgggagagcgatacttatcgtcggcgctgttcgagggtctgaggaaggaggcggaggccatgcagccagtgccagtggactaa

SEQ ID NO: 1035 - protein, 373 aa, Hordeum vulgare
MERMVMRLMRNKSLLAGASSRGGGGLASSSIVDSSPFSTLQQQQQQEDPGVLNIRDTAAHLIGRTPLVYLNKVTEGCGARVAAKLEFLQPSFSVKDRPAISMIEDAEKKGLITPGKTTLIEPTSGNMGIGLAFMAALKGYELVLTMPSYTSLERRVVMKAFGAQLVLTDPAKGMGGTVRKATQLYDNHPSAFMLQQFENPANVQVHYETTGPEIWEDTLGQVDIFVMGIGSGGTVTGVGKYLKEKNPNAKIYGVEPAEANVLNGGKPGPHLITGNGVGFKPDILDMDIMEKVLEVKGEDAVKMAQQLALQEGLLVGISSGANTVAAIELAKRPENKGKLIVTVHPSAGERYLSSALFEGLRKEAEAMQPVPVD

SEQ ID NO: 1036 - DNA, 1170 bp, Hordeum vulgare
  CDS (1)..(1170)
atggcgtcgtggacaccatcgcccgtcgccgccgccgcccaggcccagctcggcttcccggccgcccgcccggcgcaggcgcggccggccgtcctcccgccgcctctcgcccgcagattccccgccggctcctccctcctcgccgtcaacgcccccgccgcctccccctcgtggaggcgccatgccctcgccaccgaggtcgagggcctcaacatcgccgacgacgtcacccagctcatcggcaagacgcccatggtgtatctcaacaggatcgtcaagggctgcgtcgccaacgtcgccgccaagctcgagattatggagccctgttgcagtgtcaaggacaggataggtatcagtatgatttccgacgctgaagagaagggcttgataacacccggaaagagtgttttggttgaagcaacaagtggaaacacaggcattggtcttgctttcattgctgcttccaggggatataagttgatactgacaatgcccacatcaatgagcatggagaggagagttctgctcaaggcttttggcgctgaacttgtgcttacagatgctgcaaaagggatgaaaggggccctagataaggctacagagatcttaaataagacacccaattcatacatgcttgagcagtttgacaaccctgccaacccaaaggtacactatgagactactgggcctgaaatctgggaggattcaaaaggaaaggttgatatattcattggtggaattggaacgggcggaacaatatctggtactggtcgtttcctgaaggagaaaaatcccgacgtcaaggttattggtgttgaacctactgaaagcaacatactctctggtggtaaacctggcccacataagattcaaggcattggagcaggatttgttcctaggaatttggacagtgatgttctcaatgaagtaattgagatatcaagcgatgaggctgttgagacagcaaagcagttggctcttcaggaaggattgctggtcgggatctcgtctggggcagccgcggccgctgccataaaggtcgcccagagacccgagaacgccgggaagctgatagtggtggtgttcccgagcttcggcgagaggtacctgtcgtcggtgctgttccagtccatcagggaagagtgcgagaagatggaggccgaagcgtga

SEQ ID NO: 1037 - protein, 389 aa, Hordeum vulgare
MASWTPSPVAAAAQAQLGFPAARPAQARPAVLPPPLARRFPAGSSLLAVNAPAASPSWRRHALATEVEGLNIADDVTQLIGKTPMVYLNRIVKGCVANVAAKLEIMEPCCSVKDRIGISMISDAEEKGLITPGKSVLVEATSGNTGIGLAFIAASRGYKLILTMPTSMSMERRVLLKAFGAELVLTDAAKGMKGALDKATEILNKTPNSYMLEQFDNPANPKVHYETTGPEIWEDSKGKVDIFIGGIGTGGTISGTGRFLKEKNPDVKVIGVEPTESNILSGGKPGPHKIQGIGAGFVPRNLDSDVLNEVIEISSDEAVETAKQLALQEGLLVGISSGAAAAAAIKVAQRPENAGKLIVVVFPSFGERYLSSVLFQSIREECEKMEAEA

SEQ ID NO: 1038 - DNA, 1128 bp, Hordeum vulgare
  CDS (1)..(1128)
atggcgacgggggagggggcggacgggactggcaggaggggagtcccttccctgctcgccgacggcgggactggcaggaggggagtcccttccctgctcgccgacggcgggactggcaggagaggggtcccttccctgctcgccgacggcggaaccgggcaggaggagcacatcgcctccgacgtcacccagcttatagggtggacgccgctgatcgagctgaagcggatcgccgggaaggacggggtgggtgcccgcatcgtcggcaagatcgaggcctgtcagcccctctgctccgtcaaggaccgcagcgctctcaggatgattgaggatgctgaagagaatgggctgatttcacccggtgtcacgactctagtcgaggcgaccagcggcaatttgggcctaggattggtcctggttgctcttagcaaagggtacaggttcgttgcggtgatgccgggccaatactcgcttgataagcagatcttgttgagatacatgggcgctgagttgttcataaccgatccagcgcttgggtttccgggattagttgacaaggtcgaacagctcaagaaagaattacccaacgtacatgttcttgatcagttctcgaatccagcaaaccccgaggcacacatcagatggactggacctgagatttggaaggatactgctggaaaggtggacatatttgttgccggttcaggctcaggaggcacagtatctggtgttgggaagtatttgaaaatgcaaaatccaaatgtgaagatcatttgtgttgagcctgcagagagcccagttatttcaggtggggagcgaggcaaacataaaatccagggaataggaccaggattcgtgcctgaaatcttggacacctcggtcatcgacgaggtgcttaccgtgaccactcaggacgcaatgacgaatgccaggaggttggcaatggaagaaggccttcttgtgggcatatcttctggggcaaacttggcggcttgcttgaaggtcgcggcgagagaagagaacaaggggaagatgattgtgaccatgttcccgagcgggggcgagagatacatgaactctgacctctttgcagctgtaagagaggagtgtattgccatgaccttttaa

SEQ ID NO: 1039 - protein, 375 aa, Hordeum vulgare
MATGEGADGTGRRGVPSLLADGGTGRRGVPSLLADGGTGRRGVPSLLADGGTGQEEHIASDVTQLIGWTPLIELKRIAGKDGVGARIVGKIEACQPLCSVKDRSALRMIEDAEENGLISPGVTTLVEATSGNLGLGLVLVALSKGYRFVAVMPGQYSLDKQILLRYMGAELFITDPALGFPGLVDKVEQLKKELPNVHVLDQFSNPANPEAHIRWTGPEIWKDTAGKVDIFVAGSGSGGTVSGVGKYLKMQNPNVKIICVEPAESPVISGGERGKHKIQGIGPGFVPEILDTSVIDEVLTVTTQDAMTNARRLAMEEGLLVGISSGANLAACLKVAAREENKGKMIVTMFPSGGERYMNSDLFAAVREECIAMTF

SEQ ID NO: 1040 - DNA, 978 bp, Hordeum vulgare
  CDS (1)..(978)
atgggggaggcttcgacgccggcgatcgccagggatgtcaccgagctgatcgggaacacgccgctggtgtacctcaacaaggtgacggacgggtgcgtggggcgcgtcgccgccaagctcgagtccatggagccctgctccagcgtcaaggacaggattgggtacagcatgatcaccgacgcagaggagaaggggttcatcgtcccaggcaagagtgtgctgattgagccaaccagtggcaacacaggcattgggctggccttcatggctgctgccaagggttacagacttgtactcacgatgcccgcctccatgagtatggagaggagaatcatcctgaaggcttttggtgctgagctgatcctcacagacccactcttggggatgaaaggagctgtccaaaaggccgaagagctggcagcgaagacacccaactcatacatccttcagcaatttgagaatgctgctaacccaaagattcactatgagacaaccggacctgaaatctggaaaggcacaggaggaaagatcgatggccttgtttctggcattgggacaggtggtaccattactggatctggaaaatacctcaaagagcaaaatcctaatatcaagctctacggcgtggagcctaccgagagtgctgtcttaaatggtggaaagcctggaccacacaagatccaaggaattggagctggtttcatccctggtgtcttggatgttgacatcattgatgaaaccgtacaggtttcaagtgatgagtccattgagatggcaaagtctcttgcattgaaagaaggattgctggttgggatctcttctggtgcggctgcagctgcggcaatcaaggttgctcagaggcctgaaaatgcagggaaactctttgttgttgtattcccaagcttcggagagcgctacctttcgtcggtgctcttccactccatcaagaaggaggccgagagcatggtggtggagtga

SEQ ID NO: 1041 - protein, 325 aa, Hordeum vulgare
MGEASTPAIARDVTELIGNTPLVYLNKVTDGCVGRVAAKLESMEPCSSVKDRIGYSMITDAEEKGFIVPGKSVLIEPTSGNTGIGLAFMAAAKGYRLVLTMPASMSMERRIILKAFGAELILTDPLLGMKGAVQKAEELAAKTPNSYILQQFENAANPKIHYETTGPEIWKGTGGKIDGLVSGIGTGGTITGSGKYLKEQNPNIKLYGVEPTESAVLNGGKPGPHKIQGIGAGFIPGVLDVDIIDETVQVSSDESIEMAKSLALKEGLLVGISSGAAAAAAIKVAQRPENAGKLFVVVFPSFGERYLSSVLFHSIKKEAESMVVE

SEQ ID NO: 1042 - DNA, 972 bp, Brassica napus
  CDS (1)..(972)
atggaagaacggtacatgatcaagaacgatgtcactgaattgattggtaacacaccaatggtgtacctaaataaaattgttgacggttgcgtcgcacgtattgctgccaagcttgagatgatggagccttgctctagcataaaagacagaatcgcttatagtatgatcaaagatgcagaagacaaaggattgattactcccggaaagagtacattgattgaggcaaccggcggtaatactgggattggtttagccagcataggagctgcaagaggctacagagtgatacttttgatgccttcaacgatgagcttagagaggagaatcattttgagagcattaggtgcagaggttcatcttacagatatgaacataggcattaaaggaatgttggagaaagctgaagagatattaagcaaaactcctggtggttacataccacaccagtttctaaatcctgagaaccctgagattcattacagaacaacgggtccagagatatggagagattcagcaggggaagtagatattttggtagctggggctggcactggtggaacggttagtggaactgggaggtttcttaagaagatgaacaaaaacattaaggtttgtgtggtggaacctacagaaagtgcagtacttagcggaggagaaccaggtccacatttgatccaggggattggtcctggtgtcattccaaccaatttggatttaagcattgttgatgaagtcattcaggtgacaagtgaagaagctattgaaacagccaagcttcttgctcttaaagaaggattattggtgggaatatcgtcaggggctgcagcagccgctgcattaaaggttgctaaacggccagaaaacgcaggcaaacttattgtggtgatttttcccagtggaggagagcgttatttatcaacagaactgttcgagtcggtcagatatgaagcagagcatttgtcgatcgattga

SEQ ID NO: 1043 - protein, 323 aa, Brassica napus
MEERYMIKNDVTELIGNTPMVYLNKIVDGCVARIAAKLEMMEPCSSIKDRIAYSMIKDAEDKGLITPGKSTLIEATGGNTGIGLASIGAARGYRVILLMPSTMSLERRIILRALGAEVHLTDMNIGIKGMLEKAEEILSKTPGGYIPHQFLNPENPEIHYRTTGPEIWRDSAGEVDILVAGAGTGGTVSGTGRFLKKMNKNIKVCVVEPTESAVLSGGEPGPHLIQGIGPGVIPTNLDLSIVDEVIQVTSEEAIETAKLLALKEGLLVGISSGAAAAAALKVAKRPENAGKLIVVIFPSGGERYLSTELFESVRYEAEHLSID

SEQ ID NO: 1044 - DNA, 978 bp, Triticum aestivum
  CDS (1)..(978)
atgggggaggcgtcatctccggcgatcgccaaggatgtcaccgagctgatcgggaacacgccgctggtgtacctcaacaaggtgaccgacgggtgcgtggggcgcgtcgccgccaagctcgagtccatggagccctgctccagcgtcaaggacaggattggatacagcatgatcaccgacgcggaggagaaggggttcatcgtcccaggcaagagtgtcctgattgagccaaccagtggcaacacaggcattgggctggccttcatggctgctgccaagggttacagacttgtactcacaatgcccgcatccatgagtatggagaggagaatcatcttgaaggcttttggtgctgagctgatcctcaccgacccactcttgggaatgaaaggagctgtccaaaaggcggaagagctggcagcaaagacacccaactcatacatccttcagcagttcgagaatgctgccaacccaaagattcactatgagacaactgggcctgaaatctggaaaggcacaggaggaaagatcgatggccttgtttctggcatcgggacaggtggtaccattactggaactggaaagtacctcaaagagcaaaactctaacatcaagctctacggtgtggagcctaccgagagtgctgtcttaaatggtggaaagcctggaccacacaagatccaaggaattggagctggttttatccctggtgtcttggatgttgacatcattgatgaaaccatacaggtttcaagtgatgagtctattgagatggcaaagtctcttgcattgaaagaaggattgctggttgggatctcttctggtgctgctgcagctgctgcaatcaaggttgctcagaggcctgaaaatgcagggaaactctttgttgttgtgttcccgagcttcggagagcgctacctttcgtcggtgctcttccactccatcaagaaggaggccgagagcatggtggtcgagtga

SEQ ID NO: 1045 - protein, 325 aa, Triticum aestivum
MGEASSPAIAKDVTELIGNTPLVYLNKVTDGCVGRVAAKLESMEPCSSVKDRIGYSMITDAEEKGFIVPGKSVLIEPTSGNTGIGLAFMAAAKGYRLVLTMPASMSMERRIILKAFGAELILTDPLLGMKGAVQKAEELAAKTPNSYILQQFENAANPKIHYETTGPEIWKGTGGKIDGLVSGIGTGGTITGTGKYLKEQNSNIKLYGVEPTESAVLNGGKPGPHKIQGIGAGFIPGVLDVDIIDETIQVSSDESIEMAKSLALKEGLLVGISSGAAAAAAIKVAQRPENAGKLFVVVFPSFGERYLSSVLFHSIKKEAESMVVE

SEQ ID NO: 1046 - DNA, 1137 bp, Triticum aestivum
  CDS (1)..(1137)
atggagaggatggtgatgaggctgatgaggaacaagaaccagtccctccgccagctgcaaggggccgccgccggcgtgctagcgtcgtcgtcctccgcctcctcggccgccggcgccgccgcgtctcccttctccaccctgcagcagcaggaggaccatcccggggtgctcaacatcagggacaccgccgcccacctcatcggccggacgccgctggtgtacctgaacaaggtgacggaggggtgcggcgcccgcgtcgccgccaagctcgagttcctccagccttccttcagcgttaaggacaggccagcaatctccatgatcgaagatgcggagaagaaggggctgataaccccaggcaagacgacgctgatcgagcctacatccgggaacatgggcatcggcctggcgttcatggctgcactcaaagggtacgagctcgtgctgacgatgccatcatacaccagcctcgagaggagggtggtcatgaaggccttcggtgcgcagctcgtgctcactgacccggcgaaggggatgggaggcaccgtcaggaaagcaacccagctctatgagaaccatcccagcgccttcatgctccagcagttcgagaatcccgccaacgtccaggtgcactacgagaccaccggtccggagatatgggaggacacgctcgggcaggtcgacatcttcgtcatgggaatcggcagcggcggcaccgtcaccggcgtcggcaagtacctcaaggagaagaaccccaacgcaaagatctatggagttgaacctgccgaagcaaatgtcctgaacggtggcaagccagggcctcacctcatcactggaaatggagttggatttaagccagatattttggatatggatataatggagaaggttctagaggtgaaaagcgaggacgccgttaagatggcgcaacagttggcactgcaggagggcctgctggtggggatatcatcaggagccaacacagtggctgcgatcgaactcgcaaagaggccagaaaacaaagggaagctcatcgtgactgttcatccgagcgcgggagagcgatacttatcgtcggcgctattcgagggtctgaggaaggaggctgaggcaatgcagccagtgccagtggactaa

SEQ ID NO: 1047 - protein, 378 aa, Triticum aestivum
MERMVMRLMRNKNQSLRQLQGAAAGVLASSSSASSAAGAAASPFSTLQQQEDHPGVLNIRDTAAHLIGRTPLVYLNKVTEGCGARVAAKLEFLQPSFSVKDRPAISMIEDAEKKGLITPGKTTLIEPTSGNMGIGLAFMAALKGYELVLTMPSYTSLERRVVMKAFGAQLVLTDPAKGMGGTVRKATQLYENHPSAFMLQQFENPANVQVHYETTGPEIWEDTLGQVDIFVMGIGSGGTVTGVGKYLKEKNPNAKIYGVEPAEANVLNGGKPGPHLITGNGVGFKPDILDMDIMEKVLEVKSEDAVKMAQQLALQEGLLVGISSGANTVAAIELAKRPENKGKLIVTVHPSAGERYLSSALFEGLRKEAEAMQPVPVD

SEQ ID NO: 1048 - DNA, 1047 bp, Triticum aestivum
  CDS (1)..(1047)
atgccgccgggggcggaggaggcggagcgggctggccgcagaggggtcccttccctgctcgccggcggcggaaccgggcaggaggagcacatcgccaccgacgtcacccagctgatagggtggacgccgctgatcgagctgaagcggatcgccggcaaggagggggtgggtgcccgcatcgtcggcaagatcgaggcctaccagcccctctgctccgtcaaggaccgcagcgctctcaggatgatagaagacgccgaagagaaagggctgatttcacctggtgtcacgactctagtcgagccgacaagtggtaatttggggctaggactggtgctcattgctctgagcaaagggtacaggtttgtcgcggtgatgccgggccaatattcgctggataagcagatcttgttgagatacatgggtgctgagttgttcataaccgatccagcacttgggtttccagggcaagttgaaaaggtcgaacagctcaagaaagaattgcccaatgtacatgttcttgatcagttctcgaatccagcaaaccccgaggcacacattcgatggactggacccgagatttggaaggatactgctggaaaggtggatatatttgttgcaggttcaggctcaggagggacggtatctggtgttgggaagtatttgaagatgcaaaatccaaatgtaaagatcatttgtgtggaacctgcagagagtccagttatttcaggtggggagcgaggcaaacataaaatccagggaatagggccgggattcgtgcctgaaatcttggacagctcggtcatcgatgaggtgcttaccgtgaccaccgaggaagcaatggtgaatgcaaggaggttggcaatggaagagggcctacttgtgggcatatcttcgggtggaaacttggcggcttgcttgaaggtcgcggcaagagaagagaacaaggggaagatgattgtgaccatgttcccgagcgggggcgagagatacatgaactctgacctctttgcagctgtaagagaggagtgtatcgccatgaccttttga

SEQ ID NO: 1049 - protein, 348 aa, Triticum aestivum
MPPGAEEAERAGRRGVPSLLAGGGTGQEEHIATDVTQLIGWTPLIELKRIAGKEGVGARIVGKIEAYQPLCSVKDRSALRMIEDAEEKGLISPGVTTLVEPTSGNLGLGLVLIALSKGYRFVAVMPGQYSLDKQILLRYMGAELFITDPALGFPGQVEKVEQLKKELPNVHVLDQFSNPANPEAHIRWTGPEIWKDTAGKVDIFVAGSGSGGTVSGVGKYLKMQNPNVKIICVEPAESPVISGGERGKHKIQGIGPGFVPEILDSSVIDEVLTVTTEEAMVNARRLAMEEGLLVGISSGGNLAACLKVAAREENKGKMIVTMFPSGGERYMNSDLFAAVREECIAMTF

SEQ ID NO: 1050 - DNA, 1104 bp, Triticum aestivum
  CDS (1)..(1104)
atggacctccccttcctcgtctcctgtataaaacctcgcgtcctgatgcttcctcctccaactccacgagccgccatttcccaaggaggagcaaggattgttgttgtttcgctgtcagatcgagacccaacgggagaagccgcgacgacgatcgccaaggacgtcaccgagttgatcgggaacacgccgctggtgtacctcaacaaggtgaccgatgggtgcgtcggccgcgtcgccgccaagctcgagtccatggagccctgctccagcgtcaaggataggattggctacagcatgatcacagacgcagaggagaaggggctgatcactccaggcgtgagtgttctgattgaaccaactagtggcaacacaggcattggactggcctttatggctgctgccaagggctacaaacttatactcacaatgcctgcctccatgagcatggagaggaggatcatcttgaaggctttcggtgctgaacttgtccttactgacccactcctgggaatgaaaggagctgtcaaaaaggcggaagagattcaagcaaagacacccaactcatacatccttcaacaatttgaaaatccagctaacccaaagattcactatgagactacagggccagaaatctggaaagctacagccggaaaaattgatgcccttgtatctggtatcgggacaggaggtaccataactggtactgggcgatacctcagagagcaaaatcctaatgtcaagctctatggtgtggagccagtggagagtgctgttttgaatggtggaaaacctggaccacacaagattcaaggaattggagctggttttatccctggtgtcttggatgttgacatcattgatgaaaccatacaggtttcaagtgatgagtctattgagatggcaaagtctcttgcattgaaagaaggattgctggttgggatctcttctggtgctgctgcagctgctgcaatcaaggttgctcagaggcctgaaaatgcagggaaactctttgttgttgtgttcccgagcttcggagagcgctacctttcgtcggtgctcttccactccatcaagaaggaggccgagagcatggtggtcgagtga

SEQ ID NO: 1051 - protein, 367 aa, Triticum aestivum
MDLPFLVSCIKPRVLMLPPPTPRAAISQGGARIVVVSLSDRDPTGEAATTIAKDVTELIGNTPLVYLNKVTDGCVGRVAAKLESMEPCSSVKDRIGYSMITDAEEKGLITPGVSVLIEPTSGNTGIGLAFMAAAKGYKLILTMPASMSMERRIILKAFGAELVLTDPLLGMKGAVKKAEEIQAKTPNSYILQQFENPANPKIHYETTGPEIWKATAGKIDALVSGIGTGGTITGTGRYLREQNPNVKLYGVEPVESAVLNGGKPGPHKIQGIGAGFIPGVLDVDIIDETIQVSSDESIEMAKSLALKEGLLVGISSGAAAAAAIKVAQRPENAGKLFVVVFPSFGERYLSSVLFHSIKKEAESMVVE

SEQ ID NO: 1052 - DNA, 978 bp, Triticum aestivum
  CDS (1)..(978)
atgggggaggcgtcatctccggcgatcgccaaggatgtcaccgagctgatcgggaacacgccgttggtgtacctcaacaaggtgaccgacgggtgcgtggggcgcgtcgccgccaagctcgagtccatggagccctgctccagcgtcaaggacaggattgggtacagcatgatcaccgacgcggaggagaaggggttcatcgtcccaggcaagagtgtgctgattgaaccaaccagtggcaacacaggcattgggctggccttcatggctgctgccaagggttacagacttgtactcacaatgcccgcctccatgagtatggagaggagaatcatcttgaaggcctttggtgctgagctgatcctcaccgacccactcttgggaatgaaaggagctgtccaaaaggcggaagagcttgcagcaaagacgcccaactcatacatccttcagcagttcgagaatcctgccaacccaaagattcactatgagacaactgggcctgaaatctggaaaggcacaggaggaaagatcgatggccttgtttctggcatcgggacaggtggtaccattactggatctggaaaatacctcaaagagcaaaatcctaacatcaagctctacggtgtggagcctaccgagagtgctgtcttaaatggtggaaagcctggaccacacaagatccaaggaattggagctggttttatccctggtgtcttggatgttgacatcattgatgaaaccatacaggtttcaagtgatgagtccattgagatggcaaagtctctggcattgaaagaaggattgctggttggaatctcttctggtgctgctgcagcagctgcaatcaaggttgctcagaggcctgaaaatgcagggaaactctttgttgttgtattcccaagcttcggagagcgctacctttcgtcggtgctcttccactccatcaagaaggaggccgagagcatggtggtcgagtga

SEQ ID NO: 1053 - protein, 325 aa, Triticum aestivum
MGEASSPAIAKDVTELIGNTPLVYLNKVTDGCVGRVAAKLESMEPCSSVKDRIGYSMITDAEEKGFIVPGKSVLIEPTSGNTGIGLAFMAAAKGYRLVLTMPASMSMERRIILKAFGAELILTDPLLGMKGAVQKAEELAAKTPNSYILQQFENPANPKIHYETTGPEIWKGTGGKIDGLVSGIGTGGTITGSGKYLKEQNPNIKLYGVEPTESAVLNGGKPGPHKIQGIGAGFIPGVLDVDIIDETIQVSSDESIEMAKSLALKEGLLVGISSGAAAAAAIKVAQRPENAGKLFVVVFPSFGERYLSSVLFHSIKKEAESMVVE

SEQ ID NO: 1054 - DNA, 1041 bp, Zea mays
  CDS (1)..(1041)
atggcgggagaggaggccgggaggaggggcgttccctctctgctgaacccgccgtccgcttccagcgaggggcagcaggagcacatcgcctctgatgtcacacagctcatcggatggacacctctggtcgagctcaagcgaatcgccgccaaggaaggggtatgcgcgcgcatcgtcggcaaggtggaggcgtaccagcctctgtgctccgtcaaggatcgcagcgctctgagaatgatcgaagacgcagaggagagggggctgatctcgcccggcaccacgacgctcgtggagccgacgagcggcaacctggggctgggcctggtcctcgtcgccctccgcaagggctacaggttcgtcgcggtcatgccaggccagtactcgctcgacaagcagatcctgctgacatacatgggcgcagagctgtacgtaacagatccatccctcgggttcccgggcataaccgccaaggtcgaggagctcaagaaggagctgcccaacgtgcacgtcctcgaccagttctccaacagagcgaatcctgaagcgcatgttagatggactgggcctgagatctggaaggacaccgccggcaaggtggacgtattcgtggccggttcaggctcgggaggcacggtgtctggcgtcggcaagtacctcaagacgcagaaccccagcgtcaaggtcatctgcgttgagcctgccgagagcccagttgtttcaggcggggaaccaggcagccacaagatccagggaatagggccgggattcataccggaagtgctggacacctccgtcatcgacgaggccgtcacggtgaccaccgaggaggcgatggcgggcgcccggaggctggccagggaggagggcctgctcgtcggcatctcttccggagccaacctggcggcctgcttgaaggtcgcggcgcgagaagagagcaaggggaagatgattgtcaccgtgtttccgagcgggggcgagaggtacatgacctccgacctgttcgccgccgccagagaggagtgtattgccatgacgttttga

SEQ ID NO: 1055 - protein, 346 aa, Zea mays
MAGEEAGRRGVPSLLNPPSASSEGQQEHIASDVTQLIGWTPLVELKRIAAKEGVCARIVGKVEAYQPLCSVKDRSALRMIEDAEERGLISPGTTTLVEPTSGNLGLGLVLVALRKGYRFVAVMPGQYSLDKQILLTYMGAELYVTDPSLGFPGITAKVEELKKELPNVHVLDQFSNRANPEAHVRWTGPEIWKDTAGKVDVFVAGSGSGGTVSGVGKYLKTQNPSVKVICVEPAESPVVSGGEPGSHKIQGIGPGFIPEVLDTSVIDEAVTVTTEEAMAGARRLAREEGLLVGISSGANLAACLKVAAREESKGKMIVTVFPSGGERYMTSDLFAAAREECIAMTF

SEQ ID NO: 1056 - DNA, 1323 bp, Zea mays
  CDS (1)..(1323)
atgagctggtggcttggcctctcctccaccagtggcagtggcagtggctggccacccaatcgcctcgttcgtcatctacctctccctcctacaacccaagctaagctaaacagcttacacaggctcgctccgccatcaccgtatagagagagacagagacaggctagcgagggaacggagaggatgctcgccacgctgatgcggcggcggagctccgtccccctgtccggcctcctccaccacggaggagcgcccgccccgctgcaggccgccggcgccactggggcctccccgctgatcttctcgcaccagcagcagcagcagcacacggccgcctccgccgtcctgccggggctcaagatcagggactccgcgtcccagctgatcgggaggaccccgatggtgtacctgaacaaggtgaccgaggggtgcggcgcccgggtggctgccaagctcgagttcctgcagccgtccttcagcgtcaaagacagaccggcgatctcgatgctggaagacgctgaaaagagggggctcatcactccaggaaagaccacgttgatcgagcccacgtcggggaacatgggcatcgggctggcgttcatggcggcgctcaaggggtacgagctcgtgctcaccatgccgtcctacaccagcctggagaggagggtgacgatgcgggcgttcggcgccaacctggtgctgaccgacccggccaaagggatgggcgggacggtgaggaaggcgacggagctgtacgagagacatcccagcgcgcacatgctccagcagttccagaaccctgccaacgtcaaggtgcactacgacacgacgggaccggagatctgggaggacacgcttggccaggtcgatatcttcgtcatggggatcgggagcggcggcaccgtcacgggagtcggcaagtacctcaaggagaaaaaccctaacgcaaagatctatggagttgaacctgccgaggcaaatgttctgaatggtggaaagccaggacctcacctcatcactggaaacggagtagggttcaagccagatattctggacatggacgtgatggaaaaggtgctcgaggtgaaaggtgaggacgccgtcaagatggctcgagagctggcagtcaaggagggtcttttggtcgggatatcatcgggagccaacaccgttgctgctctcgagctagccaagaggccggagaacaaggggaagctcatcgtgaccgttcttccgagccttggcgagcggtacctgtcgtccgcgctgttcgatgagctgaggaaggaggcacaagccatggaaccggtcgcggtggattga

SEQ ID NO: 1057 - protein, 440 aa, Zea mays
MSWWLGLSSTSGSGSGWPPNRLVRHLPLPPTTQAKLNSLHRLAPPSPYRERQRQASEGTERMLATLMRRRSSVPLSGLLHHGGAPAPLQAAGATGASPLIFSHQQQQQHTAASAVLPGLKIRDSASQLIGRTPMVYLNKVTEGCGARVAAKLEFLQPSFSVKDRPAISMLEDAEKRGLITPGKTTLIEPTSGNMGIGLAFMAALKGYELVLTMPSYTSLERRVTMRAFGANLVLTDPAKGMGGTVRKATELYERHPSAHMLQQFQNPANVKVHYDTTGPEIWEDTLGQVDIFVMGIGSGGTVTGVGKYLKEKNPNAKIYGVEPAEANVLNGGKPGPHLITGNGVGFKPDILDMDVMEKVLEVKGEDAVKMARELAVKEGLLVGISSGANTVAALELAKRPENKGKLIVTVLPSLGERYLSSALFDELRKEAQAMEPVAVD

SEQ ID NO: 1058 - DNA, 1191 bp, Zea mays
  CDS (1)..(1191)
atggcgtcgtggtcgtcgccctcatccgccgccgccgcctcgggcgcccgattcggccccttcccgagccgagcgcagcggctcgtgccgtatccgtcgctcgcccgcggaacccccgcctcgacgctcgtcctcaggccccacccggacggccgtggccatggcctcctcgcgcacaccggctcctcttcctcgcggtgccgcgccgtcgccgccgaggtcgagggcctcaacatcgccaaccacgtcagccagctcatcggcaagacaccaatggtatatatcaacaatgtcgtcaagggctctgtcgccaatgttgctgctaagcttgagattatggagccctgttgtagcgtcaaggacaggatagggtacagtatgataaatgatgctgaacagaagggcttgattactcctggaaagagtgttttagtggaagctacaagtggaaatacaggcattggtcttgcctttattgctgcttccaaaggatataagttgatattaacaatgccttcatcaatgagcatggagagaagagtcctactcagagcttttggtgctgaacttgtccttactgatgctgcaaaagggatgaaaggagccgtagataaggctacagagattttaaataagacacccaattcttacatgcttcaacagtttgataaccctgccaaccctaaggtacattatgagaccactggcccagagatctgggaggattcaaaggggaaggtggatatactaattggtggaattggaacaggcgggacaatatctggtgctggccgtttcctcaaggagaaaaattctggaattaaggttattggtattgagccttctgaaagtaacatactctccggtggaaaacctggtccacataagattcagggaattggtgcaggatttgttccaaggaacttggatagcgatattcttgatgaagtaattgagatatcaagtgatgaagctgttgagactgcaaaacagttggctgttcaggaaggattactggttggaatctcctctggagcagctgctgccgctgccataaaggttgcgaaaagaccagaaaatgctggaaagttgatagtggttgtgtttccgagttttggcgagaggtacctttcatctgtcctttatcagtccataagagaagaatgcgagaacatgcagcctgagccatga

SEQ ID NO: 1059 - protein, 396 aa, Zea mays
MASWSSPSSAAAASGARFGPFPSRAQRLVPYPSLARGTPASTLVLRPHPDGRGHGLLAHTGSSSSRCRAVAAEVEGLNIANHVSQLIGKTPMVYINNVVKGSVANVAAKLEIMEPCCSVKDRIGYSMINDAEQKGLITPGKSVLVEATSGNTGIGLAFIAASKGYKLILTMPSSMSMERRVLLRAFGAELVLTDAAKGMKGAVDKATEILNKTPNSYMLQQFDNPANPKVHYETTGPEIWEDSKGKVDILIGGIGTGGTISGAGRFLKEKNSGIKVIGIEPSESNILSGGKPGPHKIQGIGAGFVPRNLDSDILDEVIEISSDEAVETAKQLAVQEGLLVGISSGAAAAAAIKVAKRPENAGKLIVVVFPSFGERYLSSVLYQSIREECENMQPEP

SEQ ID NO: 1060 - DNA, 978 bp, Zea mays
  CDS (1)..(978)
atgggagaggcctcgccgtcgatcgccaaggacgtcaccgagttgatcgggaacacgccgctggtgtacctcaacaaggtgaccgatgggtgcgtcggccgcgtcgccgccaagctcgagtccatggagccctgctccagcgtcaaggataggattggctacagcatgatcacggacgcagaggagaaagggctgattactccaggcgtgagtgttctgattgaaccaactagcggcaacacaggcattggactggcctttatggctgctgccaagggctacaaacttacactcacaatgcctgcctccatgagcatggagaggaggatcatattgaaggcttttggtgctgaacttgtccttactgacccactcctgggaatgaaaggagctgtcaagaaagcggaagagatacaagcaaagacacccaactcgtacatccttcaacaatttgaaaatccagctaacccaaagattcactatgagactactgggcctgaaatctggaaagctacagcaggaaaaattgctggccttgtatctggtatcgggacaggaggtaccatcaccggtactgggcgatacctcagagagcaaaatcctaatgtcaagctctatggtgtggagccagtggagagtgctgttttgaatggtggaaaacctggaccacacaagattcaaggaattggagctggttttatccctggagtcttggatgttgatctccttgatgagactctacaggtttcaagtgatgaagctattgagactgccaaggctcttgctctgaaagaagggttgttggttggaatctcttctggtgcagctgcagctgcggcagttaggcttgctaagaggccagaaaacgccggaaagctatttgttgtcgtgttcccgagcttcggcgagcgctacctctcatcggtgctgttccagtccatcaagaaggaagcggaaagcatggtggtcgagccctag

SEQ ID NO: 1061 - protein, 325 aa, Zea mays
MGEASPSIAKDVTELIGNTPLVYLNKVTDGCVGRVAAKLESMEPCSSVKDRIGYSMITDAEEKGLITPGVSVLIEPTSGNTGIGLAFMAAAKGYKLTLTMPASMSMERRIILKAFGAELVLTDPLLGMKGAVKKAEEIQAKTPNSYILQQFENPANPKIHYETTGPEIWKATAGKIAGLVSGIGTGGTITGTGRYLREQNPNVKLYGVEPVESAVLNGGKPGPHKIQGIGAGFIPGVLDVDLLDETLQVSSDEAIETAKALALKEGLLVGISSGAAAAAAVRLAKRPENAGKLFVVVFPSFGERYLSSVLFQSIKKEAESMVVEP

SEQ ID NO: 1062 - DNA, 1155 bp, Zea mays
  CDS (1)..(1155)
atggcgatggctccaccgcctgcctgctcgctcttcccccgggtcgccgctgctgcgcccagttccgtcacctccaactccgttttgacctcgcgtggccccggtatccttccttccccgcgtctcgctttcgcccgccgccacctctccgcggcatggtcatcgaaggcagcagcctccgcttctgtcgaaatccaggatgactacacggatgagatggacgcggtgaacattgcgcaggatgtcacccagctcattggaaaaacaccaatggtgtatctcaatagagttgctgacggatgtgtggctaatatcgctgcaaagctcgagtacatgggaccttgccgaagtgtcaaagataggattggattaagcatgattaatgatgctgaagagaagggattaatttctccagacaagaccattttggtagaaccaacaactggaaatactggtgtagccattgcttctgtggctgcagcaagaggatacaagttgatagcaacaatgccttcatcgttagatgtcgagagacgcattcttctgcgtgcattcggagcagagattgtgttaactgatcctaccaaaggactaaaaggagcttttgataaagctgaggaaatagtcctgagaacaccaaatgcgtatatgtttcagcagttcaacaatgaggcaaatagtgagatccactttcaaaccacaggcccagaaatatgggaagacacgttgggttctgttgatatacttgttgcaagcataggaacaggcggtaccattagtggcactgggcgttacttgaaaaggatgaacaaagatattaaggttattggggtagaacctgctgaaactagtgtgatttctggtgatagccctggttacattccaagtatattagatgtgcagttgattgatgaggttgtgaaggttagcacagcagaagccgttgattctgcaagggaacttgctctaaaagagggcctgctggttggtatttcctctggtgctgcagcgattgctgctatcaatgttggcaaaagacctgaaaatgctggaaagttgattgcggtcattttccccagctttggagagagatacatctccaccattctgttccgtccgatatatgactctgttcgaagaatgaggaagagatag

SEQ ID NO: 1063 - protein, 384 aa, Zea mays
MAMAPPPACSLFPRVAAAAPSSVTSNSVLTSRGPGILPSPRLAFARRHLSAAWSSKAAASASVEIQDDYTDEMDAVNIAQDVTQLIGKTPMVYLNRVADGCVANIAAKLEYMGPCRSVKDRIGLSMINDAEEKGLISPDKTILVEPTTGNTGVAIASVAAARGYKLIATMPSSLDVERRILLRAFGAEIVLTDPTKGLKGAFDKAEEIVLRTPNAYMFQQFNNEANSEIHFQTTGPEIWEDTLGSVDILVASIGTGGTISGTGRYLKRMNKDIKVIGVEPAETSVISGDSPGYIPSILDVQLIDEVVKVSTAEAVDSARELALKEGLLVGISSGAAAIAAINVGKRPENAGKLIAVIFPSFGERYISTILFRPIYDSVRRMRKR

SEQ ID NO: 1064 - DNA, 978 bp, Zea mays
  CDS (1)..(978)
atgggagaggcctcgccgtcgatcgccaaggacgtcaccgagttgatcgggaacacgccgctggtgtacctcaacaaggtgaccgaggggtgcgtcggccgcgtcgccgccaagctcgagtccatggagccctgctccagcgtcaaggataggattggctacagcatgatcacggacgcagaggagaaagggctgattactccaggcgtgagtgttctgattgaaccaactagcggcaacacaggcattggactggcctttatggctgctgccaagggctacaaacttacactcacaatgcctgcctccatgagcatggagaggaggatcatattgaaggcttttggtgctgaacttgtccttactgacccactcctgggaatgaaaggagctgtcaagaaagcggaagagatacaagcaaagacacccaactcttacatccttcaacaatttgaaaatccagctaacccaaagattcactatgagactactgggcctgaaatctggaaagctacagcaggaaaaattgatggccttgtatctggtatcgggacaggaggtaccatcaccggtactgggcgatacctcagagagcaaaatcctaatgtcaagctctatggtgtggagccagtggagagtgctgttttgaatggtggaaaacctggaccacacaagattcaaggaattggagctggttttatccctggagtcttggatgttgatctccttgatgaaactctacaagtttcaagtgatgaagctatcgagactgccaaggctcttgctctgaaagaagggttgttggttggaatctcttctggtgcagctgcagctgcggcagttaggcttgctaagaggccagaaaacgccggaaagctatttgttgtcgtgttcccgagcttcggcgagcgctacctctcctcggtgctgttccagtccatcaagaaggaagcggagagcatggtggtcgagccctag

SEQ ID NO: 1065 - protein, 325 aa, Zea mays
MGEASPSIAKDVTELIGNTPLVYLNKVTEGCVGRVAAKLESMEPCSSVKDRIGYSMITDAEEKGLITPGVSVLIEPTSGNTGIGLAFMAAAKGYKLTLTMPASMSMERRIILKAFGAELVLTDPLLGMKGAVKKAEEIQAKTPNSYILQQFENPANPKIHYETTGPEIWKATAGKIDGLVSGIGTGGTITGTGRYLREQNPNVKLYGVEPVESAVLNGGKPGPHKIQGIGAGFIPGVLDVDLLDETLQVSSDEAIETAKALALKEGLLVGISSGAAAAAAVRLAKRPENAGKLFVVVFPSFGERYLSSVLFQSIKKEAESMVVEP

SEQ ID NO: 1066 - DNA, 1149 bp, Zea mays
  CDS (1)..(1149)
atggagaggatgctggccaggctgatgcggcggcggagctccgtccccctgtccggcctcctccaccacggaggagcgcccgccccgctgcaggccgccggcgccactggggcctccccgctgatcttgtcgcaccagcagcagcagcagcacacggccgcctccgccgtcctgccggggctcaagatcagggactccgcgtcccagctgatcgggaggaccccgatggtgtacctgaacaaggtgaccgaggggtgcggcgcccgggtggctgccaagctcgagttcctgcagccgtccttcagcgtcaaagacagaccggcgatctcgatgctggaagacgctgaaaagagggggctcatcactccaggaaagaccacgttgatcgagcccacgtcggggaacatgggcatcgggctggcgttcatggcggcgctcaaggggtacgagctcgtgctcaccatgccgtcctacaccagcctggagaggagggtgacgatgcgggcgttcggcgccaacctggtgctgaccgacccggccaaagggatgggcgggacggtgaggaaggcgacggagctgtacgagagacatcccagcgcgcacatgctccagcagttccagaaccctgccaacgtcaaggtgcactacgacacgacgggaccggagatctgggaggacacgcttggccaggtcgatatcttcgtcatggggatcgggagcggcggcaccgtcacgggagtcggcaagtacctcaagaagaaaaaccctaacgcaaagatctatggagttgaacctgccgaggcaaatgttctgaatggtggaaagccaggacctcacctcatcactggaaacggagtagggttcaagccagatattctggacatggacgtgatggaaaaggtgctcgaggtgaaaggtgaggacgccgtcaagatggctcgagagctggcagtcaaggagggtcttttggtcgggatatcatcgggagccaacaccgttgctgctctcgagctagccaagaggccggagaacaaggggaagctcatcgtgaccgttcttccgagccttggcgagcggtacctgtcgtccgcgctgttcgatgagctgaggaaggaggcacaagccatggaaccggtcgcggtggattga

SEQ ID NO: 1067 - protein, 382 aa, Zea mays
MERMLARLMRRRSSVPLSGLLHHGGAPAPLQAAGATGASPLILSHQQQQQHTAASAVLPGLKIRDSASQLIGRTPMVYLNKVTEGCGARVAAKLEFLQPSFSVKDRPAISMLEDAEKRGLITPGKTTLIEPTSGNMGIGLAFMAALKGYELVLTMPSYTSLERRVTMRAFGANLVLTDPAKGMGGTVRKATELYERHPSAHMLQQFQNPANVKVHYDTTGPEIWEDTLGQVDIFVMGIGSGGTVTGVGKYLKKKNPNAKIYGVEPAEANVLNGGKPGPHLITGNGVGFKPDILDMDVMEKVLEVKGEDAVKMARELAVKEGLLVGISSGANTVAALELAKRPENKGKLIVTVLPSLGERYLSSALFDELRKEAQAMEPVAVD

SEQ ID NO: 1068 - DNA, 1191 bp, Zea mays
  CDS (1)..(1191)
atgtcgtcgtggtcgtcgccctcatccgccgccgccgcctcgggcgcccgattcggccccttcccgagccgagcgcagcggctcgtgccgtatccgtcgctcgcccgcggaacccccgcctcgacgctcgtcctcaggccccacccggacggccgtggccatggccacctcgcgcacaccggctcctcttcctcgcggtgccgcgccgtagccgccgaggtcgagggcctcaacatcgccaaccacgtcagccagctcatcggcaagacaccaatggtatatctcaacaatgtcgtcaagggctctgtcgccaatgttgctgctaagcttgagattatggagccctgttgtagcgtcaaggacaggatagggtacagtatgataaatgatgctgaacagaagggcttgattactcctggaaagagtgttttagtggaagcaacaagtggaaatacaggcattggtcttgcctttattgctgcttccaaaggatataagttgatattaacaatgccttcatcaatgagcatggagagaagagtcctactcagagcttttggtgctgaacttgtccttactgatgctgcaaaagggatgaaaggggccgtagataaggctacagagattttaaataagacacccaattcttacatgcttcaacagtttgataaccctgccaaccctaaggtacattatgagaccactggcccagagatctgggaggattcaaaggggaaggtggatatactaattggtggaattggaacaggcgggacaatatctggtgctggccgtttcctcaaggagaaaaattctggaattaaggttattggtattgagccttctgaaagtaacatactctccggtggaaaacctggtccacataagattcagggaattggtgcaggatttgttccaaggaacttggatagcgatattcttgatgaagtaattgagatatcaagtgatgaagctgttgagacagcaaaacagttggctgttcaggaaggattactggttggaatctcctctggagcagctgctgccgctgccataaaggttgcgaaaagaccagaaaatgctggaaagttgatagtggttgtgtttccgagttttggcgagaggtacctttcatctgtcctctatcagtccataagagaagaatgcgagaacatgcagcctgagccatga

SEQ ID NO: 1069 - protein, 396 aa, Zea mays
MSSWSSPSSAAAASGARFGPFPSRAQRLVPYPSLARGTPASTLVLRPHPDGRGHGHLAHTGSSSSRCRAVAAEVEGLNIANHVSQLIGKTPMVYLNNVVKGSVANVAAKLEIMEPCCSVKDRIGYSMINDAEQKGLITPGKSVLVEATSGNTGIGLAFIAASKGYKLILTMPSSMSMERRVLLRAFGAELVLTDAAKGMKGAVDKATEILNKTPNSYMLQQFDNPANPKVHYETTGPEIWEDSKGKVDILIGGIGTGGTISGAGRFLKEKNSGIKVIGIEPSESNILSGGKPGPHKIQGIGAGFVPRNLDSDILDEVIEISSDEAVETAKQLAVQEGLLVGISSGAAAAAAIKVAKRPENAGKLIVVVFPSFGERYLSSVLYQSIREECENMQPEP

SEQ ID NO: 1070 - DNA, 24 bp, Artificial sequence
  primer
atgagtaagatttttgaagataac

SEQ ID NO: 1071 - DNA, 25 bp, Artificial sequence
  primer
ttactgttgcaattctttctcagtg

SEQ ID NO: 1072 - protein, 387 aa, Artificial sequence
  consensus sequence
  Variant (2)..(2): Xaa in position 2 is any amino acid
  Variant (5)..(7): Xaa in position 5 to 7 is any amino acid
  Variant (9)..(15): Xaa in position 9 to 15 is any amino acid
  Variant (16)..(28): Xaa in position 16 to 28 is any or no amino acid
  Variant (30)..(30): Xaa in position 30 is any amino acid
  Variant (32)..(34): Xaa in position 32 to 34 is any amino acid
  Variant (35)..(35): Xaa in position 35 is any or no amino acid
  Variant (37)..(38): Xaa in position 37 to 38 is any amino acid
  Variant (39)..(40): Xaa in position 39 to 40 is any or no amino acid
  Variant (46)..(53): Xaa in position 46 to 53 is any amino acid
  Variant (56)..(57): Xaa in position 56 to 57 is any amino acid
  Variant (59)..(65): Xaa in position 59 to 65 is any amino acid
  Variant (66)..(69): Xaa in position 66 to 69 is any or no amino acid
  Variant (71)..(71): Xaa in position 71 is any amino acid
  Variant (78)..(78): Xaa in position 78 is any amino acid
  Variant (80)..(80): Xaa in position 80 is any amino acid
  Variant (83)..(84): Xaa in position 83 to 84 is any amino acid
  Variant (85)..(88): Xaa in position 85 to 88 is any or no amino acid
  Variant (91)..(95): Xaa in position 91 to 95 is any amino acid
  Variant (98)..(100): Xaa in position 98 to 100 is any amino acid
  Variant (102)..(102): Xaa in position 102 is any amino acid
  Variant (104)..(111): Xaa in position 104 to 111 is any amino acid
  Variant (114)..(127): Xaa in position 114 to 127 is any amino acid
  Variant (128)..(139): Xaa in position 128 to 139 is any or no amino acid
  Variant (141)..(153): Xaa in position 141 to 153 is any amino acid
  Variant (154)..(170): Xaa in position 154 to 170 is any or no amino acid
  Variant (173)..(173): Xaa in position 173 is any amino acid
  Variant (175)..(176): Xaa in position 175 to 176 is any amino acid
  Variant (178)..(179): Xaa in position 178 to 179 is any amino acid
  Variant (180)..(180): Xaa in position 180 is any or no amino acid
  Variant (182)..(183): Xaa in position 182 to 183 is any amino acid
  Variant (186)..(186): Xaa in position 186 is any amino acid
  Variant (187)..(187): Xaa in position 187 is any or no amino acid
  Variant (190)..(192): Xaa in position 190 to 192 is any amino acid
  Variant (193)..(208): Xaa in position 193 to 208 is any or no amino acid
  Variant (210)..(215): Xaa in position 210 to 215 is any amino acid
  Variant (221)..(222): Xaa in position 221 to 222 is any amino acid
  Variant (224)..(227): Xaa in position 224 to 227 is any amino acid
  Variant (230)..(239): Xaa in position 230 to 239 is any amino acid
  Variant (240)..(243): Xaa in position 240 to 243 is any or no amino acid
  Variant (245)..(251): Xaa in position 245 to 251 is any amino acid
  Variant (252)..(288): Xaa in position 252 to 288 is any or no amino acid
  Variant (290)..(290): Xaa in position 290 is any amino acid
  Variant (292)..(293): Xaa in position 292 to 293 is any amino acid
  Variant (294)..(298): Xaa in position 294 to 298 is any or no amino acid
  Variant (300)..(306): Xaa in position 300 to 306 is any amino acid
  Variant (307)..(309): Xaa in position 307 to 309 is any or no amino acid
  Variant (311)..(319): Xaa in position 311 to 319 is any amino acid
  Variant (320)..(323): Xaa in position 320 to 323 is any or no amino acid
  Variant (325)..(330): Xaa in position 325 to 330 is any amino acid
  Variant (331)..(331): Xaa in position 331 is any or no amino acid
  Variant (333)..(334): Xaa in position 333 to 334 is any amino acid
  Variant (335)..(335): Xaa in position 335 is any or no amino acid
  Variant (338)..(340): Xaa in position 338 to 340 is any amino acid
  Variant (342)..(342): Xaa in position 342 is any amino acid
  Variant (344)..(344): Xaa in position 344 is any amino acid
  Variant (346)..(347): Xaa in position 346 to 347 is any amino acid
  Variant (348)..(349): Xaa in position 348 to 349 is any or no amino acid
  Variant (352)..(368): Xaa in position 352 to 368 is any amino acid
  Variant (369)..(378): Xaa in position 369 to 378 is any or no amino acid
  Variant (380)..(380): Xaa in position 380 is any amino acid
  Variant (381)..(383): Xaa in position 381 to 383 is any or no amino acid
GXTPXXXLXXXXXXXXXXXXXXXXXXXXKXEXXXXPXXXXSVKDRXXXXXXXXAEXXGXXXXXXXXXXXEXTSGNTGXIXLAXXXXXXGYXXXXXMPXXXSXEXXXXXXXXGAXXXXXXXXXXXXXXXXXXXXXXXXXXAXXXXXXXXXXXXXXXXXXXXXXXXXXXXXXQFXNXXNXXXHXXTTXXEIXXXXXXXXXXXXXXXXXXXDXXXXXXGTGGTXXGXXXXLKXXXXXXXXXXXXXXPXXXXXXXXXXXXXXXXXXXXXXXXXXXXXXXXXXXXXXXXXXXXGXGXXXXXXXPXXXXXXXXXXDXXXXXXXXXXXXXAXXXXXXXLXXXEGXXXGXSXGXXXXAAXXXXXXXXXXXXXXXXXXXXXXXXXXXGXXXXRYLS

SEQ ID NO: 1073 - protein, 12 aa, Artificial sequence
  protein pattern
  Variant (2)..(2): Xaa in position 2 is any amino acid
  Variant (4)..(4): Xaa in position 4 is Ala, Gly, Ser or Thr
  Variant (9)..(10): Xaa in position 9 to 10 is any or no amino acid
  Variant (12)..(12): Xaa in position 12 is Ala, Gly or Ser
EXTXGNTGXXIX

SEQ ID NO: 1074 - protein, 14 aa, Artificial sequence
  protein pattern
  Variant (2)..(2): Xaa in position 2 is Ser or Thr
  Variant (3)..(3): Xaa in position 3 is Gly or Thr
  Variant (6)..(7): Xaa in position 6 to 7 is any amino acid
  Variant (9)..(9): Xaa in position 9 is any amino acid
  Variant (10)..(10): Xaa in position 10 is Ala, Gly, Ser or Thr
  Variant (11)..(13): Xaa in position 11 to 13 is any amino acid
GXXGTXXGXXXXXK

SEQ ID NO: 1075 - protein, 14 aa, Artificial sequence
  protein pattern
  Variant (3)..(3): Xaa in position 3 is Ile, Leu or Val
  Variant (4)..(5): Xaa in position 4 to 5 is any amino acid
  Variant (7)..(7): Xaa in position 7 is any amino acid
  Variant (9)..(9): Xaa in position 9 is Ala, Cys, Gly, Ser or Thr
  Variant (11)..(13): Xaa in position 11 to 13 is any or no amino acid
EGXXXGXSXGXXXA

SEQ ID NO: 1076 - DNA, 1092 bp, Escherichia coli
  CDS (1)..(1092): transl_table=11
atgtctaactttatcaatattcatgttctgatctctcacagcccttcatgtctgaaccgcgacgatatgaacatgcagaaagacgctattttcggcggcaaaagacgagtaagaatttcaagtcaaagccttaaacgtgcgatgcgtaaaagtggttattacgcacaaaatattggtgaatccagtctcagaaccattcatcttgcacaattacgtgatgttcttcggcaaaaacttggtgaacgttttgaccaaaaaatcatcgataagacattagcgctgctctccggtaaatcagttgatgaagccgaaaagatttctgccgatgcggttactccctgggttgtgggagaaatagcctggttctgtgagcaggttgcaaaagcagaggctgataatctggatgataaaaagctgctcaaagttcttaaggaagatattgccgccatacgtgtgaatttacagcagggtgttgatattgcgcttagtggaagaatggcaaccagcggcatgatgactgagttgggaaaagttgatggtgcaatgtccattgcgcatgcgatcactactcatcaggttgattctgatattgactggttcaccgctgtagatgatttacaggaacaaggttctgcacatctgggaactcaggaattttcatcgggtgttttttatcgttatgccaacattaacctcgctcaacttcaggaaaatttaggtggtgcctccagggagcaggctctggaaattgcaacccatgttgttcatatgctggcaacagaggtccctggagcaaaacagcgtacttatgccgcttttaaccctgcggatatggtaatggttaatttctccgatatgccactttctatggcaaatgcttttgaaaaagcggttaaagcgaaagatggctttttgcaaccgtctatacaggcgtttaatcaatattgggatcgcgttgccaatggatatggtctgaacggagctgctgcgcaattcagcttatctgatgtaggcccaattactgctcaagttaaacaaatgcctactttagaacagttaaaatcctgggttcgtaataatggcgaggcgtaa

SEQ ID NO: 1077 - protein, 363 aa, Escherichia coli
MSNFINIHVLISHSPSCLNRDDMNMQKDAIFGGKRRVRISSQSLKRAMRKSGYYAQNIGESSLRTIHLAQLRDVLRQKLGERFDQKIIDKTLALLSGKSVDEAEKISADAVTPWVVGEIAWFCEQVAKAEADNLDDKKLLKVLKEDIAAIRVNLQQGVDIALSGRMATSGMMTELGKVDGAMSIAHAITTHQVDSDIDWFTAVDDLQEQGSAHLGTQEFSSGVFYRYANINLAQLQENLGGASREQALEIATHVVHMLATEVPGAKQRTYAAFNPADMVMVNFSDMPLSMANAFEKAVKAKDGFLQPSIQAFNQYWDRVANGYGLNGAAAQFSLSDVGPITAQVKQMPTLEQLKSWVRNNGEA

SEQ ID NO: 1078 - DNA, 1092 bp, Escherichia coli
  CDS (1)..(1092): transl_table=11
atgtctaactttatcaatattcatgttctgatctctcacagcccttcatgtctgaaccgcgacgatatgaacatgcagaaagacgctattttcggcggcaaaagacgagtaagaatttcaagtcaaagccttaaacgtgcgatgcgtaaaagtggttattacgcacaaaatattggtgaatccagtctcagaaccattcatcttgcacaattacgtgatgttcttcggcaaaaacttggtgaacgttttgaccaaaaaatcatcgataagacattagcgctgctctccggtaaatcagttgatgaagccgaaaagatttctgccgatgcggttactccctgggttgtgggagaaatagcctggttctgtgagcaggttgcaaaagcagaggctgataatctggatgataaaaagctgctcaaagttcttaaggaagatattgccgccatacgtgtgaatttacagcagggtgttgatattgcgcttagtggaagaatggcaaccagcggcatgatgactgagttgggaaaagttgatggtgcaatgtccattgcgcatgcgatcactactcatcaggttgattctgatattgactggttcaccgctgtagatgatttacaggaacaaggttctgcacatctgggaactcaggaattttcatcgggtgttttttatcgttatgccaacattaacctcgctcaacttcaggaaaatttaggtggtgcctccagggagcaggctctggaaattgcaacccatgttgttcatatgctggcaacagaggtccctggagcaaaacagcgtacttatgccgcttttaaccctgcggatatggtaatggttaatttctccgatatgccactttctatggcaaatgcttttgaaaaagcggttaaagcgaaagatggctttttgcaaccgtctatacaggcgtttaatcaatattgggatcgcgttgccaatggatatggtctgaacggagctgctgcgcaattcagcttatctgatgtagacccaattactgctcaagttaaacaaatgcctactttagaacagttaaaatcctgggttcgtaataatggcgaggcgtaa

SEQ ID NO: 1079 - protein, 363 aa, Escherichia coli
MSNFINIHVLISHSPSCLNRDDMNMQKDAIFGGKRRVRISSQSLKRAMRKSGYYAQNIGESSLRTIHLAQLRDVLRQKLGERFDQKIIDKTLALLSGKSVDEAEKISADAVTPWVVGEIAWFCEQVAKAEADNLDDKKLLKVLKEDIAAIRVNLQQGVDIALSGRMATSGMMTELGKVDGAMSIAHAITTHQVDSDIDWFTAVDDLQEQGSAHLGTQEFSSGVFYRYANINLAQLQENLGGASREQALEIATHVVHMLATEVPGAKQRTYAAFNPADMVMVNFSDMPLSMANAFEKAVKAKDGFLQPSIQAFNQYWDRVANGYGLNGAAAQFSLSDVDPITAQVKQMPTLEQLKSWVRNNGEA

SEQ ID NO: 1080 - DNA, 1047 bp, Chlorobium tepidum TLS
  CDS (1)..(1047): transl_table=11
atgaacaacaatccattcaagggccagcgcatcgaattccacatcctccagtcctttccggttacctgcctgaaccgtgacgacgttggcgctccgaaaacggcgatggtcggcggctccacccgcgcccgcgtcagctcgcagtgctggaagcggcaagtgcgcctcgaaatgcacgaactcggcgtgaggctcggcatccgcagcaaaaaggtcgccgattacgttgccaaagcctgcgtcgcactcggcgcggatgatgaggctgctaaggcgtgtggtgagaagattgccgccgccttcagcaacgacacgctcttctttttcagcgaaacagaggccagcgcctacgcgcagtacgccgccgaaaaggagttcgacgccgcgaagttcaacgacaaggagctggcgaagctctcgaagaaaacgctcgacccggccaaagacggcctcgacatcgcgctgttcgggcggatggtggcgcaggctgccgagctgaacgtcgaggctgccgcgtcgttcgctcatgccatttcgacccacaaggtgagcaacgaggtcgagttcttcacggcgctcgacgaccttgccgaagagccgggttcggcgcacatgggcagccttgagttcaactccgccacctactaccgctacgtcagcctcgacctcggccagctttcggcgaacctcggcggcgcggacattgccgacgcggtggaggcgttcaccaaagcgctcttcgtggccgtgccgagcgcccggcaaacaacgcagtcgggcgcgtcgccgtgggagttcgcgaaaatctatatccgcaagggccagcgccttcaggttccgttcgagactccggtcaaagccgaaagaggcggcggattcctccagccgagcatcaaggcgctcaccgactatctcaccaaaaaggagcagcaggccggctcgctcttcggcaaggaaaaggagttcaccttcggcggcgaggacgaaacgttcagcatcgacacgctggtcagcgaaatccgcaactttatcgaagcgaaatcatga

SEQ ID NO: 1081 - protein, 348 aa, Chlorobium tepidum TLS
MNNNPFKGQRIEFHILQSFPVTCLNRDDVGAPKTAMVGGSTRARVSSQCWKRQVRLEMHELGVRLGIRSKKVADYVAKACVALGADDEAAKACGEKIAAAFSNDTLFFFSETEASAYAQYAAEKEFDAAKFNDKELAKLSKKTLDPAKDGLDIALFGRMVAQAAELNVEAAASFAHAISTHKVSNEVEFFTALDDLAEEPGSAHMGSLEFNSATYYRYVSLDLGQLSANLGGADIADAVEAFTKALFVAVPSARQTTQSGASPWEFAKIYIRKGQRLQVPFETPVKAERGGGFLQPSIKALTDYLTKKEQQAGSLFGKEKEFTFGGEDETFSIDTLVSEIRNFIEAKS

SEQ ID NO: 1082 - DNA, 1179 bp, Streptomyces avermitilis MA-4680
  CDS (1)..(1179): transl_table=11
gtgctcactccggcccgcttcatcgacatccacgtcctgcagtccgtccccttcgccaacctcaaccgggacgacaccaactccgtgaagaccgtccagtacggcaacaccctgcgcacccgtgtcagcagccagtcctggaaacgtgccatccgatccgtcttcgaagaccgcatcggacaggccgcgctgcgaacccgccgcatcggcgaacgcgtcacccgcgaactggaacagcgcggctggcccgccgagctagcccagcgcgccggcggccacaccgcggcggccagcggcatcaagttcgaactcgccaaatcctccggcgacgccaagcagaccgtccccaacaaggtgctcaccaacgccatggtgtacgtgccggaggccgcagtcgccgagctggccgacctcgccgaacagcaccgtgaagaacttcagcaggccaaggacatcaagaagcccgcggacaagagcatcctccctgtcagcacggtggaggccgtgctgcgctcccgcaacggcgtcatcaacctcttcgggcggatgctcgccgaaatcaacgacgcgggcgtggacggcgccgtccaggtcgcacacgccctgaccactcacgagaccgacgtcgaactcgactacttctccgccgtggacgacgtcaccgccgtctggaacgacgccaccggcagcggccacatgggccacgccgagttcagcgccggcaccttctaccgctacgccaccctcgacctgcgcaacctggtcgccaacatcggcgacgacccgcaggccgcacgggagctgaccaccgtattcctggcctccttcatcacctcgctcccccaggccaagaagaactccaccgccccgcacaccatccccgacctggtccacctttccgtccgcaccgaccggcccctctcctacgcagccgccttcgaaaagcccgtccaggccagcccccagggcggcttcgccgacgtctcccgcacccagctcgccgcctacgcccaggccgccaacacgctcctgggcacaaccggcatcctcacctccggctgggccagcctggagaccaaggacctcaccggactcggcgagcgccgcgactccttcgacgacctgatcaccaccgccctggacaccgccctcacccacaccgccgaggcgaacgcgtga

SEQ ID NO: 1083 - protein, 392 aa, Streptomyces avermitilis MA-4680
MLTPARFIDIHVLQSVPFANLNRDDTNSVKTVQYGNTLRTRVSSQSWKRAIRSVFEDRIGQAALRTRRIGERVTRELEQRGWPAELAQRAGGHTAAASGIKFELAKSSGDAKQTVPNKVLTNAMVYVPEAAVAELADLAEQHREELQQAKDIKKPADKSILPVSTVEAVLRSRNGVINLFGRMLAEINDAGVDGAVQVAHALTTHETDVELDYFSAVDDVTAVWNDATGSGHMGHAEFSAGTFYRYATLDLRNLVANIGDDPQAARELTTVFLASFITSLPQAKKNSTAPHTIPDLVHLSVRTDRPLSYAAAFEKPVQASPQGGFADVSRTQLAAYAQAANTLLGTTGILTSGWASLETKDLTGLGERRDSFDDLITTALDTALTHTAEANA

SEQ ID NO: 1084 - DNA, 1095 bp, Geobacter sulfurreducens PCA
  CDS (1)..(1095): transl_table=11
atgaagaacttcatcaactttcacatcctgatttcccacagtccctcctgccttaaccgcgacgatatgaacatgcagaaatctgctgttttcggtggtgagcggcgggtgcgcgtttccagtcaaagcctcaaacgggccatccgaaagagtgattactatcgtcagcaccttggcgaagcgagtgtgcgcaccaagaagttggacgaactgatcgcgatcataaatgatcgtctggccggacgctacgataccgacctcctgaagaagactgttgggctgctggccggcaaggagttaagtgtcgaggttgcgacagaaggtgatgccgtggcgccgtgggcaatcgaagaggtggcatggttctgtgagcaggtcaagaggatggtggcgcaaggacaggacgaaaaagctctgggcaaattgttgaagaatgaaacggctgccatgcggcaggctctggcatccggtgttgatattgcactttccggccgcatggcgacgtcaggtctcatgagtgaactcggcaaggtcgatggtgccttggccgttgcccatgtcttgaccacccacagcgttgatgcggatatcgactggttcactgccgtggatgacttgcaggaactgggctccggtcatctcgatacgcaggaattttccagcggggtcttttatcgttatgccagcctcaacgtgaagcagttgcaggaaaacctgggcaatgccccgcgcgagaaggcactggagatcggcgctcatctgcttcacatgctggcaacgattgtcccttcagccaaacagcagagcttcgcagctcacaacctggccgaccttgccctggtttccttttccgatatcccggtatcgctcgcaaatgcattcgaaaaacctgtccgtagcgtcaatggcagcggcttcaaagagccttccattgctgaactgcataactactggcagcagatccatacaggttacggcctttccgagcggtgcggcgagttcatcctcggtcagagtagcgtccctgaagggatcacccggaagagtactattgaagaactcaaaacctgggtgatgaacaacggagaggggtaa

SEQ ID NO: 1085 - protein, 364 aa, Geobacter sulfurreducens PCA
MKNFINFHILISHSPSCLNRDDMNMQKSAVFGGERRVRVSSQSLKRAIRKSDYYRQHLGEASVRTKKLDELIAIINDRLAGRYDTDLLKKTVGLLAGKELSVEVATEGDAVAPWAIEEVAWFCEQVKRMVAQGQDEKALGKLLKNETAAMRQALASGVDIALSGRMATSGLMSELGKVDGALAVAHVLTTHSVDADIDWFTAVDDLQELGSGHLDTQEFSSGVFYRYASLNVKQLQENLGNAPREKALEIGAHLLHMLATIVPSAKQQSFAAHNLADLALVSFSDIPVSLANAFEKPVRSVNGSGFKEPSIAELHNYWQQIHTGYGLSERCGEFILGQSSVPEGITRKSTIEELKTWVMNNGEG

SEQ ID NO: 1086 - DNA, 1113 bp, Desulfococcus oleovorans Hxd3
  CDS (1)..(1113): transl_table=11
atgatgagccgatttattcaattacatttattgaccgcctatccacccgccaacctgaatcgcgatgacatgggcagccccaaaaccgcaaaaatgggcgggtatgaacgcctccgggtatcgtctcaatgcctgaaacggtcatggcgaacttcggatgcgtttcaagcagcaatggccgggcatattggcaagcggacgaaagaaatgggtttgaaggtatacgaaatccttcggaagaaagatgttacccacaaagatgccatagcgtggtctaaatcgatagcgggcgttttcgggaagcttaaggagctttccaaaaaggaaaaggatggcctgaaggacctggataagaaggatcgcgaaaaaaaagaactggtggaacttgaaatagaacaattagccttctttgataccggagaagagcaaggcataattgaccttgcaaatacaattgttaaaagaacagaaggcccaacagaccaggaattggaactcttgcgtgataggatgcaggctgtcgatattgccctctttggacgaatgcttgcatcaaaaccctcttatagcatcgaagcggcctgtcaggttgctcattcaatcagcgttcatccggtagttatagaggatgactattttaccgcagttgatgatttgaataatggcctggaagacatgggcgctgcccatatcggggaaacccgttttgcggccgggttgttttattcctatgtatgcatcaatcgagatctgctgatcgaaaatctgggcggcgacaaagctctggccgcaaaagccatccgggccttggtcgaagcagcggtcaaggtcgcgccggaaggcaagcaaaacagctttgcgtcccgggcctatgcctcctatgtcctttcggaaaaaggcgaccagcagccccgctccctgtcggtcgcctatttaaaaccgatcaaccaccgtgaaaatgagaattttatcagtgattccattaaggcgctggttgagcaaaaagactgctttgattcggtttacggcaaatgcgcggatggtcgatatgaaataaatgttcccaaaaaagaaggcaccttggctgatctgctggactttgtaagccaatag

SEQ ID NO: 1087 - protein, 370 aa, Desulfococcus oleovorans Hxd3
MMSRFIQLHLLTAYPPANLNRDDMGSPKTAKMGGYERLRVSSQCLKRSWRTSDAFQAAMAGHIGKRTKEMGLKVYEILRKKDVTHKDAIAWSKSIAGVFGKLKELSKKEKDGLKDLDKKDREKKELVELEIEQLAFFDTGEEQGIIDLANTIVKRTEGPTDQELELLRDRMQAVDIALFGRMLASKPSYSIEAACQVAHSISVHPVVIEDDYFTAVDDLNNGLEDMGAAHIGETRFAAGLFYSYVCINRDLLIENLGGDKALAAKAIRALVEAAVKVAPEGKQNSFASRAYASYVLSEKGDQQPRSLSVAYLKPINHRENENFISDSIKALVEQKDCFDSVYGKCADGRYEINVPKKEGTLADLLDFVSQ

SEQ ID NO: 1088 - DNA, 1122 bp, Thermobifida fusca YX
  CDS (1)..(1122): transl_table=11
atgactttcgttgacattcacgccatccagaccctgccctactccaacatcaaccgcgacgacttgggctcccccaagacggtcgtctacggcggcaaggaacgcactcgcgtgtccagccagagctggaagcgcgccgtccgccacgaagtggaagcccggctcggcgacaaggcggtccgcacccgccgtatcatcagcgagatcgccaagcggcttcgggaacgcggctgggacgctgacctcgctgacgccggagcacgccaagtcgtgctgtctgtcggtaagaagagcggcatcaaactggaaaaggagaaagacagcgaggcccctgccacttctgtcctgttctacctcccggtccccgcaatcgacgaactcgccgccatcgccgatgagcaccgggacgccgtcgccaaagaagcagccaagaagacccccaagggaatcctccccgctgaccgcatcaccgaagtactgaagagccgcaacgtctcagtcaacttgttcggtcggatgctcgctgaactgccctccaccgaggtcgacggcgcagtgcagttcgcgcacgcgttcaccgtgcacggcaccaccgtagaagtcgacttcttcaccgctgtcgacgacatccccaaagaaaacgaccacggtagtggccacatgaacgcgggccagttcagtgccggaacgttctaccgctacgccaacgtcaacctcgaccgactggtggaaaacaccggtgacgcccaaaccgcccgcaccgccgtggccgagttcctccgcgctttcctgagcacggtcccctccgggaaacagaacgctaccgctgccatgaccctgcccgacctggtacacatcgcggtacgcttcgaccgacccatctctttcgctcccgcgttcgaaaccgcgctatacggcagcgacggctacaccctccgcgcctgccaggaactcaacaactacgccgaacggctccgcgaagtctggcccgacgacgcgatccgcggctacgcgaccgtggaaaacaagaccgacctcgccgcgttgggggagcggtacgactcctacccggcgctcatcgacgccatggtcgcggcagccttcgagggggagcgggagtga

SEQ ID NO: 1089 - protein, 373 aa, Thermobifida fusca YX
MTFVDIHAIQTLPYSNINRDDLGSPKTVVYGGKERTRVSSQSWKRAVRHEVEARLGDKAVRTRRIISEIAKRLRERGWDADLADAGARQVVLSVGKKSGIKLEKEKDSEAPATSVLFYLPVPAIDELAAIADEHRDAVAKEAAKKTPKGILPADRITEVLKSRNVSVNLFGRMLAELPSTEVDGAVQFAHAFTVHGTTVEVDFFTAVDDIPKENDHGSGHMNAGQFSAGTFYRYANVNLDRLVENTGDAQTARTAVAEFLRAFLSTVPSGKQNATAAMTLPDLVHIAVRFDRPISFAPAFETALYGSDGYTLRACQELNNYAERLREVWPDDAIRGYATVENKTDLAALGERYDSYPALIDAMVAAAFEGERE

SEQ ID NO: 1090 - DNA, 1080 bp, Rhodospirillum rubrum ATCC 11170
  CDS (1)..(1080): transl_table=11
atgtcgcgctttctgcaattgcatgtgctgaccgcctatgccgcgtccaatctcaatcgcgatgacaccggtcgccccaagacccttaattttggcggcgccgaacgcctgcgggtttcctcgcaaagcctgaagcgggccttccgccagtcggagctgttccaaagccgcctgccgggcgaattgggcacgcgctcgcaagatttcgccaaagccctggtgagcgccctggtggccaggggggtggaggaagccgaagccattacccgcgccgaagccctgatcgaccatgacaaacttggcaaggtcaagaaaggcaaggcgcagaccgaacaacttgttcatctcggccccgatgaactggccgcgatcgacgccttggccgagcgcttggccaccagcgccacgcttgatgacaaggcgatgctggtcctgaaaagcaagccgcgcgccgtcgatatcgccatgttcggccggatgctggcgggcaatcccggcttcaatgtcgaagccgccgtccaggtcgcccacgccttcaccacccatcgcgctaccccggaagacgactattacaccaccgtcgacgacatcaagaacgccgaccaggaagaagatcgcggggcggggttcctgggaatcctcgaatacgggtcggggctgttttatctttacatctgcattaacgccgatctgctggtcgataatctggccggcgatcaggccctggccgccgaagccgccgcgctgctgatcgaggcggcctgcaccatcagccccacgggcaagcaaaacaccttcgccagccgggcgcgcggactgtatgcgcttctggaaatcggcgaggagacgccacgcagccttgccgccgccttccaatacgccgttggcagtcgcgccaccgaggccgaccatttggcggcctcgatccagcgcctgaccgccctgcgtgagggcttttccaaggcctatggcgaaaacctgcgcagcgtcgcccttgatgtcaccgatcccgccaccccgggcctgaaggcgctgatcgccgccgcgcgcgacgccgtctgcccgccgacgggccagtaa

SEQ ID NO: 1091 - protein, 359 aa, Rhodospirillum rubrum ATCC 11170
MSRFLQLHVLTAYAASNLNRDDTGRPKTLNFGGAERLRVSSQSLKRAFRQSELFQSRLPGELGTRSQDFAKALVSALVARGVEEAEAITRAEALIDHDKLGKVKKGKAQTEQLVHLGPDELAAIDALAERLATSATLDDKAMLVLKSKPRAVDIAMFGRMLAGNPGFNVEAAVQVAHAFTTHRATPEDDYYTTVDDIKNADQEEDRGAGFLGILEYGSGLFYLYICINADLLVDNLAGDQALAAEAAALLIEAACTISPTGKQNTFASRARGLYALLEIGEETPRSLAAAFQYAVGSRATEADHLAASIQRLTALREGFSKAYGENLRSVALDVTDPATPGLKALIAAARDAVCPPTGQ

SEQ ID NO: 1092 - DNA, 1104 bp, Methanococcoides burtonii DSM 6242
  CDS (1)..(1104): transl_table=11
atgacaaaatttatacaaatacacacactcgtttcatacccaccatcgaatttgaaccgcgatgacctgggaagaccaaagactgccgtaatgggtgacactcagaggctgagagtgtcttcacagagcttgaagagagcatggagaacgtcagatgtgttcaaagaagctcttggggaccacataggcattcgtaccaaaggtatgggtgtgagcattttcaaggcattgacagaaggtagcagattaaaggatgtactggacaacgtaactgcacctgtggtaaatgaactagtagaagagaagattgctaaggaatgggcaaaaatgattgctggagtcttcggcaagtccaaaaaagacactgaggattcacttaccgggctcgagatcgaacaattgacacacttcagtccagaagagataactgcaatcgatgaactggtttcaaaaatagctgccagtggtactgctccttcaaaggatgacctcgatcttttgagaaaggatcatactgctgtggatatcgctatgttcggaaggatgcttgcatcaaatactaaattcaataccgaagctgctgtacaggtttcccatgcgatcacagtaaataaagttgcagtagaggatgatttcttcactgctgtggatgatctgaaccgaggtgaagaggatatgggttcagggcatcttggtgagactgagtttgcatccggacttttctatacatatatctgtgttgaccgtgaacttttggaaagcaatctcggcggggataaggagcttgcagataagtctgtgcgtgctttggtcgaagcaatggccaaggtatcacctacgggtaagcagaacagttttgcttcaagagcatacgcatcatacatgatgatcgagaaaggaaaacaacagccacgttcgctttctgtcgcttatcttgaagcggttaaagggaaaagcatgttgaaggatgcaattgaaggcctcaagcagacaaatgagaacatggagaaggtctatggtccatgttgtgaggataggtctgagatgaatgcatacactggtgaaggtaccttgaccaagatgcttgatttcgttactaattaa

SEQ ID NO: 1093 - protein, 367 aa, Methanococcoides burtonii DSM 6242
MTKFIQIHTLVSYPPSNLNRDDLGRPKTAVMGDTQRLRVSSQSLKRAWRTSDVFKEALGDHIGIRTKGMGVSIFKALTEGSRLKDVLDNVTAPVVNELVEEKIAKEWAKMIAGVFGKSKKDTEDSLTGLEIEQLTHFSPEEITAIDELVSKIAASGTAPSKDDLDLLRKDHTAVDIAMFGRMLASNTKFNTEAAVQVSHAITVNKVAVEDDFFTAVDDLNRGEEDMGSGHLGETEFASGLFYTYICVDRELLESNLGGDKELADKSVRALVEAMAKVSPTGKQNSFASRAYASYMMIEKGKQQPRSLSVAYLEAVKGKSMLKDAIEGLKQTNENMEKVYGPCCEDRSEMNAYTGEGTLTKMLDFVTN

SEQ ID NO: 1094 - DNA, 1044 bp, Prosthecochloris aestuarii DSM 271
  CDS (1)..(1044): transl_table=11
atgagcataacaaatccattcaggaacacccgaattgaatatcatattcttcagtctttccctgtgacatgcctgaaccgtgacgatgttggtgcgccaaaaacagcgatagtcggcggaagcacccgagcccgtgtcagttcacaatgctggaaacgtcaggtgcgactttcgatgcaggatttcggcatcaaacttggaatacgatcgaaaaaagtttcagaattcgttgcaaaagcctgccttcaaaaaggagcatcggaagaacaggccgcagaatgtggaaaagtaatttccgattcattcagtaaggatacgctgttttttttcagtgaatccgaagctcaggcatttgctgattatgctcgagaaaaaaattttgatagtaaaaatctgaatgataaggagatccgaaaagtagcaaaaaaagccctgaaccctgcaattgacgggcttgatattgcacttttcggacggatggttgcccaggctactgacctgaatattgaagctgccgcatcattctcccatgccatttccactcacaaagtaagcaacgaggtggagtttttcaccgccttagacgatttagctgaagaaccgggttccgcacatatgggtagccttgaattcaattcagccacctattaccgatacatcagcctcgatcttggccaattatgggagagcatcggaggagaacatcttgctgaagccgtagaatccttgaccaaagcgctgtttgttgcggtcccaagtgcgcgtcagacaactcaatcaggagcatctccctgggagtttgctaaaattttcatccggaaaggccagcgattgcaggtgccttttgaaacggcagtcaaagcgaaggacgggggataccttcaaccaagcattacagcactcaccgactatctgacaaaaaaagaagccttggcgggatcattatttggcaaagaaaaagaatttactttcggcgaggacgtaaacttcagcattgatgatcttattaagggattgaaactaactgtagcggaggttcaatga

SEQ ID NO: 1095 - protein, 347 aa, Prosthecochloris aestuarii DSM 271
MSITNPFRNTRIEYHILQSFPVTCLNRDDVGAPKTAIVGGSTRARVSSQCWKRQVRLSMQDFGIKLGIRSKKVSEFVAKACLQKGASEEQAAECGKVISDSFSKDTLFFFSESEAQAFADYAREKNFDSKNLNDKEIRKVAKKALNPAIDGLDIALFGRMVAQATDLNIEAAASFSHAISTHKVSNEVEFFTALDDLAEEPGSAHMGSLEFNSATYYRYISLDLGQLWESIGGEHLAEAVESLTKALFVAVPSARQTTQSGASPWEFAKIFIRKGQRLQVPFETAVKAKDGGYLQPSITALTDYLTKKEALAGSLFGKEKEFTFGEDVNFSIDDLIKGLKLTVAEVQ

SEQ ID NO: 1096 - DNA, 1185 bp, Thauera sp. MZ1T
  CDS (1)..(1185): transl_table=11
atgagtctcccgcgcttcatccagatccacaccctgcacacctaccccgctgccctgctcaaccgtgacgatgccggactcgcaaaacgcctcccctacggcggcgcgatccgaacgcgcatttcctcacagtgcctcaagcgccactggcgcgtcgccgacgacgcgttttcgctggcgaaactgggcgtgccgatggccacgcgcacacgctacgtcgccgaattgattcgccaacgccttatcgagcaaggcatcgacgaagcgcgcgcctacgctaccgccgaggccctgcttgaggccctgttcggcgagaaggccgacaagaagaaggaaggcgtcaaggcacttcaaaccgggcaggcggtgctcttcggcaacgaagaaatcgcttaccttgcgcgccgctgccgagacatcactggcgacttttccgatccagtcgcgctgaaggcagaggtggcgaagttcctcaaagaggaaaagaagaacatcgaggcgatgaagctcggcagcggcctcgaatcggctctcttcggtcgcatggttacctctgacctgcttgccaaccgcgacgcatcggtgtcggtcgcccacgccttcacggtgcatgaagcgcaggtcgaaaacgactacttcaccgtagtcgatgattttgcccaggcggaagatggtgcgggctcggccggcatcttcgataccgaactcgcctcggggttgtactacggatacgtggttatcgacgtgccgcaactcgttgcaaacctcgagggcatcaaagtcgaggatgtcttcacgatcggggccgacaagcgtggtttggccggcaaggtcgtccaacatttgctgcaccttatcgccaccgtgagccccggcgccaagcgtggatccactgcaccatacgactgggcaaagttcgtcttggtcgaggccggtgactggcaaccgcgcagccttgcagcagctttccacgatccaataccgctcaagggcgactcttcgatccgtggccgcgccgctagcaaactggccaaagagatcgcggccttcgacgcagcatacggaatgcctacggcgcgccggttcctgtcgctggacgagttggctgttcccgccgcggagcgcgcgacgctctcacaactgggtgagtggatcgcacaaaccgttcgcgacggcgcgtgctga

SEQ ID NO: 1097 - protein, 394 aa, Thauera sp. MZ1T
MSLPRFIQIHTLHTYPAALLNRDDAGLAKRLPYGGAIRTRISSQCLKRHWRVADDAFSLAKLGVPMATRTRYVAELIRQRLIEQGIDEARAYATAEALLEALFGEKADKKKEGVKALQTGQAVLFGNEEIAYLARRCRDITGDFSDPVALKAEVAKFLKEEKKNIEAMKLGSGLESALFGRMVTSDLLANRDASVSVAHAFTVHEAQVENDYFTVVDDFAQAEDGAGSAGIFDTELASGLYYGYVVIDVPQLVANLEGIKVEDVFTIGADKRGLAGKVVQHLLHLIATVSPGAKRGSTAPYDWAKFVLVEAGDWQPRSLAAAFHDPIPLKGDSSIRGRAASKLAKEIAAFDAAYGMPTARRFLSLDELAVPAAERATLSQLGEWIAQTVRDGAC

SEQ ID NO: 1098 - DNA, 28 bp, Artificial sequence
  primer
atgtctaactttatcaatattcatgttc

SEQ ID NO: 1099 - DNA, 25 bp, Artificial sequence
  primer
ttacgcctcgccattattacgaacc

SEQ ID NO: 1100 - protein, 363 aa, Artificial sequence
  consensus sequence
  Variant (3)..(4): Xaa in position 3 to 4 is any amino acid
  Variant (6)..(6): Xaa in position 6 is any amino acid
  Variant (8)..(14): Xaa in position 8 to 14 is any amino acid
  Variant (20)..(23): Xaa in position 20 to 23 is any amino acid
  Variant (25)..(28): Xaa in position 25 to 28 is any amino acid
  Variant (31)..(32): Xaa in position 31 to 32 is any amino acid
  Variant (34)..(34): Xaa in position 34 is any amino acid
  Variant (40)..(41): Xaa in position 40 to 41 is any amino acid
  Variant (44)..(45): Xaa in position 44 to 45 is any amino acid
  Variant (47)..(96): Xaa in position 47 to 96 is any amino acid
  Variant (97)..(130): Xaa in position 97 to 130 is any or no amino acid
  Variant (132)..(170): Xaa in position 132 to 170 is any amino acid
  Variant (171)..(177): Xaa in position 171 to 177 is any or no amino acid
  Variant (185)..(195): Xaa in position 185 to 195 is any amino acid
  Variant (196)..(198): Xaa in position 196 to 198 is any or no amino acid
  Variant (200)..(202): Xaa in position 200 to 202 is any amino acid
  Variant (206)..(208): Xaa in position 206 to 208 is any amino acid
  Variant (210)..(213): Xaa in position 210 to 213 is any amino acid
  Variant (215)..(215): Xaa in position 215 is any amino acid
  Variant (217)..(217): Xaa in position 217 is any amino acid
  Variant (224)..(227): Xaa in position 224 to 227 is any amino acid
  Variant (228)..(233): Xaa in position 228 to 233 is any or no amino acid
  Variant (236)..(236): Xaa in position 236 is any amino acid
  Variant (238)..(241): Xaa in position 238 to 241 is any amino acid
  Variant (244)..(245): Xaa in position 244 to 245 is any amino acid
  Variant (247)..(248): Xaa in position 247 to 248 is any amino acid
  Variant (250)..(250): Xaa in position 250 is any amino acid
  Variant (252)..(258): Xaa in position 252 to 258 is any amino acid
  Variant (260)..(261): Xaa in position 260 to 261 is any amino acid
  Variant (263)..(263): Xaa in position 263 is any amino acid
  Variant (265)..(267): Xaa in position 265 to 267 is any amino acid
  Variant (268)..(281): Xaa in position 268 to 281 is any or no amino acid
  Variant (283)..(297): Xaa in position 283 to 297 is any amino acid
  Variant (299)..(300): Xaa in position 299 to 300 is any amino acid
  Variant (303)..(305): Xaa in position 303 to 305 is any amino acid
  Variant (307)..(320): Xaa in position 307 to 320 is any amino acid
  Variant (321)..(322): Xaa in position 321 to 322 is any or no amino acid
  Variant (324)..(324): Xaa in position 324 is any amino acid
  Variant (326)..(328): Xaa in position 326 to 328 is any amino acid
  Variant (331)..(346): Xaa in position 331 to 346 is any amino acid
  Variant (347)..(350): Xaa in position 347 to 350 is any or no amino acid
  Variant (352)..(362): Xaa in position 352 to 362 is any amino acid
FIXXHXLXXXXXXXLNRDDXXXXKXXXXGGXXRXRVSSQXXKRXXRXXXXXXXXXXXXXXXXXXXXXXXXXXXXXXXXXXXXXXXXXXXXXXXXXXXXXXXXXXXXXXXXXXXXXXXXXXXXXXXXXXXXLXXXXXXXXXXXXXXXXXXXXXXXXXXXXXXXXXXXXXXXXXXXXXXIALFGRMXXXXXXXXXXXXXXAXXXAHAXXXHXXXXEXDXFTAVDDXXXXXXXXXXGSXHXXXXEFXXGXXYXYXXXXXXXLXXNXGXXXXXXXXXXXXXXXXXAXXXXXXXXXXXXXXXPXXKQXXXAXXXXXXXXXXXXXXXXPXSXXXAFXXXXXXXXXXXXXXXXXXXXLXXXXXXXXXXXG

SEQ ID NO: 1101 - protein, 43 aa, Artificial sequence
  protein pattern
  Variant (2)..(2): Xaa in position 2 is Asp, Glu, Asn or Gln
  Variant (3)..(3): Xaa in position 3 is any amino acid
  Variant (5)..(5): Xaa in position 5 is any amino acid
  Variant (7)..(9): Xaa in position 7 to 9 is any amino acid
  Variant (10)..(10): Xaa in position 10 is any or no amino acid
  Variant (12)..(13): Xaa in position 12 to 13 is any amino acid
  Variant (14)..(14): Xaa in position 14 is any or no amino acid
  Variant (20)..(20): Xaa in position 20 is any amino acid
  Variant (21)..(21): Xaa in position 21 is Gly or Asn
  Variant (22)..(23): Xaa in position 22 to 23 is any amino acid
  Variant (25)..(25): Xaa in position 25 is any amino acid
  Variant (26)..(26): Xaa in position 26 is Ala, Leu or Val
  Variant (27)..(28): Xaa in position 27 to 28 is any amino acid
  Variant (30)..(30): Xaa in position 30 is Asp, Gly or Asn
  Variant (31)..(32): Xaa in position 31 to 32 is any amino acid
  Variant (34)..(34): Xaa in position 34 is any amino acid
  Variant (36)..(36): Xaa in position 36 is Ile or Val
  Variant (40)..(40): Xaa in position 40 is Cys or Ser
  Variant (41)..(41): Xaa in position 41 is any amino acid
IXXHXLXXXXPXXXLNRDDXXXXKXXXXGXXXRXRXSSQXXKR

SEQ ID NO: 1102 - protein, 26 aa, Artificial sequence
  protein pattern
  Variant (2)..(4): Xaa in position 2 to 4 is any amino acid
  Variant (5)..(5): Xaa in position 5 is any or no amino acid
  Variant (8)..(8): Xaa in position 8 is Ala, Ser or Val
  Variant (9)..(9): Xaa in position 9 is Phe, Ile or Leu
  Variant (10)..(10): Xaa in position 10 is Ser or Thr
  Variant (11)..(11): Xaa in position 11 is Thr or Val
  Variant (13)..(13): Xaa in position 13 is any amino acid
  Variant (14)..(14): Xaa in position 14 is Ala, Thr or Val
  Variant (15)..(16): Xaa in position 15 to 16 is any amino acid
  Variant (17)..(17): Xaa in position 17 is Asp or Glu
  Variant (18)..(18): Xaa in position 18 is any amino acid
  Variant (19)..(19): Xaa in position 19 is Asp or Glu
  Variant (20)..(20): Xaa in position 20 is Phe, Trp or Tyr
  Variant (21)..(21): Xaa in position 21 is Phe or Tyr
  Variant (22)..(22): Xaa in position 22 is Ser or Thr
  Variant (23)..(23): Xaa in position 23 is Ala, Thr or Val
  Variant (24)..(24): Xaa in position 24 is Leu or Val
AXXXXAHXXXXHXXXXXXXXXXXXDD

SEQ ID NO: 1103 - protein, 24 aa, Artificial sequence
  protein pattern
  Variant (2)..(2): Xaa in position 2 is Ala, Asn or Ser
  Variant (3)..(3): Xaa in position 3 is Ala or Ser
  Variant (4)..(4): Xaa in position 4 is Ala or Gly
  Variant (5)..(5): Xaa in position 5 is any amino acid
  Variant (6)..(6): Xaa in position 6 is Phe or Tyr
  Variant (8)..(8): Xaa in position 8 is any amino acid
  Variant (10)..(10): Xaa in position 10 is Ala, Ile or Val
  Variant (11)..(11): Xaa in position 11 is Cys, Asn, Ser or Thr
  Variant (12)..(12): Xaa in position 12 is Ile, Leu or Val
  Variant (13)..(13): Xaa in position 13 is Asp or Asn
  Variant (14)..(16): Xaa in position 14 to 16 is any amino acid
  Variant (18)..(18): Xaa in position 18 is any amino acid
  Variant (19)..(19): Xaa in position 19 is Ala, Glu or Ser
  Variant (20)..(20): Xaa in position 20 is Asn or Ser
  Variant (21)..(21): Xaa in position 21 is any amino acid
  Variant (23)..(23): Xaa in position 23 is Asp, Gly or Asn
  Variant (24)..(24): Xaa in position 24 is Ala, Asp or Glu
FXXXXXYXYXXXXXXXLXXXXGXX

SEQ ID NO: 1104 - protein, 10 aa, Artificial sequence
  protein pattern
  Variant (2)..(2): Xaa in position 2 is Ala or Asn
  Variant (3)..(3): Xaa in position 3 is Leu or Met
  Variant (4)..(4): Xaa in position 4 is any amino acid
  Variant (8)..(8): Xaa in position 8 is any or no amino acid
  Variant (10)..(10): Xaa in position 10 is Glu, Gly, Gln, Ser or Thr
IXXXGRMXAX

SEQ ID NO: 1105 - DNA, 900 bp, SYNECHOCYSTIS SP.
  CDS (1)..(900): transl_table=11
atgaataagggctttgtctccggtgaagaatttgcccgttggtatgccacagcccgacaaatggcgatcgcccatggcattgaaacaggggaattgaactggttattgcagggatggacggatttagaccggttaaccctacggttgcaggattttgcccatcgagagattgctttgcaagaaacttgggaaaatattcaacggggctggcgcagaagagtcgaggaaaaatatccagtgcaatacctgttggggcaaacccagtggcgtgattttgtgattaaagtcactgatgatgtactaattccccggccggaaacggagttaataatcgacatagtgcaacatgagcattctgccttatctccgtctaactgcgctgaccattgggtggatttgggtacggggagtggagccattgccctaggtttagccgccacgtttccccaggccctagtccatgccgtggattgcagcggctctgctttggcgatcgccagagaaaatgcccagttgaatcagtttggcgatcggattcaatttcatcaaggttattggtgggaacccctagagcatctgaagggccaggtccagggcatggtgtctaatccgccttacattccccaacgggaattggcccagttacaaccggaagtgattaagcacgaaccccttttagccctagatggcggccccgatggcctgcaagcagtggagcaactcattcggcgatcgccaacttatttaaagcccggaggtttttggttggtggaaatcatgaccggccaggcccccatggttgctgaacttttgagagctagtggagcctaccaagatattcaaattcaccgggacctagcaagcattgagcggtttgtttccgcccgtaccttgagttaa

SEQ ID NO: 1106 - protein, 299 aa, SYNECHOCYSTIS SP.
MNKGFVSGEEFARWYATARQMAIAHGIETGELNWLLQGWTDLDRLTLRLQDFAHREIALQETWENIQRGWRRRVEEKYPVQYLLGQTQWRDFVIKVTDDVLIPRPETELIIDIVQHEHSALSPSNCADHWVDLGTGSGAIALGLAATFPQALVHAVDCSGSALAIARENAQLNQFGDRIQFHQGYWWEPLEHLKGQVQGMVSNPPYIPQRELAQLQPEVIKHEPLLALDGGPDGLQAVEQLIRRSPTYLKPGGFWLVEIMTGQAPMVAELLRASGAYQDIQIHRDLASIERFVSARTLS

SEQ ID NO: 1107 - DNA, 1134 bp, Arabidopsis thaliana
  CDS (1)..(1134)
atgataagaatcttcccaagtctacggttaacctctttgctctctgccgctaaacctctttgctcatcttctccggcgaaaaaaccaccgcaatacacgtcgcttacagagtcaaaatcctctcggccgactaagtctctcagcataactcccaagacaccgctataccttaggacgccgtcgcacgcaacttctctatcggaggtttggaaatggcacgactgggcgaaagatctggcgtcctccgtagaggaatcttcgaagaattccgaagatactcttgactctgtcattctccaccgtgagctaaaatggctgatcgaagactcaatcgtagacgatcctttagtgattcttcatagaagcgaaatcgcggacaacggcgagaagaatgtgaaattgagagcgtcgttggaggagctttacgatttatggaggcagaggatcgagaagcgtcggccgtttcagtacgtcgtcggatgcgagcattggagagatctagtgttgtgcgttgaggaaggggttctaattccgagaccggagacggaactgatcgtcgatatggtggaggagcttgtaacgagagatgaatggtttaagaaagatatttgggctgatcttgggacaggaagtggtgctattgcgatcggcattgctaaagtcttgggaagccgtgggagagttatagctacagatctcagtccggtggcgatcgccgtcgccggccacaatgtgcagagatacagccttgaggggatgattgaagtgagagaaggatcttggtttgagcctttgaaagatcttgaaggaaaacttgtggggcttgtgagtaatccaccatacataccaagtgatgacattccaggcctacaagctgaagttggtagacacgaaccgaaacttgcattggatggtggtattgatggaactgatagtctttttcatctctgtcatggggcttctcggatgcttcaacctggtggctttttcgttttcgagactaatggagagaagcaaagcaagatgatcgtagattacatgatgaccagtgatctcaaagactgtttctctgatttgaagatagtttctgattttgctggaatcaatcggttcgtgactggctttcgtctctga

SEQ ID NO: 1108 - protein, 377 aa, Arabidopsis thaliana
MIRIFPSLRLTSLLSAAKPLCSSSPAKKPPQYTSLTESKSSRPTKSLSITPKTPLYLRTPSHATSLSEVWKWHDWAKDLASSVEESSKNSEDTLDSVILHRELKWLIEDSIVDDPLVILHRSEIADNGEKNVKLRASLEELYDLWRQRIEKRRPFQYVVGCEHWRDLVLCVEEGVLIPRPETELIVDMVEELVTRDEWFKKDIWADLGTGSGAIAIGIAKVLGSRGRVIATDLSPVAIAVAGHNVQRYSLEGMIEVREGSWFEPLKDLEGKLVGLVSNPPYIPSDDIPGLQAEVGRHEPKLALDGGIDGTDSLFHLCHGASRMLQPGGFFVFETNGEKQSKMIVDYMMTSDLKDCFSDLKIVSDFAGINRFVTGFRL

SEQ ID NO: 1109 - DNA, 915 bp, Nostoc sp. PCC 7120
  CDS (1)..(915): transl_table=11
atgacaaatcgacaggcaaatgtagtttctggtttacaactttggcagtggcgcatcaaagcaaatcaagccgcgatcgctcataatattcccatagcagaagtggattggctgttgcaagagatagctgatttagaccgcttggcactgcgtttagagtcgtttaaagactggtctgaagtgccgatgggtttatctctggacaagttagaccaactttggcagaggcgattaggcgatcgcttacccgtacagtacatcgccggagttacaccttggcgcaagttcaaacttacggtgtcgagcgctgttttgattcctagaccggaaactgagtgcttgattgatttagctgtagctgctgttgctaacagcgaatcggctatgcacttacaacaaggacattgggtagacttgggaacgggtagtggggcgatcgccttggggttagctgatgctttccctgaagccacaattcatgctgtagattgcagtgtggaagctttggcgatcgcccagcaaaacgcctggaacgcaggtttatttgataggatgcgattttatcagggtcgctggtgggagcctttaagtttgctgaaaggtcaatttaatggcatggtatctaaccctccttatattcccagcgacattgtgcctacgctacaaccagaagtagtaaaccatgaaccacatttagccttagatggcggtgcggatggcttagatgccatccgccatctaatagaagttgcccccagttatttacgacctgggggtatatggttaattgaaatgatggcgggtcaagcggacgcggtacaagctcttctgctgcaacagggcagttatagtaatattcaaattcactctgatttagctggtattgagcgtttcgctttagcacagattcagtga

SEQ ID NO: 1110 - protein, 304 aa, Nostoc sp. PCC 7120
MTNRQANVVSGLQLWQWRIKANQAAIAHNIPIAEVDWLLQEIADLDRLALRLESFKDWSEVPMGLSLDKLDQLWQRRLGDRLPVQYIAGVTPWRKFKLTVSSAVLIPRPETECLIDLAVAAVANSESAMHLQQGHWVDLGTGSGAIALGLADAFPEATIHAVDCSVEALAIAQQNAWNAGLFDRMRFYQGRWWEPLSLLKGQFNGMVSNPPYIPSDIVPTLQPEVVNHEPHLALDGGADGLDAIRHLIEVAPSYLRPGGIWLIEMMAGQADAVQALLLQQGSYSNIQIHSDLAGIERFALAQIQ

SEQ ID NO: 1111 - DNA, 846 bp, Streptomyces coelicolor A3(2)
  CDS (1)..(846): transl_table=11
gtgaacctgctgctcgcggaggtggcccaggccacccagcggctggccgacgccggcgtgccctcgccgcgcaccgacgcggaggaactcgccgcgtacctgcacggcgtcaagcggggcgagctgcacaccgtgccggacgcggacttcgacgcccggtactgggaggtcgtcgcccgccgcgaggcgcgcgagccgctccagcacatcaccggccgcgcctacttccgctacctggagctccaggtcggccccggcgtcttcgtgccccgccccgagaccgagtcggtcgtcggctgggccatagacgcggtgcgcgccatggacgtcgtcgagccctgcatcgtcgacctgtgcaccggctcgggcgccatcgcgctcgccctcgcccaggaggtgccgcgctcgcgcgtgcacgccgtggagctgtccgaggacgccctcaagtggacgcgcaggaacatggaggggtccagggtcgacctgcgccagggagacgccctgacggccttcccggacctcgacggccaggtcgacctggtggtctccaacccgccgtacatcccgctcaccgagtgggagtacgtcgcgcccgaggcccgcgaccacgatccggagctggccctgttctccggcgaggacggcctcgacctgatccgcggcctggaacgcaccgcgcaccgcctgctgcgccccggcggcgtggtcgtcgtcgagcacgccgacacccagggcggccaggtgccgtggatcttcaccgaggagcggggctgggccgacgcggccgaccaccccgacctcaacaaccgacctcgtttcgcgacggcccgcaaggcactgccgtga

SEQ ID NO: 1112 - protein, 281 aa, Streptomyces coelicolor A3(2)
MNLLLAEVAQATQRLADAGVPSPRTDAEELAAYLHGVKRGELHTVPDADFDARYWEVVARREAREPLQHITGRAYFRYLELQVGPGVFVPRPETESVVGWAIDAVRAMDVVEPCIVDLCTGSGAIALALAQEVPRSRVHAVELSEDALKWTRRNMEGSRVDLRQGDALTAFPDLDGQVDLVVSNPPYIPLTEWEYVAPEARDHDPELALFSGEDGLDLIRGLERTAHRLLRPGGVVVVEHADTQGGQVPWIFTEERGWADAADHPDLNNRPRFATARKALP

SEQ ID NO: 1113 - DNA, 876 bp, Thermosynechococcus elongatus BP-1
  CDS (1)..(876): transl_table=11
gtgagtggtgaggcgctccaaagatggtggcattgggcccaggggatcattcctgcccctgagcgcgagagtggtctgcgggagttaaaacaatttctcagggcctttacagggctgagtcccctggaaatcacactgcgccgattcccgccccagattcatctgaaacttccccttacagaactccaagagcggtggcaacgccgctggcaagagcgagtccccctacaatatctgattggtgtggctcactggcacgatctcgaattagtcgtgacccccagtgtgctgattcctcggccagaaaccgaggagttacttgccgtcgtcgcagcaacggtacccccttggcaacagcaggggcattggctggatttgggtacggggagtggggcgatcgccattgggttggcgcggttatttccggcagcgctgattcatgctgtggattgtagctctgaggccctagaggtggcgcaagttaatattcaaaagtacgctttgggcgatcgcgtgcggtgctacgttgggaattggtttgaccccattgtgcctctgcaagggcaggtgcaggggattgtcagcaatcctccctatattcccaccagcgtcgtggccaccctccaaccggaggtgcagtaccatgaacccctccttgccctcgatggcggtacggatggcttgcaggccattcgccagattcttgagacggcgccagagtatttgcaaccccaaggctggctctttattgaattgatggccacccaaggaaaagcagtggcagctttggcaatggctacccaagcctatgaacgggtggaaatccttcgagatctgagtggccacgatcgcttcttgctcgctcaaacaccttag

SEQ ID NO: 1114 - protein, 291 aa, Thermosynechococcus elongatus BP-1
MSGEALQRWWHWAQGIIPAPERESGLRELKQFLRAFTGLSPLEITLRRFPPQIHLKLPLTELQERWQRRWQERVPLQYLIGVAHWHDLELVVTPSVLIPRPETEELLAVVAATVPPWQQQGHWLDLGTGSGAIAIGLARLFPAALIHAVDCSSEALEVAQVNIQKYALGDRVRCYVGNWFDPIVPLQGQVQGIVSNPPYIPTSVVATLQPEVQYHEPLLALDGGTDGLQAIRQILETAPEYLQPQGWLFIELMATQGKAVAALAMATQAYERVEILRDLSGHDRFLLAQTP

SEQ ID NO: 1115 - DNA, 882 bp, Prochlorococcus marinus subsp. marinus str. CCMP1375
  CDS (1)..(882): transl_table=11
atgtcttttgaaagatttttttcagcagaagaaattttaatttggagaaagcaagagttgtctaaaggaggccgagcagtagatcttgattggttattagatatcggaggaggattgggttggagtactttgcaagaattgaaaatttttcaaagctcttttcataagcttgatttatcacttgaagaactctcattgatttggatgagacatttaagtgatcaaattcctttacagcatctagtaggtaaatgtccttggagagactttgagctgaaagtcaattcttcagctttgatacctcgccaagaaactgaaatattgatagatatagctttgaaaaaggtagacgcaggattaatgaaatatgggagatgggctgatttaggtaccggttctggagcattagcagttgcattggcaagagctttgcctttatgggaaggtcatgcagctgattgctgcaatgatgccttagctttagcagaatcaaacataaataccttaactgaaaatgccaatgtttctttgcatttaggagattggtgggagcctctaaaaccttggtggggaaattttgatttagttgttgctaatccgccttatattcctaagactcatttaagtgaacttgatcctgttgttcgtgatcatgaaccaattttggcgcttagtggcggggatgatggaatggattcatgccgtaaagtaatcaaaggtgcaatgaaaggccttcgttcgggtgggtggttgctgttagaacacaattttgatcaaagtgaacaggcattaaatcttatggttgactctggctttttggaagttgattttgaaaatgatttggaaggagtaagacgttttggattagctcttcgcccttaa

SEQ ID NO: 1116 - protein, 293 aa, Prochlorococcus marinus subsp. marinus str. CCMP1375
MSFERFFSAEEILIWRKQELSKGGRAVDLDWLLDIGGGLGWSTLQELKIFQSSFHKLDLSLEELSLIWMRHLSDQIPLQHLVGKCPWRDFELKVNSSALIPRQETEILIDIALKKVDAGLMKYGRWADLGTGSGALAVALARALPLWEGHAADCCNDALALAESNINTLTENANVSLHLGDWWEPLKPWWGNFDLVVANPPYIPKTHLSELDPVVRDHEPILALSGGDDGMDSCRKVIKGAMKGLRSGGWLLLEHNFDQSEQALNLMVDSGFLEVDFENDLEGVRRFGLALRP

SEQ ID NO: 1117 - DNA, 870 bp, Prochlorococcus marinus subsp. pastoris str. CCMP1986
  CDS (1)..(870): transl_table=11
atgtttcttatttctgctgaaaaattttcattgtggaaaaaaaaacaattatcaaaaggaggggataaccattctcttaatcttttgcttgaatcattaggtggattatcaaatatagaattaaatttacttaaaataaatttagaaaaaaatttaaattttaaagtaaatttagatttgattgagtctttttgggataaacaccttaatacctctatacctatacaatatttaagtggaatctctttttggaggaatctaaaattagaagtttcaaatagagttcttatcccgcgacctgagacagaacttattattgatattatttcgggcatattcaaaaataaggaagaaaaaataacctttgtagatctaggaactggttcgggtgcgattagcatagctttagcacttgagaatccaaactggaatggaattgcaactgatatagataaaaatgctattaaaattgcatcgaggaattttgcaacttattctaatcaatcaaatttgaaattttataatggaaattggtgggatcctcttaaaaatttcaaaggtgaaattgattttgcggtatcaaatcctccatatattccgcaagatacttatgaagtcttaccaatagaggtaaagaattttgaacctaaacttgctcttttgggagggcaagaaggtctagatcatatcaatcaaatagttcaaaatgcgcccctatatttaaaaaataaagggtggttattgattgagaatcattttgatcaaggtgagaaagttaaaaaattatttcttgaaaatagatttacttctgtaaaagttttaaaagatttttctgggattggaagatttacaataggaagatataaataa

SEQ ID NO: 1118 - protein, 289 aa, Prochlorococcus marinus subsp. pastoris str. CCMP1986
MFLISAEKFSLWKKKQLSKGGDNHSLNLLLESLGGLSNIELNLLKINLEKNLNFKVNLDLIESFWDKHLNTSIPIQYLSGISFWRNLKLEVSNRVLIPRPETELIIDIISGIFKNKEEKITFVDLGTGSGAISIALALENPNWNGIATDIDKNAIKIASRNFATYSNQSNLKFYNGNWWDPLKNFKGEIDFAVSNPPYIPQDTYEVLPIEVKNFEPKLALLGGQEGLDHINQIVQNAPLYLKNKGWLLIENHFDQGEKVKKLFLENRFTSVKVLKDFSGIGRFTIGRYK

SEQ ID NO: 1119 - DNA, 921 bp, Prochlorococcus marinus str. MIT 9313
  CDS (1)..(921): transl_table=11
atggcattgctggagatttccgcagcagagctattggcctggcgtcgtttgcagttggctgaaggaggccgtgctgttgattttgactggttgcttgatttgggtggaggtttgcgctggagcgatcttcagcagctttatctcgacccacgccgttcagtgctgcttgagcgatctcttgatcagctcgaaatgatctggaagcaacatcttgatcatcacattcctcttcagcatttgatcggttactgcccttggagggattttgagctggaggtcagtgcggtggcattgattccccgacaagagacggagctgttggtggattttgctttgcaagcattggttcggaaaccttttggtcgctgggccgatttggggacagggtcaggagcactagctgtggcgttggctcgcgctctccctgtttggcgaggacatgcagtggattgcagcatcgaggccttggctttggcgaaacggaacttgcaaaggcttgcgccccatgccttatggcagctgcatcagggcagttggtgggagcctttgcggccttggtggggagagttcagcttggtactggtcaatcctccctacatcccagaagttgtaatggctcaacttgaacccgtggtccgtgatcatgagccgcatttggctctatacgggggagccgatgggttggtggccactcgtcaaatcattgctggtgccatgcaggccttagagcctggtggttggctgttcttggaacaccaccatgaccagagcgatgccgtgctggctttgatgcgtcagcagggtttggagaatgtggactacaagtcagatttactgggggtaaggcgctttgccattgctcggcatcctgattatcaagactctttgaaccatggcagttctgccctcggctgttcttga

SEQ ID NO: 1120 - protein, 306 aa, Prochlorococcus marinus str. MIT 9313
MALLEISAAELLAWRRLQLAEGGRAVDFDWLLDLGGGLRWSDLQQLYLDPRRSVLLERSLDQLEMIWKQHLDHHIPLQHLIGYCPWRDFELEVSAVALIPRQETELLVDFALQALVRKPFGRWADLGTGSGALAVALARALPVWRGHAVDCSIEALALAKRNLQRLAPHALWQLHQGSWWEPLRPWWGEFSLVLVNPPYIPEVVMAQLEPVVRDHEPHLALYGGADGLVATRQIIAGAMQALEPGGWLFLEHHHDQSDAVLALMRQQGLENVDYKSDLLGVRRFAIARHPDYQDSLNHGSSALGCS

SEQ ID NO: 1121 - DNA, 891 bp, Synechococcus sp. WH 8102
  CDS (1)..(891): transl_table=11
gtgaccaccgcccagcagctggagggggcatcgctgctgagttggcgacgtcggcagcttcagcgaggggggcgtcgtgttgacttcgattggcttttggacctcgccggggggctgtcatggtcgtctctccagcgcctgctggtggagccgcagcgcactgtgcagttaaaggtttcgctgaaggatctcgagcagatctgggggcatcatctcgaccaagccattcccctgcagcatcttgttggccgctgtccctggcgcgatcttgaactggcggtgtcggccgcagccctgatcccgcgccaggaaacggaagtgcttgtggatctggcgctggagacgatcgccgggatgtccatcgaacgttgggccgatctggggacaggatctggagccatcgccgttgcccttagtcgggcgatgccggcgaccccgggccatgctgtcgatctcagccccaatgcccttgcattagccaggaccaatcttgaggctctggctcccgagggggagtggcatctgcaccagggccgttggtgggaaccgctggagccgtggtggggacacatcgatcttgtggtctgcaaccccccttacatcccgtccgacctgatcctcaatctcgatcctgtggtccgtgatcatgaaccccatctggccttagccggtggaatcgacggtttgcaggcgatccgtgaggttgtggcgggagcttgtcgtgctctggctccgggagggtggatcctgatcgagcatcaccacgatcagagtgcgccagcgctcaacctgttgaaacaggctggcttgagctccatccgtgcggcccgagatctcgaaggcgtcaaccgcttcgctctggcccgccgatcgctctccccttgctcatga

SEQ ID NO: 1122 - protein, 296 aa, Synechococcus sp. WH 8102
MTTAQQLEGASLLSWRRRQLQRGGRRVDFDWLLDLAGGLSWSSLQRLLVEPQRTVQLKVSLKDLEQIWGHHLDQAIPLQHLVGRCPWRDLELAVSAAALIPRQETEVLVDLALETIAGMSIERWADLGTGSGAIAVALSRAMPATPGHAVDLSPNALALARTNLEALAPEGEWHLHQGRWWEPLEPWWGHIDLVVCNPPYIPSDLILNLDPVVRDHEPHLALAGGIDGLQAIREVVAGACRALAPGGWILIEHHHDQSAPALNLLKQAGLSSIRAARDLEGVNRFALARRSLSPCS

SEQ ID NO: 1123 - DNA, 861 bp, Gloeobacter violaceus PCC 7421
  CDS (1)..(861): transl_table=11
gtgagacagccggccgacggttggcgggagcaagccctggccgaggcccgggttcacgacattgatgcggccgaaatcgactacctgatcgaagcggtcacaggtctcgaccggctgcgggtacgccttggcgggccacaagcactcgaagcacaccgcgaaaagctcgccgccctttggcgtcggcgtatcgaagaagcgatgccgctgcagtacctgctgggcaccgcccactggcgcgatctgcaattgcaggtgaaccctgcggtgctcattccccgaccggagagcgaggcgctggtggatgttgccgtcgatttttgccgctcctgcgccggggcgcgggtggtggatttgggcaccggttccggggcaatcgccgtcgccgtggcccgcgccctaccgggagccaccgtctgggcggtggacgcttcggaggcggctctcgtggtggcaggagccaatatcgagcgctacgggctttctgaacaggtgcatttgctgcggggcaactggtttgtacctttgcccacgcagcccttcgatgccgtgttgagcaacccgccctacatcccgagcgctgaaattgccgcactgatgcccgaggtgcgcctgcacgaaccgctctcggctctcgacggcggttcagacggtcttgatgcagtccggcagattattgccgatgccgcccggcatctgcggccgggcggcatcctcgctctcgaagtgatggcgggtcagggcccgacggtagtgcaactattggcccgcgacagtcgctacggctgtatccgcacggtgcgcgactgggcggggatcgaacgcatcgtggttacgtacgcttgggcgagaggatcataa

SEQ ID NO: 1124 - protein, 286 aa, Gloeobacter violaceus PCC 7421
MRQPADGWREQALAEARVHDIDAAEIDYLIEAVTGLDRLRVRLGGPQALEAHREKLAALWRRRIEEAMPLQYLLGTAHWRDLQLQVNPAVLIPRPESEALVDVAVDFCRSCAGARVVDLGTGSGAIAVAVARALPGATVWAVDASEAALVVAGANIERYGLSEQVHLLRGNWFVPLPTQPFDAVLSNPPYIPSAEIAALMPEVRLHEPLSALDGGSDGLDAVRQIIADAARHLRPGGILALEVMAGQGPTVVQLLARDSRYGCIRTVRDWAGIERIVVTYAWARGS

SEQ ID NO: 1125 - DNA, 870 bp, Rhodopseudomonas palustris CGA009
  CDS (1)..(870): transl_table=11
gtgagcgacgctccgacgattgcatccgcgcgtcgtcgtctcacccggcaattccaggacgcgggcatcgagtccgccgcactcgatgcccggctgttggtcggcgaggtcgccgggctcgatctcaccgggcttctgattcaggccgagcgtatcttgaccgctgaggagaacgagcagctgcagtcgttggcggcgcgccggcttggcggcgagccggtggcgcgcatcctcgggatgcgggagttctgggggctgccgttcgagctctctgccgacacgctggtgccgcgccctgatactgagacgatcgtagaggccgcactcgcgattctggccgaacgatcctcactagcgccgcggattctcgatatcgggaccgggaccggtgcaatcctgctggcgctgctacacgaatgtccggacgccgtcggcgttgcgacagacatcagcctcggcgcgctacgcaccgcgcgaggcaatgcgcagcgtcttgggcttgctgatcgcgcctgcttcgtcgcctgcgactacgcttcggcgctgtgcgggccgttcgacctgattgtttccaacccgccctatattccaggtaacgagattgcggcgcttgatcgcgaggtgcgggaccacgatccgcgacgcgcgctcgacggtggcgacgacgggctcgatgcttaccggaaaatcatccccgaatcggtccggctgttgcaaccaggcggcgtgttggtggttgaaatcggacagggccaggaaggcgatgtaagcgccctgatgcaggcttcggggttaaccgtctctgaccccttccgtcctgatttgtcagggattttccgggcggtgacagggcgtctcgcggtcctctga

SEQ ID NO: 1126 - protein, 289 aa, Rhodopseudomonas palustris CGA009
MSDAPTIASARRRLTRQFQDAGIESAALDARLLVGEVAGLDLTGLLIQAERILTAEENEQLQSLAARRLGGEPVARILGMREFWGLPFELSADTLVPRPDTETIVEAALAILAERSSLAPRILDIGTGTGAILLALLHECPDAVGVATDISLGALRTARGNAQRLGLADRACFVACDYASALCGPFDLIVSNPPYIPGNEIAALDREVRDHDPRRALDGGDDGLDAYRKIIPESVRLLQPGGVLVVEIGQGQEGDVSALMQASGLTVSDPFRPDLSGIFRAVTGRLAVL

SEQ ID NO: 1127 - DNA, 855 bp, Geobacter sulfurreducens PCA
  CDS (1)..(855): transl_table=11
atgacggaaaagccggaaatctggaccattcgcaaggttctcgactggaccaggggctacctggctgaaaagggagtcgagaatgctcgcctggaaaccgaatggctcctgagcgccgccctggggcttgatcgggtggggctctacgtcaatttcgacaaacccctgaacccggaggaactggccgcctgccgcggactcgtggcgcgccgggccaagcgggaaccacttcagtatattctcggtacccaggagttctgcggtctcgacttcgtcgtgacgccgtcggttctcatcccccggcatgacaccgaggtgattgtggaagaggcgctccgtcgcgccccccatgctgctgcggtcctcgatatcggtgtgggcagcggctgtatcgccgtggccttggccaagcaacttccccacgcccaggtagtgggagtggagcagtctcccggcgccatcgccctggcccagcggaacgcggaacggcacggcgcgcgggtgaccctcttcgagggttccctgttcgaacccttaggagaccagcggttcgacctgatcgtctccaatcccccttatatccccaccgccgacctggaggcgcttcagccggaggttcgggagtacgagccccgtgccgccctggacggtggatccgacggtctcgatttctatcggcttatcgttccggccgctccggagtacctgaatcccggcggctggctcatggtcgaactgggcatcggtcaggcggagacggtgctcggcatgttctcccgtaccggtttctgcgattgttttaccgctcaagaccccaacggcatagaccgggtggtcggcggaaggatcggatag

SEQ ID NO: 1128 - protein, 284 aa, Geobacter sulfurreducens PCA
MTEKPEIWTIRKVLDWTRGYLAEKGVENARLETEWLLSAALGLDRVGLYVNFDKPLNPEELAACRGLVARRAKREPLQYILGTQEFCGLDFVVTPSVLIPRHDTEVIVEEALRRAPHAAAVLDIGVGSGCIAVALAKQLPHAQVVGVEQSPGAIALAQRNAERHGARVTLFEGSLFEPLGDQRFDLIVSNPPYIPTADLEALQPEVREYEPRAALDGGSDGLDFYRLIVPAAPEYLNPGGWLMVELGIGQAETVLGMFSRTGFCDCFTAQDPNGIDRVVGGRIG

SEQ ID NO: 1129 - DNA, 1005 bp, Nasonia vitripennis
  CDS (1)..(1005)
atgacaattcaccaacaaaaacctttgaagctgcccgttctgttcatgtgtaataattgtgacgacgaaaacaagaaaaacacgattgcttatgtagtcaagcattggcaagagaggtttctacaggagggtattgctgagccgattgaatcgatagaacacattgtttgtcacgtgattggatcgaaaaagataacggacttgattaatcatcacgaaagagttctcgacaaagagcagttggaaaaattagagctgctatgcgaatgccgattatcaaggatgccggtccaatatattatcggcgaatgggattttcgagaactgacgttaacgttggaacctcctatttttataccacgcccggagaccgagattttggttgattttttattgacaagaatatctgattccgcgaataagaacaagaacattttagaaataggatgcggctctggtgcaatcagtttgtcggtattgcactcgagtcaaaatgcgaatattgttgcaatcgacgtgaatccaagagcgtgcgaactcacaattcggaacgcaaaaaatttagatctcgatatgcgtttaacggttctgaatgcagccatacagaaagatggaaaaatcgaggtgaaaaaagcctacggaacgaataaagaagaagtcgatttcagtaaaagaaaattcgactttatagtcagcaatcctccttacataccaaccaagagcgtgtttgagctgcaaccggaaataaaattatacgaagatatacgagctttggatggcggggatgatggtttaaagtggatcgagccgatcctcaaatacgcgtccgaagctttaaacgttggaggatatctgatactggaagtggattctagtcatcccgagagaataaaattcctagtcgaaaagtattatgcaaatcagctgaaattcaagcacatccacaaagactattgtaacaaggagcgaattgtagaaatcttgaaaataaatagtagttcttaa

SEQ ID NO: 1130 - protein, 334 aa, Nasonia vitripennis
MTIHQQKPLKLPVLFMCNNCDDENKKNTIAYVVKHWQERFLQEGIAEPIESIEHIVCHVIGSKKITDLINHHERVLDKEQLEKLELLCECRLSRMPVQYIIGEWDFRELTLTLEPPIFIPRPETEILVDFLLTRISDSANKNKNILEIGCGSGAISLSVLHSSQNANIVAIDVNPRACELTIRNAKNLDLDMRLTVLNAAIQKDGKIEVKKAYGTNKEEVDFSKRKFDFIVSNPPYIPTKSVFELQPEIKLYEDIRALDGGDDGLKWIEPILKYASEALNVGGYLILEVDSSHPERIKFLVEKYYANQLKFKHIHKDYCNKERIVEILKINSSS

SEQ ID NO: 1131 - DNA, 987 bp, Tribolium castaneum
  CDS (1)..(987)
atgctatacttacgtaaggccataccacattcaccacatttttgcacaaatttctcaaacattttcttgcaaaaaattgtgaggttaaaaaacacaagcgtcaacaaaactggggaatttacgtcctgtcaggttggtgcactatttgaaacttggcgccaaaaattcgaccaaaattcgatttcggagcctcgagagtcgattgagtatattttagcacattgtttggggacacctcggatttctgacgtttacaaataccgggatatggttttggatgaggatcgcgttaaattggtcgaatctttatgcttgaaaaggctacaaaagcttccggttcaatacgtgttaggtgagtgttacttccggcaattggtgttgaaaatgtctccgccggtgttcatcccccgaccagagacggaacaacttgtagatatcgttttgggggaaatagatcggaaaaattgtcgtcattttttggagttgtgttgcggcagcggtgccattgcgttatctctcttacaagaacgtccgcaaataaaaggcactgctttggatcaatcgaaggcggcttgtcacttaacaaaagaaaatgcacaaaaggccggtttaaacaaacgcatccgtatcattcagagccaactagcccagtggcaccgttgcgaaaaattcgatatcatcgtctcgaatccgccttatgttttcagcaaggatttggataagctacaacccgaaattaaattgtacgaggatttgcaggctttggacggaggtgttgacggtttaaaagttattaaacaaatcctcgaattatcatccgaatgtttaaacatgaatgggaaattgtttcttgaagtggaaccacgtcatccgacgctgctgcaagattatttaaccgagtttgtcccggggctggcttatgccgcgacctacaaggatttatacgccaaagatagattcgtcgagataattaaaaccatccaataa

SEQ ID NO: 1132 - protein, 328 aa, Tribolium castaneum
MLYLRKAIPHSPHFCTNFSNIFLQKIVRLKNTSVNKTGEFTSCQVGALFETWRQKFDQNSISEPRESIEYILAHCLGTPRISDVYKYRDMVLDEDRVKLVESLCLKRLQKLPVQYVLGECYFRQLVLKMSPPVFIPRPETEQLVDIVLGEIDRKNCRHFLELCCGSGAIALSLLQERPQIKGTALDQSKAACHLTKENAQKAGLNKRIRIIQSQLAQWHRCEKFDIIVSNPPYVFSKDLDKLQPEIKLYEDLQALDGGVDGLKVIKQILELSSECLNMNGKLFLEVEPRHPTLLQDYLTEFVPGLAYAATYKDLYAKDRFVEIIKTIQ

SEQ ID NO: 1133 - DNA, 870 bp, Prochlorococcus marinus str. AS9601
  CDS (1)..(870): transl_table=11
atgctttgcatttctgtaaaggaatttttattgtggaaaaaaaagcaactttcaaaaggtggtgatcaacaatcttttgaagttttacttgattgtttaggcgatatttcgactagagatctaaatttgaaaattttaaatcctaagggaaacttacatttaaaaaaaaacttagaatttttggagtctgtttgggaagatcatttaataagatcttgcccaattcaatacctttgcggattaacttattggagagacttaaaattaaaagttacaaataaagtacttattcccagaccagagacagagctcatagtagatattgtcttcaatatatttagaaggaagtcagagaaattattttttgctgaattagggactggatcaggcgctataagtattgcgttagcattggcttatccatttagcaaaggagtggcaactgatgtagatcaagacgcattagaaatagctacaaaaaattatataaattcttccaaacaatcaaatttgaaattttattgtggaaattggtggtcacctcttgaaaattttaaaggaaaattagaccttgctatttcaaacccgccatatattcctaaagatacttatgaaaaattacccaaagaagttaaaaatttcgaacctaaagttgctttattaggcggtgaagatggtttaaaacacattagggaaataatacaaaaagcaccaatatttttaaaagagaagggctggctaattttagagaatcattttgatcaaggcgaaaaagtaaaacaactttttattaaaaataaatttacatcaatagaaattgtgaaagatctttcaggtattggtaggtttaccattggaagatataaataa

SEQ ID NO: 1134 - protein, 289 aa, Prochlorococcus marinus str. AS9601
MLCISVKEFLLWKKKQLSKGGDQQSFEVLLDCLGDISTRDLNLKILNPKGNLHLKKNLEFLESVWEDHLIRSCPIQYLCGLTYWRDLKLKVTNKVLIPRPETELIVDIVFNIFRRKSEKLFFAELGTGSGAISIALALAYPFSKGVATDVDQDALEIATKNYINSSKQSNLKFYCGNWWSPLENFKGKLDLAISNPPYIPKDTYEKLPKEVKNFEPKVALLGGEDGLKHIREIIQKAPIFLKEKGWLILENHFDQGEKVKQLFIKNKFTSIEIVKDLSGIGRFTIGRYK

SEQ ID NO: 1135 - DNA, 921 bp, Prochlorococcus marinus str. MIT 9303
  CDS (1)..(921): transl_table=11
atggcattgctggagatttgcgcagcagagctattggcctggcgtcgtttgcagttggctgaaggaggccgtgctgttgattttgactggttgcttgatttgggtggaggtttgcgctggagcgatcttcagcagctttatctcgatccacgacgttcagtgctgcttgagcgatcccttgatcagctggcaatgatctggaagcaacatcttgatcatcacattcctcttcagcatttgatcggttgctgcccttggagggacgttgagctggaggtcagtgcggcggcattgattccccgtcaggagactgagctgttggtggattttgctttgcaagcatttgctcggaaaccttttggttgctgggccgatttggggacaggttcaggagcactagctgtggcattggctcgcgcgctccctgtttggcgtggacatgcagtggattgcagcatcgaggccttggctttggcgaaacggaacttgcaaaggcttgcgccccatgccttatggcagctgcatcagggcagttggtgggagccattgcggccttggtggggagagttcagcttggtgctggtcaatcctccctacatcccagaagctgtaatggctcaacttgaacctgtggtccgtgatcatgagccgcatttggctctatgcgggggagctgatgggttggtggccacacgtcaaatcattgttggtgccatgcaggccttagagcctggtggttggctgttcttggaacaccaccatgaccagagcgatgccgtgctggctttgatgcgtcagcagggtttggagaatgtggagtacaagtcagatttactgggggtaaggcgctttgccattgctcggcatcctgaacatcacgactctttgaaccatggcacttctgccttcggctgttcttga

SEQ ID NO: 1136 - protein, 306 aa, Prochlorococcus marinus str. MIT 9303
MALLEICAAELLAWRRLQLAEGGRAVDFDWLLDLGGGLRWSDLQQLYLDPRRSVLLERSLDQLAMIWKQHLDHHIPLQHLIGCCPWRDVELEVSAAALIPRQETELLVDFALQAFARKPFGCWADLGTGSGALAVALARALPVWRGHAVDCSIEALALAKRNLQRLAPHALWQLHQGSWWEPLRPWWGEFSLVLVNPPYIPEAVMAQLEPVVRDHEPHLALCGGADGLVATRQIIVGAMQALEPGGWLFLEHHHDQSDAVLALMRQQGLENVEYKSDLLGVRRFAIARHPEHHDSLNHGTSAFGCS

SEQ ID NO: 1137 - DNA, 900 bp, Synechococcus sp. WH 7803
  CDS (1)..(900): transl_table=11
atgccaacaacgcgttgttccgcgcaagacctgctggcctggcgccaatccctgctcatgcaaggaggccgcgctgttgattttgactggctgctgatgatgcgcggcgatctcggctgggcggctatgcaaaagctgcgcatcctgccggaatcaaccgttcatctcgccgcatccctccatgacctggagttgttgtggcatcgacatgtcaccgaacacgttccccttcagcatctggtgggacggtgtccatggcgagatgtggagttgcaggtcagccccgctgcgttgattccgcgccaggagactgaactgctgattgatctggccttgcagtgcctgaagccctctgagtcagaggctctccctcaggctggagtctgggctgatctcggcactggcagcggcgctttagcggtcgcgctcgcccgatccttgcctggttgggaggggcatgccgttgatctcagcgccgaggctcttgaactggcgcgagccaatctccgatcactcgcgccttcgccttgctggacgttgcatcagggcagctggtgggagcccctggagccctggtggggcaccgtgcacctggtggtttcgaaccctccgtacattcctcgtgttcaggtgcaggggctcgagccggtggttcgcgatcatgaaccccatctcgccctctcaggcggtgatgacgggctggactgttgccgggctcttatttctggcgccccgagggctctggctccagggggatggctcttgctggagcatcaccatgaccagagcgaagctgttttggtgctgctgcgcgatgcaggcctcgaggctgttcaggcccgtcctgaccttcagggcgtgatgcgtttcgccttggcgcggcgtcccttgcgaaggtga

SEQ ID NO: 1138 - protein, 299 aa, Synechococcus sp. WH 7803
MPTTRCSAQDLLAWRQSLLMQGGRAVDFDWLLMMRGDLGWAAMQKLRILPESTVHLAASLHDLELLWHRHVTEHVPLQHLVGRCPWRDVELQVSPAALIPRQETELLIDLALQCLKPSESEALPQAGVWADLGTGSGALAVALARSLPGWEGHAVDLSAEALELARANLRSLAPSPCWTLHQGSWWEPLEPWWGTVHLVVSNPPYIPRVQVQGLEPVVRDHEPHLALSGGDDGLDCCRALISGAPRALAPGGWLLLEHHHDQSEAVLVLLRDAGLEAVQARPDLQGVMRFALARRPLRR

SEQ ID NO: 1139 - DNA, 882 bp, Prochlorococcus marinus str. MIT 9211
  CDS (1)..(882): transl_table=11
atgaatatgaagtcaaaagaaaaaaaatcagcaagggatatcttgaactggagaatggctcaacttgcccttggagggagagttgtagatattgattggttgctagatgtggggggaggcctgggatgggagtctcttcaaagattaaaaatttttcaaaataatcactatgaactccaaaaatctttagatgagctttcatttatatggcatagacatataaatgagaatgagccacttcaatatcttgtagggaaatgcccttggagagattttcagttagaaatcaattcttccgtatttattccgcgacaggagacagagatccttgttgaattagccttaaagaaatgcaatggaataagtgttggccgatgggctgacttaggaactggttcaggcgtattggccgtagctttggctagatctttacctggttggattggagatgcagtggattgtagtaaggatgcattgtctttggcaaaaaaaaatttagctaatttagccaataattcacatgtccattttcacttggggcattggtggcagcctctaaaatcttggtggggaacatatgatttggtattagcgaaccctccatatattccaagcgcagtgttaagtgaattacatccaattgtgagagataatgagccacatttggcactttctggaggcctggatggaatgaattgttgtcgtgagattattcgaggagcaaagaaaggacttggaacaggagggtggttaattttcgaacatcattatgaccaaagtgaacggctgttgaatgagttgattgctaatggttttaaggaagttaattttgagaatgatcttgaaggggttagacgttttgctataggacgtaagtcttga

SEQ ID NO: 1140 - protein, 293 aa, Prochlorococcus marinus str. MIT 9211
MNMKSKEKKSARDILNWRMAQLALGGRVVDIDWLLDVGGGLGWESLQRLKIFQNNHYELQKSLDELSFIWHRHINENEPLQYLVGKCPWRDFQLEINSSVFIPRQETEILVELALKKCNGISVGRWADLGTGSGVLAVALARSLPGWIGDAVDCSKDALSLAKKNLANLANNSHVHFHLGHWWQPLKSWWGTYDLVLANPPYIPSAVLSELHPIVRDNEPHLALSGGLDGMNCCREIIRGAKKGLGTGGWLIFEHHYDQSERLLNELIANGFKEVNFENDLEGVRRFAIGRKS

SEQ ID NO: 1141 - DNA, 843 bp, Azoarcus sp. EbN1
  CDS (1)..(843): transl_table=11
gtgaaaatggccgaagcgactccccacatcggcggcgcgctgaactgggcacgagcgcggatcgcggtcgtcgatgcgcgcattctgctgcgccacgtgctgcagtgctcggcggcacgcctcgcggcgtacccggaagccaggctcgaagccccggagtgggctgaattccgctcgctcgtcgagcggcgcgaggcgggtgagccggtggcttatctgaccggcgagcgggagttcttcggccatccgttcatcgtgacaccggcggtgctgattccgcgtcccgacaccgagctgctggtggaactggcgctggcgcatttcggcgacaagccacatacgcgcgtgctcgacctcggtaccgggagcggcgcgctcgcgatcagcctcgcgctggagctgccgcaggccgatgtcgtcgcagtcgatcggtcgcgcgaggcgctgtgggtcgcgatggcgaacgcggcacgcttgcgggcgagcatttcctttgtgctcggcgactggttttcttcgcttggcgacgaccactatcaactcatcgttgcgaacccgccttatatcgcggcagccgacccgcatctcgacgagggtgacgtgcgcttcgaaccgagcaccgcgcttgtcgcgggccccgacgggctcgacgacctcgcggccatcgccgcgcaggccccacgtcacctcgaacccggtggctggctgttcatggaacacggcttcgaccaggctgccgcggtgcgcgggctgctgaccgatggcgggttttcgtcgatcgcgtcctggaaggatctggcgggcatcgagcgggtgtcgggagggcaatggcgcggtcgctga

SEQ ID NO: 1142 - protein, 280 aa, Azoarcus sp. EbN1
MKMAEATPHIGGALNWARARIAVVDARILLRHVLQCSAARLAAYPEARLEAPEWAEFRSLVERREAGEPVAYLTGEREFFGHPFIVTPAVLIPRPDTELLVELALAHFGDKPHTRVLDLGTGSGALAISLALELPQADVVAVDRSREALWVAMANAARLRASISFVLGDWFSSLGDDHYQLIVANPPYIAAADPHLDEGDVRFEPSTALVAGPDGLDDLAAIAAQAPRHLEPGGWLFMEHGFDQAAAVRGLLTDGGFSSIASWKDLAGIERVSGGQWRGR

SEQ ID NO: 1143 - DNA, 882 bp, Synechococcus elongatus PCC 6301
  CDS (1)..(882): transl_table=11
atggcaaccactacctggcaggctgtgctcacttggcgatcgcaccagcagcaactggcgccggatatcgatcgccaagaattggactggctcctccgggaagtggccggcgttccgctagaacgtcaacgctgggcagccccaggcgatcgccttgagctacgttgcccactagcagcgatcgcggatctctggcaacaacggatccgacagcgctgtccggtgcagtatctggcaggtcatgcgccttggcgcgacttggagttgcaggtttcccccgctgtcctgattcccaggccagaaacagagctgatcatcgacctagcaatcgcttggtcccaagcagaaccagcccgacaaacaggcttctgggcggatttagggactggcagcggtgcgatcgcgatcgcgttagcgcgggcactaccccaaatcaccgtccttgccgtcgatgacagtgctgaggctctggcgatcgcccggaacaatgcagcccgctatggtttaagcgatcgcatccgctggtatcagggcagttggttggtgcctttggccgactatcgaggtcaactgcaggcaattatctccaatccgccctacattcccactcaagagtggcaagccctagagccggaagtccgcgatcatgaaccgcgtcaagctctggagtctggccctgatgggttagaagcgctacgccatttagcccaagcggcgcctgactatttgcgatcgctcggtctgtggctctgcgaacacatggccggtcaaagtaccgctgtaacggctttgctggcggccattcctggctattctgagatccaaagtcatcgcgatttagcgggccgcgatcgctttgtttcggccagttggagtgcttga

SEQ ID NO: 1144 - protein, 293 aa, Synechococcus elongatus PCC 6301
MATTTWQAVLTWRSHQQQLAPDIDRQELDWLLREVAGVPLERQRWAAPGDRLELRCPLAAIADLWQQRIRQRCPVQYLAGHAPWRDLELQVSPAVLIPRPETELIIDLAIAWSQAEPARQTGFWADLGTGSGAIAIALARALPQITVLAVDDSAEALAIARNNAARYGLSDRIRWYQGSWLVPLADYRGQLQAIISNPPYIPTQEWQALEPEVRDHEPRQALESGPDGLEALRHLAQAAPDYLRSLGLWLCEHMAGQSTAVTALLAAIPGYSEIQSHRDLAGRDRFVSASWSA

SEQ ID NO: 1145 - DNA, 867 bp, Bacillus clausii KSM-K16
  CDS (1)..(867): transl_table=11
atggcgattacgattcacgaagctcttcgctgggcttcgtcttttttgcaggaaaacggagttgaacctacagcaggggaatggctattgcggcaccatgggaacatggaacgggccaaactattggcaagcttaagagaccccctcccagaaccagtttggcaagcatttaaacaagatgtggccgtcatggtttcgggggttcctgtccagcacgtactcggctatgaacaattttatgggcggacgtttctcgttaatggcgacgtccttattcctcgcccagaaacagaagagcttgttgcgctcgtgcttaataaattaaagcctggtccccaagccatccttgatgtcggtacgggcagtggggcgattgcgcttacgttaaagctagagcgacccgattgccatgtaaccgcgactgatatttccgagaaagcgctagacgttgcccgggaaaatgcccagcggttaggtgccgacataacgtttgccaaaggcgatttactagcgccagtagcaggagcggtatttgatgtcattgtgtccaatcccccctatattccgtatcgtgatcgagacagccttgcggtccatgtgcgtgaattcgaaccggaaatggcattgtttgctgaagaagatgggctaatgttttatcggcggctggcggaagaagtgcccgcttgcatccatccgcgctcattggtcgcagtcgaaattggcgctggccaaggcgaagcggttcaagcgttgtttgctgccgcgtttccctttgctgatataaacattgtctatgacataaatgggaaagaccggattgtgtttgtttctggcaatctgggacggcaaggccataatattgattag

SEQ ID NO: 1146 - protein, 288 aa, Bacillus clausii KSM-K16
MAITIHEALRWASSFLQENGVEPTAGEWLLRHHGNMERAKLLASLRDPLPEPVWQAFKQDVAVMVSGVPVQHVLGYEQFYGRTFLVNGDVLIPRPETEELVALVLNKLKPGPQAILDVGTGSGAIALTLKLERPDCHVTATDISEKALDVARENAQRLGADITFAKGDLLAPVAGAVFDVIVSNPPYIPYRDRDSLAVHVREFEPEMALFAEEDGLMFYRRLAEEVPACIHPRSLVAVEIGAGQGEAVQALFAAAFPFADINIVYDINGKDRIVFVSGNLGRQGHNID

SEQ ID NO: 1147 - DNA, 927 bp, Anabaena variabilis ATCC 29413
  CDS (1)..(927): transl_table=11
atgacaaatcgacaggcaaatgtagtttctggtttacaactttggcagtggcgcatcaaagcaaatcaagcagcgatcgctcacaatattcccatagtagaagttgattggctattgcaggaaatagctggtttagaccgcttggcactgcgtttagagtcgtttaaagactgctctgaagtgccgatgggtttatctctggacaagttagaccaactttggcaaaggcgattaggcgatcgcttacccgtacagtacatcgctggagtcacaccttggcgcaacttcagacttacggtgtcgagtgctgttttgattcccagaccagaaactgagtgcttgattgatttagctgtagctgctgttgcgaacagtgaatcggctttgcagttacagcaaggacattgggtagacttgggaactggtagtggggcgatcgctttggggttagctgatgctttccctgaagccacaattcatgctgtagattgcagtttagaagctttggcgatcgcccagcaaaatgcccagaacacaggtttggttgatagaatgcggttttatcagggtcgctggtgggagcctttaactttgctgaaaggtcaatttagcggtatggtatctaaccctccttatattcccagcgacatcgtgcctacgctacaaccagaagtagtaaaccatgaaccacatttagccttagatggcggtgcggatggcttagatgccatccgccatctaatagaagttgcccccagttatttacgacctgagggtatatggttaattgaaatgatggcaggtcaagcggaagcggtacaggctttgttgcttcaacagggcagttatagtaacattcaaatccattctgacttagctggtattgagcgtttcgctttagctgaaatagcaagagggatggtttga

SEQ ID NO: 1148 - protein, 308 aa, Anabaena variabilis ATCC 29413
MTNRQANVVSGLQLWQWRIKANQAAIAHNIPIVEVDWLLQEIAGLDRLALRLESFKDCSEVPMGLSLDKLDQLWQRRLGDRLPVQYIAGVTPWRNFRLTVSSAVLIPRPETECLIDLAVAAVANSESALQLQQGHWVDLGTGSGAIALGLADAFPEATIHAVDCSLEALAIAQQNAQNTGLVDRMRFYQGRWWEPLTLLKGQFSGMVSNPPYIPSDIVPTLQPEVVNHEPHLALDGGADGLDAIRHLIEVAPSYLRPEGIWLIEMMAGQAEAVQALLLQQGSYSNIQIHSDLAGIERFALAEIARGMV

SEQ ID NO: 1149 - DNA, 906 bp, Synechococcus sp. CC9605
  CDS (1)..(906): transl_table=11
ttggcgcaagcctcggccttgagagactgcacaaccgttgccggcactgatgtgttgcattggcggcgccaacaactcgcccggggtggcaccgcggctgatctggattggttgcttgatctggctggtggtcttcgttgggccagcctcaaacggctgttgctggacccgacgcgcagcgtcgacttggagcagtcccttgagatgctctctgggctgtgggagcgtcaccttcacgggaatgttcccctccagcacctggtggggctctgtccctggcgggatgtgctgcttgagtcgtcgcctgccgcattgattccccgtcaggaaacagaactgctggtggatctagccctgagccagttcaaagccacccctcccgcccgttgggctgacctcggcactggctcaggggccatcgctgtggctctggcccgtgcctggccgacggcaccagggcatggcgtcgacctcagttccgatgccttgcagttggcagaacgcaaccttgagcgttgcgccccgcatcacagttgttcgctgcacctcggttcgtggtggtcgcccctgaagagttggtggggaagcctcgatttggtggtcagcaatcctccgtacatccccggtgctgtggttgacggtcttgaggctgtggtccgtgaccacgaacctcacttggcattgctcgggggagcggatggtttggacgcgattcgggctgtggtggatggagcaccaacggggttgtcgcccggaggctggcttctgcttgaacaccatcacgatcagagcgctcaggtgatgcagctgctgcgggatgccggcttggtggagggcagagcggccgctgatcttgaggggacccttcgcttcgcgcttgctcgtaaacctgccgaatcaagctga

SEQ ID NO: 1150 - protein, 301 aa, Synechococcus sp. CC9605
MAQASALRDCTTVAGTDVLHWRRQQLARGGTAADLDWLLDLAGGLRWASLKRLLLDPTRSVDLEQSLEMLSGLWERHLHGNVPLQHLVGLCPWRDVLLESSPAALIPRQETELLVDLALSQFKATPPARWADLGTGSGAIAVALARAWPTAPGHGVDLSSDALQLAERNLERCAPHHSCSLHLGSWWSPLKSWWGSLDLVVSNPPYIPGAVVDGLEAVVRDHEPHLALLGGADGLDAIRAVVDGAPTGLSPGGWLLLEHHHDQSAQVMQLLRDAGLVEGRAAADLEGTLRFALARKPAESS

SEQ ID NO: 1151 - DNA, 870 bp, Prochlorococcus marinus str. MIT 9312
  CDS (1)..(870): transl_table=11
atgcttagcatttcagtaaaagaatttttaatttggaaaaaactacaactttctaaaggaggagatcaagaatcttttgcttttttacttgactgtataggcggaatttcgaattttgatttaaatttgctgagcataaatccaaagggaaacctatatttaaaaaaaaaattagactttttagaatctgtttgggacgatcatttagtaaaatgttacccaattcaatacctttgtgaaacaacttattggagagatttaaaattaaaagttacaaataaagtacttatccctaggccagaaactgaacttatagttgatattgtttttaatatatttggaaagcaatcacgaaaattatttttcgctgaattaggaactggatcaggtgctataagtattgctttggcattagcgtatccattgtgtaatggaatagcaactgatatagatcaagatgcattagaaatagccattaataattatatgaattcttctaaacaatcaaatttgaaattttattgtggacattggtggacccctcttgagagttttaaaggaaaattagatctcgccatttcaaacccgccatatatccctaaagatacttatgaaaaattacccaaagaagttaaaaatttcgaaccaagaattgctttattaggcggcgaagatggtttacaacatattagggaaataattcaaaaagcacctatttttttaaaagagaagggatggttaattttagagaatcattttgatcaaggtgaaaaagtcaaacaactttttattaagaataaatttacatcaatagaaattgtgaatgatctttcaggtattggtaggtttaccataggaagatataaataa

SEQ ID NO: 1152 - protein, 289 aa, Prochlorococcus marinus str. MIT 9312
MLSISVKEFLIWKKLQLSKGGDQESFAFLLDCIGGISNFDLNLLSINPKGNLYLKKKLDFLESVWDDHLVKCYPIQYLCETTYWRDLKLKVTNKVLIPRPETELIVDIVFNIFGKQSRKLFFAELGTGSGAISIALALAYPLCNGIATDIDQDALEIAINNYMNSSKQSNLKFYCGHWWTPLESFKGKLDLAISNPPYIPKDTYEKLPKEVKNFEPRIALLGGEDGLQHIREIIQKAPIFLKEKGWLILENHFDQGEKVKQLFIKNKFTSIEIVNDLSGIGRFTIGRYK

SEQ ID NO: 1153 - DNA, 882 bp, Synechococcus elongatus PCC 7942
  CDS (1)..(882): transl_table=11
atggcaaccactacctggcaggctgtgctcacttggcgatcgcaccagcagcaactggcgccggatatcgatcgccaagaattggactggctcctccgggaagtggccggcgttccgctagaacgtcaacgctgggcagccccaggcgatcgccttgagctacgttgcccactagcagcgatcgcggatctctggcaacaacggatccgacagcgctgtccggtgcagtatctggcaggtcatgcgccttggcgcgacttggagttgcaggtttcccccgctgtcctgattcccaggccagaaacagagctgatcatcgacctagcaatcgcttggtcccaagcagaaccagcccgacaaacaggcttctgggcggatttagggactggcagcggtgcgatcgcgatcgcgttagcgcgggcactaccccaaatcaccgtccttgccgtcgatgtcagtgctgaggctctggcgatcgcccggaacaatgcagcccgctatggtttaagcgatcgcatccgctggtatcagggcagttggttggtgcctttggccgactatcgaggtcaactgcaggcaattatctccaatccgccctacattcccactcaagagtggcaagccctagagccggaagtccgcgatcatgaaccgcgtcaagctctggagtctggccctgatgggttagaagcgctacgccatttagcccaagcggcgcctgactatttgcgatcgctcggtctgtggctctgcgaacacatggccggtcaaagtaccgctgtaacggctttgctggcggccattcctggctattctgagatccaaagtcatcgcgatttagcgggccgcgatcgctttgtttcggccagttggagtgcttga

SEQ ID NO: 1154 - protein, 293 aa, Synechococcus elongatus PCC 7942
MATTTWQAVLTWRSHQQQLAPDIDRQELDWLLREVAGVPLERQRWAAPGDRLELRCPLAAIADLWQQRIRQRCPVQYLAGHAPWRDLELQVSPAVLIPRPETELIIDLAIAWSQAEPARQTGFWADLGTGSGAIAIALARALPQITVLAVDVSAEALAIARNNAARYGLSDRIRWYQGSWLVPLADYRGQLQAIISNPPYIPTQEWQALEPEVRDHEPRQALESGPDGLEALRHLAQAAPDYLRSLGLWLCEHMAGQSTAVTALLAAIPGYSEIQSHRDLAGRDRFVSASWSA

SEQ ID NO: 1155 - DNA, 852 bp, Moorella thermoacetica ATCC 39073
  CDS (1)..(852): transl_table=11
atgaccctgcggcaagccctgggggaggccgtccggcgcctggcggccgggggggttgaacgcccgcggctggaggcggaagtccttctcgggtgggcctgtagtttaacccggccccgcctcctggcccgcctggaggaggaactggcaccggcagccgcaggacggttctggcaggcaattgaccgccgggcagccggttaccccctccagtacctcaccggacaccaggaatttatgtccctggactttaaagtcactccggcggttttaatcccccgccaggataccgaagtggtggtggaggctgtccttgagcgtctggacccctgcgagagctataccatcgccgactgcggtacgggcagcggggccattgccctgagcctggcccattacctgccccgggcccgggtttacgccacggacatcagcccggcggccctgacggtggcccaggaaaacgccaggaaactggggctggcggccagggtaacccttctccagggtgattttttggcgcccctgcggggtttaaagctcgacgcccttgtggccaaccccccctacatacccactgccgccctgccagggctgcccgcggatgtccgctctgaaccgcgcctggccctggacggcgggcccgacggcctggatgcctaccggttcctcctgccgggggcggcaggacttttgcggcccggcggtctcctggccctggaaatcggctccgaccagggacaggccgtaaaggacctggcccgggccgtgggagcctatcgcaacgaacaggttttaccagattatgccggccgcgatcgttgtttcctggcttatcgccgggaagaataa

SEQ ID NO: 1156 - protein, 283 aa, Moorella thermoacetica ATCC 39073
MTLRQALGEAVRRLAAGGVERPRLEAEVLLGWACSLTRPRLLARLEEELAPAAAGRFWQAIDRRAAGYPLQYLTGHQEFMSLDFKVTPAVLIPRQDTEVVVEAVLERLDPCESYTIADCGTGSGAIALSLAHYLPRARVYATDISPAALTVAQENARKLGLAARVTLLQGDFLAPLRGLKLDALVANPPYIPTAALPGLPADVRSEPRLALDGGPDGLDAYRFLLPGAAGLLRPGGLLALEIGSDQGQAVKDLARAVGAYRNEQVLPDYAGRDRCFLAYRREE

SEQ ID NO: 1157 - DNA, 906 bp, Trichodesmium erythraeum IMS101
  CDS (1)..(906): transl_table=11
atgaattttccttttaggtggctggtttcaggtaatgaactctgggaatggtattgtcaaactaaggcttgtgctttgagggcaggtatatctgttgctgaggttgatttattcttagaggagtttgctagtctcaatagattaaccctgcgtttggagtcttttaaagattggcctaatgtttcaatggagctttctttagttgagttggatagtctttggcgccgacgtttggaagatagggttccgcttcaatatttaactggggttacttattggcggaatttttctttgagggttggttctggagttttgatacctagaccggaaacagagcttttaattgatctggttttggttgctactaattcggttttggagcttgggcacggaaattgggtggatatgggaactggtagtggagcgatcgcttgtggtttagcagatatattgacagatgcttctatttatggtatagattgcagtccagtagctttggcaattgctagacaaaatgctgttagcctaggttatggtgatcgaatcaatttctatgaaggctcttggtggcaaccactggaacatttgcgtggccaggtgagtgggatggtggcgaatcctccttatattcctagtgatatggtttctactctggaaccagaggtcaggaaacatgagcctcatttggcccttgatggtggtgttgatggtctagattgtattaggtttttagttgaaactgctccactatatttggtttctggtggtgtttggttggtggaaatgatggctgggcaaagtgaggaagtcgctaaaattttgtatgatcatggttcttattgtcaggttgagattttcggtgatttggagggggttgatcgctttgctatggcttatttaaagtag

SEQ ID NO: 1158 - protein, 301 aa, Trichodesmium erythraeum IMS101
MNFPFRWLVSGNELWEWYCQTKACALRAGISVAEVDLFLEEFASLNRLTLRLESFKDWPNVSMELSLVELDSLWRRRLEDRVPLQYLTGVTYWRNFSLRVGSGVLIPRPETELLIDLVLVATNSVLELGHGNWVDMGTGSGAIACGLADILTDASIYGIDCSPVALAIARQNAVSLGYGDRINFYEGSWWQPLEHLRGQVSGMVANPPYIPSDMVSTLEPEVRKHEPHLALDGGVDGLDCIRFLVETAPLYLVSGGVWLVEMMAGQSEEVAKILYDHGSYCQVEIFGDLEGVDRFAMAYLK

SEQ ID NO: 1159 - DNA, 921 bp, Synechococcus sp. CC9311
  CDS (1)..(921): transl_table=11
atgggcgttatccgctgcaagggaacagatctactggtgtggaggcgggagctgatccgtcagggtggacgccctgtggatttggattggctgctttcgatcgccgcagattgctcgtggagtgatcttcaaaagctacgaatttgcccagacgttgagatcgagctgagttcctcgttgcatcacctcacggatctttgggcccagcatcgcgatcatcacattcctcttcagcacttggttggcatttgtccatggcgagatcttgagctggaggtttcgtccgacgccttgatcccccgtcaagaaactgagctgctcatcgagttggctttgcagtgtttgccagaggatgctcgcgatgtagaagggatctgggccgacttgggaacaggatcgggagctttggcggcggctcttgcccgtgttttccctagctggcagggccatgccgtggactccagtggcagtgcgcttgctcttgccgaacgcaatctgatcgccctagctggcaaaagtgattggcaactccatctcggcagctggtgggaaccgctcaaaccatggtgggggcagatagaccttgtgctcagtaacccgccctatatcccgacggctgtgatggatgaacttgctcccgttgttaaagaccatgagcctcatttggctctttgtggtggtgaggatggactcgactgttgcaggcagatcatccgtgatgccagcagagcactagctccaggcggatggatccttctggagcatcaccatgaccagagtgcgatggtgctgaagttgctcagtgatgcaggtcttgaacggccagaagcccgttatgaccttcagggcatccctcgctttgctcttgcgcagcggtcttgcgaacctatcgcttacgaccagcagagggatgaacgatga

SEQ ID NO: 1160 - protein, 306 aa, Synechococcus sp. CC9311
MGVIRCKGTDLLVWRRELIRQGGRPVDLDWLLSIAADCSWSDLQKLRICPDVEIELSSSLHHLTDLWAQHRDHHIPLQHLVGICPWRDLELEVSSDALIPRQETELLIELALQCLPEDARDVEGIWADLGTGSGALAAALARVFPSWQGHAVDSSGSALALAERNLIALAGKSDWQLHLGSWWEPLKPWWGQIDLVLSNPPYIPTAVMDELAPVVKDHEPHLALCGGEDGLDCCRQIIRDASRALAPGGWILLEHHHDQSAMVLKLLSDAGLERPEARYDLQGIPRFALAQRSCEPIAYDQQRDER

SEQ ID NO: 1161 - DNA, 852 bp, Magnetospirillum magnetotacticum MS-1
  CDS (1)..(852): transl_table=11
atggcgacagtgggccaggccatcaacgcggcggcggagcgtctggccgaggcagggatcgatacggctcatttcgattccagattgatggccgccgaggttctgggagtcgagatgcggcgcctgcccgcttcgcaccacgccgaactgagcccggaagatgccgcccgccttgccgccatgctggaccgccgcgcggcccgcgagcccatgtcccatatcctgggacggcgcggcttctggacccatgacttcctggtgaccaaggacactctggatccgcgccccgataccgagaccctgatcgaggcggtgctgggcgctctggacgatcggggacggcccctgcggctggttgatttcggcaccggaacgggttgcatcctgctcacactgctatcggagttaggccacgccaccggcttagggatcgatgccagcgaggcggccctggcggtggcaggggacaatgccgaacggctgggtctggcgtcgcgtgcccagttccgtctcggcgattggggctgggggctggacggcgtcttcgacattatcgtctccaatccgccttatatccccgacggcgatatcgatggtctggagccggaagtgtcccgttatgagccccgttcggccctggccggaggagcggacggcctcgattgctaccgcgccctgattccccatatggcccgcctgctggtccccggcggcctggccgccctggaggtgggggccggtcaggcatccgatgtggccgccatgctggcggcagcaggattgccgggcgccggattccggtgcgacctgggcggcatcgaacgctgcgtcattgtgcagcgcctaaaataa

SEQ ID NO: 1162 - protein, 283 aa, Magnetospirillum magnetotacticum MS-1
MATVGQAINAAAERLAEAGIDTAHFDSRLMAAEVLGVEMRRLPASHHAELSPEDAARLAAMLDRRAAREPMSHILGRRGFWTHDFLVTKDTLDPRPDTETLIEAVLGALDDRGRPLRLVDFGTGTGCILLTLLSELGHATGLGIDASEAALAVAGDNAERLGLASRAQFRLGDWGWGLDGVFDIIVSNPPYIPDGDIDGLEPEVSRYEPRSALAGGADGLDCYRALIPHMARLLVPGGLAALEVGAGQASDVAAMLAAAGLPGAGFRCDLGGIERCVIVQRLK

SEQ ID NO: 1163 - DNA, 891 bp, Nostoc punctiforme PCC 73102
  CDS (1)..(891): transl_table=11
atgggggaaaagcatctgatagtttctggtttacaactttggcagtggcgaaatgcagcccttgaagcagcgatcgccactgatgtcccaacaatggaggtagattggctgctcttagaagttgctgggttagaccgcttggcactgcgtttggagtcttttaaaaactggccgcaaattcagctgcaattacctctagaaaagttagaccagctatggcagaggcgattaaacgatcgcctaccagtacaatatattgccggagtgacaccttggcgtaactttcaaatcgcggtgtcaagtgcagtattgattcccagaccagagacagaatgcttaattgatttagctttagcagctgctagcggtgtatcaggatattgggcggatttgggtactgggagtggagcgatcgccatcggattagcagatgttttgccaaaagcaacaattcatgctgttgattacagtttagaagctttagcgatcgcccaagccaacgcccgtaatttaggttttgctgaccggattaaattttatcaaggttcctggtgggagccactgacatttctcaaaggtcagttcagtggtatggtgtcgaaccccccttacatacccaccagtaccttatctagcctgcaaccagaagtagttaaccatgaaccacatctagctttggatggtggcgctgatggcttagattgtattcgccatttgatagaaatttcccctagttatttgcaacctggcggtgtatggttaattgaaatgatggcaggacaggcggatgcagtgcgagaacttttgcaaagtcaaggtagttattgtaagattcaaattcacgctgatttagctggaattgaacgctttgcccttgcctacaaaagttag

SEQ ID NO: 1164 - protein, 296 aa, Nostoc punctiforme PCC 73102
MGEKHLIVSGLQLWQWRNAALEAAIATDVPTMEVDWLLLEVAGLDRLALRLESFKNWPQIQLQLPLEKLDQLWQRRLNDRLPVQYIAGVTPWRNFQIAVSSAVLIPRPETECLIDLALAAASGVSGYWADLGTGSGAIAIGLADVLPKATIHAVDYSLEALAIAQANARNLGFADRIKFYQGSWWEPLTFLKGQFSGMVSNPPYIPTSTLSSLQPEVVNHEPHLALDGGADGLDCIRHLIEISPSYLQPGGVWLIEMMAGQADAVRELLQSQGSYCKIQIHADLAGIERFALAYKS

SEQ ID NO: 1165 - DNA, 906 bp, Crocosphaera watsonii WH 8501
  CDS (1)..(906): transl_table=11
atggcctctgtattttctatctccggacaaacattagatcaatggtatcgttgggccaaacaagaggcgatcgccgctgagatccctgcctcagaggtagactggttgcttcaaaccgtaactcccttagatagtttatccttgcgcttggggttatttaaagagcgatcgcaaattcccctacaataccccttatcaaaattaaccgaattatggcaacgtcgggttaaacagagagtccctctacaatatttagtgggtatcactccctggcgacgtttttccttaaaagtgtcccctgatgtcttaattcctcgtcctgaaacggaattaatcattgattttgcagttgaggcagcgaaacagagtcctaaccccgatctaatgtttggccattggctggatctcggtacgggaagtggtgccatcgcccttggcctaggggatagttttccccaagcaactattcatgctgtagatactagcagtaaagccttaaccattgcccaagaaaatgctattcaggcaggtttttctcatagaatcaacttttatcaaggatcgtggtggactcctttagaacagttaaaaggacaagtcagtgcaatggtgtctaaccctccctatatccccacatccttattgtccgagttacaaccagaagtgcaagaacatgaacccatacttgctttagacggaggaaatgacggtttagaggcgattcgttatctaattgatacttctcctgattatttggtttcaggaggcatttttttagtggaaatgatggcgggacaaggagaaacagttagacaactattagaaacatctggtcattatcaatctattcaaactctaccagatttagcaggaatcagtcgctttgccttggcttatcgttcttaa

SEQ ID NO: 1166 - protein, 301 aa, Crocosphaera watsonii WH 8501
MASVFSISGQTLDQWYRWAKQEAIAAEIPASEVDWLLQTVTPLDSLSLRLGLFKERSQIPLQYPLSKLTELWQRRVKQRVPLQYLVGITPWRRFSLKVSPDVLIPRPETELIIDFAVEAAKQSPNPDLMFGHWLDLGTGSGAIALGLGDSFPQATIHAVDTSSKALTIAQENAIQAGFSHRINFYQGSWWTPLEQLKGQVSAMVSNPPYIPTSLLSELQPEVQEHEPILALDGGNDGLEAIRYLIDTSPDYLVSGGIFLVEMMAGQGETVRQLLETSGHYQSIQTLPDLAGISRFALAYRS

SEQ ID NO: 1167 - DNA, 849 bp, Exiguobacterium sibiricum 255-15
  CDS (1)..(849)
atgcggattgcaaaacgtctcaatcaagcacaaacgatgctcgtgacggcaggacgcgaggcctcgagtgccgaatggttacttatgcacgttttacagatcgaccggaccggattattgatccgcctgtcggacgaactcgagccggaacaggacctgttgttcagtgaatatttattggcgcatttaaatggtgtcccggttcagcatttgatcggatatcaaccgttttacggacgaaatttccgtgtgtcaccggccgttctcattccgcgcccggagacggaggaattgattgaattcgtgacgggacgcctgcagggcgaaacgttccaaccgggggaaatcgtcgatatcggcaccggcagcggcgcaatttgtctgacgcttgcgcttgaactcggacaaccggtcacgacggtcgatatttcaccggaagccattgcggtggcaaaggaaaatcaacagacgcttggaggagaggtcacctttttggaaggtgacttactggcaccgcttgctgaccattcggtccgggtgcttgtctcgaatcccccttatattgaagaagatgaattgctcagtgacgtcgtgtttgatcatgaaccgcaccttgctttatttggcgggaaagacggacttgtattctaccgccgcctgcttgaagatagcgcacgtgtcttacgcgatgattttcgtctgattgcgttcgaaatcggacacaatcagggacaagaagtgcaaatgatgttaaaaaaacgttatccaactgtagaaacgggtattttaaaagatataaacggtaaagaccgtatcgtgtatgcggaacgaaaggattgtccagagtga

SEQ ID NO: 1168 - protein, 282 aa, Exiguobacterium sibiricum 255-15
MRIAKRLNQAQTMLVTAGREASSAEWLLMHVLQIDRTGLLIRLSDELEPEQDLLFSEYLLAHLNGVPVQHLIGYQPFYGRNFRVSPAVLIPRPETEELIEFVTGRLQGETFQPGEIVDIGTGSGAICLTLALELGQPVTTVDISPEAIAVAKENQQTLGGEVTFLEGDLLAPLADHSVRVLVSNPPYIEEDELLSDVVFDHEPHLALFGGKDGLVFYRRLLEDSARVLRDDFRLIAFEIGHNQGQEVQMMLKKRYPTVETGILKDINGKDRIVYAERKDCPE

SEQ ID NO: 1169 - DNA, 900 bp, Synechococcus sp. RS9917
  CDS (1)..(900): transl_table=11
atgaccttagtggagctgagcgggaacgagcttctggcctggcgccgggcccagctggccacaggcgggcgtgctgtggatcttgattggttgctcgatctggccggtggcttgcgttgggccgatctgcaggccttgcatctcgatccggcggcccgtcgggtgcggctcgcctgcgagctctccgagctcgcttcgctctggcagcgtcatcgcctgcagcatgaaccgctccagcacctggtgggtcgctgcccttggcgcgatcttgagctcacggtatcggccgctgcgctgatccccaggcaggagacggaatctctggtggatctggccctggagcgctggcgggcggcgcaacccggtgcctcccctcagccgttgctgcgctgggcggatctgggaacgggctctggcgccctggccgtcgccctggcccgtgcctttccccaggccagtgggcatgccgtcgactgcagcgaagcggccctggcgctggcgcgcctgaatcttgaacggcatggggtttcagcacgctgcacccttcacagcggtgattggtggcagcccctgaggccctggtgggggctgttgcagctggtgctcagcaatcccccttacattcccagtgcggtggtcgatcagctcgaccctgtggtgcgtgagcatgagcctcggctcgctctggatggcggcgcggatggcctggcggcgacgcgcctgatcgttgcgggggctcccgaggccctggcgccgggcggttggctcctgatcgagcatcaccacgatcagagcgcggcggtgctggacctctgcgctgccgccggcctggaccacctgaaggctgaaacagattggcagggtgtgcgccgcttcgtgtgtgcgcgtcagccatgctga

SEQ ID NO: 1170 - protein, 299 aa, Synechococcus sp. RS9917
MTLVELSGNELLAWRRAQLATGGRAVDLDWLLDLAGGLRWADLQALHLDPAARRVRLACELSELASLWQRHRLQHEPLQHLVGRCPWRDLELTVSAAALIPRQETESLVDLALERWRAAQPGASPQPLLRWADLGTGSGALAVALARAFPQASGHAVDCSEAALALARLNLERHGVSARCTLHSGDWWQPLRPWWGLLQLVLSNPPYIPSAVVDQLDPVVREHEPRLALDGGADGLAATRLIVAGAPEALAPGGWLLIEHHHDQSAAVLDLCAAAGLDHLKAETDWQGVRRFVCARQPC

SEQ ID NO: 1171 - DNA, 1005 bp, Synechococcus sp. WH 5701
  CDS (1)..(1005): transl_table=11
atggctgcctccaggcccctccccagtgctgcgccccagctggctcctgccagccaagcgcctgcagccccaggtgagctgatcctgggctccgagctgctggcctggcgccggcagcggctgggggaagggggccgcgctgccgacctcgactggctgctcgacctcggcgccgggctgcgctggacccagctgcagcgggtctggctcgatcccgcttcacccgtgcagttgcacaccgggctgggcgaactcaccgtcctctggcggcagcatctcgagtgccataccccccttcagtatctggtgggggtgtgtccctggcgggagttctccctggcggtgtccccggccgttctcattccacgccaggaaaccgaagtgctggcggatctggctctcgctctggccctggccttgccggctccggcccacaggccactgacctgggcggatctcggcaccggatccggctgcctggctctggccctggcccgggcggcgcccaaggccagggggctggcggttgactgctccgcccaggccctggcccaggctgagatcaatctcgaggaagccggtctcctcgatcgggtcacgctgcacctcggccagtggtgggagcccctgcgcccccactggggtggtctggacctggtggtcagcaatcccccctacatccccacggcggttctcgtggagctcgagccgctggtgcgggagcatgagccgcacctggccctcgatggcggcccggatggactcgaagcgatccgggccctggccagcggagcctgggcggcccttgcccccgggggctggttgctgctggagcaccaccacgatcagagccatgccgtggccgagctgcttctcgcctgcggcctggtggaggtgacctcccatcgcgaccttgaggggcgttggcgctttgcccaggcccggcggcccatgcctgggtccaggccagcatggccagaatccagtaggcccccgctggcttga

SEQ ID NO: 1172 - protein, 334 aa, Synechococcus sp. WH 5701
MAASRPLPSAAPQLAPASQAPAAPGELILGSELLAWRRQRLGEGGRAADLDWLLDLGAGLRWTQLQRVWLDPASPVQLHTGLGELTVLWRQHLECHTPLQYLVGVCPWREFSLAVSPAVLIPRQETEVLADLALALALALPAPAHRPLTWADLGTGSGCLALALARAAPKARGLAVDCSAQALAQAEINLEEAGLLDRVTLHLGQWWEPLRPHWGGLDLVVSNPPYIPTAVLVELEPLVREHEPHLALDGGPDGLEAIRALASGAWAALAPGGWLLLEHHHDQSHAVAELLLACGLVEVTSHRDLEGRWRFAQARRPMPGSRPAWPESSRPPLA

SEQ ID NO: 1173 - DNA, 900 bp, Synechococcus sp. WH 7805
  CDS (1)..(900): transl_table=11
atgcaaacaacgcgttgttccgcgcaagacctgctcgcctggcgccgctccaagcttgcgcagggtgggcgagctgttgatttcgactggctgctgatgatgcagggcgatctcagctgggctgcactgcagaagatgcgcatcctgccggaatcaaccgtttatctcgctgcatccctcactgaattggaatcgttgtggcatcgccatgtcacggagcatgtccccctgcagcacctggtgggccgatgtccatggcgtgatgtggagttgcaggtcagcgcagcagcgctgatccctcgccaggagaccgagcttctgattgacctagctcttcagtgcctgaagcactccgattcagatgctctccctcaggccgggttctgggctgatctcggtacgggaagtggagccattgctgtggcgcttgcccgctctttgcctcgctgggaaggacacgccgtcgatctcagtgccgaggctcttgacctggcgcgggtgaacctgcggtcactcgcgccttcgaacggatggacgctgcatcagggcagctggtgggagcccttgcgtcacttgtggggcatgttgcatctggtgctttccaatcctccatacatccctcgcactcagcttcatggtctcgacccggtggttcgtgaccatgaacctcatttggccctctcgggcggtgatgacgggctggattgcttacgcgccatcattgataaagcgccaagggcgcttgccccagggggatggctgttggtggagcaccaccacgaccagagcgatgatgttctgatgctgatgcgcgatgcgggcctcgatgccccccaggccaggcctgaccttcagggtgtgatgcgcttcgcattggcacagcgtcccttgcgagggtga

SEQ ID NO: 1174 - protein, 299 aa, Synechococcus sp. WH 7805
MQTTRCSAQDLLAWRRSKLAQGGRAVDFDWLLMMQGDLSWAALQKMRILPESTVYLAASLTELESLWHRHVTEHVPLQHLVGRCPWRDVELQVSAAALIPRQETELLIDLALQCLKHSDSDALPQAGFWADLGTGSGAIAVALARSLPRWEGHAVDLSAEALDLARVNLRSLAPSNGWTLHQGSWWEPLRHLWGMLHLVLSNPPYIPRTQLHGLDPVVRDHEPHLALSGGDDGLDCLRAIIDKAPRALAPGGWLLVEHHHDQSDDVLMLMRDAGLDAPQARPDLQGVMRFALAQRPLRG

SEQ ID NO: 1175 - DNA, 960 bp, delta proteobacterium MLMS-1
  CDS (1)..(960): transl_table=11
atgcccgccagcgaccaggaccatgaccttgctctgccccccgcccacgccaccctccgccagtggcggcaatggctgatctcttgctggcgccaggcgggaatcgccgaggccgggcaggaagccgagctgttgttgagctgggttttggccgctgggcaaaagggccatcaagcatgggacgagcgggccgggctggtactggccgccgatcggccgctgagcagcgcccagatcgagaagctgcgccaggcggcggcccggcgcagccggcgggagccgttggcctatatcattggcgagtgggaattctggtcgttgccctttgcggtggaccccggggttctgattccccgcccggagaccgaactgctggtggaagaagccctgcggctggccccgcagctcaggggcggggctggccggccgttgaccatcctcgatctgggtaccggcagcggtatcctggcggtggtgctggcccgggaactggccccggcccgggtgatcgccgtggatcgctccccggcggccctggcggtggcccggcgcaatgtttgccgtcaccgggtggagtcgcgggtctccctgctcgccgccgactggctgagcgccctggccgccggcaaagcgctttttgatctggtggtcgccaacccgccctatgtcgaggatgtggccttgcccgggctggagccggaagtgcgtgattatgagccccggcaggccctggacggcggcgcggcgggaatggcccagatccggcggctggccgccgagttgccaccgtttctgcgccccggcggcgggctgctgatggaaatcggctgggatcagcaaggggtggtggagcaactgttggcgccggataacgcctggcgggaggttcgtatcctgccggatctggccggcttgccacggctactatgctgccgccgcagcctggacggcggcagttaa

SEQ ID NO: 1176 - protein, 319 aa, delta proteobacterium MLMS-1
MPASDQDHDLALPPAHATLRQWRQWLISCWRQAGIAEAGQEAELLLSWVLAAGQKGHQAWDERAGLVLAADRPLSSAQIEKLRQAAARRSRREPLAYIIGEWEFWSLPFAVDPGVLIPRPETELLVEEALRLAPQLRGGAGRPLTILDLGTGSGILAVVLARELAPARVIAVDRSPAALAVARRNVCRHRVESRVSLLAADWLSALAAGKALFDLVVANPPYVEDVALPGLEPEVRDYEPRQALDGGAAGMAQIRRLAAELPPFLRPGGGLLMEIGWDQQGVVEQLLAPDNAWREVRILPDLAGLPRLLCCRRSLDGGS

SEQ ID NO: 1177 - DNA, 900 bp, Synechococcus sp. RS9916
  CDS (1)..(900): transl_table=11
atggtctcgccgcctctcaagggatccgacctgctggcatggcgccgtcgcctactgggggacggtggtcacgcggccgacctcgattggttgctggatctggccgctggattgcgctggccggatttgcagcgtctgcagttggatcccgatggtgtggagctgacactggcttgctcattggaagctttagagcagcagtggcttctgcatcgccagcgtcagattcccctgcagcatctggtgggccgctgtccctggcgtgatctggaattgtgggtgtcgcccgatgcgttgatcccccgccaggaaaccgagcttttggtggatcttgccgtggctcggggccttcagtctccttctcctcaatggggtcgggggcggatttgggctgatctgggaacgggttccggagctgtggcggtcgctttggcgcgtcagttatccggctggcaaggacacgctgtcgattgcagcgctgcagccctggccttggcccgccgcaatcttgagtcgtgggctgatggcatggcttggcagttgcatcagggcagttggtggcagccgttgcggccctggtgggggcaattggacctggtggtatcaaacccgccttacatccctgcgggggtggtggatcaattggatcccgtcgtgcgtgatcacgagccgcgtttggcccttgatggtggtttagacgggctggattgctgccgtctgttgttggatggcgctgctgaagctttggctccggggggatggttgttgctggagcatcaccacgatcagagcgaggcggtgttggcgctgatgacgaacgctggattgcgcgacgttcaagctgctcaggatttggagggtattcgtcgctttgccttggcccgtcgtgcagcaggctga

SEQ ID NO: 1178 - protein, 299 aa, Synechococcus sp. RS9916
MVSPPLKGSDLLAWRRRLLGDGGHAADLDWLLDLAAGLRWPDLQRLQLDPDGVELTLACSLEALEQQWLLHRQRQIPLQHLVGRCPWRDLELWVSPDALIPRQETELLVDLAVARGLQSPSPQWGRGRIWADLGTGSGAVAVALARQLSGWQGHAVDCSAAALALARRNLESWADGMAWQLHQGSWWQPLRPWWGQLDLVVSNPPYIPAGVVDQLDPVVRDHEPRLALDGGLDGLDCCRLLLDGAAEALAPGGWLLLEHHHDQSEAVLALMTNAGLRDVQAAQDLEGIRRFALARRAAG

SEQ ID NO: 1179 - DNA, 1068 bp, Oryza sativa subsp
  CDS (1)..(1068)
atgctcgcctccgccgccgccgccgccgccgttggcgtcgccgcgttgctcccggggcggctcaagcccaagccgacgccccgccttctcaagcgcctcgccaccgcctcgtcctccgcgtcgacgccgccgagcccccgaagcggcggcgcgggggtggaggcggaggcggacaccacgccgctcttcctccgcccggcggcgcacccggtcgcggcggcctccctcgccgcgttccggcgccgcgcggcggagctcgtgccggactccgcgccgcacctccaccgccacctccgctggctcctcgccgacgccgccgcccgcgacgcgggcgccgacccggcgctcctccgcgcgccgctcggcgatctcgagtccctctggctccgccacgtccgggaccgccgcccgttccagtacgtcgtcgggaacgagcactggagggacctggtggtcgccgtccgggaaggcgtgctcatcccgcgccccgagacggaggcggtggtggacatggtcgcgaaggtgcaagggttcgaggccgggtggtgggccgacctcgggacgggcagcggcgccatcgccgtggccgtggcgaggatgctcggcccggaggggagggtgttcgccactgatgtcagcgaggtcgccattgacgtagctcggctcaacgttcagagatacgggatgcaggataaagttgagataaggcatggctcatggtttgagcctctagaagatctgaagggaaagctcatgggtgtgattagtaaccctccatatataccaactgaagatctacctggcctgcaacctgaagttgggtggcatgaaccaaagctggcacttgatggaggcaaagatggacttgagcatctgcttcatctttgtgaaggattgtcatcagtacttaagcctggtggtttctttgtttttgagacaaacggcaacaaacagtcagagtttcttgtcgatttcatacagactaagtgggattcttcttttcgtgatgttgaagcagttttagactttgcagacatcaaacgttttgtgacaggatatcgcagatga

SEQ ID NO: 1180 - protein, 355 aa, Oryza sativa subsp
MLASAAAAAAVGVAALLPGRLKPKPTPRLLKRLATASSSASTPPSPRSGGAGVEAEADTTPLFLRPAAHPVAAASLAAFRRRAAELVPDSAPHLHRHLRWLLADAAARDAGADPALLRAPLGDLESLWLRHVRDRRPFQYVVGNEHWRDLVVAVREGVLIPRPETEAVVDMVAKVQGFEAGWWADLGTGSGAIAVAVARMLGPEGRVFATDVSEVAIDVARLNVQRYGMQDKVEIRHGSWFEPLEDLKGKLMGVISNPPYIPTEDLPGLQPEVGWHEPKLALDGGKDGLEHLLHLCEGLSSVLKPGGFFVFETNGNKQSEFLVDFIQTKWDSSFRDVEAVLDFADIKRFVTGYRR

SEQ ID NO: 1181 - DNA, 846 bp, Magnetospirillum gryphiswaldense
  CDS (1)..(846): transl_table=11
gtgaccagtgccggagacctgttgcgggcgctgaccgtgcgctttcaggcggcgggtatccagagcgcccgcctggatgcgcggctgctggtggccgaagcgctgggggtcgagcctttgcggctggtcactcatccggaaatggttttgaccgcgcaacaacaaactgccatcgaaggcatggcggcgcggcgggaagaccgccagcccatcagccacattctgggccgacgcggcttctggaccctggatttgcgggtcacccccgataccctggacccgcgtcccgataccgaaaccctagtgcaaggggtactggaccgcgtcgctgatcgccacgccgccttgcggatcgtcgatttcggcaccggcagcggttgtatcttgctggccttgctggcggaactgcccaatgcccacggcttaggtatcgaccaaagcgcggcggccctggcggtggcggctgaaaacgccgaacgtaatggcttggccgggcgggcggaattccgtcacggcgattgggggcgggggcttgacggccccttcgacatcatcgtcagcaatccgccctatatccctgaagccgacatcgccggattagagccggaagtggcccggcacgagccgcgctcggccctggtcggcggggcggacggactggattgttatcgtgccctggcccccgacattgcccgcctgctggcggtgggcggcatcaccggactggaagtgggggccggccaagacagcgatgtggcggctttgctgaaggccgccggattgcgggacttgtgcgttgcggacgaccttgccggccatggtcgctcggtttttgcagcacggtaa

SEQ ID NO: 1182 - protein, 281 aa, Magnetospirillum gryphiswaldense
MTSAGDLLRALTVRFQAAGIQSARLDARLLVAEALGVEPLRLVTHPEMVLTAQQQTAIEGMAARREDRQPISHILGRRGFWTLDLRVTPDTLDPRPDTETLVQGVLDRVADRHAALRIVDFGTGSGCILLALLAELPNAHGLGIDQSAAALAVAAENAERNGLAGRAEFRHGDWGRGLDGPFDIIVSNPPYIPEADIAGLEPEVARHEPRSALVGGADGLDCYRALAPDIARLLAVGGITGLEVGAGQDSDVAALLKAAGLRDLCVADDLAGHGRSVFAAR

SEQ ID NO: 1183 - DNA, 1071 bp, Vitis vinifera
  CDS (1)..(1071)
atgaagctaagcattcctcgcgcatgtgggtcctggtctaaatctcctcctgtctccaccactctccacaagcccatctccttctattcttccataccatcgtcctcccctctcaaaccccaagtcccactcttcctcaggccacctatccactctgcaaccctctcagacctccaaaaatggcaccactgggccaaaaccctcccagttccacactcagacgaccccccagaccccaccctcctccgcagagagctgaaatggctcctagaggacgctcttgaagtccactcatcagttccccaaatgggtagtcacagtgatgacagacccataaaattgaggaccagtttggagcagttgtactctgtctggaggcagaggattgaggagaggaggccttttcagtatgtagttgggtgtgagcattggagggatttagtgttgagtgttcaagatggggttttgattcccaggcctgaaacggaggtttttgtggatttggtgggggatgtggtgactcagaatggagatttgacgcagggtttgtgggctgatttggggactggaagtggggctattgccatcggaattgggaggattttgggacctcgtgggagggtcattgccacggatttgagccctgttgccgtttctgttgcttcctttaatgtgcagaggtacagcttgcaggatataattgagatacggcaaggatcttggtttgaacctctgaaggatgttgaaggaaaactttcaggtcttgtgagcaatccaccatatattccaagtgatcatatttctggtctacaacctgaagttgggtggcatgaaccaagacttgcattagatggtggtgtggatggcatagatgctcttctccatctctgcaatggggctgcttcaatgttgaaacctggtggattttttatttttgagacaaatggggagaaacaatgcaagtttcttgtagactacatggaaaatgaatccaaaggcaacttctatgatgttaaaatagtaccagattttgctggtatccaaagattcgtgactggcttccatcactaa

SEQ ID NO: 1184 - protein, 356 aa, Vitis vinifera
MKLSIPRACGSWSKSPPVSTTLHKPISFYSSIPSSSPLKPQVPLFLRPPIHSATLSDLQKWHHWAKTLPVPHSDDPPDPTLLRRELKWLLEDALEVHSSVPQMGSHSDDRPIKLRTSLEQLYSVWRQRIEERRPFQYVVGCEHWRDLVLSVQDGVLIPRPETEVFVDLVGDVVTQNGDLTQGLWADLGTGSGAIAIGIGRILGPRGRVIATDLSPVAVSVASFNVQRYSLQDIIEIRQGSWFEPLKDVEGKLSGLVSNPPYIPSDHISGLQPEVGWHEPRLALDGGVDGIDALLHLCNGAASMLKPGGFFIFETNGEKQCKFLVDYMENESKGNFYDVKIVPDFAGIQRFVTGFHH

SEQ ID NO: 1185 - DNA, 855 bp, Coprinopsis cinerea okayama7
  CDS (1)..(855)
atgcattcccgtctgctcgcgcgtctagctcagtcgctaggcagccaccaggcaaccctcgagttcaaatggatggggcaggccctcaaaacaaaacatgccactgcctctctcgaggaaatggtcaatcgtcgcgcacgcggcgaacccctgcaatacatcttgggaacgcagccctttggccctctcaaccttctcacacgtccgccggtccttatccctcgtccagagactgaacactgggctctaaagtttgcagaaaagtgtcgacctgttcagggtgttcacaaatccctgctggatcttgggacaggctcagggtgcattcccctccttctctgccgtctctggccacaggggagcttgagcgcaactggcgtcgacatctcgccacacgcactcagcttggccaacgaaaacgctgccctttgtggcattccgccacggtcggactctatgacaccacgaaacacctttaggacgtctctggcgaatttccttgctaatgacttccctgggacccacctctcttcggcgcttcccatcgatatccttatctcaaatcctccctatatcccctgggacgagtatctcgagctcccagaatcggtcgtcaacttcgaggatccgaaggcactcttcggagggccgtctggtctggagcactatgaagccattgcccggctactaacgcgcccaggtatattcaataccggtgccgttgtggcattagaggttggccatagacaggctgagactgtcgagggcctccttcgcagtaccggtcgcattcgctcatcagaaatatggactgacccatggggcaaagaaaggaccgtcataggttacatgtga

SEQ ID NO: 1186 - protein, 284 aa, Coprinopsis cinerea okayama7
MHSRLLARLAQSLGSHQATLEFKWMGQALKTKHATASLEEMVNRRARGEPLQYILGTQPFGPLNLLTRPPVLIPRPETEHWALKFAEKCRPVQGVHKSLLDLGTGSGCIPLLLCRLWPQGSLSATGVDISPHALSLANENAALCGIPPRSDSMTPRNTFRTSLANFLANDFPGTHLSSALPIDILISNPPYIPWDEYLELPESVVNFEDPKALFGGPSGLEHYEAIARLLTRPGIFNTGAVVALEVGHRQAETVEGLLRSTGRIRSSEIWTDPWGKERTVIGYM

SEQ ID NO: 1187 - DNA, 885 bp, Microcystis aeruginosa PCC 7806
  CDS (1)..(885): transl_table=11
gtgtctgctagtatttccggtcaagaattaagtcaatggcgccaacaggcgatcgcggatttagcgcaagcgcaactatctccgaaggaagtggatatatttctgcaagcagtgacagatttagatactctttccctgcgcttacaatcctttcgcgaacgagaaaaaatccccttgagttattcttggtcggaaattactaaacgctggcaaaaacgcctgcaagcaagggttcccttgcagtatttgctcgaatcggtggtctggcgtaattttaccctgaaagtctccccagatgtcttaattcctcgtcccgaaaccgagttattaatcgatattgttggagaaaccgtcagaggagacgacgggggaatctgggtagatctgggaaccggtagcggtgcgatcgctattggtttagccagtatcttgacaaaagcagagatatatgccattgattacagtccaacggctctagcgatcgccaaagaaaatatcatcaagacgggttttgccgacagaattatcttaaaacagggttcttggtggacacccctagagaagtggaaaggacagattagcggtatggtgtccaatcctccctatattcccagtgcagaaatcctcgacttacaaattgaagtgcgggaacatgaaccccgtttggccctggatggaggtgaagacggattgaccgcgctgcgctatctagtggccactgctcccgattatctgcgatcgggaggcctttggctagtggaaatgagagccggtcaaggggaaaaagtagcgcaaatgctggaaaatcagggcaattatcgacaaattcagattattaatgacctagcaggtttcgatcgctttgttttggccgagcgaatttag

SEQ ID NO: 1188 - protein, 294 aa, Microcystis aeruginosa PCC 7806
MSASISGQELSQWRQQAIADLAQAQLSPKEVDIFLQAVTDLDTLSLRLQSFREREKIPLSYSWSEITKRWQKRLQARVPLQYLLESVVWRNFTLKVSPDVLIPRPETELLIDIVGETVRGDDGGIWVDLGTGSGAIAIGLASILTKAEIYAIDYSPTALAIAKENIIKTGFADRIILKQGSWWTPLEKWKGQISGMVSNPPYIPSAEILDLQIEVREHEPRLALDGGEDGLTALRYLVATAPDYLRSGGLWLVEMRAGQGEKVAQMLENQGNYRQIQIINDLAGFDRFVLAERI

SEQ ID NO: 1189 - DNA, 1185 bp, Ostreococcus tauri
  CDS (1)..(1185)
atgagcagtctggccaggcagacttatctcctccgagttgcctcctcaggacctcgtggagttgtcaaacgacgaaacgatgtaacagggtgctatcatgcacacagatcatttagttcacgctctgatgtcgtgtcggctgttcccttgcgtttaagtgaacaacctgccaggtacacggcacgcatacctgagttggacaacttcaggaggtgggcaaagttaatggccgaacgcgaggtaacagactttaatacgatagatggaagtccaaatttgcaaactcttcatcgtgaaattgattggttgatctcagacaatattgcaagtgtgcaaggttttggtcagagtctgaactctgtcaaacacgtatcctctttgctgaactcatcggagctctattccgttacgctcagattatctattgaagaacttgagcatctatggagaaaacgcacgatggagagagtcccattgcaatatcttacgcatacagctcactggcgagaccttgaactaactgtcagtgatgcagtactgatcccaagaccggagactgagctcttgatagattttgctgaagagatattgaataggctagagctgcaattggatggcactagtacatggaatcatctactttcaagcccatggcttgacctgggaaccggatccggggccttagcaattgctatggcgcaggctttgcagtccagagggagggaaacagtccctttagtactcgccacggataaatctattgaagcagttgaagtggcgaaacataacgctactacttgtggggttcaagatgttatccaagtactgaatggttcatggtttgaacctatcgatgacagcattcgctttgcaggaatcttgtcaaatcctccttacataccaactgagctattaggctccctgcaaccagaggtttatttgcacgagccgcgactggcgctagatggaggcgtcagtggcggtctactgcatattacttctatttgcgcgaaaataacagattttctgttacccggaggtctgtttgcaatagaaacacatggtgcagaacaagcaaaatttgtgggacgattactggaacaaaccagggcctttgatgatatacggacaagggcggattatgctggagtatgtcgatttgtaactgcccgaaaacaacgttga

SEQ ID NO: 1190 - protein, 394 aa, Ostreococcus tauri
MSSLARQTYLLRVASSGPRGVVKRRNDVTGCYHAHRSFSSRSDVVSAVPLRLSEQPARYTARIPELDNFRRWAKLMAEREVTDFNTIDGSPNLQTLHREIDWLISDNIASVQGFGQSLNSVKHVSSLLNSSELYSVTLRLSIEELEHLWRKRTMERVPLQYLTHTAHWRDLELTVSDAVLIPRPETELLIDFAEEILNRLELQLDGTSTWNHLLSSPWLDLGTGSGALAIAMAQALQSRGRETVPLVLATDKSIEAVEVAKHNATTCGVQDVIQVLNGSWFEPIDDSIRFAGILSNPPYIPTELLGSLQPEVYLHEPRLALDGGVSGGLLHITSICAKITDFLLPGGLFAIETHGAEQAKFVGRLLEQTRAFDDIRTRADYAGVCRFVTARKQR

SEQ ID NO: 1191 - DNA, 1134 bp, Arabidopsis thaliana
  CDS (1)..(1134)
atgataagaatcttcccaagtctacggttaacctctttgctctctgccgctaaacctctttgctcatcttctccggcgaaaaaaccaccgcaatacacgtcgcttacagagtcaaaatcctctcggccgactaagtctctcagcataactcccaagacaccgctataccttaggacgccgtcgcacgcaacttctctatcggaggtttggaaatggcacgactgggcgaaagatctggcgtcctccgtagaggaatcttcgaagaattccgaagatactcttgactctgtcattctccaccgtgagctaaaatggctgatcgaagactcaatcgtagacgatcctttagtgattcttcatagaagcgaaatcgcggacaacggcaagaagaatgtgaaattgagagcgtcgttggaggagctttacgatttatggaggcagaggatcgagaagcgtcggccgtttcactacgtcgtcggatgcgagcattggagagatctagtgttgtgcgttgaggaaggggttctaattccgagaccggagacggaactgatcgtcgatatggtggaggagcttgtaacgagagatgaatggtttaagaaaggtattttggctaatcttgggacaggaagtggtgctattgcgatcggcattgctaaagtcttgggaagccgtgggagagttatagctacagatctcagtccggtggcgatcgccgtcgccggccacaatgtgcatagatacagccttgaggggatgattgaagtgagagaaggatcttggtttgagcctttgaaagatcttgaaggaaaacttgtggggcttgtgagtaatccaccatacataccaagtgatgacattccaggcctacaagctgaagttggtagacacgaaccgaaacttgcattggatggtggtattgatggaactgatagtctttttcatctctgtcatggggcttctcggatgcttcaacctggtggctttttcgttttcgagactaatggagagaagcaaagcaagatgatcgtagattacatgatgaccagtgatctcaaagactgtttctctgatttgaagatagtttctgattttgctggaatcaatcggttcgtgactggctttcgtctctga

SEQ ID NO: 1192 - protein, 377 aa, Arabidopsis thaliana
MIRIFPSLRLTSLLSAAKPLCSSSPAKKPPQYTSLTESKSSRPTKSLSITPKTPLYLRTPSHATSLSEVWKWHDWAKDLASSVEESSKNSEDTLDSVILHRELKWLIEDSIVDDPLVILHRSEIADNGKKNVKLRASLEELYDLWRQRIEKRRPFHYVVGCEHWRDLVLCVEEGVLIPRPETELIVDMVEELVTRDEWFKKGILANLGTGSGAIAIGIAKVLGSRGRVIATDLSPVAIAVAGHNVHRYSLEGMIEVREGSWFEPLKDLEGKLVGLVSNPPYIPSDDIPGLQAEVGRHEPKLALDGGIDGTDSLFHLCHGASRMLQPGGFFVFETNGEKQSKMIVDYMMTSDLKDCFSDLKIVSDFAGINRFVTGFRL

SEQ ID NO: 1193 - DNA, 867 bp, Bacillus subtilis
  CDS (1)..(867): transl_table=11
atgaagacgatattcgaagccctgaaatgggcttcttcttatttaaccgaagcgggaagagaagaaaatgcggccgagctcctattgctttatgataccggaatggagagaagcaagctgctcgcaagcttacaggaaccgattggtgaagacgaactgtatcgctttaagcgtcacgttgagatgcataaagagggcgtgccggttcaatacattataggaaaagagtttttttatggacgggaatttatggtgaatgatgatgtgctgatcccgcggccggaaactgaagaagttgtctttcatttgcttgaaaaatatcggagtgttttttctgaagacggcaagctcgaagttgttgacgttggtacagggagcggcgcaatagccgtcacgcttgcgcttgaaaaccaaagcttttctgtgtcggcggtcgatatttcgaaagaggcgctgcaagtcgcctctgccaatgcagaaaaactcggagcgaatgtgcgcttttatcagggcgatctgcttgagccttttattaaggcgggaaaaaaagcggatatcattgtctcaaacccgccatatatttcagaggaagaaatggctgatttatcggaaattgtccgttttcatgagccgctgcacgcactcaccgatggcggagacgggctgaaattttataagcggtttatggaagacattccgcttgttatgaaggataaagtatttgtcgtttttgaaatcggctggaaacagggagcggcggtcaaagacctgatcctcaaggcgtttaagggggcggaagtggaagtgctgaaagatattaatggaaaagacagaaccatatgcgctctgattcataaaaataaataa

SEQ ID NO: 1194 - protein, 288 aa, Bacillus subtilis
MKTIFEALKWASSYLTEAGREENAAELLLLYDTGMERSKLLASLQEPIGEDELYRFKRHVEMHKEGVPVQYIIGKEFFYGREFMVNDDVLIPRPETEEVVFHLLEKYRSVFSEDGKLEVVDVGTGSGAIAVTLALENQSFSVSAVDISKEALQVASANAEKLGANVRFYQGDLLEPFIKAGKKADIIVSNPPYISEEEMADLSEIVRFHEPLHALTDGGDGLKFYKRFMEDIPLVMKDKVFVVFEIGWKQGAAVKDLILKAFKGAEVEVLKDINGKDRTICALIHKNK

SEQ ID NO: 1195 - DNA, 834 bp, Escherichia coli
  CDS (1)..(834): transl_table=11
atggaatatcaacactggttacgtgaagcaataagccaacttcaggcgagcgaaagcccgcggcgtgatgctgaaatcctgctggagcatgttaccggcagagggcgtacttttattctcgcctttggtgaaacgcagctgactgacgaacaatgtcagcaacttgatgcgctactgacacgtcgtcgcgatggtgaacccattgctcatttaaccggggtgcgagaattctggtcgttgccgttatttgtttcgccagcgaccttaattccgcgcccggatacggagtgtctggtggagcaggcactggcgcggttgcctgaacaaccttgccgtattctcgatctcgggacgggtaccggggcgattgcgcttgcgctggctagcgagcgcccggactgcgaaattatcgctgtagatcgtatgcctgatgctgtctccctggcacaacgtaatgcccagcatctggcgatcaaaaatatccacattctgcaaagcgactggtttagcgcgctagccgggcagcagtttgcgatgattgtcagcaatccgccgtatattgacgagcaggaccctcatcttcaacaaggcgatgtccgctttgagccgctcactgcgctggttgcggcagacagtggaatggcagacatcgtgcatatcatcgaacagtcgcgtaacgcgctggtatccggcggctttctgcttctggaacatggctggcagcagggcgaagcggtgcgacaagcatttatcctcgcggggtatcatgacgtcgaaacctgccgtgactatggtgataacgagcgcgtaacgctcggccgctattatcaatga

SEQ ID NO: 1196 - protein, 277 aa, Escherichia coli
MEYQHWLREAISQLQASESPRRDAEILLEHVTGRGRTFILAFGETQLTDEQCQQLDALLTRRRDGEPIAHLTGVREFWSLPLFVSPATLIPRPDTECLVEQALARLPEQPCRILDLGTGTGAIALALASERPDCEIIAVDRMPDAVSLAQRNAQHLAIKNIHILQSDWFSALAGQQFAMIVSNPPYIDEQDPHLQQGDVRFEPLTALVAADSGMADIVHIIEQSRNALVSGGFLLLEHGWQQGEAVRQAFILAGYHDVETCRDYGDNERVTLGRYYQ

SEQ ID NO: 1197 - DNA, 1062 bp, Oryza sativa
  CDS (1)..(1062)
atgctcgcctccgccgccgccgccgttggcgtcgccgcgttgctcccggggcggctcaagcccaagccgacgccccgccttctcaagcgcctcgccaccgcctcgtcctccgcgtcgacgccgccgagcccccggagcggcggcgcgggggtggaggcggaggcggacaccacgccgctcttcctccgcccggcggcgcacccggtcgcggcggcctccctcgccgcgttccggcgccgcgcggcggagctcgtgccggactccgcgccgcacctccaccgccacctccgctggctcctcgccgacgccgccgcccgcgacgcgggcgccgacccggcgctcctccgcgcgccgctcggcgacctcgagtccctctggctccgccacgtccgggaccgccgcccgttccagtacgtcgtcgggaacgagcactggagggacctggtggtcgccgtccgggaaggcgtgctcatcccgcgccccgagacggaggcggtggtggacatggtcgcgaaggtgcaagggttcgaggccgggtggtgggccgacctcgggacgggcagcggcgccatcgccgtggccgtggcgaggatgctcggcccggaggggagggtgttcgccactgatgtcagcgaggtcgccattgacgtagctcggctcaacgttcagagatacgggatgcaggataaagttgagataaggcatggctcatggtttgagcctctagaagatctgaagggaaagctcatgggtgtgattagtaaccctccatatataccaactgaagatctacctggcctgcaacctgaagttgggtggcatgaaccaaagctggcacttgatggaggcaaagatggacttgagcatctgcttcatctttgtgaaggattgtcatcagtacttaagcctggtggtttctttgtttttgagacaaacggcaacaaacagtcagagtttcttgtcgatttcatacagactaagtgggattcttcttttcgtgatgttgaagcagttttagactttgcagacatcaaacgttttgtgacaggatatcgcagatga

SEQ ID NO: 1198 - protein, 353 aa, Oryza sativa
MLASAAAAVGVAALLPGRLKPKPTPRLLKRLATASSSASTPPSPRSGGAGVEAEADTTPLFLRPAAHPVAAASLAAFRRRAAELVPDSAPHLHRHLRWLLADAAARDAGADPALLRAPLGDLESLWLRHVRDRRPFQYVVGNEHWRDLVVAVREGVLIPRPETEAVVDMVAKVQGFEAGWWADLGTGSGAIAVAVARMLGPEGRVFATDVSEVAIDVARLNVQRYGMQDKVEIRHGSWFEPLEDLKGKLMGVISNPPYIPTEDLPGLQPEVGWHEPKLALDGGKDGLEHLLHLCEGLSSVLKPGGFFVFETNGNKQSEFLVDFIQTKWDSSFRDVEAVLDFADIKRFVTGYRR

SEQ ID NO: 1199 - DNA, 20 bp, Artificial sequence
  primer
atgaataagggctttgtctc

SEQ ID NO: 1200 - DNA, 20 bp, Artificial sequence
  primer
ttaactcaaggtacgggcgg

SEQ ID NO: 1201 - protein, 319 aa, Artificial sequence
  consensus sequence
  Variant (2)..(16): Xaa in position 2 to 16 is any amino acid
  Variant (17)..(35): Xaa in position 17 to 35 is any or no amino acid
  Variant (37)..(52): Xaa in position 37 to 52 is any amino acid
  Variant (53)..(55): Xaa in position 53 to 55 is any or no amino acid
  Variant (57)..(57): Xaa in position 57 is any amino acid
  Variant (59)..(61): Xaa in position 59 to 61 is any amino acid
  Variant (63)..(72): Xaa in position 63 to 72 is any amino acid
  Variant (74)..(77): Xaa in position 74 to 77 is any amino acid
  Variant (82)..(82): Xaa in position 82 is any amino acid
  Variant (86)..(102): Xaa in position 86 to 102 is any amino acid
  Variant (103)..(117): Xaa in position 103 to 117 is any or no amino acid
  Variant (119)..(119): Xaa in position 119 is any amino acid
  Variant (126)..(126): Xaa in position 126 is any amino acid
  Variant (128)..(129): Xaa in position 128 to 129 is any amino acid
  Variant (131)..(141): Xaa in position 131 to 141 is any amino acid
  Variant (142)..(148): Xaa in position 142 to 148 is any or no amino acid
  Variant (150)..(150): Xaa in position 150 is any amino acid
  Variant (152)..(153): Xaa in position 152 to 153 is any amino acid
  Variant (155)..(157): Xaa in position 155 to 157 is any amino acid
  Variant (159)..(160): Xaa in position 159 to 160 is any amino acid
  Variant (162)..(171): Xaa in position 162 to 171 is any amino acid
  Variant (172)..(189): Xaa in position 172 to 189 is any or no amino acid
  Variant (191)..(204): Xaa in position 191 to 204 is any amino acid
  Variant (205)..(222): Xaa in position 205 to 222 is any or no amino acid
  Variant (230)..(233): Xaa in position 230 to 233 is any amino acid
  Variant (234)..(235): Xaa in position 234 to 235 is any or no amino acid
  Variant (237)..(239): Xaa in position 237 to 239 is any amino acid
  Variant (241)..(242): Xaa in position 241 to 242 is any amino acid
  Variant (243)..(243): Xaa in position 243 is any or no amino acid
  Variant (246)..(247): Xaa in position 246 to 247 is any amino acid
  Variant (250)..(250): Xaa in position 250 is any amino acid
  Variant (253)..(253): Xaa in position 253 is any amino acid
  Variant (256)..(256): Xaa in position 256 is any amino acid
  Variant (258)..(270): Xaa in position 258 to 270 is any amino acid
  Variant (271)..(272): Xaa in position 271 to 272 is any or no amino acid
  Variant (274)..(276): Xaa in position 274 to 276 is any amino acid
  Variant (278)..(281): Xaa in position 278 to 281 is any amino acid
  Variant (283)..(286): Xaa in position 283 to 286 is any amino acid
  Variant (287)..(287): Xaa in position 287 is any or no amino acid
  Variant (289)..(308): Xaa in position 289 to 308 is any amino acid
  Variant (309)..(312): Xaa in position 309 to 312 is any or no amino acid
  Variant (314)..(315): Xaa in position 314 to 315 is any amino acid
  Variant (317)..(318): Xaa in position 317 to 318 is any amino acid
LXXXXXXXXXXXXXXXXXXXXXXXXXXXXXXXXXXLXXXXXXXXXXXXXXXXXXXPXQXXXGXXXXXXXXXXVXXXXLIPRXETEXXXXXXXXXXXXXXXXXXXXXXXXXXXXXXXXDXGTGSGAXAXXLXXXXXXXXXXXXXXXXXXDXSXXAXXXAXXNXXXXXXXXXXXXXXXXXXXXXXXXXXXXGXXXXXXXXXXXXXXXXXXXXXXXXXXXXXXXXSNPPYIPXXXXXXLXXXVXXXEPXXALXGGXDGXLXXXXXXXXXXXXXXXLXXXGXXXXEXXXXXQXXXXXXXXXXXXXXXXXXXXXXXXDXXGXXR

SEQ ID NO: 1202 - protein, 15 aa, Artificial sequence
  protein pattern
  Variant (2)..(8): Xaa in position 2 to 8 is any amino acid
  Variant (9)..(9): Xaa in position 9 is any or no amino acid
  Variant (15)..(15): Xaa in position 15 is Asp, Pro or Ser
GXXXXXXXXNPPYIX

SEQ ID NO: 1203 - protein, 11 aa, Artificial sequence
  protein pattern
  Variant (5)..(5): Xaa in position 5 is Pro or Gln
  Variant (6)..(6): Xaa in position 6 is Asp or Glu
  Variant (9)..(10): Xaa in position 9 to 10 is any amino acid
  Variant (11)..(11): Xaa in position 11 is Ala, Ile, Leu or Val
LIPRXXTEXXX

SEQ ID NO: 1204 - protein, 22 aa, Artificial sequence
  protein pattern
  Variant (2)..(4): Xaa in position 2 to 4 is any amino acid
  Variant (5)..(6): Xaa in position 5 to 6 is any or no amino acid
  Variant (8)..(9): Xaa in position 8 to 9 is any amino acid
  Variant (10)..(10): Xaa in position 10 is any or no amino acid
  Variant (13)..(14): Xaa in position 13 to 14 is any amino acid
  Variant (17)..(17): Xaa in position 17 is any amino acid
  Variant (18)..(18): Xaa in position 18 is Gly or Ser
  Variant (20)..(20): Xaa in position 20 is any amino acid
  Variant (21)..(21): Xaa in position 21 is Ala, Asp, Glu or Ser
LXXXXXVXXXEPXXALXXGXXG

SEQ ID NO: 1205 - protein, 12 aa, Artificial sequence
  protein pattern
  Variant (6)..(7): Xaa in position 6 to 7 is any or no amino acid
  Variant (9)..(9): Xaa in position 9 is Ile, Leu or Val
  Variant (10)..(10): Xaa in position 10 is Ala, Cys, Gly, Ser, Thr or Val
  Variant (11)..(11): Xaa in position 11 is any amino acid
  Variant (12)..(12): Xaa in position 12 is Ala, Gly or Thr
GTGSGXXAXXXX

SEQ ID NO: 1206 - DNA, 1899 bp, Saccharomyces cerevisiae
  CDS (1)..(1899)
atgaattcacaaaaggcgagtaaaatgactggctcactaaaaaagaatgatctttatatttttgatttgtctgagcaacttctgaattcattgaaattgatgagctttgactccacactgcgagaagttgaagtagagaagacatctgataatgatagaaacaaggagtctggagatctccaaatagcaagaaagaaggtcacatcaaatgttatgcgttgtagtgtttgtcaaatgagctttgattccagaaatgaacaaaaggcccactaccagactgattatcatttgatgaatgttaagcgtaaccttagggggctggatatcctatccgttgaggaattcgatgcgctgatttctaaggagcatggtatcaagtctgaagacgaaaattctggcggcgagcaaacttcaagcgatcacgaagaaagtgaggaagccagcgatcgggacccggacctacaaactaataattatatggaaactataatcgaaaatgatttgcagaaattagggttccaaaaagacgagtcggatgctattagccatattaatacccaatcgccctacatttatttcaaatcgaagtatcttcaaaagaatgaggtcttggcgatttataagtctctatttaataaaaggagtctttccaaccccaatgaagctttgactttttggaattcgcaagagaacccaatggccatttcagctctgtttatggtgggaggtggacattttgcgggagcaattgtttctcatcaaagactcaatgtcaaggggaacgcgcacaagaaggacgaaaccttaattgagcaagcggtcaatttcttagagcacaagacgtttcacaggtatactaccagaaggaagcaaggtggttctcagtcagcaatggacaatgcaaagggaaaagctaactctgccggttcagcacttcgtaggtacaatgaaagcgctttaaaaacagatatacagggtgtgttgaaggactgggaaccttatctgtcaaagtgtgataatatttttattcgagctcgcaatgtcagtgataaaaaaatttttactgataataccgttctgaacaagggtgatgaaaggataaagagcttcccttttaccacgaacaggcccactgtattagaattgaagaaggcatggtgcgaactttcctacctgaaaatattacctaagcctgaaccattggcagtgaaagaaacagtacaaaagttagaagtgtcgaacaaaaaggacgaatttaaagaaaaacaagaaccgttactggaagaaatccaaacagaagaaataatttctctgctgaagaaaggaagggcaccgttattgatatccttcttaaaaaagaataagcttgatggaaactttcggttaaagcctgagagtaaatattccttaacccctaccatgttacattatgcatcgcagcaagggatgaaacagatggcactgattttgctctcaaatattaaatgcgatccaacgatcaagaacagactaggaaggactgcgtgggatttgaatagaaacgacgacgtgagacacgcgtttcaaattgcaagatacaatcttggagagtctttcactaattgggacgaaactcatatcggtcagccattgagcagagaacaagttgatgaaatcaatgaaaagaaaaaagcaatagagaatgaaaaggcagaaaaactgattaaattggaattagaagccgccaaggaaaaacaaagatttgctaaagatgcagagaggggtccaggcaaaaagttaaccaatattccttcaattcagcaacaaaatttgaattctttgaccgatgaacagagacgcagattgatgagagaacaaagggctagagccgcagaagaaaggatgaaaaagaaatactga

SEQ ID NO: 1207 - protein, 632 aa, Saccharomyces cerevisiae
MNSQKASKMTGSLKKNDLYIFDLSEQLLNSLKLMSFDSTLREVEVEKTSDNDRNKESGDLQIARKKVTSNVMRCSVCQMSFDSRNEQKAHYQTDYHLMNVKRNLRGLDILSVEEFDALISKEHGIKSEDENSGGEQTSSDHEESEEASDRDPDLQTNNYMETIIENDLQKLGFQKDESDAISHINTQSPYIYFKSKYLQKNEVLAIYKSLFNKRSLSNPNEALTFWNSQENPMAISALFMVGGGHFAGAIVSHQRLNVKGNAHKKDETLIEQAVNFLEHKTFHRYTTRRKQGGSQSAMDNAKGKANSAGSALRRYNESALKTDIQGVLKDWEPYLSKCDNIFIRARNVSDKKIFTDNTVLNKGDERIKSFPFTTNRPTVLELKKAWCELSYLKILPKPEPLAVKETVQKLEVSNKKDEFKEKQEPLLEEIQTEEIISLLKKGRAPLLISFLKKNKLDGNFRLKPESKYSLTPTMLHYASQQGMKQMALILLSNIKCDPTIKNRLGRTAWDLNRNDDVRHAFQIARYNLGESFTNWDETHIGQPLSREQVDEINEKKKAIENEKAEKLIKLELEAAKEKQRFAKDAERGPGKKLTNIPSIQQQNLNSLTDEQRRRLMREQRARAAEERMKKKY

SEQ ID NO: 1208 - DNA, 2004 bp, Glycine max
  CDS (1)..(2004)
atggcgactaatcttcctgcaacgaagtccaccacgacgacgtcgtctcaggagaaacgacaccgttcgatcttcgaagttccaccgaacttcttcgactcttgtcgtcttctcccttctcctcactcatccgtttccgaccaccacagcgtaggccaaacccaaatcatcgaaacatcctcaaacgacgacttcgttttggatgcccctcaaaacgccgtcgtttccgcgcctaggtggacctgcaatacctgcaagactcaattcgattcccttcaggaccagcgttcccatttcaaatccgacattcatcgattcaatgtgaagctgacaattgctggaaagaatattgtgaaggaagaagattttgaggttctaacatctgaatttgtcaaagactatgatgtgtcaagtatatcgggatcagaaagtgacgatgatagtgaaaccgagtctcagagtcaaagtgcattgcatgacaaattgagcgaaagttttaaacataaactattcttccgtcttcagacagggcagagagtttctgtctggaagtgcttgattatgaatgtgactgaaaatgtattatatgataatgaaaaggcagagaatgaagtggttgagaagttgaaatctttgactgctgagcccagagacaatacccatttgagaattgttctgcttgtgtccggtggacactttgcaggttgcgtctttgatggtgatgctgttgtggctcacaagacatttcacagatatgttgtaagggccaaggcaggaaaaaaacaatcgtctaaagatgcttctggaagggctgctcattctgctggggcttcacttcgtcgatataatgaacttgcattaaagaaggaagttcatgaactgtttgctgcttggaaaccttattttgatgcttccaatagcatttttatacatgcaccatcaagtagtcgtcaacttctttatgatggagagagatcatactttaccaatcagcaatgtgatattagaaatattgctttgactgttcggaggcctactttcagggaagcaaaacgtgtatatagccagttgacccaggtaacccatgaaggcgatgagaaggaagttttgcaaagaaaccaagaggattcggtatcaattcacatttctaaaataaatgtcagtccaaccttaagcaagggggacatggctgagttggatgacaaaaataaagctgaagcttgttcaagtaaacaaaatgatgaactcccaattttgagtaatggagaaagtgaggatgagctatttggtaaatcaactcctttacatcaggcagcacaatcgggtgactctctaaaggttttagagttcttggaaaagggtttggatccttgcatcaaagatgaaagggggaggaccccgtatatgttggcacatgacaaagaagtgagggatactttcagaaggtttatggcatcaaatcttgacaaatgggattggcaagctgcaaaagtgcccagtgcattgaccaaagaaatggaagaatcacaagctgctaagcaggcagaaaaagatgctaagagaaaagctagagcaaaagaattaaagaaattgcgtaaagcaaaagaaaagaaggctcaggttgaagccaccttgcctaagaatgattccaaaactatagagaagcaagtaactgcttcaacatcgattaagggacaatctcaactaaaaagtggtgtgcaattatccaaagaggaccaaataagaatggcacaggctgctgaaagagaaaagagagcagctgctgcagagaggagaatagccgccctcaaaattcaagctaatagtgcaatcactgcagctagcatgtcagaacctaaatgtggattagcagtaattttggttggaaaaagggaaagaaataaggaggggtggggagcagccatgggggaagaactgaatggtaaattacatgagctgatgatgttgaaggggagaaaatattgttttccaaagcaacattaa

SEQ ID NO: 1209 - protein, 667 aa, Glycine max
MATNLPATKSTTTTSSQEKRHRSIFEVPPNFFDSCRLLPSPHSSVSDHHSVGQTQIIETSSNDDFVLDAPQNAVVSAPRWTCNTCKTQFDSLQDQRSHFKSDIHRFNVKLTIAGKNIVKEEDFEVLTSEFVKDYDVSSISGSESDDDSETESQSQSALHDKLSESFKHKLFFRLQTGQRVSVWKCLIMNVTENVLYDNEKAENEVVEKLKSLTAEPRDNTHLRIVLLVSGGHFAGCVFDGDAVVAHKTFHRYVVRAKAGKKQSSKDASGRAAHSAGASLRRYNELALKKEVHELFAAWKPYFDASNSIFIHAPSSSRQLLYDGERSYFTNQQCDIRNIALTVRRPTFREAKRVYSQLTQVTHEGDEKEVLQRNQEDSVSIHISKINVSPTLSKGDMAELDDKNKAEACSSKQNDELPILSNGESEDELFGKSTPLHQAAQSGDSLKVLEFLEKGLDPCIKDERGRTPYMLAHDKEVRDTFRRFMASNLDKWDWQAAKVPSALTKEMEESQAAKQAEKDAKRKARAKELKKLRKAKEKKAQVEATLPKNDSKTIEKQVTASTSIKGQSQLKSGVQLSKEDQIRMAQAAEREKRAAAAERRIAALKIQANSAITAASMSEPKCGLAVILVGKRERNKEGWGAAMGEELNGKLHELMMLKGRKYCFPKQH

SEQ ID NO: 1210 - DNA, 1983 bp, Coprinopsis cinerea okayama7#130
  CDS (1)..(1983)
atggcttctctccaacgatcacagcaataccatgtcttctctcttccacaagagttcttggatacccttaccctcaggaatctcgtaaatcaaccgcccgttcctagcccaccatccccagaacccctgatcacatccaccagccaaagagcgtgcggaatctgccttggtgtcactttccgcgatgtcgacgaacaaaggcttcacttcaagtccgattggcatcggtacaacgtcaaaatgaagatgaacggcgggaaacctgtcacagaggccaactttaatcaactggtagacggtctcgagttagacgattcactttcgggatcggcgtcctcttcagatgaagacgatgaagactcggatgcggtcaacgctctcgtcaacaaaacgaagcagctgggaacacgttctccttctccagacgccgccagacaagcacctcagactgctctcgcgtggttccactctcctccttccactcagatcggcgtatacagggcccttttccccttgaagacggagccttccgactatctcgacgcactccgtaacctccaaacaccaaagagcggcggacggacatgggcggtattcatggttgcaggaggacactttgctggtgcattagttcgcgttagcaaagatgcggacgaggaagacgaagatgatacctccaagtcgaagaagaaaccgaagaagcccaagccagacatcgaagttttgcgacacaagaccttccatcgatacacaacacgtcgaaagcagggtggttcgcaatcagtcaacgacaacgccaagggacctgcaaaaagcgctggtgctcagctgcggagatacggtgagcaggcgcttcgagaggatatcaggaaccttctcagtgactgggccgaggatatcgacgaatgcgaaagaatttggatccgtgcaaacacctccaatcgaagaatattcctcgactacgatgaggcagtcatccgtaaaggcgacgaccgactgcgaactttccctttcccaacacggcgacccacccaatccgaactgacgcggtgcttgaatgaactcaccaaagtcaaaatcacccacttcaccgaagacgaattaaaagctcaagacgatgcatacctcgcctctcttcccaaacccaagcctgttcctacagcaccctcggcgcccacggagcgcgaaaagcctcagcccgtcaagctatccaaggaggaggagctcctccgcgacaagtggtcacgtttgctcgaaatggtcagcaaaggtcggctggagcctctgaagtcgttctgggagcgcgagaaggacaacatcggcggaatcgacaccccaatcccagaatgggcccacgagaaggttacgacgctactccaactcgcagcgtcggccggccatgtcgatgtggtccaatggcttctggaatcagctcgcgcagatccgactatccccgttggcgcccccggttcgaagcaggatggtctttccgacgcgaccgaccctgcgacccaatccgatgctgggccatctcattcctctgttgggcccaaccggactgcatacgacctctccaagaccaaggccgtccgcgacgttttccgcagggtcgctgccacacatctcgactggtgggattggctcggggctggtcacatcccgagtgtgctgtctcaagacatggaggacgagcaggagcagaagaagaaggttcggcggaaggggctgaaggataaggtgaaggagagggaggcgagagagcgggaaaagcaacaggagagaccagcaagtccgccagttgatccggcgccagcaccaaagaaagagacattgtccaatgctcatgtgcatcgccttggtggttcagcaggatcaactgaaggaattgctggcctcacacctgagatgcggatgagggtggagagggagaggagggcacgagcagcagaggctcggttgaaggcgatggcaggagggaagtag

SEQ ID NO: 1211 - protein, 660 aa, Coprinopsis cinerea okayama7#130
MASLQRSQQYHVFSLPQEFLDTLTLRNLVNQPPVPSPPSPEPLITSTSQRACGICLGVTFRDVDEQRLHFKSDWHRYNVKMKMNGGKPVTEANFNQLVDGLELDDSLSGSASSSDEDDEDSDAVNALVNKTKQLGTRSPSPDAARQAPQTALAWFHSPPSTQIGVYRALFPLKTEPSDYLDALRNLQTPKSGGRTWAVFMVAGGHFAGALVRVSKDADEEDEDDTSKSKKKPKKPKPDIEVLRHKTFHRYTTRRKQGGSQSVNDNAKGPAKSAGAQLRRYGEQALREDIRNLLSDWAEDIDECERIWIRANTSNRRIFLDYDEAVIRKGDDRLRTFPFPTRRPTQSELTRCLNELTKVKITHFTEDELKAQDDAYLASLPKPKPVPTAPSAPTEREKPQPVKLSKEEELLRDKWSRLLEMVSKGRLEPLKSFWEREKDNIGGIDTPIPEWAHEKVTTLLQLAASAGHVDVVQWLLESARADPTIPVGAPGSKQDGLSDATDPATQSDAGPSHSSVGPNRTAYDLSKTKAVRDVFRRVAATHLDWWDWLGAGHIPSVLSQDMEDEQEQKKKVRRKGLKDKVKEREAREREKQQERPASPPVDPAPAPKKETLSNAHVHRLGGSAGSTEGIAGLTPEMRMRVERERRARAAEARLKAMAGGK

SEQ ID NO: 1212 - DNA, 1971 bp, Magnaporthe grisea 70-15
  CDS (1)..(1971)
atgcccccacaagaagacgcccttttgcggcgcccactctacgtctacgacctgcctccagaagtcctcagctcacttgccctgaaggccggcgccgacgcatccgacgagccagaaaccgagacttccatcccgagcgaatcgcgacctcaaacaccagaaagtaccggaacgagctccaccttggtgggatcccaagcttgctcactatgtggtctatcctttgacggcctcgaggagcaacggagccacctcaaatccgactggcatcactataacctgaagcagaagctacgcgggctcaagccggtctctgagtcagagttcgagaagcttatcggtgacctcgatgagagtctgtcgggagaagacgactctagcgaggacgaagatgaacaggccaagggtgactcgacgctcgtgactctcctgaagaaacaggcaaatattgttgacaagagcaggaaagacaagagtgttgaagaagaacgtgaaacctcaaagaacccgcgcggatcaggcacaccacccttagtatggttcacctctccacagctgccggaaaaccactactatggcatctacagagcaatattcacaaatgaggagctggcaacagaagacaagatcctagacgcggtcaagtctcgccagctcgacccaatatccatgcccaaaccactcacaaacaaagatggcactatgggcccatctgcagcgacctacactggacgacacatcttcatgtgtatgattggtggtggccactttgccgccatggtggtctccctcgcgcccaaaaagtccaagtcgtcggccccgctgaaccgcgaggcgaccgtccttgcccacaagactttccaccgttacacgacgcgtcgcaagcagggtggttcgcaatcggccaacgacaatgccaagggcaccgcgcactcggccggttcgtcgctgagacggtacaatgagcaggccctggtggaggacgtgaggaacttactctcagactggaagggtctactcgacacggccgatctgctgtttgtacgggcaaccggcgtgacaaacaggaggactttgttcgggccgtatgagggccaggtgttgagggccaacgaccctaggctcagggggtttccgttcagcacaaaaagggcgacgcaaaacgagctcatgcggtcctttatcgagctcacaaggctcaaggtccgggagatcctccctgtgtttgagcaaccgccgcagccggaacagaagcaggccccgggacccaaacagactcctgtcaagaagctcagtgaggaagaggagacggcacagctccacacccaacaaatgcaggcccttatccgacgatccaaactcccctcactactgacctacatcaaaaacaacaacctgactcccgacttccgcttccacccacccgagacacagcagaaccaccacgcaccaaccccgcttcatctcgccgcctcgctcaactctgcaacggttgcacacggcctgctggtccggggtggcgcgaacccaacgatacacaacggccagggccgcacggcctttgagctggcgggcgaccgggcgacgagagacgccttccgggtggcgcgggcggagctgggagaagacaagtggacgtggggcgaggatggtgccaaggtgcccgctgcgctgacgcgcgcagaggccgatcagcgcgaggagagagaggccaaaaaggaggcggacaggcgcaaggccgaggaggagagattgaagcgggaggaggcggcatccggggccaagaagggcggcgccagtggtgcgaggaaagccggaggcttgttggatggcacggtgcccaagacagcgcaggatcgtagagaggaggagatgagggggttgacgccggagcagaagatgaggatcgagagagaaaggagagcgcgtgccgctgaagagaggttgaagaggatgcagtctgggtcataa

SEQ ID NO: 1213 - protein, 656 aa, Magnaporthe grisea 70-15
MPPQEDALLRRPLYVYDLPPEVLSSLALKAGADASDEPETETSIPSESRPQTPESTGTSSTLVGSQACSLCGLSFDGLEEQRSHLKSDWHHYNLKQKLRGLKPVSESEFEKLIGDLDESLSGEDDSSEDEDEQAKGDSTLVTLLKKQANIVDKSRKDKSVEEERETSKNPRGSGTPPLVWFTSPQLPENHYYGIYRAIFTNEELATEDKILDAVKSRQLDPISMPKPLTNKDGTMGPSAATYTGRHIFMCMIGGGHFAAMVVSLAPKKSKSSAPLNREATVLAHKTFHRYTTRRKQGGSQSANDNAKGTAHSAGSSLRRYNEQALVEDVRNLLSDWKGLLDTADLLFVRATGVTNRRTLFGPYEGQVLRANDPRLRGFPFSTKRATQNELMRSFIELTRLKVREILPVFEQPPQPEQKQAPGPKQTPVKKLSEEEETAQLHTQQMQALIRRSKLPSLLTYIKNNNLTPDFRFHPPETQQNHHAPTPLHLAASLNSATVAHGLLVRGGANPTIHNGQGRTAFELAGDRATRDAFRVARAELGEDKWTWGEDGAKVPAALTRAEADQREEREAKKEADRRKAEEERLKREEAASGAKKGGASGARKAGGLLDGTVPKTAQDRREEEMRGLTPEQKMRIERERRARAAEERLKRMQSGS

SEQ ID NO: 1214 - DNA, 1971 bp, Magnaporthe grisea 70-15
  CDS (1)..(1971)
atgcccccacaagaagacgcccttttgcggcgcccactctacgtctacgacctgcctccagaagtcctcagctcacttgccctgaaggccggcgccgacgcatccgacgagccagaaaccgagacttccatcccgagcgaatcgcgacctcaaacaccagaaagtaccggaacgagctccaccttggtgggatcccaagcttgctcactatgtggtctatcctttgacggcctcgaggagcaacggagccacctcaaatccgactggcatcactataacctgacacagaagctacgcgggctcaagccggtctctgagtcagagttcgagaagcttatcggtgacctcgatgagagtctgtcgggagaagacgactctagcgaggacgaagatgaacaggccaagggtgactcgacgctcgtgactctcctgaagaaacaggcaaatattgttgacaagagcaggaaagacaagagtgttgaagaagaacgtgaaacctcaaagaacccgcgcggatcaggcacaccacccttagtatggttcacctctccacagctgccggaaaaccactactatggcatctacagagcaatattcacaaatgaggagctggcaacagaagacaagatcctagacgcggtcaagtctcgccagctcgacccaatatccatgcccaaaccactcacaaacaaagatggcactatgggcccatctgcagcgacctacactggacgacacatcttcatgtgtatgattggtggtggccactttgccgccatggtggtctccctcgcgcccaaaaagtccaagtcgtcggccccgctgaaccgcgaggcgaccgtccttgcccacaagactttccaccgttacacgacgcgtcgcaagcagggtggttcgcaatcggccaacgacaatgccaagggcaccgcgcactcggccggttcgtcgctgagacggtacaatgagcaggccctggtggaggacgtgaggaacttactctcagactggaagggtctactcgacacggccgatctgctgtttgtacgggcaaccggcgtgacaaacaggaggactttgttcgggccgtatgagggccaggtgttgagggccaacgaccctaggctcagggggtttccgttcagcacaaaaagggcgacgcaaaacgagctcatgcggtcctttatcgagctcacaaggctcaaggtccgggagatcctccctgtgtttgagcaaccgccgcagccggaacagaagcaggccccgggacccaaacagactcctgtcaagaagctcagtgaggaagaggagacggcacagctccacacccaacaaatgcaggcccttatccgacgatccaaactcccctcactactgacctacatcaaaaacaacaacctgactcccgacttccgcttccacccacccgagacacagcagaaccaccacgcaccaaccccgcttcatctcgccgcctcgctcaactctgcaacggttgcacacggcctgctggtccggggtggcgcgaacccaacgatacacaacggccagggccgcacggcctttgagctggcgggcgaccgggcgacgagagacgccttccgggtggcgcgggcggagctgggagaagacaagtggacgtggggcgaggatggtgccaaggtgcccgctgcgctgacgcgcgcagaggccgatcagcgcgaggagagagaggccaaaaaggaggcggacaggcgcaaggccgaggaggagagattgaagcgggaggaggcggcatccggggccaagaagggcggcgccagtggtgcgaggaaagccggaggcttgttggatggcacggtgcccaagacagcgcaggatcgtagagaggaggagatgagggggttgacgccggagcagaagatgaggatcgagagagaaaggagagcgcgtgccgctgaagagaggttgaagaggatgcagtctgggtcataa

SEQ ID NO: 1215 - protein, 656 aa, Magnaporthe grisea 70-15
MPPQEDALLRRPLYVYDLPPEVLSSLALKAGADASDEPETETSIPSESRPQTPESTGTSSTLVGSQACSLCGLSFDGLEEQRSHLKSDWHHYNLTQKLRGLKPVSESEFEKLIGDLDESLSGEDDSSEDEDEQAKGDSTLVTLLKKQANIVDKSRKDKSVEEERETSKNPRGSGTPPLVWFTSPQLPENHYYGIYRAIFTNEELATEDKILDAVKSRQLDPISMPKPLTNKDGTMGPSAATYTGRHIFMCMIGGGHFAAMVVSLAPKKSKSSAPLNREATVLAHKTFHRYTTRRKQGGSQSANDNAKGTAHSAGSSLRRYNEQALVEDVRNLLSDWKGLLDTADLLFVRATGVTNRRTLFGPYEGQVLRANDPRLRGFPFSTKRATQNELMRSFIELTRLKVREILPVFEQPPQPEQKQAPGPKQTPVKKLSEEEETAQLHTQQMQALIRRSKLPSLLTYIKNNNLTPDFRFHPPETQQNHHAPTPLHLAASLNSATVAHGLLVRGGANPTIHNGQGRTAFELAGDRATRDAFRVARAELGEDKWTWGEDGAKVPAALTRAEADQREEREAKKEADRRKAEEERLKREEAASGAKKGGASGARKAGGLLDGTVPKTAQDRREEEMRGLTPEQKMRIERERRARAAEERLKRMQSGS

SEQ ID NO: 1216 - DNA, 1953 bp, Candida glabrata CBS 138
  CDS (1)..(1953)
atgtcagatacctctatcaaaaagcatgacctctatatatatgatttgcctgaggctctattaaattcgctggatttgttacaattcgattcatacagaaatgaagtgaagcccaaaccggtggaaagagcaccagtttcaatcgaagaagtcaagaataagcaagttcctacagtattgaaatgtaaagtttgtgctgatagtactgaagcgattggcagggaacattatcaaaccgatcttcatgttgcgaatatcaggcgaaatttaaatggattgccaccacttaatcaagctcagtttgaagagttgataagcaaaaatactgctaagaaagaccaaaaaattgtggaaggggattctgatggcgatatttccaatgatagtggcaatgactcggatagcaattacagctctgaggatgaattggaaaaaatcgatgaaattggcggtgaactttcaagaaaggtgaatgaaattaatattatagacaaaccaattactccacttttaacagatactgaagactcgcaagccaacttgtttcacctaaatacaggtcttcctcaaattctcgttaggtctccactattgtctaacggacagacatatggtatttacaaggctttgtttgataaagataacatccaagagcccttggacacaatattgaagtggaacatggatgacacaaggatgacttcgatttctgcattgtttctagttggcggtggtcattttgctggtgccattgtttgccatcagcgtggtaacatcaaaagtgttgtaagatcgaagagggtagatgaaacaccacaggaacaatgtgttcaattcttggaacataaaacatttcataggtatacaacaagaaggaagcaaggtgggtcacaatctgctatggataatgccaagggtaaggcaaactctgccggttccacattgcgtagatataatgaggctgctctgaagacggacattcaaaatttgatggaaaagtggcgcccatatttgaataagtgtgaaagtatatatatcagggcaagaaatgtccaagacaaaaagattttcttagatggtggaatcctgaacaaagatgataaaagaatcaagagttttccttttaccactaatagaccgactgttactgagctgaaaagaatatggtgtgaactgacatacatgaagccagtagaaaaaccacaacctataccgaacgaagaagcaagcagaaaggccatttcaaaaccagatgctgaaagtaaaaagaaagatgttccaaagctagagctaagtgaggcagaggttcatacagagcaaattgttacattgctgaagaagagtcgtgttcctttactactgtcatatttaaagaagaataaactggatgggaattttatacttctacccaggaacaaatatgtgcatacgccaacaatgctacattatgcatcccagcaagggttaaggcaaatggtttctatcctattaacaacagtaaaatgtgatccgactattcctaatgatgttggtaagaccgcttgggatatttcaaagaatgatactgttagatactgtttccaaaaagccaggcacgctcttggagaagaatacacaaactgggaagaagctcatgttggtgtacctttgagtaaagaagaagtagaaagattagaatcagaaaaagagaagcaagatgaagctgaaactaagaagttgatccaaaaagaattagaattgacaaaggaaagacaaaaacaagaaagaagtgctcgtgcagatgaaattgaattgaaacacgggcaaggcagaaggcttgattctgggtcacctggtctaatgaacttatcttctcataaaattgattctttgaatgaagatcaaagaagaagattaatgagagagcaaagggcaagagccgcagaggccaggatgcaaaagttaaacaaataa

SEQ ID NO: 1217 - protein, 650 aa, Candida glabrata CBS 138
MSDTSIKKHDLYIYDLPEALLNSLDLLQFDSYRNEVKPKPVERAPVSIEEVKNKQVPTVLKCKVCADSTEAIGREHYQTDLHVANIRRNLNGLPPLNQAQFEELISKNTAKKDQKIVEGDSDGDISNDSGNDSDSNYSSEDELEKIDEIGGELSRKVNEINIIDKPITPLLTDTEDSQANLFHLNTGLPQILVRSPLLSNGQTYGIYKALFDKDNIQEPLDTILKWNMDDTRMTSISALFLVGGGHFAGAIVCHQRGNIKSVVRSKRVDETPQEQCVQFLEHKTFHRYTTRRKQGGSQSAMDNAKGKANSAGSTLRRYNEAALKTDIQNLMEKWRPYLNKCESIYIRARNVQDKKIFLDGGILNKDDKRIKSFPFTTNRPTVTELKRIWCELTYMKPVEKPQPIPNEEASRKAISKPDAESKKKDVPKLELSEAEVHTEQIVTLLKKSRVPLLLSYLKKNKLDGNFILLPRNKYVHTPTMLHYASQQGLRQMVSILLTTVKCDPTIPNDVGKTAWDISKNDTVRYCFQKARHALGEEYTNWEEAHVGVPLSKEEVERLESEKEKQDEAETKKLIQKELELTKERQKQERSARADEIELKHGQGRRLDSGSPGLMNLSSHKIDSLNEDQRRRLMREQRARAAEARMQKLNK

SEQ ID NO: 1218 - DNA, 1866 bp, Kluyveromyces lactis NRRL Y-1140
  CDS (1)..(1866)
atgtccgacagaatacaaaagaatgacttgtacgtctatgatttgtctgatgagatcctttcttctttgcagttgatatctttcgactctgatatgaatgaggttaaagtggtccattctgatgtagaaatcgaaaacaaaaaggaaattgaggttaaaacagtaccttcatgtgcttcatgtggtattaatgcatttcctaatgataattctgatcctcgatatcattttaaaactgatttacacaaattcaacataaaaagaagagtttacggtttatctccagtcgatgagcaagagtttaggcagttgattaaaagtaaagaaacagccactgcagaagattctgacagtgattctttatctggtgaggatgatgagacagatgaaatagaagaagatgatatttctacaagaggaggagagcagttgacagcaattctcgagcatgaactccaggatttgatgatcaatgacaaccaaacgggacccgtttctcatttaaacacacaatctcctttaatattcatgcattctgctgaattatcgggaccaagaattttcggggcttataaagtactatttaatgcagaggaattgaaatgcccattgaaatcaattcatcattggaaaaatcaggataaaaccgagcatttctctgtgttgttcatgattggcggcggtcattttgcaggagcagtggtatcgcatcaaaagataccaactaatggtaataacaaaaataaatatatcctatctctacaagagcagtcagtacagtttttggaacagaaaacgttccatcgatacactaccagaagaaagcaaggtggctcccaatcagcaaatgacaatgccaagggaaaggcaaattccgctggttcaactctacgtagatataatgaagcagcgttgaaagcagacatacaagcattgttaaaggattgggaaccctacattgcaaagtgtgacaatattttcattagagccaatagtgtcacagatagaaagatcttcttagataatacttgcatctctaaaactgatgtcaaactaaagtctttcccattcactacgatgcgcccatcctcaaatgaactaaggcgtgcctgggttcaattgacgtatttatcgataacggacaaacctcaaccaaaagtcaaaaaattgcaaactgatcattcaaagaacaaacctaggaaacttacaaattctccaacaccagtgcctctgaagacagaagatgaacaacataccgaaaagctaatctcatttattcaaaagagtaaggcgccgctgttaatatcgtatatcaagaaaaacaatcttgatgtcaatattactttgcaaccctcttctgaatatcatcacacaccaacaatgctacattatgcatcatctcacggcttgaaacacatggtattggtgttgttgtccactttaaaagcagatcctacaattactaacaatgttggaaaaacagcgtgggatctggcgagtgacaccatggtcaaggaaaccttccagttggcgcgttataatttaggagaaagcttcacggattgggagcaaagtcatgttagtggagcattatcggctgaacagatagatgaaaggcacaagaagatagcactcgaagaagagaaagaaaagaaagacttgatagaaaaagaattgcaggcggcaaaggaaagaatcaaagaggaaaaagatgctaaaagaggtcccggaatgaaacttggcgccgcatcctctaacgttcaaataaatttgaactctttaactgatgatcaacggatgagattgatgagagagcagcgagctcgtgcagctgaagcgagaatgaaaagattttctggtaactag

SEQ ID NO: 1219 - protein, 621 aa, Kluyveromyces lactis NRRL Y-1140
MSDRIQKNDLYVYDLSDEILSSLQLISFDSDMNEVKVVHSDVEIENKKEIEVKTVPSCASCGINAFPNDNSDPRYHFKTDLHKFNIKRRVYGLSPVDEQEFRQLIKSKETATAEDSDSDSLSGEDDETDEIEEDDISTRGGEQLTAILEHELQDLMINDNQTGPVSHLNTQSPLIFMHSAELSGPRIFGAYKVLFNAEELKCPLKSIHHWKNQDKTEHFSVLFMIGGGHFAGAVVSHQKIPTNGNNKNKYILSLQEQSVQFLEQKTFHRYTTRRKQGGSQSANDNAKGKANSAGSTLRRYNEAALKADIQALLKDWEPYIAKCDNIFIRANSVTDRKIFLDNTCISKTDVKLKSFPFTTMRPSSNELRRAWVQLTYLSITDKPQPKVKKLQTDHSKNKPRKLTNSPTPVPLKTEDEQHTEKLISFIQKSKAPLLISYIKKNNLDVNITLQPSSEYHHTPTMLHYASSHGLKHMVLVLLSTLKADPTITNNVGKTAWDLASDTMVKETFQLARYNLGESFTDWEQSHVSGALSAEQIDERHKKIALEEEKEKKDLIEKELQAAKERIKEEKDAKRGPGMKLGAASSNVQINLNSLTDDQRMRLMREQRARAAEARMKRFSGN

SEQ ID NO: 1220 - DNA, 1905 bp, Debaryomyces hansenii CBS767
  CDS (1)..(1905)
atggataaagtgaataataccgatatagatgctaatgatctgtacttgtatgacttaccagagaaaattcttgggtcattggaattgatttattttgattcttcaaccacagtcgttccatcgcaatctgtaccatccacatcgacacaagtggtagaggttaatacagatactaaagaggataagcctatacagaatatcagtgtatgttctgtttgcaagcctcaatatgatttgaaagcaacacaaaatgagaagagagatcattatagatcagattatcatagattgaatttgaaaagatcaatcagtaatttgccaccattatcagaatcagaatttgacaggctcattgaagaagagtcaatagaaagtatatctggttcggatgatagtagtgaaagtgaatcagaggatgagttatcctcgtctaccaagttagacacaataatcgaaaaatttgatagcgtatcaattgacaagaatgaaacaaacgatgacgaggaagaaggaacaattagttatttgaatactaattctccttttatttatttcaaatctatattaattccagaaggaaaagtcttcggtgtgtataaatctgttttcactgaaagacaattacaagaagacccagtggagactcttcgttcattctcaaatccacctatcaagacgaagaaatctgcccttctcatgattggtggtggccatttcgcaggcgcaattatttcacatatacctaagaacatcaaaggtaatgctcctaatttcaaagagtcgaagcaagagcaattaacaaacataatagaatctaagacttttcatagatatactacaaggaaaaagcaaggtggatctcaaagcgcaagtgataatgctagaggtaaagcaaactcggctgggtctagcattcgtagatacaatgagcaagcgctcacacgggaagttagagacttattgatgtcatggaagggtcatattgatgattgtacaaatatttatataagagcgaatggtccatcaagtaggagaattcttgtgggatatgatggttgtgttttacataccagcgatgataggataagaagctttccatttactacgaaaagagcaacgacatcagaattaaagaaagcatggtcaaacttatcgtatttgactattcatgatatgccaaaatcaaatgaaaagttaaagaaaaggttacagaaacaaagggataacttgaaaaattctcagcagcaacattcaaagaaacctgaagaaattgttctcgatgaaaatgataaacattccaatgagttgataggctttttaaagaaatcaaaagctccaatgttagtcaactatattcataaaaacaatttgtcccctaatcatgaactatcgcctaaagatcaatacgttcataatccgactttattgcatttcgcttcatctcaaggtttatcacatatggtgcaagtattaatcgttaaccttaaagctgatccaactatttctaatcaattcggtaagacaccgtttgaactagcaggaaatacagcaacaagaagagcatttcaaatagcaagatattctttaggtgaggactactgtgattggcaattatcaaaagtaggtagtcccaaatcaaaagaggaagttgaaagagaacaaaaagaagaacaaaagaaaatagacgaagataagaagaaaatgatagaagatgagttagcaaaacgcacagaaatggaacagaaaaaaccgacgtactcatcaggcggaactttgggtagtggtaaaatacctagttctttaactgaaactagcggcctttctgaacagcagaagatgagaataatgagagaacaaagagcaagagcagctgaagccaggatgaaaagaatgcaaggaaattaa

SEQ ID NO: 1221 - protein, 634 aa, Debaryomyces hansenii CBS767
MDKVNNTDIDANDLYLYDLPEKILGSLELIYFDSSTTVVPSQSVPSTSTQVVEVNTDTKEDKPIQNISVCSVCKPQYDLKATQNEKRDHYRSDYHRLNLKRSISNLPPLSESEFDRLIEEESIESISGSDDSSESESEDELSSSTKLDTIIEKFDSVSIDKNETNDDEEEGTISYLNTNSPFIYFKSILIPEGKVFGVYKSVFTERQLQEDPVETLRSFSNPPIKTKKSALLMIGGGHFAGAIISHIPKNIKGNAPNFKESKQEQLTNIIESKTFHRYTTRKKQGGSQSASDNARGKANSAGSSIRRYNEQALTREVRDLLMSWKGHIDDCTNIYIRANGPSSRRILVGYDGCVLHTSDDRIRSFPFTTKRATTSELKKAWSNLSYLTIHDMPKSNEKLKKRLQKQRDNLKNSQQQHSKKPEEIVLDENDKHSNELIGFLKKSKAPMLVNYIHKNNLSPNHELSPKDQYVHNPTLLHFASSQGLSHMVQVLIVNLKADPTISNQFGKTPFELAGNTATRRAFQIARYSLGEDYCDWQLSKVGSPKSKEEVEREQKEEQKKIDEDKKKMIEDELAKRTEMEQKKPTYSSGGTLGSGKIPSSLTETSGLSEQQKMRIMREQRARAAEARMKRMQGN

SEQ ID NO: 1222 - DNA, 1821 bp, Yarrowia lipolytica CLIB122
  CDS (1)..(1821)
atggcaaaagcaaagcaagcacctacggcatactttctgtacgacctgcctgagtctattctcaagtctctcaaggtgtatgatttcaacggagtactgcgatctgaagagacggaagttaagccatcgagccagttttctgctgaagaaaaggccttccatcgatacaatcacaaactgcgtcttcagggcttggcagctattcgaaaaccagagtacgatcaactgcttaaagatggactgactgacacacaaaaagacgacgattcagacagcaacagcaacagcaacagcaacagcaacagcaacagcgaggaggatacagaatcggacagtgacgaagagtttggactgcctcgaaaaatggaactggcgtcgatctcggaagctggagatggagaaacggcaaaagacgaactcaagggaagccctgtcatcttcctcaagagccccgaagttgaacctaagacactgacggtctacaagaatgcactgggccacgtatcacccactgagtcgggtattcttggggagattcagcgggtgaatactcttccggaggctacttctgtgatcatcatggctggaggaggacattttgctgcagcgatctttcaacactcgccgaaaatcaaaaacacaatggttcccctaattctggaaaccaaatcatttcacagatacaccactcgtcgaagccagggaggttcccagagtgcttctgatggttcaaagggtaaggccaagtctgtgggttcctctctgcgacgatatggagagagccagttgcagatggaggtgaaggagttgctgacttctcccgagtggaagaagcgtctgttacctggccttcctacgtctgccgctaacatttacattcgagccagtggaaagggcagtcgtggtcttgttcttgggttcgagggatgtcctattcccaaaaatgattcccgagtcaagagtatccccttcaacacccgtcgagcaaactacaccgaggttctgcggtcctggacggaactgtccactgtcaaggttgtggatgtgagcaaagaggaagaggaggcagaaaagacacgtgaaaaggaggccgagaaggctcggaaggagcagtcgcgtcttgcagcggctgaagccaagaagcagaagcagcagcagtcccaacctaccaccgtaccactcactcctctcatgaaacagacttctgagatcactgagttgattcgaaagagtcgggctcctaagctcatttcgtacctcaaactgcaaaagctcaagtcgccctaccagctggagttccccgaaggagataagacaggcacattgtgtcctactgctctgcattacgccgctaaagagggtagcgcttacattgtgagtgtcttgttgaagcagctaggggccgatcctaccgttaccaactcgtttggaaagactgcttgggatctggtttcggatagtaagacccgggacactttccagctggcaagaggagctcttggagaagacaagtgggactggaaagccagtcatgttggagaagctcttaccgatgagcagattgaacagcgagacaaaaaggaggctgctgaacacgaccaaaaggtcaaacagtccattgcccagcaggaggaggagcagaaggaaaaggagtccagcaagagatacgaaaagattgtcgccaagagtggactgggaaagagactgcctcagatggccaccaagctggaggacactagaggtctttctgatgaagcaaagatgagactcgagcgagagagacgagctcgagctgccgaagcacggtttgcaaaaaaataa

SEQ ID NO: 1223 - protein, 606 aa, Yarrowia lipolytica CLIB122
MAKAKQAPTAYFLYDLPESILKSLKVYDFNGVLRSEETEVKPSSQFSAEEKAFHRYNHKLRLQGLAAIRKPEYDQLLKDGLTDTQKDDDSDSNSNSNSNSNSNSEEDTESDSDEEFGLPRKMELASISEAGDGETAKDELKGSPVIFLKSPEVEPKTLTVYKNALGHVSPTESGILGEIQRVNTLPEATSVIIMAGGGHFAAAIFQHSPKIKNTMVPLILETKSFHRYTTRRSQGGSQSASDGSKGKAKSVGSSLRRYGESQLQMEVKELLTSPEWKKRLLPGLPTSAANIYIRASGKGSRGLVLGFEGCPIPKNDSRVKSIPFNTRRANYTEVLRSWTELSTVKVVDVSKEEEEAEKTREKEAEKARKEQSRLAAAEAKKQKQQQSQPTTVPLTPLMKQTSEITELIRKSRAPKLISYLKLQKLKSPYQLEFPEGDKTGTLCPTALHYAAKEGSAYIVSVLLKQLGADPTVTNSFGKTAWDLVSDSKTRDTFQLARGALGEDKWDWKASHVGEALTDEQIEQRDKKEAAEHDQKVKQSIAQQEEEQKEKESSKRYEKIVAKSGLGKRLPQMATKLEDTRGLSDEAKMRLERERRARAAEARFAKK

SEQ ID NO: 1224 - DNA, 1914 bp, Aspergillus nidulans FGSC A4
  CDS (1)..(1914)
atgactaccaagaaccaggtggaggaattgctaaaaagaccactatatgtttatgatcttccccaggaacttcttgcatcgatcgccctcaaaggcgaggatcagcccataaccgttgaggatgccgagcctacccgcaaagagtcctcggacgacgtacaagaacatgcgattgcaacctcaacaagctgcgccatttgcaaagtgtccttcgccaacgtacaggaacagcgcgagcatgtgcgctccgaccatcataaatacaacgtgcgagctcagcttagaggcaatgccgttctggatgaagtacaattcacgaaggcgattggcgagcttgatgagtcgatatcggggtccgagtcgtcggaagaggaagacggagatgctggggaccagctctcagctttgctgaaaaggcaggctaaaatctcccaagcggctgaagagggcaaagagagcgccacaccgaggggtgtcgggaaacatccgctattgtggtttacgcatcctgctctcccaccgaatacgtcgctgggtgtgtaccgggcgctgtttacgaatgaggagcaggaggagcggaaatgtcttgtcgattccctgaagaagaagcaattagctcccatttatccgcagcagaaggataatggacaaccggcgactcctagtccgcatatttttatgtgcatgattggtggtgggcactttgcggcaatgctggtttctctggcacccgaggttcatcggaaacagggtggtgtcgaggaaagacaagctcgcgttattgcacacaagtcgtttcatcgctatacaaccaggcgaaaacaaggtggctcccagtcagccaacgacgcggcaaaaggtgcggcgcattcagcgggttccagcctacgacggtataatgaggctaccttggaaaaggagattagggagctgttgcaggattggggcaagatgataaacgaggctcagctcttgttcgtccgcgctgctggctctacgaatcgaagggtcttgtttggccaacatgaggggcaagtgctgaagcagaatgaccccaggttgagagggttcccgttcagtactcgtcgggcgacacagactgaactgatgagatgcttcaaagagctcactcgtgtgaagattagtcaagttgatgaagctgctctcgccgcagccgcaaccaaacagcgagaagagtcaaaaccttctacaccaaagcctcagccgcagaaaccaaagatatcgaaagaggatgaagcggcaatcatgcatacaacacaaatacaagccctcatccgtcgctcgaaaattccggcgctgatgtcgtacctatccaaaaactctataccctcttcatttacctttcagccatccgacgtccagcagaattttcgatgtcccacacctcttcacctcgcctcaaacctcaattcccccgcaatggtattagccctccttaccaagcttgacgccgacccaacggctacgaatgcagaaggaagaacgccatttgaacttgcaggtgatcgcgctactcgagatgctttccgcgtagcacgccacgagcttggcgagtccaagtggaattgggaggctgccaatattccgccagccatatccaaggctgaagcagataaccgtctgcaaagggagcggaaaacagcggaagaggaagaagcgaaccggcgtaaggcggaaatggatcgcttgcgacaggaagaggcagcgacggcggctcgaatgacaaaaaaaggtggccggactgtgggcagtgtagagaagacagctcaggaaagaagagaagaagaaacgcgggggatgacgccggaaatgaggatgcggttggagagggagcgccgtgctagagcagctgaagagaggattcggaggatgcaacagggtcagaaacagtga

SEQ ID NO: 1225 - protein, 637 aa, Aspergillus nidulans FGSC A4
MTTKNQVEELLKRPLYVYDLPQELLASIALKGEDQPITVEDAEPTRKESSDDVQEHAIATSTSCAICKVSFANVQEQREHVRSDHHKYNVRAQLRGNAVLDEVQFTKAIGELDESISGSESSEEEDGDAGDQLSALLKRQAKISQAAEEGKESATPRGVGKHPLLWFTHPALPPNTSLGVYRALFTNEEQEERKCLVDSLKKKQLAPIYPQQKDNGQPATPSPHIFMCMIGGGHFAAMLVSLAPEVHRKQGGVEERQARVIAHKSFHRYTTRRKQGGSQSANDAAKGAAHSAGSSLRRYNEATLEKEIRELLQDWGKMINEAQLLFVRAAGSTNRRVLFGQHEGQVLKQNDPRLRGFPFSTRRATQTELMRCFKELTRVKISQVDEAALAAAATKQREESKPSTPKPQPQKPKISKEDEAAIMHTTQIQALIRRSKIPALMSYLSKNSIPSSFTFQPSDVQQNFRCPTPLHLASNLNSPAMVLALLTKLDADPTATNAEGRTPFELAGDRATRDAFRVARHELGESKWNWEAANIPPAISKAEADNRLQRERKTAEEEEANRRKAEMDRLRQEEAATAARMTKKGGRTVGSVEKTAQERREEETRGMTPEMRMRLERERRARAAEERIRRMQQGQKQ

SEQ ID NO: 1226 - DNA, 1614 bp, Candida albicans SC5314
  CDS (1)..(1614): transl_table=12
atggaagacttttacatatacaacctactggacaaggtgatcaactcacttgagttgttgtatttcgattcaaaaacctccgaaagcgtcaaggcagacgaaccaccaaaaacaccacaaccaccccctaatcaacacgacacagaatactataaatcagatttataccgctataacctaaaacgaaaactcaatgatttgccaccagtcaccgaacaacagttcgataaactacttgaagaagaatccattgaaagtttatcggggtccgacgacgaaagcgacgacgaagacaagctacaacacctaatacaaaagttggatgtaaaagacgacgacaacgacgacgaatccacagtgagccacctcaacaccaaatccccattcatcctctttggctcgccattggttccagcagacaaagctattggggtctataaggcagttttctcaccctcgcaactcgacaacccaaccgaaagtctccacttccccaaaaccggcaaatcagcattatttatgattggaggcggccattttgccggtgccattatttcccacacacgcaaaaacactcgtggcaatgcccccactaccaaagagtctatccaggaacaagctgtcgacatcgttcagtcaaagacattccataggtacaccacacgaagaaaacagggtggctcccaaagtgcaagcgacaatgcccgtggcaaagccaactctgctgggtccagtataagaagatacaacgaacaagcattgatccaggaagttagagagttattgcacgattggaagaatcagctcgcagagtgtactgccatctacatacgtgcaaatggtgcatcgaaccgaaaagtcttggtcggcgaggggtctcccattcaagccaacgatccaagactaagggggttcccattcacaaccagaagagctacaacatcagagctaaagagggcgtgggtggagttgactcatttgcatgtagtggacatgccaaaagtcgaaaagaaaaaggaaacaccaaagaaaatcgaaaaaactaccgtctcaccaccgccaccacccacaaacacattatccactgacctcattactcttttgaaaaaacaaaaagcaccaaagttgattaattttgtcaaacaaaacagtattgatgtcaacgagtttaggctcgactacacccacacaccgacattattgcactatgctgctgcaaatggtcttggccatatggtgcaagtcctactcgtaaacctcaaagccaaccccatagtttacaatgccgcaggaagaacccccgccgaggttgctgacacctctgcaagaaaagtattccaaatagtcagacacaaattaggcgaagagtattgcgattggaacgccgctaaagtggcaccccccaaaagcaaagaagagatagaacaagaagaacgcactttgcatgaacaacttgaattggaaaagaaacaattgatacaacaagagttgaccaagccagaacctaaaaaagtcacacccagtttcgacttgaccggacttagcgatcaacagaaaatgagagtattgagagaacaacgagctcgcgcagccgaagcaagaatgaaacgttaa

SEQ ID NO: 1227 - protein, 537 aa, Candida albicans SC5314
MEDFYIYNLSDKVINSLELLYFDSKTSESVKADEPPKTPQPPPNQHDTEYYKSDLYRYNLKRKLNDLPPVTEQQFDKLLEEESIESLSGSDDESDDEDKLQHLIQKLDVKDDDNDDESTVSHLNTKSPFILFGSPLVPADKAIGVYKAVFSPSQLDNPTESLHFPKTGKSALFMIGGGHFAGAIISHTRKNTRGNAPTTKESIQEQAVDIVQSKTFHRYTTRRKQGGSQSASDNARGKANSAGSSIRRYNEQALIQEVRELLHDWKNQLAECTAIYIRANGASNRKVLVGEGSPIQANDPRLRGFPFTTRRATTSELKRAWVELTHLHVVDMPKVEKKKETPKKIEKTTVSPPPPPTNTLSTDLITLLKKQKAPKLINFVKQNSIDVNEFRLDYTHTPTLLHYAAANGLGHMVQVLLVNLKANPIVYNAAGRTPAEVADTSARKVFQIVRHKLGEEYCDWNAAKVAPPKSKEEIEQEERTLHEQLELEKKQLIQQELTKPEPKKVTPSFDLTGLSDQQKMRVLREQRARAAEARMKR

SEQ ID NO: 1228 - DNA, 1965 bp, Cryptococcus neoformans var. neoformans B-3501A
  CDS (1)..(1965)
atgtcggcaacctactcaaataggtccttttcggtatacaatgtaccgccacaacttctcgaaaccctagctgtccggtctatccaagcacaaaacggcgaccagcagcagtccgctctccctacgtcagcgtctaccttggctgcagcagcgccgcctgccgccggtactggtatcagttgtcagacatgtcctcaagcagacttcgatactattgaagagcagcgggcgcatttcaaaagcgattggcatcgatataatgtcaaggtcaaactgaatgcaagtggcaaggttatcagtcttgaggagtgggacaacatggttgaaggtatttcatcaatatcgggaagtgcttcttctacctctggatccgagcagagcaaagtggctcgtctactcaagaatcaatcacttgatgaatcagacgacggctcttctgctgctgccgagctggctgatcgtcaacgtcgagcccatcttcgtacagccgtcatttggttctccccttgcgcccctgttcctgaactaaacataccgaaagacacccaattcggcgttcaccgagctctctttcccccttatgaaaaggctggtgactatctggaggaattgagacgaatgcagctgacgggtgatgaagaagaggatggggagaggaggttgacgtttttgatggttgcaggaggacattttgcaggaatggttgttgggataagaccgaggggcaaaacggagaagcaagacgtcaaaggagctggggacgtgagggttctgaaacacaagactttccatcgttatacgactcgtaagaagcaaggtgggtctcaggcaattaacgacaacaacaagtcaaaagccatctctgccggtgccatgctccgtagatacggtgaacaagcccttcaagaagaaattcgtgcgcttcttatcgattgggccgatgatatccatgcttcagagcgtatattcatccgtgccagtacgcatggaaaaaagtctttttggggctacgaaaacgctccgctcgagaagaatgatgaacggataaggacgttccctttccctacgagaagaccgaccttacaagaattgttgaggtgttggcatgagttaacaagggttagggtttctcatttgagcgaggaggcattgaaacagcaagatgaagcgtacatcgcttcactccagcccaagacgcagacaaaggccaagcctgcccccgcgccagtcaaggaagtcaagtcaatagcaccaaagatttcggcggaggaagaggcgagattggacagatggaagagattggacgaaatggtacggaaaggacgtattaatgcgttgaaacctttctgggaaaagtacagcgaagaatttttatccaaccctgcttcagcatcgtcttccctttctcccgaagaaaaatcacagtacacacaaccttatcttctctccgcagcgtcatcgtcatctcaacctgaagtcttgacatacttcctttccgaacttaaatttgacccgaccctggccgtccctggtgacgcgttaaaacgcccatatgacctcgccgcatcaaaagttatgagagatatctatcgtaaggttgcttacgacaatccagacttgtgggactggaaagcggcgcgcgtgccaccaggattgagcgaggaaatggaggcagagcaaagggagaagaaagccggaaggagaaaggggttgaaggaaaagctcaaggagagggagaagtctagacaggaagcagaggtgagggaagcgcaagaagaggaggagagacggttgaagacggagaagcaagagagggagaagccaacgaggttgggtgtgagcggtccgcagaagttgggtggtggttctgccgaagggctggccgggctgagtgcggagatgaggatgcagattgaaagagaacggagagctagggctgcagaggcgcggtttggcagcagatag

SEQ ID NO: 1229 - protein, 654 aa, Cryptococcus neoformans var. neoformans B-3501A
MSATYSNRSFSVYNVPPQLLETLAVRSIQAQNGDQQQSALPTSASTLAAAAPPAAGTGISCQTCPQADFDTIEEQRAHFKSDWHRYNVKVKLNASGKVISLEEWDNMVEGISSISGSASSTSGSEQSKVARLLKNQSLDESDDGSSAAAELADRQRRAHLRTAVIWFSPCAPVPELNIPKDTQFGVHRALFPPYEKAGDYLEELRRMQLTGDEEEDGERRLTFLMVAGGHFAGMVVGIRPRGKTEKQDVKGAGDVRVLKHKTFHRYTTRKKQGGSQAINDNNKSKAISAGAMLRRYGEQALQEEIRALLIDWADDIHASERIFIRASTHGKKSFWGYENAPLEKNDERIRTFPFPTRRPTLQELLRCWHELTRVRVSHLSEEALKQQDEAYIASLQPKTQTKAKPAPAPVKEVKSIAPKISAEEEARLDRWKRLDEMVRKGRINALKPFWEKYSEEFLSNPASASSSLSPEEKSQYTQPYLLSAASSSSQPEVLTYFLSELKFDPTLAVPGDALKRPYDLAASKVMRDIYRKVAYDNPDLWDWKAARVPPGLSEEMEAEQREKKAGRRKGLKEKLKEREKSRQEAEVREAQEEEERRLKTEKQEREKPTRLGVSGPQKLGGGSAEGLAGLSAEMRMQIERERRARAAEARFGSR

SEQ ID NO: 1230 - DNA, 1956 bp, Vitis vinifera
  CDS (1)..(1956)
atggcgaagggcaatcaacagcaagagaaacgacaccgttccatcttcgaccttcctacaaccttcttgtactcctgtcgtctccttccttcttcttcttcttcgtcgtattctgcaaatcttttttcagaaacgaaggctgcgtctccaagctcaactctcgaaaccctagacgagtccaagaagttggagcacagtgctaatacttctctgtccagatggtcctgcaacacctgcaagtccgagttcgactccctccaagaccaacgctcccatttcaaatccgatgttcatcggttcaatgtaaagttgagcatcgccggaaagggtattgtgaaagaggaagactttgatgagctaactgcagatactttgttcaaagactatgatatatcgagtatatcaggatcagaagatgaagttgacaagagatgttgggcccagaatgacatgcacaagggttcagatgacaatgttaaacgaaagctatttattcagcttcagacaggggagaaagtttcactttggaagtgtttagttttggatgaatctgaaaatatttcatatgagaacgaccctggttgttgcatgccatgtttgaaagagagtgatgtgattgagaagttgaaaactgtgatccacgagcctagggataatacccatttgagggttgtgttgcttgctagtggtgggcattttgctggctgtgtctttgatggtaactctgttgtggctcacagaacattccacagatatgtcgtaagggccaaggctggtaaaaagcagtcatcaaaagatgcaggtggcagggctgcacattctgctggagcttcacttcgcagatataacgaactcgctctgaagaaggaaattcaagaattacttgcttcttggaggccttattttgaggcttcctcctgcatcttcatttatgctccttcaaacaatcgtcaactgctttttaatggggaaaaggcgtatttcagtaaccagactgctgctcgaaatgttccattgactgttcgaaggcctacattcaaggaagcccagcgtatatataaccaattgacacaagttgcctatgatatggatgagacggaatctccagaaagcatcaaagatgattcacttttaaggttaagcactattagcatcaacagcccagagtccagcaaggtgggcacagaggacaacttggagagaagggtagccactgaagcatgttcaagtaacaaaaaatctgatgacatgcccatatcaagtgagagtgagcatgaatttactggttcatcaacacctttacatgaagcagcaaagtctggagattgtcataaagtcttggaactcctagagcagggtttggatccttgcattatagatgaaagggggaggaccccatatatgctgacaactgagaaggaagtcaggaatacttttagacggttcatggcctccaacctggacaagtgggattggcatgctgcaagagtgcccagtgcattgacaaaggaaatggaggaatctcaagcagctaagcaggcagataaagatgcaaagaggaaagcaagatcaaaagagctgaagaaactgcggaaagcaaaagaaaagaaggctcaggctcaggctgccttagcccagaattcctcaacagtttcagagaatcaaggagctaagctggtttcagttctcaagggacagcctcaatctagtagcaccatatccagagaggaggaactgaagagagcagctactgctgagagggaaaagagagcagcagctgctgagaggagaatagcagcagctgcatccctcaatgctcaagggcctgcatctgacataaactgctcctactgttatgcatcattagctggtaaaatcccgtttcacaggtataattacaaatattgcagcacaacatgcatgcatgtacacaaagagatacttgaggatggataa

SEQ ID NO: 1231 - protein, 651 aa, Vitis vinifera
MAKGNQQQEKRHRSIFDLPTTFLYSCRLLPSSSSSSYSANLFSETKAASPSSTLETLDESKKLEHSANTSLSRWSCNTCKSEFDSLQDQRSHFKSDVHRFNVKLSIAGKGIVKEEDFDELTADTLFKDYDISSISGSEDEVDKRCWAQNDMHKGSDDNVKRKLFIQLQTGEKVSLWKCLVLDESENISYENDPGCCMPCLKESDVIEKLKTVIHEPRDNTHLRVVLLASGGHFAGCVFDGNSVVAHRTFHRYVVRAKAGKKQSSKDAGGRAAHSAGASLRRYNELALKKEIQELLASWRPYFEASSCIFIYAPSNNRQLLFNGEKAYFSNQTAARNVPLTVRRPTFKEAQRIYNQLTQVAYDMDETESPESIKDDSLLRLSTISINSPESSKVGTEDNLERRVATEACSSNKKSDDMPISSESEHEFTGSSTPLHEAAKSGDCHKVLELLEQGLDPCIIDERGRTPYMLTTEKEVRNTFRRFMASNLDKWDWHAARVPSALTKEMEESQAAKQADKDAKRKARSKELKKLRKAKEKKAQAQAALAQNSSTVSENQGAKLVSVLKGQPQSSSTISREEELKRAATAEREKRAAAAERRIAAAASLNAQGPASDINCSYCYASLAGKIPFHRYNYKYCSTTCMHVHKEILEDG

SEQ ID NO: 1232 - DNA, 1803 bp, Schizosaccharomyces pombe
  CDS (1)..(1803)
atgggtgatatttcgaagcacaatattttttcccttcctgaggatatcttagcaaaactagaactacgagaggaatactcagttgaggaaaaaactgatagtgctaatttgtcaaaccaaggcgatattgttgattccactcagaaaaatatatcatcatgtgtcaattgccagattgacaatctgcatactctggacgaaagaaaaagtcatattaaatctgactggcataggttcaatacgaagcgaaaaattacaaaattgcctccggtttctcaagacgaatttgaaagcataattgaagatttaccagaatcactgtctggcagtgaaagcgagacaaactcagaatccgaagaagataatttccaaatagagaaggcttttaaacaatccttgaacataggaaaagttgactccgctgacgaaaacaacaatcagcgaacaaactcaccattaacgtggtttcaattgagtaatgcttctgccgaagtgccaacctatattggtgtatataaacacatgttttccggtaataaccatatcactaaagatttacttgttcaacaacaaaatcataaccgacaaaagccacttcaactagctatgtttatggttggaggcggtcattttgctgctatgattgcttctaatgagtttaatcctcgtgatccccatgtacccaaagtactagcacagaaaactattcacagatatacaactagaaggaagcaaggtggttctcaaggggctgctgacaatactaaagggaacattcactcggcaggtagtggtttgcgacgttataacgaacaagctcttattaaagatattcagcaagtttttaaagactggggaaaattattagaaacatgcgatttaatctttgtacgtgcaatcggttcatctaatcgttcaattttcttctctcaaccaggtgctcttatttctccaaaagatccaaaactccgcgtatttccatttactactaaacgagccacacattcagaattacttcgttgttacaaagagttggttactccgaaaattagtcacgttgattcaatttcgataaaagctcaagaagaagaacgaaagagacaagccgaaattgaaaaggaaattagacaaagcagattacaagaggaagagaggaaaaagaaaaagcttgctaaatataccgaagtaattatctccaatttgaaagcgtctaatattgaagcatttttggaatatttgcgctctaatgatttgtctataaattttcaattttatcctaaaaatgttcatttgcacacatctacaccgttgcattacgcagttacccaaaaaaatgctaaattagtcgctaaacttctccgtaatggtgctgatccagcaatgctaaatgggaacggaaagacaccttttgagattagtactggaaacaaagaggttaaagatgagtttctaattgcaaggcatgagttgggagagtcatttttcgactgggaagcagctaaagttggggctcctcagtctagagaacaaattcagaaacaacgccaaaaggcaaagaccaaattagaaaatcaaagaagggataaagagaggcaagaagaacttagacggaaggaagcgatgcagaaaattgaagaacaatcgaaaagggattatgataaactgcacggcgaaggtcattcattaggaattaataatgttcgaaaagttgacgaattgcaatcattaagtccagaaatgagaatgcgaattgaacgtgaaaaaagggctgcagctgccatgaaaagaatgcaaacaaaatga

SEQ ID NO: 1233 - protein, 600 aa, Schizosaccharomyces pombe
MGDISKHNIFSLPEDILAKLELREEYSVEEKTDSANLSNQGDIVDSTQKNISSCVNCQIDNLHTLDERKSHIKSDWHRFNTKRKITKLPPVSQDEFESIIEDLPESLSGSESETNSESEEDNFQIEKAFKQSLNIGKVDSADENNNQRTNSPLTWFQLSNASAEVPTYIGVYKHMFSGNNHITKDLLVQQQNHNRQKPLQLAMFMVGGGHFAAMIASNEFNPRDPHVPKVLAQKTIHRYTTRRKQGGSQGAADNTKGNIHSAGSGLRRYNEQALIKDIQQVFKDWGKLLETCDLIFVRAIGSSNRSIFFSQPGALISPKDPKLRVFPFTTKRATHSELLRCYKELVTPKISHVDSISIKAQEEERKRQAEIEKEIRQSRLQEEERKKKKLAKYTEVIISNLKASNIEAFLEYLRSNDLSINFQFYPKNVHLHTSTPLHYAVTQKNAKLVAKLLRNGADPAMLNGNGKTPFEISTGNKEVKDEFLIARHELGESFFDWEAAKVGAPQSREQIQKQRQKAKTKLENQRRDKERQEELRRKEAMQKIEEQSKRDYDKLHGEGHSLGINNVRKVDELQSLSPEMRMRIEREKRAAAAMKRMQTK

SEQ ID NO: 1234 - DNA, 2001 bp, Oryza sativa
  CDS (1)..(2001)
atggcggcggcctcgccggagagcaggcctcctcgctcgctcttcgacctccccgcggacttcttcgattcttcttccctcctcggatcccacccttcctcggccccctctgcggcggaaccgtccgagtccatccggccggcggcggccccgcctctatcgcagccgtcggaggctccggggttgaggtggacatgcaacacctgcgcctctgaattcgagtcgctgcaggaacagcgcgagcacttcaagtctgatctccatcgcctcaacgtcaagctgagcattgctggtaaaactattatcaaggaagatgacttagacaaagcagatcccgattctctgttcgatgatttggaggtatctagtgtatctggatcagaggatgaacttgaaaatgggcctgcatcagatcgtggtctctcagccaaagacaagggagaattcaggaagaaactttattttcgctgtcattctggtgacacagtttctatctggagatgcatactgttgaaagaacatgaagagccagttttcaatagcaagtctggtcagacagaaagtcatggatctacaccatttgtacaagaggatgaaatgctaaatagagtgaagaatttgacatctgagcctcgtgatgcatcacgtttgaggatcattctactaacaagtggtggacattttgctggatgtgtttttgatggaaactcagtcatagcccataaaacatttcataggtatgttgtaagggcaaaggctggaaagaggcagtctgggaaagatgctactgggaaggttgcacattcagcaggctcatctcttcgccgttataatgaagcggcattgaaaaaggaaattcaagaattaatagcttcttggaagtcatactttgacctttgtgtctgtgtctttatgtatgctccgtcaaagaaccgtcaaatgctctttgatggggataagactcagtcggtattgcaggcttgtgatattcgtccaatcccattgactgttcatcggcccaccttgaaggaagcaaaacggttatatactaacctaacacagctctgttatgagatggaatgcttgagtacggatgaaccccatgtagaggatgtgacaagttttgaacaaagtaaagaggcaaagcagaaaaaaattatggattctgaggaatctatttctgtctcgtccttaagtttggacttgccaaataagcacgaagggacatccatacatccatctaataatgaaacaacgcctcttcacgaagcagcaaagtctggcaatgctcagcaaacactggagttgcttgagcagggtttggatccttgtattaaagatgcaagaggaaaaacaccttacttgctggcttcggacaaagaagttagaaatacattcagaagatttatggcactcaacctagacaaatgggattggcatgcggctgatgtgcctagtgcactaacaaaggaaatggaagaatcacaagctgcaaagcaggcagagaaggatgccaagaagaaggcaagagcaaaggaactgaagaaattgaagaaagcaagagaaaaggaaaaggagaaagaaaaagaaaaggcacaagcatcacagtcccaaaggacccaatctaatgtaagaggcacttcagctggtcaaatggccaatgcaactgcttctatgccaggcctgaaacaaaagcatcagctgccccagcctacggcactttcgaaagaggaggaacgacaaaggaaactcgccgaggaaagagagaaaagagcagccgcagccgaaagaagatttgcggctctggcggcacaatcaagtagcacatcagggacagcagcagcagaacatcccccacagagagcagccgcggcagacgatacttcttgttcgtgctgtttttcttccttggtcggcaaagtaccattccacaggtacaattacaagtactgcagcaccacatgtatgcatcttcattcagaaatgctggaagatgattga

SEQ ID NO: 1235 - protein, 666 aa, Oryza sativa
MAAASPESRPPRSLFDLPADFFDSSSLLGSHPSSAPSAAEPSESIRPAAAPPLSQPSEAPGLRWTCNTCASEFESLQEQREHFKSDLHRLNVKLSIAGKTIIKEDDLDKADPDSLFDDLEVSSVSGSEDELENGPASDRGLSAKDKGEFRKKLYFRCHSGDTVSIWRCILLKEHEEPVFNSKSGQTESHGSTPFVQEDEMLNRVKNLTSEPRDASRLRIILLTSGGHFAGCVFDGNSVIAHKTFHRYVVRAKAGKRQSGKDATGKVAHSAGSSLRRYNEAALKKEIQELIASWKSYFDLCVCVFMYAPSKNRQMLFDGDKTQSVLQACDIRPIPLTVHRPTLKEAKRLYTNLTQLCYEMECLSTDEPHVEDVTSFEQSKEAKQKKIMDSEESISVSSLSLDLPNKHEGTSIHPSNNETTPLHEAAKSGNAQQTLELLEQGLDPCIKDARGKTPYLLASDKEVRNTFRRFMALNLDKWDWHAADVPSALTKEMEESQAAKQAEKDAKKKARAKELKKLKKAREKEKEKEKEKAQASQSQRTQSNVRGTSAGQMANATASMPGLKQKHQLPQPTALSKEEERQRKLAEEREKRAAAAERRFAALAAQSSSTSGTAAAEHPPQRAAAADDTSCSCCFSSLVGKVPFHRYNYKYCSTTCMHLHSEMLEDD

SEQ ID NO: 1236 - DNA, 2019 bp, Zea mays
  CDS (1)..(2019)
atggcgtcgtcgcagctgccgctgccactgccgccaccaccaaagaggccccctcgctcgctctttgaactcccctctgacttcttcgattcatccgttcttctccgggctcacccctccacggccacctccgcggtggaaccgtccgaaccctcccggccgccgccgactcagcagcagcaccaacaactttcagaggctgcggggtccaggtggacgtgcaacacatgtgcctccgagttcgagtcgctacaggagcagcgcgagcactttaagtctgacctgcaccgcctcaacgttaagttgagcatggctggtaaaactattataaaggaagaggacctagataaagcagattctgattctctgtttgatgatttggagatatctagtgtctctggttcagaggacgaacaagaaaatggacctgcatcagaacgtgtactctcggttaaaggcaaggaagaattcaggaagaaactttactttcgtcgtgcatcgggtgaaatgatttctatctatagatgcatgctgttgaaagaacatgaagaaccattaattgattgtaagtctggtcagatggagaatgcatcttgtgtacaggaggaggagatgataaatagggtgaagtgtttggcttgtgaaccccgtgacacgtcacatttgagagttgttctactaacaagtggtgggcattttgctggttgtgtgtttgatggaaattctatcatagctcataaaacatttcataggtatgtcgtaagagcaaaggctggtaaaaggcaatctggaaaagatgctactggaaaagttgcacactcagcaggttcttctctacggcgctataatgaagcagcactgaaaaaggaagttcaagaattaattgtttcatggaagtcatactttgagacatgtgtttgtgccttcatttatgctccatctaggaaccgccaaatgctcttcgacggggagaagactcagtcagtaattcagtcttgtgatgttcgtccagttccattgactgttcatcgccccaccttgaaggaagcgaaacgggtatattgtaacctaacacaactctactatgagatggaatgttcaaccacagatgaaacattacctgatgctggaagtgtgaaaaatgttgaacaaggtcaaggaaaaaagaatgaagtgactgcaaaccctggggaatctatttctgacttgtctgcccgtttggaattgttgaataagaatgaagcagcaaccataccatcatcaaagaacgaaacaacacctcttcatgaggcagcaaagtgtggcaatgctcagctgaccctggagttacttgagcagggtttggatccttgcgtaaaagatgcaagaggaaagacatcttattcgctggcttcagataaggaagttaggaatacattcagaagatttatggcgctcaatcttgacaaatgggactggcatgctgcagatgtgcctagtgcactaacaaaagaaatggaagaatcacaagctgcaaaacaagcagacaaggacgccaaaaggaaagcacgtgcaaaggaattgaagaaattaaaaaaagaaagagaaaaggaagaaaaggagaaggagaaggctaaggctcaagcatcacaatcacaatctgatgttaaaggcacttcgagcggccaaatggccaacagaactgcaactgcgccaggccttgtaccaaagcatcagacgccacagcaaatacttatagcaaaggaggaggaacgacagagaaaacaagctgaagaaagagagaagagagcagctgcagcagagagaagacttgcggctctcgctgtccaatctgccggaacgagcgcatcaggtgcagcagcaacaaactgctccgcgaagagggcggcaccagatgacaattcgtgttcgtgctgtttcggttccttggtcggcaaggtgccattccaccgatacaactacaaatactgcagcactacatgtatgcatcttcattcagaaatgctgcaggatgattaa

SEQ ID NO: 1237 - protein, 672 aa, Zea mays
MASSQLPLPLPPPPKRPPRSLFELPSDFFDSSVLLRAHPSTATSAVEPSEPSRPPPTQQQHQQLSEAAGSRWTCNTCASEFESLQEQREHFKSDLHRLNVKLSMAGKTIIKEEDLDKADSDSLFDDLEISSVSGSEDEQENGPASERVLSVKGKEEFRKKLYFRRASGEMISIYRCMLLKEHEEPLIDCKSGQMENASCVQEEEMINRVKCLACEPRDTSHLRVVLLTSGGHFAGCVFDGNSIIAHKTFHRYVVRAKAGKRQSGKDATGKVAHSAGSSLRRYNEAALKKEVQELIVSWKSYFETCVCAFIYAPSRNRQMLFDGEKTQSVIQSCDVRPVPLTVHRPTLKEAKRVYCNLTQLYYEMECSTTDETLPDAGSVKNVEQGQGKKNEVTANPGESISDLSARLELLNKNEAATIPSSKNETTPLHEAAKCGNAQLTLELLEQGLDPCVKDARGKTSYSLASDKEVRNTFRRFMALNLDKWDWHAADVPSALTKEMEESQAAKQADKDAKRKARAKELKKLKKEREKEEKEKEKAKAQASQSQSDVKGTSSGQMANRTATAPGLVPKHQTPQQILIAKEEERQRKQAEEREKRAAAAERRLAALAVQSAGTSASGAAATNCSAKRAAPDDNSCSCCFGSLVGKVPFHRYNYKYCSTTCMHLHSEMLQDD

SEQ ID NO: 1238 - DNA, 26 bp, Artificial sequence
  primer
atgaattcacaaaaggcgagtaaaat

SEQ ID NO: 1239 - DNA, 27 bp, Artificial sequence
  primer
tcagtatttctttttcatcctttcttc

SEQ ID NO: 1240 - protein, 726 aa, Artificial sequence
  consensus sequence
  Variant (3)..(7): Xaa in position 3 to 7 is any amino acid
  Variant (9)..(10): Xaa in position 9 to 10 is any amino acid
  Variant (12)..(36): Xaa in position 12 to 36 is any amino acid
  Variant (37)..(74): Xaa in position 37 to 74 is any or no amino acid
  Variant (76)..(78): Xaa in position 76 to 78 is any amino acid
  Variant (80)..(80): Xaa in position 80 is any amino acid
  Variant (82)..(83): Xaa in position 82 to 83 is any amino acid
  Variant (85)..(85): Xaa in position 85 is any amino acid
  Variant (87)..(201): Xaa in position 87 to 201 is any amino acid
  Variant (202)..(244): Xaa in position 202 to 244 is any or no amino acid
  Variant (250)..(261): Xaa in position 250 to 261 is any amino acid
  Variant (262)..(286): Xaa in position 262 to 286 is any or no amino acid
  Variant (293)..(294): Xaa in position 293 to 294 is any amino acid
  Variant (296)..(296): Xaa in position 296 is any amino acid
  Variant (298)..(298): Xaa in position 298 is any amino acid
  Variant (300)..(301): Xaa in position 300 to 301 is any amino acid
  Variant (304)..(305): Xaa in position 304 to 305 is any amino acid
  Variant (307)..(311): Xaa in position 307 to 311 is any amino acid
  Variant (313)..(313): Xaa in position 313 is any amino acid
  Variant (317)..(318): Xaa in position 317 to 318 is any amino acid
  Variant (325)..(325): Xaa in position 325 is any amino acid
  Variant (328)..(333): Xaa in position 328 to 333 is any amino acid
  Variant (335)..(351): Xaa in position 335 to 351 is any amino acid
  Variant (352)..(358): Xaa in position 352 to 358 is any or no amino acid
  Variant (360)..(384): Xaa in position 360 to 384 is any amino acid
  Variant (385)..(387): Xaa in position 385 to 387 is any or no amino acid
  Variant (389)..(392): Xaa in position 389 to 392 is any amino acid
  Variant (394)..(394): Xaa in position 394 is any amino acid
  Variant (396)..(397): Xaa in position 396 to 397 is any amino acid
  Variant (399)..(400): Xaa in position 399 to 400 is any amino acid
  Variant (402)..(405): Xaa in position 402 to 405 is any amino acid
  Variant (407)..(472): Xaa in position 407 to 472 is any amino acid
  Variant (473)..(514): Xaa in position 473 to 514 is any or no amino acid
  Variant (516)..(516): Xaa in position 516 is any amino acid
  Variant (519)..(519): Xaa in position 519 is any amino acid
  Variant (521)..(531): Xaa in position 521 to 531 is any amino acid
  Variant (534)..(537): Xaa in position 534 to 537 is any amino acid
  Variant (538)..(538): Xaa in position 538 is any or no amino acid
  Variant (541)..(546): Xaa in position 541 to 546 is any amino acid
  Variant (548)..(548): Xaa in position 548 is any amino acid
  Variant (549)..(577): Xaa in position 549 to 577 is any or no amino acid
  Variant (579)..(581): Xaa in position 579 to 581 is any amino acid
  Variant (583)..(587): Xaa in position 583 to 587 is any amino acid
  Variant (588)..(589): Xaa in position 588 to 589 is any or no amino acid
  Variant (591)..(592): Xaa in position 591 to 592 is any amino acid
  Variant (594)..(605): Xaa in position 594 to 605 is any amino acid
  Variant (606)..(606): Xaa in position 606 is any or no amino acid
  Variant (608)..(619): Xaa in position 608 to 619 is any amino acid
  Variant (620)..(621): Xaa in position 620 to 621 is any or no amino acid
  Variant (623)..(670): Xaa in position 623 to 670 is any amino acid
  Variant (671)..(715): Xaa in position 671 to 715 is any or no amino acid
  Variant (718)..(718): Xaa in position 718 is any amino acid
  Variant (721)..(721): Xaa in position 721 is any amino acid
  Variant (725)..(725): Xaa in position 725 is any amino acid
LPXXXXXSXXLXXXXXXXXXXXXXXXXXXXXXXXXXXXXXXXXXXXXXXXXXXXXXXXXXXXXXXXXXXXXXXXHXXXDXHXXNXKXXXXXXXXXXXXXXXXXXXXXXXXXXXXXXXXXXXXXXXXXXXXXXXXXXXXXXXXXXXXXXXXXXXXXXXXXXXXXXXXXXXXXXXXXXXXXXXXXXXXXXXXXXXXXXXXXXXXXXXXXXXXXXXXXXXXXXXXXXXXXXXXXXXXXXXXXXXXXXGGHFAXXXXXXXXXXXXXXXXXXXXXXXXXXXXXXXXXXXXXKTFHRYXXRXKXGXXQSXXDXXXXXAXSAGXXLRRYNEXALXXXXXXLXXXXXXXXXXXXXXXXXXXXXXXXAXXXXXXXXXXXXXXXXXXXXXXXXXXXXPXXXXRXTXXEXXRXXXXLXXXXXXXXXXXXXXXXXXXXXXXXXXXXXXXXXXXXXXXXXXXXXXXXXXXXXXXXXXXXXXXXXXXXXXXXXXXXXXXXXXXXXXXXXXXXXXXXXXXXXXXXXXXXTXLHXAXXXXXXXXXXXLLXXXXXDPXXXXXXGXXXXXXXXXXXXXXXXXXXXXXXXXXXXXXTXXXLXXXXXXXRXXFXXXXXXXXXXXXXWXXXXXXXXXXXXXXEXXXXXXXXXXXXXXXXXXXXXXXXXXXXXXXXXXXXXXXXXXXXXXXXXXXXXXXXXXXXXXXXXXXXXXXXXXXXXXXXXXXXXXXXXXXXXREXRAXAAEXR

SEQ ID NO: 1241 - protein, 54 aa, Artificial sequence
  protein pattern
  Variant (2)..(3): Xaa in position 2 to 3 is any or no amino acid
  Variant (5)..(5): Xaa in position 5 is Phe or Ile
  Variant (9)..(10): Xaa in position 9 to 10 is Thr or Val
  Variant (12)..(12): Xaa in position 12 is any amino acid
  Variant (14)..(14): Xaa in position 14 is Ala or Gln
  Variant (16)..(17): Xaa in position 16 to 17 is any amino acid
  Variant (19)..(19): Xaa in position 19 is Ala, Gly or Ser
  Variant (20)..(21): Xaa in position 20 to 21 is any amino acid
  Variant (23)..(23): Xaa in position 23 is Ala or Asn
  Variant (24)..(24): Xaa in position 24 is Ala, Asn, Ser or Thr
  Variant (25)..(27): Xaa in position 25 to 27 is any amino acid
  Variant (28)..(28): Xaa in position 28 is Ala or Ile
  Variant (29)..(29): Xaa in position 29 is any amino acid
  Variant (33)..(33): Xaa in position 33 is Ala or Ser
  Variant (34)..(34): Xaa in position 34 is any amino acid
  Variant (35)..(35): Xaa in position 35 is Ile or Leu
  Variant (39)..(39): Xaa in position 39 is Gly or Asn
  Variant (41)..(41): Xaa in position 41 is any amino acid
  Variant (44)..(45): Xaa in position 44 to 45 is any amino acid
  Variant (46)..(46): Xaa in position 46 is Asp or Glu
  Variant (47)..(47): Xaa in position 47 is Ile or Val
  Variant (48)..(48): Xaa in position 48 is any amino acid
  Variant (49)..(49): Xaa in position 49 is Ala, Asp, Glu, Gly, Asn or Gln
  Variant (50)..(50): Xaa in position 50 is Leu or Val
  Variant (51)..(51): Xaa in position 51 is Phe, Ile, Leu or Met
  Variant (52)..(53): Xaa in position 52 to 53 is any amino acid
KXXTXHRYXXRXKXGXXQXXXDXXXXXXXSAGXXXRRYXEXALXXXXXXXXXXW

SEQ ID NO: 1242 - protein, 29 aa, Artificial sequence
  protein pattern
  Variant (2)..(2): Xaa in position 2 is any amino acid
  Variant (3)..(4): Xaa in position 3 to 4 is any or no amino acid
  Variant (6)..(7): Xaa in position 6 to 7 is any amino acid
  Variant (8)..(9): Xaa in position 8 to 9 is any or no amino acid
  Variant (11)..(11): Xaa in position 11 is Phe or Leu
  Variant (12)..(12): Xaa in position 12 is Asn, Pro, Ser or Thr
  Variant (13)..(13): Xaa in position 13 is Thr or Val
  Variant (14)..(14): Xaa in position 14 is any amino acid
  Variant (16)..(16): Xaa in position 16 is Ala or Pro
  Variant (17)..(17): Xaa in position 17 is Asn or Thr
  Variant (18)..(19): Xaa in position 18 to 19 is any amino acid
  Variant (21)..(21): Xaa in position 21 is Ala, Leu or Val
  Variant (22)..(22): Xaa in position 22 is any amino acid
  Variant (23)..(23): Xaa in position 23 is Lys or Arg
  Variant (24)..(26): Xaa in position 24 to 26 is any amino acid
  Variant (27)..(27): Xaa in position 27 is Glu or Asn
  Variant (29)..(29): Xaa in position 29 is Ser, Thr or Val
DXXXRXXXXPXXXXRXXXXEXXXXXXXLX

SEQ ID NO: 1243 - protein, 9 aa, Artificial sequence
  protein pattern
  Variant (6)..(6): Xaa in position 6 is Ala or Gly
  Variant (7)..(7): Xaa in position 7 is any amino acid
  Variant (8)..(8): Xaa in position 8 is Ile or Val
  Variant (9)..(9): Xaa in position 9 is Phe, Ile or Val
GGHFAXXXX

SEQ ID NO: 1244 - protein, 12 aa, Artificial sequence
  protein pattern
  Variant (3)..(3): Xaa in position 3 is any amino acid
  Variant (6)..(6): Xaa in position 6 is any amino acid
  Variant (10)..(10): Xaa in position 10 is any amino acid
  Variant (12)..(12): Xaa in position 12 is Phe, Ile, Leu or Met
REXRAXAAEXRX

SEQ ID NO: 1245 - DNA, 1410 bp, Saccharomyces cerevisiae
  CDS (1)..(1410)
atgtcttattcagctgccgataatttacaagattcattccaacgtgccatgaacttttctggctctcctggtgcagtctcaacctcaccaactcagtcatttatgaacacactacctcgtcgtgtaagcattacaaagcaaccaaaggctttaaaacctttttctactggtgacatgaatattctactgttggaaaatgtcaatgcaactgcaatcaaaatcttcaaggatcagggttaccaagtagagttccacaagtcttctctacctgaggatgaattgattgaaaaaatcaaagacgtacacgctatcggtataagatccaaaactagattgactgaaaaaatactacagcatgccaggaatctagtttgtattggttgtttttgcataggtaccaatcaagtagacctaaaatatgccgctagtaaaggtattgctgttttcaattcgccattctccaattcaagatccgtagcagaattggtaattggtgagatcattagtttagcaagacaattaggtgatagatccattgaactgcatacaggtacatggaataaagtcgctgctaggtgttgggaagtaagaggaaaaactctcggtattattgggtatggtcacattggttcgcaattatcagttcttgcagaagctatgggcctgcatgtgctatactatgatatcgtgacaattatggccttaggtactgccagacaagtttctacattagatgaattgttgaataaatctgattttgtaacactacatgtaccagctactccagaaactgaaaaaatgttatctgctccacaattcgctgctatgaaggacggggcttatgttattaatgcctcaagaggtactgtcgtggacattccatctctgatccaagccgtcaaggccaacaaaattgcaggtgctgctttagatgtttatccacatgaaccagctaagaacggtgaaggttcatttaacgatgaacttaacagctggacttctgagttggtttcattaccaaatataatcctgacaccacatattggtggctctacagaagaagctcaaagttcaatcggtattgaggtggctactgcattgtccaaatacatcaatgaaggtaactctgtcggttctgtgaacttcccagaagtcagtttgaagtctttggactacgatcaagagaacacagtacgtgtcttgtatattcatcgtaacgttcctggtgttttgaagaccgttaatgatatcttatccgatcataatatcgagaaacagttttctgattctcacggcgagatcgcttatctaatggcagacatctcttctgttaatcaaagtgaaatcaaggatatatatgaaaagttgaaccaaacttctgccaaagtttccatcaggttattatactaa

SEQ ID NO: 1246 - protein, 469 aa, Saccharomyces cerevisiae
MSYSAADNLQDSFQRAMNFSGSPGAVSTSPTQSFMNTLPRRVSITKQPKALKPFSTGDMNILLLENVNATAIKIFKDQGYQVEFHKSSLPEDELIEKIKDVHAIGIRSKTRLTEKILQHARNLVCIGCFCIGTNQVDLKYAASKGIAVFNSPFSNSRSVAELVIGEIISLARQLGDRSIELHTGTWNKVAARCWEVRGKTLGIIGYGHIGSQLSVLAEAMGLHVLYYDIVTIMALGTARQVSTLDELLNKSDFVTLHVPATPETEKMLSAPQFAAMKDGAYVINASRGTVVDIPSLIQAVKANKIAGAALDVYPHEPAKNGEGSFNDELNSWTSELVSLPNIILTPHIGGSTEEAQSSIGIEVATALSKYINEGNSVGSVNFPEVSLKSLDYDQENTVRVLYIHRNVPGVLKTVNDILSDHNIEKQFSDSHGEIAYLMADISSVNQSEIKDIYEKLNQTSAKVSIRLLY

SEQ ID NO: 1247 - DNA, 1380 bp, Coprinopsis cinerea okayama7#130
  CDS (1)..(1380)
atgtcgattcccattagcatcatccagtctgtcgccacctctgtctctccagcgagctcgtcgctccacgaccacttccgtcgacgagccattgaccccgacccagctgaacccaggatcctccatcccctggagaacgaaggcctcagactcttgatcctcgagaacatcagccaggaggccgtcgctgcattccgaagccagggctatcatgtggatcaccacaccaaggccttcacggaggacgagttggtcgagaagatcggctcttaccatggtattggtattcgtagcaaaaccaagatcacagcccgtgttctccaggctgccaaaaagttgctggtaatcggatgcttctgcatcggtaccaaccaagtcgatctcgaggcagctgcccaagctggcattcccgtcttcaactcccccttctccaactcccgatccgttgccgagttggtcatgtccgaactggtcgtcctctcccgtcagcttttcgagcgagcatacgaaattcggacgggcctctggaataagcaatccaaaaactgctacgaaattcgtggcaagactttgggcatcgtcggttatggccacatcggctcccaactctccgtgcttgcagaagcgttcggaatgagggtactcttccacgatgtattgaacatcatgcctctcggccaggctcaacaagtggaatctcttgacgccctcctcgctcaatcagactttgtcacacttcacgtccccgaatcaccagacacgatcaacatgatctcccgcggtcaattgtcgaagatgaagaagggcgcctatctcatcaacaatgctcgcggcaaagtcgtcgatatccccgccctcattgaattccttgaatcgaaacacatcgccggtgcggccatcgacgtcttccccaacgagcctggcgcaaacggcgatccattcgacgaccagctcaactcttgggcctccaaactgcgcaatcttcccaacgtcgtcttgaccccacacatcggcgggtccacggaagaagcccaacggatgatcggtatcgaagtctccacatacgttagtcgatatcttggtaccggttccaccatcggtgcagtcaatttcccggaagtcgacttgcgtgccatcaccaaggaccagcaaaaccagattcgtatctgccatgtacacaggaaccagcctggtgtcctcaaacaggtcaacgacgcgttgtccccatacaacgtcgagaagcagtactcggattccaagggcgagattgcatacgttatggccgatatctccaacgtcagcactaccgacgactgggccgccctcaaagaacgaatcaacaacaccgatgcgaacatcttgactcgcttccttgcttag

SEQ ID NO: 1248 - protein, 459 aa, Coprinopsis cinerea okayama7#130
MSIPISIIQSVATSVSPASSSLHDHFRRRAIDPDPAEPRILHPLENEGLRLLILENISQEAVAAFRSQGYHVDHHTKAFTEDELVEKIGSYHGIGIRSKTKITARVLQAAKKLLVIGCFCIGTNQVDLEAAAQAGIPVFNSPFSNSRSVAELVMSELVVLSRQLFERAYEIRTGLWNKQSKNCYEIRGKTLGIVGYGHIGSQLSVLAEAFGMRVLFHDVLNIMPLGQAQQVESLDALLAQSDFVTLHVPESPDTINMISRGQLSKMKKGAYLINNARGKVVDIPALIEFLESKHIAGAAIDVFPNEPGANGDPFDDQLNSWASKLRNLPNVVLTPHIGGSTEEAQRMIGIEVSTYVSRYLGTGSTIGAVNFPEVDLRAITKDQQNQIRICHVHRNQPGVLKQVNDALSPYNVEKQYSDSKGEIAYVMADISNVSTTDDWAALKERINNTDANILTRFLA

SEQ ID NO: 1249 - DNA, 1578 bp, Synechococcus sp. PCC 7002
  CDS (1)..(1578): transl_table=11
atggctaaagttcttgtttccgactctatcgaccaagccggaatcgatatcctctcccaggtcgcccaagtagacgttaaagtcggattacccctcgaagaactcatcagcattattcccgaatacgatgccctgatgattcgctccgggaccaaagtcaccaaagaagtgatcgaagccggtaaaaacctcaaaatcattggccgtgccggagtcggtgttgataatgtcgatattcccgccgccacccgccaagggatcatcgtcgtcaactcccccgaaggaaacaccattgctgccgccgaacatgccctcgcgatgatgttgtccctctctcgccacatccccgatgccaaccagtccgtcaaagccaaagaatggaaccggaaaaaattcatcggcgcagaagtgtataaaaagaccctcggcgttgtcggtctcggcaaaattggtgcccacgtagctagcgtcggtaaagccctaggcatgaagctcctcgcctatgatccgtttatctccgaagaacgggccggacaattgggttgtcgcctcgtcgatctcgattacctgttccgggaagccgactacattaccctccacgtccccaaaacccccgaaactacccatttaattggcgaagagtccatcgccaaaatgaagcccaccacccgcattgtgaactgtgctcgtggtggcgttgttgatgaagccgccgttgctaaagcgatccaagaaggtcgccttggtggggccgctttggatgtttttgaagaagagcccctgggtgaatctgaactccgggccttggataacgtcgtccttaccccccacttgggtgcttctaccgctgaagcccaggtaaatgttgccgttgatgttgccgagcaaattcgggatgtcattttagggttgccagcacgctctgcggtgaatattcctggccttaatgccaacgtcatggaaaaactgcgtccctatctccaattggcggagaccctagggaacatggtcggtcagttagccggaggccgcatcgaaaaattaaatgtgaccctccaaggggatttggccgaaaaagaagccaagcctttggttgtagctgcgctcaaaggtctcctttctccggcattgcgggaacgggtcaactatgtgaacgcagaaatcgaagcgaaggaacgggggatccggatcattgagacccgtgatgaatcggtgcgtgattacaccggagccattcacctagaagccactggcgctgatggagaacactccgtcaatggggcgctgttaagtgacggggatattcgcattactagtatcaatggttttccgattaatgtgccgccaacgggctacatgctctttactctccaccgggatgttccggggattatcggcaagatcggctctctgctgggcagctttaatgtgaatatcgccagtatgcaggtgggccgcaaaattgtccggggtgacgccgtaatggttctgagcctagatgatccgctgccggaaggtgtcttgagtgagattaccaaggtaaccggaatccgggatgcctacacggttaagctgtaa

SEQ ID NO: 1250 - protein, 525 aa, Synechococcus sp. PCC 7002
MAKVLVSDSIDQAGIDILSQVAQVDVKVGLPLEELISIIPEYDALMIRSGTKVTKEVIEAGKNLKIIGRAGVGVDNVDIPAATRQGIIVVNSPEGNTIAAAEHALAMMLSLSRHIPDANQSVKAKEWNRKKFIGAEVYKKTLGVVGLGKIGAHVASVGKALGMKLLAYDPFISEERAGQLGCRLVDLDYLFREADYITLHVPKTPETTHLIGEESIAKMKPTTRIVNCARGGVVDEAAVAKAIQEGRLGGAALDVFEEEPLGESELRALDNVVLTPHLGASTAEAQVNVAVDVAEQIRDVILGLPARSAVNIPGLNANVMEKLRPYLQLAETLGNMVGQLAGGRIEKLNVTLQGDLAEKEAKPLVVAALKGLLSPALRERVNYVNAEIEAKERGIRIIETRDESVRDYTGAIHLEATGADGEHSVNGALLSDGDIRITSINGFPINVPPTGYMLFTLHRDVPGIIGKIGSLLGSFNVNIASMQVGRKIVRGDAVMVLSLDDPLPEGVLSEITKVTGIRDAYTVKL

SEQ ID NO: 1251 - DNA, 1233 bp, Haemophilus somnus 2336
  CDS (1)..(1233): transl_table=11
atgacaacaaaagtatcactagataaatcaaaaattaagtttttgcttttggagggaatacaccaaaatgcactggaggtgttaaaagcagcaggatataccaatatcgaatatcatcggaaggccttagaacctgatgaattaaaaattgctatcaaagatgcacattttatcggtattcgttctcgaacgtctttaacggaggatatattagcagaagcaacaaaattaattgcaattggttgtttttgtatcggcacaaatcaagtggatttagaagcggcaaaagcacgaggtattcctgttttcaatgcaccgtttgccaataccagatctgtggctgaattagtgcttggtgagatcttattattaatgcgtaatataccgcaagccaatgccgatgtgcatcgaggtttatggaataaatccatggtgggatcttatgaggttcgtggaaaacgcttgggtattattggttatggtcatattggatctcaactaagtattattgcagaagcgttaggcatgaatgtgtatttctatgatatagaaacaaaattacctttaggtaatgcacaacaaatgaatagcttagaagaacttttgagtacctgtgatgtggtttcattacatttgccggaaaattcctcaacaaaaaatttaatgaatgcggaacgcattgcacaattaaaggcgaactgtatttttatcaacgctgcccgtggcacagtggttgatattgacgctttaactcaggcgttagaaagcaaaaaaattcgtggtgccgcaattgatgtattcccgaaagaacctgcctcgattgaagaggaatttatctcgccattgcgtgctttcgataatgttatcctaacaccacacattggtggctcaactgttgaagcacaagaaaatattggagttgaagtcgcaaataaatttgtcaaatattccgataatggttcaacactgtcggcagtaaatttcccagaagtatctctaccggaacatagtaatgcaaaacgcttattacatattcaccataaccgtccggggattttaaataaaatcaatcaaatatttgtggagcaaaatatcaatattgcggctgaatatttacaaaccgaggcaaaaattggttatgtggtaatcgatgttgaaacagaagataccgctcaattattggctaaacttaagcaaattgaaggcactattcgtgcgagagtattattttaa

SEQ ID NO: 1252 - protein, 410 aa, Haemophilus somnus 2336
MTTKVSLDKSKIKFLLLEGIHQNALEVLKAAGYTNIEYHRKALEPDELKIAIKDAHFIGIRSRTSLTEDILAEATKLIAIGCFCIGTNQVDLEAAKARGIPVFNAPFANTRSVAELVLGEILLLMRNIPQANADVHRGLWNKSMVGSYEVRGKRLGIIGYGHIGSQLSIIAEALGMNVYFYDIETKLPLGNAQQMNSLEELLSTCDVVSLHLPENSSTKNLMNAERIAQLKANCIFINAARGTVVDIDALTQALESKKIRGAAIDVFPKEPASIEEEFISPLRAFDNVILTPHIGGSTVEAQENIGVEVANKFVKYSDNGSTLSAVNFPEVSLPEHSNAKRLLHIHHNRPGILNKINQIFVEQNINIAAEYLQTEAKIGYVVIDVETEDTAQLLAKLKQIEGTIRARVLF

SEQ ID NO: 1253 - DNA, 1812 bp, Arabidopsis thaliana
  CDS (1)..(1812)
atgtcagccaccgccgccgcctcctcctcgatcgccgttgccaccaactctctcaggaacgtgactctgtcttccagatcgccccttccatcagccatctccgtggctttcccttcccgtggacgcaatactcttcagcgacgcctcgttctcgtttcctgcagtactggagacggatctaagcctacgattctcgtggcggagaagctcggtgacgctggtattaagcttttggaggatgtcgcgaatgtcgactgttcgtataacatgactcctgaggagctcaacattaagatctcgctctgtgacgccttgatcgtgaggagtgggactaaggttggccgtgaggtgttcgaatcgtctcacggacggctcaaggttgttggtcgcgctggtgttgggatcgacaacgtggatctgagtgcagcgacggagtttgggtgtttggttgtcaacgctccgacggcgaacacgatcgctgccgctgagcacggaatcgctcttatggccgccatggctaggaacgtagctcaagctgatgcgtctgttaaggctggagagtggaagaggaacaagtatgtaggtgtttcacttgtgggaaagacccttgcagtgttgggattcgggaaagttgggacggaagttgctcgtcgtgctaagggtcttggtatgcgtgtcattgctcatgatccctatgccccagcagaccgtgcacacgccattggtgttgacttagtgagctttgatgaagcccttgccaccgcggatttcatttctcttcatatgcctcttacgccaacaacatcgaagatactaaacgacgaaacctttgccaaaatgaagaagggagttcgaattgttaatgttgctcgtggaggtgtcatagacgaagatgcgttagtgagagctctggatgctggtattgttgcgcaggctgcacttgatgttttcaccaaagagcctccggctaaagatagcaagctcgtgcagcacgagagggtcactgtgacacctcatcttggagctagtaccatggaggctcaggaaggagttgccatcgaaattgctgaagctgttgttggagctctgaatggagagcttgctgctactgcagtcaatgcacctatggtttctgctgaggttctgaccgagctgaaaccatatgtggtgctagccgagaaactaggaagactggcagtgcaactggtggccggaggaagcggtgtgaaaaacgcgaaaatcacatacgcctcagcaagagccactgatgatcttgacaccagacttctccgagccatgatcaccaagggaatcatcgagccaatctctgacgtatatgtcaatttggtcaacgctgatttcacagccaagcagagaggtctcagactctcagaggaacgtgtgcttttggatggttcaccagagagcccattggagacaataactgttcagctaagcaatgtggagtccaaattcgccagttccctgtctgaatcaggagaggttaaagtggaaggaaaggttaaagacggagtcccgcatttgacaaaggttggatcttttgaggtcgatgtaactcttgaaggtagtatcatactgtgcaggcaggtggatcaacctggtatgatcgggactgtcggaagcatccttggagagtctaatgtcaatgttaacttcatgagcgttgggagaattgcaccgaggaagcaagcgattatggcgattggagtagatgacataccaagcaaagagacactgaagaagattggggaaattccagcggttgaggagttcgttttcctcaagctctag

SEQ ID NO: 1254 - protein, 603 aa, Arabidopsis thaliana [sequence omitted]

SEQ ID NO: 1255 - DNA, 1233 bp, Pasteurella multocida subsp. multocida str. Pm70
  CDS (1)..(1233): transl_table=11
atgacgaccaaagtgtctttagataaatctaaaattaaatttctcttattagaaggtgtccatcaaacggcattggaagtgctacaaaatgctggctataccaacattgaataccataaaaaagccttagatgatgatgaattaaaagaagccattaaagatgcgcactttgtgggtatccgctcacgcacgttcttaacagaagaagtacttgcccatgcacaaaaattaattgcgattggttgtttctgtatcggtactaaccaagtcaatttacaagcggcaaaattacgtggtattccagtgtttaatgcgccgttttcaaatacccgttctgtagcagaattagtgttaggggaaattctcttgttaatgcgtaacgttccccaagccaatgccgaagtacaccgtgggatttggaataaatcagccaatggatcacatgaagtacgtggtaaaaaactgggtatcattggttacgggcatatcggttcacagttaagtattattgcggagtcactcgggatgcgcgtattcttctatgatatcgagaataaattgccattaggcaatgcacagcaattacgcacattagaagaacttctgtctagctgtgatgtagtgtcattacatgtgcctgaaaatgcctcaactaaaaacctcatcagtgcagaacgcatcgcacaattaaaagaaggcgccatcttaattaatgcggcaagaggcacagtagtagatattgatgctttagcacaagccttagaggctggcaaaatccgtggcgcagccttagatgtcttcccagaagaacccgcctccattcaagaggaatttgtttcaccgttacgtgcttttgataatgtgattcttacgccgcacatcggtggctccacgtcagaagcacaagaaaacattggtgcagaagtatccggtaaatttgtcaaatattcagataatggttctaccctttctgctgtcaacttccctgaagtgtcactccctgaacatgttggtactaaacgcttattacatattcaccacaataaacaaggggtactcaataagattaaccaagtgtttgtggatgctaatgtgaatatcgccgcacaatatttacaaacagacccagcgatcggttatgtcgtgatcgatgttgagacagaagacacacacagcttattaacgcaattaaaagagattgaaggcacgattcgcgcacgcgtcttgtactag

SEQ ID NO: 1256 - protein, 410 aa, Pasteurella multocida subsp. multocida str. Pm70
MTTKVSLDKSKIKFLLLEGVHQTALEVLQNAGYTNIEYHKKALDDDELKEAIKDAHFVGIRSRTFLTEEVLAHAQKLIAIGCFCIGTNQVNLQAAKLRGIPVFNAPFSNTRSVAELVLGEILLLMRNVPQANAEVHRGIWNKSANGSHEVRGKKLGIIGYGHIGSQLSIIAESLGMRVFFYDIENKLPLGNAQQLRTLEELLSSCDVVSLHVPENASTKNLISAERIAQLKEGAILINAARGTVVDIDALAQALEAGKIRGAALDVFPEEPASIQEEFVSPLRAFDNVILTPHIGGSTSEAQENIGAEVSGKFVKYSDNGSTLSAVNFPEVSLPEHVGTKRLLHIHHNKQGVLNKINQVFVDANVNIAAQYLQTDPAIGYVVIDVETEDTHSLLTQLKEIEGTIRARVLY

SEQ ID NO: 1257 - DNA, 1242 bp, Xylella fastidiosa 9a5c
  CDS (1)..(1242): transl_table=11
atgccaccgacgaaaacttcttttcccaaacaagacatccgaattttgctgctagaaggggtcagtcacagcgggatcgaaacgttccgcgcggcgggttactcgcagatcaagatccatacaacatcgctgccggaagaggcactgcaagcagagattgcggaagcgcacatcatcggtattcgctcgcgcactcaattgaatgcagaggtgctagggcatgccaaacgtctgatggccataggttgtttctgtatcgggacgaatcaggtggatttggatactgcggaattgagcgggatccccgtgttcaacgcgccatattccaatacgcgtagtgtggctgagctgatcattgcggaagcaattttgttgctgcgggggatcccgcagaaaaatgccgaatgccatcgtgggggctggtccaaatctgccatcaacagtcatgaagcacgcggcaaggtgttgggcatcgtgggatacggtcacatcggtacgcaagtcagtgtgctggcggaggcgatggggatgcaggtgattttctacgatattgaatccaagctctctttgggcaatgcgcgtccagcggcaagcttggatgagttgctcggcattgccgacgtggtgacgctgcatgtaccggaaacggcagcgaccaagaatatgcttggtcatgcagaattggcacgaatgaaaccgggggcgcatttgattaatgcatcgcgcggtacggttgtggagattgacgcgctggatgcggctctggtgtcgggtcatctgggcggggcggcagtggatgtattcccaagcgaacccaagggcaacagtgatccgttcatctcgccattgagcagacacgacaatgtgattttgacgccacatattgggggtagcacgctagaagcgcaggacaatattgggattgaagtggcagccaaattgatccgttatagcgataacggcagcacgctatcggccgtgaatttccctgaagtcagtttgccggagcacgtggggagtatgcgtttgctgcatatccaccgtaatgtgcccggggtgctgtcgcatatcaacgagctgttctcgcgtcacaacgtcaatattgatggtcagttcctgcgtaccgatgccacgttgggctatgtggtcatcgatatcggcgccagtcagacgcaggctctggcattaaaagaggcattgacgcaggttcccgggacgctgcgtacccgtctgctgtactga

SEQ ID NO: 1258 - protein, 413 aa, Xylella fastidiosa 9a5c
MPPTKTSFPKQDIRILLLEGVSHSGIETFRAAGYSQIKIHTTSLPEEALQAEIAEAHIIGIRSRTQLNAEVLGHAKRLMAIGCFCIGTNQVDLDTAELSGIPVFNAPYSNTRSVAELIIAEAILLLRGIPQKNAECHRGGWSKSAINSHEARGKVLGIVGYGHIGTQVSVLAEAMGMQVIFYDIESKLSLGNARPAASLDELLGIADVVTLHVPETAATKNMLGHAELARMKPGAHLINASRGTVVEIDALDAALVSGHLGGAAVDVFPSEPKGNSDPFISPLSRHDNVILTPHIGGSTLEAQDNIGIEVAAKLIRYSDNGSTLSAVNFPEVSLPEHVGSMRLLHIHRNVPGVLSHINELFSRHNVNIDGQFLRTDATLGYVVIDIGASQTQALALKEALTQVPGTLRTRLLY

SEQ ID NO: 1259 - DNA, 1596 bp, Agrobacterium tumefaciens str. C58
  CDS (1)..(1596): transl_table=11
atggcacctcgcgtactcgtatccgacgaactgtcggaaaccgccgtccagattttccgtgatcgtggcgtcgaagtcgatttccagccgaagcttggcaaggacaaggacaaacttgccgaaatcatcggcaattatgatggtctggccattcgttccgccaccaaggcgaccgaaaagctgatcgaggctgcgaccaatctgaaggtcatcggccgcgccggcatcggcgtcgacaatgtcgatattccggctgcctcgcgtcgcggcatcatcgtcatgaacacgccgttcggcaactccatcaccactgccgaacatgccatcgccctgatgtttgccgtcgcgcgccagcttccggccgccgatagctccacgcaggccggcaagtgggaaaagtcgaaattcatgggtgtcgaaatcaccggcaagacgctcggcgtcatcggtgccggcaatatcggcggcatcgtctgctcgcgcgctcttggcctcaagatgcacgttctagcctacgatcccttcctgtcgccggagcgcgcgcaggaaatgggcgtcaccaaggttgagctggacgagctgctggcgcaggccgatttcatcaccctgcacgtgccgatgaccgacaagacccgcggcattctcaatgctgaaaatctggccaagaccaagaagggcgtgcgcatcgtcaactgcgcccgtggtggtctggtggatgaagcagcccttgccgaagccatcaagtctggccatgtcgccggcgccggtttcgacgtgttcgaagtcgaacccgccaccgaaagcccgcttttcggtctgccaaacgtcgtctgcacgccgcatcttggcgcttcgaccacggaagcgcaggaaaatgttgccctgcaggttgccgagcagatgtcggattacctcgtcaagggtgccgtttccaacgccatcaacatgccgtcgatcacggctgaagaagcgccgcgcctgaagcccttcatccgtctcgcggatgttctcggctctttcgtcggtcaggtgcaggaaagcgccaccaaggaaatcgaaatcctttatgatggcgcaaccgccaacatgaacaccaaggcattgaccagcgcgttgcttgccggcctcatccgcagccaggttgccgatgtgaacatggtttccgcaccagtcatgatcaaggaaaagggtatcatcctctccgaagtcaagcgtgacaagaccggcgtttatgacggctacatcaagctgacggtgaagacggaaaaccagatccgctcggttgccggcacggtgttctcggatggcaagccgcgcttcatccagatcaagaacatcaacatggatgccgatgtcggatcgcacatgatctacatcaccaacaccgacgttcccggcatgatcggcttcatgggcaccacgctcggcgaggctggcgtcaacatcgccaacttccagcttggccgtgaaaaagaagccggcgacgccatcgcgcttctttatgtcgatggtccggtttccgaagaggtactcgacaagctgcgcgccaactcggcgatccgccaggtcaagccgctgacgtttaacgtcgactga

SEQ ID NO: 1260 - protein, 531 aa, Agrobacterium tumefaciens str. C58
MAPRVLVSDELSETAVQIFRDRGVEVDFQPKLGKDKDKLAEIIGNYDGLAIRSATKATEKLIEAATNLKVIGRAGIGVDNVDIPAASRRGIIVMNTPFGNSITTAEHAIALMFAVARQLPAADSSTQAGKWEKSKFMGVEITGKTLGVIGAGNIGGIVCSRALGLKMHVLAYDPFLSPERAQEMGVTKVELDELLAQADFITLHVPMTDKTRGILNAENLAKTKKGVRIVNCARGGLVDEAALAEAIKSGHVAGAGFDVFEVEPATESPLFGLPNVVCTPHLGASTTEAQENVALQVAEQMSDYLVKGAVSNAINMPSITAEEAPRLKPFIRLADVLGSFVGQVQESATKEIEILYDGATANMNTKALTSALLAGLIRSQVADVNMVSAPVMIKEKGIILSEVKRDKTGVYDGYIKLTVKTENQIRSVAGTVFSDGKPRFIQIKNINMDADVGSHMIYITNTDVPGMIGFMGTTLGEAGVNIANFQLGREKEAGDAIALLYVDGPVSEEVLDKLRANSAIRQVKPLTFNVD

SEQ ID NO: 1261 - DNA, 1233 bp, Salmonella enterica subsp. enterica serovar Typhi str. CT18
  CDS (1)..(1233): transl_table=11
atggcaaaggtatcgctggagaaagataaaattaaatttctgctggttgaaggggtgcatcaaaaggcgctggaaagccttcgtgcggcaggttacaccaacattgaatatcacaagggcgcgctggacgctgaacagttgaaagcgtccatccgcgatgcccacttcatcggtctgcgatcccgtactcatctgacagaagaagtgattaacgccgcagagaagctggtggcgattggctgtttttgcatcggcaccaaccaggtggatttaaatgcggcggcaaaacgcggtattccggtctttaacgcgccattctcgaatacccgttccgtggcggagctggtgattggcgagctattgctgctgctgcgcggcgtgccggaagcgaacgccaaagcgcaccgcggcgtatggaataaactggcggcgggatcgttcgaagcacgcggtaaaaagcttggcattatcggttacggccatatcggaacgcagttgggcattctggcggaatcgctggggatgcatatctatttctatgatattgaaaataaactgccgctcggtaatgcaactcaggtgcagcacctgtctgaattgctgaatatgagcgatgtggtcagtctgcacgtacctgaaaacgcctccaccaaaaacatgatgggcgcaaaagagatagccctgatgaagccgggttcgctgctgattaacgccgcgcgcggtacggtagtggatatcccggctttgtgcgacgcgctggcgacgaaacatctggcgggggcggctatcgacgtcttcccgacggaaccggccactaatagcgatccgtttacctctccgctgtgcgaattcgataacgtgatcctgacgccgcatatcggcggctcgacgcaggaggcgcaagaaaacatcggtctggaagtcgcaggaaaactgattaagtactcggataacggctcgacgctgtccgccgtgaacttcccggaagtgtcgctgccgctgcacggcggtcgtcgcctgatgcacatccacgaaaaccgcccgggcgtattgaccgcgcttaaccagatctttgccgagcagggcgttaacattgccgcacagtatctgcaaacctccgcccgaatggggtatgtggtaattgatatagaagccgatggcgatgtggcggagaaagcgctgctggcgatgaaggcgattccgggcaccattcgcgcccgtctgctgtactaa

SEQ ID NO: 1262 - protein, 410 aa, Salmonella enterica subsp. enterica serovar Typhi str. CT18
MAKVSLEKDKIKFLLVEGVHQKALESLRAAGYTNIEYHKGALDAEQLKASIRDAHFIGLRSRTHLTEEVINAAEKLVAIGCFCIGTNQVDLNAAAKRGIPVFNAPFSNTRSVAELVIGELLLLLRGVPEANAKAHRGVWNKLAAGSFEARGKKLGIIGYGHIGTQLGILAESLGMHIYFYDIENKLPLGNATQVQHLSELLNMSDVVSLHVPENASTKNMMGAKEIALMKPGSLLINAARGTVVDIPALCDALATKHLAGAAIDVFPTEPATNSDPFTSPLCEFDNVILTPHIGGSTQEAQENIGLEVAGKLIKYSDNGSTLSAVNFPEVSLPLHGGRRLMHIHENRPGVLTALNQIFAEQGVNIAAQYLQTSARMGYVVIDIEADGDVAEKALLAMKAIPGTIRARLLY

SEQ ID NO: 1263 - DNA, 1233 bp, Salmonella typhimurium LT2
  CDS (1)..(1233): transl_table=11
atggcaaaggtatcgctggagaaagataaaattaaatttctgctggttgaaggggtgcatcaaaaggcgctggaaagccttcgtgcggcaggttacaccaacattgaatatcacaagggcgcgctggacgctgaacagttgaaagcgtccatccgcgatgcccacttcatcggtctgcgatcccgtactcatctgacagaagaagtgattaacgccgcagagaagctggtggcgattggctgtttttgcatcggcaccaaccaggtggatttaaatgcggcggcaaaacgcggtattccggtctttaacgcgccattctcgaatacccgttccgtggcggagctggtgattggcgagctattgctgctgctgcgcggcgtgccggaagcgaacgccaaagcgcaccgcggcgtatggaataaactggcggcgggatcgttcgaagcgcgcggtaaaaagcttggcattatcggttacggccatatcggaacgcagttgggcattctggcggaatcgctggggatgcatgtctatttctatgatattgaaaataaactgccgctcggtaatgcaactcaggtgcagcatctgtctgaattgctgaatatgagcgatgtggtcagtctgcacgtacctgaaaacgcctccaccaaaaacatgatgggcgcaaaagagattgccctgatgaagccgggttcgctgctgattaacgccgcgcgcggtacggtggtagatatcccggctttgtgcgacgcgctggcgacgaaacatctggcgggggcggctatcgacgtcttcccgacggaaccggccactaatagcgatccgtttacctctccgctgtgcgaattcgataacgtgatcctgacgccgcatatcggcggctcgacgcaggaggcgcaagaaaacatcggtctggaagtcgcaggaaaactgattaagtactcggataacggctcgacgctgtccgccgtgaacttcccggaagtgtcgctgccgctgcacggtggtcgtcgcctgatgcacatccacgaaaaccgcccgggcgtattgaccgcgcttaaccagatctttgccgagcagggcgttaacattgccgcacagtatctgcaaacctccgcccgaatggggtatgtggtaattgatatagaagccgatggcgatgtggcggagaaagcgctgctggcgatgaaggcgattccgggcaccattcgcgcccgtctgctgtactaa

SEQ ID NO: 1264 - protein, 410 aa, Salmonella typhimurium LT2
MAKVSLEKDKIKFLLVEGVHQKALESLRAAGYTNIEYHKGALDAEQLKASIRDAHFIGLRSRTHLTEEVINAAEKLVAIGCFCIGTNQVDLNAAAKRGIPVFNAPFSNTRSVAELVIGELLLLLRGVPEANAKAHRGVWNKLAAGSFEARGKKLGIIGYGHIGTQLGILAESLGMHVYFYDIENKLPLGNATQVQHLSELLNMSDVVSLHVPENASTKNMMGAKEIALMKPGSLLINAARGTVVDIPALCDALATKHLAGAAIDVFPTEPATNSDPFTSPLCEFDNVILTPHIGGSTQEAQENIGLEVAGKLIKYSDNGSTLSAVNFPEVSLPLHGGRRLMHIHENRPGVLTALNQIFAEQGVNIAAQYLQTSARMGYVVIDIEADGDVAEKALLAMKAIPGTIRARLLY

SEQ ID NO: 1265 - DNA, 1239 bp, Brucella melitensis 16M
  CDS (1)..(1239): transl_table=11
atgaccgaacgcctctccctctcccgtgatcgcatcaatgttcttcttctggaaggcatcagccagaccgccgtggaatatttcaaatcctccggctacaccaatgtcacacatctgccgaaagcattggacaaggccgatctgatcaaggcgatttcttctgcgcatatcatcggcattcgctcgcgtacgcaattgaccgaggagattttcgccgctgccgaccgtctgatcgcagtcggctgcttttcggtcggcaccaatcaggtggaactgaaagctgcccgcaagcgcggtatccccgtcttcaatgcgccattctccaacacgcgctcggttgccgaactggtgattggcgagatcatcatgctgatgcgccgcattttcccgcgttccgtttcagcccatgcgggtggctgggaaaagacagccatcggaagccgcgaagtgcgcggcaagacgctcggcatcgtcggctacggcaatatcggctcgcaggtcggcaatctggctgaaagcctcggtatgaccgtgcgttattacgacacgtccgacaagctgcaatatggcaatgtgaagcctgcggcgagccttgatgaacttctgaaaacttccgatgtggtgagtctgcacgtcccgtcgagcaaatccacctcgaagctcatcaccgaagccaagctgcgcaagatgaagaagggcgctttcctcatcaataatgcgcgcggttccgttgtcgatctcgaagccttggccaaggttttgcaggagggtcatcttgcgggcgcggcgatcgatgttttccctgtggagccggcctccaatggcgagaggttctcaaccccgcttcaggggctggagaatgtcattctcacgccgcatatcggcggctcgaccgaggaagcgcaggaacgtatcggtacggaagtcacccgcaagctggtcgaatattccgatgtcggctccactgtgagcgccgtcaattttccgcaggtgcaattgccgccacgcccgaccggcacgcgcttcatgcatgtgcatgaaaaccgtccgggtattctgaacagcctcatgaacgtgttttcgcaccaccatatcaatatcgccagccagtttctccagacggatggcgaggttggctatctcgtgatggaagccgatggcgtgggcgaagcaagcgatgccgtcttgcaggaaatccgcgaaattcccggcacgattcgcgctcgcctgctatactga

SEQ ID NO: 1266 - protein, 412 aa, Brucella melitensis 16M
MTERLSLSRDRINVLLLEGISQTAVEYFKSSGYTNVTHLPKALDKADLIKAISSAHIIGIRSRTQLTEEIFAAADRLIAVGCFSVGTNQVELKAARKRGIPVFNAPFSNTRSVAELVIGEIIMLMRRIFPRSVSAHAGGWEKTAIGSREVRGKTLGIVGYGNIGSQVGNLAESLGMTVRYYDTSDKLQYGNVKPAASLDELLKTSDVVSLHVPSSKSTSKLITEAKLRKMKKGAFLINNARGSVVDLEALAKVLQEGHLAGAAIDVFPVEPASNGERFSTPLQGLENVILTPHIGGSTEEAQERIGTEVTRKLVEYSDVGSTVSAVNFPQVQLPPRPTGTRFMHVHENRPGILNSLMNVFSHHHINIASQFLQTDGEVGYLVMEADGVGEASDAVLQEIREIPGTIRARLLY

SEQ ID NO: 1267 - DNA, 1767 bp, Arabidopsis thaliana
  CDS (1)..(1767)
atggcgacgtctctgaatctatcatcgatcttctcctcctcctcaaggctcgtcaccactccctcctctgtttttcccatccgtcagaggcgacggatcatcctcgttacgtcttcttcttccggaggtggaggaaaaccgacgattctcgtaacggagaagctaggccaagcggggatcgatctgcttaagaagtacgctaatgtggattgctcttatgatctgagtctcgaggagctttgtacgaagatctctctttgtgatgcgctcatcgtcaggagtggtaccaaggttgggagagatgtgtttgaatcgtcgcgtgggaggcttaaggttgttggacgcgctggtgttgggattgataacgtcgatttggcggcggcgactgagtatgggtgtttggttgttaatgctccgactgcgaacactgtggctgctgctgaacacggaattgcgcttttgaccgccatggctagaaacattgctcaagctgatgcttctatcaaagctggcaaatggacgagaaacaagtatgtaggtgtttcacttgtggggaagactcttgctgttcttggttttggtaaagttggatcagaggttgctagacgagccaggggacttggtatgcatgtcattacacatgatccttatgcaccagcggatcgtgcacgagctattggtgtggagcttgttagttttgaagtagctatttcaactgctgacttcatctctttgcatctgcctcttactgctgctacttcgaagatgatgaatgatgtgacctttgcgatgatgaagaaaggagtccgtattgttaatgttgctcgtggtggagttattgatgaggaagctcttttgagagcgcttgactcgggtattgttgctcaggcagctcttgatgtttttacagtagagccacctgttaaagataataagttggtgttacatgagagtgtcactgccacacctcatcttggtgctagtactatggaggctcaggaaggagtgtctatcgaagtcgcagaagctgttattggagctttgagaggagaacttgctgctaccgcggtcaatgcaccaatggttccactagaggtattgagggagctgaagccgtatgttgtacttgctgagaagcttgggaggctggctgtacaattggtaactggtggaagcggtgtgaatgctgtgaaagtgacttatgcttcttccagagctcctgatgatctcgacactagacttctccgagccatggtcataaaggggatcatcgaacccatttccagcgtattcataaatctggttaactccgattatattgccaaacaacgtggagtcaaaatctcagaagaacgtatggttctagacggctcacctgagaatccaattgaatacataactgttcggatagcaaacgtggaatcaagatttgccagcgctttatcagagtccggtgagatcaaagtagaaggcagagtgaaacaaggggttccaagtcttaccaaagtcggattatttggagtggatgtgagtttagaagggagtgtgattctgtgcaggcaagtagatcagcctgggatgatcggtaaagttgctagcatcttaggagatgaaaacgtcaacgtgagcttcatgagcgtcggtcgaatcgctccaggcaagcaagctgtgatggcaattggagtagatgaacaaccaagcaaagaaactttgaagaaaatcggagacattcctgccattgaagagtttgttttcctcaaactatag

SEQ ID NO: 1268 - protein, 588 aa, Arabidopsis thaliana
MATSLNLSSIFSSSSRLVTTPSSVFPIRQRRRIILVTSSSSGGGGKPTILVTEKLGQAGIDLLKKYANVDCSYDLSLEELCTKISLCDALIVRSGTKVGRDVFESSRGRLKVVGRAGVGIDNVDLAAATEYGCLVVNAPTANTVAAAEHGIALLTAMARNIAQADASIKAGKWTRNKYVGVSLVGKTLAVLGFGKVGSEVARRARGLGMHVITHDPYAPADRARAIGVELVSFEVAISTADFISLHLPLTAATSKMMNDVTFAMMKKGVRIVNVARGGVIDEEALLRALDSGIVAQAALDVFTVEPPVKDNKLVLHESVTATPHLGASTMEAQEGVSIEVAEAVIGALRGELAATAVNAPMVPLEVLRELKPYVVLAEKLGRLAVQLVTGGSGVNAVKVTYASSRAPDDLDTRLLRAMVIKGIIEPISSVFINLVNSDYIAKQRGVKISEERMVLDGSPENPIEYITVRIANVESRFASALSESGEIKVEGRVKQGVPSLTKVGLFGVDVSLEGSVILCRQVDQPGMIGKVASILGDENVNVSFMSVGRIAPGKQAVMAIGVDEQPSKETLKKIGDIPAIEEFVFLKL

SEQ ID NO: 1269 - DNA, 1572 bp, Methanosarcina acetivorans C2A
  CDS (1)..(1572): transl_table=11
atgaaagtattagtcagcgactcactctccaatgaaggtttggagatcctaaaagagcactttactgttgacgttaacaccggtctctccgaagatgagctggtggaaaagatcggggaatacgatgccctcgtaatacgcagcggcacccaggttactcagagagtaatcgaggctgctgacaacctgaagattgtcggaagagcgggagtcggagtcgacaatgtcgatgtggacgcagccacaaagaaaggaattatcgtggccaacgctcccgaaggaaacatgatttcggcagcagaacacacaattggcatgatgatggcgatgtccaggaatatccctcaggccaatgcttccctgaaaggcagggaatggaagcgcaacaagttcatgggcgttgaggtcaagggtaagactctgggaattatagggctcggaagaatcgggtctgaagttgcaaagcgggcttcagggcttgagatgaacctcatgggatacgaccccttcatctccgagaagcgggctatggaactcggagtcaagctggctacggttaatgagatctcaaaagaggctgactacatcactgtgcacactccccttatcaaggagacccgaaacatcctcgatgacgagcagtttgacctcatgaagtcaggagtcaggatactcaactgcgcacgcggcggtattatcaatgaagcagctctggtaagagccctcgaaagcgggaaggtaggcggggcagccctggacgtatttgtcgaagagcctccttttggcagccctcttctcaactttgacaatgttatcgtaactcctcacctcggagcctccacccaggaagctcaggttaatgttgcaatcgatatcgccaaagaagttgtttccgtccttaccggcgggcttgcaaagaatgcaatcaatattccgtccgtaaagcccgaagctatggcagtccttgccccgtatatcaggcttgcagaactcatgggcaagattgcagggcagctcgtggacagcaactacgaaaaagtagaaatcgggtataatggggaaatctcaggaaaagataccaggccccttacggtttccgccctcaaaggcctgcttgagatggctctcggagccggggtaaactatgtcaatgcccctgcccttgcgaagtccagacagatcgcagttgtggaaagcaagtccgaatccgcagaagagtattcttccactgtcagcatcaaactctccagcggagaaaccgcaaagctggttgcaggaaccgttgttggagatgagcccaagattgtttccatcgatgaggacagggtagacattttccctgcaggccgcatgatctttgccaagcacattaacaagccgaacgttatcggaccctgctgcatggtgctcgggaaaaacaacatcaacatttcaggtatgcaggtcggcaggtcagaagtcggtggcgtgaccatgatggtccttaatgtggacaccgatgtctccgatgcgatccttgatgaggtcaggcaggtcccaggcatcctcaatgccaagcttgtgaccctctga

SEQ ID NO: 1270 - protein, 523 aa, Methanosarcina acetivorans C2A
MKVLVSDSLSNEGLEILKEHFTVDVNTGLSEDELVEKIGEYDALVIRSGTQVTQRVIEAADNLKIVGRAGVGVDNVDVDAATKKGIIVANAPEGNMISAAEHTIGMMMAMSRNIPQANASLKGREWKRNKFMGVEVKGKTLGIIGLGRIGSEVAKRASGLEMNLMGYDPFISEKRAMELGVKLATVNEISKEADYITVHTPLIKETRNILDDEQFDLMKSGVRILNCARGGIINEAALVRALESGKVGGAALDVFVEEPPFGSPLLNFDNVIVTPHLGASTQEAQVNVAIDIAKEVVSVLTGGLAKNAINIPSVKPEAMAVLAPYIRLAELMGKIAGQLVDSNYEKVEIGYNGEISGKDTRPLTVSALKGLLEMALGAGVNYVNAPALAKSRQIAVVESKSESAEEYSSTVSIKLSSGETAKLVAGTVVGDEPKIVSIDEDRVDIFPAGRMIFAKHINKPNVIGPCCMVLGKNNINISGMQVGRSEVGGVTMMVLNVDTDVSDAILDEVRQVPGILNAKLVTL

SEQ ID NO: 1271 - DNA, 1623 bp, Methanosarcina mazei Go1
  CDS (1)..(1623): transl_table=11
ttgttaaaatttagcatctcatgtttatcgtatttatctggagaaattgacatgaaagtattggtcagcgactcactctccaacgaagggttggagatcctaaaagaacattttgatattgatgtctgcaccgggctctgtgaagatgagctggtggaaaagatcaaaggctacgacgcccttgtaatacgcagcggtacccaggttactcagagaataatcgaggctgctgacaacctgaagattatcggaagggcaggggtcggagtcgacaatgtggatgtggatgcagccacaaagaaaggtatcatcgtggccaacgctcccgaagggaacatgatctcggcagcagagcacacaattgccatgatgatgtcaatgtcgaggaatatccctcaggccaacgcttccctgaaagccagggaatggaagcgcaataagttcatgggcgttgaggtcaagggaaagaccctgggagttataggtctcggaagaattgggtctgaagtcgcaaagagagctgcagggcttgaaatgaacctcatgggatatgaccccttcatctccgagaagcgggctatggaacttggagtcaagctggctacagttaacgaaatcgcaaaagaggctgactacataacagtacataccccacttatcaaggaaaccagaaacattcttgacgacgagcagttcgcccttatgaagaaaggagtccgggttcttaactgcgcccgcggaggcattatcaacgaagaagcccttgcaagagcccttgaaagcggcaaggtaggcggcgcagccattgacgtttttgtcgaagagcctcctttctccagccctcttcttaactttgacaatgttatcgtaactccccacctcggtgcctctacacaggaagctcaggttaatgttgcaatcgacattgcaaaggaagttgtttccgtccttacaggcgggtctgcaaagaacgcaatcaatatcccctccgtaaagcctgaagctatggcagtccttgccccgtatataaggctttcagaactcatgggcaaaattgcagggcagcttgtggacagcaattatgaaaaggtagaaattgcatacaacggggaaatctccggaaaagataccagaccacttacagtttctgctctcaaagggctgcttgaaatggctgttgggtccggggtaaattatgtcaacgctccaatccttgcgaagtccagaaaaatcgcagtggtagaaagcaagtctgaatctgcggaagagtattcttccactgtcagtatcaggctctccagcggagaatctacaaaaatggtcgcaggaaccgttgttggggatgagcccaagatagtttccatcgatgatgacaaggtagatatcttcccggctggtcgtatgatttttgccaaacatataaacaaaccgaacgttatcggtccctgttgcatggtccttgggaaaaacaatatcaacatttcaggcatgcaggttggcaggtcggaagtcggaggcgtgaccatgatggttcttaatgtcgacaccgatgtttccgatgctatccttgatgaggtcaggcaggttccgggcatccttaatgccaagcttgtaaccctctga

SEQ ID NO: 1272 - protein, 540 aa, Methanosarcina mazei Go1
MLKFSISCLSYLSGEIDMKVLVSDSLSNEGLEILKEHFDIDVCTGLCEDELVEKIKGYDALVIRSGTQVTQRIIEAADNLKIIGRAGVGVDNVDVDAATKKGIIVANAPEGNMISAAEHTIAMMMSMSRNIPQANASLKAREWKRNKFMGVEVKGKTLGVIGLGRIGSEVAKRAAGLEMNLMGYDPFISEKRAMELGVKLATVNEIAKEADYITVHTPLIKETRNILDDEQFALMKKGVRVLNCARGGIINEEALARALESGKVGGAAIDVFVEEPPFSSPLLNFDNVIVTPHLGASTQEAQVNVAIDIAKEVVSVLTGGSAKNAINIPSVKPEAMAVLAPYIRLSELMGKIAGQLVDSNYEKVEIAYNGEISGKDTRPLTVSALKGLLEMAVGSGVNYVNAPILAKSRKIAVVESKSESAEEYSSTVSIRLSSGESTKMVAGTVVGDEPKIVSIDDDKVDIFPAGRMIFAKHINKPNVIGPCCMVLGKNNINISGMQVGRSEVGGVTMMVLNVDTDVSDAILDEVRQVPGILNAKLVTL

SEQ ID NO: 1273 - DNA, 1242 bp, Xanthomonas campestris pv. campestris str. ATCC 33913
  CDS (1)..(1242): transl_table=11
atgtcgccgaagaaaacctcgtttcccaagcaggacatccgcgtcctgttgctggaaggcatcagccagaccgccgtggacgtgttccgcgccgccggttactcgcagatcgagctgcacgccaagtccctgcccgaggacgaactcaaggcgcgcatcgccgaggcgcacatcgtcggcattcgctcgcgcacccatttgagcgccgatgtgctggcgcacgccaagcggctgatcgcggtgggctgcttctgcatcgggaccaatcaggtcgacctagaggcggcggaactggccggcattccggtgttcaacgcgccctactccaacacccgcagcgtggccgaactggtcatcgccgaggccatcctgctgttgcgcggcatcccgcagaaaaatgcgcaatgccaccgcggcggctggtccaagtcggccgccggcagccacgaaacgcgcggcaaggtgctcggcatcgttggttacgggcacatcggcacccaggttggcgtgctggccgaatcgctaggcatgcaggtgattttccacgacatcgaaaccaagctgtcgctgggcaacgcgcgcgcggcgatcgacctggacgacctgctggcgcgctcggacgtggtgaccctgcacgtgccggagaccccgtccaccaaggacatgatcggcgcggcagaaatcgcccgcatgaagcccggcgcgcatctgatcaatgcctcgcgcggcaccgtcatcgacatcgatgcactggatgcggcgctcacctccggccagatcggcggcgcggccgtggacgtgttcccgatcgagcccaagggcaatggcgatgcgttcgagtccccgttgattgcgcacgacaacgtcatcctgaccccgcacgtgggcggcagcacgctggaagcacaggacaatatcggcgtggaagtagccgccaaactggtgcgctacagcgacaacggcagcaccttgtcggcggtgaacttccctgaagtcaccctgcccgagcaccccgacagcctgcggctgctgcacatccaccgcaacgtgccgggcgtgctgtcgcagatcaacgaactgttctcgcgccacaacctcaacatcgatggtcagtttttgcgcaccgaccccaaggtgggctatgtggtgatcgacgtcagcgccagcgaggagctggcgggcgtgttgaaggacgagctgggtcagatcaccggcaccttgcggacgcgggttctctactga

SEQ ID NO: 1274 - protein, 413 aa, Xanthomonas campestris pv. campestris str. ATCC 33913
MSPKKTSFPKQDIRVLLLEGISQTAVDVFRAAGYSQIELHAKSLPEDELKARIAEAHIVGIRSRTHLSADVLAHAKRLIAVGCFCIGTNQVDLEAAELAGIPVFNAPYSNTRSVAELVIAEAILLLRGIPQKNAQCHRGGWSKSAAGSHETRGKVLGIVGYGHIGTQVGVLAESLGMQVIFHDIETKLSLGNARAAIDLDDLLARSDVVTLHVPETPSTKDMIGAAEIARMKPGAHLINASRGTVIDIDALDAALTSGQIGGAAVDVFPIEPKGNGDAFESPLIAHDNVILTPHVGGSTLEAQDNIGVEVAAKLVRYSDNGSTLSAVNFPEVTLPEHPDSLRLLHIHRNVPGVLSQINELFSRHNLNIDGQFLRTDPKVGYVVIDVSASEELAGVLKDELGQITGTLRTRVLY

SEQ ID NO: 1275 - DNA, 1242 bp, Xanthomonas axonopodis pv. citri str. 306
  CDS (1)..(1242): transl_table=11
atgtcgccgaagaaaacctcgtttcccaagcaggacatccgcgtgctgttgctggaagggatcagcccgaccgccgtggacgtgttccgcgccgccggctactcgcagatcgaactgcacgccaaatcgctgccggaagacgagttgatcgcccgcatcgcagacgcgcatatcgtcggtatccgctcgcgcacgcagctgagcgccgacgtgctggcgcacgccaagcgcctgatcgcagtcggctgcttctgcatcggcaccaaccaggtcgacctggacgcggccgagctggctggcatcccggtattcaacgcaccctactccaacacccgcagcgtggccgaactggtcatcgccgaggcgatcctgctattgcgcggcattccgcagaagaacgcgcaatgccatcgcggtggctggtcgaaatcggccgccggcagccacgaaacgcgcggcaaggtgctgggcatcgtcggctacgggcatatcggcacccaggtcggcgtgctggccgaatcgctgggcatgcaggtgatcttccacgatatcgaaaccaagctgtcgttgggcaatgcccgcgcggcgatcgatctggacgacctgctggcacgcgcagacgtggtgaccttgcacgtgccggaaacgccgtcgaccaaggacatgatcggcgcgccggagatcgcccgcatgaaacccggcgcgcatctcatcaacgcctcgcgtggcaccgtcatcgacatcgacgcgctggatgcggcgctcacctccggccagatcggcggcgcggcggtggatgtcttcccgatcgagcccaagggcaatggcgatgcgttcgaatcgccgctcactgcgcacgacaacgtgatcctgaccccgcacgtgggcggcagcacgctggaagcgcaggacaacatcggcatcgaggtcgccgccaaactggtgcgctatagcgacaacggcagcaccttgtcggcggtgaacttcccggaggtcaccctgcccgagcacgctgaaagcctgcgtttgctgcacatccatcgcaacgtgccgggcgtgctgtcgcagatcaacgaactgttttcgcgccataacgtcaatatcgatggccagttcctgcgcaccgaccccaaggtgggctacgtggtcatcgatgtcggcgccagcgaggaacttgccggcgtactgaaggacgagctggggcagatcaccggcaccttgcggacccggatcctttattga

SEQ ID NO: 1276 - protein, 413 aa, Xanthomonas axonopodis pv. citri str. 306
MSPKKTSFPKQDIRVLLLEGISPTAVDVFRAAGYSQIELHAKSLPEDELIARIADAHIVGIRSRTQLSADVLAHAKRLIAVGCFCIGTNQVDLDAAELAGIPVFNAPYSNTRSVAELVIAEAILLLRGIPQKNAQCHRGGWSKSAAGSHETRGKVLGIVGYGHIGTQVGVLAESLGMQVIFHDIETKLSLGNARAAIDLDDLLARADVVTLHVPETPSTKDMIGAPEIARMKPGAHLINASRGTVIDIDALDAALTSGQIGGAAVDVFPIEPKGNGDAFESPLTAHDNVILTPHVGGSTLEAQDNIGIEVAAKLVRYSDNGSTLSAVNFPEVTLPEHAESLRLLHIHRNVPGVLSQINELFSRHNVNIDGQFLRTDPKVGYVVIDVGASEELAGVLKDELGQITGTLRTRILY

SEQ ID NO: 1277 - DNA, 1584 bp, Thermosynechococcus elongatus BP-1
  CDS (1)..(1584): transl_table=11
atgcccaaagttctggtttccgatcccattgaacaggtggggcttgatttgcttgcccaagtggcacaagtagatgtcaaaatcggcctctcagaggaagaactgatcaaaattattcccgaatacgatgccctgatgattcgatcgggaaccaaggtcacgaaagatgtgattgaggctgccaaccaactgaaaattattggccgtgctggggtgggtgtagataacgtcgatgtgcctgccgccactcgcaaagggatcatagtggtcaattctccggagggcaataccattgctgctgcggagcacaccttagcgatgatgctctcccttgcccgtcatattcccgatgcaaatgctgcggttaaagcgggtcagtgggatcgcaaacgcttcacaggggtagaaatttacaagaaaacccttggcattattggcttgggtaaaattggctcccatgtggccacggttgcccgggccatggggatgaaactccttgcctatgacccctatctttcaacggagcgagctgaacaactgggctgccgtcttgtggagttggatgttctctttgcggagtcagactttattacactgcacttgccgaaaactcccgaaacgcagcatttaattaacgccaaaaccattgccaagatgaagcccacggcccggattattaactgtgcgcggggcggcattattgatgaggtagcccttgtggaagcgctcaaaagcggtaggctggcgggggcggccctcgatgtttttgaaaatgaaccccttgaggccgattctcccctgcggagtctgggaatggaagcgatcttaactccccacctgggagcttccactgaagaagcacaggtgaatgtggctattgatgtcgctgagcaaattcgcgatgtcctcctgggattgccggcgcgatcggcggtgaatattcccggcctgcgcccagatgtcctagaaaaactagcgccctatatgcagttggcagaaacccttggtaacttggtggggcagttggctggtggtcgggtcgagtctctggaagtccgtctgcaaggggagctggccactaatgagagtcaacccattgtgattgctgcgctgaaggggttgctctctccagccttgcgggagcgggtcaactatgtcaatgctgggttagaagccaaggagcggggaattcgcgtggttgagactcgcgatgaatcgcagcgggactatgccggctccctgacgttgattgctaaaagcccatcgatgacgcgatcggtgtctggcgctttgctctcccacaatgaattgcgcatcaccagtattgatgactttcccattagtgtggcgccaacccgctatatgctgctcacactgcaccgtgatatgcccggcattattggcaagattggcacccagttgggaagtttcaatgtcaacattgccagtatgcaggtgggacgcaagatggtgcgtggcaatgcggtgatggtgattagcttggacgatcccctgcccgaaggactcttggaggaaatcctcaaggtccccggtattcgtgatgcctatatcgtgaatttgtag

SEQ ID NO: 1278 - protein, 527 aa, Thermosynechococcus elongatus BP-1
MPKVLVSDPIEQVGLDLLAQVAQVDVKIGLSEEELIKIIPEYDALMIRSGTKVTKDVIEAANQLKIIGRAGVGVDNVDVPAATRKGIIVVNSPEGNTIAAAEHTLAMMLSLARHIPDANAAVKAGQWDRKRFTGVEIYKKTLGIIGLGKIGSHVATVARAMGMKLLAYDPYLSTERAEQLGCRLVELDVLFAESDFITLHLPKTPETQHLINAKTIAKMKPTARIINCARGGIIDEVALVEALKSGRLAGAALDVFENEPLEADSPLRSLGMEAILTPHLGASTEEAQVNVAIDVAEQIRDVLLGLPARSAVNIPGLRPDVLEKLAPYMQLAETLGNLVGQLAGGRVESLEVRLQGELATNESQPIVIAALKGLLSPALRERVNYVNAGLEAKERGIRVVETRDESQRDYAGSLTLIAKSPSMTRSVSGALLSHNELRITSIDDFPISVAPTRYMLLTLHRDMPGIIGKIGTQLGSFNVNIASMQVGRKMVRGNAVMVISLDDPLPEGLLEEILKVPGIRDAYIVNL

SEQ ID NO: 1279 - DNA, 1200 bp, Bifidobacterium longum NCC2705
  CDS (1)..(1200): transl_table=11
atgcccaaagcactgttattggaaaacattcaccccgatgcggccaaatcgctgcgtgatcacggtttcgaagtcgagaccatgaagggagccctgagcgaggacgaactcatcgatgcgctggatggcgtggacttggtgggcgtacgctccaagaccaacgtcacagcccgcgtgctggatgcgcgtcctacgctaagcgccatcggctgcttctgcatcggcaccaatcaggtcgatctggcacatgccggcaagcgtggcatcgccgtgttcaacgctccctactccaacacccgttccgtggtggaattggtgatctgcgacatcatctgcttgatgcgccgcattcccgcacacacgcatcacatcaagcatggcctgtgggacaagtccgcttccggctcgcatgaagtgcgaggcaagaccctcggcatcatcggctacggcaacatcggctcccagctgtcggtactggccgaggccctcggcatgcgcgtggtgttctacgacattgaggagaaactggcactgggcaatgcccaccgttgcgacaccctcaacgaactgctggaacagtccgatgccgtgaccctgcacgtggatggccgcaagtcgaacaccggattcttcggcgaagaccaattcgcccacatgaagcaggacgcgattttcattaacctttcgcgcggtttcgtcgccgatctgggagctctgaagcagcacctcgattccggccatctgtctggcgcggcggtcgacgtgttccccgttgaaccgaagaagagcggagatccgttcgagacctcactggccaatgaagacaatatgattctgactcctcatattggcggctccaccttggaagctcaggaatccatcggccatttcgtctctcagcgtcttgaggattactggttcaagggttctacctccttgtccgtgaacctaccacagatcaacctcggtgagtgcaagggtgtgtgccgtatcgcccatctgcacgacaatcttcctggtgtgctggctcatgtcaatcatgtgctcggcgaggagaacatcaacgtttccttccagtcgctggcaaccgagggcgaacttggctatgtggtcaccgacgtggctcagacgcccagcgccgccacgcttgaagcactgcgcaacatcgaaggcaccattcgcatgcgtgtcatcagctga

SEQ ID NO: 1280 - protein, 399 aa, Bifidobacterium longum NCC2705
MPKALLLENIHPDAAKSLRDHGFEVETMKGALSEDELIDALDGVDLVGVRSKTNVTARVLDARPTLSAIGCFCIGTNQVDLAHAGKRGIAVFNAPYSNTRSVVELVICDIICLMRRIPAHTHHIKHGLWDKSASGSHEVRGKTLGIIGYGNIGSQLSVLAEALGMRVVFYDIEEKLALGNAHRCDTLNELLEQSDAVTLHVDGRKSNTGFFGEDQFAHMKQDAIFINLSRGFVADLGALKQHLDSGHLSGAAVDVFPVEPKKSGDPFETSLANEDNMILTPHIGGSTLEAQESIGHFVSQRLEDYWFKGSTSLSVNLPQINLGECKGVCRIAHLHDNLPGVLAHVNHVLGEENINVSFQSLATEGELGYVVTDVAQTPSAATLEALRNIEGTIRMRVIS

SEQ ID NO: 1281 - DNA, 1236 bp, Leptospira interrogans serovar Lai str. 56601
  CDS (1)..(1236): transl_table=11
ttggtaggtagaatgatttcatttccaaaagataaaattcaagttctccttttagaaaacgtccaccaagacgcatttgatatgttccaaaaagatggatttaatgtacgccttcttcccgctgccttttcggaaaaagaacttttagacgaaatcgaaaacattcatgttttaggaattagaagtaaaaccaacgtcacttccgccgttttagaaaaagccaaaagacttttgacaattggttgtttttgtatcggaaccaatcaagtggatttagttggagcagaaaaaaaaggaatccctgtttttaatgccccctattctaatactcgttccgtagcggaattagtaatttcagaaatcatcatgttggccagaagagttccggatcatattcgaaatactcactctggtatttggaataaaatttccaaaaattgttttgaggttcgaggtaaaacgattggaatcgtgggttatggtcatattggaagtcaggtttcagtacttgcagaagcgatgggaatgaaagtgatctactacgatattcaaacggttcttcctcttggaaatgcaactccagtttctagttacgaagaacttttaaaaaattcggactttatttcttttcacgttcccgaaactccacaaacgatgaatctttatggaaaaaaagaaatcgaagttactaaaaaaggcgcttatatgatcaacctttccagagggaaggttgtggatctggaagctcttgcaaaagcaatccaatcgggtcatattgctggagcgggaatagacgtttttccggaagaacccgaatccaacaacgatccatttctaactcctatgcaaaatctgccgaatgtaattttgactcctcatataggcggtagtaccgaagaagctcaaagaaacatcggttccgaagtagccagtaaacttttgaaattcataaacaacggttccactacattttccgtaaattttcctaatttggaaattactccgttacccgcaggtcaatatagaattttgaacgtccataaaaaccaaccagggtttttaaaagacatcaactctatggtatccgcaatcggcgccaatatcagttcccaacatttaggaaccagtgcagaaatcggttatctttccatggtaatcgataaatctgtaggagacgaattgaaagaaaaaatcgaaaaacatcctttttcgatcaaaactaggattctttactaa

SEQ ID NO: 1282 - protein, 411 aa, Leptospira interrogans serovar Lai str. 56601
MVGRMISFPKDKIQVLLLENVHQDAFDMFQKDGFNVRLLPAAFSEKELLDEIENIHVLGIRSKTNVTSAVLEKAKRLLTIGCFCIGTNQVDLVGAEKKGIPVFNAPYSNTRSVAELVISEIIMLARRVPDHIRNTHSGIWNKISKNCFEVRGKTIGIVGYGHIGSQVSVLAEAMGMKVIYYDIQTVLPLGNATPVSSYEELLKNSDFISFHVPETPQTMNLYGKKEIEVTKKGAYMINLSRGKVVDLEALAKAIQSGHIAGAGIDVFPEEPESNNDPFLTPMQNLPNVILTPHIGGSTEEAQRNIGSEVASKLLKFINNGSTTFSVNFPNLEITPLPAGQYRILNVHKNQPGFLKDINSMVSAIGANISSQHLGTSAEIGYLSMVIDKSVGDELKEKIEKHPFSIKTRILY

SEQ ID NO: 1283 - DNA, 1230 bp, Shewanella oneidensis MR-1
  CDS (1)..(1230): transl_table=11
atggcgaaacattcgcttgacaaggataagatcaaaatcctgttgttggaaggcgtccaccaatctgctgtagatgtgtttgaacgcgcgggatacaccaatattgaatatcacaaagcctcgttaggtgatgaagccctacacgagtccataaaagatgcccattttattggtattcgttcccgtacccaactctccgccgatgtattgaaacgtgccgaaaaattaattgcaattggctgcttctgtatcggcacaaaccaagtggatcttgccaccgccgaatccctcgggatccccgtatttaatgcgccgttttccaatactcgcagcgtagccgaactcgtattaggcgaaatcattatgttgatgcgtggtattcctgagcgcaatgccatcgcccaccgaggtggttggatgaaaaccgccgctggcagttacgaagtccgtggcaaaaccttaggcgtgattggctatggccatatcgggactcaactaggcattttggcagaaaccttaggtatgcgtgtagtgttcttcgatattgaagataaattgccattgggtaacgctcagcaaatccactcaatggagcaattactggctcaagccgatgtggtcagtttgcacgtgcctgaaacgccacaaacgaaagacatgatcagtaccgccgaatttgccgctatgcgtaaaggcagcatctttatcaacgcttcccgcggtactgtggtcgatatcgatgcgctcactgtggcacttaaagaacgtcaccttgcaggcgctgcaattgacgtattccccgttgagccacaatcgaatgatgatgaatttatcagcccattacgtggtttagataatgtgctgctcacgccacatgtgggtggtagcaccgcagaagcacaggaaaatatcggtattgaagtggctggcaaattagccaaatactctgataacggctcaaccgtgtcggccgtgaacttccctgaggtgtctctaccaatgcacaaaggcacctctcgcctactgcatatccaccaaaatcgtcctggcgtgctgatcaaaatcaacaaggccttctctgagaagggtattaacattgccgctcagtacctgcaaaccaccgcagaaatcggttatgtggttatggaagttgacacgcatcaagcagaagaagcgttagtagaactcaaggcaattgatggcacgctgcgcacacgcgtattgttctaa

SEQ ID NO: 1284 - protein, 409 aa, Shewanella oneidensis MR-1
MAKHSLDKDKIKILLLEGVHQSAVDVFERAGYTNIEYHKASLGDEALHESIKDAHFIGIRSRTQLSADVLKRAEKLIAIGCFCIGTNQVDLATAESLGIPVFNAPFSNTRSVAELVLGEIIMLMRGIPERNAIAHRGGWMKTAAGSYEVRGKTLGVIGYGHIGTQLGILAETLGMRVVFFDIEDKLPLGNAQQIHSMEQLLAQADVVSLHVPETPQTKDMISTAEFAAMRKGSIFINASRGTVVDIDALTVALKERHLAGAAIDVFPVEPQSNDDEFISPLRGLDNVLLTPHVGGSTAEAQENIGIEVAGKLAKYSDNGSTVSAVNFPEVSLPMHKGTSRLLHIHQNRPGVLIKINKAFSEKGINIAAQYLQTTAEIGYVVMEVDTHQAEEALVELKAIDGTLRTRVLF

SEQ ID NO: 1285 - DNA, 1230 bp, Vibrio vulnificus CMCP6
  CDS (1)..(1230): transl_table=11
atggccaaagtttcactggaaaaagagaaaataaaaatcttacttcttgaaggcctccacccttcttcggtagaagtgctgcaagctgcgggttacaccaatatcgaataccacaaaggctcactttctgacgatgctcttcttgaagcggttaaagacgcgcacttcattggcattcgttctcgtaccaacttaactgaagaagtgatcaatgcggcacaaaaactggtagcgatcggttgtttctgcattggtaccaaccaagtggatctaaatgcagcatccaaacgtggtattcctgtgtttaacgcgcctttctcaaacactcgcagtgtagcggagctggttcttggccaaatcctgctgcttctacgtggtattccagaaaagaacgctttggctcatcgcggaatttggaaaaaaagtgccgacaactcttacgaagctcgtgggaaacgtctaggcattattggttacggtcatatcggtactcagcttggtattattgctgaaaacctaggcatgcgtgtttatttctacgatatcgagaacaagctctcgctaggtaatgcgactcaaatcccaaccatgagcgaactgctcaacaagtgtgacgtgatttctctacacgtaccagaaacgccagaaaccaaaaatatgatgggtgcagaagagtttgctcgtatgaagcctggttctatcttcatcaatgcagctcgtggcaccgtggtcgatattgaagcgctatgccattcactcgaatcaggtcatattgctggtgcagcgattgacgttttcccggttgaacctgccaccaatgctgaaccattcgaatctccactgcaaaaatttgacaatgtgattcttactccacacgttggcggctcaactcaagaagcacaagagaacattggtgttgaagtggctggcaaactggcgaaatactcagacaatggctcaacgctatccagtgttaacttcccagaagtgtcactgccagagcatcgtagctgttcacgcttactccacattcaccaaaaccgtccgggcattctgacgcaaatcaacaccatttttgctgaagaaggcatcaacatcgccggtcaatacctgcagacctcagccgatattggttatgtggtgattgacgtagaaaccgagcgctctgaagaagcactggtcaaacttaaagagatcgaaggcacaattcgagctcgaatccttcactaa

SEQ ID NO: 1286 - protein, 409 aa, Vibrio vulnificus CMCP6
MAKVSLEKEKIKILLLEGLHPSSVEVLQAAGYTNIEYHKGSLSDDALLEAVKDAHFIGIRSRTNLTEEVINAAQKLVAIGCFCIGTNQVDLNAASKRGIPVFNAPFSNTRSVAELVLGQILLLLRGIPEKNALAHRGIWKKSADNSYEARGKRLGIIGYGHIGTQLGIIAENLGMRVYFYDIENKLSLGNATQIPTMSELLNKCDVISLHVPETPETKNMMGAEEFARMKPGSIFINAARGTVVDIEALCHSLESGHIAGAAIDVFPVEPATNAEPFESPLQKFDNVILTPHVGGSTQEAQENIGVEVAGKLAKYSDNGSTLSSVNFPEVSLPEHRSCSRLLHIHQNRPGILTQINTIFAEEGINIAGQYLQTSADIGYVVIDVETERSEEALVKLKEIEGTIRARILH

SEQ ID NO: 1287 - DNA, 1590 bp, Bradyrhizobium japonicum USDA 110
  CDS (1)..(1590): transl_table=11
atgaccaaacccaaagttctcatttccgacgcgctctcgcccgccgccgtgcagatcttcaaggatcgcggcatcgaggtcgacttccagcccaatctcggcaaggacaaggacaagctcgccgagatcatcggcaattacgacggcctcgcgatccgctccgcgaccaaggcgaccgccaagatcctcgagaaggcaaccaacctcaaggtgatcggccgcgccggcatcggcgtcgacaacgtcgagatccccgccgccacggccaagggcatcatcgtgatgaacacgccgttcggcaattcgatcacgaccgccgagcacgccatcaccctgatgctcgcgctcgcccgcgagatcccgcaggccgacgcctcgacccaggccggcaagtgggagaagaaccgcttcatgggcgtcgagatcaccggcaaggtgttaggggtggtcggctgcggtaatatcggctcgatcgtcgcggaccgcgcgctcggcctgcgcatgaaggtggtcgcgttcgatccgttcctgtcgccggagcgcgccaaggacatcggcgtcgagaaggtcgatctcgacgacctcctcaagcgcgccgacttcatcacgctgcacaccccgctgaccgagaagaccaagaacatcatcgatgctgccgcgatcgccaagatgaagaagggcgtgcgcctgatcaactgcgcccgcggcggtctcgtcgacgagcaggcggtggtcgatgcgctgaattccaagcacatcgcgggcgccgccttcgacgtcttcgtcgaggagcccgcgaataccaacgtgctgttcggccatcccaacgtgatctgcacgccgcatctcggcgcctccaccaccgaagcgcaggagaacgtcgcgctccaggtcgccgagcagatgtcggactatctgctgaccggcgccatctcgaacgcggtcaacttcccctcgatcacggcggaagaagcgccgaagctgaagccgttcatcgcgctcgccgagaagctcggctcgttcgccggccagctcaccgagagcggcatcctcaaggtcgagatcacctatgagggccatgtcgccgagatgaagatcaaggcgatcacctccgccgtgctgtcgggcctgctgcggccgatgctgggcgaggtcaacgtggtgtccgcgcccgtggtcgccaaggagcgtggcatggtggtggacgagatcgtgcgcgccgcccagagcgactatgagagcctgatcaccgtcacggtggcgacggagcgccaggagcgctcggtctccggcaccgtgtatcatgacggcaagccgcgcctcgtcgacgtcaagggcatccgcgtcgacgccgagttcggcaagtcgatgatctacgtgaccaacgaggacaagcccggcttcatcggcgcgttcgcgagcctgcttggcgccgccaagctcaacatcgcgaccttccatctcggccgcgtcaagctgggcggcgacgccatcgcgctggtcgaggtcgacggcgcggtgccggccgacgtgctcgccaaggtgcaggcgctgccgcaggtcaagcaggccaaggcgctgacgttctga

SEQ ID NO: 1288 - protein, 529 aa, Bradyrhizobium japonicum USDA 110
MTKPKVLISDALSPAAVQIFKDRGIEVDFQPNLGKDKDKLAEIIGNYDGLAIRSATKATAKILEKATNLKVIGRAGIGVDNVEIPAATAKGIIVMNTPFGNSITTAEHAITLMLALAREIPQADASTQAGKWEKNRFMGVEITGKVLGVVGCGNIGSIVADRALGLRMKVVAFDPFLSPERAKDIGVEKVDLDDLLKRADFITLHTPLTEKTKNIIDAAAIAKMKKGVRLINCARGGLVDEQAVVDALNSKHIAGAAFDVFVEEPANTNVLFGHPNVICTPHLGASTTEAQENVALQVAEQMSDYLLTGAISNAVNFPSITAEEAPKLKPFIALAEKLGSFAGQLTESGILKVEITYEGHVAEMKIKAITSAVLSGLLRPMLGEVNVVSAPVVAKERGMVVDEIVRAAQSDYESLITVTVATERQERSVSGTVYHDGKPRLVDVKGIRVDAEFGKSMIYVTNEDKPGFIGAFASLLGAAKLNIATFHLGRVKLGGDAIALVEVDGAVPADVLAKVQALPQVKQAKALTF

SEQ ID NO: 1289 - DNA, 1299 bp, Bradyrhizobium japonicum USDA 110
  CDS (1)..(1299): transl_table=11
gtgcaccgtccgcggtttatgagctgcggcaaagccgcgattttaggagattctatgccagccccaggccaaagccctgagcggagcgcgaaggcgctgctgctcgaaggcgtcaatgacagtgccgtggacctgttccggagcgcgggctttgccaatgtcgagcggctgaccaaggcgctggacggcgaggcgctgcgccaggcgctcaagggcgtgtcgttgctcggcatccgctcgcgcacccagattaccgacgacgtgctggcggccgccgatcagctccttgcggtcggctgcttcagcgtcggcaccaaccaggtcgatctgctggcggcgcgcaagcgcggtattcccgtcttcaacgccccgttctccaacacgcgcagcgtcgccgaactcgtgatcggcgagatcgtgatgctgctgcggcagattttcccgcgctcggtctcggcccatgacggcggctgggacaagtccgcgaccggcagccgcgaggtccgcggccgcaccctcggcatcatcggctacggcaatatcggctcgcagctctcgaccctggccgaggccatgggcatgcgggtgatctattacgaccgcaccgacaagctccgccacggcaacaccgagccggtcgagaagctcgaggagctgctggcgcagagcgacgtcgtcagcctgcacgtgccggagacgccggagacatcaggcatgatcggcgagaaggagctgcgggcgatgaagccgggctccttcctgatcaacaacagccgcggcaccgtggtcgatctcgatgcgctggcgcgcgccttgcgcgacggtcacatcgccggtgccgccatcgacgtgtttccggtcgagccgtcgtcgaattccgatcgtttcaagagcccggtgcagggcctcggcaacgtcatccttaccccgcatatcggcggctcgaccgaggaggcgcaggagcgcatcggcggcgaggtcgcgcgcaagctggtcgactatttcatcaccggctcgaccatgggtgcggtgaacttcccggaggtgcagttgcatctgcgtccctccggcgcgcgcttcagccatgtccatcgcaacgtgccgggcatgctgcggcggctcaacgaggtcttcctccagcgcgacatcaacatcgcggcgcaatatctggagaccgccggcgacctcggctacgtcgtgctcgatgccgatctcggcggccaggattcgggcgaattgctccagcagatccgcgctctcgacggcacggtcggcgcaaggctggtattcgagcactaa

SEQ ID NO: 1290 - protein, 432 aa, Bradyrhizobium japonicum USDA 110
MHRPRFMSCGKAAILGDSMPAPGQSPERSAKALLLEGVNDSAVDLFRSAGFANVERLTKALDGEALRQALKGVSLLGIRSRTQITDDVLAAADQLLAVGCFSVGTNQVDLLAARKRGIPVFNAPFSNTRSVAELVIGEIVMLLRQIFPRSVSAHDGGWDKSATGSREVRGRTLGIIGYGNIGSQLSTLAEAMGMRVIYYDRTDKLRHGNTEPVEKLEELLAQSDVVSLHVPETPETSGMIGEKELRAMKPGSFLINNSRGTVVDLDALARALRDGHIAGAAIDVFPVEPSSNSDRFKSPVQGLGNVILTPHIGGSTEEAQERIGGEVARKLVDYFITGSTMGAVNFPEVQLHLRPSGARFSHVHRNVPGMLRRLNEVFLQRDINIAAQYLETAGDLGYVVLDADLGGQDSGELLQQIRALDGTVGARLVFEH

SEQ ID NO: 1291 - DNA, 1230 bp, Pseudomonas syringae pv. tomato str. DC3000
  CDS (1)..(1230): transl_table=11
atgagcaagacttccctcgacaagagcaagatcaagttccttcttctcgaaggcgtccatcaatccgctgtcgacgtcctcaaggcagccggctacaccagcatcgagtaccacaccaagtctctgccggaagccgaactgaaggaaaagatcgccgacgctcactttatcggtatccgctcccgcacccaactgaccgaagagctgttcgatagcgccaagaaactggtcgcagtgggctgcttctgcatcggcaccaatcaggttgacctcaacgcagcgcgcgaacgcggtattgcggtgttcaacgcgccttactccaatacccgttcggttgccgaactggtgctggccgaggcgattctgctgttgcgcggcatcccggaaaagaacgcgtcctgccaccgtggcggctggatcaagagcgcggccaactccttcgagatccgtggcaagaagctcggcatcgtcggctacggctcgatcggcacgcaattgtcagtgctggctgaaggcctgggcatgcaggtgtatttctacgacacgctgaccaagttgccactgggcaacgccactcaggtttccagcctgaacgagctgctgggcatgtccgacatcgtcacgctgcacgttccggaaaccaccgaaacccagtggatgatcggcgagaaagaaatccgcgcgatgaaaaagggcagcatcctgatcaacgccgcgcgcggcacagtcgtcgaactggatgccctggctgacgcgatcaaggacaaacacctgatcggagccgccattgacgtgttcccggtcgagccacgctcgaacgacgacatctttgaaagcccgctgcgtggcctggacaacgtgatcctgaccccgcacatcggtggttccactgccgaggcgcaggccaacattggtctggaagtggcagaaaagctggtcaagtacagcgacaacggtacgtcggtgtcctcggtcaacttcccggaagtggcgctgcctgcgcacccaggcaaacaccgcctgctgcacatccacgaaaacatcccgggcgtactcagcgagatcaacaaggtcttcgccgaaaacggcatcaacatctccggtcagttcttgcagaccaacgagaaagtcggctacgtggtgatcgacgttgacgccgagtactcggacctggcacaggccaagctgcaacacatcaaaggcaccatccgcagccgcgtgttgttctga

SEQ ID NO: 1292 - protein, 409 aa, Pseudomonas syringae pv. tomato str. DC3000
MSKTSLDKSKIKFLLLEGVHQSAVDVLKAAGYTSIEYHTKSLPEAELKEKIADAHFIGIRSRTQLTEELFDSAKKLVAVGCFCIGTNQVDLNAARERGIAVFNAPYSNTRSVAELVLAEAILLLRGIPEKNASCHRGGWIKSAANSFEIRGKKLGIVGYGSIGTQLSVLAEGLGMQVYFYDTLTKLPLGNATQVSSLNELLGMSDIVTLHVPETTETQWMIGEKEIRAMKKGSILINAARGTVVELDALADAIKDKHLIGAAIDVFPVEPRSNDDIFESPLRGLDNVILTPHIGGSTAEAQANIGLEVAEKLVKYSDNGTSVSSVNFPEVALPAHPGKHRLLHIHENIPGVLSEINKVFAENGINISGQFLQTNEKVGYVVIDVDAEYSDLAQAKLQHIKGTIRSRVLF

SEQ ID NO: 1293 - DNA, 1233 bp, Vibrio parahaemolyticus RIMD 2210633
  CDS (1)..(1233): transl_table=11
atggccaaagtttcactggaaaaagaaaagattaagatcctcttactcgagggacttcacccttcttcagttgaagttcttcaagcagctggttacaccaacattgaatatcacaaaggttcgctttcagaggaagaactgattgaagcagttaaagatacgcacttcatcggtatccgctcccgaacgaatctatccgaggaagtgatcaatgcggcaaacaaactggttgcgattggctgtttttgtatcggaactaaccaagtcgatcttggtgcggcggcaaaacgtggcattcctgtattcaatgcaccgttttcaaacacgcgaagtgtagcagaactcgtgcttggtcagattcttctgctccttcgtgggattcctgaaaagaacgccttggcacaccgtggtatttggaagaagagcgcagacaactcttacgaagcgcgtggtaaacgccttggtatcattggttacggccatatcggcactcagctgggcattattgctgaaaacttaggtatgcgcgtgtactactacgacatcgaaaacaaactatcacttggcaacgcaacgcaaatccacacgatgagcgagctgctaaacaaatgtgatgttatttcgctgcacgtaccagaaacacctgaaacgaagaatatgatgggcgaagaagaatttgctcgcatgaaacctggcgcaatcttcatcaacgccgctcgcggtaccgttgttgatattcctgcgctttgccacagcctagaagcaggtcacttagctggcgcagcaatcgacgtattcccagttgaaccaaaaacaaacgctgacccgtttgaatctccactacagaaattcgataacgtcattctaacgccacacgtgggcggctctactcaagaagcacaagaaaacatcggcgtggaagtagcgggtaaactggcgaaatattcagataatggttcaacactatcaagcgttaacttccctgaagtatctctgcctgaacacggtcgtgagtgctctcgcttactgcacattcacaaaaaccgcccaggtattctgactcaaattaacaccatcttcgcagaagaaggcatcaacatcgcagcgcagtacctacaaactgaagctgagatcggctacgtagttattgatgtggaaactgagcgttcagaagaagcactaactaagctgaaaagcattgaaggcacgattcgtgctcgtattcttcattaa

SEQ ID NO: 1294 - protein, 410 aa, Vibrio parahaemolyticus RIMD 2210633
MAKVSLEKEKIKILLLEGLHPSSVEVLQAAGYTNIEYHKGSLSEEELIEAVKDTHFIGIRSRTNLSEEVINAANKLVAIGCFCIGTNQVDLGAAAKRGIPVFNAPFSNTRSVAELVLGQILLLLRGIPEKNALAHRGIWKKSADNSYEARGKRLGIIGYGHIGTQLGIIAENLGMRVYYYDIENKLSLGNATQIHTMSELLNKCDVISLHVPETPETKNMMGEEEFARMKPGAIFINAARGTVVDIPALCHSLEAGHLAGAAIDVFPVEPKTNADPFESPLQKFDNVILTPHVGGSTQEAQENIGVEVAGKLAKYSDNGSTLSSVNFPEVSLPEHGRECSRLLHIHKNRPGILTQINTIFAEEGINIAAQYLQTEAEIGYVVIDVETERSEEALTKLKSIEGTIRARILH

SEQ ID NO: 1295 - DNA, 1221 bp, Bordetella pertussis Tohama I
  CDS (1)..(1221): transl_table=11
ttgttgtacaggcaacccaacatggcccagattgttctgttcgagaatatccaccccagcgcccgcgccgtcttcagcgcggccggctataccgacatcgtcgcccacgcggcggcgctgccttcgggcgagctgcgcgaggccctgcgcggcgccgaggtggtgggtatccgctcgcggacccatctggacgccgacctgctggcggccaaccccgacctgcgcgtggtggggtgcttttgcatcggcaccaaccaggtcgacctggacgccgccatgatgcgcggggtgccggtcttcaacgcgccgttctccaacacccgctcggtggccgagctggtgctgggcgaagccatcctgctgctgcgccggatccccgagaagaacgcccgcgtccacctggggcattgggacaagagcgccgccggcgcctacgaggcccgcggcaagacgctggggatcgtcggctacggcaacatcggttcgcagatcagcaccctggccgaggccatcggcatgcgcgtggtgttcttcgacgtcgaggccaagctgccgctgggcaacgcgcgcgccgccggctcgctggccgagctgctggagcaggccgatgtcgtcaccttgcacgtgcccggcggcaagtccacccagaacatcgtcaacgccgacaccctggcgcgcatgaagcgcggcgcgattctcatcaacgcctcgcgcggcacggtggtggacatccaggcgctgcacgacgccctggccagcggccacctggccggcgcggcgctggacgtgtttccgaccgagcccaagagcgccgacgaaccgctggccagcccgctgatcggcatgcccaacgtcgtgctcacgccgcacatcggcggcagcacccaggaatcccaggaaaacatcggccgcgaagtggccgagaaactggtgcgcttcctgcaagcaggcaccaccaagagcgccgtcaatttccccgagctgtcgtaccaggcgcccgtgggcggctcgcgcatcatccacgtgcaccgcaacgcccccggcgcgctgggcgcgctggacaacctgatggcccagcatggcctgaacatcgtcagccagagcctgcagaccaagggccagatcggctacgccgtcaccgacgtcgacggcgaagtcagcgacaccgtcctggccgacctgcgcagccacccggtcaccgtgaggtgcgaaaagctgtaa

SEQ ID NO: 1296 - protein, 406 aa, Bordetella pertussis Tohama I
MLYRQPNMAQIVLFENIHPSARAVFSAAGYTDIVAHAAALPSGELREALRGAEVVGIRSRTHLDADLLAANPDLRVVGCFCIGTNQVDLDAAMMRGVPVFNAPFSNTRSVAELVLGEAILLLRRIPEKNARVHLGHWDKSAAGAYEARGKTLGIVGYGNIGSQISTLAEAIGMRVVFFDVEAKLPLGNARAAGSLAELLEQADVVTLHVPGGKSTQNIVNADTLARMKRGAILINASRGTVVDIQALHDALASGHLAGAALDVFPTEPKSADEPLASPLIGMPNVVLTPHIGGSTQESQENIGREVAEKLVRFLQAGTTKSAVNFPELSYQAPVGGSRIIHVHRNAPGALGALDNLMAQHGLNIVSQSLQTKGQIGYAVTDVDGEVSDTVLADLRSHPVTVRCEKL

SEQ ID NO: 1297 - DNA, 1221 bp, Bordetella parapertussis 12822
  CDS (1)..(1221): transl_table=11
ttgttgtacaggcaacccaacatggcccagattgttctgttcgagaatatccaccccagcgcccgcgccgtcttcagcgcggccggctataccgacatcgtcgcccacgcggcggcgctgccttcgggtgagctgcgcgaggccctgcgcggggccgaggtggtgggtatccgctcgcggacccatctggacgccgacctgctggcggccaaccccgacctgcgcgtggtggggtgcttttgcatcggcaccaaccaggtcgacctggacgccgccatgatgcgcggggtaccggtcttcaacgcaccgttctccaatacccgctcggtggccgaactggtgctgggcgaagccatcttgctgctgcgccggatccccgagaagaacgcccgcgtccacctggggcattgggacaagagcgccgccggcgcctacgaggcccgcggcaagacgctggggatcgtcggctacggcaacatcggctcgcagatcagcaccctggccgaggccatcggcatgcgcgtggtgttcttcgacgtggaggccaagctgccgctgggcaacgcgcgcgccgccggctcgctggccgagctgctggagcaggccgatgtcgtcaccctgcacgtgcccggcggcaagtccacccagaacatcgtcaacgccgacaccctggcgcgcatgaagcgcggcgcgattctcatcaacgcctcgcgcggcacggtggtggacatccaggcgctgcacgacgccctggccagcggccacctggccggcgcggcgctggacgtgtttccgaccgagcccaagagcgccgacgaaccgctggccagcccgctgatcggcatgcccaacgtcctgctcacgccgcacatcggcggcagcacccaggaatcccaggaaaacatcggccgcgaagtggccgagaaactggtgcgcttcctgcaagcaggcaccaccaagagcgccgtcaatttccccgagctgtcgtaccaggcgcccgtgggcggctcgcgcatcatccacgtgcaccgcaacgcccccggcgcgctgggcgcgctggacaacctgatggcccagcatggactgaacatcgtcagccagagcctgcagaccaagggccagatcggctacgccgtcaccgacgtcgacggcgaagtcagcgacaccgtcctggccgacctgcgcagccacccggtcaccgtgaggtgcgaaaagctgtaa

SEQ ID NO: 1298 - protein, 406 aa, Bordetella parapertussis 12822
MLYRQPNMAQIVLFENIHPSARAVFSAAGYTDIVAHAAALPSGELREALRGAEVVGIRSRTHLDADLLAANPDLRVVGCFCIGTNQVDLDAAMMRGVPVFNAPFSNTRSVAELVLGEAILLLRRIPEKNARVHLGHWDKSAAGAYEARGKTLGIVGYGNIGSQISTLAEAIGMRVVFFDVEAKLPLGNARAAGSLAELLEQADVVTLHVPGGKSTQNIVNADTLARMKRGAILINASRGTVVDIQALHDALASGHLAGAALDVFPTEPKSADEPLASPLIGMPNVLLTPHIGGSTQESQENIGREVAEKLVRFLQAGTTKSAVNFPELSYQAPVGGSRIIHVHRNAPGALGALDNLMAQHGLNIVSQSLQTKGQIGYAVTDVDGEVSDTVLADLRSHPVTVRCEKL

SEQ ID NO: 1299 - DNA, 1581 bp, Gloeobacter violaceus PCC 7421
  CDS (1)..(1581): transl_table=11
atgcccaaggtgcttgtcagtgacgcgatcgaccaggctggtatcgaaattctcacccaggtcgctcaagtaacttacgagccggatctcagcccggcgacgttgcttgagaccattccccagtacgacgctttgatgatccgctcgggcaccaaggtgaccgccctggtgatcgaagcggcccagcgcctgcggatcatcggccgcgccggggtgggtgtcgacaatgtcgatctgcaggctgccacccgcaaggggatcgtcgtggtcaactcccccgagggcaacacgatcgccgccgccgagcacgccatcgccttgatgatgagcctgtcgcgccacgtgggcgaagcgaacgcctcactaaaagccggccagtggaagcgctcgcaatttatcggcgtcgaagtctacaaaaagacgatcggcgtggtgggcctgggccgcatcggctcgcatgtgacgcgggtggcgcgggcactcggcatgcagatcgtcgccttcgacccgtatatttccgccgagcgcgcccagcagctgggggcacgcctggtcgatctggaacaactgtttcacgaggccgactacatcacgctgcatgtgccgcgcacgccggagaccacccacctcatcaacgagaagaccctcgcctcgatgaagcccacggcccggatcatcaactgtgcccgcggcggcctcatcgacgagcaggcgctttatgtcgccctcaaggaaggccgcatcgccggggccgccctcgatgtcttcgagaacgaaccgctcggcgaatcgcccctgtgcgccctcgggcgcgaggtgatcctcacgccccacctgggtgcttcgaccgaagaggcccagaccaacgtcgccattgatgtggccgagcagattcgcgatgtgcttctgggtctacccgcccgcacggcggtcaacatcccaggcctgcgagccgaggtgctgcaggaactgaagccctatctggaactggccgacaccctgggcaaccttgtgggccaactggccggcggccgagtggatgcccttgacattcgcctgcagggcattctcgcggctaaagacgcccagcccattgtcgtggccgccctcaagggcctgctcaccccggcgctgcgcgagcgggtcaacttcgtcaacgcgctgcttgaggccaaggagcggggcattcgggtgaccgagacgcgcgattcggccttcgccgattacgcgggctcgatccgcctggaggcgcgcggcccggagggcgagcgctccgtcacaggcgcacttttggctgaggacgaactgcgcatcaccaacatcgacgaatttccgatcagcgtcgccccgagccgctacatgctcatcaccctgcaccgcgacatgccggggatcatcggcaaggtgggttcgtttctgggctcctacaacgtcaacatcgccggcatgcaggtgggtcgcaaactggtgcgcggcgacgcggtgatgatggtctccctcgacgacccgctgccggaagggttgttaggggagattgagtcggtccccggtatccgcaaggcgtatacggtcaatctttga

SEQ ID NO: 1300 - protein, 526 aa, Gloeobacter violaceus PCC 7421
MPKVLVSDAIDQAGIEILTQVAQVTYEPDLSPATLLETIPQYDALMIRSGTKVTALVIEAAQRLRIIGRAGVGVDNVDLQAATRKGIVVVNSPEGNTIAAAEHAIALMMSLSRHVGEANASLKAGQWKRSQFIGVEVYKKTIGVVGLGRIGSHVTRVARALGMQIVAFDPYISAERAQQLGARLVDLEQLFHEADYITLHVPRTPETTHLINEKTLASMKPTARIINCARGGLIDEQALYVALKEGRIAGAALDVFENEPLGESPLCALGREVILTPHLGASTEEAQTNVAIDVAEQIRDVLLGLPARTAVNIPGLRAEVLQELKPYLELADTLGNLVGQLAGGRVDALDIRLQGILAAKDAQPIVVAALKGLLTPALRERVNFVNALLEAKERGIRVTETRDSAFADYAGSIRLEARGPEGERSVTGALLAEDELRITNIDEFPISVAPSRYMLITLHRDMPGIIGKVGSFLGSYNVNIAGMQVGRKLVRGDAVMMVSLDDPLPEGLLGEIESVPGIRKAYTVNL

SEQ ID NO: 1301 - DNA, 1242 bp, Photorhabdus luminescens subsp. laumondii TTO1
  CDS (1)..(1242): transl_table=11
atggttaaggtatctctggaaaaagataagattaaatttttgctattagaaggtgtacatcagagcacggtagaaaatctacgagcagccggttatagcaatatcgaatatcataagggagcattagatcccaaagagttaaaagaggcaattcgtgatacccattttgttggtatccgttcccgcacacaactgaccgaagacatttttcaggcggccgaaaaattggttgctgtaggctgtttttgcattggtaccaatcaggttgatctgaaagcggctgcaaaacgtggtatccctgtctttaatgcgccattttctaatacccgttctgttgctgaaatggtccttggtgagctgttgttattgctgcgtcgtatccctttggcgaatgcgaaagctcatcgtggcgtgtgggataagcaggctaaaggctgctatgaagttcgtggtaaaaaactgggcattatcggttacggtcatattggcactcagcttggtattctggctgaaaatattggtatggatgtctacttttacgatattgaaaacaaattgccgttaggtaacgctcatcaggtacgtcacttgtcagaattactgaatatgagtgatgtggttagtttgcatgtaccagaaacgccatcaactaaaaatatgattggtgcaactgaactgaccctgatgaaaccgggttctatcctgattaatgcttcacgcggaacggtggtggatatcccggcattatgtgatgcattggaaagtgaacatctgtcaggggcggctgtggatgtgttccctgttgaaccggcaaccaataatgatccatttgagtcaccgttacgtaaatttgataacgtgttgctgaccccacatattggtggttctacccaagaagcgcaggaaaacattggttatgaagtcgcaggaaagttagcgaaatactctgataatggttctaccttatcagcagtaaacttcccagaagtgtctcttcctgttcatgctgatgataccaaccggtttctacatattcatgaaaatcgcccgggtatattgaacagtattaaccaggtgtttgctgaacaggatatcaatattgccgctcagtatctgcgtaccagtggggacatgggttatgtggtgattgatattgtgactgaaaatccggctcaagctgaaatggtatttcagaaactgaaagcattgccgggtactatccgttctcgtctgctttactga

SEQ ID NO: 1302 - protein, 413 aa, Photorhabdus luminescens subsp. laumondii TTO1
MVKVSLEKDKIKFLLLEGVHQSTVENLRAAGYSNIEYHKGALDPKELKEAIRDTHFVGIRSRTQLTEDIFQAAEKLVAVGCFCIGTNQVDLKAAAKRGIPVFNAPFSNTRSVAEMVLGELLLLLRRIPLANAKAHRGVWDKQAKGCYEVRGKKLGIIGYGHIGTQLGILAENIGMDVYFYDIENKLPLGNAHQVRHLSELLNMSDVVSLHVPETPSTKNMIGATELTLMKPGSILINASRGTVVDIPALCDALESEHLSGAAVDVFPVEPATNNDPFESPLRKFDNVLLTPHIGGSTQEAQENIGYEVAGKLAKYSDNGSTLSAVNFPEVSLPVHADDTNRFLHIHENRPGILNSINQVFAEQDINIAAQYLRTSGDMGYVVIDIVTENPAQAEMVFQKLKALPGTIRSRLLY

SEQ ID NO: 1303 - DNA, 1230 bp, Vibrio vulnificus YJ016
  CDS (1)..(1230): transl_table=11
atggccaaagtttcactggaaaaagagaaaataaaaatcttacttcttgaaggcctccacccttcttcggtagaagtgctacaagcggcaggttacaccaatatcgagtaccacaagggttccttgtcggatgcggatcttctagaagcggttaaagatgcgcacttcatcggtattcgctctcgcaccaacttaaccgaagaagtcattaacgcagcgcaaaaactggttgcgattggttgcttctgtattggtaccaaccaagtggatctaaatgcagcggcaaaacgtgggattcccgtgtttaatgccccattctctaacacgcgtagcgtagcggaattagtcttgggtcaaatcctgctgttacttcgtggtattccagaaaaaaatgccttggcacaccgtggtatttggaaaaagagtgcagacaattcttacgaagctcgtggtaagcgtcttggtattattggttacggccatatcggtactcagctcggtattattgctgaaaacttgggtatgcgtgtttacttctacgatatcgagaataagctctcgctaggtaatgcaactcaaatcccaaccatgagcgaattgctcaacaaatgtgatgtgatttctctacacgtaccagaaacgccagacacgaaaaacatgatgggtgcagaagagtttgctcgtatgaagcctggtgctattttcatcaacgcagctcgtggcactgtggtcgatattgaagcgctatgccattcactcgaatcaggtcatattgctggcgcagcgattgacgttttcccggttgaacctgcaaccaacgcagatcctttcgagtcgccattgcaaaaattcgacaacgtgattcttactccacacgttggcggctcaactcaagaagcacaagagaacattggtgttgaagtcgcaggcaaattagcgaagtattcagacaacggctcaacgctgtctagcgttaacttccctgaagtgtcactgccagaacatcgcagttgttcacgcttgctgcacattcaccaaaaccgcccgggcattctgacgcaaatcaacaccatttttgctgaagaaggcatcaacatcgccggtcaatacctgcagacctcagctgatattggttatgtggtgattgacgtagaaaccgagcgctctgaagaagcactggtcaaacttaaagagatcgaaggcacaattcgagctcgaatccttcactaa

SEQ ID NO: 1304 - protein, 409 aa, Vibrio vulnificus YJ016
MAKVSLEKEKIKILLLEGLHPSSVEVLQAAGYTNIEYHKGSLSDADLLEAVKDAHFIGIRSRTNLTEEVINAAQKLVAIGCFCIGTNQVDLNAAAKRGIPVFNAPFSNTRSVAELVLGQILLLLRGIPEKNALAHRGIWKKSADNSYEARGKRLGIIGYGHIGTQLGIIAENLGMRVYFYDIENKLSLGNATQIPTMSELLNKCDVISLHVPETPDTKNMMGAEEFARMKPGAIFINAARGTVVDIEALCHSLESGHIAGAAIDVFPVEPATNADPFESPLQKFDNVILTPHVGGSTQEAQENIGVEVAGKLAKYSDNGSTLSSVNFPEVSLPEHRSCSRLLHIHQNRPGILTQINTIFAEEGINIAGQYLQTSADIGYVVIDVETERSEEALVKLKEIEGTIRARILH

SEQ ID NO: 1305 - DNA, 1590 bp, Rhodopseudomonas palustris CGA009
  CDS (1)..(1590): transl_table=11
atgaccgctcccaaagtcctcatttccgacgcgctgtcggaagccgccgtgcagatcttcaaggatcgcggcattgacgtcgatttccagccgaacctcggcaaggacaaagacaagctcgccgagatcatcggcaattacgacggcctcgcgatccgctccgccaccaaggcgacggcgaagatcctggagaaggccaaccgtctcaaggtgatcggccgcgccggcatcggcgtcgacaacgtcgagattcccgcggcgaccgccaagggcatcatcgtgatgaacaccccgttcggcaattcgatcaccaccgccgagcacgccatcaccatgatgctgtcgctggcccgcgagatccccgccgccgacgcctcgacccaggccggcaagtgggaaaagaaccgcttcatgggcgtcgaaatcaccgccaagacgctcggcgtgatcggctgcggcaacatcggctcgatcgtcgccgaccgcgcgctcggcctgaagatgaaggtgatcgcgttcgatccgttcctgtcgccggagcgcgccaaggatctgggcgtcgagaaggtcgagctcgaagacatcttcaagcgcgccgacttcatcaccctgcacaccccgctcaccgacaagaccaagaacatcatcgacgcggccgcgatcgccaagatgaagaagggcgtccgcatcatcaattgcgcccgcggcggtctggtcgacgagaacgcgctcgccgaagcgctgaagtccggccacgtcgccggcgcggcgttcgacgtgttctctgaagagccggccaccaagaacgtgctgttcggcctgccgaatgtgatctgcaccccgcatctcggcgcctcgacgactgaagcgcaggagaacgtcgccctgcaggtcgccgagcagatgagcgactatctgctgaccggcgcgatcaccaacgcgatcaacttcccgtcgatcaccgccgaagaagccccgaagctgaagccgttcatcgaactggccgaaaagctcggctcgttcgccggccagctcaccgagaccggcatcaccaaggtcaccatcacctatgagggtgaagtggccgagatgaagatcaaggcgctgacctcggcggtgctgtcgggcctgctgcgcccgatgctgggcgacatcaatgtcgtgtcggcgccggtgatcgccaaggagcgcggcatggtggtggatgaagtcgtccgcgccgccgagagcgactacgagagcctgatcaccctgacggtgaccaccgagaagcaggagcgctcggtgtccggcaccgtctatgccgacggcaagccgcgcctggtcgacatcaagggcatccgcgtcgacgccgagttcggttcttcgatgatctacgtcaccaacgaggacaagccgggcttcatcggcaagttcgccagcctgctcggcgacgccaaggtcaacatcgcgaccttcaacctcggccgtcacaccgaaggcggcgacgccatcgcgttggtgacgatcgacggtccggccccgactgaggtgctggagaaggtccaggccctgccgcaggtcaagcaggtcaaggcgctgacgttctga

SEQ ID NO: 1306 - protein, 529 aa, Rhodopseudomonas palustris CGA009
MTAPKVLISDALSEAAVQIFKDRGIDVDFQPNLGKDKDKLAEIIGNYDGLAIRSATKATAKILEKANRLKVIGRAGIGVDNVEIPAATAKGIIVMNTPFGNSITTAEHAITMMLSLAREIPAADASTQAGKWEKNRFMGVEITAKTLGVIGCGNIGSIVADRALGLKMKVIAFDPFLSPERAKDLGVEKVELEDIFKRADFITLHTPLTDKTKNIIDAAAIAKMKKGVRIINCARGGLVDENALAEALKSGHVAGAAFDVFSEEPATKNVLFGLPNVICTPHLGASTTEAQENVALQVAEQMSDYLLTGAITNAINFPSITAEEAPKLKPFIELAEKLGSFAGQLTETGITKVTITYEGEVAEMKIKALTSAVLSGLLRPMLGDINVVSAPVIAKERGMVVDEVVRAAESDYESLITLTVTTEKQERSVSGTVYADGKPRLVDIKGIRVDAEFGSSMIYVTNEDKPGFIGKFASLLGDAKVNIATFNLGRHTEGGDAIALVTIDGPAPTEVLEKVQALPQVKQVKALTF

SEQ ID NO: 1307 - DNA, 1206 bp, Bdellovibrio bacteriovorus HD100
  CDS (1)..(1206): transl_table=11
atgagcgctcaaagaatcttgttggttgaaaacattcacaccgttgcgaaggaaaggctggaggaagaaggctacaaagtcgatcttatcacacatgctccttccgaggacgaactgctgaaaattcttccgaactatgatgtgctggggatccgttctaaaacggaagtcaccaaaaaagttctggattccaacaagcatctggtcaccattggctgcttctgtattggaacaaatcaagtggaccttctgaccgcgcgcgagcggggtattccggtgttcaatgctcctcattctaacactcgttccgtggcggaactggtcattgcggaaatgatttcattgtcccgtcaactgggcgaccgaaacacccaagctcatttgggcgagtgggtgaagtctgccgtgggttcgaaagaagtccgtggcaaaacattggggatcgtgggttatggtcacatcggaagtcaggtcagcattctggctgaatccatgggcttgaaagtgctgttctatgatgtgctgaagaaacttccactggggaatgccatggtacagaactcgctggaagatcttttgcgcagttcagactttgtgacattgcacgtgcctgaaactccggaaaccaaagacatgattggcgcccgtgaactgtcgatgatgaaaaaaggcagcttcctgatcaacgccagccgtggcaccgtggtggtgattgacgatctggtgaagtcccttcaggaaaaacatctggcgggttgtgcgatcgacgtgtttccggaagagccggcatcgaacaaagaaaaattcaaatccccattgcagggaattcccaacgtgattctgactccgcacatcgcgggcagcacggaagaagcccagtatgccatcggccttgaagtggcggaaagcttccgtcgttatctgaaaatcggttcttcgccgggggcggtgaatttcccgaatgtggatctgcccgtgaagcaagggacatcccgtattttgaacgtgcaccgcaatgagccgggtgtcttgggtgaaatcaacggcttgatttccaaagccggtgcgaatatcgaaggtcagtatctgtcgacggatgaaaagatcggttatctggtcatggacttgcattcaagtcaggcgcacacactggcggcggatatcgagaaactttcccgttccatccgcacacgcgtggtttactag

SEQ ID NO: 1308 - protein, 401 aa, Bdellovibrio bacteriovorus HD100
MSAQRILLVENIHTVAKERLEEEGYKVDLITHAPSEDELLKILPNYDVLGIRSKTEVTKKVLDSNKHLVTIGCFCIGTNQVDLLTARERGIPVFNAPHSNTRSVAELVIAEMISLSRQLGDRNTQAHLGEWVKSAVGSKEVRGKTLGIVGYGHIGSQVSILAESMGLKVLFYDVLKKLPLGNAMVQNSLEDLLRSSDFVTLHVPETPETKDMIGARELSMMKKGSFLINASRGTVVVIDDLVKSLQEKHLAGCAIDVFPEEPASNKEKFKSPLQGIPNVILTPHIAGSTEEAQYAIGLEVAESFRRYLKIGSSPGAVNFPNVDLPVKQGTSRILNVHRNEPGVLGEINGLISKAGANIEGQYLSTDEKIGYLVMDLHSSQAHTLAADIEKLSRSIRTRVVY

SEQ ID NO: 1309 - DNA, 1572 bp, Methanococcus maripaludis S2
  CDS (1)..(1572): transl_table=11
atgtcaaaaatacttataactgacccgctgcatgaaagtgccgttgaaatattaaaacaggcaggcgaagttgaagttgcaaccgggttaactgttgaagagctaaaattaaaaattaaagatgtagatgcgctggtaattagaagtggaacaactgctacaagagaaattatcgaagcatcagaaaatttaaaagttattgcaagagctggagttggtgtagataacgtagatttagatgcagcaacagaaaaaggaatagttgtggtaaatgcaccagatgcatcgtcaatttcagttgcagaacttttatttggtatgatgctcgcagcagcaagaaatatccctcaagctactgcatcaattaaaagcggtaaatgggacaggaaatcatttaaaggaatggaaatttacggaaaaacgctaggaattgttggtcttggtagaattggacagcaagttgcaaaaagagctcaagcttttggaatgacaattgttgcgtatgatccatatattccagaagatgttgcatcagaacttggaataaaattgttaactgtagatgaactgtgcaccgtaagtgactttataacacttcacgttccattaactcccaaaacaaaacatatgattggaaaagagcagattgcacttatgaaaagcaacatggttatcatgaactgtgcaagagggggattaattgatgaagctgcactttatgatgcattaaacagcggaaaaattaaagcagctgcattggatgtatttgaacaagaacctccaaaagaaagtcctcttttaacacttaataatttaattggaactccacaccagggagcttcaacagaagaagcacaattgagtgcaggaacaattgttgcagaacaaaccgttaaaatattgaaaggagagtctgcagaaaatgttgtaaacctcccaatggttccaactgaaaaaatgaaaaaattaaaaccttacatggttttagcggaaaaaatgggttcaatggcaatacagtaccttgataactcgatagaacttttagaaatcacttacatgggcggccttgcaaaagaaaagactgaaatactaaaaagatcatttttgaaaggtattttggcaccaatattacttgcaggcgttaatttagtgaacgctccagtgattgcgaaaagcagaaacataaaaattgcagaaggcacaatgtctgaaagcgactatggaaattcaataaaaatttctgcaaaaggtgaaaacgacgaaatttcaataattggaagcattgaacataacgaagtcgtttttagagaaattaatggatacagaatggatataaaacctgaaggaacaatctgcatcataaaacacatcgacagacccggaatggttggaaaagttggagttcttcttggtgaacacggaataaatattgcaggaatgcaagttggaagaagagagcctggaggacacagcataatgtttttagatattgaccacatgatttcagatgaagtactcgatgaaatcaggaaaatggaaaacgtaagagctgcaaaatcaataaacatctaa

SEQ ID NO: 1310 - protein, 523 aa, Methanococcus maripaludis S2
MSKILITDPLHESAVEILKQAGEVEVATGLTVEELKLKIKDVDALVIRSGTTATREIIEASENLKVIARAGVGVDNVDLDAATEKGIVVVNAPDASSISVAELLFGMMLAAARNIPQATASIKSGKWDRKSFKGMEIYGKTLGIVGLGRIGQQVAKRAQAFGMTIVAYDPYIPEDVASELGIKLLTVDELCTVSDFITLHVPLTPKTKHMIGKEQIALMKSNMVIMNCARGGLIDEAALYDALNSGKIKAAALDVFEQEPPKESPLLTLNNLIGTPHQGASTEEAQLSAGTIVAEQTVKILKGESAENVVNLPMVPTEKMKKLKPYMVLAEKMGSMAIQYLDNSIELLEITYMGGLAKEKTEILKRSFLKGILAPILLAGVNLVNAPVIAKSRNIKIAEGTMSESDYGNSIKISAKGENDEISIIGSIEHNEVVFREINGYRMDIKPEGTICIIKHIDRPGMVGKVGVLLGEHGINIAGMQVGRREPGGHSIMFLDIDHMISDEVLDEIRKMENVRAAKSINI

SEQ ID NO: 1311 - DNA, 1344 bp, Yersinia pestis biovar Microtus str. 91001
  CDS (1)..(1344): transl_table=11
ttgtattgctgcttacgtaatatttgttatgttgacagggtgctgaccggattcattcgatatcggcagccgcatctgaagtctgaaaatagggtcggggacatggcaaaagtatcactggagaaagacagaattaagtttctgttagtggaaggggtgcaccagagcgcggttgataacctgcgtgcagccggatatagcaatattgaataccataaaggtgccttagacgccgaatcactgaaggcatccattcgtgatgctcactttatcggaattagatcgcgcactcatctttccgaagacgtttttgcggcagcagaaaaattggttgctgtggggtgtttctgtatcggtactaaccaggttgatttaaaagcggcgaccaaacgtggtgtgccagtattcaatgcgcctttctccaatacccgttcggtagccgaaatggtattgggtgagttgctgctgatgttccgaggcattccgtctgctaacgcgaaagcgcaccgtggcgagtggaacaagttggcggtaggttccttcgaggcccgaggtaagaagctggggattatcggttacggtcatatcggtactcaactggggattctggctgaaagtatcggtatgaaagtcttcttttacgacatcgaaaataaactgtcgttagggaatgcgcagcaagttcgccaactgtcagatttactgaatatgagtgatgtggtcagcctgcatgtaccggaaaaccacactaccaagaatatgattggcgctgagcaattggcacagatgaagccgggtgcgctgttgattaatgcctctcgcggcaccgtggtcgatattccggccctgtgcgatgcgctgtccagcaatcacttgtcaggtgcggcaattgacgtcttccctgaagagcctgcgaccaataaagacccgttcaattcaccactgtgtgaatttgataatgtgttactgaccccgcatattggcggttctactcaggaagcgcaggagaatatcggtgatgaagtcgcgggtaagctggcgaagtattccgataatggctcaacgctatctgcggtgaatttccccgaagtttctctgccagcacatggtgataatacccgtcgcctgttgcatattcatgaaaaccggccaggcattttgaccagcattaacaccatttttgctgagcagaatgtcaatatcgcggcacagtatctacaaaccagcgctgatattggttatgtcgtgattgatgttgaaaccgatgatgcagataatgcggaaaaagccttgcaggcgatgaaggccattccagggacgatccgcgctcgcttattgtactaa

SEQ ID NO: 1312 - protein, 447 aa, Yersinia pestis biovar Microtus str. 91001
MYCCLRNICYVDRVLTGFIRYRQPHLKSENRVGDMAKVSLEKDRIKFLLVEGVHQSAVDNLRAAGYSNIEYHKGALDAESLKASIRDAHFIGIRSRTHLSEDVFAAAEKLVAVGCFCIGTNQVDLKAATKRGVPVFNAPFSNTRSVAEMVLGELLLMFRGIPSANAKAHRGEWNKLAVGSFEARGKKLGIIGYGHIGTQLGILAESIGMKVFFYDIENKLSLGNAQQVRQLSDLLNMSDVVSLHVPENHTTKNMIGAEQLAQMKPGALLINASRGTVVDIPALCDALSSNHLSGAAIDVFPEEPATNKDPFNSPLCEFDNVLLTPHIGGSTQEAQENIGDEVAGKLAKYSDNGSTLSAVNFPEVSLPAHGDNTRRLLHIHENRPGILTSINTIFAEQNVNIAAQYLQTSADIGYVVIDVETDDADNAEKALQAMKAIPGTIRARLLY

SEQ ID NO: 1313 - DNA, 1266 bp, Magnaporthe grisea 70-15
  CDS (1)..(1266)
atggcgacacctcaggatattttaaatcctaacaggattcaagaatacgccgtggccgtctcaacgtcaccttccgcaactttctcgccaccaccgagcagtactagcatcagctttggtgctttggctcatggacaggcgcctagagggacagcaaaaccgctgaagcccttcaacacaaccgacatcaagattctgctgcttgagaatgtgaaccagagcggtcaggacatcttgagggaacagggctaccaggtcgaagcacacaagacttcattaccagaagaccagctgatcgagaagatccgcagtgtgcacgtcattggtatccggtcaaaaactagactctcagaaaaggtgctccgtgaggccaagaacctgctcgtcgtgggctgcttctgcattggaaccaatcaggtagacctcgagtacgcggcgcgtcatggaattgctgtcttcaactcccccttcgccaactcacgcagtgtggcagagctggtcatagccgagatcatcaccctggcccggcagctgggtgatcggtccaatgagatgcaccgtggaacttggaacaagtcatatactacgacgtcgtcgacgctcatggccctgggcaaggcagtccaggtgtccaagctagaggacctgctgcgcgagtccgactttgttacgctgcacgttcccgccacccctgagaccaaaaacatgatctcaaacgctcagctgaaccagatgaagaccggctcatatctgatcaacgcttcccgagggacggtggtggacattcctgcgctgataaacgccatgcgcgctggcaagattgcgggtgcggcgctggacgtgtacccgaacgagccggcggccaacggagactacttcaacaaccagctcaacacctggggcgaggaccttcgtaccctgaacaacatcatcctgaccccacacatcggcggcagcaccgaggaggcccagcgggcgattggtgtcgaggtcgccgacgcgctggtgcggtacatcaaccagggagtgacgctcggtagcgtcaacctgcccgaatgcaacctccggtcgctgacgctcgaggagcccgaccacgcccgcatccatctatgttcatcggcaaacgttgccctgatttccgacagcaagggcgatgtcgcctatctgatggcggatatcagcgacgtcaagcagggcgacatcaagcagatccacgatgccctggagtcactgagctcacgtataattacccgtgttttgttttga

SEQ ID NO: 1314 - protein, 421 aa, Magnaporthe grisea 70-15
MATPQDILNPNRIQEYAVAVSTSPSATFSPPPSSTSISFGALAHGQAPRGTAKPLKPFNTTDIKILLLENVNQSGQDILREQGYQVEAHKTSLPEDQLIEKIRSVHVIGIRSKTRLSEKVLREAKNLLVVGCFCIGTNQVDLEYAARHGIAVFNSPFANSRSVAELVIAEIITLARQLGDRSNEMHRGTWNKSYTTTSSTLMALGKAVQVSKLEDLLRESDFVTLHVPATPETKNMISNAQLNQMKTGSYLINASRGTVVDIPALINAMRAGKIAGAALDVYPNEPAANGDYFNNQLNTWGEDLRTLNNIILTPHIGGSTEEAQRAIGVEVADALVRYINQGVTLGSVNLPECNLRSLTLEEPDHARIHLCSSANVALISDSKGDVAYLMADISDVKQGDIKQIHDALESLSSRIITRVLF

SEQ ID NO: 1315 - DNA, 1764 bp, Chlamydomonas reinhardtii
  CDS (1)..(1764)
atggcgtggagcctcgcggaccgagcggtccgccgctccgctgctgctgctcggcggccggcggccggccgcaggtgctgcgctcgggtagaagctgtgtatgcgacgcatcgggccacggtgctggtcacggagaagctgggtgatgcgggcctggaccggctgcggctgacatgcaacgtggagactgcgtacggcctgacgcaggaggagctgtgcgccaaggtgtcactggtggatgcgctgattgtgcggtcggggacaaagcgtgtgacgcgcgccgtgttcgaggccagccacgggcggctcaaggtggtggggcgcgcgggcgtgggcgtggacaacgtggacctggccgccgccacggaggcgggctgcctagtggtgaacgcgcccaccgccaacaccgtggcggcggcggagcacggcatcgcgctgctgtgcgccatggccaggaacatcccgcaggccgacgcctccatgaaggccgggtcctgggaccgcagcgcctacgtgggcaccagcctggctggcaagaccattgcggtgtacggcttcggcaaggtgggctcggaggtgtcccggcgcgcccgcgggctgggcctcacggtggtggcctacgacccctacgccagcgccgagaaggcggcggcgcagggcgtgcagctggtcaccttcgacgaggcgctgcaggtggccgacttccacacgttgcacatgccgctgacgcccggcaccaagggcctgttcaacgactcggcctttgcgcgcatgaagcgcggcgcacgcatcatcaacgtggcccggggcggtgtcatcgacgaggcagccctgctgcgcgcgctggagtccaagcaggtggcgcaggcggctctggacgtgttcctggaagagccgcccagcttcgagaaccacccgctggtgcaccggccggacgtgatctgcacgccacacctgggcgccagcaccacagaggcgcaggagggcgtggcgctggaggtggtggaggcggtggtggacgcactggcaggcaacctcagcgtcaacgcagtcaacgcgcccatggtgccggcggagatcctccgcgagctgcagccctacatcgtgctggctgaggggctgggccgcgccgccgtgggcctaggcggcaagggcgggttcggggacatcgccatcacctactcctcgccgcgcggcgacgacctggacacacggctgctgagggccatggtcatcaagggcgtgcttgaggagaccaccaccagcaaggtcaacctggtcaacgccgacctgctggcgcgcaaccgcggcctgcgcatcaccgaggtctccatccgcgccggcggcgacggcacgtccgaggtgctgaccagcatgagtgtggcgctgggcacagccgactccaagttctcagcggcggtggacagcggtaatacttatgggaggtgggccgaggcgccgtggagcaaggcgggggtgggggggcagcatgatgctgaagtcgcctcttccttgcccttcccctcggggatgtgtgtgggattggctgggccgggggaaggggggcgtccgagggatggaaggggaggggaggggcagacgacgcccttcatgactgtgtcgcgcacggccaaggacggcgaggccatcatggccatcggcatcgacagcgagcccagccccgccaccctggaggagatcacgcgcgtcaagggcgtcatcgaggtcaccatcttcaaggaggtggcgccgccgcagcggtga

SEQ ID NO: 1316 - protein, 587 aa, Chlamydomonas reinhardtii
MAWSLADRAVRRSAAAARRPAAGRRCCARVEAVYATHRATVLVTEKLGDAGLDRLRLTCNVETAYGLTQEELCAKVSLVDALIVRSGTKRVTRAVFEASHGRLKVVGRAGVGVDNVDLAAATEAGCLVVNAPTANTVAAAEHGIALLCAMARNIPQADASMKAGSWDRSAYVGTSLAGKTIAVYGFGKVGSEVSRRARGLGLTVVAYDPYASAEKAAAQGVQLVTFDEALQVADFHTLHMPLTPGTKGLFNDSAFARMKRGARIINVARGGVIDEAALLRALESKQVAQAALDVFLEEPPSFENHPLVHRPDVICTPHLGASTTEAQEGVALEVVEAVVDALAGNLSVNAVNAPMVPAEILRELQPYIVLAEGLGRAAVGLGGKGGFGDIAITYSSPRGDDLDTRLLRAMVIKGVLEETTTSKVNLVNADLLARNRGLRITEVSIRAGGDGTSEVLTSMSVALGTADSKFSAAVDSGNTYGRWAEAPWSKAGVGGQHDAEVASSLPFPSGMCVGLAGPGEGGRPRDGRGGEGQTTPFMTVSRTAKDGEAIMAIGIDSEPSPATLEEITRVKGVIEVTIFKEVAPPQR

SEQ ID NO: 1317 - DNA, 1425 bp, Gibberella zeae PH-1
  CDS (1)..(1425)
atgattgagatccatgctattgacggccgagagcggactacggcagcttcaccaaacatgacgaagccgcaaggctgggaccaaaacgctgccacttcaccgctcgcctctttccagtccccccccagcctcagtgctgccctccctaaccgtggcgcgcccaagaacctcaagcccttcaacaccaaggacatcaagattctacttctcgagaatgtcaatgtcactggacaagaaattctgaaggcccagggctaccaggtcgaggctctcaagacctctcttcctgaggaccagctcattgagaagattcgcgacgtccaagtcattggtatccgatccaagacaaagctcaccgagaaggtcctccgtgaggccacaaacctcctcgtcatcggctgcttctgtattggtaccaaccaggtcgacctcgagtttgccgccaagaatggtatcgccgtcttcaactcccccttcgccaactcgcgcagtgtcgctgagcttgtcattgccgagatcatcacccttgcccgtcaactcggcgaccgatccaacgagatgcaccgtggtacctggaacaaggtcagctccaagtgctgggagattcgaggcaagactttgggaattgtcggctacggtcacattggttctcagctgtctgtcctcgctgaggctatgggtatgaacgtcatctactacgatgtcgttaccctgatggctcttggtaccgccagccaggtccctactcttgagaagcttctgggcgaggccgactttgtcaccctccacgtccccgatctccccgagactcgcaacatgatctccactgctgagttcgagcagatgaagactggttcttaccttatcaacgccagccgtggtagcgtcgtcgacattgccgctctcatcaaggccagccgctccggcaaggtcgctggtgctgctcttgatgtgttcccctccgagcccgccgccaacggtgactacttcaccaacgacctcaatgtctggggcgaggacctccgaagcttgaagaaccttattctgactccccacatcggtggtagcaccgaggaggcccagcgtgctatcggtatcgaggtcagcgaggctttggtgcgttacatcaaccagggtatcactctgggcagcgtcaacatccccgaggtccagctgcgttcgctgacttcggacgaacccgacaccgctcgtgtcatcttcattcaccgaaacgtccccggtgtgctccgaaaggtcaacgaaattctgggagatcacaacgtcgacaagcagatttccgacagtagaggtgacaacgcctacctgatggctgatatcagcaacatcaagtatgagcaaatcaaggatatctacgacagccttgaaggtcttagcgctcgcgtcatgacccgtatcttgtactaa

SEQ ID NO: 1318 - protein, 474 aa, Gibberella zeae PH-1
MIEIHAIDGRERTTAASPNMTKPQGWDQNAATSPLASFQSPPSLSAALPNRGAPKNLKPFNTKDIKILLLENVNVTGQEILKAQGYQVEALKTSLPEDQLIEKIRDVQVIGIRSKTKLTEKVLREATNLLVIGCFCIGTNQVDLEFAAKNGIAVFNSPFANSRSVAELVIAEIITLARQLGDRSNEMHRGTWNKVSSKCWEIRGKTLGIVGYGHIGSQLSVLAEAMGMNVIYYDVVTLMALGTASQVPTLEKLLGEADFVTLHVPDLPETRNMISTAEFEQMKTGSYLINASRGSVVDIAALIKASRSGKVAGAALDVFPSEPAANGDYFTNDLNVWGEDLRSLKNLILTPHIGGSTEEAQRAIGIEVSEALVRYINQGITLGSVNIPEVQLRSLTSDEPDTARVIFIHRNVPGVLRKVNEILGDHNVDKQISDSRGDNAYLMADISNIKYEQIKDIYDSLEGLSARVMTRILY

SEQ ID NO: 1319 - DNA, 1401 bp, Candida glabrata CBS 138
  CDS (1)..(1401)
atggatattaaccctcttcaagattctttccaaagagcaatgaacctgtcaagatcaccaggtgctgtttccacttcacctactcaatcattcatgaacactctaccccgtcgtttgagtgtctcaaagcaacagaaagcccttaaaccattctctacaggtgatatgagaatccttctactggaaaatgtcaaccaaactgctgttgacattttcaaggaccaaggttatcaagtcgagttttacaaatcctctctaccggaagaagagttaattgaaaagattaaggatgtacatgctattggtattagatcgaaaacgaagctaactgccaatatcttgaagcacgctaagaacctagtcgttattggttgtttctgcatcggtacaaatcaagttgaccttgattatgctgcaagcatcggtgttgccgtgttcaactctcctttctcaaactctagatccgtcgctgaactagtcattgctgaaatcatctcccttgctagacaattgggtgacagatccatcgaattacacaccggaacatggaataaggtttctcagaaatgttgggaagtcagaggcaagacacttggtgttgttggttatggtcatattggttcccagttatctgttcttgccgaatctatgggtatgcatgtattatactacgatattgtcaccattatggctttaggtaccgctaagcaggtttctacgctagatgagcttttgaacaagtctgatttcgttactttacatgttccagaaactccagaaaccaaaaacttattgtcggccccacaatttgctgctatgaaggatggtgcttacgtcatcaatgcatccagaggtactgttgttgacatcccatctctaatccaagctatgaaggcaggtaagattgctggtgcagctttggatgtttatccaaatgaaccagcaaagaatggtgccgatgcattctccgataaattgaacaactggacctcagaattagtttcactgccaaatgtcatccttaccccacacatcggtggttccactgaagaagcacaaagtgctatcggtatcgaagttgcacatgctttgagtaaatacataaatgaaggtatttccgttggatcagtaaacttcccagaagtctccttgagatcgctagacttggaccaagaaaacactgtgcgtgttctatacatccacaagaatgttccgggtgtgttgaagacggtcaacaacattttatcaaaccacaatatcgaaaagcaattttccgattcctgtggtgagattgcctacctgatggctgacatttcagatgtgaaccaaagtgatatcaaacaaatctacgatgaattggataagacttcatcaaagatttccatcagacttctatattag

SEQ ID NO: 1320 - protein, 466 aa, Candida glabrata CBS 138
MDINPLQDSFQRAMNLSRSPGAVSTSPTQSFMNTLPRRLSVSKQQKALKPFSTGDMRILLLENVNQTAVDIFKDQGYQVEFYKSSLPEEELIEKIKDVHAIGIRSKTKLTANILKHAKNLVVIGCFCIGTNQVDLDYAASIGVAVFNSPFSNSRSVAELVIAEIISLARQLGDRSIELHTGTWNKVSQKCWEVRGKTLGVVGYGHIGSQLSVLAESMGMHVLYYDIVTIMALGTAKQVSTLDELLNKSDFVTLHVPETPETKNLLSAPQFAAMKDGAYVINASRGTVVDIPSLIQAMKAGKIAGAALDVYPNEPAKNGADAFSDKLNNWTSELVSLPNVILTPHIGGSTEEAQSAIGIEVAHALSKYINEGISVGSVNFPEVSLRSLDLDQENTVRVLYIHKNVPGVLKTVNNILSNHNIEKQFSDSCGEIAYLMADISDVNQSDIKQIYDELDKTSSKISIRLLY

SEQ ID NO: 1321 - DNA, 1413 bp, Kluyveromyces lactis NRRL Y-1140
  CDS (1)..(1413)
atggctttcggtcaacagatcaataatttacaggattccttcgaggctgctttgaacttatccagttctccaggtgcagtttccacctctccaactcaatcctttatgaacacattgccacacagaatcaatgctgcaaagcaacagaaggctttgaagccattctctacgggtgacatcaagatccttcttttggagaatgttaaccaaacagctattgagattttcaacaagcaaggttatcaagtcgaattccacaaatcctctttaccagaagccgaattgattgagaagatcaaggatgtccacgccattggtatcagatccaaaactaagttgacaccggaaattttgaaacacgctaagaatttggttgtcattggttgtttctgtattggtactaaccaagttgaccttgacttcgctgccaagcatggtattgctgttttcaactctccattttccaactccagatctgttgccgaactagttattgcagaaatcattaccctagctagacaattaggtgacagatctattgaattacacaccggtacttggaacaaggtttctgctgcctgttgggaagtaagaggtaagactttgggtatcatcggttacggtcatattggttctcaattatctgttttggctgaagctcttggtatgaacgttctctactatgatattgtcactattatgagtttgggtactgctaagcaggtttctactttgaatgaattgttgaacaattctgactttgtgacttgtcatgttccagctactccagaaactaaaaacttattgtctggtcctcaatttgctgctatgaaggatggctcatacgttatcaacgcatctagagggactgtggttgatattcctgctttgattcaagcaatgagagcgggcaagattgccggtgccgctttggatgtgtatccaaatgaacctgctaagaatggtgctggtgccttcagtgataatttgaacacatggacaactgatttggtctccttaccaaatgttatcttgactccacacattggtgggtctactgaagaagcccaaagttctattggtatcgaagtggctactgcactaacgaaatacatcaacgaaggtaacaccgtcggtgccgttaacttcccagaagtttcattaagagcattagatctggatcaagaaaacactgtacgtgtactatatatccatcaaaatgttcctggtgttttgaaaactgtcaacaacatcttgtccaaccacaacatcgaaaagcagttctctgattctaacggggacatcgcatatttgatggctgatatttcaaatgttaaccaaagtgatatcaaacaaatatacgatgagttgaacgaaactgactacaagatttcaatcagattactatattaa

SEQ ID NO: 1322 - protein, 470 aa, Kluyveromyces lactis NRRL Y-1140
MAFGQQINNLQDSFEAALNLSSSPGAVSTSPTQSFMNTLPHRINAAKQQKALKPFSTGDIKILLLENVNQTAIEIFNKQGYQVEFHKSSLPEAELIEKIKDVHAIGIRSKTKLTPEILKHAKNLVVIGCFCIGTNQVDLDFAAKHGIAVFNSPFSNSRSVAELVIAEIITLARQLGDRSIELHTGTWNKVSAACWEVRGKTLGIIGYGHIGSQLSVLAEALGMNVLYYDIVTIMSLGTAKQVSTLNELLNNSDFVTCHVPATPETKNLLSGPQFAAMKDGSYVINASRGTVVDIPALIQAMRAGKIAGAALDVYPNEPAKNGAGAFSDNLNTWTTDLVSLPNVILTPHIGGSTEEAQSSIGIEVATALTKYINEGNTVGAVNFPEVSLRALDLDQENTVRVLYIHQNVPGVLKTVNNILSNHNIEKQFSDSNGDIAYLMADISNVNQSDIKQIYDELNETDYKISIRLLY

SEQ ID NO: 1323 - DNA, 1398 bp, Debaryomyces hansenii CBS767
  CDS (1)..(1398)
atgtctgttccacaacaaatcagtgaaacttttcaaaaagctatgaatctttcgggatctccaaatgctgtttcaacttcccctactcaatcatacatgagtcagtatgtctcggctacccaaaagccaaccaaagctttaaagccattttctactggtgatattaagattttgttattagaaaatgtgaatcaaactgctattagtattttccaaaatcaaggttaccaagttgaattctacaagtcgtctttaggtgaagaagaattgatcgaaaagatcaaggaagtacatgctattggtatcagatccaaaactaaattaaccgaaaagattttgcaacacgccagaaacttagtggttattggttgtttctgtattggtaccaaccaagttgatttagaatacgctgccaagtcaggtatttctgttttcaactctccattttctaactccagatctgttgctgaattggttattgctgaaattatcaccttagccagacaattaggtgatcgttctattgaaatgcacactggtacctggaacaaggtaagtgctaagtgctgggaaattagaggtaagactttagggattattggttacggtcatatcggttctcaattatctgtcttagctgaagctatgggtatgaacgttatttactacgatgttcaaatgatcatggctttaggtaactcaaaacaagttgacaccttagatgacttgttacaaagggccgatttcgtcaccctccatgttccagaaacctccgatactaagaacttattatcgtctccacaatttgctgccatgaaggatggtgcctatgttatcaacgcttcccgtggtaccgtggtcgatattgctgctttagtacaagctatgaaatcaggcaaaatcgcaggtgctgcattagatgtctacccacaagaaccagcaaagaatggtgaaggttatttcagcaatgaattaaatgactgggcttctgaattatgctccttgagaaacgttatcttatctccacacattgggggttctaccgaagaagctcaatctgctatcggtgtggaagttgccacctcgttaacgaaatacattaacgaaggtaactccactgctgctgttaacttcccagaagtccaattgagagctttagatttagatcaacaaaactctgtcagagtattgtatatccatcaaaacgttcctggtgttttaaagactgttaacaacatcttatcaaatcacaatattgaaaagcaattcagtgattctagagatgatgttgcatacttgatggctgatatctctgatgttgacattactgacatcaagtccttatatgaacagttagagcaaactccatataaaattgccactcgtttattatactaa

SEQ ID NO: 1324 - protein, 465 aa, Debaryomyces hansenii CBS767
MSVPQQISETFQKAMNLSGSPNAVSTSPTQSYMSQYVSATQKPTKALKPFSTGDIKILLLENVNQTAISIFQNQGYQVEFYKSSLGEEELIEKIKEVHAIGIRSKTKLTEKILQHARNLVVIGCFCIGTNQVDLEYAAKSGISVFNSPFSNSRSVAELVIAEIITLARQLGDRSIEMHTGTWNKVSAKCWEIRGKTLGIIGYGHIGSQLSVLAEAMGMNVIYYDVQMIMALGNSKQVDTLDDLLQRADFVTLHVPETSDTKNLLSSPQFAAMKDGAYVINASRGTVVDIAALVQAMKSGKIAGAALDVYPQEPAKNGEGYFSNELNDWASELCSLRNVILSPHIGGSTEEAQSAIGVEVATSLTKYINEGNSTAAVNFPEVQLRALDLDQQNSVRVLYIHQNVPGVLKTVNNILSNHNIEKQFSDSRDDVAYLMADISDVDITDIKSLYEQLEQTPYKIATRLLY

SEQ ID NO: 1325 - DNA, 1536 bp, Yarrowia lipolytica CLIB122
  CDS (1)..(1536)
atgaaatggatgcgtcatagttcagacaaaatttcgaacctaaaacggcccacagataaaacggtgcattgtcgcacatacgaacagaccagtcgtcgttacatcgccaacaacccccgccacaccatgtccgccgtcaacattcccgtgaacgaaaacgaggtttcggtctcgtcttcgcccatcacgtcgtacggatcgcccgtctcgggctcgttccagggcaagccccgacagcgacgatactcttacaccgctgcgcgaaccaacaagctgaagccgttttccaccggcgacatcaagatcctgctgctggaaaacgtcaaccagacagccattgacattctcgagggccagggctaccaggtggagacccacaagtcgtcgctggacgaggaggagctgattgagaagatccgagatgtgcaggtggttggtatccgatccaagaccaagctcaactcacgggtgctcaaggaggccaagaacctcattgccattggttgtttctgcatcggtaccaaccaggtcgatctcgagtacgccgccaacaacggtattgccgtgttcaactcgcctttctccaactcgcggtctgtggccgagctggtcatctgcgagatcatcatgctgtcgcgacagctgggcgaccgaaacatcgagatgcacgccggcacctggaacaaggtctccgccaagtgctgggagatccgaggcaagactctcggaattgtgggctacggccacattggctcccagctgtccgttctcgccgagtccatgggcatgaacgtcatttactacgacgtgatcatgatcatgggtctcggtaccgccaagcaggtgcccacccttgccgagctgctggcccaggccgactacgtctctctgcacgtgcccgagctgcccgagaccatgaacctcatgtccaaggcccagttcgacggcatgaagaacggctcgtacctcatcaacaacgcccgaggcaaggtcattgacattcccgagctcatctctgccatgaagtccggaaagcttgctggagccgccgtcgacgtcttccccaaggagcctgccaagaacggctcaaacgagtttggctcccacctcaacgagtggaccaatgagctcctcaccctgcccaacctcatcatgtctccccatattggaggctccaccgaggaggcccagtccgccattggtatcgaggtcggcaccgctctcaccaagtacatcaacgagggttcctctgttggtgccgtcaacttccccgaggtcaacctcaacgtggtcaaccacgccgaggagcacgaccacgtgcgaatcctgtacgtgcataagaacgtgcctggtgtgcttctgtccgtcaacgagattttcgcctcccataacattgagaagcagtactctgagtcgcgtggtgatattgcctacctgatggccgacattgctgacgtcgatcaggccgacatcaagactctgtacgagaagctcgagcagacccccttcaagatctccacccgactgttgtattaa

SEQ ID NO: 1326 - protein, 511 aa, Yarrowia lipolytica CLIB122
MKWMRHSSDKISNLKRPTDKTVHCRTYEQTSRRYIANNPRHTMSAVNIPVNENEVSVSSSPITSYGSPVSGSFQGKPRQRRYSYTAARTNKLKPFSTGDIKILLLENVNQTAIDILEGQGYQVETHKSSLDEEELIEKIRDVQVVGIRSKTKLNSRVLKEAKNLIAIGCFCIGTNQVDLEYAANNGIAVFNSPFSNSRSVAELVICEIIMLSRQLGDRNIEMHAGTWNKVSAKCWEIRGKTLGIVGYGHIGSQLSVLAESMGMNVIYYDVIMIMGLGTAKQVPTLAELLAQADYVSLHVPELPETMNLMSKAQFDGMKNGSYLINNARGKVIDIPELISAMKSGKLAGAAVDVFPKEPAKNGSNEFGSHLNEWTNELLTLPNLIMSPHIGGSTEEAQSAIGIEVGTALTKYINEGSSVGAVNFPEVNLNVVNHAEEHDHVRILYVHKNVPGVLLSVNEIFASHNIEKQYSESRGDIAYLMADIADVDQADIKTLYEKLEQTPFKISTRLLY

SEQ ID NO: 1327 - DNA, 1647 bp, Aspergillus nidulans FGSC A4
  CDS (1)..(1647)
atgtcatattgtcatggacaggttattgtcagacttgagattgattgggacgaacttgacaaaacccgcaacggtgctttgctccggacacatagagagtcgcctttcaattctcatccaaattacaaggacagacaaacgctagaagtttgttacaataaatcacattccgcgcctttgatagtagaaatcatggctgcgtctgcaagggacatcaaaactggcaaagatacgttgagccttaatgtttcgcagagccagagtttctcgacttcaccgaacgcttcttttcagtccgctccgtctagccatagtggctcggctttcgcaacccgcttgggcccaatcatcaatgcgaagcacctgaagccgtttgctacagaggatatcaaagttttgctcctggaaaacgtaaaccagactggccgggatatcctcagcaaacaaggatatcaagtggaattcctcaagtcgtcgcttcccgaggatgaacttatagagaagatccgagacgtccatgtgattggaatccgttcaaagaccaagttgacggagcgcgttctaaaggaggcccgtaatctcatagttatcggttgcttttgtattggaacaaaccaggtcgacctgcaatatgcggcggagcatggtattgcagtattcaattcccctttcagcaattctcgaagtgtggctgagttggtcatttgtgaaatcatcgctcttgctcgccaacttggggatcgttccaatgaaatgcacaatggtacttggaacaagaccccaactcctgctcatgatcagactgactcttttcttaaaggcatcatcgggtatggtcacatcggttctcagctttcggttctagcagaggctatgggaatgtccgtcattttttacgacgtggtaaatctcatggagctaggcacggcgcgccaagtttcgaccctagatgacctcctgtctgaggctgatttcattacgtgccatgtgcccgagcttcctgaaacgaagaacatgctggggccaaggcagttcgagcttatgaaagatggtagttatttaatcaatgccagcagggggactgtcgtcgatatacctgccctgatacacgcgatgcgatccggcaagattgcgggtgctgctcttgatgtttatccaaatgaacccgccggaaatggagattacttcaacaacgagctaaactcttggggaactgatctccgttccctgaagaacctcatcctgactccacacattggtggtagtactgaggaggcacagcgtgcaattggcgttgaggtcgcggaagctttggttagatatgtcaacgaaggttccaccttaggcgctgtcaatcttccagaggtcacccttcgttctctcacaatggatgaaccggatcatgctcgggttatatacatccatcacaacgtccccggtgttttgcggaaagtcaatgagatccttggcgatcataacgttgataagcaaatgacggacagtagaggagatgtcagacacttcattacgctgccattagttgcctacttgatggctgatatcagcaacgtcgataacgcgacgatcaaggacttatacgagagactcgaaagtctttcatgtattgaaaccccttcacctatttag

SEQ ID NO: 1328 - protein, 548 aa, Aspergillus nidulans FGSC A4
MSYCHGQVIVRLEIDWDELDKTRNGALLRTHRESPFNSHPNYKDRQTLEVCYNKSHSAPLIVEIMAASARDIKTGKDTLSLNVSQSQSFSTSPNASFQSAPSSHSGSAFATRLGPIINAKHLKPFATEDIKVLLLENVNQTGRDILSKQGYQVEFLKSSLPEDELIEKIRDVHVIGIRSKTKLTERVLKEARNLIVIGCFCIGTNQVDLQYAAEHGIAVFNSPFSNSRSVAELVICEIIALARQLGDRSNEMHNGTWNKTPTPAHDQTDSFLKGIIGYGHIGSQLSVLAEAMGMSVIFYDVVNLMELGTARQVSTLDDLLSEADFITCHVPELPETKNMLGPRQFELMKDGSYLINASRGTVVDIPALIHAMRSGKIAGAALDVYPNEPAGNGDYFNNELNSWGTDLRSLKNLILTPHIGGSTEEAQRAIGVEVAEALVRYVNEGSTLGAVNLPEVTLRSLTMDEPDHARVIYIHHNVPGVLRKVNEILGDHNVDKQMTDSRGDVRHFITLPLVAYLMADISNVDNATIKDLYERLESLSCIETPSPI

SEQ ID NO: 1329 - DNA, 1392 bp, Candida albicans SC5314
  CDS (1)..(1392): transl_table=12
atgtcatctcctcaacaaattgtcaactcattccaacaagccttgaatttatcaggatctccaaatgctgtttctacatcaccaactcaatcattcttgagtcaatatgttccaagcaagccagctaaagctttgaaacctttcaaaactggtgatatcaaaattttattattggaaaatgttaaccaaactgccataaatattttcaaaaaccaaggttaccaagttgaattttataaatcatcattacccgaagatgaattattagagaaaatcaaagatgttcatgccattggtattagatcaaagactaaattaacagaaaaaatccttaaagctgctaaaaacttggtggttattggttgtttctgtattggtaccaatcaagttgatttggaatttgctgccaaatcaggtatcgctgttttcaactctccattttcaaattctagatcagttgctgaattagtcattgctgaaatcattactttggctagacaattgggtgatcgttcaatcgaattgcacactggtacttggaataaagtcagtgccaaatgttgggaaatcagaggtaaaactttgggtattgtaggttatggtcacattggttcccaattatctgtcttggctgaagctatgggtatgaatgttatctattatgatgtcatgaccattatgtctttaggtaactcgaaacaagttgaaagtttggacgaattgttgaaaaaagccgatttcgttactttgcacgtcccagctactccagaaaccaagaacttgttgagtgctccacaatttgccgctatgaaagatggtgcttacgttataaatgcttctagaggtactgttgttgatatcccagctttggttcaagccatgaaagccggaaaaattgctggtgccgctttagatgtttaccctcatgaaccagcaaagaatggtgaaggtttattcagtgatagtttgaatgaatgggccagtgaattgtgttcattgagaaatgtgattttgactccacacattggtggttctaccgaagaagcccaatctgctattggtattgaagttggtaattcattgaccaaatacatcaacgaaggtgcctctcaaggtgctgttaacttcccagaagtttcattgagaccattagatttggatcaacaaaatgttgtcagagtattatatatccatcaaaacgttcctggtgtgttgaaaactgtcaacaatatcttatccaatcataacattgagaaacaattctccgattctcaaggtgatattgcttacttaatggccgatatttctgatgttgatatcagcgatatacagtcattatatgaacaattagaacaaactccatataaaattgctactcgtttgttgtattaa

SEQ ID NO: 1330 - protein, 463 aa, Candida albicans SC5314
MSSPQQIVNSFQQALNLSGSPNAVSTSPTQSFLSQYVPSKPAKALKPFKTGDIKILLLENVNQTAINIFKNQGYQVEFYKSSLPEDELLEKIKDVHAIGIRSKTKLTEKILKAAKNLVVIGCFCIGTNQVDLEFAAKSGIAVFNSPFSNSRSVAELVIAEIITLARQLGDRSIELHTGTWNKVSAKCWEIRGKTLGIVGYGHIGSQLSVLAEAMGMNVIYYDVMTIMSLGNSKQVESLDELLKKADFVTLHVPATPETKNLLSAPQFAAMKDGAYVINASRGTVVDIPALVQAMKAGKIAGAALDVYPHEPAKNGEGLFSDSLNEWASELCSLRNVILTPHIGGSTEEAQSAIGIEVGNSLTKYINEGASQGAVNFPEVSLRPLDLDQQNVVRVLYIHQNVPGVLKTVNNILSNHNIEKQFSDSQGDIAYLMADISDVDISDIQSLYEQLEQTPYKIATRLLY

SEQ ID NO: 1331 - DNA, 1479 bp, Ustilago maydis 521
  CDS (1)..(1479)
atgtcagagacacacggacaagcttttcaccgagctggcttctcgccgcccgcccacgctggctccttctccgccatgatggcagcgcaggcgggtgctcaacgtctgtctaatggcacctcgattcactcttccacttcgcctcccgcttccttctcgccaactggcgctcgagtccgcgctgcctcacagtcggtaccgctttccgctccgcgtctcttgacgccgttcgacacgggtgacatccgcatcctcttgctcgagaacgtctcgcagggtgcagtcaagatgctaaaggagcagggctaccaggtcgacttccacaccaaggcttggagcgaggaggagctcatccagaacatcgggcagtaccacgccatcggcatccgcagcaaaaccaagctcaccgccaaagtgttccgcgctgcgcacaagctgctcgttgtgggctgcttctgcattggtaccaatcaggtcgacctcgaggcggcggccaaggctggtgttgctgtcttcaactctccctttgctaattcgcgatccgtagccgagctcgtgatcggtgagatgatcagcctttcgcgacagctgggcgatcgtgttaatgagatgcgatctggaacctggaacaaggtgtccaagggctgctacgaggttcgaggcaaaatccttggtattgtcggctacggccacattggatcacagctctctgttctcgccgaggccatgggcatgcacgtcatctactacgacgttgtgccgctcatgcctctcggatctgccaggcaagtatccactctcaacgagctgctcagcaccgccgactttgtctcgttgcacgtacccgagctgcccgagaccaagaacatgatccgcaaagagcagatcgaggcgatgaagaagggtgcctacctcatcaacaacgcaagaggtagcgttgtcgacattcctgctctcgttgagggtctccgatccggccacttggctggtgccgccgtcgatgtgttccctaaggagcccgctgcctcggggcccggtaccttctcaaacgagctcaatagctgggcttcggagctttgccagatgcccaatgtaatgctgactccacacatcggaggcagtaccgaggaggcgcaacgaatgatcggtatcgaggtctcagacgccttgatccgctacatcaactacggtggttcggtgggtgccgtcaacttccccgaggtcgacctccgtgcaatcaccgaagcggattcgcgtgtgattcgtatttgctacgtccatcagaaccagcccggttctctgcgcgcggtcaacgagatccttggatcattcaacgtcgacaagcaacactcggattcctacaaagcaactgcataccttttggccgacatcagtggtgtgtccgaaaacgacatccgcgagatttacgatcgtatctccaagaccgatgccaacattctgacccgtctactgtcgtga

SEQ ID NO: 1332 - protein, 492 aa, Ustilago maydis 521
MSETHGQAFHRAGFSPPAHAGSFSAMMAAQAGAQRLSNGTSIHSSTSPPASFSPTGARVRAASQSVPLSAPRLLTPFDTGDIRILLLENVSQGAVKMLKEQGYQVDFHTKAWSEEELIQNIGQYHAIGIRSKTKLTAKVFRAAHKLLVVGCFCIGTNQVDLEAAAKAGVAVFNSPFANSRSVAELVIGEMISLSRQLGDRVNEMRSGTWNKVSKGCYEVRGKILGIVGYGHIGSQLSVLAEAMGMHVIYYDVVPLMPLGSARQVSTLNELLSTADFVSLHVPELPETKNMIRKEQIEAMKKGAYLINNARGSVVDIPALVEGLRSGHLAGAAVDVFPKEPAASGPGTFSNELNSWASELCQMPNVMLTPHIGGSTEEAQRMIGIEVSDALIRYINYGGSVGAVNFPEVDLRAITEADSRVIRICYVHQNQPGSLRAVNEILGSFNVDKQHSDSYKATAYLLADISGVSENDIREIYDRISKTDANILTRLLS

SEQ ID NO: 1333 - DNA, 1533 bp, Cryptococcus neoformans var. neoformans B-3501A
  CDS (1)..(1533)
atgtccatccctatcccagacagaaacagaagacagtccgtctccgcctccgacccccccaacaacatccctatccctgccaacacccgtggcattcccgtctcttctttcgctccccattctccgcccactggcacttctcctcgcaattcctccttctctttctctacctccccttcaactagctacctcagaaatgcctctggtgctttccacggtattgcccgacaattgaccgccttccttcctcctgactaccccacacaagagaatcatgagaagaggcagggcaagactaagattctgcttttggaaaacattaacttggacgccgccgactacttgaagagccaaggctacgaggttgaccacgtcaccaaggcctacactgaagaagagctcattgccaagctccccaattaccatgccatcggtatccgatcaaaaactaagatcactgccaaggtcattgacgccaacccccaactcttggccatcggctgtttctgtatcggtaccaatcaggtcgatcttgagcacgccgccaagcgaggtatcgccgttttcaactctcccttctccaactcccgttctgttgccgagctcgtcatctccgagatcattgccctttctagacaaatcatcgaccgaacccacgagatgcgagccggtatctggaacaagctctccaagaactgttgggaaattcgtggcaagacccttggtattgtcggttacggtcacattggttctcagctttccgtccttgccgaggcatttggtatgtccgtcatctactttgacgtagtccctatcatgcctctcggttcagcccgccaggttgacacccttgaggatctcctctccagggctgatttcatcaccttgcatgtccctgaaatccctgacaccattggtatgatgggtgccgagcaattttctcagatgaagaagggtgccttcttcatcaacaacgcccgaggcaaggttgtcgacctctctgctctctgtgacgccctcgaatccgaccaccttgccggtgctgccatcgacgtcttccccaaggagcccggatccaatggtcccggctttaacgagactctcggtgacttcatccctcgactccgaaagattcccaacctcatcctcactcctcacatcggtggttctaccgaggaagctcagcgagccatcggtaccgaagtttccaacgctcttactcgatacctgaactacggtactaccctcggtgctgtcaacttccccgaagtcgacttgcgtgccatcaccgccgccgacgagagacatatcagggtctgccacgttcacaagaacgagcctggtgttttgaggggtatcaacaacatccttgcggaccacaacatcgagaagcaattctccgactccaagggtgacattgcgtacttgatggccgacatcagcggtgtcgggcaagaagaagttgagggattgtattcggcgatcaagaacaccaggtcaaacattttgacaaggttgctttttgtagaatga

SEQ ID NO: 1334 - protein, 510 aa, Cryptococcus neoformans var. neoformans B-3501A
MSIPIPDRNRRQSVSASDPPNNIPIPANTRGIPVSSFAPHSPPTGTSPRNSSFSFSTSPSTSYLRNASGAFHGIARQLTAFLPPDYPTQENHEKRQGKTKILLLENINLDAADYLKSQGYEVDHVTKAYTEEELIAKLPNYHAIGIRSKTKITAKVIDANPQLLAIGCFCIGTNQVDLEHAAKRGIAVFNSPFSNSRSVAELVISEIIALSRQIIDRTHEMRAGIWNKLSKNCWEIRGKTLGIVGYGHIGSQLSVLAEAFGMSVIYFDVVPIMPLGSARQVDTLEDLLSRADFITLHVPEIPDTIGMMGAEQFSQMKKGAFFINNARGKVVDLSALCDALESDHLAGAAIDVFPKEPGSNGPGFNETLGDFIPRLRKIPNLILTPHIGGSTEEAQRAIGTEVSNALTRYLNYGTTLGAVNFPEVDLRAITAADERHIRVCHVHKNEPGVLRGINNILADHNIEKQFSDSKGDIAYLMADISGVGQEEVEGLYSAIKNTRSNILTRLLFVE

SEQ ID NO: 1335 - DNA, 1248 bp, Bradyrhizobium sp. ORS278
  CDS (1)..(1248): transl_table=11
atgccgctctcgctgcccaagcaaaagattcgcgttctgctcctcgagggcgtgaacgactcggccgtccgcatgttcgaggccagcggctataccgaggtcgaacggctgcccaaggcgctcggctcggcggaattgaagcggatgctgtccggcgttcacatgctcggcatccgctcgcggacgaatctgaccgccgacgtgctgcaggcggccgaccggctgatggccgtgggctgcttctcggtcggcaccaaccaggtcgatctcgatgcggcgcggcggctcggcatccccgtcttcaacgcgccctattcgaacacccgcagcgtcgccgagctgaccatcgccgaggtcgtgatgctgatgcggcggatcttcccgcgctcggtgtcggcgcatgccggcggctgggacaagtcggccaatggcagccgcgaggtgcgcggcaagacgctcggcatcatcggctacggcaatatcggctcgcagctgtcgaacctcgccgaagccatgggcatgcgggtgatcttcttcgacctcaccgacaagctccgccacggcaacaccgagccggtcgaaagcctcgacgaactgctggctaatagcgacgtcgtgtcgctgcacgtgccggagacgccggcgaccgccaacatgatcggcgagcgccagatccggcacatgaaggacggcgcctacctcatcaacaattcgcgcggcacggtggtcgacatcgacgcgctggcgagcgcgctgcgcgagggcaagctgtcgggcgccgccgtcgacgtgtttccggtcgaaccggcctcgaacgccgatccgttcgtgtcgccgctgcagggcctgcccaacgtgatcctgaccccgcatgtcggcggctccaccgaggaggcgcaggatcgcatcggcggcgaggtcgcgcgcaagctgatcgattactccgacgtcggctcgactttcggcgcggtcaacttcccgcaggtgcagctgccggcgcgcccgaccggcacgcgcttcatccacgtccaccgcaacgtgccgggcgtgctgcgccaggtcaacgaggcggtgtcacggcacaacatcaacatcctcgcgcaatatctgcagaccgatccggaagtcggctacgtcgtgctggaaaccgacgtggttggcggcgaaggtgaggagctgctgtcggagctgcgcgcggtggacggcacgatccgcgtgcgcgtgctgtacgatcacgacaggccgtga

SEQ ID NO: 1336 - protein, 415 aa, Bradyrhizobium sp. ORS278
MPLSLPKQKIRVLLLEGVNDSAVRMFEASGYTEVERLPKALGSAELKRMLSGVHMLGIRSRTNLTADVLQAADRLMAVGCFSVGTNQVDLDAARRLGIPVFNAPYSNTRSVAELTIAEVVMLMRRIFPRSVSAHAGGWDKSANGSREVRGKTLGIIGYGNIGSQLSNLAEAMGMRVIFFDLTDKLRHGNTEPVESLDELLANSDVVSLHVPETPATANMIGERQIRHMKDGAYLINNSRGTVVDIDALASALREGKLSGAAVDVFPVEPASNADPFVSPLQGLPNVILTPHVGGSTEEAQDRIGGEVARKLIDYSDVGSTFGAVNFPQVQLPARPTGTRFIHVHRNVPGVLRQVNEAVSRHNINILAQYLQTDPEVGYVVLETDVVGGEGEELLSELRAVDGTIRVRVLYDHDRP

SEQ ID NO: 1337 - DNA, 1233 bp, Klebsiella pneumoniae subsp. pneumoniae MGH 78578
  CDS (1)..(1233): transl_table=11
atggctaaggtatcactggaaaaagacaagattaaatttctgctggttgaaggtgtgcatcaaaaggcaatcgatagccttcgcgcagcgggttacaccaacattgaatttcataaaggcgcgctggattcagaacagctgaaagcgtcgatccgtgatgcccatttcatcggcctgcgttcccgtacccatctgactgaagagattttcgccgcagcggaaaaactggttgccgtcggttgcttttgcatcgggaccaaccaggtcgatctgaacgccgctgcgaagcgcggtattccggtgtttaacgcgccgttctctaacacccgctcggtggccgagttggtgatcggcgaactgctgctgatgctgcgcggcgtgccggaagccaacgccaaagcgcaccgcggggtgtggaacaagcaggcggtcggcagcttcgaagcgcgtggtaaaaagctgggcatcatcggttacggccacatcggtacccagcttggcattctggcggaatcgctgggaatgcacgtcttcttctatgatattgaaaacaaactgccgctcggcaacgccactcaggtacagcatctctccgacctgctgaacatgagcgatgtggtcagcctgcacgtgccggaaaacgcctctaccaaaaatatgatgggcgcggaagaactggcgctgatgaagccgggcgcgctgctgatcaacgcctcccgcggtaccgtggtggacattccggcgctatgcgatgcgctggccagtaagcatctggccggggcggctatcgacgtcttcccgactgaacctgcgaccaacagcgaccccttcacttcgccgctgtgcgagtttgataacgtgatcctcacaccgcatatcggtggctccactcaggaagcgcaggagaacatcggtctggaagtagctggcaagctggcgaaatactctgacaacgggtcaaccctgtcggcagttaacttcccggaagtttctctaccgctgcacggcggccgtcgtctgctgcatatccatgagaaccggccgggcgtcctgaccgcaatcaaccaaatcttcgccgcgcagagcatcaacattgccgcccagtatctgcaaacgtcgccgcagatgggctacgtggtgattgatattgaagcggaagaagatgttgcccagcaggcgctgcaggcaatgaaagcgatcccggggactatccgcgcccgtctgctgttctaa

SEQ ID NO: 1338 - protein, 410 aa, Klebsiella pneumoniae subsp. pneumoniae MGH 78578
MAKVSLEKDKIKFLLVEGVHQKAIDSLRAAGYTNIEFHKGALDSEQLKASIRDAHFIGLRSRTHLTEEIFAAAEKLVAVGCFCIGTNQVDLNAAAKRGIPVFNAPFSNTRSVAELVIGELLLMLRGVPEANAKAHRGVWNKQAVGSFEARGKKLGIIGYGHIGTQLGILAESLGMHVFFYDIENKLPLGNATQVQHLSDLLNMSDVVSLHVPENASTKNMMGAEELALMKPGALLINASRGTVVDIPALCDALASKHLAGAAIDVFPTEPATNSDPFTSPLCEFDNVILTPHIGGSTQEAQENIGLEVAGKLAKYSDNGSTLSAVNFPEVSLPLHGGRRLLHIHENRPGVLTAINQIFAAQSINIAAQYLQTSPQMGYVVIDIEAEEDVAQQALQAMKAIPGTIRARLLF

SEQ ID NO: 1339 - DNA, 1278 bp, Kineococcus radiotolerans SRS30216
  CDS (1)..(1278): transl_table=11
gtgcgggagactggacccccgcgcacccgcacgaagcaggaggaacccgtgtccgcccccgacctcgctcccgtccgtcccggacgtgcgctgctgctggagaacatccacgccgacgcccggacgctgctgtccgaggccgggtgggaggtcgagaccgcctccggcgccctcgacgaggccgagctcgccgagcggctggacggggtgtcgctgctgggcatccgctcgcagacccaggtcaccgccaaggtcctggaggccgcgaccgacctgcgcgcggtcggcgccttctgcatcggcaccaaccagatcgacctcttcgccgcggccgcccacggcgtcgccgtcttcaacgccccctacagcaacacccgcagcgtggtggagctcgccctcgccgagatcatcgccctcacccgccggctcaccgtcaaggaccgggccatgcacgagggggtctgggacaagtccgccgccggctcccacgaggtccgcgggcgccgcctcggcatcgtcggctacggcaacatcggctcgcagctgtcggtggtggccgaggcgctgggcctgagcgtgttcttctacgacaccaccgacaagctcgcgctgggcaacgcccgccgctgcggcagcctgcacgagctgctggagatcgtcgacgtcgtcaccctgcacgtcgacggccgcagctccaacctcggcttcttcggcgaggcggagttctcccggatgcgcccggggtcgatcttcctcaacctctcccgcggcttcgtcgtcgaccacgaggccctcagccggcacatccgctccggccacatcgccggtgcggccatcgacgtcttccccaccgagcccaagggcagcgggcagggcttcgagtccgagctgcgggggctgcccaacgtcatcctcaccccccacgtgggcgggtccaccgaggaggcgcaggaggacatcggccgcttcgtcgcggccaagctgcgcgactacgccctgcacggggcgacgaccctgtcggtgaacctgccgacgctgggcaccgagaccacccccggcacggtgcgcctggcccacctgcaccgcaacgtccccggcgtgctggccaacatcaacaaggtgctggccgaggccggggtgaacatcgaggggcagcagctcgccacccgcggcgacctcggctacgtcgtcaccgacatcgccgcgcacgcctccgaggacgtcgggcggcggctgcgggagctgcccgagaccgtccgggtccgccagctcggctga

SEQ ID NO: 1340 - protein, 425 aa, Kineococcus radiotolerans SRS30216
MRETGPPRTRTKQEEPVSAPDLAPVRPGRALLLENIHADARTLLSEAGWEVETASGALDEAELAERLDGVSLLGIRSQTQVTAKVLEAATDLRAVGAFCIGTNQIDLFAAAAHGVAVFNAPYSNTRSVVELALAEIIALTRRLTVKDRAMHEGVWDKSAAGSHEVRGRRLGIVGYGNIGSQLSVVAEALGLSVFFYDTTDKLALGNARRCGSLHELLEIVDVVTLHVDGRSSNLGFFGEAEFSRMRPGSIFLNLSRGFVVDHEALSRHIRSGHIAGAAIDVFPTEPKGSGQGFESELRGLPNVILTPHVGGSTEEAQEDIGRFVAAKLRDYALHGATTLSVNLPTLGTETTPGTVRLAHLHRNVPGVLANINKVLAEAGVNIEGQQLATRGDLGYVVTDIAAHASEDVGRRLRELPETVRVRQLG

SEQ ID NO: 1341 - DNA, 1587 bp, Xanthobacter autotrophicus Py2
  CDS (1)..(1587): transl_table=11
atggcaccccgtgttctcatttccgacaagctctcccccgccgccgtgcagatcttcaaggatcgcggcatcgaggtggatttccagcccgacctcggcaaggacaaggacaagctggccgagatcatcggcaattatgacggcctcgccatccgctcggccaccaaggtcaccccgaagatccttcagaaggccggccgcctgaaggtcatcggccgcgccggcatcggcgttgacaatgtcgacctgccggcggcgaccgccaagggcgtgatcgtgatgaacacgccgttcggcaattccatcaccaccgccgagcatgccatcgccatgatgttcgcgctggcccgcgagatcccggcggcggatgcctccacccaggccggcaagtgggagaagaaccgcttcatgggcgtcgaggtcaccgccaagacgctgggcatcatcggctgcggcaacatcggctccatcgtggccgagcgcggcgtgggcctgaagatgaaggtgatcgccttcgatcccttcctctcggtggagcgggcgctggatctcggcgtggagaaggtggagctggacgacctgctcgcccgcgccgacttcatcaccctgcacacgcccttgaccgagaagaccaagaacatcctctcggccgagaatatcgccaggacgaagaagggcgtgcgcatcatcaactgcgcccgcggcggcctggtggacgaagccgccctgcgcgccgccctcgacagcaagcatgtggcgggcgccgccttcgacgtgttcgcggtggagccggcggagcagaacccgctgttcggtcatcccaacgtggtgtgcacgccgcacctcggcgccgccaccaacgaggcgcaggagaatgtcgccctccaggtcgccgagcagatgagcgactatctcctcaccggcgccatcaccaacgcggtgaacttcacctccatcaccgccgaggaagcgccgaagctgaagcctttcatcgcgctcgctgagaagctcggctcgttcgccggccagctcaccgacaccgacatcaagactgtgcacatcgtctacgaaggcgcggtggcggaccagaaggtgaaggcgctgacctcggccgcggtggcagggctgctgcgcccgatgctctcagaggtcaatgtcgtgtccgcccccaccgtcgccaaggaacgcggcatcgtcatcgaggagaccacccgcgccgccaccggcgactatgacagcctcatcagcatcacggtggtgaccgacacgtatgagcgcgcgatatccggcaccgtgttcgcggatggccgcccgcgcatcgtgaacatcaagggcatcaatgtggacgccgagttcgcgccctccatgatctatgtcaccaacgaggacaagcccggcttcatcggccgcttcgccggcctgctgggtgatgcgggcctgaacatcgcaaccttcgccctcggccgcgaccatctgggcggcgacgccatcgcgctggtggcggtggatggcaccgtgccggccgacgtgctcggcaaggtgcaggcgctgccgcaggtgaaggcggccaaggcgctggcgttctga

SEQ ID NO: 1342 - protein, 528 aa, Xanthobacter autotrophicus Py2
MAPRVLISDKLSPAAVQIFKDRGIEVDFQPDLGKDKDKLAEIIGNYDGLAIRSATKVTPKILQKAGRLKVIGRAGIGVDNVDLPAATAKGVIVMNTPFGNSITTAEHAIAMMFALAREIPAADASTQAGKWEKNRFMGVEVTAKTLGIIGCGNIGSIVAERGVGLKMKVIAFDPFLSVERALDLGVEKVELDDLLARADFITLHTPLTEKTKNILSAENIARTKKGVRIINCARGGLVDEAALRAALDSKHVAGAAFDVFAVEPAEQNPLFGHPNVVCTPHLGAATNEAQENVALQVAEQMSDYLLTGAITNAVNFTSITAEEAPKLKPFIALAEKLGSFAGQLTDTDIKTVHIVYEGAVADQKVKALTSAAVAGLLRPMLSEVNVVSAPTVAKERGIVIEETTRAATGDYDSLISITVVTDTYERAISGTVFADGRPRIVNIKGINVDAEFAPSMIYVTNEDKPGFIGRFAGLLGDAGLNIATFALGRDHLGGDAIALVAVDGTVPADVLGKVQALPQVKAAKALAF

SEQ ID NO: 1343 - DNA, 1290 bp, Xanthobacter autotrophicus Py2
  CDS (1)..(1290): transl_table=11
ttgctgaaggacgccgcgatcgtgcacgacagccattcccccacgccgcacctctccctgtccaaggacaagatcaaggtgctgctcctcgaaggcgtgaacgacagcgccgtggagctgctgaccaatgccggctacaccaacctcacccgcctgcccaaggcgctggacggcgacgcgctgaaggaggccatcaagggcgtccatatcctcggcatccgctcgcgcacccagatcacgcccgacgtgctggaggccgcggaccggctgatcgccatcggctgcttcagcgtcggcaccaaccaggtggacctcgacgcctcccgcatcagcggcgtgccggtgttcaacgcacccttctccaacacccgcagcgtcgccgagctggtgatcggcgagatcgtgatgctgctgcgccgcatccccacccgctcccacgcggcgcatgagggccgctgggacaagtccgccaccaacagcgtggaagtgcgcggcaagacgctcggcatcgtcggctacggcaatatcggctcgcagctctcgatcctggccgaggccatgggcctcaaggtgatcttctacgatcacaccgacaagctgcgccacggccaggccgagccggtgtcgaccctcaacgccctgctggcccagagcgacatcgtcagcctgcacgtgccggagacggcggcgacccacggcatgatcggccgcgccgagatcgccaccatgaagccgggggcctaccttatcaacaacagccgcggcacggtggtggacctcgacgccctcgccgaggcgctgaaggcgggccacctgcgcggcgcggcggtggacgtgttcccggtggagcccggctccaacgccgagcgcttcgtctctccgctccagggcctcgacaacgtgattctgacgccgcacatcggcggctccaccgaggaggcgcaggagcgcatcggcgccgaggtcgcccgcaagctggtggattattcagacaccggctccaccatgggcgcagtgaactttcccgaggtgcagctgccggcccgcccgacggggacccgcttcatccagattcaccgcaacctgccgggcatgctggggcggctcaacgaggtgctggcccgccactccgtcaacatcgccgcgcaatatctggagacctacgcggacgtgggctacgtggttctggacgccgatgcctccaccgcggacagccagagcgtgctcgccgacatccgggagatcgagggcaccatccgcgcccggctgctctacgaacgcaagatctga

SEQ ID NO: 1344 - protein, 429 aa, Xanthobacter autotrophicus Py2
MLKDAAIVHDSHSPTPHLSLSKDKIKVLLLEGVNDSAVELLTNAGYTNLTRLPKALDGDALKEAIKGVHILGIRSRTQITPDVLEAADRLIAIGCFSVGTNQVDLDASRISGVPVFNAPFSNTRSVAELVIGEIVMLLRRIPTRSHAAHEGRWDKSATNSVEVRGKTLGIVGYGNIGSQLSILAEAMGLKVIFYDHTDKLRHGQAEPVSTLNALLAQSDIVSLHVPETAATHGMIGRAEIATMKPGAYLINNSRGTVVDLDALAEALKAGHLRGAAVDVFPVEPGSNAERFVSPLQGLDNVILTPHIGGSTEEAQERIGAEVARKLVDYSDTGSTMGAVNFPEVQLPARPTGTRFIQIHRNLPGMLGRLNEVLARHSVNIAAQYLETYADVGYVVLDADASTADSQSVLADIREIEGTIRARLLYERKI

SEQ ID NO: 1345 - DNA, 1284 bp, Salmonella enterica subsp. arizonae serovar 62:z4,z23:--
  CDS (1)..(1284): transl_table=11
atgcaaatccacacacaacatcagatggcaaaaaaagacaggatcggggaaatggcaaaggtatcgctggagaaagataaaattaaatttctgctggttgaaggggtgcatcaaaaggcgctggaaagccttcgtgcggcaggttacaccaacattgaatatcacaagggcgcgctggatactgaacagttgaaagcgtccatccgcgatgcccacttcatcggtctgcgatcccgtactcatctgacagaggaagtgattaacgccgcagagaagctggtggcgattggctgcttttgcatcggcaccaaccaggtgaatttaaatgcggcggcaaaacgcggtattccggtctttaacgcgccattctcgaatacccgctccgtggcggagctggtgattggcgagttattgttgttgctacgcggcgtaccggaagcgaacgccaaagcgcaccgcggcgtatggaataaactggcggcagggtcattcgaagcgcgcggcaaaaagcttggcattatcggttacggccatattggaacgcagttgggtattctggcggaatcgctggggatgcatgtctatttctatgatattgaaaataaactgccgctcggcaatgcgacccaagtgcagcacctttctgaattgctgaatatgagcgatgtggtcagtctgcacgtccctgaaaatgcctccaccaaaaatatgatgggcgcgaaagagatagccctgatgaaacccggttcgctgctgattaacgccgcgcgcggaacggtggtagatatcccggctttgtgcgatgctctggcgacgaaacatctggcgggggccgctatcgacgtcttcccgacggaaccggcgactaacagcgatccgtttacctctccgctgtgcgaattcgataacgtgatcctgacgccgcatatcggcggctcaacgcaggaagcgcaagaaaacatcggtctggaagtcgcaggaaaactgattaagtattcggataacggttcgacgctttccgccgtgaacttcccggaagtgtcgctgccgttgcatggcggtcgtcgcctgatgcacatccatgaaaaccgtccgggcgtattaaccgcccttaaccagatttttgccgatcagggcgttaacatcgccgcgcagtatctgcaaacctccgcccgaatgggatatgtggtgattgatatagaagccgatagcgatgttgcggagaaagcgctgctggcgatgaaggcgataccaggcaccattcgtgcccgtctgctgtactga

SEQ ID NO: 1346 - protein, 427 aa, Salmonella enterica subsp. arizonae serovar 62:z4,z23:--
MQIHTQHQMAKKDRIGEMAKVSLEKDKIKFLLVEGVHQKALESLRAAGYTNIEYHKGALDTEQLKASIRDAHFIGLRSRTHLTEEVINAAEKLVAIGCFCIGTNQVNLNAAAKRGIPVFNAPFSNTRSVAELVIGELLLLLRGVPEANAKAHRGVWNKLAAGSFEARGKKLGIIGYGHIGTQLGILAESLGMHVYFYDIENKLPLGNATQVQHLSELLNMSDVVSLHVPENASTKNMMGAKEIALMKPGSLLINAARGTVVDIPALCDALATKHLAGAAIDVFPTEPATNSDPFTSPLCEFDNVILTPHIGGSTQEAQENIGLEVAGKLIKYSDNGSTLSAVNFPEVSLPLHGGRRLMHIHENRPGVLTALNQIFADQGVNIAAQYLQTSARMGYVVIDIEADSDVAEKALLAMKAIPGTIRARLLY

SEQ ID NO: 1347 - DNA, 1230 bp, Pseudomonas putida GB-1
  CDS (1)..(1230): transl_table=11
atgagcaagacttctctcgacaagagcaagatccggttccttcttcttgaaggtgtgcaccagaacgcagtcgataccctcaaggctgccggctacaccaacatcgaatacctcactggttcgttgccggaagccgagctgaaggaaaagatcgccgatgcccactttatcggcatccgttcacgcacccagcttaccgaagagatcttcgactgcgccaagaaactggtcgctgttggctgcttctgcatcggcaccaaccaggttgacctggaagctgcccgccagcgcggtatcgccgtgttcaacgcgccatactccaacacccgttcggtcgccgagctggtactggccgaggccatcctgctgctgcgcggcatcccagagaaaaacgcttcctgccaccgtggtggctggatcaagagtgcggccaactcgttcgaaatccgtggcaagaaactgggcatcgtcggctacggctcgatcggtacccagctgtcggtcctggccgaaaacctgggcatgcaggtgtacttctacgacccgctgaccaaactgccactgggcaacgccgtgcaggttaccagcctgaacgagctgctgggcctggccgacatcgtctcgctgcacgtgcctgagctgccgtccacccagtggatgatcggcgagaaggagatccgcgcgatgaaaaaaggcgcgatcctgatcaacgccgcccgtggcaccgtggtcgaactggaccacctggccgctgccatcaaggacaagcacctgatcggcgccgccatcgacgtgttcccgatcgagccgcgctccaacgacgaagagttcgaaagcccgctgcgcggcctggacaacgtgatcctgaccccgcacatcggtggttccaccgccgaagcccaggccaacatcggcctggaagtggccgagaagctggtcaagtacagcgacaacggtacttcggtatcttcggtcaacttcccggaagtggccctgccggcgcacccaggcaagcaccgcctgctgcacattcacgaaaacattcccggcgtactcagcgagatcaacaaggtcttcgccgagaacggcatcaacatctccggtcagttcctgcagaccaacgagaaagtcggttacgtggtaatcgacgttgacgccgagtactcggaccttgcgcaagaaaaactgcaacaggtcaagggcaccatccgttcccgcgtgctgttctaa

SEQ ID NO: 1348 - protein, 409 aa, Pseudomonas putida GB-1
MSKTSLDKSKIRFLLLEGVHQNAVDTLKAAGYTNIEYLTGSLPEAELKEKIADAHFIGIRSRTQLTEEIFDCAKKLVAVGCFCIGTNQVDLEAARQRGIAVFNAPYSNTRSVAELVLAEAILLLRGIPEKNASCHRGGWIKSAANSFEIRGKKLGIVGYGSIGTQLSVLAENLGMQVYFYDPLTKLPLGNAVQVTSLNELLGLADIVSLHVPELPSTQWMIGEKEIRAMKKGAILINAARGTVVELDHLAAAIKDKHLIGAAIDVFPIEPRSNDEEFESPLRGLDNVILTPHIGGSTAEAQANIGLEVAEKLVKYSDNGTSVSSVNFPEVALPAHPGKHRLLHIHENIPGVLSEINKVFAENGINISGQFLQTNEKVGYVVIDVDAEYSDLAQEKLQQVKGTIRSRVLF

SEQ ID NO: 1349 - DNA, 1155 bp, Leptospira interrogans serovar Copenhageni str. Fiocruz L1-130
  CDS (1)..(1155): transl_table=11
atgttccaaaaagatggatttaatgtacgccttcttcccgctgccttttcggaaaaagaacttttagacgaaatcgaaaacattcatgttttaggaattagaagtaaaaccaacgtcacttccgccgttttagaaaaagccaaaagacttttgacaattggttgtttttgtatcggaaccaatcaagtggatttagttggagcagaaaaaaaaggaatccctgtttttaatgccccctattctaatactcgttccgtagcggaattagtaatttcagaaatcatcatgttggccagaagagttccggatcatattcgaaatactcactctggtatttggaataaaatttccaaaaattgttttgaggttcgaggtaagacgattggaatcgtgggttatggtcatattggaagtcaggtttcagtacttgcagaagcgatgggaatgaaagtgatctactacgatattcaaacggttcttcctcttggaaatgcaactccagtttctagttacgaagaacttttaaaaaattcggactttatttcttttcacgttcccgaaactccacaaacgatgaatctttatggaaaaaaagaaatcgaagttactaaaaaaggcgcttatatgatcaacctttccagagggaaggttgtggatctggaagctcttgcaaaagcaatccaatcgggtcatattgctggagcgggaatagacgtttttccggaagaacccgaatccaacaacgatccatttctaactcctatgcaaaatctgccgaatgtaattttgactcctcatataggcggtagtaccgaagaagctcaaagaaacatcggttccgaagtagccagtaaacttttgaaattcataaacaacggttccactacattttccgtaaattttcctaatttggaaattactccgttacccgcaggtcaatatagaattttgaacgtccataaaaaccaaccagggtttttaaaagacatcaactctatggtatccgcaatcggcgccaatatcagttcccaacatttaggaaccagtgcagaaatcggttatctttccatggtaatcgataaatctgtaggagacgaattgaaagaaaaaatcgaaaaacatcctttttcgatcaaaactaggattctttactaa

SEQ ID NO: 1350 - protein, 384 aa, Leptospira interrogans serovar Copenhageni str. Fiocruz L1-130
MFQKDGFNVRLLPAAFSEKELLDEIENIHVLGIRSKTNVTSAVLEKAKRLLTIGCFCIGTNQVDLVGAEKKGIPVFNAPYSNTRSVAELVISEIIMLARRVPDHIRNTHSGIWNKISKNCFEVRGKTIGIVGYGHIGSQVSVLAEAMGMKVIYYDIQTVLPLGNATPVSSYEELLKNSDFISFHVPETPQTMNLYGKKEIEVTKKGAYMINLSRGKVVDLEALAKAIQSGHIAGAGIDVFPEEPESNNDPFLTPMQNLPNVILTPHIGGSTEEAQRNIGSEVASKLLKFINNGSTTFSVNFPNLEITPLPAGQYRILNVHKNQPGFLKDINSMVSAIGANISSQHLGTSAEIGYLSMVIDKSVGDELKEKIEKHPFSIKTRILY

SEQ ID NO: 1351 - DNA, 1233 bp, Acinetobacter sp. ADP1
  CDS (1)..(1233): transl_table=11
atgagccaacatctatcactacctaaagacaaaattcgtttcttattgttagaaggcgttcatcaaaacgcagtcgacactctaaatgcagcgggttataccaatatcgattatcgcaagacagcactggatggcgatgcgctgaaagaagccgtcaaggatgctcactttattggtattcgctcccgtactcagttgacagaagatgtctttgcagctgcgaacaagctcatcgcagtaggttgtttctgtatcggaaccaatcaggtagatctaaaagcagcaatggcacgtggtattcctgtatttaacgcgccttattcaaacacccgttcagttgctgaactggtgcttgctgaattgatccttcttctgcgtcgtgtacctgaaaaatctgcagtctgtcaccgtggtggctgggacaaatctgctgtaggttcttatgaaacacgtggcaagacattaggtattgttggttacggctcaattggctcacaactttcagtcttggctgaaagcttaggcatgcacgtcatttattacgacacagtcactaagcttccaatgggtaatgctcgccaagtgggttctttggatgaattacttgcaactgctgatgttgtgacgttgcatgtaccagatgttccatctacacgtaatttcttcaagaaagaacaatttgccaaaatgaaagaaggtgcgatcttcttgaacgcggcacgcggtacgtgtgtgatcatcgaagacttagcagatgcgttgaaatcaggtcaccttgcaggtgctgcggtagacgtattcccgaaagaaccaaaagccaatggtgaagaatttatttctccattacgtggtctggacaatgtgatcctgacacctcacgtgggcggttcaaccatggaggctcaagccaatatcggacttgaagtttcagaaaaatttgtggcttattctgataaaggtatgaccctatctgcggtcaatttcccagaaattgcactaccattgactgaaggcaagcaccgtttattgcatattcataaaaatattccaggtgtattgtctaaaatcaataatctatttgcagaacaaaatatcaatatctctggtcaaagtttgatgactaaaggtgatatcggttacctgatcatggatgtagatgcatctgcttctcaagaagcacttgatatgctcaaccaggttgaaggtactattcgcgttcgcgttctgttctaa

SEQ ID NO: 1352 - protein, 410 aa, Acinetobacter sp. ADP1
MSQHLSLPKDKIRFLLLEGVHQNAVDTLNAAGYTNIDYRKTALDGDALKEAVKDAHFIGIRSRTQLTEDVFAAANKLIAVGCFCIGTNQVDLKAAMARGIPVFNAPYSNTRSVAELVLAELILLLRRVPEKSAVCHRGGWDKSAVGSYETRGKTLGIVGYGSIGSQLSVLAESLGMHVIYYDTVTKLPMGNARQVGSLDELLATADVVTLHVPDVPSTRNFFKKEQFAKMKEGAIFLNAARGTCVIIEDLADALKSGHLAGAAVDVFPKEPKANGEEFISPLRGLDNVILTPHVGGSTMEAQANIGLEVSEKFVAYSDKGMTLSAVNFPEIALPLTEGKHRLLHIHKNIPGVLSKINNLFAEQNINISGQSLMTKGDIGYLIMDVDASASQEALDMLNQVEGTIRVRVLF

SEQ ID NO: 1353 - DNA, 1233 bp, Pectobacterium atrosepticum SCRI1043
  CDS (1)..(1233): transl_table=11
atggcaaaggtatcactggaaaaagacaagattaagtttctgttagtggaaggcgtgcaccagagcgcgctggataacctgcgtgcagcgggttacaccaacatcgagttccacaaaggggcgctggatcctgaagcattgaaagcttctatccgcgacgcgcattttgtggggatccgctcgcgtacccatctgacagaagagatttttgctgctgcggaaaaactgatcgcggtagggtgtttctgtatcgggactaatcaggttgaactgtcggccgcgaccaaacgcggtatcccagtgtttaatgcccctttttccaatacccgctccgtggcagaaatggtgatcggcgaaatgctgctgatgctgcgcggtatcccggcagcgaacgcgaaagcgcaccgtggtatctggcacaaactggctgtgggatcgtttgaagctcgcggcaaaaagctcggaatcatcggctacggccatatcggtatgcagttgggtattttggctgaaagcctgggtatgcacgtttatttctatgatattgaaagcaaattgccgctgggcaatgctcagcaggtgcgccacctgtccgatttgctgaatatgagcgacgtggtgagcctgcatgtgccggaaaatgaaagtacgcataatatgatgggcgcggaagaactggcactgatgaaaccaggtgcaatcctgattaacgccgctcgcggtacggtggttgatattcccgctctgtgtgaagtgctaagcagcaagcatttgtccggtgcagcgattgacgtattcccacaggagccggcaacgaacagcgagccattcctgtcgccgctgtgcgagtttgataacgtgctgttgacgccgcatatcggtggatccacgcaggaagcacaggaaaatatcggtgatgaagttgcagggaaactggcgaaatattcagacaacggctctacgctgtctgcggtgaatttcccagaagtgtcgctgcccgttcatggcgcacgcgctagccgcctgctgcacattcatgaaaaccgtcctggcatgattaccaaaattaaccagatctttgctgagcagggcattaacattgctgcgcagtatctgcaaacgacacctgaaattggttatgtggtgattgatgtagaaaccgacggtgcgcaaacggcactgcaactgatgaaggcgattcccggcactattcgtgcccgtctgctgttctga

SEQ ID NO: 1354 - protein, 410 aa, Pectobacterium atrosepticum SCRI1043
MAKVSLEKDKIKFLLVEGVHQSALDNLRAAGYTNIEFHKGALDPEALKASIRDAHFVGIRSRTHLTEEIFAAAEKLIAVGCFCIGTNQVELSAATKRGIPVFNAPFSNTRSVAEMVIGEMLLMLRGIPAANAKAHRGIWHKLAVGSFEARGKKLGIIGYGHIGMQLGILAESLGMHVYFYDIESKLPLGNAQQVRHLSDLLNMSDVVSLHVPENESTHNMMGAEELALMKPGAILINAARGTVVDIPALCEVLSSKHLSGAAIDVFPQEPATNSEPFLSPLCEFDNVLLTPHIGGSTQEAQENIGDEVAGKLAKYSDNGSTLSAVNFPEVSLPVHGARASRLLHIHENRPGMITKINQIFAEQGINIAAQYLQTTPEIGYVVIDVETDGAQTALQLMKAIPGTIRARLLF

SEQ ID NO: 1355 - DNA, 1254 bp, Propionibacterium acnes KPA171202
  CDS (1)..(1254): transl_table=11
atgattccacccattgagacgcccgcaacgggtcgcgcttgccccctccataaactggcggttatgaaggcgctgctactcgaaaacatccatgacgaagcggtccgaacactgaaaaaggccggatacgaggtcgagcgggtaagtgaggcccttgacgaggatgacctcatcagcgcccttgacggagttgacctgttgggcatcagatcacgtacccgcgttactcgtcgggtcgttgaggcctgcggcgacaagctccatgcggttggcgctttttgtattggcactaatcagatggatcttgatgcgttagccgaggctggcgttcccgcttttaatgctccttattccaatacccgttcagtcgttgagcttgtcatggcagagatcatcgctctagctcgtcgtttaggcgatcgcaatactcaaatgcacaacggtgtgtggcgtaagtccgcaattgggtcgcacgagattcgtggacgtcgactaggcattatcggctacggcaatattggccagcagctgtcggtcgtggcagaggccatgggcatgcaggtgtttttctatgacatcgctgatgttttacctatgggcaacgctcacaagtgtgattccatggaagagctgcttggtagcgtcgagacggtgtctcttcatatcgatggacgccccagcaacaccgatcttatcggggatcgcgaattcgccatgatgcgaccgaggtccctctttctaaacttgtcgcgaggcaaggtcgtcgacatcaatgctctggtggacaacctacgtactggacacatcgctggcgcaggagtggacgtgtatcccgaagagccggcctccggaaaagagccctttatctctccgttgcgcgagatggacaatgttattctgaccccgcatatcggcgggtccacccaagaggctcaagttgatatcggtcgttacgtcgccgggaaacttatcgactatgtagataacggcgcgaccggaatgagtgttaacattcctgagatcaccccatcgcctcgcacgggtgctcgcatcggccatctacatcgcaatgtcccaggtgtcatggcgaccctgaaccgactcgttgctgatcaggggggaaacgtcacttaccaggctctggcgacgaagggcgagctcggttactgcattctcgacattgcggagactgacagtgggctgctcgccaatgtcaccgttcttgaggggacaattcgggctcgtatcctctaa

SEQ ID NO: 1356 - protein, 417 aa, Propionibacterium acnes KPA171202
MIPPIETPATGRACPLHKLAVMKALLLENIHDEAVRTLKKAGYEVERVSEALDEDDLISALDGVDLLGIRSRTRVTRRVVEACGDKLHAVGAFCIGTNQMDLDALAEAGVPAFNAPYSNTRSVVELVMAEIIALARRLGDRNTQMHNGVWRKSAIGSHEIRGRRLGIIGYGNIGQQLSVVAEAMGMQVFFYDIADVLPMGNAHKCDSMEELLGSVETVSLHIDGRPSNTDLIGDREFAMMRPRSLFLNLSRGKVVDINALVDNLRTGHIAGAGVDVYPEEPASGKEPFISPLREMDNVILTPHIGGSTQEAQVDIGRYVAGKLIDYVDNGATGMSVNIPEITPSPRTGARIGHLHRNVPGVMATLNRLVADQGGNVTYQALATKGELGYCILDIAETDSGLLANVTVLEGTIRARIL

SEQ ID NO: 1357 - DNA, 1233 bp, Mannheimia succiniciproducens MBEL55E
  CDS (1)..(1233): transl_table=11
atgactaataaagtatctttggataaatctaagatcaaatttttacttcttgaaggtgttcaccaaaacgcattagatgtgttacatgcggccggttacactaatattgaatatcataaaaaagcgttagagccggatgaacttaaagaagcaattaaagaagcgcactttattggtttacgttcccgcacaaatttaacggcggatattcttgaacatgcgaataaattaatcgctatcggttgtttttgtatcggcaccaatcaagtggcattggaagcggcggaagaaaagggtattcccgtatttaatgcgccgttctctaatacccgttccgtagcggaattggttctcggtgagattttgttattaatgcgcaatattccggcggcaaacgcgcaggttcaccgcggtgaatggaacaagtcggcggcgggttctcatgaagttcgcggtaagaaattaggtatcgtcggctacggtcatatcggttcgcaattaagtattatcgccgagtctttaggtatgaatgtatttttctacgatgttgaaaccaagctgcctttaggtaatgcgcagcaagtttccactttagaggaattattaagttcctgcgatattatttcattacacgtacccgaactgccttcaacaaagaatttaatgagcgcggaacgtatcgctcagttaaaaccgggcagtattttaattaatgcggcgcgcggtacggttgttgatattgatgcgttagccgaagcgttagaacaggggaaaatacatggcgccgcaatcgacgtattccctaaagagccggcttctgcggcggaagcgtttgagtcaccgttgcgtaaattcgataatgtgattttaaccccgcatatcggcggttcaacggcggaagcgcaagaaaatatcggcactgaagtggcaagtaaattcgttaaatattcggataacggttcaactctaagtgcggtgaattttccggaagtttcgttaccggaacatcgtacggcaaaacgtattttgcacattcaccataaccgcccgggtattttgaataaaatcaaccaggtttttgttgatgaaaatatcaacatcgccgcgcaatatctgcaaaccgacgctaaaatcggttatgtggttattgatgtagaaacggatgacagtacggatttactgcaaaaacttaaatcaatcgagggtacgattcgcgccagagtattgttttaa

SEQ ID NO: 1358 - protein, 410 aa, Mannheimia succiniciproducens MBEL55E
MTNKVSLDKSKIKFLLLEGVHQNALDVLHAAGYTNIEYHKKALEPDELKEAIKEAHFIGLRSRTNLTADILEHANKLIAIGCFCIGTNQVALEAAEEKGIPVFNAPFSNTRSVAELVLGEILLLMRNIPAANAQVHRGEWNKSAAGSHEVRGKKLGIVGYGHIGSQLSIIAESLGMNVFFYDVETKLPLGNAQQVSTLEELLSSCDIISLHVPELPSTKNLMSAERIAQLKPGSILINAARGTVVDIDALAEALEQGKIHGAAIDVFPKEPASAAEAFESPLRKFDNVILTPHIGGSTAEAQENIGTEVASKFVKYSDNGSTLSAVNFPEVSLPEHRTAKRILHIHHNRPGILNKINQVFVDENINIAAQYLQTDAKIGYVVIDVETDDSTDLLQKLKSIEGTIRARVLF

SEQ ID NO: 1359 - DNA, 1275 bp, Burkholderia pseudomallei K96243
  CDS (1)..(1275): transl_table=11
atggccgcgtacgcgtaccgcgccggaatttccggcctccgttacgattcgaccaccacgctgggtaacatgacttccgttcttctcctcgaaaacattcacgacagcgcgtcgcggcatttcgccgacacgaacgtcgacatcgagcggcgcaagggcgcgctcgccggcgccgaattgcggcgcgcgctgcagcagcatcaactaatcggcattcgctcggcgacgcatctgctgcgcgacgagatcgacgccgcgcgccatctgctcgcgatcgggtgcttctgcatcggcacgtcgcaggtggatttgccggccgccgcgcatcacggcattccggtgttcaacgcgccgttctcgaatacgcggtcggtcgcggagctcgtgatcgccgaggccatcctgttgctgcggcgcgtgccggagaagagcgtcctcgcgcatgcgggcgaatgggcgaagggcgcgggcggatcgttcgaggcgcgcggcaagacgatcgcgatcgtcggctacggcaacatcggcgcgcaggtcggcgtgctcgccgaggcgctcggcatgagggtcgtctattacgatgtgcaggcgaagctgtcgctcggctccgcgcagccggcgcgctcgctcggtgaggcgatcgcgctcgcggacgtcgtcacgctgcacgtgcccgcacacgcgtcgacgcacaacatgatcgacgcgagcgtcctcgcgcaattcaaatcgaatgcaatcctgatcaatgcgtcgcgcggcaccgtcgtcgatatcgacgcgctgcgcgacgcgctcgtgcagaagcgcctgagcggcgcggcgatcgacgtgtttccgcgcgagccgaagaccaatgcggaccgtttcgaatcggtgctgcaaggattgccgaacgtgatcctcacgccgcatatcggcggcagcacgcaggaagcgcaggagaacatcggcgaagaggtgtcgtcgaagctcgtcgcattcctcacgcgcggcgataccgcgggcgccgtcaattttccgcaggtgagcccgggcgaatgcacgtcggccgcgcggctcctgaacgtgcacggcaatacgccgggcgtgctcgcggtgctcaacacgctgcttgctcaggatggcgcgaacatcgtcgcgcagcatctgcagacgcgcggcgatatcggctatgtcgtgaccgacctggaccgcgtgccgtccgatgcgtttctcgacacgctgagcggcaatcgcgcattcacgcgcagccgcttgctgcgcagcgcatga

SEQ ID NO: 1360 - protein, 424 aa, Burkholderia pseudomallei K96243
MAAYAYRAGISGLRYDSTTTLGNMTSVLLLENIHDSASRHFADTNVDIERRKGALAGAELRRALQQHQLIGIRSATHLLRDEIDAARHLLAIGCFCIGTSQVDLPAAAHHGIPVFNAPFSNTRSVAELVIAEAILLLRRVPEKSVLAHAGEWAKGAGGSFEARGKTIAIVGYGNIGAQVGVLAEALGMRVVYYDVQAKLSLGSAQPARSLGEAIALADVVTLHVPAHASTHNMIDASVLAQFKSNAILINASRGTVVDIDALRDALVQKRLSGAAIDVFPREPKTNADRFESVLQGLPNVILTPHIGGSTQEAQENIGEEVSSKLVAFLTRGDTAGAVNFPQVSPGECTSAARLLNVHGNTPGVLAVLNTLLAQDGANIVAQHLQTRGDIGYVVTDLDRVPSDAFLDTLSGNRAFTRSRLLRSA

SEQ ID NO: 1361 - DNA, 1230 bp, Azoarcus sp. EbN1
  CDS (1)..(1230): transl_table=11
atgcaaaattcaccactgcaccacttcgatttcaggttcgtgctgctcgaaggcattcatgccactgcggtcgagacgctcggcacgagcggctattcgcgcgttgatgcgcgtcccggtgcactgaccggcgacgacctcatccacgcggtcgccgacgcggatttcgtcggcatccgctcgcgcacccggctcaccgaggaagtgctgacgcacgcgccgaaattgctcggcatcggctgcttctgcatcggcacgaaccaggtcgacctcgaggccgcggcgctgctcggcatcccggtattcaacgcgccgttctcgaatacccgcagcgtcgccgagctggtgctcgccgagatcgtcatgctgatgcgcggcattccggagaaaaacgcgctgctgcatcgtggcggatggatgaaaagcgcgagcaattcgtgggagatccgcggcaagacgctcggcatcgtcggctatggccatatcggcacgcaggtcggcgtgctcgccgagcacttcggcatgaaagtcgtgtaccacgacatcgaggccaagctgtcgctcggcaacgcgcatcagctggggtccctcgaagacctgctggcagcgtcggacgtcgtcagcctgcacgtccccgaaaccccggcgacgcggaacatgatggacgcggcccgcctcgccgcgatgaagccgggcagtttcctcatcaacgcgtcgcgcggcacggtcgtcgatatcgacgccctcgccgatgcgctcggctccggccatgtgctcggtgcggcaatcgacgtgttcccggccgaaccgaagtccaacgacgagcctttcgtctcgccgctgctgcgcttcgacaacgtcatcctgacgccgcacatcggcggctcgacggccgaagcgcaggcgaacatcggccgcgaggtcgccgccaagctcgcccgctatgcgaacaacggatcgacagtttctgcagtgaatttccccgaagtgtcgctgcccgcgcacgaaggccagtgccgcgtgatgcacatccaccacaacgtgccgggcatgctcgcgcgcatcaacgagcggatttcgaaagccgggctcaacatcgtcgcgcagtacctgcagacgacccagcacgtcggctacgtcgtcatcgacgtcgacgccgaagcgcgtcaggtggcgttcgacgaactcaacgcgatcgacgggacgatacgctgccgactgatctgctga

SEQ ID NO: 1362 - protein, 409 aa, Azoarcus sp. EbN1
MQNSPLHHFDFRFVLLEGIHATAVETLGTSGYSRVDARPGALTGDDLIHAVADADFVGIRSRTRLTEEVLTHAPKLLGIGCFCIGTNQVDLEAAALLGIPVFNAPFSNTRSVAELVLAEIVMLMRGIPEKNALLHRGGWMKSASNSWEIRGKTLGIVGYGHIGTQVGVLAEHFGMKVVYHDIEAKLSLGNAHQLGSLEDLLAASDVVSLHVPETPATRNMMDAARLAAMKPGSFLINASRGTVVDIDALADALGSGHVLGAAIDVFPAEPKSNDEPFVSPLLRFDNVILTPHIGGSTAEAQANIGREVAAKLARYANNGSTVSAVNFPEVSLPAHEGQCRVMHIHHNVPGMLARINERISKAGLNIVAQYLQTTQHVGYVVIDVDAEARQVAFDELNAIDGTIRCRLIC

SEQ ID NO: 1363 - DNA, 1596 bp, Silicibacter pomeroyi DSS-3
  CDS (1)..(1596): transl_table=11
atggcccccaaagtactcatttccgacaagctctccgacgccgccgtccagatcttccgcgatcgcggcatcgacgtcgacttccagcccgacctgggcaaggacaaggacaaactggccgaggtcatcggccagtatgacggccttgccatccgctcggccaccaaggtgaccgagaagatcctggagaacgccaccaacctcaaggtgatcggccgcgccggtatcggcaccgacaacgtggacaaggacgccgcctcgaaaaagggcgtgatcgtcatgaacacgcccttcggcaacatgatcaccaccgccgaacatgccatcgccatgatgttcgccgttgcccgtcagatccccgaggccagcgcctcgacccatgcgggcaagtgggaaaagtccaagttcatgggcgtcgaactgaccaacaagaccctgggcgtgatcggtgccggcaatatcggcggcatcgtctgcgaccgtgcccgcggcctaaagatgaaggtcatcgcctatgaccccttcctgggcgaggagaaggccaacaagatgggcgttgaaaaggtcgaactggacgacctgctgaaacgcgccgatttcatcaccctgcacgtgccgctgaccgatcagacccgcaacatcctgggccgcgagaacctggccaagaccaagaaaggcgtgcgtatcatcaactgcgcccgcggcggtctggtggacgaggaagcgctggccgagatgctgcaatcgggccacgtggcgggcgccgcctttgacgtgttcagcgtcgaaccggccaaggagaacccgctgttcggcctgcccaacgtggtctgcaccccgcatctgggcgctgccacgaccgaggcgcaggaaaacgtcgccctgcaggtggccgagcagatgtcgaactatctgctgaccggcgccgtcgaaaacgcgctcaacatgcccagcgtcaccgccgaagaggccaaggtgatgggcccttggatcgcgctggccggccatctgggcagtttcgtcggtcagatgaccgacgagccgatcaaggccatcaacatcctctatgacgggaccgcctcgaccatgaacctggctgcgctgaactgtgccacagtcgccggcatcatgaaaaaggcaaaccccgaggtgaacatggtctctgcccctgttgtagccaaagagcggggcatccagatctcgaccaccaatcaggacaaatccggcgccttcgacggctatgtcaaggtcaccgtggtcacggccaagcgcgaacgttcggtcgcgggcaccgtgttcagcgacggcaagccgcggttcatccagatcaagggcatcaatgttgatgccgagatcggcgcgcatatgctctataccaccaacgaggacgtgccgggcatcatcggcacgctgggtcagaccatgggcgagaacggcgtcaacatcgccaacttcacccttggccgggccgctgccggcggtgaggcaatcgcgcttttgtacgtggacgagccggtcccggccgaggcgcgcgcgaaactggccgaaaccggcctgttcaaccagatcaaaccgctggaattcgacgtcgcctga

SEQ ID NO: 1364 - protein, 531 aa, Silicibacter pomeroyi DSS-3
MAPKVLISDKLSDAAVQIFRDRGIDVDFQPDLGKDKDKLAEVIGQYDGLAIRSATKVTEKILENATNLKVIGRAGIGTDNVDKDAASKKGVIVMNTPFGNMITTAEHAIAMMFAVARQIPEASASTHAGKWEKSKFMGVELTNKTLGVIGAGNIGGIVCDRARGLKMKVIAYDPFLGEEKANKMGVEKVELDDLLKRADFITLHVPLTDQTRNILGRENLAKTKKGVRIINCARGGLVDEEALAEMLQSGHVAGAAFDVFSVEPAKENPLFGLPNVVCTPHLGAATTEAQENVALQVAEQMSNYLLTGAVENALNMPSVTAEEAKVMGPWIALAGHLGSFVGQMTDEPIKAINILYDGTASTMNLAALNCATVAGIMKKANPEVNMVSAPVVAKERGIQISTTNQDKSGAFDGYVKVTVVTAKRERSVAGTVFSDGKPRFIQIKGINVDAEIGAHMLYTTNEDVPGIIGTLGQTMGENGVNIANFTLGRAAAGGEAIALLYVDEPVPAEARAKLAETGLFNQIKPLEFDVA

SEQ ID NO: 1365 - DNA, 1230 bp, Pseudomonas syringae pv. syringae B728a
  CDS (1)..(1230): transl_table=11
atgagcaagacttccctcgacaagagcaagatcaagttccttcttctcgaaggcgtccaccaatccgctgtcgacgtcctcaaggcagccggttacaccagcatcgagtaccacaccaagtctctgccggaagccgaactgaaagaaaagatcgccgacgcccatttcatcggtatccgctctcgtactcagttgaccgaagagctgttcgattgcgccaagaaactggttgcggtcggctgcttctgcatcggcaccaaccaggttgacctcaacgcggcgcgcgagcgcggtatcgcagtgttcaatgcgccctactccaatacccgttcggtcgccgaactggtattggccgaagccatcctgctgctgcgcggtatccccgagaagaacgcttcctgccaccgtggcggctggatcaagagtgcggccaactccttcgagatccgtggcaagaagctgggcatcatcggttatggttcgatcggtacgcagctgtcggtgctggccgaaggtctgggcatgcaggtgtacttctacgacacgctgaccaaactgccgctgggcaacgccactcaggtgtcgagcctgaacgagctgctgggcatgtccgatatcgtcactctgcacgttccggaaacctcggaaacccagtggatgatcggcgagaaagaaatccgcgcgatgaggaagggcagcatcctgatcaacgccgcgcgtggcacggtggtcgaactggacgcactggctgacgccatcaaggacaagcacctgatcggcgccgccatcgacgtgttcccggtcgagccgcgctcgaacgacgacatcttcgaaagcccgctgcgcggtctggacaacgtgatcctgacgccgcacatcggtggctccacagccgaagcgcaggccaacatcggtctggaagtggcggaaaaactggtcaagtacagcgacaacggtacgtcggtgtcctcggtcaacttcccggaagtggcgctgcctgcgcaccctggcaagcaccgcctgctgcacatccacgaaaacatcccgggcgtgctcagcgagatcaacaaggtcttcgccgaaaacggtatcaacatctccggtcagttcctgcagaccaacgagaaagtcggctacgtggtcatcgacgtcgacgccgaatactccgacctcgcccaggccaagctgcaacagatcaaaggcaccatccgcagccgcgtgctgttctga

SEQ ID NO: 1366 - protein, 409 aa, Pseudomonas syringae pv. syringae B728a
MSKTSLDKSKIKFLLLEGVHQSAVDVLKAAGYTSIEYHTKSLPEAELKEKIADAHFIGIRSRTQLTEELFDCAKKLVAVGCFCIGTNQVDLNAARERGIAVFNAPYSNTRSVAELVLAEAILLLRGIPEKNASCHRGGWIKSAANSFEIRGKKLGIIGYGSIGTQLSVLAEGLGMQVYFYDTLTKLPLGNATQVSSLNELLGMSDIVTLHVPETSETQWMIGEKEIRAMRKGSILINAARGTVVELDALADAIKDKHLIGAAIDVFPVEPRSNDDIFESPLRGLDNVILTPHIGGSTAEAQANIGLEVAEKLVKYSDNGTSVSSVNFPEVALPAHPGKHRLLHIHENIPGVLSEINKVFAENGINISGQFLQTNEKVGYVVIDVDAEYSDLAQAKLQQIKGTIRSRVLF

SEQ ID NO: 1367 - DNA, 1233 bp, Haemophilus influenzae 86-028NP
  CDS (1)..(1233): transl_table=11
atgacaaacaaagtttcactcgacaaatcaaaaattaaatttgtattgtttgaaggtgtgcatcaaagcgcacttgatacgctccacgcggcaggctatagcaatattgattactataaaaaagcactggatggtgatgaattaaaagaagccattaaagatgcacattttatcggattacgttctcgcacccatttaaccgcagaaatgattgaagccgcacccaaattaatcgcagtaggctgtttctgtattggcaccaaccaagtggatttaaatgcagcaaaagcacgtggtattcctgtatttaatgcgccattctcaaacactcgttccgtcgcagaacttgtattaggcgagattttattacttatgcgtaatgtgccacaggctaatgccgaagtacatcgtggtgtttggaataaatccgcgactggctcttatgaagtgcggggtaaaaaattaggcattattggttacggccacattggttcacaattaagtattattgccgaatcattaggcatggatgtgtatttctatgatattgaaaataaacttccgctcggtaatgcaaaacaggttcgtagccttgaagaattactcagttcttgcgatgtggtttcattacatgtgccagaactgccctccaccaaaaacttaatgaacgcaacgcgtatcgcacaattaaaacaaggggcaattttgatcaatgctgcgcgtggcactgtggtagatattgatgctctcgctcaagccttaaaagacgggaaacttcagggtgccgcaattgatgtattccccgttgaacctgcttcaattaatgaagaatttgtctcgccattacgcgaatttgataatgtgattttaacgccacatattggcggctcaacagcggaagcacaagaaaatatcggttttgaagtggcaggcaaatttgttaaatattcagataatggctcaaccctttcttcggtaaacttcccagaagtctctttaccagagcacgagggaacaaaacgcttattgcatattcatgaaaatcgccctggtatattgaacaaactgaaccaaattttcgtcgaagccaacctcaatattgccgcacaatatttacaaactgacccgaaaattggttacgttgtcgttgatgtagaaacgaatgatgcatcaccattactgacaaaattgaaggaaattgatggcacaattcgtgctagagtactttactaa

SEQ ID NO: 1368 - protein, 410 aa, Haemophilus influenzae 86-028NP
MTNKVSLDKSKIKFVLFEGVHQSALDTLHAAGYSNIDYYKKALDGDELKEAIKDAHFIGLRSRTHLTAEMIEAAPKLIAVGCFCIGTNQVDLNAAKARGIPVFNAPFSNTRSVAELVLGEILLLMRNVPQANAEVHRGVWNKSATGSYEVRGKKLGIIGYGHIGSQLSIIAESLGMDVYFYDIENKLPLGNAKQVRSLEELLSSCDVVSLHVPELPSTKNLMNATRIAQLKQGAILINAARGTVVDIDALAQALKDGKLQGAAIDVFPVEPASINEEFVSPLREFDNVILTPHIGGSTAEAQENIGFEVAGKFVKYSDNGSTLSSVNFPEVSLPEHEGTKRLLHIHENRPGILNKLNQIFVEANLNIAAQYLQTDPKIGYVVVDVETNDASPLLTKLKEIDGTIRARVLY

SEQ ID NO: 1369 - DNA, 1230 bp, Pseudomonas fluorescens Pf-5
  CDS (1)..(1230): transl_table=11
atgagcaagacttctctcgataagagcaagatcaagttccttctcctcgaaggcgtccaccaatccgctgtcgacgtcctcaaggccgccggctacaccagcatcgagtacctcaccggttctctgccggaagcccagctcaaggaaaagatcgccgatgcacacttcatcggcattcgctcccgcactcaactgaccgaagagatcttcgaccacgcgaagaaactggtcgcagtgggctgcttctgcatcggcaccaaccaggttgacctgtccgccgctcgtgagcgcggcatcgcggtgttcaacgcgccgtactccaacacccgttcggttgccgagctggtgctggccgaggccatcctgctgctgcgcggcatccccgagaaaaacgcttcctgccaccgtggcggctggatcaagagcgcggccaactccttcgaaatccgtggcaagaagctgggtatcgtcggctacggctccattggtacgcagttgtcggtcctggccgaaggcttagggatgcaggtgtttttctacgacaccgtgaccaagctgccactgggcaacgccacccaggtgggcaacctgcacgaactgctgggcatgtccgacatcgtcaccctgcacgtgccggaaaccgcggccacccagtggatgatcggcgagaaggaaatccgcgccatcaagaagggcggcatcctgatcaacgccgcccgcggcaccgtggtcgagctggacgccctggcggacgcgatcaaggacaagcacctgatcggcgcggccatcgacgtattcccggtggagccgcgctccaacgacgaagagttcgaaagcccgctgcgcggcctggacaacgtgatcctgaccccgcacatcggcggttccaccgctgaagcccaggccaacatcggcctggaagtggcagaaaaactggtcaagtacagcgacaacggtacctcggtgtcctcggtcaacttccctgaagtggcgctgccggcccacccgggcaagcaccgtctgctgcacatccacgagaacattccgggcgtgatgagcgagatcaacaaggtcttcgccgaaaacggcatcaacatctccggtcagttcctgcagaccaacgagaaggtcggctacgtggtgatcgacgtcgacgccgagtactcggacctggcgcaagagaagctgcagcacatcaacggcaccatccgttgccgcgtgctgttctaa

SEQ ID NO: 1370 - protein, 409 aa, Pseudomonas fluorescens Pf-5
MSKTSLDKSKIKFLLLEGVHQSAVDVLKAAGYTSIEYLTGSLPEAQLKEKIADAHFIGIRSRTQLTEEIFDHAKKLVAVGCFCIGTNQVDLSAARERGIAVFNAPYSNTRSVAELVLAEAILLLRGIPEKNASCHRGGWIKSAANSFEIRGKKLGIVGYGSIGTQLSVLAEGLGMQVFFYDTVTKLPLGNATQVGNLHELLGMSDIVTLHVPETAATQWMIGEKEIRAIKKGGILINAARGTVVELDALADAIKDKHLIGAAIDVFPVEPRSNDEEFESPLRGLDNVILTPHIGGSTAEAQANIGLEVAEKLVKYSDNGTSVSSVNFPEVALPAHPGKHRLLHIHENIPGVMSEINKVFAENGINISGQFLQTNEKVGYVVIDVDAEYSDLAQEKLQHINGTIRCRVLF

SEQ ID NO: 1371 - DNA, 1227 bp, Psychrobacter arcticus 273-4
  CDS (1)..(1227): transl_table=11
atggcgttatcactccaaaaagacaaaatccggtttttattgcttgaaggtctgcacgacaatgctttaaaggtattgaaagatgctggttatcaaaatattgaaaatatcagccatgcattggatcaagacgagctgattgaaaagattaaagatgctcattttattggtattcgctcgcgcacgcagctgacgcgcgaagtgcttgagcatgcacaaaagcttattggcatcggttgtttttgtattggtaccaaccaagtagacttagatgctgctcgtgagttcggtattccggtcttcaacgcgccattctcaaacacccgttcggtagcagagttggtacttgctgaagccatcatgctctatcgcggtatccctgaaaaaaatgccactgtacatcgcggcggttggggtaagtctgcgaccaattcacatgaagtgcgcggcaaaaccatcggtatcgtcggttatggctctatcggctcgcaactgtctgtattggctgaaagctttggtatgaaagtcatttaccatgatgtcttaaccaaactgccactaggtaacgcagtacaagtagctagcttagaagagctgttatctactgccgatatcgtgaccttgcatgtacctgaactgccaagcacgcgctatatgatgaaagctgagcagtttgcgcatatgaaagagggtagctactttatcaatgcggcacgtggtacttgtgttgagattgatgaccttactgccgtgcttgagtctggtaaaatcttgggcgcagcgattgatgtgttcccaaaagagccaaaatctgcagacgaagagtttgagtcaccactacgtaagttcgataatgtcatcttgacgccgcatattggcggctcaacgcaagaagcacaggcaaacattggattggaagttgcagataagtttgtgcgatattctgaccaaggcaacacggcaacggctgtaaacttcccagaagtatctattccgtttaaagaaggcacgcatcgtctgctacatatccacaaaaacgtaccaggcgtcctgtcacagattaaccgtctgtttgctgaagcaaatatcaatatcttagcgcagagcttgatgactgaaggcgatgtcggctatcttgttatggatgtcgattataacgactcaaccgcggctttagatcagctaaaagatgttcaagaaacgattcgtgtacgtattttattctaa

SEQ ID NO: 1372 - protein, 408 aa, Psychrobacter arcticus 273-4
MALSLQKDKIRFLLLEGLHDNALKVLKDAGYQNIENISHALDQDELIEKIKDAHFIGIRSRTQLTREVLEHAQKLIGIGCFCIGTNQVDLDAAREFGIPVFNAPFSNTRSVAELVLAEAIMLYRGIPEKNATVHRGGWGKSATNSHEVRGKTIGIVGYGSIGSQLSVLAESFGMKVIYHDVLTKLPLGNAVQVASLEELLSTADIVTLHVPELPSTRYMMKAEQFAHMKEGSYFINAARGTCVEIDDLTAVLESGKILGAAIDVFPKEPKSADEEFESPLRKFDNVILTPHIGGSTQEAQANIGLEVADKFVRYSDQGNTATAVNFPEVSIPFKEGTHRLLHIHKNVPGVLSQINRLFAEANINILAQSLMTEGDVGYLVMDVDYNDSTAALDQLKDVQETIRVRILF

SEQ ID NO: 1373 - DNA, 1254 bp, Colwellia psychrerythraea 34H
  CDS (1)..(1254): transl_table=11
atgatcattgccaaccaaaactcattagcaaaaagtaagattaaaattttattacttgaaggcttgcacccaagctctctagaagaattgaagctaaaaggttattcaaatattgaatcacttaaaacctcgctctcagaaagtgagttaattgaaaaaattgcaaatgttcactttattggcattcgctcacgtactcagttaactgaaaaagtgctaagtcatgcgaataagttggttgctatcggttgtttttgtattggcaccaatcaagttgatttaaaagcagctcaaactcgcggtatccctgtttttaatgctccattttcaaatactcgttcagttgctgagcttgttcttggtgaaacgttattattactacgtggtattcctgagaaaagtgcaaaagctcatcgtggtgaatggttgaaatcagcggttggctcagtagaagcccgtggcaaagtactaggtattattggttacggtcatattggcatgcaattaggtattttagctgaaacattaggtatgagagtacgcttttacgacgtagaaactaaattacctttaggtaatgcaagtcaagcgccgtcattagatgcattacttggtgagtctgacgtagtgagcttacatgtacctgaaacagcgcaaactcaaaatatgattgcacaagctcaattcgaagcaatgaaacaaggcgctatctttattaatgcttctcgaggaactgtggttgatatccctgctttagcacaagctttggatagtaaaaaaattgcaggggctgcaattgatgttttccctgttgagccaaagagtaataatgacgagtttatctcagcgttacgcggatttgataatgttattctaacgccacacattggtggtagtacaaaagaagcacaagccaatatcggtttagaagtagcaacaaagctagctaagtattctgataatggttcaagtctatctgcggttaacttccctgaagtatctttacctgatcactcttttccaggtcagaagaataccagccgtttattacatattcaccataaccaaccaggtgttttgactcaaattaaccaagcatttgctgaacacaatattaatattgcagcacaatacttacaaaccgatgacaaaattggctatgtggttattgatcttgattcagaagatagtagtttagcgttagaacagttaaaacatgttgatggcaccatacgcgctagaatattgcattaa

SEQ ID NO: 1374 - protein, 417 aa, Colwellia psychrerythraea 34H
MIIANQNSLAKSKIKILLLEGLHPSSLEELKLKGYSNIESLKTSLSESELIEKIANVHFIGIRSRTQLTEKVLSHANKLVAIGCFCIGTNQVDLKAAQTRGIPVFNAPFSNTRSVAELVLGETLLLLRGIPEKSAKAHRGEWLKSAVGSVEARGKVLGIIGYGHIGMQLGILAETLGMRVRFYDVETKLPLGNASQAPSLDALLGESDVVSLHVPETAQTQNMIAQAQFEAMKQGAIFINASRGTVVDIPALAQALDSKKIAGAAIDVFPVEPKSNNDEFISALRGFDNVILTPHIGGSTKEAQANIGLEVATKLAKYSDNGSSLSAVNFPEVSLPDHSFPGQKNTSRLLHIHHNQPGVLTQINQAFAEHNINIAAQYLQTDDKIGYVVIDLDSEDSSLALEQLKHVDGTIRARILH

SEQ ID NO: 1375 - DNA, 1290 bp, Pseudomonas syringae pv. phaseolicola 1448A
  CDS (1)..(1290): transl_table=11
gtgcccagagccgaaccgggcaccccctgccaattttcttcgggacacaggtttacgcagatgagcaagacttccctcgacaagagcaagatcaagttccttcttctcgaaggcgtccatcagtccgctgtcgacgtcctcaaggcagccggctacaccagcatcgagtaccacaccaagtctctgccggaagccgaactgaaagaaaagatcgccgacgcacacttcatcggtatccgctcccgcactcagttgaccgaagagctgttcgattgcgccaagaaactggttgccgtcggctgcttctgcatcggcaccaaccaggttgacctcaatgcagcgcgtgagcgcggtattgcagtgttcaatgcgccctactccaacacccgctcggtagctgaactggtgctggccgaggcgatcctgctgctgcgcggtatccctgagaaaaacgcttcatgccaccgtggcggctggatcaaaagcgcggccaactctttcgaaatccgtggcaagaagctcggcatcattggctatggctcgattggtacgcagttgtcggtgctggccgaaggcctgggcatgcaggtgtacttctacgacacgctgaccaagctgccactgggcaacgcgactcaggtgtccagcctgaacgagctgctgggcatgtccgatatcgtcaccctgcacgtgccggaaacctcggaaacccagtggatgatcggcgaaaaagaaattcgcgcgatgaaaaagggcagcatcctgatcaacgcggctcgcggcacagtcgttgagctggacgccctggccgacgcgatcaaggacaagcacctgatcggcgctgcaatcgacgtgttcccggtcgagccacgctcgaacgacgacatcttcgaaagcccgctgcgtggcctggacaacgtgatcctgaccccgcacatcggtggttccactgccgaagcgcaggccaacatcggtctggaagtcgcagaaaagctggtcaagtacagcgacaacggtacatcggtgtcgtcggtcaacttcccggaagtggccttgcctgctcaccctggcaagcatcgcctgctgcacatccacgagaacatcccgggcgtgctcagcgagatcaacaaggtcttcgccgagaacggcatcaacatctccggtcagttcctgcagaccaacgagaaagtcggttacgtggtcatcgacgtcgacgccgagtactcggatttggcacaagccaagctgcaacagatcaaaggcaccatccgcagccgcgttctgttctga

SEQ ID NO: 1376 - protein, 429 aa, Pseudomonas syringae pv. phaseolicola 1448A
MPRAEPGTPCQFSSGHRFTQMSKTSLDKSKIKFLLLEGVHQSAVDVLKAAGYTSIEYHTKSLPEAELKEKIADAHFIGIRSRTQLTEELFDCAKKLVAVGCFCIGTNQVDLNAARERGIAVFNAPYSNTRSVAELVLAEAILLLRGIPEKNASCHRGGWIKSAANSFEIRGKKLGIIGYGSIGTQLSVLAEGLGMQVYFYDTLTKLPLGNATQVSSLNELLGMSDIVTLHVPETSETQWMIGEKEIRAMKKGSILINAARGTVVELDALADAIKDKHLIGAAIDVFPVEPRSNDDIFESPLRGLDNVILTPHIGGSTAEAQANIGLEVAEKLVKYSDNGTSVSSVNFPEVALPAHPGKHRLLHIHENIPGVLSEINKVFAENGINISGQFLQTNEKVGYVVIDVDAEYSDLAQAKLQQIKGTIRSRVLF

SEQ ID NO: 1377 - DNA, 1278 bp, Ralstonia eutropha JMP134
  CDS (1)..(1278): transl_table=11
ttgccgcgccgcagcagaggctgccggcgcgcaccttgttctctccgagtcctattcttgcgcggaaaactgaacgtgacgactgcgatcctgctcgaaaacatccatgcaagcgccacggcgcgccttggcgaggccggcctgacggtcgagcgccgcaccggcgcgctggccggcgacgaactgcgccaggtgctggcaagccatgacctcgtcggcatccgctctgccacgcacctgcgcggcgacgatatccgcagcgcgcccgcgctgctcagcatcggctgcttctgcatcggcacctcgcaggtcgatctggacgccgcgaccgcggctggcatcccggtcttcaatgcgccgttttcgaacacgcggtcggtggccgagctggtcgtgtccgaggccgtgatgctgctgcgcaagatcccggagaagaatgcgctagctcatgccggcaagtgggccaagggcgccagcggcgcgttcgaggcgcgcggcaagaccatcgccatcgtcggctacggcaatatcggctctcaggtcggcgtattggcggagtcgatgggcatgcgggtggtgtactacgacgtgctggcccggctgtcgctcggctcggcgcgtgccgccggtacgctcgaagaagccgtgtcgcaggcggacgtggtcactctgcacgtgcccgctacggcccgcacgcgcaacatgatcgatgcccacgtgctcgcctgcttcaagccgggcgcgatcctgatcaacgcatcgcgcggcaccgtggtggatatcgatgcgcttgcggcggcactgcgcgacaagcgcctgggcggcgcggcaatcgacgtgttcccggaagagccgaagacgaacaacgatccattcgtcagtccgctgcagcagcttccgaatgtcctgctgacgccccacatcggcggcagcactgaagaggcgcaggagaacatcggcacagaggtagccgccaagctgctgaactacctgaacaccggcggcaccattggcgccgtcaactttcccgaagtcgatcccggtccgctgcacgcgccggcacgcctgctcaacatccacagcaatgctccgggcgcgctagccgcactgaacacgctgctggcccaggatggcgtcaacatcaacggccagcacctgcagacgcgcggccataccggctacgtcgtcacggatctcgaccgcgtgccgtccgacgtgctgatggaatcgctgcgcacgcatgccggattcgtacgttcgcggctgctggtgcgctaa

SEQ ID NO: 1378 - protein, 425 aa, Ralstonia eutropha JMP134
MPRRSRGCRRAPCSLRVLFLRGKLNVTTAILLENIHASATARLGEAGLTVERRTGALAGDELRQVLASHDLVGIRSATHLRGDDIRSAPALLSIGCFCIGTSQVDLDAATAAGIPVFNAPFSNTRSVAELVVSEAVMLLRKIPEKNALAHAGKWAKGASGAFEARGKTIAIVGYGNIGSQVGVLAESMGMRVVYYDVLARLSLGSARAAGTLEEAVSQADVVTLHVPATARTRNMIDAHVLACFKPGAILINASRGTVVDIDALAAALRDKRLGGAAIDVFPEEPKTNNDPFVSPLQQLPNVLLTPHIGGSTEEAQENIGTEVAAKLLNYLNTGGTIGAVNFPEVDPGPLHAPARLLNIHSNAPGALAALNTLLAQDGVNINGQHLQTRGHTGYVVTDLDRVPSDVLMESLRTHAGFVRSRLLVR

SEQ ID NO: 1379 - DNA, 1572 bp, Methanosarcina barkeri str. Fusaro
  CDS (1)..(1572): transl_table=11
atgaaagtattagtcagcgactcactctccaatgaaggtttggagattctaaaagaacactttaaggttgatgtttccaccgggctttccgaagatgagctggtgaaaaaaattaaggattacgatgctcttgtaatacgcagcggtacccatgttactcagaaaataatcgaagctgccgacaacctgaaaattatcgggagagccggagtcggaattgacaatgttgatgtggatgcagctacaaagaaaggcattattgtggctaactctcccgaaggcaatatgatttcggcagcagagcacacaattgctatgatgatggcaatgtccaggaacatcccccaggcaaatgcctcccttaaaggcaaggaatggaaacgtagtaaattcacaggtgtcgaggtcaaaggtaagaccctaggaatcataggtctcggaagaatcggttccgaagtcgcaaaaagggcttccggacttgaaatgaacctgatggggtatgatccatttgtttctgaaaagcgggctattgagcttggtgtcaagctggcaacagttaacgaaatcgcaaaagaagccgattacatcacagtgcacactcctcttataaaagaaaccagaaacattcttgatgaagagcagtttgccctgatgaagcctacaaccagaattctcaactgtgcccgcggcggcattatcaacgaagaagctctggcaaaagctcttgaaagcggaaaaatagccggtgcagcaatagacgttttcattgaggagcctccttttaacagccctcttctgagctttgacaatgttgtagtaacccctcaccttggtgcttctacaaaggaagctcaggtcaatgtggcagtagatattgcaaaggaagtagcgtctgtccttacaggtggacctgcaaagaacgcaatcaatatcccctcggtaaagccggaagctatggcagtccttgccccttacatcaggctctcagaaattatgggtaagattgcagggcagctcgtagacggaaactacgaaaaagtcgaaatcggatataacggagagatttccggaaaggatacaaggcctcttacagtctcggctctcaaaggactgcttgaaatggccctcggttccggagtaaactatgtcaatgctcccactcttgcaaagtccagaatgattgcagtcgtggaaagtaaatccgaatcttctgaggaatactcttcaactatcagtatcaaacttagcagcaacggcaaggaaaagctggttgcaggtactgttgtcggagacgatccaaagatcgtcgcagtcgatgatgacagagtagatatcttccctgcaggccgtatgatttttgccaaacatatcaacaggcccaacgttatcggaccttgctgcatggtactcggtaaaaacaatatcaatatctcaggcatgcaggttggcagatcagaaataggaggcgtgaccatgatggttcttaacatagactccgaagtttctgacccaatccttgaggaagtccggaaagtcgatggaatcctggatgccaaacttgtgacactctaa

SEQ ID NO: 1380 - protein, 523 aa, Methanosarcina barkeri str. Fusaro
MKVLVSDSLSNEGLEILKEHFKVDVSTGLSEDELVKKIKDYDALVIRSGTHVTQKIIEAADNLKIIGRAGVGIDNVDVDAATKKGIIVANSPEGNMISAAEHTIAMMMAMSRNIPQANASLKGKEWKRSKFTGVEVKGKTLGIIGLGRIGSEVAKRASGLEMNLMGYDPFVSEKRAIELGVKLATVNEIAKEADYITVHTPLIKETRNILDEEQFALMKPTTRILNCARGGIINEEALAKALESGKIAGAAIDVFIEEPPFNSPLLSFDNVVVTPHLGASTKEAQVNVAVDIAKEVASVLTGGPAKNAINIPSVKPEAMAVLAPYIRLSEIMGKIAGQLVDGNYEKVEIGYNGEISGKDTRPLTVSALKGLLEMALGSGVNYVNAPTLAKSRMIAVVESKSESSEEYSSTISIKLSSNGKEKLVAGTVVGDDPKIVAVDDDRVDIFPAGRMIFAKHINRPNVIGPCCMVLGKNNINISGMQVGRSEIGGVTMMVLNIDSEVSDPILEEVRKVDGILDAKLVTL

SEQ ID NO: 1381 - DNA, 1581 bp, Anabaena variabilis ATCC 29413
  CDS (1)..(1581): transl_table=11
atgtctaaggttctcgtctccgatcctattgaccaggctggcattgacattctctcgcaagtcgctactgttgatgtcaatacaggtctcaaaccagcagaattaatagaaattattggtcagtatgacgcgttaatgattcgttcgggtacgcgcgtcacgcaagaaattattgaagcaggtacacagctgaaaatcatcggtcgtgccggtgtgggtgtggataatgtagatgttccggctgctactcgtcgaggaattgttgttgtcaattctcctgaggggaacaccatcgccgccgccgaacacgccttggcaatgatgctgtcattatctcgccacatccccgatgctaacgcttccgtgaaacgcggtgagtgggatcgcaaaactttcgtgggtgcggaagtttacaaaaaaactttaggggttgtgggtttaggcaaaattggttcccatgtggctactgttgcgaaagcaatgggaatgaaattgttagcttacgatcccttcatttcgactgaacgggctgaacaacttggttgtcagttagtagatttagatttgctgatgcagcaatctgactatatcaccctgcacattcccaaaaccccagaaaccacccacatcatcaacgccaccactctggcgaaaatgaagcccaccgcccggattatcaactgcgcccgtgggggaatcatcgatgaagcagctttagccgcagccgttaaagaggggaaaattgctggggcggcgctggatgtgttcgagtcagaaccactgggtgaatcagacttaagggcgatcggtaaggatattatccttactccccacttgggtgcatccaccacagaagcccaggtgaatgtagctattgacgtagcggaacaaatccgcgatgtgttgttgggtttacccgcacgttccgccgtcaacatccccggactcggccccgatgtgttggaagaactcaaaccctatatgcagctagcggaaactttgggtaagttggtaggacagttagccggtgggcgagtagaactactcaccgtccgcttacaaggtgaactcgctactaataagagtcagcctttagtaattgcttccctgaaaggattactacaccaagccctacgggaacgagtaaactacgtcaacgccaacatagaagccaaggaacggggaatccgagttattgaaacccgcgacgcttccgcccgtgactatgctggttccctacgcttggaagcaacaggaaccttaggcactcattctgtcactggtgcattgctaggcgataaggaaattcacctcaccgacgttgatggcttcccgattaacgtcccaccaagcaaatatatgttgtttaccttgcaccgtgatatgccaggaatcattggcaaactcggttccttactgggcagctttaatgtcaatattgccagtatgcaggtagggcgcaaaatcgtccgtggtgatgccgttatggctctcagcattgatgatcccttaccagatggcattttggcggaaatcaccaaagtacccggcatccgggacgcgtacacagtaacactatag

SEQ ID NO: 1382 - protein, 526 aa, Anabaena variabilis ATCC 29413
MSKVLVSDPIDQAGIDILSQVATVDVNTGLKPAELIEIIGQYDALMIRSGTRVTQEIIEAGTQLKIIGRAGVGVDNVDVPAATRRGIVVVNSPEGNTIAAAEHALAMMLSLSRHIPDANASVKRGEWDRKTFVGAEVYKKTLGVVGLGKIGSHVATVAKAMGMKLLAYDPFISTERAEQLGCQLVDLDLLMQQSDYITLHIPKTPETTHIINATTLAKMKPTARIINCARGGIIDEAALAAAVKEGKIAGAALDVFESEPLGESDLRAIGKDIILTPHLGASTTEAQVNVAIDVAEQIRDVLLGLPARSAVNIPGLGPDVLEELKPYMQLAETLGKLVGQLAGGRVELLTVRLQGELATNKSQPLVIASLKGLLHQALRERVNYVNANIEAKERGIRVIETRDASARDYAGSLRLEATGTLGTHSVTGALLGDKEIHLTDVDGFPINVPPSKYMLFTLHRDMPGIIGKLGSLLGSFNVNIASMQVGRKIVRGDAVMALSIDDPLPDGILAEITKVPGIRDAYTVTL

SEQ ID NO: 1383 - DNA, 1230 bp, Pseudomonas fluorescens PfO-1
  CDS (1)..(1230): transl_table=11
atgagcaagacttctctcgataagagcaagatcaagttccttcttctcgaaggcgtccaccaatcggctgtcgacgtcctcaaggcggcgggctacaccagcatcgaatacctgacaggctccctgccggaagcccagctcaaggaaaagatcgctgacgctcacttcatcggcattcgctcacgcacccagctgaccgaagagatcttcgatcacgcgaagaagctggtcgctgtcggctgtttctgcatcggcaccaaccaggtcgacctggaagcggcccgcgagcgcggcatcgccgtgttcaacgcaccgtactccaacacccgctccgtggccgagctggtgctggccgaagcgatcctgctgctgcgcggcatccctgagaaaaacgcttcctgccaccgtggcggctggatcaagtccgcagccaactccttcgagatccgtggcaagaaactgggcatcgtcggctacggctcgatcggtactcagctgtcggtcctggcggaaggtctgggcatgcaggtgttcttctacgacaccgtgaccaagctgccactgggcaacgcgacccaggtcggcaacctgcacgagctgctgggcatgtccgacatcgtcaccctgcacgttccggaaaccgctgcgacccagtggatgatcggcgagaaggaaatccgcgccatcaagaagggcggcatcctgatcaacgctgcacgcggcaccgtggtcgaactggatcacctggccgctgcgatcaaggacaagcacctgatcggcgccgccatcgacgtgttcccggtcgagccgcgctccaacgacgaagagttcgaaagcccgctgcgtggcctggataacgtgatcctgaccccgcacatcggcggctccaccgctgaagcgcaggccaacatcggtctggaagtggcagaaaaactggtcaagtacagcgacaacggtacttcggtatcgtcggtgaacttcccggaagtggccctgccggcgcaccctggcaagcaccgcctgctgcacatccacgagaacatcccgggtgtgatgagcgagatcaacaaggtcttcgccgaaaacggcatcaacatctccggtcagttcctgcagaccaacgaaaaggtcggctacgtcgtgatcgacgtcgacgccgagtactcggaactggcgcaagagaagctgcaacacgtcaacggcaccatccgaagccgtgtgttgttctga

SEQ ID NO: 1384 - protein, 409 aa, Pseudomonas fluorescens PfO-1
MSKTSLDKSKIKFLLLEGVHQSAVDVLKAAGYTSIEYLTGSLPEAQLKEKIADAHFIGIRSRTQLTEEIFDHAKKLVAVGCFCIGTNQVDLEAARERGIAVFNAPYSNTRSVAELVLAEAILLLRGIPEKNASCHRGGWIKSAANSFEIRGKKLGIVGYGSIGTQLSVLAEGLGMQVFFYDTVTKLPLGNATQVGNLHELLGMSDIVTLHVPETAATQWMIGEKEIRAIKKGGILINAARGTVVELDHLAAAIKDKHLIGAAIDVFPVEPRSNDEEFESPLRGLDNVILTPHIGGSTAEAQANIGLEVAEKLVKYSDNGTSVSSVNFPEVALPAHPGKHRLLHIHENIPGVMSEINKVFAENGINISGQFLQTNEKVGYVVIDVDAEYSELAQEKLQHVNGTIRSRVLF

SEQ ID NO: 1385 - DNA, 1605 bp, Rhodobacter sphaeroides 2.4.1
  CDS (1)..(1605): transl_table=11
atgcccgacatggccccccgcgttctcgtttccgacgaactctccgaaaccgccgtccagatcttccgcgaccgtggcgtcgaggtcgactacatgccgaaactcggcaaggacaaggaaaagctggccgagatcatcggccagtacgacggcctcgcgatccgttcggccaccaaggtgaccgagaagctgctcgagcaggccaccaacctcaaggtcatcggccgcgccggcatcggggtcgacaacgtcgatatcccggccgcctcgcgcaagggcgtgatcgtgatgaacacgcccttcggcaactcgatcaccaccgccgaacatgccatcgcgatgatgttcgcctgcgcccggcagctgcccgaggccaatgcctcgacccatgccggcaagtgggagaagtcgcgcttcatgggggtcgagctcttcaacaagacgctcggcgtgatcggcgcgggcaacatcggcggcatcgtctgcgaccgggcgctggggctctcgatgaaggtcgtggcctacgatcccttcctgtcggaagagcgcgccaaggcgctcggcgtgaccaaggtcgagctcgacgacctgctggcgcgcgccgatttcatcacgctccatgtgccgctgaccgacaagacccgcaacatcctgtcggccgaagctatcgccaagaccaagaagggcgtgcggatcatcaactgcgcccgcggcggtctggtggacgagaaggcgctggccgaggcgatcaagtcgggccatgtggccggcgctgccttcgacgtgttcgaggtcgagcccgcctccgaaagcccgctcttcaacctgccgaacgtggtcgtgacgccgcacctcggcgcctccacgacggaagcgcaggagaatgtggcgcttcaggtggccgagcagatgtccgactatctgctgacgggcgcggtgcagaacgcgctcaacatgccgtcggtcacggcggaagaggccgcggtcatgggcccgtgggtcaagctcgccggccatctcggcgccttcgtgggccagatgacggacgagccgatcaaggcgatcaacgtgctctatgacggggccgtgggcgaaatgaacctcgccgcactgaactgcgccaccatcgcgggcatcatgaaggccaccaacccggacgtgaacctcgtctcggctccggtcgtggccaaggagcgcgggatccagatctcgaccaccacgcaggccaagtcgggcgccttcgatgcctacatcaagctgacggtcgtgaccgacaagcgcgagcggtcggtggcgggcacctgcttctcggacggcaagccgcgcttcatccagatcaagggcatcaacatcgacgccgaagtcggccgccacatgctctacaccacgaacgaggacgtgccgggcatcatcggcctcctcggcatgaccatgggcaagaacggcgtcaacatcgcgaacttcaccctcggccggacctcggtcgggcaggaggccatcgcgatcctctacctcgatcaggcaatcgatccgaaggtggtggagacgctcgaatcgaccggcctcttccagcaggtgaagccgctcgaattcgacgtggcctga

SEQ ID NO: 1386 - protein, 534 aa, Rhodobacter sphaeroides 2.4.1
MPDMAPRVLVSDELSETAVQIFRDRGVEVDYMPKLGKDKEKLAEIIGQYDGLAIRSATKVTEKLLEQATNLKVIGRAGIGVDNVDIPAASRKGVIVMNTPFGNSITTAEHAIAMMFACARQLPEANASTHAGKWEKSRFMGVELFNKTLGVIGAGNIGGIVCDRALGLSMKVVAYDPFLSEERAKALGVTKVELDDLLARADFITLHVPLTDKTRNILSAEAIAKTKKGVRIINCARGGLVDEKALAEAIKSGHVAGAAFDVFEVEPASESPLFNLPNVVVTPHLGASTTEAQENVALQVAEQMSDYLLTGAVQNALNMPSVTAEEAAVMGPWVKLAGHLGAFVGQMTDEPIKAINVLYDGAVGEMNLAALNCATIAGIMKATNPDVNLVSAPVVAKERGIQISTTTQAKSGAFDAYIKLTVVTDKRERSVAGTCFSDGKPRFIQIKGINIDAEVGRHMLYTTNEDVPGIIGLLGMTMGKNGVNIANFTLGRTSVGQEAIAILYLDQAIDPKVVETLESTGLFQQVKPLEFDVA

SEQ ID NO: 1387 - DNA, 1578 bp, Carboxydothermus hydrogenoformans Z-2901
  CDS (1)..(1578): transl_table=11
gtgcgaattctggcttccgacccgatagcggaaaagggcttaaatattttacgggaagaaggatttatagttgacgaaaaaacaaagctttcggaagaagaattaattaaaattattccccagtacgatgcgttaattgttcggagcgaaacaaaggttaccgcaagaattattgaagccgcagaaaacttaaagataataggacgggccggggtaggggtagataacattgacctggctgctgcatccaaaaaaggaattattgtggttaattccccggaaggtaatacaattgcggcggcggagcatacctttgccctgatgatggccttactaagaaatattccccaggcccacgctgccttaaaagaaggaaaatggctgagaaaagagtttaccggctatgagctccggggcaagacggtggggattatcggccttggccggataggaacggcggtagccaaaagagttaaagcctttgaaacccgggtaatcggttatgacccctttatttccgaagaacgggctcaaatgcttggtattacgttaatgtcattagaagaacttttacaaaattccgatattgttaccatgcaccttcctttaaataacgaaacccggaatttaatcaaccgggagcggttaaagctcatgaaaaagtcagcgtttatcatcaattgcgcccggggaggaattattgacgaagaagcgctgtacgaagcgttaaaagccggagaaattgccggagcggcactggatgtttttagcaaggagcctcttaccgagtctcctttatttgagctcccaaacgtgattgtaactccccacctgggagcttctactaaagaagcacagattaacgtcgctatcgatgtggcccgggaaattgccagcgtattaaagggcgggcttgcccagaatgccgttaacttcccggcgatggacaaagaaagctatcaacggctaaagccttacattaatcttgcagaaaaactcggaaacttcctggcccagattttatcgggagggcttctggccgcggaaatagtttacaatggttcggcttttaaagaagaaacccgtcctttaaccttagctgccttaaaaggattattagatccgcttttgatggaaagggtaaattatgttaatgcgccggtagttgccaaagaaagaggaattaaagtcagggaaacggtaatggaaaacggtgcggattacaccaacctcattaccttaaaagtaactaccgaaaagggtgaacgaattattgccggaactttgttcagaaataatgagccgcgaattgtccaaatagaccagtaccgggttgatgtggtacccgaagggtataaactttttgttccgcataaagaccagcctttaatgattggaaaagttggcataatcttgggggaaaagggaataaatattgccggaatgcagcttggccgaataactcccggcggagatgcggtcatggttttatcgctggatcatccggcggatggtgacagcattaaagcaattgcagcaattccggggatttatgaagtaaaggcggtgagtttataa

SEQ ID NO: 1388 - protein, 525 aa, Carboxydothermus hydrogenoformans Z-2901
MRILASDPIAEKGLNILREEGFIVDEKTKLSEEELIKIIPQYDALIVRSETKVTARIIEAAENLKIIGRAGVGVDNIDLAAASKKGIIVVNSPEGNTIAAAEHTFALMMALLRNIPQAHAALKEGKWLRKEFTGYELRGKTVGIIGLGRIGTAVAKRVKAFETRVIGYDPFISEERAQMLGITLMSLEELLQNSDIVTMHLPLNNETRNLINRERLKLMKKSAFIINCARGGIIDEEALYEALKAGEIAGAALDVFSKEPLTESPLFELPNVIVTPHLGASTKEAQINVAIDVAREIASVLKGGLAQNAVNFPAMDKESYQRLKPYINLAEKLGNFLAQILSGGLLAAEIVYNGSAFKEETRPLTLAALKGLLDPLLMERVNYVNAPVVAKERGIKVRETVMENGADYTNLITLKVTTEKGERIIAGTLFRNNEPRIVQIDQYRVDVVPEGYKLFVPHKDQPLMIGKVGIILGEKGINIAGMQLGRITPGGDAVMVLSLDHPADGDSIKAIAAIPGIYEVKAVSL

SEQ ID NO: 1389 - DNA, 1587 bp, Prochlorococcus marinus str. MIT 9312
  CDS (1)..(1587): transl_table=11
atgacaaaagttctcattacagatccaattgatcaaacaggaattgatattctttcacaggtagcgcaagtagatcagcgaataggaatctcaaactctgaattggcatcaattatcaaagaatatgatgccctaatgatacgatctggcactcaagtgactgaagaaattattaactcttcaaataaactgaggattattggaagagcaggagtaggagttgataatgtagatgttaaagctgctacacaaaaaggggttcttgttgttaattcgccaggaggaaatactattgctgctgctgaacacaccatagctatgatgttggccttatctagaaatattccaatagctaatagtagtactttgttaggtaaatgggagagaaagaaatttgttggtaatgagctttataagaaaaagttaggagtcgtaggtttagggaaaattggtgctcatgtagctaaagttgccaatgcattaggaatggaagtttacggatatgatccctttgtttcaactgaaagagctcaacaaataaaagttaaactatctgaattagatgacctattccaacaatcagattatgtaactttgcatttacctcgcacaccagagacagagaatttagtaaatatgaaggtgcttaaaagtatgaaaagtagcgcaaagttaattaattgtgctcgaggaggtttaattgacgaagaagcattagcagaagctttaaatcaatccttcattggaggagcagcaatagatgtcttttctaaagaacctttggaatctgattcaccacttctgcaagttgaaaagaatcttattcttacacctcatttaggagcatctactcgggaagcacaagaaaatgtagctgttgatgttgccgaacaaataagagatgtattgcttggtttatcggctagaactgccgttaatattcctggtttaagtcctgatattatggatagccttaagcctcatttacagttagcagaaacgatgggacttcttgtaagtcagcttgcaggaggacagattcaaaaattagaggtaaagcttcaaggtgaatttgttcaacatccttcccagccattaataattgccagtctaaaaggccttctaagtaaagctttgggagataggatcaattatgtgaatgcttctctagaagcagattctaggggcatttcagtcgttgagagtaaagatgaggcaagacctgaatttgctagtggatcgcttcagttaactacttatggagataatggagaccatagcgtagcgggaagcatttttgctgatggagaattaagaattattagtattgatcaatacccagtaaacgtatcaccaagcagatatatgttggttactaggcatagagatatgcctggtattattggcaagctgggttctttattgggtagcaacaatgtaaatattgcctccatgcaagttgggcgcaaaattgttagaggagaagctgttatggttttaagtattgatgatccaatacctaataagttgcttgacaccattattgaagtagagggaattactagcgctaatccagttactttataa

SEQ ID NO: 1390 - protein, 528 aa, Prochlorococcus marinus str. MIT 9312
MTKVLITDPIDQTGIDILSQVAQVDQRIGISNSELASIIKEYDALMIRSGTQVTEEIINSSNKLRIIGRAGVGVDNVDVKAATQKGVLVVNSPGGNTIAAAEHTIAMMLALSRNIPIANSSTLLGKWERKKFVGNELYKKKLGVVGLGKIGAHVAKVANALGMEVYGYDPFVSTERAQQIKVKLSELDDLFQQSDYVTLHLPRTPETENLVNMKVLKSMKSSAKLINCARGGLIDEEALAEALNQSFIGGAAIDVFSKEPLESDSPLLQVEKNLILTPHLGASTREAQENVAVDVAEQIRDVLLGLSARTAVNIPGLSPDIMDSLKPHLQLAETMGLLVSQLAGGQIQKLEVKLQGEFVQHPSQPLIIASLKGLLSKALGDRINYVNASLEADSRGISVVESKDEARPEFASGSLQLTTYGDNGDHSVAGSIFADGELRIISIDQYPVNVSPSRYMLVTRHRDMPGIIGKLGSLLGSNNVNIASMQVGRKIVRGEAVMVLSIDDPIPNKLLDTIIEVEGITSANPVTL

SEQ ID NO: 1391 - DNA, 1236 bp, Rhodospirillum rubrum ATCC 11170
  CDS (1)..(1236): transl_table=11
gtgagcaatctttcactgcccaaggacaagatccgggtcgtgctgttcgagaacatccatgacagcgccgtcgagtattttcacagtcgcggttaccacaacatcgagcggctgaccggggctctggacggtgaggcgctgaaggacaagatccgtgacgcccatatggtcgggatccgatcgcgaacccgcttgactcgcgacgtcttggaatcagccgaaaagctgatggcggtcggctgcttttgcatcggcaccaatcaggtcgatcttgacgccgccgagcttctggggatccccgttttcaacgccccctattccaatacccgctcggtcgccgaactggtggtcgccgaggcggtgatgatgatgcgcgatatcccacggcgcaattgggatacccacgagggcgggtggaacaaggcggcgaccggctgtcacgaggtgcgcggcaagaccctgggcatcgtcggctatggccatatcggcacccaggtgtccgttctcgccgaaagcatgggcatgtcggtgcgctatttcgacatcgtcgaaaagctggcgatcggcaacgcccagccctgcgccaccctgaacgagctgatggcggtggccgatgtcgtcaccttgcatgtgcccgataccgccgatacccgcgatatgatccgcgcgccgcagatcgcggcgatgaaggacggggcctatctgatcaacgcctcgcgcggcaaggtggttgatatcgacgccctggccgaagccctgacggcgggcaagctgcgcggcgccgccgtcgacgtgttccccaaggagccggccagcctgggcgatccgttcgaaagcccgttgcgcggcatgcgcaatgttctgctgaccccccatatcggcggctcgaccgaagaggcgcagatggggatcggccgcgaagtggccgaaaagctggtgaaatattccgatgacggctcgactctgggcgccgtcaacttccccgaggtggccttgccccagcaggccagcgtgacccgcttcttgcacattcaccgcaatgtgcccggggtgatgagcgcgctcaacgaggtgttttccagccaccacatcaatatccgcggccagtatctgatgaccaatccccgggtcggctatgtggtggtcgatgtggaaaaggacctgaaggccggcgagggcttccgtcaggctttggcggcgatcaacggcacgctgcgcttccgcttcctgaattaa

SEQ ID NO: 1392 - protein, 411 aa, Rhodospirillum rubrum ATCC 11170
MSNLSLPKDKIRVVLFENIHDSAVEYFHSRGYHNIERLTGALDGEALKDKIRDAHMVGIRSRTRLTRDVLESAEKLMAVGCFCIGTNQVDLDAAELLGIPVFNAPYSNTRSVAELVVAEAVMMMRDIPRRNWDTHEGGWNKAATGCHEVRGKTLGIVGYGHIGTQVSVLAESMGMSVRYFDIVEKLAIGNAQPCATLNELMAVADVVTLHVPDTADTRDMIRAPQIAAMKDGAYLINASRGKVVDIDALAEALTAGKLRGAAVDVFPKEPASLGDPFESPLRGMRNVLLTPHIGGSTEEAQMGIGREVAEKLVKYSDDGSTLGAVNFPEVALPQQASVTRFLHIHRNVPGVMSALNEVFSSHHINIRGQYLMTNPRVGYVVVDVEKDLKAGEGFRQALAAINGTLRFRFLN

SEQ ID NO: 1393 - DNA, 1578 bp, Moorella thermoacetica ATCC 39073
  CDS (1)..(1578): transl_table=11
atgcgtgttttagctctggacggcgttgacgcgcggggcctggccgctctccgggaggccgggctggaagtaacgacctccggtaagatggaggaggaagaattgaaagaggctattcgcgactgcgaagccctgatcgtccgcagcggcacgagggtgacagcagcagccattaatgccgctaaaaagttaaagattatcgcccgtgccggggtcggtaccgacaacatcgatgtagcggcggccactgaaaggggtattgtagtggtcaatgcccctgagggcaataccattgctgccgctgaacacaccatagccatgatgctggccctggcccgtaatatcccccaggccagcgccgccctgaaacagggccgctgggaaaagaaaaaatttgtaggcgtggaactgcggggaaaaaccctggggataatcggcctgggcaagattggccgggaggtggcccgtcgcgcccggggcctggaaatgaaggtggtggcctttgatccctatgtagattcggaacaggcggcccgtctggaagtcgagttggtgcccctggaaacccttctggccggggctgattttgtaaccgtgcatctgcccctcaccaaagacacccgccacctcctggaccgggagaagctggggctcatgaagcagggagcgcgggttttaaatgtcgccagggggggtattattgacgaaggagccctctatgaagccctgaaggcgggccacctggcgggggcggccctggatgtctttgaggaagaacccctggggcagagccccctgctggaactggaaaatgtcattgtgaccccgcacctgggggcttccacccgggaggcccaggtggcagtggcggtggaggtggccggtgacgttatccgttgcctccagggtgaaccggtgctcaatgccgtcaatataccggtggttcgggggcatctggcggaggtcctccacccctacctgcagctggcggagaagctgggcagtttcctctcccagctgatggagagccccatcctcacggcagaaatatgttttaacggcgagctggccggctacgacctggccccccttaccagttcctttttaaaggggctcttacggcccctcctggctgaagccgtcaattacgtgaacgcccccctggtggccaaaaaacggggtatccgtatccgagagaaaaagagcccggagatggagtactttgccaacctgatcggcgttcaggtccagggtcggcgggagtcccaccgcctggccgggaccgttaaccaggctggggaaccccggttggtaaacctggacggttacagcgtggacactatcccggccggccatcttctggtgatacctcacctggaccggccccggattatcggcccggtggccctggctatcggtgaccacggcgtcaatatcgcggcgatgcaggtgggccggcgcgagcggggcggccaggccgttatgctaatcagcgtcgattccgaagtcccccgggccgccctggacgccattcgccaggtggacggcgtcctggacgtgcgttatatctccctttag

SEQ ID NO: 1394 - protein, 525 aa, Moorella thermoacetica ATCC 39073
MRVLALDGVDARGLAALREAGLEVTTSGKMEEEELKEAIRDCEALIVRSGTRVTAAAINAAKKLKIIARAGVGTDNIDVAAATERGIVVVNAPEGNTIAAAEHTIAMMLALARNIPQASAALKQGRWEKKKFVGVELRGKTLGIIGLGKIGREVARRARGLEMKVVAFDPYVDSEQAARLEVELVPLETLLAGADFVTVHLPLTKDTRHLLDREKLGLMKQGARVLNVARGGIIDEGALYEALKAGHLAGAALDVFEEEPLGQSPLLELENVIVTPHLGASTREAQVAVAVEVAGDVIRCLQGEPVLNAVNIPVVRGHLAEVLHPYLQLAEKLGSFLSQLMESPILTAEICFNGELAGYDLAPLTSSFLKGLLRPLLAEAVNYVNAPLVAKKRGIRIREKKSPEMEYFANLIGVQVQGRRESHRLAGTVNQAGEPRLVNLDGYSVDTIPAGHLLVIPHLDRPRIIGPVALAIGDHGVNIAAMQVGRRERGGQAVMLISVDSEVPRAALDAIRQVDGVLDVRYISL

SEQ ID NO: 1395 - DNA, 1275 bp, Burkholderia thailandensis E264
  CDS (1)..(1275): transl_table=11
atggcgacgtgcgcgcaccgcgccgggatttccggcttccgctacgattcgaccaccacgctaggtaacatgacttccgttctcctcctcgaaaacattcacgacagcgcgtcccggcatttcgccgacgcgaatgtcgacatcgagcggcgcaagggcgcgctcgccggcgacgagcttcagcgcgcgctgctgcagcatcaattgatcggcattcgctccgcgacgcatctgacgcgcaacgagatcgacgccgcgcgtcatctgctcgcgatcgggtgtttctgcatcggcacgtcgcaggtcgatttgtcggctgccgcgcatcacggcattccggtgttcaacgcgccgttctcgaatacgcggtcggtcgcggagctcgtgatcgccgaggcgatcctgttgctgaggcgcgtgccggagaagagtgtcctcgcgcatgcgggggaatgggcgaaaggtgcgggcggatcgttcgaggcgcgcggcaagacgatcgcgatcgtcggctacggcaacatcggcgcgcaagtcggcgtgcttgccgaggcgctcggcatgaaggtcgtctattacgacgtgcaggcgaagctgtcgctcggttccgcgcggccggcgcgttcgctgggcgaagcgatcgcgctcgcggacgtcgtcacgctgcacgtgcccgcaaccgcgacgacgcacaacatgatcgacgcgagtgtcctcgcgcagttcaaatcgaatgcgatcctgatcaatgcgtcgcgcggcaccgtcgtcgatatcgatgcgctgcgcgatgcgctcgtgcggaagcacctgagcggtgcggcgatcgacgtgtttccgcgcgagccgaagagcaacgcggaccgcttcgaatccgtgctgcaggggttgccgaacgtgatcctgacgccgcatatcggcggcagcacgcaggaagcgcaggagaacatcggcgcggaggtgtcgtcgaagcttgtcgcgttcctgacgcgcggcgataccgcgggcgccgtcaatttcccgcaggtgagcccgggcgattgcacgtcggccgcgcggctcttgaacgtgcacggcaacgcgccgggcgtgctcgcggtgctcaacacgctgctcgcgcaagagggcgcgaatgtcgtagcgcagcatctgcaaacgcgcggcgatatcggctatgtggtgaccgatctcgaccgcgtgccgtccgacgcgtttcttgaaaagctgagcggcaaccgcgcatttactcgcagccggctgcttcgcagcgcatga

SEQ ID NO: 1396 - protein, 424 aa, Burkholderia thailandensis E264
MATCAHRAGISGFRYDSTTTLGNMTSVLLLENIHDSASRHFADANVDIERRKGALAGDELQRALLQHQLIGIRSATHLTRNEIDAARHLLAIGCFCIGTSQVDLSAAAHHGIPVFNAPFSNTRSVAELVIAEAILLLRRVPEKSVLAHAGEWAKGAGGSFEARGKTIAIVGYGNIGAQVGVLAEALGMKVVYYDVQAKLSLGSARPARSLGEAIALADVVTLHVPATATTHNMIDASVLAQFKSNAILINASRGTVVDIDALRDALVRKHLSGAAIDVFPREPKSNADRFESVLQGLPNVILTPHIGGSTQEAQENIGAEVSSKLVAFLTRGDTAGAVNFPQVSPGDCTSAARLLNVHGNAPGVLAVLNTLLAQEGANVVAQHLQTRGDIGYVVTDLDRVPSDAFLEKLSGNRAFTRSRLLRSA

SEQ ID NO: 1397 - DNA, 1623 bp, Novosphingobium aromaticivorans DSM 12444
  CDS (1)..(1623): transl_table=11
atgacggtgtctcattctgatggattggatcgaaacatgaccaagcctaaagtcctgatttccgacaagatggaccccaacgccgcccgcatcttcaccgagatgggctgcgacgtcgatgtgatcaccggcgagacgccggaacagctcatcgcccgcatcggcgagtacgatggccttgccatccgttcctcgaccaaggtgaccaaggcgatcctcgatgccgccaccaacctcaaggtcatcggccgcgccggcatcggcgtcgacaacgtcgatatcccggcagcatcggcgcagggcgtggtggtcatgaacaccccgttcggcaactcgatcaccactgccgaacacgccatcgcgatgatgttcgcgctcgcgcggcagatccccgaagccaacgcccagacccaggcgggcctgtggccgaagaacggcttcatgggcgttgaagtcaccggcaagacgctcggcctgatcggcgcgggcaacatcggctcgatcgtcgcctcgcgtgcgctgggcctgaagatgaaggtcgttgccttcgacccgttcctgacgcccgaacgcgccgtggaaatgggtgtcgagaaggccgatctcgaaacgctgctggccaaggcggacttcatcacgctgcacacgcctctgaccgaccagacccgcaacatcctcagccgcgagaacatcgccaagtgcaagaagggcgtgcgcatcatcaactgcgcgcgtggcggtctcgtcgatgaagccgccctcaaggacgcgctcgattccggccacgtcgccggcgccgcgctcgacgtgttcgagaccgagcccgccaaggaatcgccgctgttcggcaccccgaacttcatctgcaccccgcacctgggcgcgagcacgaccgaagcgcaggtcaacgtggcgctccaggtggccgagcagatggcggacttcctcgtcaccggcggcgtcaccaacgcgctcaacatgccttcgctctcggccgaggaagcgccgaagctgcgcccctacatggcgctggccgaaaagctgggcagcctcgtcggccagcttgcgcacgacaacctcaccaagatcgccatcgaggtcgagggcgctgccgcgcagctcaaccagaagccgatcaccgcggctgtcctggccggcctgatgaagcagtattcgcagaccgtgaacatggtcaacgcgccgttcctcgccaaggaacgcgggctggacgttcgcgaagtgcgccatgaccgcgagggcgaataccgcacgctggtgcgcgtcaccgtcagcacttcgcagggcgaacgttcggtggccggcacgctgttcggcaacggccagccgcgcctcgtcgagatcttcggcatcggcatcgaggccgacctcgacggcgacatgctctacatcgtcaactccgacgcgcccggcttcatcggccgcatcggcacgctgctgggtcagaacacgatcaacatcggcaccttccacctcggccgccgcgaagctggtggcgaggccgtgctgctgctgtcgctcgacaacccggtcagcgaggacgttctcaaggaagctcgcgaaatccagggcgttcgggtcgtcaaggcgctcaagttcgcctga

SEQ ID NO: 1398 - protein, 540 aa, Novosphingobium aromaticivorans DSM 12444
MTVSHSDGLDRNMTKPKVLISDKMDPNAARIFTEMGCDVDVITGETPEQLIARIGEYDGLAIRSSTKVTKAILDAATNLKVIGRAGIGVDNVDIPAASAQGVVVMNTPFGNSITTAEHAIAMMFALARQIPEANAQTQAGLWPKNGFMGVEVTGKTLGLIGAGNIGSIVASRALGLKMKVVAFDPFLTPERAVEMGVEKADLETLLAKADFITLHTPLTDQTRNILSRENIAKCKKGVRIINCARGGLVDEAALKDALDSGHVAGAALDVFETEPAKESPLFGTPNFICTPHLGASTTEAQVNVALQVAEQMADFLVTGGVTNALNMPSLSAEEAPKLRPYMALAEKLGSLVGQLAHDNLTKIAIEVEGAAAQLNQKPITAAVLAGLMKQYSQTVNMVNAPFLAKERGLDVREVRHDREGEYRTLVRVTVSTSQGERSVAGTLFGNGQPRLVEIFGIGIEADLDGDMLYIVNSDAPGFIGRIGTLLGQNTINIGTFHLGRREAGGEAVLLLSLDNPVSEDVLKEAREIQGVRVVKALKFA

SEQ ID NO: 1399 - DNA, 1236 bp, Francisella tularensis subsp. holarctica
  CDS (1)..(1236): transl_table=11
atgagccagctatctcttaataaaaagaaaatcccaattcttctcttagaaggtatacactcaaatgcagttgaatcattcaaagctgcaggagacgaaaatatcgaattactaaacactgcgcttgaaggacaagaactaatagataaacttaaagattttaaaattgtcggcttacgctctcgtactcaacttacaaaagaagtcctagagcaatctgatcaccttatagctattggttgcttttgtattgatactaatcaagtagatcttagaactgcacaaagcttaggtatacctgtttttaatgccccattttcaaatactcgtagtgttgctgagcttgtcttagaagaagctattttactgatacgtaatgtaattgacaaaaatgctaaagcccacagaggtgaatggcttaagtcagctgataatgctaatgaagtaagaggtaaaaccttaggaattgttggttacggtcatatcggtatgcagcttggagttctagcagaaaatatcggtttaaatgtgatattttatgatatcgaagagaaactacctttaggtaatgcttgtcaagttgatagtttagcaacgctactacaacaatctgatgtagtttctctacatgtaccacaactgccaactactgcaaatatgatatcaaccaaagaattcgctcttatgaagcaaaatgcagtgcttatcaatgcttcaagaggtaatgtaatagatattgatgctttggttgatgcactaacaagctccaagcttaaaggtgcggcaattgatgttttccctaaagatccatcatcaaaaggtgaaatttttgaaagtcctttaagaggccttgataatgtttttctaacactacacataggtggcagtactatagaggcacaagaaaatattgctacagaagtaagtgcaaaattaatcaaatattcagacaatggttcaacattaaatgcagtaaacttttctgaattatccttacctagtcatagagaaactcatcgaatcttacatattcatcagaatatcccaggtattattaatgagctaaatagaattttggcgtctaaaaatatcaatgttgaaggtcaatatttaagaacattagaaaatattggttatgttgttatggatattaaatcaagctcagatgaggctaaagaacttattgatgaattcaaaaaagttaaagctaccataaaagcccgttatttagtataa

SEQ ID NO: 1400 - protein, 411 aa, Francisella tularensis subsp. holarctica
MSQLSLNKKKIPILLLEGIHSNAVESFKAAGDENIELLNTALEGQELIDKLKDFKIVGLRSRTQLTKEVLEQSDHLIAIGCFCIDTNQVDLRTAQSLGIPVFNAPFSNTRSVAELVLEEAILLIRNVIDKNAKAHRGEWLKSADNANEVRGKTLGIVGYGHIGMQLGVLAENIGLNVIFYDIEEKLPLGNACQVDSLATLLQQSDVVSLHVPQLPTTANMISTKEFALMKQNAVLINASRGNVIDIDALVDALTSSKLKGAAIDVFPKDPSSKGEIFESPLRGLDNVFLTLHIGGSTIEAQENIATEVSAKLIKYSDNGSTLNAVNFSELSLPSHRETHRILHIHQNIPGIINELNRILASKNINVEGQYLRTLENIGYVVMDIKSSSDEAKELIDEFKKVKATIKARYLV

SEQ ID NO: 1401 - DNA, 1236 bp, Saccharophagus degradans 2-40
  CDS (1)..(1236): transl_table=11
atgaccgatagcaaaacctcgctaaacaaagacaaaattaaatttctactgctggaaggcgtacaccagtccgctgtagacagtttgaaaaacgccggctacaccaatattgagtaccacaaagcggcattgaacgaagacgagctaatagaagcaataaaagatgcacactttgttggcttgcgttcacgcacccagttaacccgcaaggtatttgaaaacgcgccgaaattagttgctgcaggttgtttctgtattggtaccaaccaagtagacctacaagccgccaccgagcacggcgtagccgtatttaacgccccctactccaacacccgcagcgtggcagaactggttattgctgaagcaattttattattgcgcggtattccggctaaaaatgctggctgtcaccgcggtgaatggcaaaaaagtgccgagggctctttcgagattcgcggcaaaaccttgggcattattggttacggctctattggtagccaaatgagcgtactggccgaatctttgggtatgcgcgtatttttctacgatgttatcaaccgtttgccattgggcaacgccgtacagtgcaaatcgttaaacgaactgttggccaaatcagatgttgttagcttgcatgtacccgaaaccggcgccactaaaaacatgattggcgagcgcgaaattaacgccatgaagaaaggcgctattttacttaacgcctcacgcggtaccgttgtagatatcgatgccttagctgcagccatggagagcggccacatcgcaggttgcgccattgacgtattccccgttgaaccaaaaggtaacaacgaagaattccaaagcccattgcgcgcgttcgacaacgctattcttacgccgcacattggtggctccaccatggaagcacaagagaacattggctttgaagtagcagaaaaactggtaaaatactccgacaatggcaccaccatcacctctgtaaacttcccagaagtagccttgccttcgcacgacaaggtgcaccgcttgctgcacgtacacaaaaacgtaccgggtgtacttaccgcgattaacaaaatcttctcggaaagcgacatcaacatttgcggccagtacctgcaaaccaacgacaagctgggctatgtgattttagatgtagatcgcgcctacagcgagatggcacttgagcaattgcgtaaagtgactggcacaattcgctgccgagtattattttaa

SEQ ID NO: 1402 - protein, 411 aa, Saccharophagus degradans 2-40
MTDSKTSLNKDKIKFLLLEGVHQSAVDSLKNAGYTNIEYHKAALNEDELIEAIKDAHFVGLRSRTQLTRKVFENAPKLVAAGCFCIGTNQVDLQAATEHGVAVFNAPYSNTRSVAELVIAEAILLLRGIPAKNAGCHRGEWQKSAEGSFEIRGKTLGIIGYGSIGSQMSVLAESLGMRVFFYDVINRLPLGNAVQCKSLNELLAKSDVVSLHVPETGATKNMIGEREINAMKKGAILLNASRGTVVDIDALAAAMESGHIAGCAIDVFPVEPKGNNEEFQSPLRAFDNAILTPHIGGSTMEAQENIGFEVAEKLVKYSDNGTTITSVNFPEVALPSHDKVHRLLHVHKNVPGVLTAINKIFSESDINICGQYLQTNDKLGYVILDVDRAYSEMALEQLRKVTGTIRCRVLF

SEQ ID NO: 1403 - DNA, 1233 bp, Methylobacillus flagellatus KT
  CDS (1)..(1233): transl_table=11
atgacccaacaactttccctgccaaaggacaagatccgttttttactgctggaaggcgtgcaccaaaacgccgtggaggtgctcaatgccgccggttaccgtaatatcgactatcgcaagactgcactggacgaagatgcgctgatcgaggcaatcaaggatgtacatttccttggcattcgctcccgcacccaggtaacggccaaggtgctggacgctgccaataaactcactgccatcggctgcttctgcatcggcaccaaccaggtggacctggatggcgcgctggagcggggcatcccagtattcaatgccccttactcgaacactcgctccgtcgccgaactggtactggcgcagactattctgctgctgcgcggtattccggagaagaacgcgttggtgcacaggggcggctggaccaagtccgctgaaggatccttcgaggcgcgaggcaagaccttgggtatcgtcggttatggttccattggttcgcagctgtccgtgttggccgaaagcctgggcatgaaagtgatctactttgatgtcattgccaagctgcctttgggcaatgcacgccaggttggcacgatggaggaattgttgtcgcaggcggatgtggtgtctctgcacgtgccggaattgccctccaccaagaacatgatgcgcgccgagcagttcgcgcaaatgaagaaggggagcatcttcatcaatgcggcccgcggcacctgcgtggatatcgacgcattggcacgggcgatcgagtccaagcacctggccggtgcggcgatcgatgtattccccgttgagcccaagagcaatgatgaggagttccagtcacctttgcgcgcttttgacaatgtcatcctcactccgcatatcggcggctcaacccaagaagcgcaagccaatatcggcatcgaggtcggcgagaagttcgtgcgctattccgacgcgggatcgacaatcactgccgtgaatttccctgaagtctctattccgaagcagccaggcacgcatcgcttgttgcatatccatcggaatgtgccgggtgtattgtccgctgtcaatagcctgttcgcgcgcaacaacatcaacattgcggcccagagcatgatgaccaagggcgatatcggttacatgatcatggatgtggaagcctcggcatctagcgccgcgatcgaagcgttgcagacggttgagggaacattgcgcactcgagtgctttattaa

SEQ ID NO: 1404 - protein, 410 aa, Methylobacillus flagellatus KT
MTQQLSLPKDKIRFLLLEGVHQNAVEVLNAAGYRNIDYRKTALDEDALIEAIKDVHFLGIRSRTQVTAKVLDAANKLTAIGCFCIGTNQVDLDGALERGIPVFNAPYSNTRSVAELVLAQTILLLRGIPEKNALVHRGGWTKSAEGSFEARGKTLGIVGYGSIGSQLSVLAESLGMKVIYFDVIAKLPLGNARQVGTMEELLSQADVVSLHVPELPSTKNMMRAEQFAQMKKGSIFINAARGTCVDIDALARAIESKHLAGAAIDVFPVEPKSNDEEFQSPLRAFDNVILTPHIGGSTQEAQANIGIEVGEKFVRYSDAGSTITAVNFPEVSIPKQPGTHRLLHIHRNVPGVLSAVNSLFARNNINIAAQSMMTKGDIGYMIMDVEASASSAAIEALQTVEGTLRTRVLY

SEQ ID NO: 1405 - DNA, 1572 bp, Methanococcoides burtonii DSM 6242
  CDS (1)..(1572): transl_table=11
atgaaagtattggtaagcgattcattatcagaggaaggagtttcaaagttaagtgagcattttgacgttgatgtttcaacgggtctttctgaggacgagcttgtagagaagatcggtattttcgatgctcttgtaattcgcagtggtacacatgtcacaaaaagggtaatcgaggccgctgacaaccttaaaattataggcagggctggtgttggtgtcgataatgttgatgttgatgcagctactgaaaaaggtatcattgttgtaaatgctcctgaagggaacatgctttctgcggcagaacacactatcgctatgatgatgtcgatggcaaggaacattcctcaggcaaatgcttctttaaaggccaagaaatgggaacgcaagaacttcatgggggttgaggttaacggcaaaacacttggtgtaataggtctgggacgtattggtgctgaggtggcaaaacgtgcacagggtcttgaaatgtcaattctggcctatgatcctttcgttactgaggaccgtgctaaggatatgggcgttgaacttacgactgttgatgatattgctcagagggcagatttcattacggttcatactccgctcataaaagagacgcgtaatatactcgataaagcacagtttgatatgatgaagagttccacaagggtcatcaattgtgcacgtggaggaattatcaatgaggaagctcttgctgatgcggcaaggaatgggaagatcgcaggtgctgccattgatgtgttcaccagtgagcctccatttgactgtcctttcattggtcttgataatgtgatcgtaacacctcatttgggtgcatcgacagaagaagcccaggtcaatgttgcagtgtctgttgctgaagagatcatctctgttctgaatggtggttctgcacgtaatactatcaatattcctgctgtgaagccggaagtaatggcaatacttgctccttatatcggacttgctgagacgttggggagtgtggcagcacagcttcttgatgcaaattataataagatcgagatatcttacaatggtgagatcgctgataaggatacaagggctgtaacggttgcagctttaaagggtattcttgaggatgcagttggttcggctgtaaactatgtgaatgctccttcgttggctaagtccagaaatgttgaggtagttgagagtaaatccgaaacttccggggatcacgcttcaaccattcgcataactcttttccagggtacgaacacaaagtccgtttcaggtgcagttgtcggtcgcgagcctaagatcgttatgatcgatggccagtatgttgaccttgttccgaatggatttatgatcgtgtcgaatcatgtcaatagaccgaatgtcattggaccatgctgtatcgtgcttggtgagaataatattaatatttccggtatgcaggtgggccgtgtggaagttggtggcaataccataatggcgctaaatgttgataatgaggtctctgagggaattcttgatgagatccgtgctattaatggcatattggatgcgaaattagttacactttga

SEQ ID NO: 1406 - protein, 523 aa, Methanococcoides burtonii DSM 6242
MKVLVSDSLSEEGVSKLSEHFDVDVSTGLSEDELVEKIGIFDALVIRSGTHVTKRVIEAADNLKIIGRAGVGVDNVDVDAATEKGIIVVNAPEGNMLSAAEHTIAMMMSMARNIPQANASLKAKKWERKNFMGVEVNGKTLGVIGLGRIGAEVAKRAQGLEMSILAYDPFVTEDRAKDMGVELTTVDDIAQRADFITVHTPLIKETRNILDKAQFDMMKSSTRVINCARGGIINEEALADAARNGKIAGAAIDVFTSEPPFDCPFIGLDNVIVTPHLGASTEEAQVNVAVSVAEEIISVLNGGSARNTINIPAVKPEVMAILAPYIGLAETLGSVAAQLLDANYNKIEISYNGEIADKDTRAVTVAALKGILEDAVGSAVNYVNAPSLAKSRNVEVVESKSETSGDHASTIRITLFQGTNTKSVSGAVVGREPKIVMIDGQYVDLVPNGFMIVSNHVNRPNVIGPCCIVLGENNINISGMQVGRVEVGGNTIMALNVDNEVSEGILDEIRAINGILDAKLVTL

SEQ ID NO: 1407 - DNA, 1299 bp, Ralstonia metallidurans CH34
  CDS (1)..(1299): transl_table=11
gtggtaaggtgtgcccatgcgcgtcccgcatatcgcatattgcatagggacgccccgtgcctttccaactctcctgcattcagcccgaccatcatggccagcgccctgcttctcgagaacatccacgccagcgcccagcagttgctgggccgccaccagatcgacctcgccacccagggcaaggccctggccggcgacgcgctgcttgccgccgtgcgcgatcacgaactgctgggcattcgctcggctaccaccctgacagccgaagcgttcgccaaggcgcagcggctgctcacggtcggctgcttctgcatcggcacgtcccaagtggacctgggcgcggctgcccatgccggcatcccggttttcaatgcgccgttttcgaacacacgttccgtggccgagctggtcatcggccaggccatcatgctgatgcggcgcatcccggaaaagagccgcgccgcccacagcggccaatggcagaaaaccgccaagggcgccttcgagatccggggcaagaccatggcggtgatcggctatgggaacatcggcgcgcaggtcggcatcctggccgaggcgatggggatgcgcgtggtgttctacgacatccgcccccgcctgtcgatcggaggcgccatgccggtgcactcgctcgaagatgccctgtcgcaggccgacgtggtgacgctgcacgtccccgccacgccgcagacacgcaacctgatggatgccaaggcactggctgccatgcgacatggcagcatcctgatcaatgcctcgcgcggcaccgtggtggatatcccggcgctggcgcaattgctggacaacgggcaactggccggcgcggccatcgacgtgttcccggaagagccgcgcagtaacgccgatccgttcgtctcgccgctgcagggcaagccgaatgtcatcctgacgccccatgtcggcggcagcaccgaggaagcgcaggagaacatcggcgtggaagtagcgaccaagctggtcaactttctcgaaaccggcgcgaccctgggcgcggtgaacctgccccagattcagccagcgccgcaacaggctccagcccgcgtgctcaacatccactacaaccggccgggcacgctgtcgcacttcaaccaggcgctggccgagatcggcgcgaatatcgtcgcccagcaactgcagaccgagggcgatattggctacgcgattaccgacatcagcctggtgccgcctgccggctgggcggaggcgctgatgaaggatgacgccttcattcgcacccgggtgatcgtggcgccctga

SEQ ID NO: 1408 - protein, 432 aa, Ralstonia metallidurans CH34
MVRCAHARPAYRILHRDAPCLSNSPAFSPTIMASALLLENIHASAQQLLGRHQIDLATQGKALAGDALLAAVRDHELLGIRSATTLTAEAFAKAQRLLTVGCFCIGTSQVDLGAAAHAGIPVFNAPFSNTRSVAELVIGQAIMLMRRIPEKSRAAHSGQWQKTAKGAFEIRGKTMAVIGYGNIGAQVGILAEAMGMRVVFYDIRPRLSIGGAMPVHSLEDALSQADVVTLHVPATPQTRNLMDAKALAAMRHGSILINASRGTVVDIPALAQLLDNGQLAGAAIDVFPEEPRSNADPFVSPLQGKPNVILTPHVGGSTEEAQENIGVEVATKLVNFLETGATLGAVNLPQIQPAPQQAPARVLNIHYNRPGTLSHFNQALAEIGANIVAQQLQTEGDIGYAITDISLVPPAGWAEALMKDDAFIRTRVIVAP

SEQ ID NO: 1409 - DNA, 1596 bp, Acidobacteria bacterium Ellin345
  CDS (1)..(1596): transl_table=11
ttgaaaatcgttgtcgccgaaaaaattgccaaagccgccattgatctgttcaagcaggatcccacgtggaacgtggtgactcccgaccaggtcgcccagaaagaacaacttctcgaacagctcaagggcgccgatgccctcatcgtccgctcggccgtcttcgtggacgccgccatgcttgagcacgccgaccagctccgcgtcatcggacgcgccggcgttggcgtcgacaacatcgagcttgaagccgctacccgcaagggcatcgccgtgatgaacacccccggcgccaatgccatcgccgtcgctgagcacaccatcggcctcatgctcgcgctcgcccgcttcatcccccgcgccaccgaaaccatgcacgccggaaagtgggaaaagaagtcgttgcaaggcaccgagctgcgcggcaaaaccctcggtatcgtcggtctcggacgcatcggcctggaagttgcgcggcgcgcagcatcgtttggcatgacgctcgtcgcccacgatccctacgtctctcccgcaattgcgcacgatgcgaagatccgcctcgctgatcgcgacgaagtgcttgcagttgcggattacatcacgctgcacgttgggttgacgccgcagacggcgaacatgatcaacgcgacaacgctcgccacgatgaagaagggtgtgcgcattgtgaactgcgcgcgcggcgaactcattgacgacgccgccctcgcggaagccgtgaagtccggccacgtcggcggagcggcactcgatgtctttaccgaagagccgttgaaggcatcgccctaccatggcgtgcccaacgtcatcctcaccccgcacatcggcggctccactgccgaagcgcaagatgcggtaggcgtgcagatcgcgcatcaagtccgcgattacctgcaacgcggcgtcgtgcagaacgcagtcaacatgccgtcgctcaccgagcaggagtacgtcgcgctggagccattcatcaccctaggcgaacgcctcggcagcctgctcgcgcagctcgcggaatcgcgcttcgaagaaatcggcatccgctacaccggcccgctcgccgactggaagaccgagctcatccgcaatgccagcatcaagggcatcctgcagcacaccaccgacgagagcgtgaacgtcatcaacgccaactccgtggctgagacgcgcggcatccgtgtgcacgagtcgaagaaggagcacccgtcgagcggcgccgccgccaatgtgctcggcctaacggtcacgacgccgaagggaacgctctctgtacgaggcacggtgctgcatggcaattcgccgcgcctgctttcgttcgacaacattgatgtggaagccccgctcgaagggacgttgctggtcattcgcaaccgcgatatccccggcgtagtaggacgcgtcggcaccatcctcggcgagcacgaagtcaacatcgcaaacttcgcgctaggccgtcccagcggcaacagcggcggcaacgccatcgcagcggtgcaggtcgacggcccgctgaaagagccagtcctgcaacagctacgccagcagaaagcgatcctggctgcgaatgtagtgcagttctag

SEQ ID NO: 1410 - protein, 531 aa, Acidobacteria bacterium Ellin345
MKIVVAEKIAKAAIDLFKQDPTWNVVTPDQVAQKEQLLEQLKGADALIVRSAVFVDAAMLEHADQLRVIGRAGVGVDNIELEAATRKGIAVMNTPGANAIAVAEHTIGLMLALARFIPRATETMHAGKWEKKSLQGTELRGKTLGIVGLGRIGLEVARRAASFGMTLVAHDPYVSPAIAHDAKIRLADRDEVLAVADYITLHVGLTPQTANMINATTLATMKKGVRIVNCARGELIDDAALAEAVKSGHVGGAALDVFTEEPLKASPYHGVPNVILTPHIGGSTAEAQDAVGVQIAHQVRDYLQRGVVQNAVNMPSLTEQEYVALEPFITLGERLGSLLAQLAESRFEEIGIRYTGPLADWKTELIRNASIKGILQHTTDESVNVINANSVAETRGIRVHESKKEHPSSGAAANVLGLTVTTPKGTLSVRGTVLHGNSPRLLSFDNIDVEAPLEGTLLVIRNRDIPGVVGRVGTILGEHEVNIANFALGRPSGNSGGNAIAAVQVDGPLKEPVLQQLRQQKAILAANVVQF

SEQ ID NO: 1411 - DNA, 1254 bp, Myxococcus xanthus DK 1622
  CDS (1)..(1254): transl_table=11
atgagccctccccagttcccgccctctccgacgcgcgccatcagcagtgacggccccttccgagccctgctgctggagaacatccacccgtccgcgggggagatgctggccgccgagggcttccaggtggagcgcgtctcgtccgccctcaagccggacgaactggcggagcggctgaagggggtgcacctgctgggcatccgcagcaagacgacggtgccgctcgcggcgctggagcacgcggagaacctgctggccattggggccttctgcatcggcaccaaccaggtggacctgacgtccgccaacacgcacggcatccccgtcttcaacgcgcccttcagcaacacgcgcagcgtggcggagatggtgattgcggaagtcatcgtcctgacgcggcagctcttcgagcgcagccaggaggtccacgcgggccagtggcgcaaggtggccaccggcagccatgaggtgcgcggcaagacgctgggcatcatcggctatggccacatcggctcgcagctgggcgtcatcgccgaggcgctgggcatgcgcgtcctctacttcgacgtgatgaccaagctgccgctgggcaacgcgcagccagccgtcaccctggaggagctgctcggcgcttccgacttcgtcaccctccacgtgcccgcgctgcccaccacgcacatgatgatgggcgccgagcagattgcccagatgaagaagggcgcctgcctcatcaacgccagccgaggcacggtggtggacatcgacgcgctggcgcgggcgctccagtcccagcacctgggcggcgccgcggtggacgtctacccggaggagccggagagcaactcggacggcttcgtcaccgcgctccagggcctgcccaacgtggtcctcacgccgcacatcggcgggtccacggaagaggcgcaggcctccatcggcaaggaggtggccaccagcctgctgaagtacttcaaggcgggcgccagcacgggcgcggtcaacttcccgaacatcgaggcgccgctcatcccgggcacgcaccgcatcctcaacgtgcaccgcaacatcccgggcgtgctgcgcgacatcaaccgcatcgtctccgacctcaacgccaacatccacgcccaggtgctcagcacggacgccaacatcggctacctgctgatggacctggaccaggacgtgtccaccccggtgtgcgaggccatcgccgggctggagacggacatcaagacgcgcatcctgtcctga

SEQ ID NO: 1412 - protein, 417 aa, Myxococcus xanthus DK 1622
MSPPQFPPSPTRAISSDGPFRALLLENIHPSAGEMLAAEGFQVERVSSALKPDELAERLKGVHLLGIRSKTTVPLAALEHAENLLAIGAFCIGTNQVDLTSANTHGIPVFNAPFSNTRSVAEMVIAEVIVLTRQLFERSQEVHAGQWRKVATGSHEVRGKTLGIIGYGHIGSQLGVIAEALGMRVLYFDVMTKLPLGNAQPAVTLEELLGASDFVTLHVPALPTTHMMMGAEQIAQMKKGACLINASRGTVVDIDALARALQSQHLGGAAVDVYPEEPESNSDGFVTALQGLPNVVLTPHIGGSTEEAQASIGKEVATSLLKYFKAGASTGAVNFPNIEAPLIPGTHRILNVHRNIPGVLRDINRIVSDLNANIHAQVLSTDANIGYLLMDLDQDVSTPVCEAIAGLETDIKTRILS

SEQ ID NO: 1413 - DNA, 1902 bp, Cytophaga hutchinsonii ATCC 33406
  CDS (1)..(1902): transl_table=11
atggaaacaatcgagaaggttccgtatttcgtcattgactttgacagtacatttactcaagttgaagcgttagatgaattggctacaatttcattagcaggtaatccaaatcaacagcagattattcagcaaataatcgaccttacaaatcttggtatggaaggcaaagggtccttcagtgaaaatcttgttaagagattacaactggttaaagccaacagatcgcaccttgctccgttgattgatttattacgttctaaagtttctaaatctgtaaaacgtaacaagcatttcttccgcgattacgctgaccagatctatattgtttcttccggttttaaagaattcattctgccgatcgtaacagaattcggtattaaggaagagcatgtaatggcaaatacgttcacgttcgacaatgatggcaacatcattggttgtgacgcgaacaacccgctcagccaggataaaggcaagatcaaattaatggagaagcttggcttaaccggtgatgtacacgtgatcggcgatggttatacggactacgaaatcagaggtgcgggtcttgcttctaaattctatgcattcaccgaaaacgtaagccgcgctgctgttactgcaaaagcagacagcattgcgcctagcttcgacgaaatattatttcaggaaaaacttccgatgacgatctcttatccgaagaaccgcatcaaagttttgttgctggaaaacattcacacagatgctttcaaattattcagcgaagaaggatataccgttgaagtaattgcaagtgcattagaggaagatgaattgatcgaaaaaatcaaagacgtttccatcattggtatccgttctaaaacaacgatcacagcaaaagttttggagcacgctccaaaacttatcgcaatcggtgcgttctgtatcggcacaaaccagattgatttaaaagcagcacaaatgaaaggtgttgcagtattcaacgcaccattcagcaacacacgcagcgtggttgaattggctattggcgagatcatcatgctttaccgacgtacacttgagaaaagtatgcagatgcacgctggtaagtgggacaaatccgctaagaactcttttgagatcagaggtaaaaaattaggtcttgttggttatggcaatattggttcccagctttctgtcatcgcggaatcacttggtatggttgtgtattattatgatatcgttgaaagactctctcttggtaatgcaaagaaatgcagctctctgaaagaattattaaataccgtagatgttgtttcattacacgttgacggtagagcaagcaataaaggcatgtttggcgcgaaagaatttaatgaaatgagacagggttctattttcttaaacttggcgcgcggacctgtaacggatcttaaagccttatcagaaaatcttaagagtggcaaaatcttaggtgcaggtctggatgtatacgaatacgaaccgaaaaataacgatgaagaattcatcaatgacgtacgaggcttaccaaacgtaatccttacaccgcacattggtggttctacggaagaagcgcaatcaaacatcgggaatttcgtaccaaacagaattacggattacatcaacaacggtactacattacacagtgtaaacttcccgaacattcagttacctgaattacaggaaggccatcgtttcatgcacctgcacgaaaaccaaccaggtattttggcaaagatcaataacctgtttgcaaaacacaacatcaatattttagcacagtatttaaaaaccaacgaacaggttggatatgtaattacagatatcgctaagatctacgacaaagaagtactggacgaattaaaagaaattccaggaacaatccgtttcagaacgctttattaa

SEQ ID NO: 1414 - protein, 633 aa, Cytophaga hutchinsonii ATCC 33406
METIEKVPYFVIDFDSTFTQVEALDELATISLAGNPNQQQIIQQIIDLTNLGMEGKGSFSENLVKRLQLVKANRSHLAPLIDLLRSKVSKSVKRNKHFFRDYADQIYIVSSGFKEFILPIVTEFGIKEEHVMANTFTFDNDGNIIGCDANNPLSQDKGKIKLMEKLGLTGDVHVIGDGYTDYEIRGAGLASKFYAFTENVSRAAVTAKADSIAPSFDEILFQEKLPMTISYPKNRIKVLLLENIHTDAFKLFSEEGYTVEVIASALEEDELIEKIKDVSIIGIRSKTTITAKVLEHAPKLIAIGAFCIGTNQIDLKAAQMKGVAVFNAPFSNTRSVVELAIGEIIMLYRRTLEKSMQMHAGKWDKSAKNSFEIRGKKLGLVGYGNIGSQLSVIAESLGMVVYYYDIVERLSLGNAKKCSSLKELLNTVDVVSLHVDGRASNKGMFGAKEFNEMRQGSIFLNLARGPVTDLKALSENLKSGKILGAGLDVYEYEPKNNDEEFINDVRGLPNVILTPHIGGSTEEAQSNIGNFVPNRITDYINNGTTLHSVNFPNIQLPELQEGHRFMHLHENQPGILAKINNLFAKHNINILAQYLKTNEQVGYVITDIAKIYDKEVLDELKEIPGTIRFRTLY

SEQ ID NO: 1415 - DNA, 1233 bp, Haemophilus somnus 129PT
  CDS (1)..(1233): transl_table=11
atgacaacaaaagtatcactagataaatcaaaaattaagtttttgcttttggagggaatacaccaaaatgcactggaggtgttaaaagcagcaggatataccaatatcgaatatcatcgaaaggccttagaacctgatgaattaaaaattgctatcaaagatgcacattttatcggtattcgttctcgaacgtctttaacggaggatatattagcagaagcaacaaaattaattgcaattggttgtttttgtatcggcacaaatcaagtggatttagaggcggcaaaagcacgtggtattcctgttttcaatgcaccgtttgccaataccagatctgtggctgaattagtgcttggtgagatcttattattaatgcgtaatatcccgcaagccaatgccgatgtgcatcgaggtttatggaataaatccatggtgggatcttatgaggttcgtggaaaacgcttgggtattattggttatggtcatattggatctcaactaagtattattgcagaagcgttaggcatgaatgtgtatttctatgatatagaaacaaaattacctttaggtaatgcacaacaaatgaatagcttagaagaacttttgagtacctgtgatgtggtttcattacatttgccggaaaattcctcaacaaaaaatttaatgaatgcggaacgcattgcacaattaaaggcgaactgtatttttatcaatgctgcccgtggcacagtggttgatattgacgctttagctcaggcgttagaaagcaaaaaaattcgtggtgccgcaattgatgtattcccgaaagaacctgcctcgattgaagaggaatttatctcgccattgcgtgctttcgataatgttatcctaacaccacacattggtggctcaactgttgaagcacaagaaaatattggagttgaagtcgcaaataaatttgtcaaatattccgataatggttcaacactgtcggcagtaaatttcccagaagtatctctaccggaacatagtaatgcaaaacgcttattacatattcaccataaccgtccggggattttaaataaaatcaatcaaatatttgtggagcaaaatatcaatattgcggctgaatatttacaaaccgaggcaaaaattggttatgtggtaatcgatgttgaaacagaagataccgctcaattattggctaaacttaagcaaattgaaggcactattcgtgcgagagtattattttaa

SEQ ID NO: 1416 - protein, 410 aa, Haemophilus somnus 129PT
MTTKVSLDKSKIKFLLLEGIHQNALEVLKAAGYTNIEYHRKALEPDELKIAIKDAHFIGIRSRTSLTEDILAEATKLIAIGCFCIGTNQVDLEAAKARGIPVFNAPFANTRSVAELVLGEILLLMRNIPQANADVHRGLWNKSMVGSYEVRGKRLGIIGYGHIGSQLSIIAEALGMNVYFYDIETKLPLGNAQQMNSLEELLSTCDVVSLHLPENSSTKNLMNAERIAQLKANCIFINAARGTVVDIDALAQALESKKIRGAAIDVFPKEPASIEEEFISPLRAFDNVILTPHIGGSTVEAQENIGVEVANKFVKYSDNGSTLSAVNFPEVSLPEHSNAKRLLHIHHNRPGILNKINQIFVEQNINIAAEYLQTEAKIGYVVIDVETEDTAQLLAKLKQIEGTIRARVLF

SEQ ID NO: 1417 - DNA, 1584 bp, Trichodesmium erythraeum IMS101
  CDS (1)..(1584): transl_table=11
atgccaaaagttcttgtatctgattcaatcgatcaaaatggaataaatattctctcccaagtagctcaggtagatataaaaataggtctaccagtagaagaactagtaaaaattataccagaatatgatggtttaatgattcgctctggtaccaaagttaccaaagaaataatagaagctgccgataaactaaaaattattggtcgtgctggagtgggtgtagataatgtagacgtacaagcagcaacccgtaaaggtattgtggtagtcaactcaccagaaggaaatacaattgctgcagcagaacacgctttggcaatgatgttatctatgtcgcgccacgttccagaagctaaccaatcaattatcaatgctcaatgggaccgcaaaaagtttgtcggggtcgaggtctacaaaaaaactctcggtgttgttggtttaggtaaaattggctcccatgtagctaaggtagcaaaagctatgggaatgaaaattttggcttatgatccatttatttctgaagaaagagcagaacaattgggttgtagtttggtagatctggatcttttagtccaagagtctgattatattactctccatatacccaaaactgacgaaacttatcactcaattaatgctgaaacttttgccaaaatgaaacccacagctcggattattaattgttctagaggtggcattattgatgaagttgctttatccaaagctctaaaagaaggaaaaattgctggagctgctttagatgtatatgaaaatgagcctctagaagttgagtccccactacgagatttgggacaaaaaattgtgatgactcctcatttgggtgcttctactgctgaagctcaagtgaatgtagcaatagatgttgctgaacaaattcgagatgtattgttagggctgcctgccagatcggcagtgaatatccctggtatgtatcctgatactttaaaaaaactgaagccctatttacgattggccgaaactcttggtaatttggtaagtcagttagccggtgggcgtattgattttctcaatgttcgtcttgaaggagatttggccggtggagatagtaaacctgtagtagtaggagctttaaagggattactttctcaagctttgcgagagcgcgtcaattatgtaaatgcttttattgaagctaaagaacgaggtattcgagtagtggaaactagagatgattcagtacgagattatactggttcattacatctagaagcaaaagggtctctgggtgaacataatgttcgaggttctttgctgggaaaagatgagattcggattactaatattgatgggtttccaattaatgtccctcctagcccatatatgttattgactctccaccgagatatgccgggaattattggtaaaattggttcacttctggggagttttaatgtcaatattgctagtatgcaggtgggacgtaaaattgttagaggtgatgctgtaatggtattaagtgttgatgacccattaccagaagaaatattaactgaaattcttaaagaaccaggaattaggaatgcttatacagttgctctttga

SEQ ID NO: 1418 - protein, 527 aa, Trichodesmium erythraeum IMS101
MPKVLVSDSIDQNGINILSQVAQVDIKIGLPVEELVKIIPEYDGLMIRSGTKVTKEIIEAADKLKIIGRAGVGVDNVDVQAATRKGIVVVNSPEGNTIAAAEHALAMMLSMSRHVPEANQSIINAQWDRKKFVGVEVYKKTLGVVGLGKIGSHVAKVAKAMGMKILAYDPFISEERAEQLGCSLVDLDLLVQESDYITLHIPKTDETYHSINAETFAKMKPTARIINCSRGGIIDEVALSKALKEGKIAGAALDVYENEPLEVESPLRDLGQKIVMTPHLGASTAEAQVNVAIDVAEQIRDVLLGLPARSAVNIPGMYPDTLKKLKPYLRLAETLGNLVSQLAGGRIDFLNVRLEGDLAGGDSKPVVVGALKGLLSQALRERVNYVNAFIEAKERGIRVVETRDDSVRDYTGSLHLEAKGSLGEHNVRGSLLGKDEIRITNIDGFPINVPPSPYMLLTLHRDMPGIIGKIGSLLGSFNVNIASMQVGRKIVRGDAVMVLSVDDPLPEEILTEILKEPGIRNAYTVAL

SEQ ID NO: 1419 - DNA, 1230 bp, Shewanella sp. MR-4
  CDS (1)..(1230): transl_table=11
atggcgaaacattcgctggacaaggataagatcaagatcctgttgttggaaggcgtccaccaatctgcggtcgatgtatttgaacgtgctggatacaccaatatcgagtatcacaaagcctccttaggtgatgaagccctgctcgagtccatcaaagatgctcactttgttggtattcgttcccgtacccaattgaccgctgacgtgttaaaacgtgccgaaaaactgattgcgattggttgtttctgtatcggcactaaccaggtggatctggcgaccgccgaattgctcggtatcccggtatttaacgcaccgttttctaatacccgcagcgtagctgaactggtattaggcgaaatcatcatgttgatgcgcggcattcctgagcgtaatgcgattgcccaccgtggtggctggatgaagacagccgcaggcagttacgaagtccgtggcaaaaccttaggtgtgataggttatggccatattggtactcagctagggatcttggctgaaaccttaggtatgcgcgtggtgtttttcgatatcgaagacaaactgccattaggtaacgctcagcaaatccattcgatggaacaattactggcacagtccgatgtggtgagcttacacgtccctgagacagcgcaaactaaagatatgatcagcgcagcagaatttgcagccatgcgtaaaggcagcatcttcatcaacgcctcacgcggcactgtggttgatatcgatgccctgacggttgcccttaaagagcgtcaccttgcgggcgcggcaatcgacgtattccctgtcgagccacaatcgaatgatgatgaatttatcagcccattacgtggcttagacaatgtgctattgaccccgcacgtgggcggcagtactgctgaagcccaagaaaatatcggtatcgaagtggctggtaagttagccaaatactcagataacggttcgaccgtttctgcggttaacttccctgaagtgtcgctgccaatgcacaaaggcatttcgcgcttgctgcacattcaccaaaaccgtcctggcgtgctgatcaaaatcaacaaagctttctctgaaaaaggcatcaacattgccgctcagtatctgcaaaccactgctgaaatcggttatgtggtgatggaagtcgatactcaccaagccgaggaagcactggtcgaacttaaggccattgaaggcactctgcgcacccgcgtattgttctaa

SEQ ID NO: 1420 - protein, 409 aa, Shewanella sp. MR-4
MAKHSLDKDKIKILLLEGVHQSAVDVFERAGYTNIEYHKASLGDEALLESIKDAHFVGIRSRTQLTADVLKRAEKLIAIGCFCIGTNQVDLATAELLGIPVFNAPFSNTRSVAELVLGEIIMLMRGIPERNAIAHRGGWMKTAAGSYEVRGKTLGVIGYGHIGTQLGILAETLGMRVVFFDIEDKLPLGNAQQIHSMEQLLAQSDVVSLHVPETAQTKDMISAAEFAAMRKGSIFINASRGTVVDIDALTVALKERHLAGAAIDVFPVEPQSNDDEFISPLRGLDNVLLTPHVGGSTAEAQENIGIEVAGKLAKYSDNGSTVSAVNFPEVSLPMHKGISRLLHIHQNRPGVLIKINKAFSEKGINIAAQYLQTTAEIGYVVMEVDTHQAEEALVELKAIEGTLRTRVLF

SEQ ID NO: 1421 - DNA, 1230 bp, Shewanella sp. MR-7
  CDS (1)..(1230): transl_table=11
atggcgaaacattcgctggacaaggataagatcaagatcctgttgttggaaggcgtccaccaatctgcggtcgatgtatttgaacgtgctggatacaccaatatcgagtatcacaaagcctccttaggtgatgaagccctgctcgagtccatcaaagatgctcactttgttggtattcgttcccgtacccaattgaccgctgacgtgttaaaacgtgccgaaaaactgattgcgattggttgtttttgtatcggcactaaccaggtggatctggcgaccgccgaattgctcggtatcccggtatttaacgcaccgttttctaatacccgcagcgtagctgaactggtattaggcgaaatcatcatgttgatgcgcggcattcctgagcgtaatgcgattgcccaccgtggtggctggatgaagacagccgctggcagttacgaagtccgtggcaaaaccttaggtgtgataggttatggccatattggtactcagctagggatcttggctgaaaccttaggtatgcgcgtggtgtttttcgatatcgaagacaaactgccattaggtaacgctcagcaaatccattcgatggaacaattactggcacagtccgatgtggtgagcttacacgtccctgagacagcgcaaactaaagatatgatcagcacagcagaatttgcagccatgcgtaaaggctgcatcttcatcaacgcctcacgcggcactgtggttgatatcgatgccctgacggttgcccttaaagagcgtcaccttgcgggcgcggcaatcgacgtattccctgtagagccacaatcgaatgatgatgaatttatcagcccattacgtggcttagacaatgtgctattgaccccgcacgtgggcggcagtactgctgaagcccaggaaaatatcggtatcgaagtggctggtaagttagccaaatactcagataacggttcgaccgtttctgcggttaatttccctgaagtgtcgctgccaatgcacaaaggcatttcgcgcttgctacacattcaccaaaaccgtcctggcgtgctgatcaaaatcaacaaagctttctctgaaaaaggcatcaacattgccgctcagtatctgcaaaccacagctgaaatcggttatgtggtgatggaagtcgatactcaccaagccgaggaagcactggtcgaacttaaggccattgaaggcacactgcgcacccgcgtattgttctaa

SEQ ID NO: 1422 - protein, 409 aa, Shewanella sp. MR-7
MAKHSLDKDKIKILLLEGVHQSAVDVFERAGYTNIEYHKASLGDEALLESIKDAHFVGIRSRTQLTADVLKRAEKLIAIGCFCIGTNQVDLATAELLGIPVFNAPFSNTRSVAELVLGEIIMLMRGIPERNAIAHRGGWMKTAAGSYEVRGKTLGVIGYGHIGTQLGILAETLGMRVVFFDIEDKLPLGNAQQIHSMEQLLAQSDVVSLHVPETAQTKDMISTAEFAAMRKGCIFINASRGTVVDIDALTVALKERHLAGAAIDVFPVEPQSNDDEFISPLRGLDNVLLTPHVGGSTAEAQENIGIEVAGKLAKYSDNGSTVSAVNFPEVSLPMHKGISRLLHIHQNRPGVLIKINKAFSEKGINIAAQYLQTTAEIGYVVMEVDTHQAEEALVELKAIEGTLRTRVLF

SEQ ID NO: 1423 - DNA, 1596 bp, Rhizobium leguminosarum bv. viciae 3841
  CDS (1)..(1596): transl_table=11
atggcacctcgcgttctcgtatccgacgaattgtcggaaaccgccgtccagatttttcgcgatcgcggcgtcgaagtcgatttcgaaccgcagctcggcaaggacaaagaccgtctgctcgaagtcatcggcaagtatgatggcctcgccatccgctccgccaccaaggtgacggaaaagatcatcgagggggcgacgaacctcaaggtcgtcggccgtgccggcatcggcgtcgacaatgtcgatatcccggccgcctcgcgccgcggcatcatcgtcatgaacacgcccttcggcaactcgatcacgacagccgaacatgcgatcgcgctgatgttcgccgtcgcccgccagcttccggcagccgatacttcgacgcaggccggcaagtgggagaagtcgaagttcatgggcgtcgagatcaccggcaagacgctcggcgtcatcggcgccggtaatatcggttcgatcgtctgcgcccgggccatcggcctgaagatgcacgtcgtcgcctacgatccgttcctttccaaggagcgcgccgaagagatgggcgtcaccaaggtcgaactggaagagcttttcgcccgcgccgacttcatcacgctgcatgtgccgatgaccgacaagacgcggggtatcctcaacaaggaagcgctggcgaagaccaagcccggcgtgcgcatcatcaactgcgcccgtggcggcctggtcgatgaagcagcccttgccgaagcgatcaagtcgggccatgtcgcgggcgctgccttcgatgtgttcgaggtcgagccggccaaggaaagcccgctcttcggcctgccgaacgtcgtctgcacgccgcatctcggcgcctcgacgaccgaggctcaggagaacgtcgctttgcaggtcgccgaacagatggcggattaccttgtcaatggtgcggtctccaacgccatcaacatgccgtcgatcacggctgaggaagcgccgatcctgaagcccttcatccggcttgccgacgttcttggcgcctttgtcggccaggtcaccgaagagccgatcaaggaaatcgagatcctctatgacggcctcaccgccaacatgaatacgcgggcactgacgagtgcagtgctcgccggcctcatccgcccgcaggtctccgacgtcaacatggtttcggcgccgatcatgatcaaggaaaaaggtgtcgtgctctccgaggtcaagcgcgacaagacaggcgtcttcgacggctatatcaagctgacggtcaccaccgacagcatgacgcgctctgtcgccggcacggtgttttcggatggcaagccgcgtttcatccagatcaagggcatcaatctcgatgccgatgtcggctcgcacatgatctatattaccaataccgacgtccctggcatgatcggcttcatcggcacgacgcttggtgctgccggcgtcaacatcgccaacttccagctcggtcgtgacaagcagggcggcgacgccatcgcgctgctctatgtcgacggcaaagttgatgacgccgtgcttgctgagttgaccgcccaccaggcggttcgccaggcaaagccgctgaccttcaatatcgactga

SEQ ID NO: 1424 - protein, 531 aa, Rhizobium leguminosarum bv. viciae 3841
MAPRVLVSDELSETAVQIFRDRGVEVDFEPQLGKDKDRLLEVIGKYDGLAIRSATKVTEKIIEGATNLKVVGRAGIGVDNVDIPAASRRGIIVMNTPFGNSITTAEHAIALMFAVARQLPAADTSTQAGKWEKSKFMGVEITGKTLGVIGAGNIGSIVCARAIGLKMHVVAYDPFLSKERAEEMGVTKVELEELFARADFITLHVPMTDKTRGILNKEALAKTKPGVRIINCARGGLVDEAALAEAIKSGHVAGAAFDVFEVEPAKESPLFGLPNVVCTPHLGASTTEAQENVALQVAEQMADYLVNGAVSNAINMPSITAEEAPILKPFIRLADVLGAFVGQVTEEPIKEIEILYDGLTANMNTRALTSAVLAGLIRPQVSDVNMVSAPIMIKEKGVVLSEVKRDKTGVFDGYIKLTVTTDSMTRSVAGTVFSDGKPRFIQIKGINLDADVGSHMIYITNTDVPGMIGFIGTTLGAAGVNIANFQLGRDKQGGDAIALLYVDGKVDDAVLAELTAHQAVRQAKPLTFNID

SEQ ID NO: 1425 - DNA, 1230 bp, Pseudomonas aeruginosa UCBPP-PA14
  CDS (1)..(1230): transl_table=11
atgagcaagacctctctcgacaagagcaagatcaagttccttcttctcgaaggtgtccaccagaacgccgtggacacgctgaaggccgccggctacaccaacatcgagtacctcaagaccgcgctttccggcgacgagctgaaggaaaggatcgccgatgcgcacttcatcggcattcgctcccgcacccagctgaccgaagaggtcttcgactgcgcgaagaaactgatcgcggtcggctgcttctgcatcggcaccaaccaggtcgacctcaacgccgctcgcgaacgcggtatcgccgtgttcaacgcgccctactcgaacacccgctctgtggctgagctggtactggccgaggcgatcctgctgctgcgcggcatcccggaaaagaacgcttcctgccatcgcggcggctggatcaagagcgcggcgaactccttcgagatccgtggcaagaagctcggcatcgtcggctacggttcgatcggcacccagctctcggtactcgccgaggccctgggcatgcaggtgttcttctacgacaccgtgaccaagctgccgctgggcaacgcggtgcagatcggcagcctgcacgagctgctgggcatgtccgacatcgtctcgctgcacgttcccgaactgccctccacccagtggatgatcggcgagaaggaaatccgcgcgatgaagaagggcggcatcctgatcaacgccgcgcgcggcaccgtggtcgagctggaccacctggccgccgcgatcaaggatgagcacctgatcggcgccgccatcgacgtgttcccggtcgagccgaaatccaacgacgaggaattcgccagcccgctgcgtggcctggaccgggtgatcctgaccccgcacatcggcggctccaccgccgaggcacaggccaacatcggcctggaagtggcggagaagctggtcaagtacagcgacaacggcacctcggtgtcctcggtcaacttccccgaagtggccctgccgtcgcacccgggcaagcaccgcctgctgcacatccacgccaacatccccggcgtgatgagcgagatcaacaaggtcttcgccgacaacggcatcaacgtttccggccagtacctgcaaaccaacgataaggtcggctacgtggtgatcgacgtcgacgccgagtactccgacctggccctggagaaactccagcaggtcaacggcaccatccgtagccgcgtgctgttctaa

SEQ ID NO: 1426 - protein, 409 aa, Pseudomonas aeruginosa UCBPP-PA14
MSKTSLDKSKIKFLLLEGVHQNAVDTLKAAGYTNIEYLKTALSGDELKERIADAHFIGIRSRTQLTEEVFDCAKKLIAVGCFCIGTNQVDLNAARERGIAVFNAPYSNTRSVAELVLAEAILLLRGIPEKNASCHRGGWIKSAANSFEIRGKKLGIVGYGSIGTQLSVLAEALGMQVFFYDTVTKLPLGNAVQIGSLHELLGMSDIVSLHVPELPSTQWMIGEKEIRAMKKGGILINAARGTVVELDHLAAAIKDEHLIGAAIDVFPVEPKSNDEEFASPLRGLDRVILTPHIGGSTAEAQANIGLEVAEKLVKYSDNGTSVSSVNFPEVALPSHPGKHRLLHIHANIPGVMSEINKVFADNGINVSGQYLQTNDKVGYVVIDVDAEYSDLALEKLQQVNGTIRSRVLF

SEQ ID NO: 1427 - DNA, 1239 bp, Solibacter usitatus Ellin6076
  CDS (1)..(1239): transl_table=11
atgaccaagacctccttggataaatccaagatcaaaatcctcctgctcgaaggcattcatcccagtgccgtggaaaaattccggcaggatggctatgacaacatcgaatgccaccagaagtccctcaccggctccgcgctggaagaggccgccgccgacgcttactttgtcggcattcgctccgccacgcagctggagcgcgccttcttcgagaatgcttcccggctgacaggcgttggctgcttctgcatcggcaccaatcaggtgaatctttcagccgccgaagagcgcggcgtcccggtcttcaacgcgcccttttccaacacgcgcagcgtcgccgaactggtgctggcggagatcatcattctcatgcgcggcatcccgcagcgcaacgccgcggcccatcgcggcggctggctgaagaccgccaccggtagccacgaagtgcgcggcaagacgctcggcatcgtcggctacggccacattgggacccaggtcggcgtactggccgaatcgctcggcatgcaggtggtgacctacgacgtggagagcaagctcgcgctcggcaatgcccgcgcactcggctcgctcgacgcgctgcttgaaatcagcgacgtggtcacgctccatgttcccgagaccccggctacctttcagatgatcggcgccgagcagctggcccgcatgaagccgggcgcgcgcctgatcaacgcctcccgcggcaccgtggtggagattcaggcgctggccgccgccctcgcttcccaacacctggccggggccgcgatcgacgtcttcccggccgagcccaagagcaccgccgacctgttctactcgcctttacgcggcatggataacgtcctgctgaccccgcacgtcggcggcagcacggaggaggcgcaggagaatatcggtgtcgaagtggcgcagaagctgatcaagtacagcgataacggctccacgctcggcgctgtcaatttcccggaggtctcgctccccgaacatcccggcaagcatcgcgtgctccacatccaccacaatcagccgggcgtgctttccgcgatcaacgcggtcttctccgaagacgcgatcaacatcgccgccgagtatctgcaaaccgatgcgaaggtcggctacgtggtaatcgacgtggaaaccgacgagcgcgacgagaccgccaacatccgccgcaaactcgaactggtccccggcaccatccgcacccgcatcctctattaa

SEQ ID NO: 1428 - protein, 412 aa, Solibacter usitatus Ellin6076
MTKTSLDKSKIKILLLEGIHPSAVEKFRQDGYDNIECHQKSLTGSALEEAAADAYFVGIRSATQLERAFFENASRLTGVGCFCIGTNQVNLSAAEERGVPVFNAPFSNTRSVAELVLAEIIILMRGIPQRNAAAHRGGWLKTATGSHEVRGKTLGIVGYGHIGTQVGVLAESLGMQVVTYDVESKLALGNARALGSLDALLEISDVVTLHVPETPATFQMIGAEQLARMKPGARLINASRGTVVEIQALAAALASQHLAGAAIDVFPAEPKSTADLFYSPLRGMDNVLLTPHVGGSTEEAQENIGVEVAQKLIKYSDNGSTLGAVNFPEVSLPEHPGKHRVLHIHHNQPGVLSAINAVFSEDAINIAAEYLQTDAKVGYVVIDVETDERDETANIRRKLELVPGTIRTRILY

SEQ ID NO: 1429 - DNA, 1230 bp, Shewanella sp. ANA-3
  CDS (1)..(1230): transl_table=11
atggcgaaacattcgctggacaaggataagatcaagatcctgttgttggaaggcgtccaccaatctgcggtcgatgtatttgaacgtgctggatacaccaatatcgagtatcacaaagcctccttaggtgatgaagccctgctcgagtccatcaaagatgctcactttgttggtattcgttcccgtacccaattaacggctgaggtattgaagcgtgccgaaaaactgattgcgattggttgtttctgtatcggtactaaccaagtggatctggcgaccgccgaattactcggtatcccagtatttaacgcaccattctctaatacccgcagcgtggctgaactggtattaggcgaaatcatcatgctgatgcgcggcattcctgaacgtaatgctatcgcccaccgtggtggctggatgaagacggccgccggcagttacgaagtccgtggcaaaaccttaggtgtgataggttatggtcatatcggtacacagctcgggatcctagctgaaaccttaggcatgcgcgtggtgtttttcgatatcgaagacaaactgccattaggcaatgcccagcaaatccattcgatggaacaattactggcacagtccgatgtgatcagtttgcacgtccctgagacggcgcaaaccaaagatatgatcagcaccgccgaatttgccgccatgcgtaaaggcagcatctttatcaacgcctcacgcggcactgtggtcgatatcgatgccctaacggttgcccttaaagagcgtcaccttgcgggcgcggccatcgacgtattccccgtcgagccacaatcgaatgatgatgaatttatcagcccattacgtggtttagataacgtactgctgactccgcacgtgggtggcagtactgccgaagcccaagaaaacatcggtatcgaagttgccggtaagttagctaaatactctgacaacggttcgaccgtatctgcggttaacttccctgaagtgtcgctgccaatgcacaaaggcatttcgcgcttactgcacattcaccaaaaccgtcctggcgtgctaatcaaaatcaacaaagccttctctgaaaaaggcatcaacattgccgctcagtacctgcaaaccactgcagaaatcggttatgtggtgatggaagtcgatactcaccaagccgaagaggcactggttgaacttaaggccattgaaggcacactgcgcacccgcgtattgttctaa

SEQ ID NO: 1430 - protein, 409 aa, Shewanella sp. ANA-3
MAKHSLDKDKIKILLLEGVHQSAVDVFERAGYTNIEYHKASLGDEALLESIKDAHFVGIRSRTQLTAEVLKRAEKLIAIGCFCIGTNQVDLATAELLGIPVFNAPFSNTRSVAELVLGEIIMLMRGIPERNAIAHRGGWMKTAAGSYEVRGKTLGVIGYGHIGTQLGILAETLGMRVVFFDIEDKLPLGNAQQIHSMEQLLAQSDVISLHVPETAQTKDMISTAEFAAMRKGSIFINASRGTVVDIDALTVALKERHLAGAAIDVFPVEPQSNDDEFISPLRGLDNVLLTPHVGGSTAEAQENIGIEVAGKLAKYSDNGSTVSAVNFPEVSLPMHKGISRLLHIHQNRPGVLIKINKAFSEKGINIAAQYLQTTAEIGYVVMEVDTHQAEEALVELKAIEGTLRTRVLF

SEQ ID NO: 1431 - DNA, 1194 bp, Nocardioides sp. JS614
  CDS (1)..(1194): transl_table=11
gtgaaggtactgctgctcgagaacatccacccggccgccgtcgagatcctcgagggccatggcttcgaggtcgagctgcggtcccgatccctctccgaggccgagctcatcgaagagctgcccggggtgtcggtgctgggcatccggtcgaacacccacctcaccgcgcccgtgctggaggcggcgaccgacctgatggcggtcggctgcttctgcatcggcaccaaccaggtcgacctgtccgcggccagccgccgcggcgtggccgtgttcaacgcgccgtactccaacacccgcagcgtcgtggagctggtgatcggcgagatcatcgcgctcgggcgccggctcaccgagaagacccagcgcatgcacgagggcgtgtgggacaagtccgccaagggcagccacgaggtgcgcggccggaccctgggcatcgtcgggtacgggaacatcggcacccagctctcgaacgtcgccgaggcgctgggcctgcgggtgatcttcttcgacaccgccgaccggctcgcccacgggaacgcgcagcggatgcgcagcctcgacgagctgctcgccgaggcggacgtcgtcagcatccacgtcgacgggcgccccgggaacgccgggctgttcggcgccgaggagttcgcgaagatgaagccgcgcagcctgttcatcaacgcctcgcgcgggatggtcgtcgacgacgtcgcgctgcgcgagcacgtcctgtcggggcacatcgccggcgcggccatcgacgtcttcccgatcgagccgaaggcccagggcgacccgttcgagtcggtgctgcgcggcctcgacaacgtgatcctcaccccgcacgtcggcggctccacccaggaggcgcaggaggagatcggccacttcgtctccggcaagctggccgcgttcacccggcagggccgcaccgagctgtcggtgaacctgccgacggtccaggcccccgagctcgaggtcggccaccggatcggcttcctccacgacaacgtccccggcgtgctcgcgagcgtcaacgacctgctggccgacgccaacgcgaacgtcaccgggcagtacctctcgacccggggccagcaggggtacgtcgtcaccgacaccctcgacccgctgccccaggacgccctggccaagctcgccgaggccgaccacaccatctggctgcgcacctggtga

SEQ ID NO: 1432 - protein, 397 aa, Nocardioides sp. JS614
MKVLLLENIHPAAVEILEGHGFEVELRSRSLSEAELIEELPGVSVLGIRSNTHLTAPVLEAATDLMAVGCFCIGTNQVDLSAASRRGVAVFNAPYSNTRSVVELVIGEIIALGRRLTEKTQRMHEGVWDKSAKGSHEVRGRTLGIVGYGNIGTQLSNVAEALGLRVIFFDTADRLAHGNAQRMRSLDELLAEADVVSIHVDGRPGNAGLFGAEEFAKMKPRSLFINASRGMVVDDVALREHVLSGHIAGAAIDVFPIEPKAQGDPFESVLRGLDNVILTPHVGGSTQEAQEEIGHFVSGKLAAFTRQGRTELSVNLPTVQAPELEVGHRIGFLHDNVPGVLASVNDLLADANANVTGQYLSTRGQQGYVVTDTLDPLPQDALAKLAEADHTIWLRTW

SEQ ID NO: 1433 - DNA, 1233 bp, Azoarcus sp. BH72
  CDS (1)..(1233): transl_table=11
atgaatcagcgcctttcggtgcagaaggacaagctcaacgtggtgctgttcgaaggcatccacgcctccgcggtggaagccttccgcgccgatggctacggcagcgtcaccgccgtcgccaaggcgctggcgggtgaggagctggcgcaggcgctggcccacgcccacttcgtcggcatccgctcgcgcacccgcctcaccgccgaggtgctggcgcaggcgcccaagctggtcgccgtcggctgcttctgcatcggcaccaaccaggtggacctgggcgccgccgcggcgcgcggcgtgccggtgttcaacgcgcctttctccaacacccgcagcgtggccgagctggtgatcgccgaaaccatcatgctgatgcgcggcatcccggcgcgcaacgcgctgcagcaccgcggcggctggatgaagagcgccgccaacgcctgggaggtgcgcggcaagacgctgggtatcgtcggctacggccacatcggcacccaggtgggcgtgctcgccgaacagctcggcatgagcgtggtgttccacgacatcgagacccggctgccgctcggcaacgcccgccagctcggctcgctcgacgcgctgctggcggtggccgacgtggtgagcctgcacgtgccggaaaccccggcgacgatgaacatgatcgccgcgccgcagctggccgcgatgaaggccggcagcttcctcatcaacgcctcgcgcggcaccgtggtggacatcgacgcgctcgcccaggcgctggaggccggccacctgctcggcgccgcgatcgacgtcttcccggtggagccggaaggcaacgacgaccccttcgtgtcgccgctcacccgcttcgacaacgtcatcctgacgccccacatcggcggctccaccgccgaagcgcaggccaacatcggccgcgaggtcgccgccaagctgatccgctacagcaacaacggctccaccgtcaccgcggtgaatttccccgaggtgtcgctgcccgagcacgccggcaagtgccgcgtgctgcacatccaccgcaacgtgcccggcatgctcgcgcgcatcaacgagcgcttctcgcgggccggcatcaacatcgccggccagtacctgcagaccacgcccgacctcggctacgtggtgatcgacgtggatgccgctgccagccaggtggccttcgacgagctgtgctcgatcgaaggcaccatccgctgccgggtgctgtactag

SEQ ID NO: 1434 - protein, 410 aa, Azoarcus sp. BH72
MNQRLSVQKDKLNVVLFEGIHASAVEAFRADGYGSVTAVAKALAGEELAQALAHAHFVGIRSRTRLTAEVLAQAPKLVAVGCFCIGTNQVDLGAAAARGVPVFNAPFSNTRSVAELVIAETIMLMRGIPARNALQHRGGWMKSAANAWEVRGKTLGIVGYGHIGTQVGVLAEQLGMSVVFHDIETRLPLGNARQLGSLDALLAVADVVSLHVPETPATMNMIAAPQLAAMKAGSFLINASRGTVVDIDALAQALEAGHLLGAAIDVFPVEPEGNDDPFVSPLTRFDNVILTPHIGGSTAEAQANIGREVAAKLIRYSNNGSTVTAVNFPEVSLPEHAGKCRVLHIHRNVPGMLARINERFSRAGINIAGQYLQTTPDLGYVVIDVDAAASQVAFDELCSIEGTIRCRVLY

SEQ ID NO: 1435 - DNA, 1305 bp, Acidovorax sp. JS42
  CDS (1)..(1305): transl_table=11
ttgcacaatgatcccctctcctgtccagcggcgcgcgccgcctgggtgttttcatctcctctcaatttgcacgccatggccaagacttccctggataaaagcaagatcaagttcctgttgctggagggcatccatccctctgcggtggaagtgttgcggtccgcggggtatacgcaggtcgaggtgctggccggggcgctggagggcgaggaactgcgccgcaagatcgccgacgtgcacttcattggcatccgctcgcgcacgcagctcacggcggacgtgttcgcgcatgcgcacaagctcgtggccgtggggtgcttttgcatcggcaccaaccaggtagacctgaacgctgcgcgcgagcgcggcatcgccgtgttcaatgcgccgtattccaacacccgctccgtggccgagctggtgctggccgaggccatcctgctgctgcgcggcgtgcccgagaagaacgctgcggcccaccgcggcggctggctcaagagcgccacgaacgcctacgagatccgcggcaagacgctgggcatcgtgggctacggctccatcggcacccagctgtcggtgctggccgaggcgctgggcatgcacgtgatcttccacgacgtggtgcacaagctgccgctgggcaatgcgcgccaggtgggttcgctgcacgagctgctgggccaggccgacatcgtgaccctgcacgtgcctgagctgccttccacccagtggatgattggcgccgccgagatcgcggccatgaagccgggcggcatcctcatcaacgcctcgcgcggcacggtggtggagatcgaccccctggcccaggcgctgaagggcggcaacttgctgggcgcggccgtggacgtgttcccggtggagcccaagagcaacaaggacgagttcgtctcgccgctgcgcgggctggacaacgccctcctcacgccccacatcggcggctccaccatggaggcgcaggccaacatcggcctggaggtggcggaaaagctcgtcaggtacagcgacaacggcaccagcacttcgtcggtcaacttccccgaggtggcgctgcccgagcatgcgggcaagcaccgcctgctgcacgtgcaccacaacgtgccgggcgtgctctcgcagatcaacagcatcctgtcggacaaccacatcaacatcgcggcgcagtacctgcagaccaacgagaagatcggctatgtggtgatcgacctcgacgcgcgctcgtccgacctggcgctggagaagctggcccaggtgcccggcaccatccgcagccgcgtgctgtattaa

SEQ ID NO: 1436 - protein, 434 aa, Acidovorax sp. JS42
MHNDPLSCPAARAAWVFSSPLNLHAMAKTSLDKSKIKFLLLEGIHPSAVEVLRSAGYTQVEVLAGALEGEELRRKIADVHFIGIRSRTQLTADVFAHAHKLVAVGCFCIGTNQVDLNAARERGIAVFNAPYSNTRSVAELVLAEAILLLRGVPEKNAAAHRGGWLKSATNAYEIRGKTLGIVGYGSIGTQLSVLAEALGMHVIFHDVVHKLPLGNARQVGSLHELLGQADIVTLHVPELPSTQWMIGAAEIAAMKPGGILINASRGTVVEIDPLAQALKGGNLLGAAVDVFPVEPKSNKDEFVSPLRGLDNALLTPHIGGSTMEAQANIGLEVAEKLVRYSDNGTSTSSVNFPEVALPEHAGKHRLLHVHHNVPGVLSQINSILSDNHINIAAQYLQTNEKIGYVVIDLDARSSDLALEKLAQVPGTIRSRVLY

SEQ ID NO: 1437 - DNA, 1581 bp, Nostoc punctiforme PCC 73102
  CDS (1)..(1581): transl_table=11
atgtctaaggttcttgtctctgattctattgaccaagctggaattgacattctttcgcaagttgctactgttgatgtcaaaataggtctaaaaccagcccaactgctcgaaattattggtgaatatgacgcactgatgattcgctctagtacgcgggtcactcaagaaatcattgaagccggcactcagctaaaaatcatcggtcgtgctggcgtgggtgtggataatgtggatgttcccgcagccacacgccggggaattgtagtagtcaattctccagagggaaacacaattgccgccgccgaacacgcactagcaatgattttggctttgtctcgccacatcccggatgctaacgcttcggtgaaacgcggcgcgtgggatcgcaatagctttgtcggcgcggaagtctacaaaaaaactctcggcgttgtcggtttgggtaaaattggctcccatgttgcggctgtagctaagacaatggggatgaaactcttagcttatgacccttttatttctacagaacgagctgaacaaattggctgtcagttggtggagctagatttactcttccagcaagcagactatatcaccctacacatcccgaaaactccagagactacccacttaatcaatgccacaaccctggcaaaaatgaaacccacagcccggattatcaactgcgctcgtggtgggatcattgatgaagtagctttagcagcagctctaaaagcgggaaaaataggcggtgcagccctggatgtgttcgagtcagaaccactgggtgaatcagaattgcgatcgctaggcaaagaagttatcctcaccccccacttgggagcctctaccgcagaagctcaagtaaatgtggcgattgatgttgccgaacaaattcgggatgtacttttaggactaccagcgcgttcagccgtcaacattcccggactcggccccgatgtgttggaagaactcaaaccatacatgcaactagcagaaactctaggtaatctagtaggacagctagctggcggacgggtggaagtactcaatattcgtctgcaaggcgaactcgcaaccaacaaaagtcagcctttggtagtagctgccctcaaaggattactttaccaagctttgcgggaacgggtaaattacgttaatgccagcatagaagccaaagaacgcggaattcgggtaattgaaacccgcgatgcttctattcgagactatgccggaacgcttcatctagaagccacgggtactttgggtactcattctgtcacaggtgctttgctgggtgaacgggaaatccacctaactgatgttgacggtttccccattaacgtcccacccagcaaatatatgctgtttaccctgcaccgcgatatgccagggattatcggcaaacttggttctttactcggcagttttaatgtgaatattgccagtatgcaagtaggccgtaaaatcgtccgtggtgatgcggtaatggctctgagtatagatgaccctttaccagagggcattttagatgagattataaaagtccctggtattcgggacgcatatacagtaacactatga

SEQ ID NO: 1438 - protein, 526 aa, Nostoc punctiforme PCC 73102
MSKVLVSDSIDQAGIDILSQVATVDVKIGLKPAQLLEIIGEYDALMIRSSTRVTQEIIEAGTQLKIIGRAGVGVDNVDVPAATRRGIVVVNSPEGNTIAAAEHALAMILALSRHIPDANASVKRGAWDRNSFVGAEVYKKTLGVVGLGKIGSHVAAVAKTMGMKLLAYDPFISTERAEQIGCQLVELDLLFQQADYITLHIPKTPETTHLINATTLAKMKPTARIINCARGGIIDEVALAAALKAGKIGGAALDVFESEPLGESELRSLGKEVILTPHLGASTAEAQVNVAIDVAEQIRDVLLGLPARSAVNIPGLGPDVLEELKPYMQLAETLGNLVGQLAGGRVEVLNIRLQGELATNKSQPLVVAALKGLLYQALRERVNYVNASIEAKERGIRVIETRDASIRDYAGTLHLEATGTLGTHSVTGALLGEREIHLTDVDGFPINVPPSKYMLFTLHRDMPGIIGKLGSLLGSFNVNIASMQVGRKIVRGDAVMALSIDDPLPEGILDEIIKVPGIRDAYTVTL

SEQ ID NO: 1439 - DNA, 1200 bp, Bifidobacterium longum DJO10A
  CDS (1)..(1200): transl_table=11
atgcccaaagcactgttattggaaaacattcaccccgatgcggccaaatcgctgcgtgatcgcggtttcgaagtcgagaccatgaagggagccctgagcgaggacgaactcatcgatgcgctggatggcgtggacttggtgggcgtacgctccaagaccaacgtcacagcccgcgtgctggatgcgcgtcctacgctaagcgccatcggctgcttctgcatcggcaccaatcaggtcgatctggcacatgccggcaagcgtggcatcgccgtgttcaacgctccctactccaacacccgttccgtggtggaattggtgatctgcgacatcatctgcttgatgcgccgcattcccgcacacacgcatcacatcaagcatggcctgtgggacaagtccgcttccggctcgcatgaagtgcgcggcaagaccctcggcatcatcggctacggcaacatcggctcccagctgtcagtactggccgaggccctcggcatgcgcgtggtgttctacgacattgaggagaaactggcactgggcaacgcccaccgttgcgacaccctcaacgaactgctggaacagtccgatgccgtgaccctgcacgtggatggccgcaagtcgaacaccggcttcttcggcgaagaccaattcgcccacatgaagcaggacgcgattttcattaacctttcgcgcggtttcgtcgccgatctgggagctctgaagcagcacctcgattccggccatctgtctggcgcggcggtcgacgtgttccccgttgagccgaagaagagcggagatccgttcgagacttcactggccaatgaagacaatatgattctgactcctcatattggcggctccaccttggaagctcaggaatccatcggccatttcgtctctcagcgtcttgaggattactggttcaagggttctacctccttgtccgtgaacctaccgcagatcaacctcggtgagtgcaagggtgtgtgccgtatcgcccatctgcacgacaatcttcctggtgtgctggctcatgtcaatcatgtgctcggcgaggagaacatcaacgtttccttccagtcgctggcaaccgaaggcgaacttggctatgtggtcaccgacgtggctcaaaagcccagcgccgccacgcttgaagcactgcgcaacatcgaaggcaccattcgcatgcgtgtcatcagctga

SEQ ID NO: 1440 - protein, 399 aa, Bifidobacterium longum DJO10A
MPKALLLENIHPDAAKSLRDRGFEVETMKGALSEDELIDALDGVDLVGVRSKTNVTARVLDARPTLSAIGCFCIGTNQVDLAHAGKRGIAVFNAPYSNTRSVVELVICDIICLMRRIPAHTHHIKHGLWDKSASGSHEVRGKTLGIIGYGNIGSQLSVLAEALGMRVVFYDIEEKLALGNAHRCDTLNELLEQSDAVTLHVDGRKSNTGFFGEDQFAHMKQDAIFINLSRGFVADLGALKQHLDSGHLSGAAVDVFPVEPKKSGDPFETSLANEDNMILTPHIGGSTLEAQESIGHFVSQRLEDYWFKGSTSLSVNLPQINLGECKGVCRIAHLHDNLPGVLAHVNHVLGEENINVSFQSLATEGELGYVVTDVAQKPSAATLEALRNIEGTIRMRVIS

SEQ ID NO: 1441 - DNA, 1233 bp, Haemophilus influenzae R2846
  CDS (1)..(1233): transl_table=11
atgacaaacaaagtctctctagacaaatcaaaaatcaaatttgtattgtttgaaggtgtgcaccaaagcgcacttgatacgctccatgcggcaggctataccaatattgattactataaaaaagcactagatggcgatgaattaaaagaagccattaaagatgcacattttatcggcttgcgttctcgcacccatttaacggcagaaatgattgaggccgcacccaaattaattgctgtgggatgtttctgtattggtaccaaccaagtggatttaaatgcagcaaaagtgcgtggaattcctgtatttaatgccccattctcaaacactcgttccgtcgcagaactagtattaggcgagattttattacttatgcgcaatgtgccacaagctaatgccgaagtacatcgtggcgtctggaataaatcagcgactggatctcatgaagtgcggggtaaaaaactaggaattattggttacggccacattggttcacaattaagtattattgcggaatcattgggcatggatgtatatttctacgatattgaaaataaacttccgcttggcaatgctaaacagcttcgtggccttcaagaattactcagttcttgtgatgtggtttcattacatgtgccagaactgccctctaccaaaaacttaatgaacgctgagcgtatcgcacaattaaaacaaggtgcaattttgatcaatgctgcgcgtggcacagtggtagatattgatgctctcgctcaagccttaaaagatgggaaacttcagggtgccgcaattgatgtattccccgttgagcccgcttcaattaatgaagaatttatctcgccgttacgtgaatttgataatgtgattttaacgccacatatcggcggctcaacagcggaagcacaagaaaatatcggttttgaagtggcaggcaaatttgtcaaatattcagacaacggatcaaccctttcttcggtaaacttcccagaggtctctttaccagaacacgagggaacaaaacgcttattgcatattcacgaaaatcgtcctggtatattgaacaaactgaaccaaattttcgtcgaagctaacctcaatattgcagcgcaatatttacaaactgacccgaaaattggttatgttgtcgtagatgtagaaacgaatgacgcatcgccattactgacgaaattgaaggaaatagatggcacaattcgtgcgcgagtgctttactaa

SEQ ID NO: 1442 - protein, 410 aa, Haemophilus influenzae R2846
MTNKVSLDKSKIKFVLFEGVHQSALDTLHAAGYTNIDYYKKALDGDELKEAIKDAHFIGLRSRTHLTAEMIEAAPKLIAVGCFCIGTNQVDLNAAKVRGIPVFNAPFSNTRSVAELVLGEILLLMRNVPQANAEVHRGVWNKSATGSHEVRGKKLGIIGYGHIGSQLSIIAESLGMDVYFYDIENKLPLGNAKQLRGLQELLSSCDVVSLHVPELPSTKNLMNAERIAQLKQGAILINAARGTVVDIDALAQALKDGKLQGAAIDVFPVEPASINEEFISPLREFDNVILTPHIGGSTAEAQENIGFEVAGKFVKYSDNGSTLSSVNFPEVSLPEHEGTKRLLHIHENRPGILNKLNQIFVEANLNIAAQYLQTDPKIGYVVVDVETNDASPLLTKLKEIDGTIRARVLY

SEQ ID NO: 1443 - DNA, 1242 bp, Xylella fastidiosa Ann-1
  CDS (1)..(1242): transl_table=11
atgccaccgacgaaaacttcttttcccaaacaagacatccgaattttgctgctagaaggggtcagtcacagcgggatcgaaacgttccgtgcggcaggttactcgcagatcaagatccatacgacatcgctgccggaagaggctctgcaagcagagattgcggaagcgcacatcatcggtattcgctcgcgcactcaattgaatgcagcggtgctagggcatgccaaacgtctgatggccataggttgtttctgcatcgggacgaatcaggtggacttggatacggcggaattgagcgggatccccgtgttcaacgcgccatattccaatacgcgtagtgtggctgagctgatcattgcggaagcaattttgttgctacgcaggatcccgcagaaaaatgccgaatgccatcgtgggggctggtccaaatctgccatcaacagtcatgaagcacgcggtaaggtgttgggcatcgtgggatacggtcacatcggtacgcaagtcagtgtgctggcggaggcgatggggatgcaggtgattttctacgatattgaatccaagctctctttgggcaatgcgcgtccagcggcaagcttggatgagttgctcggcattgccgacgtggtgacgctgcatgtaccggaaacggcagcgaccaagaatatgcttggtcatgcagaattggcacgaatgaaaccgggggcgcatttgattaatgcatcgcgcggtacggttgtggagattgacgcgctggatgcggctctggtgtcggggcatctgggcggggcggcagtggatgtattcccaagcgaacccaagggcaatagtgatccgttcatctcgccattgagcagacacgacaatgtgattttgacgccacatattgggggcagcacgctagaagcgcaggacaatattgggattgaggtagcagccaaattgatccgttatagcgataacggcagcacgctatcggcggtgaatttccctgaagtcagtttgccggagcacgtggggagtatgcgtttgctgcatatccaccgtaatgtgcccggggtgctgtcgcatatcaacgagctgttctcgcatcacaacgtcaatattgatggtcagttcctgcgtaccgatgccacgttgggctatgtggtcatcgatatcagtgccagtcagacgcaggctctggcattaaaagaggcattgacgcaggttcccgggacgctgcgtacccgtctgctgtactga

SEQ ID NO: 1444 - protein, 413 aa, Xylella fastidiosa Ann-1
MPPTKTSFPKQDIRILLLEGVSHSGIETFRAAGYSQIKIHTTSLPEEALQAEIAEAHIIGIRSRTQLNAAVLGHAKRLMAIGCFCIGTNQVDLDTAELSGIPVFNAPYSNTRSVAELIIAEAILLLRRIPQKNAECHRGGWSKSAINSHEARGKVLGIVGYGHIGTQVSVLAEAMGMQVIFYDIESKLSLGNARPAASLDELLGIADVVTLHVPETAATKNMLGHAELARMKPGAHLINASRGTVVEIDALDAALVSGHLGGAAVDVFPSEPKGNSDPFISPLSRHDNVILTPHIGGSTLEAQDNIGIEVAAKLIRYSDNGSTLSAVNFPEVSLPEHVGSMRLLHIHRNVPGVLSHINELFSHHNVNIDGQFLRTDATLGYVVIDISASQTQALALKEALTQVPGTLRTRLLY

SEQ ID NO: 1445 - DNA, 1242 bp, Xylella fastidiosa Ann-1
  CDS (1)..(1242): transl_table=11
atgccaccgacgaaaacttcttttcccaaacaagacatccgaattttgctgctggaaggggtcagtcacagcgggatcgaaacgttccgcgcggcgggttactcgcagatcaagatccatacgacatcgctgccggaagaggcactgcaagcagagattgcggaagcgcacatcatcggtattcgctctcgcactcaattgaatgcagcggtgctagggcatgccaaacgtctgatggccataggttgtttctgcatcgggacgaatcaggtggacttggatacggcggaactgagcgggatcccggtgttcaacgcgccatattccaatacgcgtagtgtggctgagctgatcattgcagaagcaattttgttgctacgcaagatcccgcagaaaaatgccgaatgccatcgtgggggctggtccaaatctgccatcaacagtcatgaagcacgcggtaaggtgttgggcatcgtgggatacggtcacatcggtacgcaagtcagtgtgctggcggaggcgatggggatgcaggtgattttctacgatattgaatccaagctctctttgggcaatgcgcgtccagcagcaagcttggatgagttgctcggcattgccgacgtggtgacgctgcatgtaccggaaacggcagcgaccaagaatatgcttggtcatgcagaattggcgcgaatgaaaccgggggcgcatttgattaatgcatcgcgcggtacggttgtggagattgacgcgctggatgcggctctggtgtcggggcatctgggcggggcggcagtggatgtattcccaagcgaacccaagggcaatagtgatccgttcatctcaccattgagcagacacgacaatgtgattttgacgccacatattgggggcagcacgctagaagcgcaggacaatattgggattgaagtggcagccaaattgatccgttatagcgataacggcagcacgctatcggccgtgaatttccctgaagtcagtttgccggagcacgtggggagtatgcgtttgctgcatatccaccgtaatgtgcccggggtgctgtcgcatatcaacgagctgttctcgcgtcacaacgtcaatattgatggtcagttcctgcgtaccgatgccacgttgggctatgtggtcatcgatatcggtgccagtcagacgcaggctctggcattaaaagaggcattgacgcaggttcccgggacgctgcgtacccgtctgctgtactga

SEQ ID NO: 1446 - protein, 413 aa, Xylella fastidiosa Ann-1
MPPTKTSFPKQDIRILLLEGVSHSGIETFRAAGYSQIKIHTTSLPEEALQAEIAEAHIIGIRSRTQLNAAVLGHAKRLMAIGCFCIGTNQVDLDTAELSGIPVFNAPYSNTRSVAELIIAEAILLLRKIPQKNAECHRGGWSKSAINSHEARGKVLGIVGYGHIGTQVSVLAEAMGMQVIFYDIESKLSLGNARPAASLDELLGIADVVTLHVPETAATKNMLGHAELARMKPGAHLINASRGTVVEIDALDAALVSGHLGGAAVDVFPSEPKGNSDPFISPLSRHDNVILTPHIGGSTLEAQDNIGIEVAAKLIRYSDNGSTLSAVNFPEVSLPEHVGSMRLLHIHRNVPGVLSHINELFSRHNVNIDGQFLRTDATLGYVVIDIGASQTQALALKEALTQVPGTLRTRLLY

SEQ ID NO: 1447 - DNA, 1596 bp, Sulfitobacter sp. EE-36
  CDS (1)..(1596): transl_table=11
atggcccccaaagtgcttatttccgacaaactctcggacgccgccgttcaaatcttcaaagaccgcggcattgacgtcgacttccaacccgatcttggcaaagacaaggacaagcttgccgccgtgatcggcgattacgacgggctcgccatccggtccgcgacgaaagtgaccgaaaagatcctcgccaatgcgaccaacctcaaggtgatcgcccgcgccggtatcggcaccgataacatcgacaaggatgcggcctcgaaaaagggtgtcatcgtcatgaacacccccttcggcaacatgatcaccacggcagaacacgcgattgcgatgatgttcgccgttgcccgtcaaatccccgaggcatcggcctccacccatgccggcaaatgggaaaagtccaaattcatgggggtcgagcttacgggtaaaacccttggcgtaatcggtgccggcaacatcggcggcatcgtctgcgatcgcgcccgcgggctgaagatgaaagtcgcggcctatgaccccttcctgagcgaagaaaaagccaagaagatgggtgtcgagaaagtcgagctggacgatctcctggcgcgcgcggacttcataacgttgcacgtgccttacacggatcaaaccgcaaatatcctgtccaaggaagccttggcgaaaaccaaaaaaggtgtgcggatcatcaactgtgcccgcggcggtctggtcgacgaagaagcattggccgaagcgctgaaatccggccatgtcgctggcgcagccttcgacgttttcaaggaagagcccgcgaccgaaaacccgctgttcggcctacccaacgtcgtctgcaccccccaccttggggccgccacgacggaagcacaggaaaacgtggcacttcaggtcgctgaacagatgtccgactacctgctgaccggtgccgtcacaaacgccctgaacatgccgtccgtcaccgccgaagaggcaaaggtcatgggcccgtggatcactttggcgggtcaccttggggccttcattggccagatgacggatgaagccgtgaaggcgatcaacatcctttacgacggtcaggtgtccgagatgaacctgaacgcgctgaactgcgcggtcgtggcgggcatcatgaaacgtgccaaccccgacgtgaacatggtcagcgcccccgttgttgcgcgcgaaaaaggcatccagatcagcaccaccaatcaggacaaatccggtgtcttcaacggctatgtgaaagtgaccgttgtcaccgagaaacgtgagcggtcgatcgcgggcaccgtgttctcggatggcaaaccacgcttcatccagatcaaaggcatcaatatcgaagccgaagttggtgcgcatatgctttacaccaccaacaacgacgtgcccggcatcatcgggacgctgggtcagaccctgggggcaaacgacgtaaacatcgcgaacttcaccctcggccggtccaccgccaaaggggaagcgattgccttgctctatattgacggccctctgcccgagaaagcgctgaaagacctgcgtgatacaggtctgttcaaacaggtcaaagagctcgaattcgaagtcgcctaa

SEQ ID NO: 1448 - protein, 531 aa, Sulfitobacter sp. EE-36
MAPKVLISDKLSDAAVQIFKDRGIDVDFQPDLGKDKDKLAAVIGDYDGLAIRSATKVTEKILANATNLKVIARAGIGTDNIDKDAASKKGVIVMNTPFGNMITTAEHAIAMMFAVARQIPEASASTHAGKWEKSKFMGVELTGKTLGVIGAGNIGGIVCDRARGLKMKVAAYDPFLSEEKAKKMGVEKVELDDLLARADFITLHVPYTDQTANILSKEALAKTKKGVRIINCARGGLVDEEALAEALKSGHVAGAAFDVFKEEPATENPLFGLPNVVCTPHLGAATTEAQENVALQVAEQMSDYLLTGAVTNALNMPSVTAEEAKVMGPWITLAGHLGAFIGQMTDEAVKAINILYDGQVSEMNLNALNCAVVAGIMKRANPDVNMVSAPVVAREKGIQISTTNQDKSGVFNGYVKVTVVTEKRERSIAGTVFSDGKPRFIQIKGINIEAEVGAHMLYTTNNDVPGIIGTLGQTLGANDVNIANFTLGRSTAKGEAIALLYIDGPLPEKALKDLRDTGLFKQVKELEFEVA

SEQ ID NO: 1449 - DNA, 1596 bp, Roseovarius nubinhibens ISM
  CDS (1)..(1596): transl_table=11
atggctcccaaagttctcgtttccgacaagctctctgaaaccgccgtccagattttccgcgaccgcggcatcgacgtggatttcctgcccgacgtgggcaaggacaaggacaagctcgctgaaatcattggccaatacgatggtctcgccatccgctcggccaccaaggtcaccgagaaaattctcgacgccgccaccaatctcaaggtgatcggccgcgccgggatcggcaccgacaatatcgacaaggacgccgcctcgaaaaagggcgtgatcgtcatgaacacgcctttcggcaacatgatcaccaccgccgaacatgccatcgcaatgatgttcgccgtggcacgtcagctgcccgaagcctctgcctcgacccatgccggcaaatgggaaaagtcgaaattcatgggggtcgagctcaccggcaagacgctcggcgtcattggcgcgggcaatatcggcggcatcgtctgcgaccgcgcccgtggcctcaagatgaaggtcgtggcctatgaccccttcctgagccaggaaaaggccgacaagatgggcgtcgaaaaggtcgatctcgacacgctcgtcgcgcgcgccgatttcatcacgctgcatgtgccgctgaccgatcagacccgcaacatcctctccgctgaacggctcgcccagaccaagaagggcgtgcgcatcatcaactgtgcccggggcggtctggtcgatgaggcggcgctggcggagctgctgaaatccggccatgtggcgggcgcgggctttgacgtcttctcgcaggaaccggcgaccgaaaacccgctcttcgatctgcccaacgtggtctgcaccccgcatctgggcgccgccaccaccgaggcacaggaaaacgtggcgctgcaggtggcggaacagatttccgactatctgctgaccggggccgtgtcgaacgcgctcaacatgccgtcggtcaccgccgaagaggccaaggtgatgggcccctggatcaagctcgcgggccatctgggcaatttcatcggccagatgacggacgagccgatcaaggcgatcaacatcctctatgacggggtggtgtcgcagatgaacctcgaggcgctgacctgttcggcggtcgcgggcatcatgaaatcggtcaaccccgaggtgaacatggtctcggccccggtcatcgccaaggaacgcggcgtcaagatctcgaccacccatcaggacaaatcgggggtcttcgagggctatatcaagctcaccgttgtgacggccgagcgggaacgttcgatcggtggcacggtgttctcggatggcaagccgcgctttatccagatcaaaggcatcaatatcgacgccgagatcggggcgcacatgctctacaccaccaatgaggacgagccgggcatcatcggcatgctgggtcagaccatggggcagaacggcgtcaacatcgccaactttaccctgggccgctcgcaggccggcggcgaggccatcgcgcttctctatgtcgatgccgaagtccccgccccggtgatcaagcagctcgaagacaccggcatgttcaaacaggtccgtccgctgcaattcgacgtggcctga

SEQ ID NO: 1450 - protein, 531 aa, Roseovarius nubinhibens ISM
MAPKVLVSDKLSETAVQIFRDRGIDVDFLPDVGKDKDKLAEIIGQYDGLAIRSATKVTEKILDAATNLKVIGRAGIGTDNIDKDAASKKGVIVMNTPFGNMITTAEHAIAMMFAVARQLPEASASTHAGKWEKSKFMGVELTGKTLGVIGAGNIGGIVCDRARGLKMKVVAYDPFLSQEKADKMGVEKVDLDTLVARADFITLHVPLTDQTRNILSAERLAQTKKGVRIINCARGGLVDEAALAELLKSGHVAGAGFDVFSQEPATENPLFDLPNVVCTPHLGAATTEAQENVALQVAEQISDYLLTGAVSNALNMPSVTAEEAKVMGPWIKLAGHLGNFIGQMTDEPIKAINILYDGVVSQMNLEALTCSAVAGIMKSVNPEVNMVSAPVIAKERGVKISTTHQDKSGVFEGYIKLTVVTAERERSIGGTVFSDGKPRFIQIKGINIDAEIGAHMLYTTNEDEPGIIGMLGQTMGQNGVNIANFTLGRSQAGGEAIALLYVDAEVPAPVIKQLEDTGMFKQVRPLQFDVA

SEQ ID NO: 1451 - DNA, 1605 bp, Erythrobacter sp. NAP1
  CDS (1)..(1605): transl_table=11
atgacgattggagtgcttccaatgacaaaacccaaagtcctcatttccgacaagatggaccccaatgcagcgcgcatttttgaagagcgcggctgcgaggtcgacgtcatcaccggcgaaacgccagaagagttgaaagcgcgtattggcgagtatcacggcctcgccatccggtcctcgaccaaggtgacggccgaaattctggatgctgcgacgaaccttaaggtcatcggccgcgccgggatcggtgtcgacaacgtcgatatcccttatgcgagcggcaagggcgtggtggtgatgaacaccccgttcggcaactcgatcaccacagccgaacacgccattgcgatgatcatggcgcttgcccggatgatcccggcggcagatgcacgcacccagaatggcgagtggcccaagaaagacttcatgggcatcgaagtgacgggcaagacgcttggcctgatcggggccggcaatatcggctcgatcgtcgccagccgcgctctgggccttcgcatgaaggtcatcgcgtatgatccgttcctgaccgaagaccgtgctgtcgaaatcggggtggagaaggtcgatctcgacaacctgctctcgcgcgccgatttcgtgagcctgcacacaccgctcaccgatgaaacccgcaacattctcagccgcgaacggcttgagaatgcgaagcccggcatccgcatcgtcaattgcgcgcgcggcgggctgatcgacgaggtcgcgctcaagaactgcctcgaaagcggtcaggtcgcaggcgccgcgctcgatgtgtttgccgaggaaccggcgaaggaaaatccgctgttcggcgcgcccaactttatctgcaccccgcaccttggagcatcgacgaccgaagcgcaggtgaacgttgcgctgcaggtggccgagcagatgagcgactacctcgtcaatggaggcgtcacgaacgcgctcaacatgccttcgctctccgccgaggaagcgccgaagctcaagccctacatgtcgctcgccgaaaagctcggcagcctcgtgggacagctcgcccatggcaacctcaccaagatcagcatcgagcgtgaaggtgcagcggcagagctcaacggcaagccgatcaccggcgcggtgctggcgggcttcatgcgccgctattccgacacggtgaacatggtcaacgcgccgtaccttgcgaaggaacgcggcctggatgtgagcgagatccgccaccagcgcgaaggtgcgttcaacacgctcatccgcgtctcggtcgaaaccgatgcgggcacgcgctcggtcgccggtaccttgttcggcaaggacgcaccgcgcctcgtcgagattttcggcatcgggatcgaagccgacctcgacggcaacatgctttacgtcgtcaacgacgataagccgggcttcattgggcgcatcggtacgctgctgggttcacagggcatcaatatcggcaccttcaacctcggtcgccgcgatgcgggcggggaagcggtgctgcttttgagcctggacgatgagcccagcgcggacgtgatggccgaggccgagaaggtcgaaggcgtgaaaatggtcaaggcgctcagcttttag

SEQ ID NO: 1452 - protein, 534 aa, Erythrobacter sp. NAP1
MTIGVLPMTKPKVLISDKMDPNAARIFEERGCEVDVITGETPEELKARIGEYHGLAIRSSTKVTAEILDAATNLKVIGRAGIGVDNVDIPYASGKGVVVMNTPFGNSITTAEHAIAMIMALARMIPAADARTQNGEWPKKDFMGIEVTGKTLGLIGAGNIGSIVASRALGLRMKVIAYDPFLTEDRAVEIGVEKVDLDNLLSRADFVSLHTPLTDETRNILSRERLENAKPGIRIVNCARGGLIDEVALKNCLESGQVAGAALDVFAEEPAKENPLFGAPNFICTPHLGASTTEAQVNVALQVAEQMSDYLVNGGVTNALNMPSLSAEEAPKLKPYMSLAEKLGSLVGQLAHGNLTKISIEREGAAAELNGKPITGAVLAGFMRRYSDTVNMVNAPYLAKERGLDVSEIRHQREGAFNTLIRVSVETDAGTRSVAGTLFGKDAPRLVEIFGIGIEADLDGNMLYVVNDDKPGFIGRIGTLLGSQGINIGTFNLGRRDAGGEAVLLLSLDDEPSADVMAEAEKVEGVKMVKALSF

SEQ ID NO: 1453 - DNA, 1233 bp, Pseudoalteromonas tunicata D2
  CDS (1)..(1233): transl_table=11
atgagtaataaggtttcgttagcaaaagataaaattaaaattttattgttagaaggtttacaccaaagcgctgtagaaacgctcaagcgccacggttacagcaatattgaatatgtaaaaacctctttagctgaagaagaactgattgagcgaattagtgatgtacactttattggtattcgctcgcgtactcatttaactgaaaaagtgcttaatgccgcagaaaagctaatagcagtcggttgcttttgtatcggtactaaccaagttgaactcgatgccgccaaagcgcgcggcattgcagtgtttaacgcgccgttttcaaatacacgttcggtagcagaattggtattaggtgagatcttattactccttcgtcgtattccacaaaaaaatgcccaagcacatcgtggcatatgggataaatcagcccatggttcatttgaagctcgcggtaaaactttagggatcataggttatggccacattggtacccagcttggcatcatggctgaaaatattggcatgaatgtgcaatattatgatatcgaagataaactaagcctaggcaatgccacacaagtgcatcacctcactcagctattacaaacttctgatgtgattagcttgcatgtgcctgaaacgccacaaactaaaaacctgattggtgctgccgagcttgaaatcatcaaacatggtgcgattttaattaatgcatcacgcggtactgtggttgatatcgatgcccttgccagcagcttacgtgaaaataaactctcaggtgcggcgattgatgtattcccgaccgagccaacctcaaatgatgaagagtttatctcgccactgcgtgagtttgacaacgttattttaaccccgcacattggtggttcaacccaagaagcccaagaaaacattggcattgaagtagcgggtaaattagccaaatattcagataacggttcaaccttatctgcggttaacttccctgaggtatcactgccagagcttgctggccgtagccgtttattacacgtgcaccacaatcgtccggggattttaacgcaaatcaaccaagcatttgcacagcacggcatcaatatcgcggcgcaatacttacaaaccaatgaaaccatcggttatgtcgtaatcgatgtcgataccgatgactctgaaatcgctttaaaagaacttcgtgcagttgaaggcaccattaaagcgcgtattttgcactag

SEQ ID NO: 1454 - protein, 410 aa, Pseudoalteromonas tunicata D2
MSNKVSLAKDKIKILLLEGLHQSAVETLKRHGYSNIEYVKTSLAEEELIERISDVHFIGIRSRTHLTEKVLNAAEKLIAVGCFCIGTNQVELDAAKARGIAVFNAPFSNTRSVAELVLGEILLLLRRIPQKNAQAHRGIWDKSAHGSFEARGKTLGIIGYGHIGTQLGIMAENIGMNVQYYDIEDKLSLGNATQVHHLTQLLQTSDVISLHVPETPQTKNLIGAAELEIIKHGAILINASRGTVVDIDALASSLRENKLSGAAIDVFPTEPTSNDEEFISPLREFDNVILTPHIGGSTQEAQENIGIEVAGKLAKYSDNGSTLSAVNFPEVSLPELAGRSRLLHVHHNRPGILTQINQAFAQHGINIAAQYLQTNETIGYVVIDVDTDDSEIALKELRAVEGTIKARILH

SEQ ID NO: 1455 - DNA, 1230 bp, Photobacterium sp. SKA34
  CDS (1)..(1230): transl_table=11
atggccaaagtttcactcaataaagataaaattaaaattctattattagaaggactacacccttcatctctagaagtgctacaacaagctggttacaccaacattgaataccacaaaggatcgctcgctggtgaagagttactagaagccgtaaaagatgcccacttcattggtattcgctctcgtacacaattaacgcctgaagtttttgctgcagcgagaaaacttaccgctgttggatgtttctgtattggtactaaccaagttgatttagatgaagctatgcgccgcggtatccccgtttttaacgcaccattttcaaatacccgtagtgttgcagaacttgtcttaggtgagctgcttcttctgttacgtggcatcccagaaaagaatgctaaagcgcatcgtggtgaatggataaaatctgcagataactcatttgaagcgcgtggtaaaaccttaggtattatcggctacggtcatattggtactcaacttggtatattggctgaaaacctcggaatgcgcgtttgtttttacgatattgaaagtaaattaaccttaggtaatgcaacacaagtcgcatcgttaagtgagctgttaaataaatcggatgtgatttcactgcacgttccagaaacgccagagacacaaaacattatgggtgctgaagaatttgcacgcatgaagccaggttctatttttattaacgcagcacgtggaactgtcgttgatattgatgccctttgtagcgcattagaaagcaaacatattgcaggcgctgctatcgatgtattccctgtagaacctaaaaccaataacgacccatttgaatcccccctgctgcaatttgataacgttattttgacgcctcacattggaggatcaacgcaagaagcacaggaaaatattggcattgaagtggcgggtaaactagtgaaatactcagataatggttcaacgctatctgctgttggcttccctgaggtatcactacctgagcaccgtggttgctctcgtctacttcatattcatgaaaaccgccctggagtcttaaatcaaatcactacaatttttgcttcagaaggtatcaatatcgccgctcagttcttacaaacaggcgctgaaattggttatgtggttattgatgttgaaactgaacgttcaaaagaagcactagcaaaactgaaaacaatcgaaggtactattcgcgcccgtattttgcactaa

SEQ ID NO: 1456 - protein, 409 aa, Photobacterium sp. SKA34
MAKVSLNKDKIKILLLEGLHPSSLEVLQQAGYTNIEYHKGSLAGEELLEAVKDAHFIGIRSRTQLTPEVFAAARKLTAVGCFCIGTNQVDLDEAMRRGIPVFNAPFSNTRSVAELVLGELLLLLRGIPEKNAKAHRGEWIKSADNSFEARGKTLGIIGYGHIGTQLGILAENLGMRVCFYDIESKLTLGNATQVASLSELLNKSDVISLHVPETPETQNIMGAEEFARMKPGSIFINAARGTVVDIDALCSALESKHIAGAAIDVFPVEPKTNNDPFESPLLQFDNVILTPHIGGSTQEAQENIGIEVAGKLVKYSDNGSTLSAVGFPEVSLPEHRGCSRLLHIHENRPGVLNQITTIFASEGINIAAQFLQTGAEIGYVVIDVETERSKEALAKLKTIEGTIRARILH

SEQ ID NO: 1457 - DNA, 1233 bp, Neptuniibacter caesariensis
  CDS (1)..(1233): transl_table=11
atgagtcaaacaacctctcttgataaaagcaaaatcaagatattgctgttggaaggtgtccaccagtctgctgtggatacatttaaccaaaacggttacaccaacattgagtttctgacgggttcactgccagaagaagaactgattgcacgtattaaggatgttcacttcatcggtatccgctcgcgtactcagctgactgagaaagtctttgctgctgccgagaaactggttgctgttggttgtttctgtatcggaacaaaccaggtgaatctggaagccgcgacgatgcgcggtgttgcagtctttaatgcgccattctctaacactcgctctgtagctgaactggtgatcgctgaagcaatcctattgctgcgcggcgtcgctgagaagaatgctaaagctcaccgcggtgagtggcagaaatcagctaagaactcctacgagatccgtggtaagaagctgggtattgttggttacggcagcatcggttctcagttgagtgttattgctgaatccctaggtatgaaagtctacttctatgacgttgtgactaaactgccactgggtaatgcaacacaggttggctctcttaaggaactgcttaacatcagtgatattgtttccctgcatgtacctgagacaccgtctacacaagatatgatgggtgaagctcagtttgcagagatgaaacagggctctatcttcctgaacgctgcacgcggtacggttgtagtgatcgacgagctatgtaaagcactggattcaggtcgtctgctgggcgcagctgtcgatgtattcccagttgaaccacgtacaaacaacgatgagttcatctcacctcttcgcgagtatgacaatgtgatcctgacacctcacgtaggtggttctactatggaagctcaggagaacatcggttacgaagtagcagagaaactgatcaagtacagtgataacggttcctctatcacttcagttaacttccctgaagttgcgctgccagaacatccaaatgttcaccgtctgctgcatgttcataacaacgtgcctggcattatgacagcgatcaacagtgtattctcggagaacagcatcaacatcagcggccagtacctgcagacaaatgagaaagtaggttacgttgtcgtagacgttgatgccgattactctcaggttgccctacaaaacctgagacagatcgaaggcactattcgctgccgccgtctgttctaa

SEQ ID NO: 1458 - protein, 410 aa, Neptuniibacter caesariensis
MSQTTSLDKSKIKILLLEGVHQSAVDTFNQNGYTNIEFLTGSLPEEELIARIKDVHFIGIRSRTQLTEKVFAAAEKLVAVGCFCIGTNQVNLEAATMRGVAVFNAPFSNTRSVAELVIAEAILLLRGVAEKNAKAHRGEWQKSAKNSYEIRGKKLGIVGYGSIGSQLSVIAESLGMKVYFYDVVTKLPLGNATQVGSLKELLNISDIVSLHVPETPSTQDMMGEAQFAEMKQGSIFLNAARGTVVVIDELCKALDSGRLLGAAVDVFPVEPRTNNDEFISPLREYDNVILTPHVGGSTMEAQENIGYEVAEKLIKYSDNGSSITSVNFPEVALPEHPNVHRLLHVHNNVPGIMTAINSVFSENSINISGQYLQTNEKVGYVVVDVDADYSQVALQNLRQIEGTIRCRRLF

SEQ ID NO: 1459 - DNA, 1230 bp, Oceanobacter sp. RED65
  CDS (1)..(1230): transl_table=11
atgagcacaacttctctggataaaagcaaaattcgtatccttttattggaaggggttcaccaaagcgccctagatacactaaatgctgctggctatacgaatatcgagtatgtaaaaacggcattggctggggacgaactgaaagaaaaaattaaagacgcccactttgttggtatccgctcgcgcacccagttaactgaagacgtgtttgaagtggccaataaactgattggtgttggttgcttctgtatcggtaccaaccaggttgatcttaacgcagcagccaaacgcggtatcccagtatttaatgctccatattcaaacactcgctcagttgcagagttagtccttgctgaagctatcctaatgctacgcggtattccggaaaagaatgctgtgtgtcaccgtggtggctggttaaagtctgctgttggcagcttcgaatgtcgtggtaaaaacctaggtatcgtgggttatggcagtattggtactcagctatctgttttagctgaaggccttggtatgaaagtctacttctacgatgtggtaactaagcttccgatcggtaacgctacacaagtagagagcatggacgagctgctgtctatttctgacattgttactcttcatgtccctgaaactggcgacacgaaagacatgatgggtgctgaacagtttgccaaaatgaaaaaaggtagccttttcattaatgctgctcgtggtaccgttgtcgatatcccagcattggcagaagcgcttgaaactggccatatcgcaggtgccgcagtggatgttttcccagttgaacctaaaggcaatgatgatgagttcttatcgcctctacgcaagttcgacaatgtgattttaacgccgcatatcggtggatctacgcaagaggcacaagaaaacattggtaaagaggtaggtgaaaagctagcaggctattctgatacgggtacgactttatctgccgttaacttcccagaagtagcgctgcctcagcatggaaacttccaccgcattcttcacatccacaaaaaccagcctggtgtattgaatgctatcaacaccatctttgctgaaaacaatatcaacgtcttaggtcagttcttacagactagtgccgacattggttacgttgtgatcgatgtagaagaaagcgccggcgaactggcactagaaaaagtgcaagaagtagaagcgaccattcgtgctcgcattctgtactaa

SEQ ID NO: 1460 - protein, 409 aa, Oceanobacter sp. RED65
MSTTSLDKSKIRILLLEGVHQSALDTLNAAGYTNIEYVKTALAGDELKEKIKDAHFVGIRSRTQLTEDVFEVANKLIGVGCFCIGTNQVDLNAAAKRGIPVFNAPYSNTRSVAELVLAEAILMLRGIPEKNAVCHRGGWLKSAVGSFECRGKNLGIVGYGSIGTQLSVLAEGLGMKVYFYDVVTKLPIGNATQVESMDELLSISDIVTLHVPETGDTKDMMGAEQFAKMKKGSLFINAARGTVVDIPALAEALETGHIAGAAVDVFPVEPKGNDDEFLSPLRKFDNVILTPHIGGSTQEAQENIGKEVGEKLAGYSDTGTTLSAVNFPEVALPQHGNFHRILHIHKNQPGVLNAINTIFAENNINVLGQFLQTSADIGYVVIDVEESAGELALEKVQEVEATIRARILY

SEQ ID NO: 1461 - DNA, 1233 bp, Vibrio sp. Ex25
  CDS (1)..(1233): transl_table=11
atggccaaagtttcactggaaaaagaaaagattaagatcctcttgttagagggactccacccttcttcagttgaagttcttcaagcagctggttataccaacattgagtaccataaaggttcccttccggaagaagaattgattgaagcggttaaagacgtgcacttcatcggtattcgctcccgtacgaacctatccgaagaggtaatcaatgcggcgaataaactggttgcaattggctgtttttgtatcggtactaaccaagtaaacctagacgcagcagcaaaacgcggcattcctgtgtttaatgcaccgttctctaacacacgcagtgtggctgagctagtgcttggtcaaatcctactacttctgcgtggcattcctgaaaagaatgcgcttgcacatcgcggtatttggaagaaaagtgctgacaactcttacgaagcacgtggcaaacgtcttggcattatcggatacggccacattggtacgcagctaggtattattgccgaaaacttaggtatgcgcgtttactactacgacatcgagaacaaattgtcccttggtaatgcgacgcaagtacataccatgagtgaactactaaacaagtgtgacgtaatttctctgcacgttcctgaaacgccagaaacaaaaaatatgatgggtgaagctgagtttgctcgcatgaagccaggctcaatctttattaatgcagcacgcggcactgtcgtgcatattccagcactttgccatagtttagaagcgggtcacattgcgggcgctgcgattgatgtattcccaacagaaccaaaaacgaatgccgacccgttcgaatctcctttgcagaagttcgataatgtcatcctcactccacacgttggtggttcaacgcaagaagcacaagagaacatcggtgttgaggtcgcaggaaaactggcgaagtactctgacaacggctctacgctttcaagcgtaaacttcccagaggtgtcactgccagagcacggtggtgaatgctctcgcttgcttcacatccataaaaaccgtcctggtattcttactcagatcaacaccatcttcgcggaagacggcattaacattgccgcacagtacctacaaacagccgctgaaatcggctacgtagtgatcgatgttgaaaccgagcgctcagaagaagcactagcgaaactgaaaagtattgaaggcactatccgtgctcgtatccttcactaa

SEQ ID NO: 1462 - protein, 410 aa, Vibrio sp. Ex25
MAKVSLEKEKIKILLLEGLHPSSVEVLQAAGYTNIEYHKGSLPEEELIEAVKDVHFIGIRSRTNLSEEVINAANKLVAIGCFCIGTNQVNLDAAAKRGIPVFNAPFSNTRSVAELVLGQILLLLRGIPEKNALAHRGIWKKSADNSYEARGKRLGIIGYGHIGTQLGIIAENLGMRVYYYDIENKLSLGNATQVHTMSELLNKCDVISLHVPETPETKNMMGEAEFARMKPGSIFINAARGTVVHIPALCHSLEAGHIAGAAIDVFPTEPKTNADPFESPLQKFDNVILTPHVGGSTQEAQENIGVEVAGKLAKYSDNGSTLSSVNFPEVSLPEHGGECSRLLHIHKNRPGILTQINTIFAEDGINIAAQYLQTAAEIGYVVIDVETERSEEALAKLKSIEGTIRARILH

SEQ ID NO: 1463 - DNA, 1230 bp, Alteromonadales bacterium TW-7
  CDS (1)..(1230): transl_table=11
atgagtaaggtatcgttagcaaaagacaaaataaaaattctcttgcttgaaggtgtgcaccaaagcgcagttgaaacgctaaaacgaaatggttacagcaatatagactacgttaaaacatcgctacctgaagacgagcttaaagaacgtattaaagacgctcactttgtaggtctgcgttctcgtactcatattaacgaagctgttttagatgctgcagagaagctgattgccattggttgtttttgtattggcacaaaccaagttgacttaagtaacgctcgccagcgtggtattgctgtatttaatgcgccattttcaaatacacgctctgttgcagagctagtacttggtgaaatactgcttttacttcgcggtatacctgagcgaaatgctgcagctcaccgtggtgagtggctaaaaacagcaacgggttcatttgaagcacgtggtaaaacgttgggtattattggctatggccacattggtactcagctaggtattatggctgaaaacataggtatgaacgtcgagttttacgacattgaagataagctaacactgggtaatgcaaagcaagtgcataacttgactcagctacttcagcgatctgatgtaattagtttgcatgtgccagaaacaccacaaaccaaaaacttaatcggttcggcagagcttgcggtaatgaaacaaggcgctattttaattaacgcctctcgcggcaccgttgttgatattgatgcccttgcagaatcacttagcgagaaaaagctaagtggtgcagcaattgatgtgttccctgttgaacctaaatctaacgatgaagagtttgtatcgccactacgcgatttcgataacgttattttaacgccgcatattggtggttcaactcaagaagctcaagaaaatattggtattgaagtggcaggtaaattggctaaatactcagataacggctctacaattaccgccgttaacttccctgaggtatcactgccagagcttgctaaccgtagtcgcttattgcatgttcaccacaaccgcccaggtgtgttaacgcaaattaaccaagcgtttgcgcagcacggtatcaatatagcggctcagtacttacaaactgatgaagcaattggttatgtggttattgacgttgataccgaccactctgaagtagcgcttaaagagctaagtgcagttgaaggaacaattagagcgcgtattcttcactaa

SEQ ID NO: 1464 - protein, 409 aa, Alteromonadales bacterium TW-7
MSKVSLAKDKIKILLLEGVHQSAVETLKRNGYSNIDYVKTSLPEDELKERIKDAHFVGLRSRTHINEAVLDAAEKLIAIGCFCIGTNQVDLSNARQRGIAVFNAPFSNTRSVAELVLGEILLLLRGIPERNAAAHRGEWLKTATGSFEARGKTLGIIGYGHIGTQLGIMAENIGMNVEFYDIEDKLTLGNAKQVHNLTQLLQRSDVISLHVPETPQTKNLIGSAELAVMKQGAILINASRGTVVDIDALAESLSEKKLSGAAIDVFPVEPKSNDEEFVSPLRDFDNVILTPHIGGSTQEAQENIGIEVAGKLAKYSDNGSTITAVNFPEVSLPELANRSRLLHVHHNRPGVLTQINQAFAQHGINIAAQYLQTDEAIGYVVIDVDTDHSEVALKELSAVEGTIRARILH

SEQ ID NO: 1465 - DNA, 1230 bp, marine gamma proteobacterium HTCC2143
  CDS (1)..(1230): transl_table=11
atgagccaaacatcactcgacaagagcaagatcaaattcctgttgttagaaggggttcatcagtcggctgtcgatacgctaaaagcggcgggctattcaaatatcgtctgccatccaaaggcattgtcagagcagcagctaaaagaagaacttgccgatgctcactttgtcggaattcgctcccgcacccaactaactgacgacatattcagcaccgcaaagaaactaattgcggtcggctgtttttgcatcggcaccaaccaggtagacctaaaagcggcaaccgaaaaaggcgtggtgatattcaatgcgcccttctccaacacccgcagtgtcgccgaattagttattgccgaggcaattttactgctcagaggtgtcgctgagaaaaatgcattagcgcatcgtggaatctggcaaaaatctgccagcggatcctttgaaatccgaggcaaacaattaggcattattggctatggcagtatcggtatgcagctgggcgttattgcagaatcactgggcatgcaagtggtattttatgatgttgtcagcaaactccctttgggcaatgctatgcaagttcccagtttaaatggcctattggcgaaatcagatatcgtgagcttacatgtgcctgaaacgggctccactagaaatatgattggagaacaagaactcacgcaaataaaaccaggtgccattttaatcaacgcatcacggggcactgttattgacatcgacgcacttgctgcagcactagaatcaggccggctttctggcgcggcaatagacgtctttcctgtagaacctcgctccaatgacgacgaatttttgtcccccctgcggaaatttgacaatgtattcctgacacctcacattggtggcagcaccatggaggctcaagaaaatatcggattggaagtagccgagaaaatggccaggtacagtgacaatggaacgtcgacatcgtccgtcaactttccagaggtggcactacctgcccacaccgatatgcaccgtttactgcatacacaccgcaatactcccggagtaatgtcagcaatcaacaaagtcttcgctgagaacaatatcaatattcgtgcacaatatctccaaacaactcaagatattggctacgtcgttattgatatagatgctgaatacagtgagctggcactgaaaaaactcagcgcaatagaaggcacaatccgctgccgggttttattctag

SEQ ID NO: 1466 - protein, 409 aa, marine gamma proteobacterium HTCC2143
MSQTSLDKSKIKFLLLEGVHQSAVDTLKAAGYSNIVCHPKALSEQQLKEELADAHFVGIRSRTQLTDDIFSTAKKLIAVGCFCIGTNQVDLKAATEKGVVIFNAPFSNTRSVAELVIAEAILLLRGVAEKNALAHRGIWQKSASGSFEIRGKQLGIIGYGSIGMQLGVIAESLGMQVVFYDVVSKLPLGNAMQVPSLNGLLAKSDIVSLHVPETGSTRNMIGEQELTQIKPGAILINASRGTVIDIDALAAALESGRLSGAAIDVFPVEPRSNDDEFLSPLRKFDNVFLTPHIGGSTMEAQENIGLEVAEKMARYSDNGTSTSSVNFPEVALPAHTDMHRLLHTHRNTPGVMSAINKVFAENNINIRAQYLQTTQDIGYVVIDIDAEYSELALKKLSAIEGTIRCRVLF

SEQ ID NO: 1467 - DNA, 1230 bp, Marinobacter sp. ELB17
  CDS (1)..(1230): transl_table=11
atgtccaatacgtctctgcaaaaaagaaaaattcgaattctgttgctggaaggcgtgcaccagtctgcactcgattctctgcacgccgccggttacaccaacattgagtccctgtcgcactcgttggctgaagacgagctgatcaagaaaattgccgacgcgcattttgtcggccttcggtcgcgcacacagctgacagaggccgtattcgaagcggccaagaaattggtggcggtgggttgcttctgtattggcaccaaccaagtagacctgcaggctgccacgcgccgcggtgtggcggtgtttaatgcgcccttctccaacactcgctcagtagccgagctggtgttggcgcaagccattttgttgctgcgcggcgtgccggaaaagaacgccaaggcccaccgtggcgagtggattaagtcggccaaaaacagctatgaaatccgcggcaagaagctgggcattattggctatggcaacattggtacccagttcagtgtgctggccgaaggcttgggcatggaagtgtacttttacgatgtggtatccaaactctccatcggtaacgccacgcaagtgggttccatgcaggaactgctaaacctgtgtgatgtggtgagcctgcacgtaccggagaccgcagccaccaaatacatgttcaaagccgagcagctcgcgcaaatgaagccgggttctattctgatgaacgcctcgcgcggcaccgtggtcgatattgaggccctggctgactccttgcgcagcggaaagttgctgggcgctgccgttgacgttttcccggttgaaccaaaatccaacagcgaagagtttgtctcaccgctgcgcgaattcgataacgtcatcctgaccccacacgtgggtggctccaccatcgaagcccaggaaaatatcggccgtgaagtcgctgaaaaactgtccatgtacagcgacaacggtacatctgtatcgtcagtgaacttccccgaagtggccctgccctcgcacccgaaccagcatcggctgctgcacattcacgaaaacgtgccgggcgtgatgtcagagatcaaccaagtcttttccgctaacggtatcaacgtctgcggtcagtacctgcaaaccaaggacgacattggctacgtggtaatcgacgtcgacaaggcctacggtgagctggcgctggaaaaattgctggaagtgaaaggcaccattcgctgccgcgtgctgttttaa

SEQ ID NO: 1468 - protein, 409 aa, Marinobacter sp. ELB17
MSNTSLQKRKIRILLLEGVHQSALDSLHAAGYTNIESLSHSLAEDELIKKIADAHFVGLRSRTQLTEAVFEAAKKLVAVGCFCIGTNQVDLQAATRRGVAVFNAPFSNTRSVAELVLAQAILLLRGVPEKNAKAHRGEWIKSAKNSYEIRGKKLGIIGYGNIGTQFSVLAEGLGMEVYFYDVVSKLSIGNATQVGSMQELLNLCDVVSLHVPETAATKYMFKAEQLAQMKPGSILMNASRGTVVDIEALADSLRSGKLLGAAVDVFPVEPKSNSEEFVSPLREFDNVILTPHVGGSTIEAQENIGREVAEKLSMYSDNGTSVSSVNFPEVALPSHPNQHRLLHIHENVPGVMSEINQVFSANGINVCGQYLQTKDDIGYVVIDVDKAYGELALEKLLEVKGTIRCRVLF

SEQ ID NO: 1469 - DNA, 1614 bp, Erythrobacter sp. SD-21
  CDS (1)..(1614): transl_table=11
atgtcgggaaaacgacaggaatattccgtcatgagcaaacccaaagtccttatcagcgacaagatggacccgaacgctgcgcgcattttcgaagagcgtggctgcgacgtcgatgtcattaccggcgaaacgcccgaagagctgaaagcccgcatcggcgaatacgatggccttgcaatccgttcctcgaccaaggtgacgcccgagatcctagacgccgcgaccaacctcaaggtcatcggccgcgccggtatcggcgtcgacaatgtcgatgtcccctatgccagcggcaagggcgtggtggtgatgaacacccccttcggcaactcgatcaccaccgccgaacacgcgattgccatgatcatggcgctcgcccgccagatcccgcaggccgaccgccgcacgcaggccggcgaatggcccaagaacgacttcatgggcgtcgaggtgaccggtaagacgctgggcctgatcggcgcgggaaatatcggctcgatcgtcgccgctcgtgcgcagggcctgaagatgaaggtcatcgccttcgatcccttcctgaccgaggaccgcgcgctggaaatcggcgtggagaaggtcgatctcgacacgctgcttacgcgcgccgatttcatcacgctgcacacgccgttgaccgacgagacgcgcaacatcctgagccgtgagaacctcgccaagaccaagaagggcgtgcgtatcgtcaattgcgcgcgtggtggtcttatcgacgaggcagcgctggcggaagcgctcgacagcggccaggcggcaggtgccgcgctcgacgtgttccagaccgagccggccaaggactcgccgctcttcggcaagcccaacttcatctgcaccccgcaccttggtgccagcaccaccgaagcacaggtcaatgtcgccctgcaggtggccgaacagctagctgattacctcgtcaacggcggcgttaccaacgcactcaacatgccctcgcttagcgcggaagaagcgcccaagctgcggccctacatgaagctcgccgaaaatctcggcagcctcgtgggccagctcgcccacggcaatctcaccaagatcaatatcgagcgcgaaggcgcggcagccgagctgtcgggcaagccgatcgagggcgctgtcctctccggcctcatgcgccagtattcagacacggtgaacatggtcaacgcgcccttcctcgcgaaggaacgtggtctcgacatccgctcgatccgccatgagaaagaaggtgcctacaacacgctgctgcgagtgacggtgggcacggacagcggcgatcgctccgtcgccggcacgctgttcggagccgacgcaccgcgtctcgtcgaaatcttcggcgtgcgtatcgaggccgaactcgacgggcacatgctctacatcgtcaacgaggacgcgccgggcttcatcggccgcatcggttcgctgctgggcgagaacggcatcaacatcggtaccttcaacttaggccgccgcgccgcgggcggagaagcggttttgctgctgagcgtcgatcagcctatcccgaacgaggtggtgaagaaggcctgcgcgctggaaggcgtgaaaacggtaatgccactggcattctaa

SEQ ID NO: 1470 - protein, 537 aa, Erythrobacter sp. SD-21
MSGKRQEYSVMSKPKVLISDKMDPNAARIFEERGCDVDVITGETPEELKARIGEYDGLAIRSSTKVTPEILDAATNLKVIGRAGIGVDNVDVPYASGKGVVVMNTPFGNSITTAEHAIAMIMALARQIPQADRRTQAGEWPKNDFMGVEVTGKTLGLIGAGNIGSIVAARAQGLKMKVIAFDPFLTEDRALEIGVEKVDLDTLLTRADFITLHTPLTDETRNILSRENLAKTKKGVRIVNCARGGLIDEAALAEALDSGQAAGAALDVFQTEPAKDSPLFGKPNFICTPHLGASTTEAQVNVALQVAEQLADYLVNGGVTNALNMPSLSAEEAPKLRPYMKLAENLGSLVGQLAHGNLTKINIEREGAAAELSGKPIEGAVLSGLMRQYSDTVNMVNAPFLAKERGLDIRSIRHEKEGAYNTLLRVTVGTDSGDRSVAGTLFGADAPRLVEIFGVRIEAELDGHMLYIVNEDAPGFIGRIGSLLGENGINIGTFNLGRRAAGGEAVLLLSVDQPIPNEVVKKACALEGVKTVMPLAF

SEQ ID NO: 1471 - DNA, 1230 bp, Moritella sp. PE36
  CDS (1)..(1230): transl_table=11
atgaccaacctctctcttcagaaagataagatcaagatattacttcttgaaggactacatcaaagtgcagtcgatacgttcactaatgccggttacaccaatatcgaatcgattaagacagcattaagtgaagaagaactgtgtgaaaaaattaaagatgtgcattttgtcggtatccgttcccgcactcatttaaatgcaaacgtcattgcagcagcaaaaaaattggttggtattggctgtttttgtattggtacaaatcaggttgatcttgctgcagctcagaaagcggcgatccctgtgtttaatgcaccattctcgaacacccgcagtgtggctgaattagtactcggcgaaatcctattattattacgcggtattccagagaaaaatgcgaaagcacaccgtggcgaatggcaaaaatctgcaacgggctcttacgaagcacgtggcaaacaattgggtattattggttatggtcatatcggtattcaattaagtattttggctgaaaacttaggtctgcgcgtgaagtattatgacgttgaaaccaagctttcactgggtaatgccgagcagctcacaagcatggaagatttattagctacgtctgacattatctcgctacacgtaccagaaaccccacaaaccaaactgatgatgggtgaagttgaattcgcacaaatgaaagatggcgcgatcttcattaatgcttcacgcggcacagtggttgatattgatgcgcttgtctcagcactggcaagcaagaaaatatcgggtgcagcaattgatgtattccctaccgaaccagcatcaaataatgacgagttcatctcgccgttacgccagtttgataatgtgatcctaacaccacacgtgggtggtagtacccaggaagcacaagaaaatatcggttatgaagtggctggtaaactgactaaatattcggataatggttcaaccctgtctgctgttaacttccctgaagtatcactaccaggccatgcaggttcaagccgtctgatgcatattcaccagaaccaaccaggtatcttaaaccagatcacccaagcgtttgctgaagaaggggtgaatatttcgggtcaatacctacaaactgcaggcgatattggttatgtggttattgatgttgaaagtgaacatgctgaacgtggtttagcaaaacttaaatcgattagcggtactatccgttcgcgtttattacgctag

SEQ ID NO: 1472 - protein, 409 aa, Moritella sp. PE36
MTNLSLQKDKIKILLLEGLHQSAVDTFTNAGYTNIESIKTALSEEELCEKIKDVHFVGIRSRTHLNANVIAAAKKLVGIGCFCIGTNQVDLAAAQKAAIPVFNAPFSNTRSVAELVLGEILLLLRGIPEKNAKAHRGEWQKSATGSYEARGKQLGIIGYGHIGIQLSILAENLGLRVKYYDVETKLSLGNAEQLTSMEDLLATSDIISLHVPETPQTKLMMGEVEFAQMKDGAIFINASRGTVVDIDALVSALASKKISGAAIDVFPTEPASNNDEFISPLRQFDNVILTPHVGGSTQEAQENIGYEVAGKLTKYSDNGSTLSAVNFPEVSLPGHAGSSRLMHIHQNQPGILNQITQAFAEEGVNISGQYLQTAGDIGYVVIDVESEHAERGLAKLKSISGTIRSRLLR

SEQ ID NO: 1473 - DNA, 1590 bp, Opitutaceae bacterium TAV2
  CDS (1)..(1590): transl_table=11
atgaaaatcctagtcgccgacaagatctcgcccaagggagtcgcctacttgcgtcagcaagaaggcttcgaagtggtggaggcttacggctcctcccccgaaaaggttctcgaactcgtcaaagacgttcacgccatcgccgtccgttcggaaaccaaaatcacgcgcgaagtcattgccgccgccccccagctcaaagtcgtgggccgcgccggagtcggcgttgacaacgtcgatgtcgaagccgccaccgaacgcggcgtcgtcgtcatgaacaccccggcgggcaacaccattgccaccgccgagttgacctttacgcacatcctctgcggctcgcgccccgtctcccaggccgccgcctcgatgcgcgaaggcaagtgggaccgcaaatccttcagcggcgtcgaactcttcaaaaaaacgcttggcgtcatcggcatgggccgcatcggtggcgaagtcgcccgccgcgccgtcgccttcggcatgaaagtccttgcctacgacccctacctcgcccccagccgcgccaaggccatgcaagtcgaagtcgccaccctcgacgaaatccttgcccaagccgattacatcaccgtccacatgcccctcacggacgacaccaaatacatgatcgacgaggccgccctcgccaaatgcaagaaaggcgtccgcctcttcaactgcgcccgcggcggcattattaaggaaagcgccctcattgccgcgctcaagagcggccacgtcgccgccgccggccttgacgtttacgaagacgaaccccttgccaaggatagcgaactgcgcgccctccccaacgtcgtcctcaccccgcacctcggcgcctccactgccgaagcgcaggaatccgtcggcatcgaaatcgcggaacaaatcgccgacgtcctcaagaccggtgccatccgcaacgccgtcaacatgccctcggtcgatgccaccaccgcgcaagtcctcggcccctacatcaacctcggcaccaagctcggcacgctcgtgcagcagatcgcgccgcaacagatcgccaaagtccgcgtcatgtatcacggcaaaatggtcgaactcgacgccaacgccgtcacccgcgccatccagcacggcttcctgcgccgcatcagcggcgacgaagtcaacaccgtcaacgcgccgatcttcttccagcgcctcggcatcgactttgaagtcatcaagacgagcgacaccaccgactacaccgaactcatgcaagttgaggcgatcacgcctgccggcgaaatttttagcgcacgcggcaccctcatcggcaagaacaacgaaccccgcgtcgtcggcatcaacggacgcgaagtcgaagtcgccgccgaaggccagctcctcgtcttggagaacaccgacaaacccggcatggtcggcatggtcggcacgctcctcggcaacgacggcgtgaacatcgccgacatgtcgctcacccgcctcatcctcggcggcaccgcctacatggtggtgcgcgtcgatcacgaacccagcccgaccgcccgcaaagccctcaaggacaacccggccgtcaagttcgccaagttcgtgcaactgtaa

SEQ ID NO: 1474 - protein, 529 aa, Opitutaceae bacterium TAV2
MKILVADKISPKGVAYLRQQEGFEVVEAYGSSPEKVLELVKDVHAIAVRSETKITREVIAAAPQLKVVGRAGVGVDNVDVEAATERGVVVMNTPAGNTIATAELTFTHILCGSRPVSQAAASMREGKWDRKSFSGVELFKKTLGVIGMGRIGGEVARRAVAFGMKVLAYDPYLAPSRAKAMQVEVATLDEILAQADYITVHMPLTDDTKYMIDEAALAKCKKGVRLFNCARGGIIKESALIAALKSGHVAAAGLDVYEDEPLAKDSELRALPNVVLTPHLGASTAEAQESVGIEIAEQIADVLKTGAIRNAVNMPSVDATTAQVLGPYINLGTKLGTLVQQIAPQQIAKVRVMYHGKMVELDANAVTRAIQHGFLRRISGDEVNTVNAPIFFQRLGIDFEVIKTSDTTDYTELMQVEAITPAGEIFSARGTLIGKNNEPRVVGINGREVEVAAEGQLLVLENTDKPGMVGMVGTLLGNDGVNIADMSLTRLILGGTAYMVVRVDHEPSPTARKALKDNPAVKFAKFVQL

SEQ ID NO: 1475 - DNA, 1410 bp, Saccharomyces cerevisiae
  CDS (1)..(1410)
atgtcttattcagctgccgataatttacaagattcattccaacgtgccatgaacttttctggctctcctggtgcagtctcaacctcaccaactcagtcatttatgaacacactacctcgtcgtgtaagcattacaaagcaaccaaaggctttaaaacctttttctactggtgacatgaaaattctactgttggaaaatgtcaatgcaactgcaatcaaaatcttcaaggatcagggttaccaagtagagttccacaagtcttctctacctgaggatgaattgattgaaaaaatcaaagacgtacacgctatcggtataagatccaaaactagattgactgaaaaaatactacagcatgccaggaatctagtttgtattggttgtttttgcataggtaccaatcaagtagacctaaaatatgccgctagtaaaggtattgctgttttcaattcgccattctccaattcaagatccgtagcagaattggtaattggtgagatcattagtttagcaagacaattaggtgatagatccattgaactgcatacaggtacatggaataaagtcgctgctaggtgttgggaagtaagaggaaaaactctcggtattattgggtatggtcacattggttcgcaattatcagttcttgcagaagctatgggcctgcatgtgctatactatgatatcgtgacaattatggccttaggtactgccagacaagtttctacattagatgaattgttgaataaatctgattttgtaacactacatgtaccagctactccagaaactgaaaaaatgttatctgctccacaattcgctgctatgaaggacggggcttatgttattaatgcctcaagaggtactgtcgtggacattccatctctgatccaagccgtcaaggccaacaaaattgcaggtgctgctttagatgtttatccacatgaaccagctaagaacggtgaaggttcatttaacgatgaacttaacagctggacttctgagttggtttcattaccaaatataatcctgacaccacatattggtggctctacagaagaagctcaaagttcaatcggtattgaggtggctactgcattgtccaaatacatcaatgaaggtaactctgtcggttctgtgaacttcccggaagtcagtttgaagtctttggactacgatcaagagaacacagtacgtgtcttgtatattcatcgtaacgttcctggtgttttgaagaccgttaatgatatcttatccgatcataatatcgagaaacagttttctgattctcacggcgagatcgcttatctaatggcagacatctcttctgttaatcaaagtgaaatcaaggatatatatgaaaagttgaaccaaacttctgccaaagtttccatcaggttattatactaa

SEQ ID NO: 1476 - protein, 469 aa, Saccharomyces cerevisiae
MSYSAADNLQDSFQRAMNFSGSPGAVSTSPTQSFMNTLPRRVSITKQPKALKPFSTGDMKILLLENVNATAIKIFKDQGYQVEFHKSSLPEDELIEKIKDVHAIGIRSKTRLTEKILQHARNLVCIGCFCIGTNQVDLKYAASKGIAVFNSPFSNSRSVAELVIGEIISLARQLGDRSIELHTGTWNKVAARCWEVRGKTLGIIGYGHIGSQLSVLAEAMGLHVLYYDIVTIMALGTARQVSTLDELLNKSDFVTLHVPATPETEKMLSAPQFAAMKDGAYVINASRGTVVDIPSLIQAVKANKIAGAALDVYPHEPAKNGEGSFNDELNSWTSELVSLPNIILTPHIGGSTEEAQSSIGIEVATALSKYINEGNSVGSVNFPEVSLKSLDYDQENTVRVLYIHRNVPGVLKTVNDILSDHNIEKQFSDSHGEIAYLMADISSVNQSEIKDIYEKLNQTSAKVSIRLLY

SEQ ID NO: 1477 - DNA, 1239 bp, Rhizobium meliloti
  CDS (1)..(1239): transl_table=11
atgactcgtcaactctccctcccacgcgaccgaatttccctacttctgctagaagggatcagccagaccgccgtggattatttcttgtcgaccggctacaccaaccttattcatctgccgaaggcgctcgatgacaaggatctcaaaagccatatcgccgatgctcacattatcggtattcgttcccggacacagctgacggaagagattttcgagtccgccaagaagctgatcgccgttggctgcttttccgtcggtacgaaccaggtcgacttggacgcggcgcggcggcgcggcattccggtgttcaacgcaccttattcgaatacacggtcagtggcggaactggtgattggcgagatcatcatgctgacacggcaaatcttcccgcgttcggcttccgcgcatcaaggtgggtgggagaagtccgctgtcggcagccgcgaagtccgcggcaaaacgctcggcattgtcggctacggcaatattggatcgcagctcagcgcgctcgccgaaagcatgggcatggtagtacgttatttcgatctttccgacaggttgcggcggggcaattcggaatcgatggttacgctcggtgagctcctcgagatttcagattatgtgacgatgcatgtgcccgaaacgccttcgacgcataacatgatcaccgaaactgagctccgccgcatgaagaagggagccatcttcatcaacaattcccgtggcacggtggtcgatctcgatgcgctggcgaaagtcctgaacgaaggccatcttgcgggcgccgccgtcgacgtgttccccaaagagccggcatcgaacaacgagcgttttgtgacgccgttgcagggcttgagcaatgtcatcctgacgccgcatatcggcggttcaacggaggaagcgcaggagcgcattggcggagaagtctctagaaagctggtcgaatattccgacatcggatcgaccattggcgccgtcaactttcctcaggttcagttgcccgagcgcccgaacggcactcgtttcatccacgtgcatgaaaaccgccctggcatgctcatccaacttaacgagatcttctcgtcgcgcgggctgaacatcgtcgcggagttccttcaaacccatggcgatacgggttatgtggtggtcgaggccgaagggatttccgctaatgctgacgagattcttcagtcactacgcaaaattccgggaacgatacgcacgcgattggtctactga

SEQ ID NO: 1478 - protein, 412 aa, Rhizobium meliloti
MTRQLSLPRDRISLLLLEGISQTAVDYFLSTGYTNLIHLPKALDDKDLKSHIADAHIIGIRSRTQLTEEIFESAKKLIAVGCFSVGTNQVDLDAARRRGIPVFNAPYSNTRSVAELVIGEIIMLTRQIFPRSASAHQGGWEKSAVGSREVRGKTLGIVGYGNIGSQLSALAESMGMVVRYFDLSDRLRRGNSESMVTLGELLEISDYVTMHVPETPSTHNMITETELRRMKKGAIFINNSRGTVVDLDALAKVLNEGHLAGAAVDVFPKEPASNNERFVTPLQGLSNVILTPHIGGSTEEAQERIGGEVSRKLVEYSDIGSTIGAVNFPQVQLPERPNGTRFIHVHENRPGMLIQLNEIFSSRGLNIVAEFLQTHGDTGYVVVEAEGISANADEILQSLRKIPGTIRTRLVY

SEQ ID NO: 1479 - DNA, 1578 bp, Magnetospirillum gryphiswaldense
  CDS (1)..(1578): transl_table=11
atgcccaaggttctgattagcgacaggttcagccaggctgcccagcaggccttcatcctgcgcggcatcgaagtggacgtgcgtcccggcctgtccaccgacgagttgaaggcgatcatcggcgggtacgacggtttggcggtgcgttccggcaccaaggtcagcgccgatttgctggctgccgccacccgcctgaaggtgatcggtcgtgccggtatcggcaccgagaacatcgatctggccgccgccaccgaccaaggggtggtggtgatgaacacgccgttcggcaattcggtgaccaccgccgaacacgccatcgccctgatgttttccctggctcggcaaatccccgccgccaatgcctcgacccatctgggcaagtgggagaaatcccgcttcatgggggtcgagctgaccggcaagaccctgggcatcatcggcagcggcaatatcggtgccgtcgtcgccgaccgcgccttgggcctgaacatgcgcgtggtcgccttcgaccccttcttgtcggaagagcgggccaaggacatgtgcatcgaaaaggtcgatctgccgaccctgttcgctcgggccgatttcatcagcctgcacacgcccctgaccgaagccacccgtaatctgatctgcaccgattccatcgccttgatgaaggatggggtgcgcatcatcaactgcgcgcgcggcggcttgatcaacgaagccgatttgcgcgccgccatcgtctcgggcaaggtggcgggggcagcgctagacgtctatcagaccgaaccggccacggaaaactgcctgttcgggctggagcaggtggtgtgcaccccgcatctgggcgcctccaccgccgaggcccaggaaaaccaggccttgcaggtggccgagcagatgtccgacttcctgctgtcgggcatcgtcgccaacgccctcaacatggtgccggtatcggccgaggacgcgcccaagctcaagccctacatgaagctggccggccagttgggcagcttcgccgggcaattgaccgagcacgccatcaaggcggtccggatcgaatacgaaggccatgtggccggcctcaataccaagccgctcaccgctattgtgctggaaagcctgctcaggccgatgatggtgtcggtcaacatggtcaacgcccccctggtggccaaggcccgcggcatcgaggtgtccgaggtgacctgtgagcgcaagggggattacaacaccttgctgcgggtcatcgtcaccaccgagcaacgcacccgcgaagtggccggcaccttgttcggcggcgacaagccgcgcgtggtcgccatcaagggtattcccatcgaggcggaactgggcagccacatgctgtatgtcaccaaccaggacaagcccggcttcatcggcgccctgggcagtctgctgggggccaggggggtcaatatcgccaccttccatctgggccggtcggaagctggcggcgacgccatcttgctgacccaggtggatcaacccttgaccgatgccatcctggacgaggtgaaggcgttgccccatgtggttcaggccaaggccctgaatttctga

SEQ ID NO: 1480 - protein, 525 aa, Magnetospirillum gryphiswaldense
MPKVLISDRFSQAAQQAFILRGIEVDVRPGLSTDELKAIIGGYDGLAVRSGTKVSADLLAAATRLKVIGRAGIGTENIDLAAATDQGVVVMNTPFGNSVTTAEHAIALMFSLARQIPAANASTHLGKWEKSRFMGVELTGKTLGIIGSGNIGAVVADRALGLNMRVVAFDPFLSEERAKDMCIEKVDLPTLFARADFISLHTPLTEATRNLICTDSIALMKDGVRIINCARGGLINEADLRAAIVSGKVAGAALDVYQTEPATENCLFGLEQVVCTPHLGASTAEAQENQALQVAEQMSDFLLSGIVANALNMVPVSAEDAPKLKPYMKLAGQLGSFAGQLTEHAIKAVRIEYEGHVAGLNTKPLTAIVLESLLRPMMVSVNMVNAPLVAKARGIEVSEVTCERKGDYNTLLRVIVTTEQRTREVAGTLFGGDKPRVVAIKGIPIEAELGSHMLYVTNQDKPGFIGALGSLLGARGVNIATFHLGRSEAGGDAILLTQVDQPLTDAILDEVKALPHVVQAKALNF

SEQ ID NO: 1481 - DNA, 1278 bp, Vibrio sp
  CDS (1)..(1278)
atgtgcgccacattagcccacctttccattttaaggacgagaaaaatggccaaagtttcactggaaaaagaaaagattaagatcctcttgttagagggactccacccttcttcagttgaagttcttcaagcagctggttataccaacattgagtaccataaaggttcccttccggaagaagaattgattgaagcggttaaagacgtgcacttcatcggtattcgctcccgtacgaacctatccgaagaggtaatcaatgcggcgaataaactggttgcaattggctgtttttgtatcggtactaaccaagtaaacctagacgcagcagcaaaacgcggcattcctgtgtttaatgcaccgttctctaacacacgcagtgtggctgagctagtgcttggtcaaatcctactacttctgcgtggcattcctgaaaagaatgcgcttgcacatcgcggtatttggaagaaaagtgctgacaactcttacgaagcacgtggcaaacgtcttggcattatcggatacggccacattggtacgcagctaggtattattgccgaaaacttaggtatgcgcgtttactactacgacatcgagaacaaattgtcccttggtaatgcgacgcaagtacataccatgagtgaactactaaacaagtgtgacgtaatttctctgcacgttcctgaaacgccagaaacaaaaaatatgatgggtgaagctgagtttgctcgcatgaagccaggctcaatctttattaatgcagcacgcggcactgtcgtgcatattccagcactttgccatagtttagaagcgggtcacattgcgggcgctgcgattgatgtattcccaacagaaccaaaaacgaatgccgacccgttcgaatctcctttgcagaagttcgataatgtcatcctcactccacacgttggtggttcaacgcaagaagcacaagagaacatcggtgttgaggtcgcaggaaaactggcgaagtactctgacaacggctctacgctttcaagcgtaaacttcccagaggtgtcactgccagagcacggtggtgaatgctctcgcttgcttcacatccataaaaaccgtcctggtattcttactcagatcaacaccatcttcgcggaagacggcattaacattgccgcacagtacctacaaacagccgctgaaatcggctacgtagtgatcgatgttgaaaccgagcgctcagaagaagcactagcgaaactgaaaagtattgaaggcactatccgtgctcgtatccttcactaa

SEQ ID NO: 1482 - protein, 425 aa, Vibrio sp
MCATLAHLSILRTRKMAKVSLEKEKIKILLLEGLHPSSVEVLQAAGYTNIEYHKGSLPEEELIEAVKDVHFIGIRSRTNLSEEVINAANKLVAIGCFCIGTNQVNLDAAAKRGIPVFNAPFSNTRSVAELVLGQILLLLRGIPEKNALAHRGIWKKSADNSYEARGKRLGIIGYGHIGTQLGIIAENLGMRVYYYDIENKLSLGNATQVHTMSELLNKCDVISLHVPETPETKNMMGEAEFARMKPGSIFINAARGTVVHIPALCHSLEAGHIAGAAIDVFPTEPKTNADPFESPLQKFDNVILTPHVGGSTQEAQENIGVEVAGKLAKYSDNGSTLSSVNFPEVSLPEHGGECSRLLHIHKNRPGILTQINTIFAEDGINIAAQYLQTAAEIGYVVIDVETERSEEALAKLKSIEGTIRARILH

SEQ ID NO: 1483 - DNA, 1581 bp, Aphanothece halophytica
  CDS (1)..(1581): transl_table=11
atggcaaaagttttagtttcagactctgtggatcaagctgggattgatattctctcgcaggtcgcacaagtcgatgtcaaaaccaaactctctccagaagaactggtcgcaaccatccctgaatatgatgcgctgatggttcgttcagggacaaaagtgaccgaagaagttatcgaggcgggaaaccagcttaaaatcattggtcgcgctggtgtcggtgttgataacattgatgttcctgctgcgactcgtcgtgggattatggtggttaactccccagaaggaaataccattgctgctgcagaacacgcattagcgatgatgttatctctctctcgtcatatcccagaagcgaaccaatccgtaaaagagaaaaaatgggaacggaaaaattttattggttcggaagtctataagaaaacccttggtgtggtgggcttaggtaaaattggttctcatgtcgccacagtagcgcgtgcgatgggaatgaaattactcgcctatgatccctttatttctgctgaacgcgcagaacaactggggtgtcgcttagtggatttagatattatcttcaccgaagccgattatattaccctgcacattccccgcactcccgaaacggaaaatttaatcaacgcggaagccttagcgaaaatgaagcccacaacgcggattattaactgttctcgcggtggggtgattgatgaagaagctctggcgactgccgttgaaaatggtacgattggcggtgcagcattggatgtgtttgccgaagaaccccttggtgaatcgaaactgcgagaggtgggatcaaatattgttctcacacctcatttaggtgcatcgacagaagaagcccaaaccaacgtcgcggtggatgtcgctgaacagattcgtgatgtcttattaggcttacccgcacggtctgcggtgaatatccctggactgaaccccgatgtgttagaacagttacgtccgttcttacaactggcggaaactttgggcaacttggtcagtcagttagctgggggacgagtggaacaactgaatgtgcgtttgcaaggcgaattaaccgatagccaaagtcaaccgattgtcattgctgctttgaaaggcttactatctcaagcgttgcgagaacgagtcaattatgttaatgcttctattgaagccaaagaacgaggcattcgcgttattgaaaccaaggatgcgtcagtccatgattattcaggctccctgcgtttggaagctacaggctctctcggtgaacattcggtaacaggagcattactcagtgatcaggaaatgcggattaccaatgtcgatggttttccgattaatgttccccccaataactatatgttgtttaccttacaccgcgatatgcctggcattattggtaaaattggctctttattgggcggttttaatgtcaatattgccagtatgcaagttggacgcaagattgttcgcggtgatgcagtgatggtactcagtattgacgatcctttacctgaaggcgttttagatgagattatgaaagtgcctgggattcgtgatgcttacaccattaaactctaa

SEQ ID NO: 1484 - protein, 526 aa, Aphanothece halophytica
MAKVLVSDSVDQAGIDILSQVAQVDVKTKLSPEELVATIPEYDALMVRSGTKVTEEVIEAGNQLKIIGRAGVGVDNIDVPAATRRGIMVVNSPEGNTIAAAEHALAMMLSLSRHIPEANQSVKEKKWERKNFIGSEVYKKTLGVVGLGKIGSHVATVARAMGMKLLAYDPFISAERAEQLGCRLVDLDIIFTEADYITLHIPRTPETENLINAEALAKMKPTTRIINCSRGGVIDEEALATAVENGTIGGAALDVFAEEPLGESKLREVGSNIVLTPHLGASTEEAQTNVAVDVAEQIRDVLLGLPARSAVNIPGLNPDVLEQLRPFLQLAETLGNLVSQLAGGRVEQLNVRLQGELTDSQSQPIVIAALKGLLSQALRERVNYVNASIEAKERGIRVIETKDASVHDYSGSLRLEATGSLGEHSVTGALLSDQEMRITNVDGFPINVPPNNYMLFTLHRDMPGIIGKIGSLLGGFNVNIASMQVGRKIVRGDAVMVLSIDDPLPEGVLDEIMKVPGIRDAYTIKL

SEQ ID NO: 1485 - DNA, 1602 bp, Mesorhizobium ciceri
  CDS (1)..(1602): transl_table=11
atggcgccccgcgttctcgtctcagacaaactctcccccaccgccgtgcaaatcttcaaggatcgtggcgtcgaggtcgactatctgcccgatctcggcaaggacaaggataagctcgccgaagtgatcggccagtatgatggcctcgccatccgctcggcgaccaaggtcaccgaaaagctgatcaacgccgctaccaatctcaaagtcatcggccgcgccggcatcggcgtcgacaatgtcgatatcccggcggcaagccgcaagggcatcatcgtgatgaacacgcccttcggcaactcgatcaccacagccgaacatgcggtggcgatgatctttgcgctggcgcgccagatccctgaagccaacgcctcgacccatgccggcaaatgggaaaagaaccgcttcatgggcgtcgagatcaccggcaagacgctgggcgtcatcggctgcggcaacatcggttcgatcgtcgcgacgcgcggcgttggcctcaagatgcacgtcatcgccttcgatccgttcctgtcggacagccgtgccgaggagcttggcgtcgacaaggtcgagctcgacgagctgttcgcccgcgccgatttcatcaccctgcacacgccgctgaccgacaagacgcgcaacatcatcgatgccgcggcgatcgccaagatgaagaagggcgtgcgcatcatcaattgcgcacgcggcggtctgatcgtcgaggccgatctggtcgcagcgctgaagagtggcaaggtggccggcgctggcgtcgacgtcttcgaggtcgaaccggccgagaacaacgaactgttcggcatggagaatgtggtggcgacgccgcatctcggcgcctcgacgacggaggcccaggagaatgtcgcgctgcaggttgccgagcagatggccgactatctgatcaagggcgccgtctccaacgccatcaacatgccgtcgatcaccgccgaggaggcgccgcggctgaagccgttcgtcaagctcgccgaggtgctcggcgcctttgtcggccaggtcaccgaggatccgatcaaggaggtggagatcctgttcgacggctcgaccgcgacgatgaacacgcgcgcgctgatcagtgcagcactcgccgggctgatccggcctcaggtctcggacgtcaacatggtgtcggcgccgatcatggtgaaggagcgcggcatcatcgtggccgaggtcaagcgcgacaagtcgggcgtgttcgacggctatatcaagctgacggtgaagaccgagcacatgacgcgctcgatcgccggcacatgcttctcggatggcaagccacgcttcatccagatcaagggcatcaacctcgatgccgaggtcggccagcacatgctctacaccaccaatgcggacgcgccgggcatcatcggcctgctcggcaccgtctgcggcgagaatggcgtcaacatcgccaacttccagctcggccgcaaccggccgggcggcgatgccatagcgctgctctatctcgacgcgccgttcccggaagccgtgctggaaaaggtcaaggcgcacaagtcgatcgactcggccaagcggctgcagttcgacgtcaacgcgatgtga

SEQ ID NO: 1486 - protein, 533 aa, Mesorhizobium ciceri
MAPRVLVSDKLSPTAVQIFKDRGVEVDYLPDLGKDKDKLAEVIGQYDGLAIRSATKVTEKLINAATNLKVIGRAGIGVDNVDIPAASRKGIIVMNTPFGNSITTAEHAVAMIFALARQIPEANASTHAGKWEKNRFMGVEITGKTLGVIGCGNIGSIVATRGVGLKMHVIAFDPFLSDSRAEELGVDKVELDELFARADFITLHTPLTDKTRNIIDAAAIAKMKKGVRIINCARGGLIVEADLVAALKSGKVAGAGVDVFEVEPAENNELFGMENVVATPHLGASTTEAQENVALQVAEQMADYLIKGAVSNAINMPSITAEEAPRLKPFVKLAEVLGAFVGQVTEDPIKEVEILFDGSTATMNTRALISAALAGLIRPQVSDVNMVSAPIMVKERGIIVAEVKRDKSGVFDGYIKLTVKTEHMTRSIAGTCFSDGKPRFIQIKGINLDAEVGQHMLYTTNADAPGIIGLLGTVCGENGVNIANFQLGRNRPGGDAIALLYLDAPFPEAVLEKVKAHKSIDSAKRLQFDVNAM

SEQ ID NO: 1487 - DNA, 1488 bp, Xanthomonas oryzae pv
  CDS (1)..(1488): transl_table=11
atggcgtgttgcaacgaaaggatgcggggatcggtcatggcacgcgacgctgcagtagggaccgcacagcgtgccagcgacagcctgccccgtctagccggcgcactcacagccgacgcagcgttggattcagctgaaaccgttgcgccgcaagggctttgccggtgcgaacacagcgttgcggccacccaatcgcacaccccatctggcatagttgccgacccgatcgcagcgttgcattgccccatgtcgccgaagagaacctcgtttcccaagcaggacatccgcgtactgttgctggaaggcatcagcccaaccgccgtggatgtgttccgcgccgctggctactcgcagatcgaactgcacgccaaatcgctgccggaagacgagttgatcgcccgcatcgccgacgcgcatatcgtgggcatccgctcgcgcacccagttgagcgccgaggtgctggcgcacgccaagcgcctgatcgcggtgggctgcttctgcatcggcaccaaccaggtggatctggatgcggccgaagtcgccggcattccggtgttcaacgcaccctactccaatacccgcagcgtggccgaactggtcatcgccgaagcgatcctgctgctgcgtggtatcccgcaaaagaatgccgaatgccaccgcggcggttggtccaaatcggccgcgggcagccatgaaacgcgcggcaaagtgctgggcatcgttggctacggccatatcggcacccaggtgggcgtgctggccgaatcgttgggcatgcaagtgatattccacgacatcgaaaccaagctgtcgctcggcaacgcgcgcgcggcgatcgatctggacgacctgctggcacgcgcggacgtggtgaccttgcacgtaccggaaacgccgtccaccaaggacatgatcggcgctgcagagatcgcccgcatgaagcacggcgcgcacctgatcaacgcctcgcgcggcaccgttatcgacatcgacgcactggatgcagcgctcacctccggccagatcggcggcgcagcggtggacgtgttcccgatcgagccaaagggcaatggcgatgcattcgcatcgccgctcaccgcgcacgacaacgtcatcctgaccccgcacgtgggcggcagcacgctggaagcgcaggacaatatcggcatcgaagtggcggccaaactggtgcgctacagcgacaacggcagcaccttgtcggcggtgaacttccccgaggtcaccctgcccgagcaccccgacagcctgcgtctgctgcacatccatcgcaacgtgcctggcgtgctatcgcagatcaacgaactgttctcgcgccacaacctcaacatcgacggccagtttttgcgcaccgaccccaaggtgggctacgtggtgatcgacgtcagcgccagcgaggaacttgcggcaatactgaaagacgggctggctcagatcaccggcacgttgcggacgcgggtgctttattga

SEQ ID NO: 1488 - protein, 495 aa, Xanthomonas oryzae pv
MACCNERMRGSVMARDAAVGTAQRASDSLPRLAGALTADAALDSAETVAPQGLCRCEHSVAATQSHTPSGIVADPIAALHCPMSPKRTSFPKQDIRVLLLEGISPTAVDVFRAAGYSQIELHAKSLPEDELIARIADAHIVGIRSRTQLSAEVLAHAKRLIAVGCFCIGTNQVDLDAAEVAGIPVFNAPYSNTRSVAELVIAEAILLLRGIPQKNAECHRGGWSKSAAGSHETRGKVLGIVGYGHIGTQVGVLAESLGMQVIFHDIETKLSLGNARAAIDLDDLLARADVVTLHVPETPSTKDMIGAAEIARMKHGAHLINASRGTVIDIDALDAALTSGQIGGAAVDVFPIEPKGNGDAFASPLTAHDNVILTPHVGGSTLEAQDNIGIEVAAKLVRYSDNGSTLSAVNFPEVTLPEHPDSLRLLHIHRNVPGVLSQINELFSRHNLNIDGQFLRTDPKVGYVVIDVSASEELAAILKDGLAQITGTLRTRVLY

SEQ ID NO: 1489 - DNA, 1812 bp, Arabidopsis thaliana
  CDS (1)..(1812)
  misc_feature (378)..(378): r is g or a
  misc_feature (918)..(918): y is t or c
atgtcagccaccgccgccgcctcctcctcgatcgccgttgccaccaactctctcaggaacgtgactctgtcttccagatcgccccttccatcagccatctccgtggctttcccttcccgtggacgcaatactcttcagcgacgcctcgttctcgtttcctgcagtactggagacggatctaagcctacgattctcgtggcggagaagctcggtgacgctggtattaagcttttggaggatgtcgcgaatgtcgactgttcgtataacatgactcctgaggagctcaacattaagatctcgctctgtgacgccttgatcgtgaggagtgggactaaggttggccgtgaagtgttcgaatcgtctcacggacggctcaargttgttggtcgcgctggtgttgggatcgacaacgtggatctgagtgcagcgacggagtttgggtgtttggttgtcaacgctccgacggcgaacacgatcgctgccgctgagcacggaatcgctcttatggccgccatggctaggaacgtagctcaagctgatgcgtctgttaaggctggagagtggaagaggaacaagtatgtaggtgtttcacttgtgggaaagacccttgcagtgttgggattcgggaaagttgggacggaagttgctcgtcgtgctaagggtcttggtatgcgtgtcattgctcatgatccctatgccccagcagaccgtgcacacgccattggtgttgacttagtgagctttgatgaagcccttgccaccgcggatttcatttctcttcatatgcctcttacgccaacaacatcgaagatactaaacgacgaaacctttgccaatatgaagaagggagttcgaattgttaatgttgctcgtggaggtgtcatagacgaagatgcgttagtgagagctctggatgcyggtattgttgcgcaggctgcacttgatgttttcaccaaagagcctccggctaaagatagcaagctcgtgcagcacgagagggtcactgtgacacctcatcttggagctagtaccatggaggctcaggaaggagttgccatcaaaattgctgaagctgttgttggagctctgaatggagagcttgctgctactgcagtcaatgcacctatggtttctgctgaggttctgaccgagctgaaaccatatgtggtgctagccgagaaactaggaagactggcagtgcaactggtggccggaggaagcggtgtgaaaaacgcgaaaatcacatacgcctcagcaagagccactgatgatcttgacaccagacttctccgagccatgatcaccaagggaatcatcgagccaatctctgacgtatatgtcaatttggtcaacgctgatttcacagccaagcagagaggtctcagactctcagaggaacgtgtgcttttggatggttcaccagagagcccattggagacaataactgttcagctaagcaatgtggagtccaaattcgccagttccctgtctgaatcaggagaggttaaagtggaaggaaaggttaaagacggagtcccgcatttgacaaaggttggatcttttgaggtcgatgtaactcttgaaggtagtatcatactgtgcaggcaggtggatcaacctggtatgatcgggactgtcggaagcatccttggagagtctaatgtcaatgttaacttcatgagcgttgggagaattgcaccgaggaagcaagcgattatggcgattggagtagatgacataccaagcaaagagacactgaagaagattggggaaattccagcggttgaggagttcgttttcctcaagctctag

SEQ ID NO: 1490 - protein, 603 aa, Arabidopsis thaliana
MSATAAASSSIAVATNSLRNVTLSSRSPLPSAISVAFPSRGRNTLQRRLVLVSCSTGDGSKPTILVAEKLGDAGIKLLEDVANVDCSYNMTPEELNIKISLCDALIVRSGTKVGREVFESSHGRLKVVGRAGVGIDNVDLSAATEFGCLVVNAPTANTIAAAEHGIALMAAMARNVAQADASVKAGEWKRNKYVGVSLVGKTLAVLGFGKVGTEVARRAKGLGMRVIAHDPYAPADRAHAIGVDLVSFDEALATADFISLHMPLTPTTSKILNDETFANMKKGVRIVNVARGGVIDEDALVRALDAGIVAQAALDVFTKEPPAKDSKLVQHERVTVTPHLGASTMEAQEGVAIKIAEAVVGALNGELAATAVNAPMVSAEVLTELKPYVVLAEKLGRLAVQLVAGGSGVKNAKITYASARATDDLDTRLLRAMITKGIIEPISDVYVNLVNADFTAKQRGLRLSEERVLLDGSPESPLETITVQLSNVESKFASSLSESGEVKVEGKVKDGVPHLTKVGSFEVDVTLEGSIILCRQVDQPGMIGTVGSILGESNVNVNFMSVGRIAPRKQAIMAIGVDDIPSKETLKKIGEIPAVEEFVFLKL

SEQ ID NO: 1491 - DNA, 1875 bp, Arabidopsis thaliana
  CDS (1)..(1875)
atggcattttcatcttcgtgttcgtccgtcaaagccgtcaactcacggtggacgtctccgtctccgtcaccgtcttctagattcgccgtcctccctgctttccttcaccgccgttacgcaacaagcgtcaaactaacggccataagcgccgccttaaaaaccgtcgagcaaacgacgttaacagaggataacagattctcaaccgtcggatctgactctgatgaatacaatccaactcttccaaagccgaggatcctcgtcaccgagaaactgggagaagccggcgtgaatctcctcagggaattcggcgacgttgactgctcttacgatctttcgccggaagatctgaagaagaaagtggcggagagtgacgctctgatcgtgagaagcggaactaaagtgacgagggaagtgtttgaggcggcgaaggggaggttgaaagtggtcggaagagccggagttgggattgacaatgttgatctgcaggcggcgacggagcacgggtgtttggtggttaatgctccaacggctaatacggtggctgctgccgaacatggaattgctttgcttgcttctatggcacgtaacgttgctcaggccgacgcttctattaaagccggaaaatgggagaggagcaagtacgtcggtgtatctctcgtcggaaaaaccttggccgtgatgggtttcgggaaagttgggacggaggtggcgagaagagccaaaggtctaggcatgaccgttatctcccacgacccttacgcgccagctgacagagccagagctctcggtgtcgatcttgtttcattcgatcaagctatctccaccgccgatttcgtctccctgcacatgcctttaactccggccaccaaaaaggtcttcaacgacgaaactttctctaagatgaagaaaggtgtgcgtctcattaatgtcgctagaggtggcgtcatcgacgaggatgcactcgttagagctctcgatgccggaatcgttgctcaggcagcattagatgtgttctgtgaggaaccaccatcgaaagatagcagactaattcagcatgaaaatgttactgtgacacctcatcttggagctagcacaaaagaagctcaggaaggtgtagccattgagatagcagaggctgtagcaggggcattgaaaggagagttatcagctactgccgtcaatgctccaatggtggctcctgaggtcttgtctgagttgactccttatattgtcttagctgagaagcttgggaggttagctgtgcagttagcatctggaggtaaaggagtacagtccattagggtggtctatcggtcagctcgtgaccgagatgatttggatactagactacttcgtgcaatgatcacaaagggaatcattgaaccgatctcagattcatatgtcaacttggtgaatgctgatttcatagctaaacaaaagggtcttcgtattagtgaggaacgaatggttgttgattcatcaccagagtaccctgttgattccatccaagttcagattttgaatgtggagtcaaatttcgctggtgctgtctctgatgctggtgatataagtattgaagggaaggtgaagtacggagttccgcatttaacttgtgtcggatcatttggtgtggatgtgagccttgaagggaatctgatactgtgcaggcaagtggatcaaccagggatgattggacaggttggtaacatacttggagaacaaaacgtgaatgtgaatttcatgagtgttggaagaacagtgttgaggaaacaagcgataatggcgattggagttgatgaagaaccagacaacaaaacacttgagaggattgggggtgtttctgcgattgaagagtttgtgtttcttaaactataa

SEQ ID NO: 1492 - protein, 624 aa, Arabidopsis thaliana
MAFSSSCSSVKAVNSRWTSPSPSPSSRFAVLPAFLHRRYATSVKLTAISAALKTVEQTTLTEDNRFSTVGSDSDEYNPTLPKPRILVTEKLGEAGVNLLREFGDVDCSYDLSPEDLKKKVAESDALIVRSGTKVTREVFEAAKGRLKVVGRAGVGIDNVDLQAATEHGCLVVNAPTANTVAAAEHGIALLASMARNVAQADASIKAGKWERSKYVGVSLVGKTLAVMGFGKVGTEVARRAKGLGMTVISHDPYAPADRARALGVDLVSFDQAISTADFVSLHMPLTPATKKVFNDETFSKMKKGVRLINVARGGVIDEDALVRALDAGIVAQAALDVFCEEPPSKDSRLIQHENVTVTPHLGASTKEAQEGVAIEIAEAVAGALKGELSATAVNAPMVAPEVLSELTPYIVLAEKLGRLAVQLASGGKGVQSIRVVYRSARDRDDLDTRLLRAMITKGIIEPISDSYVNLVNADFIAKQKGLRISEERMVVDSSPEYPVDSIQVQILNVESNFAGAVSDAGDISIEGKVKYGVPHLTCVGSFGVDVSLEGNLILCRQVDQPGMIGQVGNILGEQNVNVNFMSVGRTVLRKQAIMAIGVDEEPDNKTLERIGGVSAIEEFVFLKL

SEQ ID NO: 1493 - DNA, 1233 bp, Escherichia coli O157
  CDS (1)..(1233): transl_table=11
atggcaaaggtatcgctggagaaagacaagattaagtttctgctggtagaaggcgtgcaccaaaaggcgctggaaagccttcgtgcagctggttacaccaacatcgaatttcacaaaggcgcgctggatgatgaacaattaaaagaatccatccgcgatgcccacttcatcggcctgcgatcccgtacccatctgactgaagacgtgatcaacgccgcagaaaagctggtcgctattggctgtttctgtataggaacaaaccaggttgatctggatgcggcggcaaagcgcgggatcccggtatttaacgcaccgttctcaaatacgcgctctgttgcggagctggtgattggcgaactgctgctgctattgcgcggcgtgccggaagccaatgctaaagcgcaccgtggcgtgtggaacaaactggcggcgggttcttttgaagcgcgcggcaaaaagctgggtatcatcggctacggtcatattggtacgcaattgggcattctggctgaatcgctgggaatgtatgtttacttttatgatattgaaaacaaactgccgctgggcaacgccactcaggtacagcatctttctgacctgctgaatatgagcgatgtggtgagtctgcatgtaccagagaatccgtccaccaaaaatatgatgggcgcgaaagagatttcgctaatgaagcccggctcgctgctgattaatgcctcgcgcggtactgtggtggatattccggcgctgtgtgatgcgctggcgagcaaacatctggcgggggcggcaatcgacgtattcccgacggaaccggcgaccaatagcgatccatttacctctccactgtgtgaattcgacaacgtccttctgacgccacacattggcggttcgactcaggaagcgcaggagaatatcggcctggaagttgcgggtaaattgatcaagtattctgacaatggctcaacgctctctgcggtgaacttcccggaagtctcgctgccactgcatggtggtcgtcgtctgatgcacatccacgaaaaccgtccgggcgtgctaactgcgctgaacaaaatcttcgccgagcagggcgtcaacatcgccgcgcaatatctacaaacttccgcccagatgggttatgtagttattgatattgaagctgacgaagacgttgccgaaaaagcgctgcaggcaatgaaagctattccgggtaccattcgcgcccgtctgctgtactaa

SEQ ID NO: 1494 - protein, 410 aa, Escherichia coli O157
MAKVSLEKDKIKFLLVEGVHQKALESLRAAGYTNIEFHKGALDDEQLKESIRDAHFIGLRSRTHLTEDVINAAEKLVAIGCFCIGTNQVDLDAAAKRGIPVFNAPFSNTRSVAELVIGELLLLLRGVPEANAKAHRGVWNKLAAGSFEARGKKLGIIGYGHIGTQLGILAESLGMYVYFYDIENKLPLGNATQVQHLSDLLNMSDVVSLHVPENPSTKNMMGAKEISLMKPGSLLINASRGTVVDIPALCDALASKHLAGAAIDVFPTEPATNSDPFTSPLCEFDNVLLTPHIGGSTQEAQENIGLEVAGKLIKYSDNGSTLSAVNFPEVSLPLHGGRRLMHIHENRPGVLTALNKIFAEQGVNIAAQYLQTSAQMGYVVIDIEADEDVAEKALQAMKAIPGTIRARLLY

SEQ ID NO: 1495 - DNA, 1233 bp, Haemophilus influenzae
  CDS (1)..(1233): transl_table=11
atgacaaacaaagtctctctagacaaatcaaaaatcaaatttgtattgtttgaaggtgtgcatcaaagcgcacttgatacgctccatgcggcaggctataccaatattgattactataaaaaagcactagatggcgatgaattaaaagaagccattaaagatgtacactttatcggcttgcgttctcgcacccatttaacggcagaaatgattgaggccgcacccaaattaatcgctgtgggatgtttctgtattggcaccaaccaagtggatttaaatgcagcaaaagcgcgtggaattcctgtatttaatgccccattctcaaacactcgctccgtcgcagaacttgtattaggcgagattttattacttatgcgcaatgtgccacaggctaatgccgaagtacatcgtggtgtctggaataaatccgcgactggctctcatgaagtgcgggggaaaaaattaggcattattggttacggtcacattggttcacaattaagtattattgctgaatcattagggatggatgtgtatttctacgatattgaaaacaaacttccactcggtaatgccaaacaggttcgtagccttgaagaattactcagttcttgcgatgtggtttcattacatgtgccagaactgccatctaccaaaaacttaatgaacgtagcacgtatcgcacaattaaaacaaggggcaattttgatcaatgctgcgcgtggcacagtggtagatattgacgctctcgctcaagccttaaaagatgggaaacttcagggtgccgcaattgatgtattccccgttgagcccgcttcaattaatgaagaatttatctcgccgttacgtgaatttgataatgtgattttaacgccacatatcggcggctcaacagcggaagcacaagaaaatatcggttttgaagtggcaggcaaatttgtcaaatattcagacaacggatcaaccctttcttcggtaaacttcccagaggtctctttaccagaacacgagggaacaaaacgcttattgcatattcacgaaaatcgtcctggtatattgaacaaactgaaccaaattttcgtcgaagctaacctcaatattgcagcgcaatatttacaaactgacccgaaaattggttatgttgtcgtagatgtagaaacgaatgatgcatcgccattactgacgaaattgaaggaaatagatggcacaattcgtgctcgtgtactatactaa

SEQ ID NO: 1496 - protein, 410 aa, Haemophilus influenzae
MTNKVSLDKSKIKFVLFEGVHQSALDTLHAAGYTNIDYYKKALDGDELKEAIKDVHFIGLRSRTHLTAEMIEAAPKLIAVGCFCIGTNQVDLNAAKARGIPVFNAPFSNTRSVAELVLGEILLLMRNVPQANAEVHRGVWNKSATGSHEVRGKKLGIIGYGHIGSQLSIIAESLGMDVYFYDIENKLPLGNAKQVRSLEELLSSCDVVSLHVPELPSTKNLMNVARIAQLKQGAILINAARGTVVDIDALAQALKDGKLQGAAIDVFPVEPASINEEFISPLREFDNVILTPHIGGSTAEAQENIGFEVAGKFVKYSDNGSTLSSVNFPEVSLPEHEGTKRLLHIHENRPGILNKLNQIFVEANLNIAAQYLQTDPKIGYVVVDVETNDASPLLTKLKEIDGTIRARVLY

SEQ ID NO: 1497 - DNA, 1575 bp, Methanocaldococcus jannaschii
  CDS (1)..(1575): transl_table=11
atggttaagatattagttacagacccattgcatgaagatgcaataaagatattagaggaagttggagaggttgaagtagctactggattaacaaaagaagaattgttagaaaaaattaaagatgcagatgttttagttgttagaagtgggacaaaggtcacaagggatgttattgagaaggctgaaaaattaaaggttattggtagagctggagttggagtggataacatagacgttgaagcagcaacagaaaaagggattatagtagttaatgcccctgatgcttcatcaatctctgtagctgagctaactatgggattaatgcttgctgctgcaagaaacattcctcaagcaacagcatcattaaaaagaggagaatgggatagaaagagatttaaaggtattgaattgtatggaaaaacacttggagttattggtttgggaaggataggacagcaagttgttaagagagctaaggcatttggaatgaacataattggttacgacccttacatcccaaaggaagttgctgaaagtatgggagttgagttggttgatgatataaatgagctatgtaagagggctgattttataactctgcatgttccattaacaccaaaaacaagacatattattggtagagaacaaatagccctaatgaaaaagaatgccataattgttaattgtgcaagaggaggacttattgatgaaaaggctttatatgaagcattaaaagagggtaaaattagagcagcagccttggatgtgtttgaggaagagccacctaaggacaatccattattaacgttagataatgttataggaactccacaccaaggagcttcaactgaagaggcacagaaagcagctggaactattgtggcagagcagataaagaaggttttgagaggagagttagctgaaaatgttgtaaatatgcccaatattccccaagaaaagttaggaaaactaaaaccatacatgttgttggcagagatgcttggaaacattgttatgcaggtattagatggttctgttaatagggttgaacttatatattcaggagaattagccaaagaaaaaactgatttaataaaaagagctttcttaaaagggcttttgtcaccaatattattggctggaatcaatttggttaatgcccctattatagcaaaaaatagaaatatcaatgtggttgaaagctcaacctctgaagagaaatatggaaatgctataaaaataactgctgaaagtgataagaaaaaattctcaatagttggggcaataataaacaataaaccagttatcttagaagttgatggatatgaagttagcttcattccagagggagttttagcaattattaaacatattgatagacctggcacaattggtagggtgtgcataacattgggtgattatggaataaatattgcaagtatgcaagtaggaagaaaagagcctggaggagaaagtgtaatgctattaaacttagaccatacagtccctgaggaagttattgaaaaaataaaagagattccaaatattaaagatgttgctgtgataaatttataa

SEQ ID NO: 1498 - protein, 524 aa, Methanocaldococcus jannaschii
MVKILVTDPLHEDAIKILEEVGEVEVATGLTKEELLEKIKDADVLVVRSGTKVTRDVIEKAEKLKVIGRAGVGVDNIDVEAATEKGIIVVNAPDASSISVAELTMGLMLAAARNIPQATASLKRGEWDRKRFKGIELYGKTLGVIGLGRIGQQVVKRAKAFGMNIIGYDPYIPKEVAESMGVELVDDINELCKRADFITLHVPLTPKTRHIIGREQIALMKKNAIIVNCARGGLIDEKALYEALKEGKIRAAALDVFEEEPPKDNPLLTLDNVIGTPHQGASTEEAQKAAGTIVAEQIKKVLRGELAENVVNMPNIPQEKLGKLKPYMLLAEMLGNIVMQVLDGSVNRVELIYSGELAKEKTDLIKRAFLKGLLSPILLAGINLVNAPIIAKNRNINVVESSTSEEKYGNAIKITAESDKKKFSIVGAIINNKPVILEVDGYEVSFIPEGVLAIIKHIDRPGTIGRVCITLGDYGINIASMQVGRKEPGGESVMLLNLDHTVPEEVIEKIKEIPNIKDVAVINL

SEQ ID NO: 1499 - DNA, 1578 bp, Methanobacterium thermoautotrophicum
  CDS (1)..(1578): transl_table=11
atgtccaggatgaaagtgcttattgctgattccatcaatgaaaagggaatatcagaactcgaagaggtggctgaggttgtggtcaacaccaccataacccctgaggagctccttgatgccataaaggactttgatgccatcgttgtaaggagcaggacaaaggttacgcgtgaggtcatagaggcggcgccccgcctcaagataatagcaagggccggtgtgggtgttgacaacgttgatgttaaggctgccaccgaccggggtataatggtgataaacgcccctgagtccacatccataacggttgcagaacactcaatcggtctcatgctcgcacttgcaaggaagattgcaatcgcagacaggtccgtgaaggagggtaaatgggagaagaaccggttcatgggtatcgagctcaacggcaagaccctgggtataatcggtatgggtcgcataggctcacaggtcgttgtgaggacaaaggccttcggcatggacataatggtctacgacccctacataagcaaggaggctgccgaggagatgggtgtgaccgtcacagaccttgaaaccctcctgagggaatcagatatagtgaccatacacgtccccctcacacccgagacaaggcacctcatctcagaggatgaattcaaattgatgaaggacacggccttcatagtgaactgtgcccgtggcggtataatcgatgaggacgccctctacagggcccttaaggatggtgaaatagccggcgcagcccttgacgtctttgaggaggagcctcctgagggcagcccgctccttgaacttgaaaatgtggtcctgacaccacacataggagcctccacctctgaggcccagagggacgccgccatcatagttgcaaatgagataaaaacggttttccagggcggtgcaccgaggaacgtcctcaacatgccggtgatggactcagagacctacaagtccctcaaaccatacattgaactggcagagaagatgggggccatcatcgcacaggcactcccgggtaacatagagaaacttgatgtcacatactgcggtgaactggcagagatgcagttcgacatcctcacaaggaccatgctccaggccatactcaaccccatcctcacagaaccagttaacctcataaatgcgccctcaattgcaaagaagaggggtataatggttacagaggcccgccggtctgagtcagatggttacaggtcaatcataatcgccactgcagaatcagacaggggcgggttcagtgtggaggcaacacacatcaaggagcctaccataatcgggatcaacggttacagggtcgatgtgaaacctgagggtaccatgataatagcacgctacagggacctcccgggtaccatcggcgccataggaacaaagctcggccagcacggtataaacattgcaaccatgcaggtcggcaggaaggagatcggcggtgaggctgtgatggtcctcaaggtcgatcagagtgtcccggcagaggtcatcgaggaggttaagaagctggacaacgtggatgatgcggttgcaatagagatctaa

SEQ ID NO: 1500 - protein, 525 aa, Methanobacterium thermoautotrophicum
MSRMKVLIADSINEKGISELEEVAEVVVNTTITPEELLDAIKDFDAIVVRSRTKVTREVIEAAPRLKIIARAGVGVDNVDVKAATDRGIMVINAPESTSITVAEHSIGLMLALARKIAIADRSVKEGKWEKNRFMGIELNGKTLGIIGMGRIGSQVVVRTKAFGMDIMVYDPYISKEAAEEMGVTVTDLETLLRESDIVTIHVPLTPETRHLISEDEFKLMKDTAFIVNCARGGIIDEDALYRALKDGEIAGAALDVFEEEPPEGSPLLELENVVLTPHIGASTSEAQRDAAIIVANEIKTVFQGGAPRNVLNMPVMDSETYKSLKPYIELAEKMGAIIAQALPGNIEKLDVTYCGELAEMQFDILTRTMLQAILNPILTEPVNLINAPSIAKKRGIMVTEARRSESDGYRSIIIATAESDRGGFSVEATHIKEPTIIGINGYRVDVKPEGTMIIARYRDLPGTIGAIGTKLGQHGINIATMQVGRKEIGGEAVMVLKVDQSVPAEVIEEVKKLDNVDDAVAIEI

SEQ ID NO: 1501 - DNA, 1401 bp, Schizosaccharomyces pombe
  CDS (1)..(1401)
atggatattaaaggcggtcgtcgtggtaatgtcgaggatagtttgaacaaattatctttgtctccccctgataataattcatccttcctctcgaatcacttccaggtacgcaagtcttactcccaagctcctgctcgtactttgaagccattcgcttccgaagacatcaagattttgctgttggaaaacgttaatcaatcagctttgagcaacttgaaggatgagggctaccaggttgagttcttgaaaacttctatgagcgaggacgatttggttgagaagatcaagggcgttcatgctattggcattcgttctaagacccgcttgactcgtcgtgtcttggaggctgccgacagtttaattgtcatcggttgcttctgtatcggtactaaccaagtcgatttggactttgctgccgaacgtggtatcgccgtcttcaactctccatacgccaactctcgttccgttgctgaattggtcatcggctatatcattagcttggctcgtcaagtgggcgatcgctccttggaattgcaccgtggtgagtggaacaaggtgtccagtggatgctgggagatccgtggtaagaccttgggcatcattggttatggtcatattggatcccaactttctgttctcgctgaagccatgggtttacacgtcgtttattacgatattctccctatcatgcctttgggttccgccaagcagctctcttctctccctgaactccttcaccgtgctgactttgtttctttacacgttcctgcttctccagaaacaaagaatatgatttcctccaaggaatttgccgccatgaaggagggtagctacttgatcaatgcctcccgtggtactgtcgttgacattcccgctctcgttgatgctagcaagtctggtaaaattgctggtgccgccattgatgtttacccatccgagcctgctggtaacggtaaggacaagttcgttgactcactcaactcttggacttctgaattgacccattgcaagaacattattttgactcctcacattggtggtagtaccgaggaggctcaatataacattggtattgaggtcagtgaggctcttactcgttacattaatgaaggaaacagtatcggtgctgttaacttccctgaggtctctttgcgcagccttaccgaggctgatagaaatgctgctcgtgtcttgtttgtccacagaaatgtgcctggtgttcttcgccaagttaacgagctttttatcgaccacaacatcaagtctcaattctccgattctcgtggtgacattgcttacttggttgctgatattagcgactgtactcctggttctttggaggccttgcaccaaaagttggaatctttaccttgcaagattaacactcgtttactttattaa

SEQ ID NO: 1502 - protein, 466 aa, Schizosaccharomyces pombe
MDIKGGRRGNVEDSLNKLSLSPPDNNSSFLSNHFQVRKSYSQAPARTLKPFASEDIKILLLENVNQSALSNLKDEGYQVEFLKTSMSEDDLVEKIKGVHAIGIRSKTRLTRRVLEAADSLIVIGCFCIGTNQVDLDFAAERGIAVFNSPYANSRSVAELVIGYIISLARQVGDRSLELHRGEWNKVSSGCWEIRGKTLGIIGYGHIGSQLSVLAEAMGLHVVYYDILPIMPLGSAKQLSSLPELLHRADFVSLHVPASPETKNMISSKEFAAMKEGSYLINASRGTVVDIPALVDASKSGKIAGAAIDVYPSEPAGNGKDKFVDSLNSWTSELTHCKNIILTPHIGGSTEEAQYNIGIEVSEALTRYINEGNSIGAVNFPEVSLRSLTEADRNAARVLFVHRNVPGVLRQVNELFIDHNIKSQFSDSRGDIAYLVADISDCTPGSLEALHQKLESLPCKINTRLLY

SEQ ID NO: 1503 - DNA, 1665 bp, Synechocystis sp
  CDS (1)..(1665): transl_table=11
gtgaatctagcctggctccagggactgtctcttggccttttgtccccgccggccccagcgctattaatttttcgatcattcaccatggctaaagttttagtttctgactccattgaccaagtcggcattgatattctcaaacaagtggcccaagttgacgtcaaaactgggctatcggaagcagaaattatagacattgttcctgagtacgatgccattatgttgcgctctgccaccaaggtgacggagaaaattatccaagcgggtagccagttaaaaatcattggtcgggctggggttggggtggataacattgatgtgccggcggccacccgtcagggcattgtggtggtcaattcccccgagggtaacaccattgcggcggcggaacatgctctagcgatgatgatggccctggcccgccacatccccgatgccaacaaatccgttaaggaaagtaagtgggaacggaaacaatttattggtacggaagtttataagaaaactttaggtgtagtggggctggggaaaattggttcccacgtggccggtgtggccaaagccatggggatgaaattgttagcttacgatccgtttatttcccaggaacgggccgaccaaattggttgcactttggtggacttagatctgctcttcagtgaagccgactttatcactctacacattcccaaaacaccggaaaccgccaacctaatcaatgctgaaaccctggctaaaatgaagcccactgcccggattatcaactgttcccggggaggcattattgatgaagaagctttggtaacagccattgaaacggcccagattggtggggctgccctggatgtgtttgcccaggaacccctaggggaatctcggctgcgggaatttagcaatgtgattttaaccccccatttgggtgcttccactgaagaagcccaggtaaatgtggcggtggatgtggcggaacaaattcgggatgtgttgcttggtttgccggcccgttcagcggtgaatattcccggtttaacccccgatgtaatggaaaaattgcgtccctacctgaagctggcggaaaccctcggtactttagtgggtcaattggccggcggccgcatcgatcgcctaacggtttgcttacagggagatttggcggaatataccaatagtcaacccctggtggtggcggccattaaaggtttgctctcccaagctctgcgggaacgggttaattacgtcaatgcggcgatcgaagccaaggaacggggcatccgggtcattgaaactaaagatgcttccgtgcgggactattctggctctttgcacctcaaagccaccggcaccatgggagaacattccgccaccggggccctgttgagtaatggtgaaattcgcattaccgacgtggatgagtttcccattaacgttccccccaacaactatatgttgttcaccttgcaccgggatatgccgggtatcattggtaaaattggttccctgctgggtagctttaacgtcaacatcgccagcatgcaggtggggcgcaaaattgtccggggcgatgcaattatggccctgagcttggatgatcctctgcccgatggtctgctgtcggaaatcaccaaggtggccggtatccgggatgcctacaccgttaagctctaa

SEQ ID NO: 1504 - protein, 554 aa, Synechocystis sp
MNLAWLQGLSLGLLSPPAPALLIFRSFTMAKVLVSDSIDQVGIDILKQVAQVDVKTGLSEAEIIDIVPEYDAIMLRSATKVTEKIIQAGSQLKIIGRAGVGVDNIDVPAATRQGIVVVNSPEGNTIAAAEHALAMMMALARHIPDANKSVKESKWERKQFIGTEVYKKTLGVVGLGKIGSHVAGVAKAMGMKLLAYDPFISQERADQIGCTLVDLDLLFSEADFITLHIPKTPETANLINAETLAKMKPTARIINCSRGGIIDEEALVTAIETAQIGGAALDVFAQEPLGESRLREFSNVILTPHLGASTEEAQVNVAVDVAEQIRDVLLGLPARSAVNIPGLTPDVMEKLRPYLKLAETLGTLVGQLAGGRIDRLTVCLQGDLAEYTNSQPLVVAAIKGLLSQALRERVNYVNAAIEAKERGIRVIETKDASVRDYSGSLHLKATGTMGEHSATGALLSNGEIRITDVDEFPINVPPNNYMLFTLHRDMPGIIGKIGSLLGSFNVNIASMQVGRKIVRGDAIMALSLDDPLPDGLLSEITKVAGIRDAYTVKL

SEQ ID NO: 1505 - DNA, 1410 bp, Saccharomyces cerevisiae
  CDS (1)..(1410)
atgacaagcattgacattaacaacttacaaaatacctttcaacaagctatgaatatgagcggctccccaggcgctgtttgtacttcacctacgcaatctttcatgaataccgttccacagcgcttgaatgctgtaaagcacccaaaaattttgaagcctttctcaacgggtgatatgaagattttactattagaaaacgttaatcaaactgctattacaatcttcgaagagcaaggttaccaagtcgaattctataaatcttcattgcccgaggaagagttgatcgaaaagatcaaggacgttcatgctattggtatcagatcaaagactagattaacttcaaatgtcttacaacatgcgaagaatctggtttgtattggttgtttctgtatcggtaccaaccaagttgacttagactacgctaccagcagaggtattgctgttttcaactcgcctttctccaactcaagatcagtagcagaattggtcatcgctgaaatcattagtttagcaagacaactaggtgatagatctatcgaattacataccggtacatggaataaggttgctgctagatgttgggaggtaagaggaaaaactcttggtattattgggtacggtcacattggttcccaattatcagttcttgcagaagctatgggtttgcatgtgttgtactacgatattgtaactatcatggccttgggtactgccagacaagtttctacattagatgaattgttgaataaatctgattttgtgacactacatgtaccagctactcctgaaactgaaaaaatgttatctgccccacaatttgctgctatgaaggatggcgcttatgttattaatgcttcaagaggtactgtcgtggacattccatctttgatccaagccgtgaaagccaacaaaattgcaggtgctgctttggatgtttatccacatgaaccagctaagaacggtgaaggttcatttaacgatgagctaaatagctggacttctgaattagtttcattaccaaatatcatcttgacaccacacattggtggctctaccgaagaagcccaaagctcaatcggtattgaagtggctaccgcattgtccaaatacatcaatgaaggtaactctgtcggttcagtcaacttcccagaagtggcattgaaatcattgtcttacgaccaagagaacactgtgcgtgtgttatacattcaccaaaatgtaccaggtgttttgaagaccgtcaatgatattttatcgaaccataacatcgaaaagcaattttccgattcaaatggtgaaattgcttatttaatggctgatatctcttctgttgaccaaagcgatattaaagatatttatgaacaactaaatcaaacctctgctaagatctcaattagattgctatattaa

SEQ ID NO: 1506 - protein, 469 aa, Saccharomyces cerevisiae
MTSIDINNLQNTFQQAMNMSGSPGAVCTSPTQSFMNTVPQRLNAVKHPKILKPFSTGDMKILLLENVNQTAITIFEEQGYQVEFYKSSLPEEELIEKIKDVHAIGIRSKTRLTSNVLQHAKNLVCIGCFCIGTNQVDLDYATSRGIAVFNSPFSNSRSVAELVIAEIISLARQLGDRSIELHTGTWNKVAARCWEVRGKTLGIIGYGHIGSQLSVLAEAMGLHVLYYDIVTIMALGTARQVSTLDELLNKSDFVTLHVPATPETEKMLSAPQFAAMKDGAYVINASRGTVVDIPSLIQAVKANKIAGAALDVYPHEPAKNGEGSFNDELNSWTSELVSLPNIILTPHIGGSTEEAQSSIGIEVATALSKYINEGNSVGSVNFPEVALKSLSYDQENTVRVLYIHQNVPGVLKTVNDILSNHNIEKQFSDSNGEIAYLMADISSVDQSDIKDIYEQLNQTSAKISIRLLY

SEQ ID NO: 1507 - DNA, 1842 bp, Oryza sativa
  CDS (1)..(1842)
atggcggcgccgtcccagaccaccgccaccaccacccaccaccgcgtcctcctcccgtcccaccaccaccaccgagcggtgcctccctcgctcctccgcctcccgctccgcgccgcgcgccggggccgcctctccgccgccgccgcggccgcggcgcccgccgcgtcgaccgcggcgccgtcggagcccgccgcgggtgccgtaccggggaagccgacggtgctcgtggccgagaagctcggcgccgcggggctcgagctgctccgggggttcgccaacgtggactgctcctacggcctctcccccgaggagctccgcgccaagatcccgctctgcgacgcgctcatcgtgcggtcggggaccaaggtggggcgcgacgtgttcgaggcatccgggggaaggctccgcgtcgtggggcgcgccggggtcgggatcgacaacgtcgatctcgccgccgccaccgagcacgggtgcctcgtcgtcaacgcacccacggcgaacaccgtcgccgcggccgagcacggcatcgcgctgctcaccgctatgtccaggaacatcgcccaggccgacgcgtcgctcaaggctggtaaatggcagcgcaacaagtatgtgggtgtatctctcgttggtaaaactattgcaattcttggatttggaaaggttgggtcagaagtcgctcgtcgtgctaaaggtttgggaatgcatgtgattgcacacgatccgtatgcttctgctgatcgtgcccatgcaattggagttgagctagtgagcatggaagacgctttgacaactgctgactttatctcgttgcatatgcctcttacccctgcaacaaacaagatgctcaatgatgaaactttcgctaagatgaagaagggtgttagaattataaatgttgcgcgtggtggtgtaattgatgaagatgctctagtcagggctcttgattcaggaatagttgcacaggctgctcttgatgtgttcactaaagagccaccggcaccagacagcaaattagtgctgcatgagaatgttactgtaacaccacaccttggtgccagcacagttgaagcacaggaaggagtggctattgaaatagctgaagctgttattggagctctgaaaggggaacttgcagcttcagcagtcaacgcaccaatggttcctgctgaggtgctgtcagagcttgcaccttatgttgtgctcgcagagaagcttgggcgcctggctgtgcagctagtggctggtggcggtggtatcaagtccgtgaaagtgacctatgcttctgcaagggctcctgatgatcttgacacgagacttcttcgtgcaatgatcaccaaggggttgatcgaaccaatctccagtgttttcgtcaatctggtcaatgctgacttcactgcgaaacagaggggagttcgtatcactgaggagagaatcttgttggatggctcacccgagacacctattgactacatccaagttcatattgcccatgttgagtccaaatttcccagtgcaatatcggagagtggagagatcactgttgaggggaaggtgaaggatggcatcccccatctgacaaaggttggatcattccaggttgatgtgagcttggaaggaagcctgatcctttgcaggcaggtcgatcaacctggtatgatcggcgcagtaggaagtgtccttggtgaggagaatgttaatgtcagtttcatgagtgttggaagaatcgctcctcgcaagcatgccgtcatggcgattggtgttgatgaggaacctaaaaagagcacactgacaaagattggggagattccggcgattgaagaattcgttttcctcaagctctag

SEQ ID NO: 1508 - protein, 613 aa, Oryza sativa
MAAPSQTTATTTHHRVLLPSHHHHRAVPPSLLRLPLRAARRGRLSAAAAAAAPAASTAAPSEPAAGAVPGKPTVLVAEKLGAAGLELLRGFANVDCSYGLSPEELRAKIPLCDALIVRSGTKVGRDVFEASGGRLRVVGRAGVGIDNVDLAAATEHGCLVVNAPTANTVAAAEHGIALLTAMSRNIAQADASLKAGKWQRNKYVGVSLVGKTIAILGFGKVGSEVARRAKGLGMHVIAHDPYASADRAHAIGVELVSMEDALTTADFISLHMPLTPATNKMLNDETFAKMKKGVRIINVARGGVIDEDALVRALDSGIVAQAALDVFTKEPPAPDSKLVLHENVTVTPHLGASTVEAQEGVAIEIAEAVIGALKGELAASAVNAPMVPAEVLSELAPYVVLAEKLGRLAVQLVAGGGGIKSVKVTYASARAPDDLDTRLLRAMITKGLIEPISSVFVNLVNADFTAKQRGVRITEERILLDGSPETPIDYIQVHIAHVESKFPSAISESGEITVEGKVKDGIPHLTKVGSFQVDVSLEGSLILCRQVDQPGMIGAVGSVLGEENVNVSFMSVGRIAPRKHAVMAIGVDEEPKKSTLTKIGEIPAIEEFVFLKL

SEQ ID NO: 1509 - DNA, 1842 bp, Oryza sativa
  CDS (1)..(1842)
atggcgttggcgccgccgctctgccacctactcgccgcaccgccgccgtccacgtccgccgcagccgacgcggctcacgaccacgcgggagccctggccccacaccgccgcgcctccccgctccgccgccgcggccgcctcttcctcgcctgcagggtccccgctgctgcgccctccgcccgtggggtcgcggcggaggcggcggcgggaaggccgacggtgcttgtgacggagaagctgggcgacgcggggctggagctgctgcggaggttcgcgaacgtggactgcgcgtacgagctcacggcggaggagctccgcgccaaggtgtcgctcgtggacgcgctcgtggtgcgcagcgccacgcgggtgacgcgggaggtgttcgaggccgcgcgcggccgcctccgcgtcgtcggccgcgccggggtcggcatcgacaacgtcgacctccaggccgccaccgaggccgggtgcctcgtcgtcaacgcccccaccgccaacaccgtcgccgccgccgagcacgccatcgccctcctcgccgccatggcgcgcaatgtcgcccaggccgacgcctccctcaaggccggcaaatggcaacgtaacaaatatgttggtgtttctttggtgggaaagacgctagctattatgggctttgggaaggttggctcagaagtagcacgacgcgcgaaaggacttggaatggatatcatttctcatgatccctatgctcctgttgatagagcccgggcaattggtgtagaccttgtatcgtttgatgaggccatctccactgcagacttcatatcactgcatatgccacttacaccatcaacagcaaagcttttcgatgatgaaacttttgcaaacatgaaaaaaggtgtgaggattattaacgttgcaaggggtggggtagttgatgaagacgcgttgctgagagcactcgataatggaacagtttcacaggcagcacttgatgtattcactgaggagccaccaccaaaagacagcaagttagtacaccatgaacatgtgactgtcactccacaccttggagctagtacatcagaagcacaggaaggtgtagcccttgaaattgcagaggctgttcttggagcactgaaaggggaattagctgctactgctgttaatgccccgatggtccctgctgaggttttatcggagttatctccgtatgttatccttgctgagaaactaggtcggcttgtcgtgcaacttgtagctgggggaagtgggattaagggagtgaagattggatattcatcatctcgagaccctgatgatctggacacaagggtactccgtgctatggtcaccaaaggcatcatcgagcccatttcaagtgcatttgttaacattgtcaatgctgactatgtggccaagcaaagaggccttcgcatcagcgaagagagaatcctccttgatggatcaccggagattcctatagattctatccaggtgcatctcgccaatgtagagtccaagttcgccggtgccctctctgacgaaggtgacatcagagtggagggagaggtgaaggatgggaaaccacatctcacacttgttgggccattcagtgtggatgttagtcttgagggcaacctaatactctgccgtcaagttgatcagccaggtatcattggaaaggtaggatcaattttggggaagatgaatgtgaatgtgaatttcatgagcgttggaaggactgctcctggaaagcaggcgataatggccattggggttgatgaggagcctgagaaggaagctctcaagttgatcggcgacataccatcagttgaggagtttgtctttattaagctttag

SEQ ID NO: 1510 - protein, 613 aa, Oryza sativa
MALAPPLCHLLAAPPPSTSAAADAAHDHAGALAPHRRASPLRRRGRLFLACRVPAAAPSARGVAAEAAAGRPTVLVTEKLGDAGLELLRRFANVDCAYELTAEELRAKVSLVDALVVRSATRVTREVFEAARGRLRVVGRAGVGIDNVDLQAATEAGCLVVNAPTANTVAAAEHAIALLAAMARNVAQADASLKAGKWQRNKYVGVSLVGKTLAIMGFGKVGSEVARRAKGLGMDIISHDPYAPVDRARAIGVDLVSFDEAISTADFISLHMPLTPSTAKLFDDETFANMKKGVRIINVARGGVVDEDALLRALDNGTVSQAALDVFTEEPPPKDSKLVHHEHVTVTPHLGASTSEAQEGVALEIAEAVLGALKGELAATAVNAPMVPAEVLSELSPYVILAEKLGRLVVQLVAGGSGIKGVKIGYSSSRDPDDLDTRVLRAMVTKGIIEPISSAFVNIVNADYVAKQRGLRISEERILLDGSPEIPIDSIQVHLANVESKFAGALSDEGDIRVEGEVKDGKPHLTLVGPFSVDVSLEGNLILCRQVDQPGIIGKVGSILGKMNVNVNFMSVGRTAPGKQAIMAIGVDEEPEKEALKLIGDIPSVEEFVFIKL

SEQ ID NO: 1511 - DNA, 1866 bp, Oryza sativa
  CDS (1)..(1866)
atggcaaccgccgccgccgcctcacgcgccgccctctcaaggcctcacgccgccgccgccgcggcgcgcgcgagccccgccgcgggggcgcgggtgacgctcccgcggcgccgaagcgtccgatccgcggtgatctcgtcgtcggcgtccgcggcggcggtggcggcgtcggagccggcggcggggagggtgacgctgggcgcggggacggacggggcgctgtggccgaagccggcggtgctggtggcggagaagctgagcgaggccgggctggcggtgctgcgcgggttcgcggacgtggagtgcgcgtacgggatgtcccccgcggagctcctcgccaaggtggcgcagttcgacgcgctcatcgtgcgcagcggcaccaaggtgacgagggaggtgctggaggccgggcgcgggcggctgcgcgtggtgggccgcgccggcgtcgggatcgacaacgtcgacctccaggccgccaccgaggccggctgcctcgtcgtcaacgcccccaccgccaacaccgtcgccgccgccgagcacggcatcgcgctcctcgcctccatggcgcgcaacgtctcccaggccgacgccgccctcaaggccgggaaatggcaaagaaccaagtacgttggagtttctctggtcgggaagacacttgcggtaatgggctttggcaaggttggttcagaggtagccaggcgggcgaaagggctcggtatgcatgtgattgctcatgatccgtacgcccctgccgatagggctcgtgccattggagctgaactggtctctttcgatgaggccattggcagagccgacttcatctcccttcacatgcctctcaccccagcaacatccaaggtcttcaacgacgaatccttttctaggatgaagaatggagttcggatcatcaatgtggccaggggtggagtgatcgacgaagatgctcttgtcagagcccttgactctggcaaagttgctcaggcagcccttgatgtcttcactgaggagcccccagccaaggacagcaagctagtcctccatgagaatgttactgttacaccccatcttggagcaagtacagtggaggcccaggagggcgtcgctatcgagatagccgaagctgtcgtcggtgcactgagaggtgagctcgcagcaacagccgtgaatgctcccatggtcccagctgaggtcatgtcagagcttgccccgtatgtttcactggcagagaagctgggcaagctggcggtgcagctcgtcgcaggcgagagcggcggcatcaagggcgtcaaggtggtgtacaccacggcccgtggcccggacgacctcgacacgaggctcctccgcgccatggtgaccaagggcatcgtggagcccgtgtcgagcacgttcgtcaacctggtgaacgccgactacacggcgaagcagcgcggcctgcgcatcaccgaggagcgggtctcccacgagagccccgccgcggaggcgccgctggagtccatccaggtgaggctctcacacgtccagtccaagttcgccggcgccatcagcgacggcggcgacatcgtcctcgaggggagggtcaagtacggcgtgccgcacctcaccgtcgtcgggccctacgaggtggacgtcagcctggagggcaacctgatcctgtgccggcagatcgaccagcccggcatgatcggcaaggtcggcaacatcctcggccagacgaacgtcaacatcagcttcatgagcgtcggccggaccttccgcggcaagcaggccatcatggccatcggcgtcgacgaggagcccgacaaggagaccctcgagcacatcggccacatcccggcgatcgaggagttcgtcttcctcgagctatga

SEQ ID NO: 1512 - protein, 621 aa, Oryza sativa
MATAAAASRAALSRPHAAAAAARASPAAGARVTLPRRRSVRSAVISSSASAAAVAASEPAAGRVTLGAGTDGALWPKPAVLVAEKLSEAGLAVLRGFADVECAYGMSPAELLAKVAQFDALIVRSGTKVTREVLEAGRGRLRVVGRAGVGIDNVDLQAATEAGCLVVNAPTANTVAAAEHGIALLASMARNVSQADAALKAGKWQRTKYVGVSLVGKTLAVMGFGKVGSEVARRAKGLGMHVIAHDPYAPADRARAIGAELVSFDEAIGRADFISLHMPLTPATSKVFNDESFSRMKNGVRIINVARGGVIDEDALVRALDSGKVAQAALDVFTEEPPAKDSKLVLHENVTVTPHLGASTVEAQEGVAIEIAEAVVGALRGELAATAVNAPMVPAEVMSELAPYVSLAEKLGKLAVQLVAGESGGIKGVKVVYTTARGPDDLDTRLLRAMVTKGIVEPVSSTFVNLVNADYTAKQRGLRITEERVSHESPAAEAPLESIQVRLSHVQSKFAGAISDGGDIVLEGRVKYGVPHLTVVGPYEVDVSLEGNLILCRQIDQPGMIGKVGNILGQTNVNISFMSVGRTFRGKQAIMAIGVDEEPDKETLEHIGHIPAIEEFVFLEL

SEQ ID NO: 1513 - DNA, 1803 bp, Brassica napus
  CDS (1)..(1803)
atgtcagccgccgccgcatcctccgcgatctccgtcgccaccaaccccctcaagaccttttccctctcctccagatcccctctcccatccgccatctccctcccatctcgcagccttaacacccctcgccgccgcctcgtcctcgtatcctgcaccgccggagacggatccaaacccacgatcctcgtcgcggagaagctcggcgaggccggcgtgaagctcctggagggtttcgcgaatgtcgactgctcttacaacatgacccccgaggagctcaacaccaagatctccctctgcgacgccttgatcgttcgcagtggaactaaagttggtcgggaggttttcgagtcctctcgcggacgtctcaaggttgttggacgcgctggtgttgggattgacaacgtggatctgagcgccgcgactgagtttgggtgtcttgtcgttaacgcccccacggctaacacgatcgccgccgctgagcatgggatcgcgcttttagcctccatggctagaaacgtcgctcagtctgatgcgtctgttaaagctggagagtggaagaggaacaagtatgtgggtgtttcacttgtcggcaagaccctcgcagtgatgggattcgggaaagttggtaccgaagttgctcgtcgtgccaaaggtctcggcatgcgtgtgattgctcatgatccttacgcacctgcagaccgtgcacacgccattggtgttgagctagtgagcttcgacgaagccttggccactgcggatttcatttcgctccacatgcctcttacacctgcaacgaacaagatactcaacgacgagacgttcgccaagatgaagaagggagttcgtatcgttaacgttgctcgtggaggtgtgatagacgaagacgcgttggtgagggctcttgatgctgggattgtttctcaggctgcgcttgatgttttcactaaagagccgccggctaaagacagccctctggtgcagcacgagaatgtcactgtgacacctcatcttggagccagcacgatggaggctcaggaaggagttgctattgagatcgctgaagctgttgttggagctttgaacggagagctcgctgctactgctgtcaatgcacctatggtctctgctgaggttctgactgagctgaaaccatatgtgatactagccgagaagctagggagactagcggtgcagctcgtggctggaggaagcggcgtgaagaacgtgaaagtctcctacacgtcagcacgagccactgacgatctcgacacaagacttctccgagccatgatcaccaagggaatcatcgagccaatctctgacgtgtatgtcaacttggtcaacgcagatttcacagccaagcagagaggtctcagaatctcagaggaacgtgtgctcttggacgggtcaccagagaacccgttggaaacaataacagtccagctaggcaacgtggagtccaagttcgcgagttccttgtctgaatcaggagaggtgaaagtggaaggaagggtgaaagacgggatcccgcatttgacgaaggttggatcttttgaggtggatgtgactcttgaaggtagtatcatactgtgcaggcaggttgatcagccgggtatgattgggacggtggggagcatccttggagagtctaacgtcaatgtgaacttcatgagcgttggaagaatcgcaccgaggaagcaagccatcatggcgattggagtagatgatcagccaagcaaggagactcttaagaagattggagagatcccagcgattgaggagtttgttttcctcaaactctag

SEQ ID NO: 1514 - protein, 600 aa, Brassica napus
MSAAAASSAISVATNPLKTFSLSSRSPLPSAISLPSRSLNTPRRRLVLVSCTAGDGSKPTILVAEKLGEAGVKLLEGFANVDCSYNMTPEELNTKISLCDALIVRSGTKVGREVFESSRGRLKVVGRAGVGIDNVDLSAATEFGCLVVNAPTANTIAAAEHGIALLASMARNVAQSDASVKAGEWKRNKYVGVSLVGKTLAVMGFGKVGTEVARRAKGLGMRVIAHDPYAPADRAHAIGVELVSFDEALATADFISLHMPLTPATNKILNDETFAKMKKGVRIVNVARGGVIDEDALVRALDAGIVSQAALDVFTKEPPAKDSPLVQHENVTVTPHLGASTMEAQEGVAIEIAEAVVGALNGELAATAVNAPMVSAEVLTELKPYVILAEKLGRLAVQLVAGGSGVKNVKVSYTSARATDDLDTRLLRAMITKGIIEPISDVYVNLVNADFTAKQRGLRISEERVLLDGSPENPLETITVQLGNVESKFASSLSESGEVKVEGRVKDGIPHLTKVGSFEVDVTLEGSIILCRQVDQPGMIGTVGSILGESNVNVNFMSVGRIAPRKQAIMAIGVDDQPSKETLKKIGEIPAIEEFVFLKL

SEQ ID NO: 1515 - DNA, 1854 bp, Hordeum vulgare
  CDS (1)..(1854)
atggcggcgccgtccccgaccaccgccgccgccgccatcaccacccaccaccgcgtcctcctccccgcccgcgcctccctctcccccgccccgtcctccgccctccgcatccccgcccgcgccgcccgcgccaaccgcggccgcatctgcgtctccgcgcccgcggcccccgccgcgtcgaccgcgtccccgcccgcttccgccgcggtggccgtcgagggcaagcccacggtgctcgtggccgagaagctgggcgccgcggggctggcgctgctccgggagttcgccaacgtcgactgctcctacggcctctcccccgaggagctccgggccaagatctcgctctgcgacgcgctcatcgtgcgctccggcaccaaggtcggccgcgacgtcttcgaggcctccggcggccggctccgcgtcgtcggccgcgcgggcgtcgggatcgacaacgtcgatctcgccgccgccaccgagcacggctgcctcgtcgtcaacgctcccaccgccaacaccgtcgccgccgccgagcacggcatcgcgctcatgtgcgccatggcccggaacgtcgcccaggccgacgcatcgctcaaggctggtaaatgggcgcgcaccaagtatgtcggtgtgtctcttgttggcaaaactctcgccatccttggatttggaaaggttgggtcagaggtcgcacgtcgcgccaaaggtctaggaatgcacgtgattgcacacgatccatatgcttctgctgatcgtgctcgtgcaattggagttgacctagtgagcatggaagaggctatgaccactgccgacttcatctcgttgcatatgcccctcaccccttcaacaaacaagatgctcaacgatgaagcctttgccaagatgaagaagggtgttcggattataaatgttgcacgtggtggtgtgattgatgaagatgctctagtcagggctcttgatgcgggaattgttgcacaggctgctcttgatgtgttcaccaaagagcctccagcagcagacagcaagttagtgctacatgagaatgttactgtgactccgcatcttggtgccagcacagtggaagcacaggaaggagtggctatcgaaatagctgaagctgtcactggagctctgaaaggggagcttgcagcttctgcggtcaatgcaccaatggttcctgctgaggtgttgtcagagcttgcaccttatgttgttctcgctgaaaagcttgggcgccttgctgtccagctagttgctggcggtggcggtatcaagtctgtgaaggtgacctatgcatccgcaagggctcctgatgatctcgacacgagacttctccgtgcgatgatcaccaagggtgtgatagaaccaatctctgacgtcttcgtcaatctggtcaatgctgacttcactgcaaagcagaggggcatccgtgtcagcgaggagaaaatcgtgatggatggctcacccgagacaccgctcgagtatatccaggtccagatagccaatgtggagtccaaattccccagtgcgatatgtgactccggatttgtcacggtagaggggagggtgaaggatggcatcccccaccttaccaaggtcggtgcattcgaggtggatgtgagcatggagggcagcctgatcctgtgcaggcaggtcgaccagcccggcatgatcgggtcggtcggaagcgttctgggcgaggagaatgtcaacgtcagcttcatgagcgttggtaggatcgctccccgcaagacggctatcatggcgatcggtgttgatgaggagcccagcaagaccacgctgaccaagattggtgagatccccgcgatcgaggagttcgtcttcctcaagctctag

SEQ ID NO: 1516 - protein, 617 aa, Hordeum vulgare
MAAPSPTTAAAAITTHHRVLLPARASLSPAPSSALRIPARAARANRGRICVSAPAAPAASTASPPASAAVAVEGKPTVLVAEKLGAAGLALLREFANVDCSYGLSPEELRAKISLCDALIVRSGTKVGRDVFEASGGRLRVVGRAGVGIDNVDLAAATEHGCLVVNAPTANTVAAAEHGIALMCAMARNVAQADASLKAGKWARTKYVGVSLVGKTLAILGFGKVGSEVARRAKGLGMHVIAHDPYASADRARAIGVDLVSMEEAMTTADFISLHMPLTPSTNKMLNDEAFAKMKKGVRIINVARGGVIDEDALVRALDAGIVAQAALDVFTKEPPAADSKLVLHENVTVTPHLGASTVEAQEGVAIEIAEAVTGALKGELAASAVNAPMVPAEVLSELAPYVVLAEKLGRLAVQLVAGGGGIKSVKVTYASARAPDDLDTRLLRAMITKGVIEPISDVFVNLVNADFTAKQRGIRVSEEKIVMDGSPETPLEYIQVQIANVESKFPSAICDSGFVTVEGRVKDGIPHLTKVGAFEVDVSMEGSLILCRQVDQPGMIGSVGSVLGEENVNVSFMSVGRIAPRKTAIMAIGVDEEPSKTTLTKIGEIPAIEEFVFLKL

SEQ ID NO: 1517 - DNA, 1818 bp, Triticum aestivum
  CDS (1)..(1818)
atggcggcgccgtccccgaccaccgccgccgccacccaccaccgcgccctcctcccggccccggcccgccgcgcggccctctccctcgcccgcgccagccgcggccgcatctgcgtctccgcgcccgccgcccccgccgcgtcgaccgcgtccccgcccgcgacggccgcggtggccgtcgagggcaagcccacggtgctcgtggccgagaagctcggcgccgcggggctggcgctgctccgggagttcgccaacgtcgactgctcctacggcctctcccccgaggagctccgcgccaagatctcgctctgcgacgcgctcatcgtgcgctcggggaccaaggtcggccgcgacgtcttcgaggcctcggggggccggctccgcgtcgtcggccgcgcgggggtcgggatcgacaacgtcgatctcgccgccgccaccgagcacggctgcctcgtcgtcaacgcgcccaccgccaacaccgtcgccgccgccgagcacggcatcgcgctgctctgcgccatggcccggaacgtcgcccaggccgacgcctccctcaaggctggtaaatgggcgcgcaccaagtatgttggtgtgtctcttgttggcaaaactcttgctatccttggatttggaaaggttgggtcagaggtcgcacgccgtgccaaaggtctaggaatgcacgtgattgcacacgatccatatgcttctgctgatcgtgctcgcgcaattggagttgacctagtaagcatggaagaggctatgacaactgccgactttatctcattgcatatgccccttaccccttcaacaaacaagatgctcaacgatgaagcctttgcgaagatgaagaagggtgttcggattataaatgttgcccgtggtggtgtgattgatgaagatgctctagtcagggcccttgatgcaggaattgttgcacaggctgctcttgatgtgttcactaaggagcctccagcagcagacagcaagttagtgctgcatgagaatgttaccgtgacaccacatcttggtgccagcacagtagaagcacaggaaggagtggctattgaaatagctgaagctgtcactggagctctgaaaggggagcttgcagcttctgccgtcaatgcaccaatggttcccgctgaggtgctgtcagagcttgcaccttatgtcatgctcgctgaaaagcttgggcgcctagctgtccagctagttgctggtggtggcggtatcaagtctgtgaaggtgacctatgcatctgcaagggctcccgatgatcttgacacgagacttctccgtgcaatgatcaccaagggtgtgatcgaaccaatctccgacgttttcgtcaatctggtcaacgccgactttaccgcgaagcagaggggcatccgtgtcagcgaggagaaaatcgtgatggatggctcacccgagacacctctcgagtacattcaggttcagatagccaatgtggagtccaaattccccagtgcgatatgcgactccggactggtcacggtggaggggcgggtgaaggacggcatccctcaccttaccaaggtcggagcgttcgaggtggacgtgagcatggagggcagcctgatcctgtgcaggcaggtcgaccagcccggcatgatcgggtcggtcggaagcgtcctgggcgaggagaacgtcaacgtcagcttcatgagcgtcgggaggatcgctccccgcaagacggctatcatggcgataggcgtcgatgaggagcccagcaaggccacgctgaccaagatcggggagatccctgcgatcgaagagtttgtcttcctcaagctctag

SEQ ID NO: 1518 - protein, 605 aa, Triticum aestivum
MAAPSPTTAAATHHRALLPAPARRAALSLARASRGRICVSAPAAPAASTASPPATAAVAVEGKPTVLVAEKLGAAGLALLREFANVDCSYGLSPEELRAKISLCDALIVRSGTKVGRDVFEASGGRLRVVGRAGVGIDNVDLAAATEHGCLVVNAPTANTVAAAEHGIALLCAMARNVAQADASLKAGKWARTKYVGVSLVGKTLAILGFGKVGSEVARRAKGLGMHVIAHDPYASADRARAIGVDLVSMEEAMTTADFISLHMPLTPSTNKMLNDEAFAKMKKGVRIINVARGGVIDEDALVRALDAGIVAQAALDVFTKEPPAADSKLVLHENVTVTPHLGASTVEAQEGVAIEIAEAVTGALKGELAASAVNAPMVPAEVLSELAPYVMLAEKLGRLAVQLVAGGGGIKSVKVTYASARAPDDLDTRLLRAMITKGVIEPISDVFVNLVNADFTAKQRGIRVSEEKIVMDGSPETPLEYIQVQIANVESKFPSAICDSGLVTVEGRVKDGIPHLTKVGAFEVDVSMEGSLILCRQVDQPGMIGSVGSVLGEENVNVSFMSVGRIAPRKTAIMAIGVDEEPSKATLTKIGEIPAIEEFVFLKL

SEQ ID NO: 1519 - DNA, 1875 bp, Zea mays
  CDS (1)..(1875)
atggcggcctcacgcgcgctcctccccagcccgcaggtgagccctgcgagcgcgcgggtccgcctggccgaggccgtgccgtcgtcgctcacgctcgcggcgcgcggcggggccggggccggcgcgcgtctccgcgtgcagtgcgcgatcctgtcgtcgcccgcgcccgtggcgcccaccgagtcgaggccggcgcgccggatctcgccgtccgcgccggacggcgcgctgcggcccaagccggcggtgctggtcgccgagaagctgaacgaggccgggctggccgtgctgcagcagttcgcggacgtggagtgcgcctacggcatgtcccccgcggagctcctcgccaaggcggcgcagttcgacgcgctcatcgtgcgcagcggcaccaaggtgacgcgggaggtgctggaggccgggcagggccggctgcgggtggtgggccgcgcgggcgtcgggatcgacaacgtcgacctccaggccgccaccgaggtcgggtgcctcgtcgtcaacgcgcccaccgccaacactatcgccgcggccgagcacggcatcgcgctgctcgcctccatggcgcgcaacgtctcgcaggcggacgcggcgctcaaggccggtaaatggcaaaggaacaagtacgtgggggtttctctggtgggaaagaccctggccgtcatgggcttcgggaaggttgggtcagaggtagcgaggcgagcgaaagggcttgggatgcacgtgatagctcatgatccctacgcccctgccgaccgggcccgggccctcggggtagagctggtttctttcgacgaggccatcgcaagagccgacttcatctccctccacatgccgctgataccgacgacgtccaagatcttcaacgacgagtccttcgcaaagatgaagaatggtgtccggatcatcaacgtggccaggggtggagtgatcgacgaagacgctctggtcagggcgcttgactccggcaaagttgctcaggcggctcttgatgtcttcaccgtggagcccccgcccaaggacagcaagctggtgttgcatgagaatgtcactgtaacaccccaccttggagctagtactgtcgaggctcaggaaggcgtcgctatcgagattgcggaagccgtggttggtgcgctgagaggggagctcgcagcaaccgctgtgaatgcgcccatggtcccagctgagatcctgtcagagctggctccatacgtttctctggccgagaagctcgggaggctggcggtgcagctcgtggccggcgagagcggcatcaagggcgtgaaggtggtgtacaccacagcgcgtggccccgacgacctggacactcggctcctccgcgcgatggtgaccaagggcctggtggagccggtgtccagcacgttcgtgaacctggtgaacgcggactacacggccaagcagcgcggcctccgcctcacggaggagcgcgtggcgcacgacagccccgcggcggaggcgccgctggagtccgtccaggttcgcctctcgcacgtgcagtccaagttcgcgggtgccatcagcgacggcggggacgacatcgtcctggagggccgggtcaagtacggcgtgcctcacctcaccctcgtggggccctacgaggtggacgtcagcctggagggcaacctgatcctgtgccgccagatcgaccagcccgggatgatcggcaaggtcggcaacatactcggcgacacgaacgtgaacatcaacttcatgagcgtcggacggacgttcaggggcaagcaggcgatcatggccattggcgttgacgaggagcccgacaaggacacgctggagaagatcggggccatcccggcgatcgaggagttcgttttcctcgaactatga

SEQ ID NO: 1520 - protein, 624 aa, Zea mays
MAASRALLPSPQVSPASARVRLAEAVPSSLTLAARGGAGAGARLRVQCAILSSPAPVAPTESRPARRISPSAPDGALRPKPAVLVAEKLNEAGLAVLQQFADVECAYGMSPAELLAKAAQFDALIVRSGTKVTREVLEAGQGRLRVVGRAGVGIDNVDLQAATEVGCLVVNAPTANTIAAAEHGIALLASMARNVSQADAALKAGKWQRNKYVGVSLVGKTLAVMGFGKVGSEVARRAKGLGMHVIAHDPYAPADRARALGVELVSFDEAIARADFISLHMPLIPTTSKIFNDESFAKMKNGVRIINVARGGVIDEDALVRALDSGKVAQAALDVFTVEPPPKDSKLVLHENVTVTPHLGASTVEAQEGVAIEIAEAVVGALRGELAATAVNAPMVPAEILSELAPYVSLAEKLGRLAVQLVAGESGIKGVKVVYTTARGPDDLDTRLLRAMVTKGLVEPVSSTFVNLVNADYTAKQRGLRLTEERVAHDSPAAEAPLESVQVRLSHVQSKFAGAISDGGDDIVLEGRVKYGVPHLTLVGPYEVDVSLEGNLILCRQIDQPGMIGKVGNILGDTNVNINFMSVGRTFRGKQAIMAIGVDEEPDKDTLEKIGAIPAIEEFVFLEL

SEQ ID NO: 1521 - DNA, 1875 bp, Zea mays
  CDS (1)..(1875)
atggcggcctcacgcgcgctcctccccagcccgcaggtgagccctgcgagcgcgcgggtccgcctggccgcggccgtgccgtcgtcgctcacgctcgcggcgcgcggcggggccggggccggcgcgcgtctccgcgtgcggtgcgcgatcttgtcgtcgcccgcgcccgtggcgcccaccgagtcgaggccggcgcgccggatctcgccgtccgcgccggacggcgcgctgcggcccaagccggcggtgctggtcgccgagaagctgagcgaggccgggctggccgtgctgcggcagttcgcggacgtggagtgcgcctacggcatgtcccccgcggagctcctcgccaaggcggcgcagttcgacgcgctcatcgtgcgcagcggcaccaaggtgacgcgggaggtgctggaggccgggcagggccggctgcgggtggtgggccgcgcgggcgtcgggatcgacaacgtcgacctccaggccgccaccgaggtcgggtgcctcgtcgtcaacacgcccaccgccaacactatcgccgcggccgagcacggcatcgcgctgctcgcctccatggcgcgcaacgtctcgcaggcggacgcggcgctcaaggccggtaaatggcaaaggaacaagtacgtgggggtttctctggtgggaaagaccctggccgtcatgggcttcgggaaggttgggtcagaggtagcgaggcgagcgaaagggcttgggatgcacgtgatagctcatgatccctacgcccctgccgaccgggcccgggccctcggggtagagctggtttctttcgacgaggccatcgcaagagccgacttcatctccctccacatgccgctgataccgacgacgtccaagatcttcaacgacgagtcctttgcaaagatgaagactggtgtccggatcatcaacgtggctaggggtggagtgatcgacgaagacgctctggtcagggcgcttgactccggcaaagttgctcaggcggctcttgatgtcttcaccgtggagcccccgcccaaggacagcaagctggtgttgcatgagaatgtcactgtaacaccccaccttggagctagtactgtcgaggctcaggaaggcgtcgctatcgagattgcggaagccgtggttggtgcgctgagaggggagctcgcagcaaccgctgtgaatgcgcccatggtcccagctgagatcctgtcagagctggctccatacgtttctctggccgagaagctcgggaggctggcggtgcagctcgtggccggcgagagcggcatcaagggcgtgaaggtggtgtacaccacagcgcgtggccccgacgacctggacactcggctcctccgcgcgatggtgaccaagggcctggtggagccggtgtccagcacgttcgtgaacctggtgaacgcggactacacggccaagcagcgcggcctccgcctcacggaggagcgcgtggcgcacgacagccccgcggcggaggcgccgctggagtccgtccaggttcgcctctcgcacgtgcagtccaagttcgcgggtgccatcagcgacggcggggacgacatcgtcctggagggccgggtcaagtacggcgtgcctcacctcaccctcgtggggccctacgaggtggacgtcagcctggagggcaacctgatcctgtgccgccagatcgaccagcccgggatgatcggcaaggtcggcaacatactcggcgacacgaacgtgaacatcaacttcatgagcgtcggacggacgttcaggggcaagcaggcgatcatggccattggcgttgacgaggagcccgacaaggacacgctggagaagatcggggccatcccggcgatcgaggagttcgttttcctcgaactatga

SEQ ID NO: 1522 - protein, 624 aa, Zea mays
MAASRALLPSPQVSPASARVRLAAAVPSSLTLAARGGAGAGARLRVRCAILSSPAPVAPTESRPARRISPSAPDGALRPKPAVLVAEKLSEAGLAVLRQFADVECAYGMSPAELLAKAAQFDALIVRSGTKVTREVLEAGQGRLRVVGRAGVGIDNVDLQAATEVGCLVVNTPTANTIAAAEHGIALLASMARNVSQADAALKAGKWQRNKYVGVSLVGKTLAVMGFGKVGSEVARRAKGLGMHVIAHDPYAPADRARALGVELVSFDEAIARADFISLHMPLIPTTSKIFNDESFAKMKTGVRIINVARGGVIDEDALVRALDSGKVAQAALDVFTVEPPPKDSKLVLHENVTVTPHLGASTVEAQEGVAIEIAEAVVGALRGELAATAVNAPMVPAEILSELAPYVSLAEKLGRLAVQLVAGESGIKGVKVVYTTARGPDDLDTRLLRAMVTKGLVEPVSSTFVNLVNADYTAKQRGLRLTEERVAHDSPAAEAPLESVQVRLSHVQSKFAGAISDGGDDIVLEGRVKYGVPHLTLVGPYEVDVSLEGNLILCRQIDQPGMIGKVGNILGDTNVNINFMSVGRTFRGKQAIMAIGVDEEPDKDTLEKIGAIPAIEEFVFLEL

SEQ ID NO: 1523 - DNA, 26 bp, Artificial sequence
  primer
atgtcttattcagctgccgataattt

SEQ ID NO: 1524 - DNA, 28 bp, Artificial sequence
  primer
ttagtataataacctgatggaaactttg

SEQ ID NO: 1525 - protein, 513 aa, Artificial sequence
  consensus sequence
  Variant (2)..(30): Xaa in position 2 to 30 is any amino acid
  Variant (31)..(33): Xaa in position 31 to 33 is any or no amino acid
  Variant (35)..(46): Xaa in position 35 to 46 is any amino acid
  Variant (49)..(49): Xaa in position 49 is any amino acid
  Variant (51)..(59): Xaa in position 51 to 59 is any amino acid
  Variant (60)..(60): Xaa in position 60 is any or no amino acid
  Variant (62)..(63): Xaa in position 62 to 63 is any amino acid
  Variant (64)..(64): Xaa in position 64 is any or no amino acid
  Variant (66)..(68): Xaa in position 66 to 68 is any amino acid
  Variant (70)..(73): Xaa in position 70 to 73 is any amino acid
  Variant (75)..(77): Xaa in position 75 to 77 is any amino acid
  Variant (80)..(82): Xaa in position 80 to 82 is any amino acid
  Variant (84)..(86): Xaa in position 84 to 86 is any amino acid
  Variant (88)..(89): Xaa in position 88 to 89 is any amino acid
  Variant (91)..(91): Xaa in position 91 is any amino acid
  Variant (93)..(93): Xaa in position 93 is any amino acid
  Variant (95)..(96): Xaa in position 95 to 96 is any amino acid
  Variant (98)..(101): Xaa in position 98 to 101 is any amino acid
  Variant (104)..(113): Xaa in position 104 to 113 is any amino acid
  Variant (115)..(125): Xaa in position 115 to 125 is any amino acid
  Variant (127)..(127): Xaa in position 127 is any amino acid
  Variant (129)..(131): Xaa in position 129 to 131 is any amino acid
  Variant (132)..(136): Xaa in position 132 to 136 is any or no amino acid
  Variant (138)..(139): Xaa in position 138 to 139 is any amino acid
  Variant (142)..(142): Xaa in position 142 is any amino acid
  Variant (145)..(146): Xaa in position 145 to 146 is any amino acid
  Variant (147)..(147): Xaa in position 147 is any or no amino acid
  Variant (149)..(149): Xaa in position 149 is any amino acid
  Variant (151)..(151): Xaa in position 151 is any amino acid
  Variant (154)..(154): Xaa in position 154 is any amino acid
  Variant (155)..(159): Xaa in position 155 to 159 is any or no amino acid
  Variant (161)..(163): Xaa in position 161 to 163 is any amino acid
  Variant (166)..(166): Xaa in position 166 is any amino acid
  Variant (168)..(170): Xaa in position 168 to 170 is any amino acid
  Variant (172)..(187): Xaa in position 172 to 187 is any amino acid
  Variant (188)..(192): Xaa in position 188 to 192 is any or no amino acid
  Variant (194)..(197): Xaa in position 194 to 197 is any amino acid
  Variant (199)..(201): Xaa in position 199 to 201 is any amino acid
  Variant (204)..(204): Xaa in position 204 is any amino acid
  Variant (206)..(209): Xaa in position 206 to 209 is any amino acid
  Variant (211)..(221): Xaa in position 211 to 221 is any amino acid
  Variant (224)..(224): Xaa in position 224 is any amino acid
  Variant (226)..(228): Xaa in position 226 to 228 is any amino acid
  Variant (231)..(232): Xaa in position 231 to 232 is any amino acid
  Variant (235)..(237): Xaa in position 235 to 237 is any amino acid
  Variant (239)..(240): Xaa in position 239 to 240 is any amino acid
  Variant (243)..(244): Xaa in position 243 to 244 is any amino acid
  Variant (246)..(252): Xaa in position 246 to 252 is any amino acid
  Variant (256)..(256): Xaa in position 256 is any amino acid
  Variant (260)..(261): Xaa in position 260 to 261 is any amino acid
  Variant (264)..(273): Xaa in position 264 to 273 is any amino acid
  Variant (274)..(286): Xaa in position 274 to 286 is any or no amino acid
  Variant (289)..(290): Xaa in position 289 to 290 is any amino acid
  Variant (294)..(294): Xaa in position 294 is any amino acid
  Variant (296)..(296): Xaa in position 296 is any amino acid
  Variant (299)..(299): Xaa in position 299 is any amino acid
  Variant (303)..(308): Xaa in position 303 to 308 is any amino acid
  Variant (311)..(319): Xaa in position 311 to 319 is any amino acid
  Variant (321)..(325): Xaa in position 321 to 325 is any amino acid
  Variant (328)..(328): Xaa in position 328 is any amino acid
  Variant (330)..(348): Xaa in position 330 to 348 is any amino acid
  Variant (349)..(495): Xaa in position 349 to 495 is any or no amino acid
  Variant (498)..(502): Xaa in position 498 to 502 is any amino acid
  Variant (503)..(511): Xaa in position 503 to 511 is any or no amino acid
LXXXXXXXXXXXXXXXXXXXXXXXXXXXXXXXXLXXXXXXXXXXXXRSXTXXXXXXXXXXAXXXLXXXGXXXXGXXXVDXXXAXXXGXXVXNXPXXNXXXXAEXXXXXXXXXXRXXXXXXXXXXXGXWXXXXXXXXEXXGKXLGXXXGXGXIGXXXXXXAXXXGMXVXXXDXXXXXXXXXXXXXXXXXXXXXLXXXXDXXXLHXPXXXXTXXXXXXXXXXXMKXGXXXINXXRGXXXDXXALXXAXXXXXXXGAAXDVFXXEPXXXXXXXXXXXXXXXXXXXXXXXNVXXTPHXGXSTXEAQXXXXXXVAXXXXXXXXXGXXXXXVNXPXXXXXXXXXXXXXXXXXXXXXXXXXXXXXXXXXXXXXXXXXXXXXXXXXXXXXXXXXXXXXXXXXXXXXXXXXXXXXXXXXXXXXXXXXXXXXXXXXXXXXXXXXXXXXXXXXXXXXXXXXXXXXXXXXXXXXXXXXXXXXXXXXXXXXXXXXXXXXXXXXXXXXXPGXXXXXXXXXXXXXXNI

SEQ ID NO: 1526 - protein, 40 aa, Artificial sequence
  protein pattern
  Variant (2)..(5): Xaa in position 2 to 5 is any amino acid
  Variant (7)..(7): Xaa in position 7 is any amino acid
  Variant (8)..(8): Xaa in position 8 is any or no amino acid
  Variant (10)..(10): Xaa in position 10 is any or no amino acid
  Variant (12)..(12): Xaa in position 12 is Asp, Glu or Asn
  Variant (13)..(13): Xaa in position 13 is Ile, Leu or Val
  Variant (14)..(15): Xaa in position 14 to 15 is any amino acid
  Variant (17)..(19): Xaa in position 17 to 19 is any amino acid
  Variant (21)..(22): Xaa in position 21 to 22 is any amino acid
  Variant (24)..(24): Xaa in position 24 is any amino acid
  Variant (26)..(26): Xaa in position 26 is Ala, Ser or Thr
  Variant (28)..(28): Xaa in position 28 is any amino acid
  Variant (29)..(29): Xaa in position 29 is Ala, Gly or Ser
  Variant (31)..(32): Xaa in position 31 to 32 is any amino acid
  Variant (33)..(33): Xaa in position 33 is Ala, Ser or Thr
  Variant (34)..(34): Xaa in position 34 is Ala, Thr or Val
  Variant (37)..(38): Xaa in position 37 to 38 is any amino acid
  Variant (39)..(39): Xaa in position 39 is Phe, Ile, Leu, Met or Val
  Variant (40)..(40): Xaa in position 40 is Ala, Cys, Gly, Ser or Thr
GXXXXGXXNXVXXXXAXXXGXXVXNXPXXNXXXXAEXXXX

SEQ ID NO: 1527 - protein, 26 aa, Artificial sequence
  protein pattern
  Variant (2)..(2): Xaa in position 2 is Phe, Ile, Leu or Val
  Variant (3)..(4): Xaa in position 3 to 4 is any amino acid
  Variant (8)..(8): Xaa in position 8 is any amino acid
  Variant (10)..(10): Xaa in position 10 is Ala or Gly
  Variant (13)..(14): Xaa in position 13 to 14 is any or no amino acid
  Variant (16)..(17): Xaa in position 16 to 17 is any or no amino acid
  Variant (19)..(20): Xaa in position 19 to 20 is any amino acid
  Variant (21)..(21): Xaa in position 21 is Ala, Ile or Val
  Variant (22)..(22): Xaa in position 22 is Ala or Gly
  Variant (23)..(24): Xaa in position 23 to 24 is any amino acid
  Variant (25)..(25): Xaa in position 25 is Ile or Val
  Variant (26)..(26): Xaa in position 26 is Ala, Gly, Ser or Thr
NXXXTPHXGXSTXXAXXQXXXXXXXX

SEQ ID NO: 1528 - protein, 25 aa, Artificial sequence
  protein pattern
  Variant (3)..(3): Xaa in position 3 is any amino acid
  Variant (4)..(4): Xaa in position 4 is Ile or Leu
  Variant (5)..(5): Xaa in position 5 is Ala or Gly
  Variant (6)..(6): Xaa in position 6 is Ile, Leu or Val
  Variant (7)..(7): Xaa in position 7 is Ile, Leu, Met or Val
  Variant (9)..(9): Xaa in position 9 is any amino acid
  Variant (11)..(11): Xaa in position 11 is any amino acid
  Variant (12)..(12): Xaa in position 12 is Ile or Val
  Variant (14)..(15): Xaa in position 14 to 15 is any amino acid
  Variant (16)..(16): Xaa in position 16 is Ile, Leu or Val
  Variant (17)..(17): Xaa in position 17 is Ala, Cys, Gly, Ser or Val
  Variant (18)..(19): Xaa in position 18 to 19 is any amino acid
  Variant (21)..(22): Xaa in position 21 to 22 is any amino acid
  Variant (23)..(23): Xaa in position 23 is Phe, Ile, Leu or Met
  Variant (24)..(24): Xaa in position 24 is any amino acid
  Variant (25)..(25): Xaa in position 25 is Leu or Met
GKXXXXXGXGXXGXXXXXXAXXXXX

SEQ ID NO: 1529 - DNA, 903 bp, SACCHAROMYCES CEREVISIAE
  CDS (1)..(903)
atgctttatttgatcggacttggtctctcgtacaaatcagacattaccgttcgtggtttggaagctattaagaaatgttctagagtttatctagaacactataccagtatcctaatggctgcaagccaagaagagttagaatcttactatggtaaagagatcatcttggctgatagggaattagttgagactggttctaagcagatcctaaataacgccgataaggaagacgttgctttcttggtcgtgggcgatccatttggtgccaccacacacacagatttagttctcagagctaaacgtgaggcaattcccgtcgaaattattcataatgcgtccgttatgaatgcagttggggcatgtggcctacaactatacaatttcggtcaaaccgtttccatggttttctttaccgataattggagaccagactcatggtacgacaagatctgggaaaatagaaaaattggccttcatactttagtgttattggacatcaaagttaaggaacaaagcattgaaaatatggcccgtggcagactaatctacgaaccaccaagatacatgtctatcgctcaatgttgtgaacaattattagaaattgaagagaaaagaggtacaaaggcatacactcctgatactccagcagtcgcaattagtagattaggctcgagctcccaaagctttaagtctggtaccataagtgagttagccaattacgattcaggagagccacttcattcgcttgtcatcctcggcagacaatgtcatgaattggagctggaatacctgctagagtttgccgacgacaaagaaaagtttgggaaagatgtggcaaatgaccaagagtacttcaaacctgcggcatgggtcccacccacagaagacgacagcgacgagtaa

SEQ ID NO: 1530 - protein, 300 aa, SACCHAROMYCES CEREVISIAE
MLYLIGLGLSYKSDITVRGLEAIKKCSRVYLEHYTSILMAASQEELESYYGKEIILADRELVETGSKQILNNADKEDVAFLVVGDPFGATTHTDLVLRAKREAIPVEIIHNASVMNAVGACGLQLYNFGQTVSMVFFTDNWRPDSWYDKIWENRKIGLHTLVLLDIKVKEQSIENMARGRLIYEPPRYMSIAQCCEQLLEIEEKRGTKAYTPDTPAVAISRLGSSSQSFKSGTISELANYDSGEPLHSLVILGRQCHELELEYLLEFADDKEKFGKDVANDQEYFKPAAWVPPTEDDSDE

SEQ ID NO: 1531 - DNA, 984 bp, Zea mays
  CDS (30)..(893)
ttcaacttcggctcgagggaaagatcacaatgttgtacctcgtgggacttggtctctctgacgagacagatattactgtcaagggtcttgaggtcgttaagaaagcctccagggtctatctggaggcttatactagcattctgcttgtcgagcaatctgtcttggaatcgtactatggacgatccatcacggtagctgaccgtgagatggttgagtcaaacagcgacgagatcctccgaaatgcgcagaacgaagatgttgcgttccttgtagttggagatcccttcggagctaccactcatacggatctcgtgcttcgtgctcgggaactcgaaatccctgtccgaaccgttcccaatgcctccatcatgtccgggattggcgcatgcggtctacagctctacaattttggacaaaccgtgtccatggtttttttcactgatacatggaagcccgcatctttctacgatcggataaaggagaaccgtcaaatcggcttacatacgctagtcttggtcgatatcaaggttaaggagcagagtctcgaaaatatggcccgaggtcgtctggtctacgagcctcctcgctacatgactgttggccagtgtgcaaagcagatgctagagattgaggatgagcgtaaggagggtgtctataccaaggacagtctggccattggcgctgctcgcgtgggaggtaagacggagaagttcgtggccggtactttggaggagctttgctccaccgacgaggtgctagggcctcctcttcacagtctcgtcctccttggtcgaaggacacacgagctggagcttgactacgtccggcagtttgcggttgacaaggagaagtgggatagactatggaaagctgagtacggaaagcagctgtgaactgttgctaatattgtcatgaattcgtatcgcctttgataaaagtcctatcgtacaagcgagatttgcattattcagaacattactctcg

SEQ ID NO: 1532 - protein, 287 aa, Zea mays
MLYLVGLGLSDETDITVKGLEVVKKASRVYLEAYTSILLVEQSVLESYYGRSITVADREMVESNSDEILRNAQNEDVAFLVVGDPFGATTHTDLVLRARELEIPVRTVPNASIMSGIGACGLQLYNFGQTVSMVFFTDTWKPASFYDRIKENRQIGLHTLVLVDIKVKEQSLENMARGRLVYEPPRYMTVGQCAKQMLEIEDERKEGVYTKDSLAIGAARVGGKTEKFVAGTLEELCSTDEVLGPPLHSLVLLGRRTHELELDYVRQFAVDKEKWDRLWKAEYGKQL

SEQ ID NO: 1533 - DNA, 1392 bp, Zea mays
  CDS (25)..(1086)
ctcgaggccggccgggatgaaaacatgcgacacggaatagtagaaactcacctcaagcagcaagcacccgagcggccagctccagccccaccagagaaatacggcgtaaacgccgccggggacaaacccaggcgaccggggtgcctagctcgccgtttcttttcgccttctcctcgcaatttcttaggatcaacgccctactacacgacgggggttttccccttcggctgccactccgtcctttcgcagcctgccgccggcgccatgctgtacatcgtgggcctcggcctgggcgacgagcgcgacatcactgtgcgggggctcgatgccgtacgcagctgctccaagatatacatggaggcatacacatccctcctctccctcggcctcgacccggccgcgctcgccaacctggagaagctgtacgggaaggagataacggtcgccgatcgggagatggtggaggagcgtgtcgaccaggtgctaagcgaggctgccgacactgacgtcgccttccttgttgttggcgacccgttcggggcaactacacatactgatctggttgttcgtgccaagaaaatgggagtagaagtgaaggtgatccacaatgcatctgtcatgaatgcaattggagtttgtgggctacaactttaccgctatggagaaactatctcaataccattcttcacagacgaatggagaccagatagtttctatgagaagattcagaacaatcgccagcttgggctgcacacactttgcctgcttgatatccgtgtcaaggagccaacatgggaatctttagccagaggaaagaaagtctatgaaccaccaagattcatgactgtaaacactgcaataagtcagctttttgaggtggaggaagcacgtgggggatatgcatatcgcagggaaacattgtgcataggagtggcacgacttggaagtgatgatcagaagattgttgctgggcctatggagaagctactagatgttgattttggtccaccccttcactgcctgatcatagtgggagagactcatcctttggaagaagagatgctagagttttacatgatcaagtagtgatatacacaccctacacatgtgagttttcacttgtattgactaagggaatgcttagacttctgtccttgtcaatattggattgttgaatacttagccatttggatgtagaaccccaggaaatggtgcagtatgcgatttggagtgctggcagcttgtaaaacaaatctgtgctagcagtctaccattagtttacgtctccgaatcttgtttgaaacttgcatgtgaacgcaggcctccgtctcaaaatataatttgttttagattaaaaaaaaaaaaaaaaaatcgagagagggcgccggtacc

SEQ ID NO: 1534 - protein, 353 aa, Zea mays
MRHGIVETHLKQQAPERPAPAPPEKYGVNAAGDKPRRPGCLARRFFSPSPRNFLGSTPYYTTGVFPFGCHSVLSQPAAGAMLYIVGLGLGDERDITVRGLDAVRSCSKIYMEAYTSLLSLGLDPAALANLEKLYGKEITVADREMVEERVDQVLSEAADTDVAFLVVGDPFGATTHTDLVVRAKKMGVEVKVIHNASVMNAIGVCGLQLYRYGETISIPFFTDEWRPDSFYEKIQNNRQLGLHTLCLLDIRVKEPTWESLARGKKVYEPPRFMTVNTAISQLFEVEEARGGYAYRRETLCIGVARLGSDDQKIVAGPMEKLLDVDFGPPLHCLIIVGETHPLEEEMLEFYMIK

SEQ ID NO: 1535 - DNA, 1232 bp, Triticum aestivum
  CDS (73)..(894)
  misc_feature (1206)..(1206): n is a, g, c or t
  misc_feature (1208)..(1208): n is a, g, c or t
  misc_feature (1217)..(1217): n is a, g, c or t
  misc_feature (1219)..(1219): n is a, g, c or t
gccggccgggtcgggaccctccctccctccacgggagacgacagagcacggagaaagcgaacgaccgcggcgatgctctacatagtcggcctaggcctcggcgatgagcgcgacatcacggtgcgggggctcgacgccgtccgccgctgcgccaaggtctacatggaggcctacacctccctcctctctctcggcctcgacccagcctcgctcgctaacctcgagaagatgtacgacaaggagatcacggtcgccgaccgcgagatggtagaggagcgcgcggaccagatgctgagcgaggccgcggaagccgacgtcgccttcctcgtcgtcggcgacccgtttggggcgaccacacacactgatttggttgttcgtgccaagaacatgggggtagaggttaaggttatccacaatgcatctgtcatgaatgctattggcgtttgtgggttgcaactttaccgctatggagagaccatctctatacctttcttcacagagacatggagaccggatagtttctatgagaaaattcagaacagtcgtcgacttggcttgcatactctttgcctactagacatccgtgttaaggagccaacacttgagtccttatgcagaggaaagaaagtgtacgaaccagcaagattcatgaccgtgaacactgcaataagtcagcttttggaggtggaggaactgcatgggggatctgcatatggtccagattcgctatgtatgggtgtagctcgccttggaagcgatgatcagaagattgtggctggccccatgaagaaactactagatgttgattttggaccaccccttcactgtctcattatagtgggagagactcaccctgtggaacaagagatgctagaattctacatgatcaagtagtgatgagctttcgtatgaggaacttgtagtctagatgcatggtccccttatgaagaaaagaagctctcttgaagcgttgatgtttgcttgcactcgaagtgtgctgctggatcagcggctactcatataccgaatagacctcgagagatattgttacttattcacaaacgttgatcagaatactagctgctattgcaaggtcatcactgaattctcttgttcttccatgttgtatgtgcacacgtccatcaatttgaaagtttgcagacccatattgcattcgcacagcacggtcagtttgagaaggtttcncngcattgcangncaaaaaaaaaaaa

SEQ ID NO: 1536 - protein, 273 aa, Triticum aestivum
MLYIVGLGLGDERDITVRGLDAVRRCAKVYMEAYTSLLSLGLDPASLANLEKMYDKEITVADREMVEERADQMLSEAAEADVAFLVVGDPFGATTHTDLVVRAKNMGVEVKVIHNASVMNAIGVCGLQLYRYGETISIPFFTETWRPDSFYEKIQNSRRLGLHTLCLLDIRVKEPTLESLCRGKKVYEPARFMTVNTAISQLLEVEELHGGSAYGPDSLCMGVARLGSDDQKIVAGPMKKLLDVDFGPPLHCLIIVGETHPVEQEMLEFYMIK

SEQ ID NO: 1537 - DNA, 1288 bp, Glycine max
  CDS (290)..(1114)
ggtaacaccggttgttcaaaactataaatcaaaagctcagagaacccatcccgccgccgccgtgtgctccgaccgccacctccattcgccgtgtactctcactcccttaataattattgatttcttctcttactttttgctctcgctggagttgagtgtgatggtataggttaataggaaagaaaaactaagtgaggaaaggtgaaaaaagaattaattagagtggaagagtgtggttattttctgatttgagaagcaaataccaaagagtgaagaacaaaagaaaaaaatgttgtacataattggtttagggttgggtgatgagaaagacatcactctcaaaggtttggaagctgtgaagaagtgtgacaaggtttacatggaagcctacacttccctcctctcctttggtctctccaccaatggcatctccaacctggaaaaactatacggtaaacccattattcttgctgacagagaaatggtagaagaaaaggctgatgaaattctctctgaagctgatcatgcccatgttgctttccttgttgttggggatccttttggggctaccactcacactgacctggttgttcgagcaaagaagatggcaattgaagtcaaagtagtacacaatgcatctgtgatgaatgctattggagtttgtggtctacagctttaccgttatggggagaccgtttctataccattctttacagagacttggagacctgatagcttctatgaaaagattcaaagaaacctatcaatgggactgcacacgctttgcttgttagatattcgtgtgaaggaacccacactagaatctttgtgcagaggaagaaaagcttatgaaccacccagatatatgacaataaacacagccattgagcagctcttggagattgtgcaagcacgtgaagaacctgcctacactgaggatactgagtgtgttgggcttgcacggcttgggagtgaagatcagatgatagtagctggaacaatgaagcagttgcagatgattgattttggagcacctttgcattgccttgttataacaggcccgacccatcccgtggaggaagaaatgctggatttttacagatgcaggacatagatacaacattaagacagcaagaccggtgtaatttagcaaaatagacttcatttttttttgttgtaggagcccttgtattttttttcttcctgaaacactttttggtttctaatcagggccaaaagtgaactaaattcattggtgaatgaaaaattatgtttagcgtgtttgaag

SEQ ID NO: 1538 - protein, 274 aa, Glycine max
MLYIIGLGLGDEKDITLKGLEAVKKCDKVYMEAYTSLLSFGLSTNGISNLEKLYGKPIILADREMVEEKADEILSEADHAHVAFLVVGDPFGATTHTDLVVRAKKMAIEVKVVHNASVMNAIGVCGLQLYRYGETVSIPFFTETWRPDSFYEKIQRNLSMGLHTLCLLDIRVKEPTLESLCRGRKAYEPPRYMTINTAIEQLLEIVQAREEPAYTEDTECVGLARLGSEDQMIVAGTMKQLQMIDFGAPLHCLVITGPTHPVEEEMLDFYRCRT

SEQ ID NO: 1539 - DNA, 837 bp, Glycine max
  CDS (1)..(837)
atgctgtacataattggtttagggttgggtgatgagcaagacatcactctcaaaggcttggaagctgtgaagaagtgcagcaaggtttacatggaagcctacacttccctcctctcctttggtctctccaccaatggcatctccaacctggaaaaactatacggtaaacccattattcttgctgacagagaaatggtagaagaaaaggctgatgaaattctctctgaagctgatcatgcccatgttgctttccttgttgttggggatccttttggggctaccactcacactgacctggttgttcgagcaaagaagatggcaattgaagtcaaagtagtacacaatgcatctgtgatgaatgctattggagtttgtggtctacagctttaccgttatggggagaccgtttctataccattctttacagagacttggagacctgatagcttctatgaaaagattcaaagaaacctatcaatgggactgcacacgctttgcttgttagatattcgtgtgaaggaacccacactagaatctttgtgcagaggaagaaaagcttatgaaccacccagatatatgacaataaacacagccattgagcagctcttggagattgtgcaagcacgtgaagaacctgcatatactgaggataccgagtgtgttgggcttgcacggcttgggagtgaagatcagatgatagtagctggaacaatgaagcagttgcagatggttgattttggagcacctttgcattgccttgttataacaggccagacccatcctgtggaggaagaaatgctgtatttttacagatgcaggacatcgatacaacattaa

SEQ ID NO: 1540 - protein, 278 aa, Glycine max
MLYIIGLGLGDEQDITLKGLEAVKKCSKVYMEAYTSLLSFGLSTNGISNLEKLYGKPIILADREMVEEKADEILSEADHAHVAFLVVGDPFGATTHTDLVVRAKKMAIEVKVVHNASVMNAIGVCGLQLYRYGETVSIPFFTETWRPDSFYEKIQRNLSMGLHTLCLLDIRVKEPTLESLCRGRKAYEPPRYMTINTAIEQLLEIVQAREEPAYTEDTECVGLARLGSEDQMIVAGTMKQLQMVDFGAPLHCLVITGQTHPVEEEMLYFYRCRTSIQH

SEQ ID NO: 1541 - DNA, 825 bp, Glycine max
  CDS (1)..(825)
atgttgtacataattggtttagggttgggtgatgagaaagacatcactctcaaaggtttggaagctgtgaagaagtgtgacaaggtttacatggaagcctacacttccctcctctcctttggtctctccaccaatggcatctccaacctggaaaaactatacggtaaacccattatccttgccgacagagaaatggtagaagaaaaggcccatgaaattctctctgaagctgatcatggccatgttgctttccttgttgttggggacccttttggggctaccactcacactgaccttgttgttcgagcaaataagatgggaattgaagtcaaagtagtacacaatgcatctgtgatgaatgctattggagtttgtggtctacagctttaccgttatggggagactgtttctataccattctttacagagacgtggagacctgatagcttttatgaaaagattcaaagaaaccgaatgatgggactgcatacactttgcttgttagatattcgtgtgaaggagcccacactagaatctttgtgcaggggaagaaaagcctatgaaccacccaggtatatgacaataaacacagccattgagcagctcttggagattgtgcaagcacatgaagaacctgcctacactgaggatactgagtgtgttgggcttgcacggcttggtaatgaagatcagatgatagtagctggaacaatgaagcagttgcagttgattgattttggagcacctttgcattgccttgttataacaggcccgacccatcccgtggaggaagaaatgctggatttttacagatgcaggacatag

SEQ ID NO: 1542 - protein, 274 aa, Glycine max
MLYIIGLGLGDEKDITLKGLEAVKKCDKVYMEAYTSLLSFGLSTNGISNLEKLYGKPIILADREMVEEKAHEILSEADHGHVAFLVVGDPFGATTHTDLVVRANKMGIEVKVVHNASVMNAIGVCGLQLYRYGETVSIPFFTETWRPDSFYEKIQRNRMMGLHTLCLLDIRVKEPTLESLCRGRKAYEPPRYMTINTAIEQLLEIVQAHEEPAYTEDTECVGLARLGNEDQMIVAGTMKQLQLIDFGAPLHCLVITGPTHPVEEEMLDFYRCRT

SEQ ID NO: 1543 - DNA, 822 bp, Physcomitrella patens subsp. patens
  CDS (1)..(822)
atgttgtatgttgtgggcttggggcttggtgatgagaaggacatcacgttgagggggttggaggctgttcggaaatgtgacaaagtgtatttggaggcgtacacctccttgctggcgctcgggcttggccctgatgccaccacgacgctggagaagatttatgggcgaccagttgtagttgctgatcgtgagttggtcgaacagggcgctgaaggaattttagaggaagctcgcaccctgaatgtggcatttctagtcgttggtgacccgtttggagccacaactcactcggacttgcttgtcagagctaagaccttgggcattgatgtcgaggtagtgcacaatgcgtcgattatgaacgcagttggagcttgcggattgcaactctaccggtttggggaggccatctcgattcctttcttcactgatacatggcgacccgatagcttctatgataaaatcgaagcaaatcggaaaatcgggttgcacacattatgtctcttagacatccgagtgaaggagcaatcagttgaagctttgtgtaggggtaggaaagagtatgagcctcctagatacatgagcatcaacaccgccattgagcaattgcttgaagtagaggagacgcgtgcgggcaaagtgtatagtgaagaaactctgtgcgttggattggctcggttgggtactagcacacaaaagatagtcgccggctcaatgaaggagcttcttgatgtggactttgggcccccattgcatagtgtagttattgcaggtacaacacatgtgatggaagaagaattcctgtccttctacaaaccatcatag

SEQ ID NO: 1544 - protein, 273 aa, Physcomitrella patens subsp. patens
MLYVVGLGLGDEKDITLRGLEAVRKCDKVYLEAYTSLLALGLGPDATTTLEKIYGRPVVVADRELVEQGAEGILEEARTLNVAFLVVGDPFGATTHSDLLVRAKTLGIDVEVVHNASIMNAVGACGLQLYRFGEAISIPFFTDTWRPDSFYDKIEANRKIGLHTLCLLDIRVKEQSVEALCRGRKEYEPPRYMSINTAIEQLLEVEETRAGKVYSEETLCVGLARLGTSTQKIVAGSMKELLDVDFGPPLHSVVIAGTTHVMEEEFLSFYKPS

SEQ ID NO: 1545 - DNA, 849 bp, Halobacterium sp. NRC-1
  CDS (1)..(849): transl_table=11
atgcttaccggtgtcgttctcgcggcgactcgaaacccatacgacgccgcccgcccaactcggggcatgctcacgttcgtcgggctcggcctctacgacgaggcgtcggtcaccgtcgccggccgcgacgccatcgcggcggccgaccgcgtgttcgccgagttctacaccagccggctgatcggcaccgatgtcgccgccctcgaagcccaccacgacaccaccatcgagcgccgggaccgcgcgggcgtcgaacaacaccccgagccgatcctggacgccgccgccgacggcgacgccgtgttcctcacggccggcgacacgatgatctcgacgacacacgtcgacctccggatgcgcgccgcggaccgcggcatcgacacgcgagtgatccacgcgccgaccgccgcgtccgccgcggcaggcctcaccggcctccagaactaccgcttcggcaaggccacgacgctgccgttcccgtgggcgcacggggccgacggcgttcccggatcggtcaccgacaccatcgaggccaaccgcgagcgcggcctgcacacgctggtctacctcgacatcaaggtcgatcacccccgtgtcgacggggacgcctacatgaccgccagccaggcggccgacctgctcgcgaccaactgggacgcggacgccctcggggtcgtggtcgcgcgcgccggggcgccggacgcgacggtgcgggccgaccgcctgggtgcgctcgcggacgcggacttcggcagccccctgcatctgctcgtcgttccggggtcgctgcaccacatcgagcgcgacgcgctccgcgagctcgcgggcgcgccggcggacgcgctgtag

SEQ ID NO: 1546 - protein, 282 aa, Halobacterium sp. NRC-1
MLTGVVLAATRNPYDAARPTRGMLTFVGLGLYDEASVTVAGRDAIAAADRVFAEFYTSRLIGTDVAALEAHHDTTIERRDRAGVEQHPEPILDAAADGDAVFLTAGDTMISTTHVDLRMRAADRGIDTRVIHAPTAASAAAGLTGLQNYRFGKATTLPFPWAHGADGVPGSVTDTIEANRERGLHTLVYLDIKVDHPRVDGDAYMTASQAADLLATNWDADALGVVVARAGAPDATVRADRLGALADADFGSPLHLLVVPGSLHHIERDALRELAGAPADAL

SEQ ID NO: 1547 - DNA, 846 bp, Drosophila melanogaster
  CDS (1)..(846)
atgttctacctaatcggcctcggccttggcgacctgaaggacatcacggtcaagggtctggagatagtgaagcaatgcagtcgcgtctatctggagatgtacacctcgattctgggctgcagccttgaggatatgcaagagttctatggacgaccactgctgctagccgaccgcgatctggtggagcagggtgcggatgagatcctggcgggtgcgggcgaatccgatgttgcgctgctcgtggtgggcgacccctttggcgccaccacccacacagacttcatactgcgcgccaaggagaagaacatcccctacaaggtcatccacaatgcatcgatcatgaacgccgtcggctgctgcggcctgcaattgtacaaattcggcgagaccgtttcgattccgtactgggacgagacatggaagccggacagcttctacgacaagatcaagctgaatcgcctgcacaacatgcacacgctgtgcctgctggacatcaaggtgaaggagcccacgccggagtccttgatgcgcaaacgcaaggagtacatgccaccgcgtttcatgaccgtggcggaggcggctcatcagttgctgtccattgtggagaagaaggactcgctggagaagaacacagtgctcaacgagcagtcactgtgcgttggactggcccgtgttggccaggagtcgcagcagattgccgttggcacgctgcttgagatgcgctcgaccgatttgggcggaccgctgcactcgctcatcattcccgccaaggagatgcatccgctggaggtggagttcttgcagcagtatgcccccagcatcaagctggacgactacaaccactaa

SEQ ID NO: 1548 - protein, 281 aa, Drosophila melanogaster
MFYLIGLGLGDLKDITVKGLEIVKQCSRVYLEMYTSILGCSLEDMQEFYGRPLLLADRDLVEQGADEILAGAGESDVALLVVGDPFGATTHTDFILRAKEKNIPYKVIHNASIMNAVGCCGLQLYKFGETVSIPYWDETWKPDSFYDKIKLNRLHNMHTLCLLDIKVKEPTPESLMRKRKEYMPPRFMTVAEAAHQLLSIVEKKDSLEKNTVLNEQSLCVGLARVGQESQQIAVGTLLEMRSTDLGGPLHSLIIPAKEMHPLEVEFLQQYAPSIKLDDYNH

SEQ ID NO: 1549 - DNA, 789 bp, Encephalitozoon cuniculi GB-M1
  CDS (1)..(789)
atgggtgataaatctcccatcccaaaacctcccatgctctacctggttggatttggattgcactcgtacaaggacataactctcaggggactggaggctgtcaaaggcagtgccacggtgtatctcgaaagctacacatccatccacggcgagtcgctggatgcgtttgaaaagctcatagggaagaaggtgcatcttgcagaccgagccatgatggaacagacagacaaaatagttgacgagtcctgcagggagaacgtctccctacttgttgttggaactccgctgtttgcaacaacccactcggacataatgataagggcaaaggagaagggcgtggatgtggaggtgattcacaacgcctccatcataaacgtgttgggctgctgcgggctctactcatactcctttggaagagtagtgtccatcccatacttcacagagaggtggaagccaacaagcttttacgacaatatagtgaggaaccaccagagcaaccttcatacactatgtctcctggatatcaggacagatgaggacaggttcatgagcgttaacgaggccgtcgaccagattctggaggcagccgccattacagggtctccgcttatcaacgaagacaccaggatctttgcagtctgcagattcggatcgccttcagaagaaatagtctacgggaaaatcggggacctgaagctgaggtcgtttggggaccccctgcactcattgatagtacctgcagagctggacagggttgaggcggagctggttggatccctatttaagtaa

SEQ ID NO: 1550 - protein, 262 aa, Encephalitozoon cuniculi GB-M1
MGDKSPIPKPPMLYLVGFGLHSYKDITLRGLEAVKGSATVYLESYTSIHGESLDAFEKLIGKKVHLADRAMMEQTDKIVDESCRENVSLLVVGTPLFATTHSDIMIRAKEKGVDVEVIHNASIINVLGCCGLYSYSFGRVVSIPYFTERWKPTSFYDNIVRNHQSNLHTLCLLDIRTDEDRFMSVNEAVDQILEAAAITGSPLINEDTRIFAVCRFGSPSEEIVYGKIGDLKLRSFGDPLHSLIVPAELDRVEAELVGSLFK

SEQ ID NO: 1551 - DNA, 858 bp, Strongylocentrotus purpuratus
  CDS (1)..(858)
atgttgtttcttatcggtttgggccttggtgacgttaaagatgttacagtaaaaggattggaagccatcaaaaatgccaaacgtgtttatttagaagcctacacatccatcttaaccgtaggcaaagatgcattggagcagtattatggacgggagatcattttagccgaccgtgacctggttgaacaagggtcagatgagatctttgagggtgcaaggacggaggatatagcattcttagttgtcggcgatccatttggagccactacacacacagacctagttctgagagcgaagcaggaagggattgagtacaaggttatccacaatgcttccatcatgaatgctataggttgctgtggcttacagctctataactatggggagaccatctcaatagtgttctggaccgacacctggaaaccagatagctactatgataagatagcatctaacagatcaagaggtcttcacacgctgtgcctactagacatcaaaatgaaggagcagagtgtagaaaacctaatcaaagggcgtaagatctttgagcctccacgcttcctcacggtaccacaggctgcgtctcaacttcttgaaatcccagacaggaggaaagagaggggagacgactacacagcctacacagaagacacaatttgcataggggttgccagagtcggttccgatacccagcagatcgtatctggaacattacgagagctgacctccgttgacctcggagatccacttcactcattggttatcgctggtcacatgcatccagtcgagctagagatgctcaagcagtttgctgttaccccttccattttcgatgcattgctcgcagaaagcagatag

SEQ ID NO: 1552 - protein, 285 aa, Strongylocentrotus purpuratus
MLFLIGLGLGDVKDVTVKGLEAIKNAKRVYLEAYTSILTVGKDALEQYYGREIILADRDLVEQGSDEIFEGARTEDIAFLVVGDPFGATTHTDLVLRAKQEGIEYKVIHNASIMNAIGCCGLQLYNYGETISIVFWTDTWKPDSYYDKIASNRSRGLHTLCLLDIKMKEQSVENLIKGRKIFEPPRFLTVPQAASQLLEIPDRRKERGDDYTAYTEDTICIGVARVGSDTQQIVSGTLRELTSVDLGDPLHSLVIAGHMHPVELEMLKQFAVTPSIFDALLAESR

SEQ ID NO: 1553 - DNA, 852 bp, Nasonia vitripennis
  CDS (1)..(852)
atgttttatgtaataggtttgggtctgggtgacgcaaaagacgtgacagtaaaaggtttggaaattattaaaaaatgcgatcgagtctatctggaagcatacacttcgattttgacagttgggaaacaaaaacttgaagaattttatgggcgcagtgtcattatagctgacagggaacttgttgaaagtggagcagatgaaattctggaaaacgcagagcaacaagatgttgcattcctagttgttggtgatccttttggtgccacaactcatactgatctagtattaagggcaaaagaaaagaatataaaagttcaagttgttcataatgcttctatcataaatgctgttggatgctgtggccttcaactgtactcttacggagaagtagtttcaatacctctatggacagaaacttggaaaccagatagtttttatgataaaattattgaaaattatcagagaggtttgcatactctttgtctattagacataaaagtcaaggagccaactctcgaaagtattttgaaaaagaagaaagtttatatgccacccaagtttatgtcagtagcggaagcagcagatcaactattgcaaattatagagaataagacaaaagaaaatgaggacaaatcatctattagctcttcaagtcttgctgtcggacttgcaagagttggttctgatgatcaaaagatatttgtttgctcattgtctaaaatgagtaaagtagatcttggcccaccactacattgtcttgttataccaggacacagcctgcatcctcttgaatcagaatatttatcccagtatgcagatgacaaagctgaactggaaaaactaaatcattag

SEQ ID NO: 1554 - protein, 283 aa, Nasonia vitripennis
MFYVIGLGLGDAKDVTVKGLEIIKKCDRVYLEAYTSILTVGKQKLEEFYGRSVIIADRELVESGADEILENAEQQDVAFLVVGDPFGATTHTDLVLRAKEKNIKVQVVHNASIINAVGCCGLQLYSYGEVVSIPLWTETWKPDSFYDKIIENYQRGLHTLCLLDIKVKEPTLESILKKKKVYMPPKFMSVAEAADQLLQIIENKTKENEDKSSISSSSLAVGLARVGSDDQKIFVCSLSKMSKVDLGPPLHCLVIPGHSLHPLESEYLSQYADDKAELEKLNH

SEQ ID NO: 1555 - DNA, 921 bp, Aedes aegypti
  CDS (1)..(921)
atgttctacgtgattggcctcgggttgggtgaccccaaggatatcaccgtcaaggggctggagattgtgaagcggtgcgagcgggtctatctggaatcgtacacctcgataatgacttgcggacacgaaaaactggaggagttttacgggcggccgctgattctggcggatcgtgaactggtggagagcggtgccgatgacatcctccacaatgcccacacggtcgaggtggcctttctggtggtgggggatccgtttggcgccacgacccataccgatctgttgctgcgagccaaagagaagaaaattccctaccaggtgattcacaacgcgtccatcatgaacgctattgggtgctgtgggctgcagttgtaccacttcggggaaacggtgtccattccgtactgggatggtgactggcagccggatagtttcttcgataagatcatcctcaatctggaacatggattgcacacgctctgtctgttggacatccgggtcaaggaacccaccctggcatcgttgaccaagaagaaacgggagtacgaacccccgcggttcatgagctgcagcactgcgtgtgatcagttggcccaactaatccacaagcgcaggttaagtggagaggccaagcatcacttgttcaacgatcgcaacgtggtgatcggattggctcgagtcggtcacgaaacccaggagatcaaggcctgcaccctgaaggaaatgaagcaaaccgacctcggggaaccgctccactcgctgatcattccggccgagatgcacccgatggagattgagtttctgcagcagtttgccgacgaagatctgaaggagctgcagaagagagcccgccgcgatgagaccacgagcattttcaagctggaaacgacactggacagcactagcaattcaaacaactaa

SEQ ID NO: 1556 - protein, 306 aa, Aedes aegypti
MFYVIGLGLGDPKDITVKGLEIVKRCERVYLESYTSIMTCGHEKLEEFYGRPLILADRELVESGADDILHNAHTVEVAFLVVGDPFGATTHTDLLLRAKEKKIPYQVIHNASIMNAIGCCGLQLYHFGETVSIPYWDGDWQPDSFFDKIILNLEHGLHTLCLLDIRVKEPTLASLTKKKREYEPPRFMSCSTACDQLAQLIHKRRLSGEAKHHLFNDRNVVIGLARVGHETQEIKACTLKEMKQTDLGEPLHSLIIPAEMHPMEIEFLQQFADEDLKELQKRARRDETTSIFKLETTLDSTSNSNN

SEQ ID NO: 1557 - DNA, 861 bp, Anopheles gambiae str. PEST
  CDS (1)..(861)
atgttttacattattggacttggtcttggtgatccggaggacatcaccgtgaaagggctgaacataatcaaacagtgcgaacgcgtttatttagaatcgtacacgtcggtgctgtgctgtggacaggagaaattggaagaattctacggcagaaaactcattctagctgatcgagaaatggtcgagcaacgggccgatgacatcttggagggagccgaaagtgtatcggtagcgttcttggtcgtcggtgatccgtttggcgctaccacgcacaccgacctgatgcttcgagcgaaggaaaaaggcatcaaaacatccatcgttcacaatgcttcaattatgaatgccgtgggttgctgtggactgcagttgtatcatttcggtgaaactgtgtccattccatactgggacgatagctggaagccggacagtttttacgataaaatcgttgccaatctgaaacacggactgcacacgctatgccttttagatatcaaagtaaaggaaccaacgttagaatcgttgatgaagaaaaagcgcgaatacatgccgccacggtttatgtccgttagcgaagcggcagaccagttgctgcagattgtcgccaagaagtcggatgcagaagctggcgttcagcctgaccagcaaaacgaacacgggctaagcgaaaacacgcttattgtcggtcttgcgcgagtgggccatgacacacagcaaattctagcatgttcgcttagcgaaatgagaaacgtcgacctaggaccaccgttacattcgcttatcattcccaatgggcagcttcatccgttggaaatggaatttctgcagcagttcgccgaactaaagcaacaaatattgtga

SEQ ID NO: 1558 - protein, 286 aa, Anopheles gambiae str. PEST
MFYIIGLGLGDPEDITVKGLNIIKQCERVYLESYTSVLCCGQEKLEEFYGRKLILADREMVEQRADDILEGAESVSVAFLVVGDPFGATTHTDLMLRAKEKGIKTSIVHNASIMNAVGCCGLQLYHFGETVSIPYWDDSWKPDSFYDKIVANLKHGLHTLCLLDIKVKEPTLESLMKKKREYMPPRFMSVSEAADQLLQIVAKKSDAEAGVQPDQQNEHGLSENTLIVGLARVGHDTQQILACSLSEMRNVDLGPPLHSLIIPNGQLHPLEMEFLQQFAELKQQIL

SEQ ID NO: 1559 - DNA, 882 bp, Magnaporthe grisea 70-15
  CDS (1)..(882)
atgctttatctcatcggcctaggtctctcggacgagaccgatatcacggtcaagggtctcgagatcgtcaagacggcggctcgagtttacctcgaggcatacacaagcatcctacttgtcgaccagaaagttttggaatcctactatggccgctctatagaagttgccgatcgcgagatggtcgagtccaacagcgacgaaatcctccggaatgccgcgacagaagatgttgcgtttcttgtcgttggagatcctttcggtgcaacgacacatacggacctggttatccgcgcacgtcagctccagattccaatccgcacgattcccaacgcctccattatgtctgccatcggcgcatgtggcctacaactgtacaattttgggcagaccgtcagcatggttttcttcactgagaactggcggccatccagcttttacgaccgtgtggccgagaatcgcgctctaggcctacacacgctggttttgctggatatcaaggtcaaggagcccaactttgagagtttggccagggggaagttggtgtacgagcctccgaggtttatgaccgtcggaacatgcgccaggcaaatgctcgaggttgaggaggagaaggttaaggacggggctgaaggcggcgtctgtggaggcgaagctttggccattggcgctgcgagggtcggcggtaagacagaaaagtttgttgcgggcacgcttagggagcttgccgacggcgccgatgaattgcttggcgcgccattgcacagcctcgtgttgttggggaagaaaacacatgaactcgagcacgactttgtgcgggagtttgcgctcaaccaggataactgggatcgcatctggaaagcagactatcaaattcagccgtga

SEQ ID NO: 1560 - protein, 293 aa, Magnaporthe grisea 70-15
MLYLIGLGLSDETDITVKGLEIVKTAARVYLEAYTSILLVDQKVLESYYGRSIEVADREMVESNSDEILRNAATEDVAFLVVGDPFGATTHTDLVIRARQLQIPIRTIPNASIMSAIGACGLQLYNFGQTVSMVFFTENWRPSSFYDRVAENRALGLHTLVLLDIKVKEPNFESLARGKLVYEPPRFMTVGTCARQMLEVEEEKVKDGAEGGVCGGEALAIGAARVGGKTEKFVAGTLRELADGADELLGAPLHSLVLLGKKTHELEHDFVREFALNQDNWDRIWKADYQIQP

SEQ ID NO: 1561 - DNA, 828 bp, Apis mellifera
  CDS (1)..(828)
atgttacacgtgattggattaggccttggcgatgcaacagatataactgtaaaaggtcttgaaattattcgaatgagcgatcgtgtctatttagaatcatacacatcaattttgtctatcgatttgaaggatttggaacgattttacggatgttcgatacttgaggcggatagagaattagtggaaaataacgctgacgaaatattgccaaaggacgagaaggaaaatgttgcttttctagttgtgggtgatccatttggtgctactacacattccgatctaattttaagagctcgggcaaaaaatataaaggtaaaagttattcacaattgttccatattaactgcaataggatgttccggtttacaattgtatcgtttcggagaaactgtttctattccttattggagcatagattggcaaccgaatagtttctacgataaaataatctccaatagaagaagagatcttcacacgttatgtttattggatattaaaataaaagaacctactatagagagtattagcaaaaagaaaagagaatatatgccaacgcgatttatgagcgtgtcggaagctgttactcaactgttaaaaattatggaggaaaaaatggaagaaaataaggaggaaatggttttattaaataaatccagccttgcgattggtttagctcgtataggttgggacaatcaacgtatcgttgcttgttctcttgaaaaaatggcttctaccgatttgggtcctcctcttcattctttgatcattcctgctacaaacttacatcctctcgaatcagaatttatgtctctatatatgtacgaataa

SEQ ID NO: 1562 - protein, 275 aa, Apis mellifera
MLHVIGLGLGDATDITVKGLEIIRMSDRVYLESYTSILSIDLKDLERFYGCSILEADRELVENNADEILPKDEKENVAFLVVGDPFGATTHSDLILRARAKNIKVKVIHNCSILTAIGCSGLQLYRFGETVSIPYWSIDWQPNSFYDKIISNRRRDLHTLCLLDIKIKEPTIESISKKKREYMPTRFMSVSEAVTQLLKIMEEKMEENKEEMVLLNKSSLAIGLARIGWDNQRIVACSLEKMASTDLGPPLHSLIIPATNLHPLESEFMSLYMYE

SEQ ID NO: 1563 - DNA, 996 bp, Ustilago maydis 521
  CDS (1)..(996)
atggtcctctacgtcatcggcctcggccttgccgatgagaacgacatcactctcaagggattccatgctgtcaaatcgtccgagcgcatctatcttgaaagttacaccagcattctcatggtcacgggcttcaaggaacgtctcgaggcactctaccagaaacctgtcattctagcgcaccgcgagaccgttgagctcgaagctgaatcgatcctcgaaggtgctgccacttgcaatgtatccttcctcgtcgttggcgatcccctctcagcgaccacgcatactgacctcatcctgcgagcaaagcaaagctctccgcccattccagtcaagatcattcacaatgccagcatcatgaccgccatcggctcgagcggcttggctggatacaacttcggccagaccgtcagtgttcctttctggacagaggactggaagccagatagctggcttgaacgcatcggtgaaaatctccacattggccttcacaccctcgccttgtccgacatcaaagtccgcgaacagagtgcacaggacatgagcagaggcatcctccgctatcaagatccccgctacatgcttatccctcaactcatctcacaactcatctcggctgcgaattcacacaaagtcgattaccttgaccctaatcgcacacttgccatcgctctttgcagaatgggctcagaagacgaacgcatcgtctcgggaacattatcagagctcttggacatggcaaacccaagtccagagcaagctcaagcagaaggagcagaagacgacgcagacgagatggctagcgaagctgaactcgacaagcgacgtgctgcgagagcagaagcccgtgccaaaaatgtcttcggagaaccgcttcacagtctagttattgtgggcaagcgtctccatcctttggagcgcgattacgccgccaactatgcttgcccaggaagcaaattcgttcaggtcgccaacgacgtctacggttgcaaggaatga

SEQ ID NO: 1564 - protein, 331 aa, Ustilago maydis 521
MVLYVIGLGLADENDITLKGFHAVKSSERIYLESYTSILMVTGFKERLEALYQKPVILAHRETVELEAESILEGAATCNVSFLVVGDPLSATTHTDLILRAKQSSPPIPVKIIHNASIMTAIGSSGLAGYNFGQTVSVPFWTEDWKPDSWLERIGENLHIGLHTLALSDIKVREQSAQDMSRGILRYQDPRYMLIPQLISQLISAANSHKVDYLDPNRTLAIALCRMGSEDERIVSGTLSELLDMANPSPEQAQAEGAEDDADEMASEAELDKRRAARAEARAKNVFGEPLHSLVIVGKRLHPLERDYAANYACPGSKFVQVANDVYGCKE

SEQ ID NO: 1565 - DNA, 1017 bp, Cryptococcus neoformans var. neoformans B-3501A
  CDS (1)..(1017)
atgttctatgtcattggtctcggtctctctgatgagaaggatattaccgtcaagggcctcgaggccgtaaaaaactctgcacgagtctatctggagtcgtacacttccatcttgatggtcgagaaggaaaaacttgaagcgttctatgagcgaccggtcatcactgccacgagggagatggttgagctcgaggcggacgatattttgaaagatgcggacaaggtggatatctcgttcttggtcgttggtgatcctctcggagctaccacccacagcgacctccttctccgtgcccagtcgcgcaacatccctacttccatcatccacaacgcctccatcctcaccgccctcggctctaccggtctacaaatgtactccttcggccaaacgctttctttaccattctacactgaaacatggaggccggatagttggtacccccgattggaagagaatttgaggttgggcgtccatactttggtgttgttagatatcaaggttagggagcagagtgaggagaatatggcgaggggccgtttgatttacgagcctccgaggttcatgaacccagcccaggcgttcaaccaaatgctgcttaccgaatccattcgccatcccgctcccagacatccatcccaatcccaatccaccgaccaaacccaaaaaccctcccaacttccctcctcttcccactctgattccgaagaagaagaagaagaagaagcagaacgcgtagatccttatcccagcttgatgcccccatctcaaaccctcgccatctctctctcccgcgtcggcaccccttcccaacgcctcatctctggtacactctctgaactcgccgctctggatgaagaagaatttggagggcccttacattcagtggtgattgtgggtaagaggctgcacccgttagagttggagtatgcgggcaagtttgcggtaggtggggagcaaggggactggtggaaggttgggaaagaggtctatggtgtagagagggagactttttactaa

SEQ ID NO: 1566 - protein, 338 aa, Cryptococcus neoformans var. neoformans B-3501A
MFYVIGLGLSDEKDITVKGLEAVKNSARVYLESYTSILMVEKEKLEAFYERPVITATREMVELEADDILKDADKVDISFLVVGDPLGATTHSDLLLRAQSRNIPTSIIHNASILTALGSTGLQMYSFGQTLSLPFYTETWRPDSWYPRLEENLRLGVHTLVLLDIKVREQSEENMARGRLIYEPPRFMNPAQAFNQMLLTESIRHPAPRHPSQSQSTDQTQKPSQLPSSSHSDSEEEEEEEAERVDPYPSLMPPSQTLAISLSRVGTPSQRLISGTLSELAALDEEEFGGPLHSVVIVGKRLHPLELEYAGKFAVGGEQGDWWKVGKEVYGVERETFY

SEQ ID NO: 1567 - DNA, 858 bp, Strongylocentrotus purpuratus
  CDS (1)..(858)
atgttgtttcttatcggtttgggccttggtgacgttaaagatgttacagtaaaaggattggaagccatcaaaaatgccaaacgtgtttatttagaagcctacacatccatcttaaccgtaggcaaagatgcattggagcagtattatggacgggagatcattttagccgaccgtgacctggttgaacaagggtcagatgagatctttgagggtgcaaggacggaggatatagcattcttagttgtcggcgatccatttggagccactacacacacagacctagttctgagagcgaagcaggaagggattgagtacaaggttatccacaatgcttccatcatgaatgctataggttgctgtggcttacagctctacaactatggggagaccatctcgatagtgttctggaccgacacctggaaaccagatagctactatgataagatagcgtctaacagatcaagaggtcttcacacgctgtgcctactagacatcaaaatgaaggagcagagtgtagaaaacctaatcaaagggcgtaagatcttcgagcctccacgcttcctcacggtaccacaggctgcgtctcaacttcttgaaattccagacaggaggaaagagaggggagacgactacacagcttacacagaagacacaatttgcataggggttgccagagtcggttccgacacccagcggatcgtatctggaacgttacgagagctgacctccgttgacctcggagatcctctgcactcattggtcattgctggtcacatgcatccagtcgagctagagatgctcaagcagtttgctgttaccccttctattttcgatgcattgcttgcagaaagcagatag

SEQ ID NO: 1568 - protein, 285 aa, Strongylocentrotus purpuratus
MLFLIGLGLGDVKDVTVKGLEAIKNAKRVYLEAYTSILTVGKDALEQYYGREIILADRDLVEQGSDEIFEGARTEDIAFLVVGDPFGATTHTDLVLRAKQEGIEYKVIHNASIMNAIGCCGLQLYNYGETISIVFWTDTWKPDSYYDKIASNRSRGLHTLCLLDIKMKEQSVENLIKGRKIFEPPRFLTVPQAASQLLEIPDRRKERGDDYTAYTEDTICIGVARVGSDTQRIVSGTLRELTSVDLGDPLHSLVIAGHMHPVELEMLKQFAVTPSIFDALLAESR

SEQ ID NO: 1569 - DNA, 1038 bp, Cenarchaeum symbiosum
  CDS (1)..(1038): transl_table=11
atgctctggtttgtcggcatggggctggcgggagcagggtcaattccggccgacgcaaaaaatgttatagaacaagccgagatggtatacctggagggatttaccagcatagtcacagaatccgacgagcgtgcactagaagagatggccggcggcaaaatcatcccggcaaggcggtggatggtagaagatggaaaagagatactggataatgcgcgcacaaaaaaagtggtgttggtatcctacggggatccgtatactgccaccacccacatcgagcttaggacccgtgctgccgaattgaatatcccgactggctcaatacatgctgcatcgatactggcatctgcagttggcgagtgcggtctccaccattacaaaatgggcaggactgccactgtaacccgcgatccgcgggctgcatccaccccgtacagaataatatacgagaatcttgtatcggggagccacacggtcctgcttctagaatatgaccaggacgggggctttttccttgacccgggggatgcgctgggcctcctgattgaatatgaaaaggagcaaagaaggggcgtcataacagacgaattgtttgccgtgatagcctctagaataggcatgaaagggcagtcgatagtggcgggccgcatatcgtccctgaaagggtatgactttggggcccctccccatgcagtgataatccccgggggcctgcactttacagaatcagaggcgctgtcggcctctgccaaatgtctcgatgccccgtcggataattctgagcgcatgccaagcataccacagcagatggtcaaaaagtatgtccccatggtaagagacgcaatgaaaacaatagaggctctagaggacaaccctccagagtatggccatgtactggagaatgcggggcactatctccgggatgctgaggagttcatgggcaaaggagagggcgagctggccgtgctcagcgtgggatacgcggacggcctggtggacgcgctaagaatggcgcgcgggatagacagggtgcaatga

SEQ ID NO: 1570 - protein, 345 aa, Cenarchaeum symbiosum
MLWFVGMGLAGAGSIPADAKNVIEQAEMVYLEGFTSIVTESDERALEEMAGGKIIPARRWMVEDGKEILDNARTKKVVLVSYGDPYTATTHIELRTRAAELNIPTGSIHAASILASAVGECGLHHYKMGRTATVTRDPRAASTPYRIIYENLVSGSHTVLLLEYDQDGGFFLDPGDALGLLIEYEKEQRRGVITDELFAVIASRIGMKGQSIVAGRISSLKGYDFGAPPHAVIIPGGLHFTESEALSASAKCLDAPSDNSERMPSIPQQMVKKYVPMVRDAMKTIEALEDNPPEYGHVLENAGHYLRDAEEFMGKGEGELAVLSVGYADGLVDALRMARGIDRVQ

SEQ ID NO: 1571 - DNA, 879 bp, Coprinopsis cinerea okayama7
  CDS (1)..(879)
atgttctatgtcatcggcctggggctttgcgatgaaaaggatatcaccgttcggggcctcgaggcagtcaagggcgcgtctcgagtgtacctagaagcctacaccagcatcctgatgattcaacaagatcgcctcgaagagttctatggaaagccagtcatcctcgccgaccgcgacatggtcgaaacccaatccgacgaaatccttcgagacgcagacaaggaggacgtcgctttcctggttgtcggcgatccatttggagcgactacacatacagatatcatccttcgagcccgtgcacttggaattcagacaagagttatccataatgcctcgatcatgaacgcggttggagcgtgtgggctgcagctgtacaactttggacagaccgtctcgctggttttcttcacggagacctggaagccggacagctattacgacagggtgaaggagaacgtccagctcgggatgcacacgttggtactgctggatatcaaggtcaaggagcagagcgaagagaacctggcacgaggacgcaaaatctacgagccgccaaggtacatgtcaatacctactgctgtttcccagatgctagatacggaatcaacccgacaagaaaacgtcctcaatcccgaatcgacgctcgcgatcgctctctcaagagtcggtggagacggaaaccaacagcgaatcgtagccggtactctcaaggagcttcaaggccagcctccagaggtcttcggggagccccttcacagcatcgtgattgtcggtaaacgcgtgcactaccttgaaatcgagtatgcggaagctttcgctgtggacaaggagaactggagacgagtagcacgagacgtatatggatgtgccggtctgtaa

SEQ ID NO: 1572 - protein, 292 aa, Coprinopsis cinerea okayama7
MFYVIGLGLCDEKDITVRGLEAVKGASRVYLEAYTSILMIQQDRLEEFYGKPVILADRDMVETQSDEILRDADKEDVAFLVVGDPFGATTHTDIILRARALGIQTRVIHNASIMNAVGACGLQLYNFGQTVSLVFFTETWKPDSYYDRVKENVQLGMHTLVLLDIKVKEQSEENLARGRKIYEPPRYMSIPTAVSQMLDTESTRQENVLNPESTLAIALSRVGGDGNQQRIVAGTLKELQGQPPEVFGEPLHSIVIVGKRVHYLEIEYAEAFAVDKENWRRVARDVYGCAGL

SEQ ID NO: 1573 - DNA, 858 bp, Aspergillus oryzae
  CDS (1)..(858)
atgctctacctcgttgggttgggtcttgccgatgagactgacattactgtcaaaggcttagaggtggtgaaaagggcggaaagggtctacctcgaagcatatacaagtattctgctcgtcaacaaagagaaactagaagctttctatggacgtcctgttattgaagcagaccgtgaaaaggtcgagagcggaagcgatgagattctcgctggagcagataaaacagatgttgcattcctagtcgtcggcgatccttttggcgccaccacccatacggacctcgttctgcgcgcccgtgaactgggcatcgaatctaaggtcatcccgaacgcatcgatcatgtccggtattggttgcacgggactgcaattgtataacttcggtcaaactgtcagcatggttttcttcacagaaaactggaagccctcgtcatactacgataagattaaggagaacatttcactgggccttcacaccctcgtgctcttggacattaaggtcaaggagcagtcgtacgagaacatggcccgaggacgcctgatctacgagcctccgagatatatgaccgttgcgcagtgcgccagtcagatgttggagaccgaggaggagcgcaaggaaggtgtttatggacctgacagcctcgcggtcggagctgcgagagttggagccccggaccagaaattggtcgtcggaactctgaaggaattggcagaggtcgagatgggcgcacctcttcacagtctcgttctcctgggaaggagggcgcatgacttagagaaggactacattcgagaatttgccgtggacaaagcgacttttgatgccagttggcagaagggttacggcgctacttcatga

SEQ ID NO: 1574 - protein, 285 aa, Aspergillus oryzae
MLYLVGLGLADETDITVKGLEVVKRAERVYLEAYTSILLVNKEKLEAFYGRPVIEADREKVESGSDEILAGADKTDVAFLVVGDPFGATTHTDLVLRARELGIESKVIPNASIMSGIGCTGLQLYNFGQTVSMVFFTENWKPSSYYDKIKENISLGLHTLVLLDIKVKEQSYENMARGRLIYEPPRYMTVAQCASQMLETEEERKEGVYGPDSLAVGAARVGAPDQKLVVGTLKELAEVEMGAPLHSLVLLGRRAHDLEKDYIREFAVDKATFDASWQKGYGATS

SEQ ID NO: 1575 - DNA, 834 bp, Arabidopsis thaliana
  CDS (1)..(834)
atgttgtacattatagggttaggtttaggagatgaaaaagatataaccttgagaggactcgaggctgttaagaaatcacagaaagtatacatggaagcttacacttctcttttgtcctttggtctctctgctgatggactttccaatcttgaaaagttctatgggaaaccaattatacttgctgatagagaaatggtggaagaaaaggctggtgatatgattgatgaagccattgataatgatgtcgcttttctcgttgttggtgatcctttcggagctacaacgcatagtgatcttgttgttcgagctaagacactcggtgtaaaagtagaggtagtgcacaatgcatcggtgatgaatgctgttgggatttgtggattgcagctttaccattatggagagactgtttcgatcccattctttaccgagacttggagacctgatagtttttatgagaagatcaagaagaaccgctctcttggacttcacactctctgtttgctagatatccgagtgaaggagcctacttttgaatctctatgcagaggagggaagaaacagtatgaaccgccgaggtatatgagtgttaatacagcaatcgagcagcttctggaagttgagcaaaagcatggagattctgtttatggtgaagacacacagtgtgtgggctttgcccggcttggctctgaggaccagacgatagttgcagggacgatgaagcaactcgaaagcgttgattttggagcaccgttgcattgtcttgtgatagtaggcgagactcatcccgtggaagaagagatgttagagttttacaaatacaaaagtggaaactaa

SEQ ID NO: 1576 - protein, 277 aa, Arabidopsis thaliana
MLYIIGLGLGDEKDITLRGLEAVKKSQKVYMEAYTSLLSFGLSADGLSNLEKFYGKPIILADREMVEEKAGDMIDEAIDNDVAFLVVGDPFGATTHSDLVVRAKTLGVKVEVVHNASVMNAVGICGLQLYHYGETVSIPFFTETWRPDSFYEKIKKNRSLGLHTLCLLDIRVKEPTFESLCRGGKKQYEPPRYMSVNTAIEQLLEVEQKHGDSVYGEDTQCVGFARLGSEDQTIVAGTMKQLESVDFGAPLHCLVIVGETHPVEEEMLEFYKYKSGN

SEQ ID NO: 1577 - DNA, 897 bp, Ashbya gossypii
  CDS (1)..(897)
atgttgtttctggtcgggctgggactgtcgtcgcacgaggatatcacggtgcgagggctgaatgccgtgaaacggtgtgcgcgggtgtacctggagcactacacgtcgatcctaatgacggcttcgaaggaagagctggagggcttctacgggaagccggtggtgctggcagaccgggagatggtggagtcggggtgcgaggagatcttgcgggacgcagacaaggaggacgtggcgttcctggtggtgggcgacccgttcggggcgacgacgcacacggacctggtgctgcgggccaagaaacagggcatcgtggtggaggtggtgcacaatgcttccgtgatgaacgcagtgggctcgtgcggcttgcagctgtacaacttcgggcagacgatctcgatggtgttcttcacggacagctggcggccggactcgtggtacgacaaggtactggagaaccggcgcatcgggctgcacacgctggtgctgctggacattaaggtcaaggagcagagccccgaaaacctggcgcgcggccgcctgatctttgagccgccacgttacatgtcgatctcgcagtgctgcgaacagttgctggaggtcgaggagaagcgcggccagcaggcgtacacgccggacacgccctgcgtcgccatctcgcgcctgggtgcgccgacgcaacacatgaagtccggctcgatccacgagctggctgagtacgacgccggcgagccactgcattcgcttgtcatactgggcagacagtgccacgagctggagttggagtacctgcttgagttcagtgaggaccaggaacgcttcaaggaccaggtccaccgcgaccaagagttcttcaagccggccccatgggtccctccgccggaggacgaggactaa

SEQ ID NO: 1578 - protein, 298 aa, Ashbya gossypii
MLFLVGLGLSSHEDITVRGLNAVKRCARVYLEHYTSILMTASKEELEGFYGKPVVLADREMVESGCEEILRDADKEDVAFLVVGDPFGATTHTDLVLRAKKQGIVVEVVHNASVMNAVGSCGLQLYNFGQTISMVFFTDSWRPDSWYDKVLENRRIGLHTLVLLDIKVKEQSPENLARGRLIFEPPRYMSISQCCEQLLEVEEKRGQQAYTPDTPCVAISRLGAPTQHMKSGSIHELAEYDAGEPLHSLVILGRQCHELELEYLLEFSEDQERFKDQVHRDQEFFKPAPWVPPPEDED

SEQ ID NO: 1579 - DNA, 858 bp, Aspergillus fumigatus
  CDS (1)..(858)
atgttgtatcttgttggtcttggtctcgctgatgaaactgacatcactgtaaaaggcctcgaggttgtcaagagagccgagcgggtttaccttgaggcatacacaagcattctgctagtgagcaaagagaagctagaagcgttctatggacgtcccgttatcgaagcagatagggaacttgttgagaccggcagtgatgagatcctggctggggccgacaaggcggatgttgcattccttgtagttggcgatccttttggagccacgacacatacggacttggttctccgagctcgagagatgggcatcgaatccaaagttatcccgaacgcgtcaatcatgtccggcattggctgcaccggtctgcaactctacaatttcggacaaactgtgagcatggtgttcttcacggagaactggaagccgacctcttactacgaccgggtcaaagaaaacgttcagttgggtctccacacattagtcctcttggatatcaaggtcaaggagcaatcgtatgagaacatggctagaggacggaggatatttgaacctccaaggtacatgaccgttgcccaatgtgcgagccaaatgctggaaaccgaggaagaacgaaaggaaggtgtctttggacccgacagccttgcggttggagctgctagagtcggcggtcctgaccagaaactggttgtgggcactctcaaagaactgtcagaggtggacatgggaccgcctttgcacagcttggtgttgcttggaagaaaagcacatgatctggagcgactttatatcagagaatttgctgtggataaggcaacctttgatgccagctggaacaaagggtatggggcaacttcatga

SEQ ID NO: 1580 - protein, 285 aa, Aspergillus fumigatus
MLYLVGLGLADETDITVKGLEVVKRAERVYLEAYTSILLVSKEKLEAFYGRPVIEADRELVETGSDEILAGADKADVAFLVVGDPFGATTHTDLVLRAREMGIESKVIPNASIMSGIGCTGLQLYNFGQTVSMVFFTENWKPTSYYDRVKENVQLGLHTLVLLDIKVKEQSYENMARGRRIFEPPRYMTVAQCASQMLETEEERKEGVFGPDSLAVGAARVGGPDQKLVVGTLKELSEVDMGPPLHSLVLLGRKAHDLERLYIREFAVDKATFDASWNKGYGATS

SEQ ID NO: 1581 - DNA, 900 bp, Candida albicans
  CDS (1)..(900): transl_table=12
atgttgtacctcattgggttagggttgtcatacgaatcggacatcacagttaggggattggagacagttaagaaatgtaagagggtgtacctcgaggcatacacctcaattttgatggcagccaaccaggagtcattggaaaagttctacagcagagaaatcatattggctgaccgtgagcttgtggagacagggtcagacgatattttgaaagatgccgacaaggaggatgtggcatttttggttgtgggagacccatttggggccacaacacacacagacttggtcattcgtgcacgtgaattggggatcaaagtcgagaccatccacaatgcgtcggtgatgaacgccgtgggagcatgtgggttgcagttgtaccagtttggacagactgtgtcgttagtgtttttcaccgactcatggaagccagactctttctatgggaagatcatggagaacagaaagattgggttgcacactttattgttgctcgatatcaaggtgaaggagcagagcatcgagaacatggctagaggcaggttgatctatgaaccacctagatatatggacattgccactgcagcacaacaattgttagagattgagtcgatcagacaggaacaggcatacacacccaacacaccgtgcgtggccatttcgcgattggggtcaccaacacagacatttaaagccggaacattgcaggagttgagcgagtacgattctggtgagccattgcactcgttggtgatgcttgggagacaggtgcacgagttggagttggagtacttgtaccagtttgttgacgacaaggagaagttcaagaaatttgttgaacaagatcaagagtttttcaaaccagctccgtatgttccaccggaggatgtggatagtgaatag

SEQ ID NO: 1582 - protein, 299 aa, Candida albicans
MLYLIGLGLSYESDITVRGLETVKKCKRVYLEAYTSILMAANQESLEKFYSREIILADRELVETGSDDILKDADKEDVAFLVVGDPFGATTHTDLVIRARELGIKVETIHNASVMNAVGACGLQLYQFGQTVSLVFFTDSWKPDSFYGKIMENRKIGLHTLLLLDIKVKEQSIENMARGRLIYEPPRYMDIATAAQQLLEIESIRQEQAYTPNTPCVAISRLGSPTQTFKAGTLQELSEYDSGEPLHSLVMLGRQVHELELEYLYQFVDDKEKFKKFVEQDQEFFKPAPYVPPEDVDSE

SEQ ID NO: 1583 - DNA, 897 bp, Candida glabrata
  CDS (1)..(897)
atgttgtatcttattgggttgggtctatcatacaagagtgatataactgtacgtggtttggaagccgtcaagaattgtactagagtgtatctagagcactacacaagtattttgatggctgcttccaaagaagaattagaagaattctacgggaaagaagttattttggcagatagagagttagttgaaagtggctctgccgatattttgcgtgatgcagacaaagaaaatgttgcatttttggttgtcggcgatccttttggtgctactacacatactgatcttgttcttagagctaagaaggataaaatcccagtagaggtaatccacaatgcatctgttatgaatgccgtgggatcatgtggtttgcaactctataactttggccaaacaatctccatggttttcttcacagatagttggagaccagattcttggtatgacaaggtcatggagaataggaaaattggccttcacacacttgtactactagatatcaaggtcaaggaacaaagtttagaaaacatggcaagaggcagactaatctacgagccaccaagatacatgagcatcgctcaatgctgccaacagctactggaaatcgaggaactacgggccgaaaaagcatacactgcagataccccagttgtaggtattagcagattaggctctccaacacaaagttttaaggccggtactataaaagagcttgcagaatatgatgcgggggagccattgcattctctggtcattctaggtagacaatctcatgaactggaattggagtatctattggaatttactgacaacaaagagaagtttaaaaacgacgttatagcagatcaggaatactttaaaccagctccctgggttcctcctgttgaagaagaagactaa

SEQ ID NO: 1584 - protein, 298 aa, Candida glabrata
MLYLIGLGLSYKSDITVRGLEAVKNCTRVYLEHYTSILMAASKEELEEFYGKEVILADRELVESGSADILRDADKENVAFLVVGDPFGATTHTDLVLRAKKDKIPVEVIHNASVMNAVGSCGLQLYNFGQTISMVFFTDSWRPDSWYDKVMENRKIGLHTLVLLDIKVKEQSLENMARGRLIYEPPRYMSIAQCCQQLLEIEELRAEKAYTADTPVVGISRLGSPTQSFKAGTIKELAEYDAGEPLHSLVILGRQSHELELEYLLEFTDNKEKFKNDVIADQEYFKPAPWVPPVEEED

SEQ ID NO: 1585 - DNA, 903 bp, Debaryomyces hansenii
  CDS (1)..(903)
atgttatacttgattggattaggtttgtcatatgaaagtgatatcactgttcgtgggttagaaacaattaaaaaatgtaaaagagtttatttagaagcttatacatcgatcttaatggccgccaaccaagaatcattggaggctttctatggacgtgaaattatattagcagacagagaattagtagagggtgggtctgataaaatcttagaaaatgctgacgaggatgatgtagcctttttggttgttggtgacccgtttggtgcaacaacgcatacagatttaatcatcagggcgagagaattaaacatcaaggttgaggcaattcataacgcatctgtcatgaatgctgtcggagcatgtggtttacaattgtaccaatttggtcaaactgtttccttggtatttttcacagaaacatggaagccggactcgttttacaataaaatcatggaaaatagaagaattggcttgcatacattacttttgttagatatcaaagtcaaggagcagagtattgaaaatatggcgaggggaaagttgatatatgagcctccaagatatatgaatatagaaacggcggccagtcaattattagaaattgaagaaatgagacaagaaaaggcctatactccaaatacgccatgtgtagctatttctagattggggtctcctgaacagacttttaaggctggtactttacaagaattatccgagtatgattctggtgaaccattacattcattggttatgttaggtagacaagttcatgatttagaattggaatacctatatgaatatgtcgataataaagaacaattcaaaaagtttgtggaagaagatcaagaatttttcaaacctcctccatatgttcctccagaagatgaaaatttaagcgaataa

SEQ ID NO: 1586 - protein, 300 aa, Debaryomyces hansenii
MLYLIGLGLSYESDITVRGLETIKKCKRVYLEAYTSILMAANQESLEAFYGREIILADRELVEGGSDKILENADEDDVAFLVVGDPFGATTHTDLIIRARELNIKVEAIHNASVMNAVGACGLQLYQFGQTVSLVFFTETWKPDSFYNKIMENRRIGLHTLLLLDIKVKEQSIENMARGKLIYEPPRYMNIETAASQLLEIEEMRQEKAYTPNTPCVAISRLGSPEQTFKAGTLQELSEYDSGEPLHSLVMLGRQVHDLELEYLYEYVDNKEQFKKFVEEDQEFFKPPPYVPPEDENLSE

SEQ ID NO: 1587 - DNA, 864 bp, Gibberella zeae
  CDS (1)..(864)
atgctgtacctcgtaggactcggtctttcagacgagacagatattactgtcaagggcctggaggttgtcaagaaggcttccagggtctatcttgaagcctacactagcattctgctggttgagcaatccgtcttggaatcatactatggtcgctctatcacagtagctgaccgtgaaatggtcgaatccaacagcgaagagatcctacgaaatgcgcagaacgaggatgtcgcattccttgtcgttggtgatccttttggtgcgacaacacatacagatctcgttcttcgtgcacgagaacttgagatccctgtccgaacagttcccaatgcctccatcatgtccggtatcggtgcctgcggtcttcagctttacaactttggtcagaccgtgtccatggtcttcttcacagacacctggaagcctgcatctttctacgaccgcataaaggagaatcgccagattggccttcatacattggttctagtggatatcaaagtcaaggagcagagtctcgagaacatggctcgtggtcgcctcgtctacgagccccctcgctacatgaccgtgggccaatgtgcccagcaaatgttggaaattgaggaggagcgcaaggagggcgtatacgccaaagacagtcttgccattggtgctgctcgtgtaggaggcaggacagagaaattcgtggctggtacgctggaagaactttgctctactgatgaggagcttggtcctcctcttcacagtcttgttcttcttggacgaaggacacatgagctggagctcgactacgtgcgacaatttgctgttgacaaggagaagtgggacaaaatatggaacgccgagtatggaaaacaactttga

SEQ ID NO: 1588 - protein, 287 aa, Gibberella zeae
MLYLVGLGLSDETDITVKGLEVVKKASRVYLEAYTSILLVEQSVLESYYGRSITVADREMVESNSEEILRNAQNEDVAFLVVGDPFGATTHTDLVLRARELEIPVRTVPNASIMSGIGACGLQLYNFGQTVSMVFFTDTWKPASFYDRIKENRQIGLHTLVLVDIKVKEQSLENMARGRLVYEPPRYMTVGQCAQQMLEIEEERKEGVYAKDSLAIGAARVGGRTEKFVAGTLEELCSTDEELGPPLHSLVLLGRRTHELELDYVRQFAVDKEKWDKIWNAEYGKQL

SEQ ID NO: 1589 - DNA, 897 bp, Kluyveromyces lactis
  CDS (1)..(897)
atgttgtactttattggattaggtctttcttacgaaacagatatcaccgtcagaggcttgaatgccatcaagcaatgttcgagagtgtacttggagcactacacttccatattgatgacagcttctctagaagaactagaggaattttatggcaagaaagttacactagctgacagggaacttgtcgaatcgggagctgaagaacttctccgtgatgccgataaagaagatgttgcgtttttggttgtcggtgacgtttttggagccaccactcatactgacttggtgttgcgtgccaagcaaaggaatattccagtagaagtcatccataacgcgtctgttatgaatgcagtaggatcatgtgggttgcaactatacaattttggtcaaacgatctctatggtctttttcaccgatagttggagaccagattcctggtacgacaagatatgggaaaaccggaaaatcgggttgcacaccttggttcttctagatatcaaagtgaaggaacagagtatagagaatatggctcgtggaagactcatttatgagcctccaagatacatgagtattgcacaatgttgtgaacaactattggaaattgaagaaacaagaggcactgaggcatatactcctgatactccctgtgtagcaatctcaagactaggttctgcaagccaaaccttcaaagcaggtaccatcaaagagctagccgaatatgattctggtgaaccattgcattctttagttatactcggtaggcaaacccatgaattggaaatcgagtatttgctcgaattctgtgacgatagagaaaaattcaagcaagatgtcgccagtgatcaagaatatttcaaaccaccagcatgggttccacctccagaagatgaagattag

SEQ ID NO: 1590 - protein, 298 aa, Kluyveromyces lactis
MLYFIGLGLSYETDITVRGLNAIKQCSRVYLEHYTSILMTASLEELEEFYGKKVTLADRELVESGAEELLRDADKEDVAFLVVGDVFGATTHTDLVLRAKQRNIPVEVIHNASVMNAVGSCGLQLYNFGQTISMVFFTDSWRPDSWYDKIWENRKIGLHTLVLLDIKVKEQSIENMARGRLIYEPPRYMSIAQCCEQLLEIEETRGTEAYTPDTPCVAISRLGSASQTFKAGTIKELAEYDSGEPLHSLVILGRQTHELEIEYLLEFCDDREKFKQDVASDQEYFKPPAWVPPPEDED

SEQ ID NO: 1591 - DNA, 864 bp, Neurospora crassa
  CDS (1)..(864)
atgctgtacctcgttggtctcggtctctctgatgagacagacattaccgtcaagggtctcgaagttgtcaagaaggccgagcgtgtctacctcgaggcttacaccagcatcctccttgtggaccaggctactcttgaatcctactatggccgccctatcgtcgtcgccgaccgcgaaatggtcgagtccaacagcgacgagatcctccgcgatgcggacaaagtcgatgtagccttctgcgtcgtcggcgacccattcggcgccaccacgcacacggacctggtgctgcgcgcgcgcgagctaggcatccaggtgcgcaccgtgcctaacgcctccatcatgagcggcatcggagccgcgggtctgcagctgtacaactttggccagacggtcagcatggtgttcttcctcgataactggcggcccgcgagcttctacgaccgtatcaaggagaaccgctccatcggcctgcacacgctcgtcctgctggacatcaaggtcaaggagcagagcctggagaacatggcgcgcggtaggaagatctacgagccgcctaggtatatgacggtcggcacctgcgcgcagcagatgctggagattgaggaggagaagcaggagggtgtttatggtcccgaaagtctggccattggctgcgcccgtgttggtggaaagacggagaagttcgtgtcgggcacgctcaaggagctctgtgatgctgatgatctgctgggtcccccgctgcacagcttgatcctcttgggacggaggacgcacgagctcgagcacgactttgtgagggagtttgctgtcaacaaggagaactgggacaggatatggaaggctgaatactgtggaaagcagtag

SEQ ID NO: 1592 - protein, 287 aa, Neurospora crassa
MLYLVGLGLSDETDITVKGLEVVKKAERVYLEAYTSILLVDQATLESYYGRPIVVADREMVESNSDEILRDADKVDVAFCVVGDPFGATTHTDLVLRARELGIQVRTVPNASIMSGIGAAGLQLYNFGQTVSMVFFLDNWRPASFYDRIKENRSIGLHTLVLLDIKVKEQSLENMARGRKIYEPPRYMTVGTCAQQMLEIEEEKQEGVYGPESLAIGCARVGGKTEKFVSGTLKELCDADDLLGPPLHSLILLGRRTHELEHDFVREFAVNKENWDRIWKAEYCGKQ

SEQ ID NO: 1593 - DNA, 852 bp, Schizosaccharomyces pombe
  CDS (1)..(852)
atgttttatttaattggattaggattatttgatgaaaaggatattaccttaagaggcctagaaacagtaaaaaaatgtcagcgtatatatcttgaggcatatacgtccattttgctcgttcagaaggaaaaattagaagaactttatggtaaagaggttatccttgctgatcgtgaaatggtagagagcagtagtgatgaaatcttgaaagacgctgacaattgtgatgttgcaatgcttgttgttggtgatccgatgggagctaccactcatgctgatctagttataagagctcgtgagcttaagattcctgttcgcatgatacacaatgcctccattatgaacgctattggtgcatgtggtttacaactctacaagtttggtcaaacagtcagtcttgtcttcttcgaaaacaattaccgtcctcaaagtttctatgaccacattaaagagaacgttagtttgggacttcataccttagttttgctggatatcaaggtaaaggagcaaagctgggaaaatcttgctcgaggcaggaaagtatacgaacctcctcgctatatgtctgctagtttggctgctcagcagatgttggaagtcgaagaggatcgtcaagaaaatatatgcacaccagactctttatgtgtggctgttggaagaatgggttccgatgatcaagttatatttgcaggcacattgcaagagttagctgagcatgatataggtcctccattgcacagcgtggttctcgtcggtagagatgttcacgatttagaattagaatttctacgtgcgtacgcagtcaatctcgagaactttgatcgtgtcgcaaaaacatacttggagaagtaa

SEQ ID NO: 1594 - protein, 283 aa, Schizosaccharomyces pombe
MFYLIGLGLFDEKDITLRGLETVKKCQRIYLEAYTSILLVQKEKLEELYGKEVILADREMVESSSDEILKDADNCDVAMLVVGDPMGATTHADLVIRARELKIPVRMIHNASIMNAIGACGLQLYKFGQTVSLVFFENNYRPQSFYDHIKENVSLGLHTLVLLDIKVKEQSWENLARGRKVYEPPRYMSASLAAQQMLEVEEDRQENICTPDSLCVAVGRMGSDDQVIFAGTLQELAEHDIGPPLHSVVLVGRDVHDLELEFLRAYAVNLENFDRVAKTYLEK

SEQ ID NO: 1595 - DNA, 903 bp, Yarrowia lipolytica
  CDS (1)..(903)
atgcttcatctgattggcctgggtctgtcccacgaaaccgacatcactgtccgaggtctggagaccatcaaaaagtgcaagcgagtctacctcgaggcgtacacttcgattctcatggccgccgagaaggagaccctggagaagttctacggcaaggagctcattctggccgaccgagagatggtcgagcaggcatccgacgacattctggccggcgcccaggaggacgatattgcatttctggtggtgggagacccctttggagccaccacccataccgacttggtgattcgagcccgagagctgggaatcaaataccagactatccacaacgcctcggtcatgaatgctgttggagcctgcggtctgcagctgtacaactttggccagaccgtgtctctcgttttcttcaccgattcatggaagcccgattctttctatgacaagatccacgagaaccgaaagattggtctgcacaccctggttcttcttgacatcaaggtcaaggagcagagcattgaaaacattatgcgaggccgaaacgtctttgagcctccccgatacatgtctattgagcaggctgcttcccagctgctggagattgaggaatctcgagatgagaaggtgtactgttccgacaccccagctattgctgtctctcgactaggatctcctcgacaatgcatcaaggccggttctctgggagagcttgctgagtacgagtctggcgagcctctgcactctctgattgtgcttggaaacaacgtgcacgacctggagatcgacttcctggtcgagtttgctgatgatcccgaggctttcaaggctctcatcaccaaggatgccgagaacttcaagaaggaggtcaagattatgtcttactccgacgacgacgacgagtaa

SEQ ID NO: 1596 - protein, 300 aa, Yarrowia lipolytica
MLHLIGLGLSHETDITVRGLETIKKCKRVYLEAYTSILMAAEKETLEKFYGKELILADREMVEQASDDILAGAQEDDIAFLVVGDPFGATTHTDLVIRARELGIKYQTIHNASVMNAVGACGLQLYNFGQTVSLVFFTDSWKPDSFYDKIHENRKIGLHTLVLLDIKVKEQSIENIMRGRNVFEPPRYMSIEQAASQLLEIEESRDEKVYCSDTPAIAVSRLGSPRQCIKAGSLGELAEYESGEPLHSLIVLGNNVHDLEIDFLVEFADDPEAFKALITKDAENFKKEVKIMSYSDDDDE

SEQ ID NO: 1597 - DNA, 885 bp, Aeropyrum pernix
  CDS (1)..(885): transl_table=11
gtggctagagggagggaggccgtgacgcttctcctagtgggctggggctacgcgccgggtatgcagacgctcgaagcgcttgatgctgtgcggagggctgacgttgtctatgtagagtcatacaccatgccaggctccagctggctctacaagagtgtcgtcgaggctgcgggggaggctagggttgttgaggcgtcgaggagggatctggaagagaggtcgagggaaatagtgtcgagggccttggatgccgtggtcgccgtggtcacggcgggcgatccaatggtagccaccacccactcgagcctggctgcagaggctctagaggccggggtggcggttagatacatccccggtgtgagcggcgtccaggccgctcggggtgcaaccatgctgagcttctacaggttcgggggcacggtaaccctgcccggaccctggaggggcgtgacccccatcagcgttgctagaaggatatacctgaacttatgcgcaggcctacacaccacagccctactggacgtcgacgagaggggtgtacagctgagcccgggccagggggtcagtctactactagaggcggacagggaatacgcccgcgaggctggtgccccagccctgctggctagactcccctcggtacttgtagaagcgggggctggcggggggcatagggtgctgtactggagtagcctcgagaggctgtctacggcggatgtggaggggggtgtctactcgatagtcatccctgcgaggctctcgggggttgaggagtggcttctggcagctgcctcggggcagcggaggcccctggagtacgataggagtgtgtatgagactgttgaggagaactgtaaaaaaggggtctacatggagcccgtgtag

SEQ ID NO: 1598 - protein, 294 aa, Aeropyrum pernix
MARGREAVTLLLVGWGYAPGMQTLEALDAVRRADVVYVESYTMPGSSWLYKSVVEAAGEARVVEASRRDLEERSREIVSRALDAVVAVVTAGDPMVATTHSSLAAEALEAGVAVRYIPGVSGVQAARGATMLSFYRFGGTVTLPGPWRGVTPISVARRIYLNLCAGLHTTALLDVDERGVQLSPGQGVSLLLEADREYAREAGAPALLARLPSVLVEAGAGGGHRVLYWSSLERLSTADVEGGVYSIVIPARLSGVEEWLLAAASGQRRPLEYDRSVYETVEENCKKGVYMEPV

SEQ ID NO: 1599 - DNA, 756 bp, Archaeoglobus fulgidus
  CDS (1)..(756): transl_table=11
atgctgaccttcgttggactcggactttgggacgtcaaagacatttcagtcaagggactggaggccgtaagggaggctgatgaggtttacgtggagtattatacgtcgaagcttttgagcagcattgaggaaatggaagaattcttcggtaagagagttgttgagctggagaggagcgaccttgaggaaaacagcttcaggttgatagagagagcaaagagtaaaagtgttgtgctgcttgtccccggagacccaatggttgcaaccacgcactccgcaattaagcttgaggcggagaggaaaggcgtcaaaacgagaatcatccacggggcaagcatttctaccgctgtttgcggactaacgggtttgcacaactatagattcggaaaatccgcgactgtaagctggcacaggtcgcagacgccggttaatgttattaaggctaatcgaagcatcgacgcacacacgctgctgtttttagacctccatccggagccaatgacgatagggcatgccgtagaaaacctaatcgccgaagatgcccaaatgaaagacctttacgcagtggggatagccagagcggggagtggagaggaagtggttaagtgcgacaggctcgaaaatctgaagaaaattgactttggcaaacccctccacgtgatggttgtccttgcaaaaactctgcacttcatggagtttgagtgcctgagagagtttgccgacgctcctgcagagcttgagaggttggtagcatga

SEQ ID NO: 1600 - protein, 251 aa, Archaeoglobus fulgidus
MLTFVGLGLWDVKDISVKGLEAVREADEVYVEYYTSKLLSSIEEMEEFFGKRVVELERSDLEENSFRLIERAKSKSVVLLVPGDPMVATTHSAIKLEAERKGVKTRIIHGASISTAVCGLTGLHNYRFGKSATVSWHRSQTPVNVIKANRSIDAHTLLFLDLHPEPMTIGHAVENLIAEDAQMKDLYAVGIARAGSGEEVVKCDRLENLKKIDFGKPLHVMVVLAKTLHFMEFECLREFADAPAELERLVA

SEQ ID NO: 1601 - DNA, 780 bp, Haloarcula marismortui
  CDS (1)..(780): transl_table=11
atgctcacattcgtcgggctgggcctctatgatgagcgctcggtcacggtcgcgggccgcgacgccatccgggacgctgaccgggtgttcgccgaattttacacgagccggctgatcggtactgatatcgaaacgctggaggacacactggagacgagtatcgaacgcagagaccgagccggcatcgagcaggaccctgagccgattctcgaagccgccgagagcgaacacgtcgtcttctgtaccgccggggatacgatggtctcgacgacacacgctgacctccggcttcgggccgcggaccgtggtatcgaaacccgaatcgttcacgggacgaccgcccagactgctgccggctcgctgaccggcctgcagaactaccgcttcgggaaggctacgacccttccgttcgaggacgcacacggcggtgacggcgttccggacagcgtcgtcgctaccatcgaggacaatcgagaccgggacctgcacacgctggtctacctcgacatcaaagtcgacgacccccactgggaggaaagcgacgacacgtacatgaccgccagtcaggccgccaccatgctgtcggagccattcccggacacacttggggttgtcgtggccagggccggcagtccagacccattagtggccgctgacacgctcgacgaactcgctacgcagacgttcggcgacccgctacatctgctcgtcattcccggttcgctccacccacttgaggcggatacactggagtcagttgctggagcagcgttagaatag

SEQ ID NO: 1602 - protein, 259 aa, Haloarcula marismortui
MLTFVGLGLYDERSVTVAGRDAIRDADRVFAEFYTSRLIGTDIETLEDTLETSIERRDRAGIEQDPEPILEAAESEHVVFCTAGDTMVSTTHADLRLRAADRGIETRIVHGTTAQTAAGSLTGLQNYRFGKATTLPFEDAHGGDGVPDSVVATIEDNRDRDLHTLVYLDIKVDDPHWEESDDTYMTASQAATMLSEPFPDTLGVVVARAGSPDPLVAADTLDELATQTFGDPLHLLVIPGSLHPLEADTLESVAGAALE

SEQ ID NO: 1603 - DNA, 849 bp, Halobacterium salinarium; identical to SEQ ID NO: 1545
  CDS (67)..(849): transl_table=11

SEQ ID NO: 1604 - protein, 260 aa, Halobacterium salinarium
MLTFVGLGLYDEASVTVAGRDAIAAADRVFAEFYTSRLIGTDVAALEAHHDTTIERRDRAGVEQHPEPILDAAADGDAVFLTAGDTMISTTHVDLRMRAADRGIDTRVIHAPTAASAAAGLTGLQNYRFGKATTLPFPWAHGADGVPGSVTDTIEANRERGLHTLVYLDIKVDHPRVDGDAYMTASQAADLLATNWDADALGVVVARAGAPDATVRADRLGALADADFGSPLHLLVVPGSLHHIERDALRELAGAPADAL

SEQ ID NO: 1605 - DNA, 801 bp, Methanosarcina acetivorans
  CDS (1)..(801): transl_table=11
atgctcacatttatagggctgggcctttttgacgaatacgatatttccttaaaaggacttgaggctgtccgggaagctgaccttgtatacgcggaattttatacttcctgcctcatgggaacaaaccctgaaaaaatggaaaagctctatggaaagaaagtccatctactctcaagggaagacgtagaacaacagcccgactggctggataaagcaaaagacaaaaatgtcgccttcctcacaggcggggacacaatggtctccacaacccatgttgacctgcgcctcagggcagaaaagctcggcatagaaacccacctgattcatggggcttccatcgcttcggctgtctcggggcttaccgggcttcagaactaccgcttcggaaaatccgcaagtatcccatatccttatgaaagccgtagaggagccataattatttcggaaactccttatgacaccataaaacagaactccgaacttggcctccacaccatgatctttctggacatcgataaagataaagggtatatgaccgccaaccatgcgcttgaactcctgctcgaggttgagaagcgaagaggagaagggataatggagagggctgttgctgtaggaatcgcaagagccggctcggaaaaacccgtggtgaaagctgactacgcagaaagcctgaaggacttcgattttggaaatcctcttcatatcctcgtggttcccggaaaactgcatttcctagaagctgaagctcttgtgaaacttgcagccgggcctgggaaaatcatggaagagacggagtaa

SEQ ID NO: 1606 - protein, 266 aa, Methanosarcina acetivorans
MLTFIGLGLFDEYDISLKGLEAVREADLVYAEFYTSCLMGTNPEKMEKLYGKKVHLLSREDVEQQPDWLDKAKDKNVAFLTGGDTMVSTTHVDLRLRAEKLGIETHLIHGASIASAVSGLTGLQNYRFGKSASIPYPYESRRGAIIISETPYDTIKQNSELGLHTMIFLDIDKDKGYMTANHALELLLEVEKRRGEGIMERAVAVGIARAGSEKPVVKADYAESLKDFDFGNPLHILVVPGKLHFLEAEALVKLAAGPGKIMEETE

SEQ ID NO: 1607 - DNA, 801 bp, Methanosarcina barkeri
  CDS (1)..(801): transl_table=11
atgcttacatttataggtctgggccttttcgacgaatatgacatttctttaaagggacttgaagctatcagggaagctgacatggtttatgcggaattctatacatcctgtctcatgggtacgaaccttgaaaaaatggagaagctctacggaaagaaagtctttttgctttcaagagaggatgtggagcagcaccctgactggctctccaaagcaaagaataggaatctttgcttcctgactggcggagatacaatggtctccacaacccatgtagacttacgcctgagagctgaaaaactggggatagatactcgactgattcatggggcttccattgcctcggctgtctcgggtcttacaggactgcagaactaccgcttcgggaaatctgcaagtattcctcatccctatgagagcaggagaggcacaaggataatctcagagactccttatgatactataaagcaaaacctggaacttggcctgcatactctggtgttcctggatatagacaaggaaaaaggctatatgactgtaaacaccgctcttgagcttctccttgaggttgaggaaaaaaggggtgaaggaatcatgcgaggagctgctgcagtaggaatagccagggcaggctcggaaaaaccagtcataagagcagactatgcagaaaatctcaaggactttaattttggaaaacctcttcatatcctcgtaattcccggaaaactgcattttcttgaagccgaagcgcttgtgaaacttgcaggaggcccagtaggatttatgaaagaagtggagtaa

SEQ ID NO: 1608 - protein, 266 aa, Methanosarcina barkeri
MLTFIGLGLFDEYDISLKGLEAIREADMVYAEFYTSCLMGTNLEKMEKLYGKKVFLLSREDVEQHPDWLSKAKNRNLCFLTGGDTMVSTTHVDLRLRAEKLGIDTRLIHGASIASAVSGLTGLQNYRFGKSASIPHPYESRRGTRIISETPYDTIKQNLELGLHTLVFLDIDKEKGYMTVNTALELLLEVEEKRGEGIMRGAAAVGIARAGSEKPVIRADYAENLKDFNFGKPLHILVIPGKLHFLEAEALVKLAGGPVGFMKEVE

SEQ ID NO: 1609 - DNA, 804 bp, Methanococcoides burtonii
  CDS (1)..(804): transl_table=11
atgcttgattttgtaggacttggtctgttcgatgaaaaggacatttcgttaaaaggtcttgaaaagatacacaacgctgacaaggtctatgttgagttctatacttccattctaatggggactgatcttgaaaagatggaaatgctctataaaaagaagatcaccgtgctctcaagggaagatgtggaacaacatgctgaggactggttggttgatgcgaaagacagtaatgtcgtttttttgacaggcggagataccatggtttccacaacacatgtggacctgcgtctgagggcagcggatatgggtatcaagacgacccttatacacggagcttccatcgcatctgcaatatgcgggctttccggcctccagaactaccgttttggcaaatccgttaccataccacatccttatgttagcaatcgtggggtaagggtggtatctcagactccttatgacactattaagaataatatcgaagcgggacttcatacggctgttttccttgacatcgacaaggacaaaggctatatgaccgtcaatcaggcaatggagatactgcttgaggtcgagggcaaacttggtgaaggcgttatggtcgatcgtctcgccgtgggtattgctcgtgctggttcaccatctcctgtggtgaaagcagactatattgaagctctcagggactattatttagggggaccgcttcatatcgttgtgatcccggcagagttgcattttgtcgaggcagaagcacttgtaaagcttgctggcgcgcctgaagggatccttgagaatattgattga

SEQ ID NO: 1610 - protein, 267 aa, Methanococcoides burtonii
MLDFVGLGLFDEKDISLKGLEKIHNADKVYVEFYTSILMGTDLEKMEMLYKKKITVLSREDVEQHAEDWLVDAKDSNVVFLTGGDTMVSTTHVDLRLRAADMGIKTTLIHGASIASAICGLSGLQNYRFGKSVTIPHPYVSNRGVRVVSQTPYDTIKNNIEAGLHTAVFLDIDKDKGYMTVNQAMEILLEVEGKLGEGVMVDRLAVGIARAGSPSPVVKADYIEALRDYYLGGPLHIVVIPAELHFVEAEALVKLAGAPEGILENID

SEQ ID NO: 1611 - DNA, 774 bp, Methanocaldococcus jannaschii
  CDS (1)..(774): transl_table=11
atgctaatcttagcgggtttaggattgtatgatgaaaatgacatgaccttaaaaaccttaaaatttgccaaaaaagctgagaaaatctatgctgaattctacactgcagttttaactggaactacaactgaaaaaatagaagaggttttaggtaaaaagattcatgttttaagtaggaaagatgttgaatacaatggatataagttgatagaagaggcaaaggataaagacataatgtttttaactgctggcgacccaatggttgctacaacacacgttgatttagcaatagaggcaaaaaagaaagggattgaagttttaataataaatgctccatccatatattcagctgttggaattactggattgcagttgtataaatttggtaaaactacatcaattgtctttccagaagaaaactactttccagaaactccatacaatgtaataaaggaaaacttagagagagggttgcatactctctgcttattggatattaggattgatgaaaatgaaaagaggtttatgacagcaaatgaaggattaaaagtgttgttagaattagaaaatagaaagaaagaaggaattataaatgaagatacaaaggctgtggtggttgcaagagctggaagtttaaaaccaaaacttgtctatgggaagataaaagatttaattaattatgattttggtgagcctttgcattgcataataattccaggaaaacttcattttatggaagaagatgcattaaaatatttatgtgaaaatatttaa

SEQ ID NO: 1612 - protein, 257 aa, Methanocaldococcus jannaschii
MLILAGLGLYDENDMTLKTLKFAKKAEKIYAEFYTAVLTGTTTEKIEEVLGKKIHVLSRKDVEYNGYKLIEEAKDKDIMFLTAGDPMVATTHVDLAIEAKKKGIEVLIINAPSIYSAVGITGLQLYKFGKTTSIVFPEENYFPETPYNVIKENLERGLHTLCLLDIRIDENEKRFMTANEGLKVLLELENRKKEGIINEDTKAVVVARAGSLKPKLVYGKIKDLINYDFGEPLHCIIIPGKLHFMEEDALKYLCENI

SEQ ID NO: 1613 - DNA, 792 bp, Methanopyrus kandleri
  CDS (1)..(792): transl_table=11
atgggtgagctgtacctggtcggagggggtctctccgacgttcgagatctcacgctgcgggcccttgaagtgctagctagcgtggagttggtgctggtcgacacctacaccagcgtgtacgacgtaagcgagggcgacctgaaacggttgctcaacgggttcggaggtgatcctgaagtacgtatgtgctcgcggcgggacctggaggagcgcttcttcgacctgtgtgaggggtacgatcgcgtcgccctgctctccccgggcgacccgatggcagcgaccactcacgtggcgctggtggtcgaggccgccgaccgtgggtgggacgtcgagataatcaacggcgtatcggtgttcaccgcggcaccatccaagtcggggctggaaatgtaccggttcggacgtaccgccacgattccgttgaacgtgcgctccgtgtatccctacgatgtgctcgaatcgaaccggcaggccggtttacacaccctcttcctgctggaagttgctgaagacggggagttcgtctctgtcgctgacgccgcccgctacctattggaaattgagagggaagaaggtcgcggagtactcgacccctcggatctcgcgatcgccgtagtgaggctggggttcgaggacgagttggtggcttggggaaccctcgaagaactctccgactgggagcccggtgaacctccgcaagctctaatactgcccgcctcccgactccgtgaagcggagcgcgaatacatccgccgcgtcctcccacacatccgagatgtgcgtggggtctag

SEQ ID NO: 1614 - protein, 263 aa, Methanopyrus kandleri
MGELYLVGGGLSDVRDLTLRALEVLASVELVLVDTYTSVYDVSEGDLKRLLNGFGGDPEVRMCSRRDLEERFFDLCEGYDRVALLSPGDPMAATTHVALVVEAADRGWDVEIINGVSVFTAAPSKSGLEMYRFGRTATIPLNVRSVYPYDVLESNRQAGLHTLFLLEVAEDGEFVSVADAARYLLEIEREEGRGVLDPSDLAIAVVRLGFEDELVAWGTLEELSDWEPGEPPQALILPASRLREAEREYIRRVLPHIRDVRGV

SEQ ID NO: 1615 - DNA, 801 bp, Methanosarcina mazei
  CDS (1)..(801): transl_table=11
atgctcacatttatagggctgggcctttttgatgaatacgatatctccttaaaaggacttgaagctgttaaggaagctgacctggtatacgctgagttttacacatcctgtctcatgggaacaaaccctgagaaaatggaaaagctctacggaaagaaggttcatttactctcaagggaagatgtggaacagcaccctgactggcttgataatgccagagacaaaaaagtagctttcctcaccggtggagatacaatggtctccacaacacatgttgacctgcgcctcagagctgaaaagctcgggatagagacccgtctgatccacggggcgtccatcacatcagctgtttcagggctaacagggctacagaactaccggtttgggaagtctgcaagcattccctatccttatgaaagcaggcgagggacgaaagtaatttctgaaaccccttatgataccataaagcaaaattcttcattcgggcttcatactcttgtttttctggatatcgataaagataagggatttatgtccgttaacatcgcccttaagcttctccttgaagttgaaagtaaaaggggggaaggagtgatggatagggctgttgctgtgggaatagcaagggcaggctcggaaaagcctgtagtaaaagctggttacgcagaggacctgaaaggttttgattttggaaagcctcttcacatccttgtggttccgggaaaactgcattttctggaagctgaagcccttgtgaaacttgcggatgggcctgaagaaatcatggaaaacattgaatga

SEQ ID NO: 1616 - protein, 266 aa, Methanosarcina mazei
MLTFIGLGLFDEYDISLKGLEAVKEADLVYAEFYTSCLMGTNPEKMEKLYGKKVHLLSREDVEQHPDWLDNARDKKVAFLTGGDTMVSTTHVDLRLRAEKLGIETRLIHGASITSAVSGLTGLQNYRFGKSASIPYPYESRRGTKVISETPYDTIKQNSSFGLHTLVFLDIDKDKGFMSVNIALKLLLEVESKRGEGVMDRAVAVGIARAGSEKPVVKAGYAEDLKGFDFGKPLHILVVPGKLHFLEAEALVKLADGPEEIMENIE

SEQ ID NO: 1617 - DNA, 768 bp, Methanococcus maripaludis
  CDS (1)..(768): transl_table=11
atgcttgtaatggcaggacttggactttacgatgaaagagacgttacactaaaaacgcttgactttgcaaaaaaagttgataaaatttacgctgaattttacacggcaatacttactggaacaacgatggaaaaaattgaaggtacgcttcaaaaacccataactgttttggatcgagaaaaagtagagtatgaaacgaataaattaattgacgaagcaaaagataaggatataatgtttttaactgcaggagacccgatggttgcaacaacacacgtggatatagcagttgaagctagaaaaaaaggaatcgaagttgtaattataaatgctccttcaatttactcggcaataggaattacgggacttcaattatacaaatttggaaaaacaacgtcaatagtatttcccgaaccaaattatttcccggaaaccccttatgacgtaataaaagataatttaaaattaggataccacacactctgccttttagatattcaggcagataaggaaagattcatgactgcaaacgaaggattggatgcacttttaaaaattgaggaaaaaagaaaagaaaacgtaatttctgaggaaacagaagttgcggttgttgcaagagctggaagtattaatcctggattatactatggaaaaataaaagatcttttaaattatgattttaaaagcccgcttcactgtgtgataattcctggaaaacttcactttatggaagaagacgctttaaaatacttatttgaaaatatttaa

SEQ ID NO: 1618 - protein, 255 aa, Methanococcus maripaludis
MLVMAGLGLYDERDVTLKTLDFAKKVDKIYAEFYTAILTGTTMEKIEGTLQKPITVLDREKVEYETNKLIDEAKDKDIMFLTAGDPMVATTHVDIAVEARKKGIEVVIINAPSIYSAIGITGLQLYKFGKTTSIVFPEPNYFPETPYDVIKDNLKLGYHTLCLLDIQADKERFMTANEGLDALLKIEEKRKENVISEETEVAVVARAGSINPGLYYGKIKDLLNYDFKSPLHCVIIPGKLHFMEEDALKYLFENI

SEQ ID NO: 1619 - DNA, 795 bp, Methanobacterium thermoautotrophicum
  CDS (1)..(795): transl_table=11
atgctatacataattggactgggactctacgacgagaatgacatatcaatcaagggcctgagggccatagaggactgtgacgaggtttacgctgaattctacactgcaatgctccaggggtccagtttatcggcaatcgagaggagaataggtaggagtgtgaaggtcctggggaggggagaaatcgaggaggaaagaatccccattgaaagggccctggagcttgatgtggccctccttgttgcaggggatccccttgttgcaacaacacacacggagcttctcatagacgcccacaggaggggcatagagacaagggttatccattcgtcatccataatatcagccgctcctggtctcgcaggccttcaggcctacaagtttggaaggataatcacaataccattcacctctgataactactttcccacatcaccctacaccaacataggggagaaccttaaggcaggttcccactcccttgtgctcctggatatcgaggcccacaggaatagatacatgacggcaactgaggggctcaggtatctcctgaaggcatcagagaaacttgatgatggtacaattagtggcgaaacccttgcagttgtcatagcaagggctggctctgagaagccccttgtgagggctgataaaatagctacactcgttgaggaggacttcggtgatccactccactgtcttgtggtcccggcgggccttcatttcattgaggcggactatcttgttgagattgcaggggcaccccgggcagtggtggagaggatgatcctatag

SEQ ID NO: 1620 - protein, 264 aa, Methanobacterium thermoautotrophicum
MLYIIGLGLYDENDISIKGLRAIEDCDEVYAEFYTAMLQGSSLSAIERRIGRSVKVLGRGEIEEERIPIERALELDVALLVAGDPLVATTHTELLIDAHRRGIETRVIHSSSIISAAPGLAGLQAYKFGRIITIPFTSDNYFPTSPYTNIGENLKAGSHSLVLLDIEAHRNRYMTATEGLRYLLKASEKLDDGTISGETLAVVIARAGSEKPLVRADKIATLVEEDFGDPLHCLVVPAGLHFIEADYLVEIAGAPRAVVERMIL

SEQ ID NO: 1621 - DNA, 789 bp, Pyrococcus abyssi
  CDS (1)..(789): transl_table=11
atggctttatatttcatcggtcttggactttacgatgagaaggatataaccctaaagggcctcgagatagctaggaagtgcgactacgtatttgcggagttttatacatctttaatggctggaacgaacctagaaagaattgaaaaattgattggaaaagaaataagggttttaagcagagaagatgtcgagcttaactttgaaaggatagttttgcctctagctaaagatcacgatgtggcattcctgacggctggggatccattagttgcaaccacccatgcggaacttaggctcagggcgaagaagttcggagttgaaagctatgtcatccatgctccaagcatatactcggccattgcaataactggattgcatatatataagtttgggaagagcgcgacaatctcgtatccagagaagaattggtttccaacgagttactatgacgtcataaaggagaacttagaaagaggacttcatactttgcttttcttggatataaaggctgagaaaggaaaatatatgactgccaacgaaggtatgaaattgcttcttaaggtcgaggatatgaaaaaagaaggagtatttactcaagaaacgttggtagtcgttctagctagggcaggctctttgaatccggtaattagggctggatacgttagagacatgattagagaggactttggaagcccacctcacgtgctgatagttcctgggaggttgcacatagttgaggccgagtatttggtcgagatcgctggagctcctagagagataatacgataa

SEQ ID NO: 1622 - protein, 262 aa, Pyrococcus abyssi
MALYFIGLGLYDEKDITLKGLEIARKCDYVFAEFYTSLMAGTNLERIEKLIGKEIRVLSREDVELNFERIVLPLAKDHDVAFLTAGDPLVATTHAELRLRAKKFGVESYVIHAPSIYSAIAITGLHIYKFGKSATISYPEKNWFPTSYYDVIKENLERGLHTLLFLDIKAEKGKYMTANEGMKLLLKVEDMKKEGVFTQETLVVVLARAGSLNPVIRAGYVRDMIREDFGSPPHVLIVPGRLHIVEAEYLVEIAGAPREIIR

SEQ ID NO: 1623 - DNA, 765 bp, Pyrobaculum aerophilum
  CDS (1)..(765): transl_table=11
gtgctttcattagtcgggctcggccctgggcggggctatgtgacagaggccgcggctgaggcgataaaaaacgccgactgtgtattttatgaagactacacggcccccctcgacgtggaggcgctgaggagactggccaggggggagcccatcaggctcaccagggcggatttagaagatcactccgggcggaagatatttgagtgcctaaaagaggggaaaagggccgtgttagtaactgggggcgatcccatgttggccacggcccatgccgcaatactggctctggcgaggaggcgggggtacagagtggaggtggtgcccggcgtttcaattatatgtgccgcattttcattaagttgcctctcaatatataaattggggggagtggccactgtgacctacccaagagggggggtttactccaccaggccatacgacctcgtggaacagaacttgcaaagaggtcttcacacgctgttacttctggacgtcagagaagacgggagatttatgccccctagagagggcgccgaagttttgttacaactagaagagagagttgggaggggcttgtttaaagaggacttgcccatagtggtagtgtacaaagtgggctggggaggctctgccgtatacgctactctgggcgagattgcacgtagcgatttagaagggcctgcggtgttcatagtcccgtcaaggctgggccctgtggaaaaggaatgcctagaggggctcagcgcgcggagctctacaaggtga

SEQ ID NO: 1624 - protein, 254 aa, Pyrobaculum aerophilum
MLSLVGLGPGRGYVTEAAAEAIKNADCVFYEDYTAPLDVEALRRLARGEPIRLTRADLEDHSGRKIFECLKEGKRAVLVTGGDPMLATAHAAILALARRRGYRVEVVPGVSIICAAFSLSCLSIYKLGGVATVTYPRGGVYSTRPYDLVEQNLQRGLHTLLLLDVREDGRFMPPREGAEVLLQLEERVGRGLFKEDLPIVVVYKVGWGGSAVYATLGEIARSDLEGPAVFIVPSRLGPVEKECLEGLSARSSTR

SEQ ID NO: 1625 - DNA, 810 bp, Pyrococcus furiosus
  CDS (1)..(810): transl_table=11
atgcccctatactttattggacttgggttatatgatgagaaagacataacgctcaaaggattggagattgcaaaaaggtgcgataaggtgtatgcagaattctacacctctcttatggctggaactacgcttgagaaaatcgaagaggtaattgggaaaaagataatagtcctcaatagagaggatgtggaaatgaacttcgaaaaaatagtcctcccagaggccaaggaaaaagaagtagcattcctaaccgctggggatcccatggtggctactacccacgcagagctgaggataagggcgaagagaatgggtgtggagagctatgttattcacgccccaagcatttattcagctgtggcaataactggattgcatatatataagtttggaaagagtgccacagtagcctatccagaggggaattggttccccactagctactacgatgtagttaaagagaacttagagagaggacttcatactctcctcttccttgacataaaggccgagaaggggaagtacatgaccgcaaatgaggccatggaactcctacttaaggtagaggaaatgaggggagagaatgttttcactcccaacactttggtggttgtccttggaagggctggctcgctcaacccaacaattagggctggatacgtaaaagatatgataaaggaagactttggaaagcaacctcatgttctaatagttccagggaaacttcacgttgtagaggcagagtatttagttgagattgcaggtgccccaaaagagatacttgagcaatttgctcctagaaaaatgtaa

SEQ ID NO: 1626 - protein, 269 aa, Pyrococcus furiosus
MPLYFIGLGLYDEKDITLKGLEIAKRCDKVYAEFYTSLMAGTTLEKIEEVIGKKIIVLNREDVEMNFEKIVLPEAKEKEVAFLTAGDPMVATTHAELRIRAKRMGVESYVIHAPSIYSAVAITGLHIYKFGKSATVAYPEGNWFPTSYYDVVKENLERGLHTLLFLDIKAEKGKYMTANEAMELLLKVEEMRGENVFTPNTLVVVLGRAGSLNPTIRAGYVKDMIKEDFGKQPHVLIVPGKLHVVEAEYLVEIAGAPKEILEQFAPRKM

SEQ ID NO: 1627 - DNA, 798 bp, Pyrococcus horikoshii
  CDS (1)..(798): transl_table=11
atggttttgtactttattggattggggctctacgatgagagggatataaccgttaaaggtcttgagatagctaagaagtgcgactatgtgtttgcagaattttatacctctctaatggcgggaactacgcttggaaggatccaaaaattaataggtaaggagataagggtgctaagtagagaagatgttgagttaaactttgagaacatagttttacccttggcaaaggaaaatgatgtagccttcttgactcctggagatcccctcgttgccacaacccatgcggagctcaggataagggcgaagagggctggtgttgaaagctatgtaattcatgctccaagcatatactcggcggtaggtatcactggacttcatatatataagtttggtaaaagtgctacggttgcttatccggaaggtaattggttcccgacaagttactatgatgttataaaagagaacgctgagaggggacttcataccctattgttccttgatataaaggccgaaaaaaggatgtatatgaccgctaatgaagctatggaattattgctgaaggttgaagatatgaagaagggaggggtattcacagatgatactctggtagttgtcctagctagggccggttcgttaaatcctactataagggccggatacgtaaaggatttgataagggaagattttggggatcctcctcatattctaatagttcctgggaagttgcatatagttgaagctgaatacctcgttgaaatcgctggggcccccagggagatattaagggttaatgtttaa

SEQ ID NO: 1628 - protein, 265 aa, Pyrococcus horikoshii
MVLYFIGLGLYDERDITVKGLEIAKKCDYVFAEFYTSLMAGTTLGRIQKLIGKEIRVLSREDVELNFENIVLPLAKENDVAFLTPGDPLVATTHAELRIRAKRAGVESYVIHAPSIYSAVGITGLHIYKFGKSATVAYPEGNWFPTSYYDVIKENAERGLHTLLFLDIKAEKRMYMTANEAMELLLKVEDMKKGGVFTDDTLVVVLARAGSLNPTIRAGYVKDLIREDFGDPPHILIVPGKLHIVEAEYLVEIAGAPREILRVNV

SEQ ID NO: 1629 - DNA, 795 bp, Pyrococcus kodakaraensis
  CDS (1)..(795): transl_table=11
atggtgctgtacttcattgggcttgggctttacgatgaaaaggacatcacactcaagggactggaaacggcgagaaggtgtgataaagtcttcgctgagttctacacttcccttttagcaggtaccacccttgagaaaattgaggagctcatcggcaagccgatagttcgactcagcagggaggatgttgagctgaacttcgagagaatagttcttcccgaggctaaggacaaagacgttgcgtttttaaccgccggagacccgatggtggcaactactcactcagacctcaggataagggcaaagaaagctggagttaagagctacgttatccacgctccaagcatttactccgcggtggcaatcaccggtcttcagatatacaagttcgggaagagcgctaccgttgcctatcccgagaagaactggttcccgacgagccactacgacgtgataagggataacaaagaaaggggtctccacacgcttctgttcctcgacatcaaggcagaccagaaccgctacatgacggccaatgaagcgatggagatacttctcaaagtcgaggaaatgaaaggtgaaggagtgttcacccctgagactctcgttgtcgtcttagcgagggctggttcgcttgagccgactctgagggccggctacgtcagggagctcataaacgaggacttcggaagacagccccacgtccttatcgtcccaggcaggcttcacatagttgaggcagaatacctggtggagttcgctggagcacccgagaagatactcgaagaagtttag

SEQ ID NO: 1630 - protein, 264 aa, Pyrococcus kodakaraensis
MVLYFIGLGLYDEKDITLKGLETARRCDKVFAEFYTSLLAGTTLEKIEELIGKPIVRLSREDVELNFERIVLPEAKDKDVAFLTAGDPMVATTHSDLRIRAKKAGVKSYVIHAPSIYSAVAITGLQIYKFGKSATVAYPEKNWFPTSHYDVIRDNKERGLHTLLFLDIKADQNRYMTANEAMEILLKVEEMKGEGVFTPETLVVVLARAGSLEPTLRAGYVRELINEDFGRQPHVLIVPGRLHIVEAEYLVEFAGAPEKILEEV

SEQ ID NO: 1631 - DNA, 774 bp, Sulfolobus solfataricus
  CDS (1)..(774): transl_table=11
gtgagcatcttaagtctagtaggtcttggaatctctaagaaattcataactgatagtgctatagagacactaagtaattctgatattataatttttgatagatatacatctagatcttgtgatataaatgtggacgtattaaggagattggtaaagggagagagagaattcattgaagcggataggagtttattagaaaataactcaaaggctatcatagactatttagacaagggttataatgtaagtatagccagtattggagatgcattaatagccacaacccatgtttcgctacttatagaggctaaacatcgaggacatgaggtaaaagtgattccagggatttcagtacattgctatcttatatcaaagtctctattatcttcctataaatttggtaagtcagttacagttacatttccttataacgatttcatagatcctactccctataatgtgattaaggataacaaagaaagaggtcttcataccatattatatctggatttgaaaaacgagaaagcaatgactgctaacgaagcacttcagatcttattacgacttgaagagaggcataagaaaagtgttctttcaaaatctgatattataatagttggtgctagattagggtgtgatgacgagagaattattgcacttaaagtagaagaagctacttcattcgacttcggaaatacaccacatattattataattcctggtaaccttcattatatggaggctgatgctataaaatggatattgaggagttaa

SEQ ID NO: 1632 - protein, 257 aa, Sulfolobus solfataricus
MSILSLVGLGISKKFITDSAIETLSNSDIIIFDRYTSRSCDINVDVLRRLVKGEREFIEADRSLLENNSKAIIDYLDKGYNVSIASIGDALIATTHVSLLIEAKHRGHEVKVIPGISVHCYLISKSLLSSYKFGKSVTVTFPYNDFIDPTPYNVIKDNKERGLHTILYLDLKNEKAMTANEALQILLRLEERHKKSVLSKSDIIIVGARLGCDDERIIALKVEEATSFDFGNTPHIIIIPGNLHYMEADAIKWILRS

SEQ ID NO: 1633 - DNA, 765 bp, Sulfolobus tokodaii
  CDS (1)..(765): transl_table=11
atgccaacgcttaagcttatagggttgggcctctctgctaaatttgtaactagagaagcaattgatgagataagtaaatgtaatgttgtgctattcgagagttatacttctctatcttgtgatataaatttagattttattaaatttttaaataaaaatgttattatcgtagatagaaaatttattgaaaataatattaaagaaattattaaactgttaaaagagaaagaagatgtttgtatagtaactataggggatcctatgattgcaacaacacatgtgagtcttattgttgaggtgaaagacaagggctataattttaaagtaattccggggatatcagttcattgctatataatttcaaaatctatgttatcttcctataaatttggtaaatctgtaactataacttacccttataataataaaattgatacgactccctatgatgtaatttatgataattttatacggggactccacacaatactatatcttgacttaaaagaagataaaattatgacagctaaagaagccgtagaacttctaatagaaatggagaaaataaagaagcaaggattagttagtgatgatagaatcatcatagtaggtcagagattgggatgcgatgatgaggaagtagttgcattacgattaaaggaagtatttaattataaatttaaagaaccaccacatattattgtatttcctacagataagttacacttcatggaggtagaggctttaaaatgtctaatgaaataa

SEQ ID NO: 1634 - protein, 254 aa, Sulfolobus tokodaii
MPTLKLIGLGLSAKFVTREAIDEISKCNVVLFESYTSLSCDINLDFIKFLNKNVIIVDRKFIENNIKEIIKLLKEKEDVCIVTIGDPMIATTHVSLIVEVKDKGYNFKVIPGISVHCYIISKSMLSSYKFGKSVTITYPYNNKIDTTPYDVIYDNFIRGLHTILYLDLKEDKIMTAKEAVELLIEMEKIKKQGLVSDDRIIIVGQRLGCDDEEVVALRLKEVFNYKFKEPPHIIVFPTDKLHFMEVEALKCLMK

SEQ ID NO: 1635 - DNA, 774 bp, Thermoplasma acidophilum
  CDS (1)..(774): transl_table=11
atgcttaacatcataggagttggacttcgagggactggcagtataacatttgatgaattcgatgcgctgcgcaccagtgatttcgtgtacgccgatatgtacacgtccatagggcagcccgggctaataagaaagatcagcgccatgatcgacagggacatcttaccgctcacaagggatgagatagagaatggatcgatacttccacaggctgcatcgaaaaatgtaagccttatcgttgtaggcgatccattgatggccaccacgcacaacgaactcaggtacgaggccatgaaccaggggattggcgttcggatcttcgagaatgcgtccatactgaatgccgcaataggaaaggcaggcctcatggtttacaaggttgcgcctcccgtctccctgcccaggatatccgagaaatttttcccgctcagtgtcatagacaagataaagaggaacgctgacctcggattacatacacccgtgctcatagatcttgaagatcaggaaaacatacctctgcacgatgcgcttgcatcgctcttggagatggagagaagaagggaatacagcggaatcatcagagaaatatgcgtactctcccgcatttccttcccagatgagaagatactgttcggaaggatcgaggacatgatgcagcaggaagtcaactcgccctacatgatgtttatactatcgaaactcgacgacaacgagaggaggtttctgtctctattttccgaatccgtttccaaagtaagcgatgccagatcctga

SEQ ID NO: 1636 - protein, 257 aa, Thermoplasma acidophilum
MLNIIGVGLRGTGSITFDEFDALRTSDFVYADMYTSIGQPGLIRKISAMIDRDILPLTRDEIENGSILPQAASKNVSLIVVGDPLMATTHNELRYEAMNQGIGVRIFENASILNAAIGKAGLMVYKVAPPVSLPRISEKFFPLSVIDKIKRNADLGLHTPVLIDLEDQENIPLHDALASLLEMERRREYSGIIREICVLSRISFPDEKILFGRIEDMMQQEVNSPYMMFILSKLDDNERRFLSLFSESVSKVSDARS

SEQ ID NO: 1637 - DNA, 825 bp, Oryza sativa
  CDS (1)..(825)
atgctgtacatcgtggggctcggcctcggcgacgagcgcgacatcaccgtgcgggggctcgacgccgtccgccgctgcgccaaggtctacatggaggcctacacctccctcctttccctcggcctcgacccctccgcgctctccaacctcgagaagatgtatgggaaggagatcacggtggcggaccgcgagatggtggaggagcgcgccgaccagatgctccgcgaggccgccgacgcggacgtcgccttcctcgtcgtcggcgaccccttcggcgcaactacacacactgatctggtggttcgcgccaagaacatgggggtggaagtgaaggtgatccacaatgcgtccgtcatgaatgcagttggagtttgcggattgcaactttaccgctacggggagaccatctctatacctttcttcacggagacatggaggccggacagtttctatgagaagattcagaacaatcgacggcttggactgcacacactttgcttactagatattcgtgttaaggaaccaacgcttgagtctttatgcaggggaaagaaagtgtatgaaccaccaaggttcatgtctgtaaacaccgcaataagtcagcttttggaggtggaggaactgcgtgggggatctgcatatggcgcagattcactatgcataggtgttgctcgccttggaagtgatgatcagaagatcgtcgctggacctatgaagaaactactagatgtcgatttcggcccaccccttcactgccttatcatagtgggagagacgcatcctgtggaagaagagatgatagaattccacatgatcaagtcatga

SEQ ID NO: 1638 - protein, 274 aa, Oryza sativa
MLYIVGLGLGDERDITVRGLDAVRRCAKVYMEAYTSLLSLGLDPSALSNLEKMYGKEITVADREMVEERADQMLREAADADVAFLVVGDPFGATTHTDLVVRAKNMGVEVKVIHNASVMNAVGVCGLQLYRYGETISIPFFTETWRPDSFYEKIQNNRRLGLHTLCLLDIRVKEPTLESLCRGKKVYEPPRFMSVNTAISQLLEVEELRGGSAYGADSLCIGVARLGSDDQKIVAGPMKKLLDVDFGPPLHCLIIVGETHPVEEEMIEFHMIKS

SEQ ID NO: 1639 - DNA, 825 bp, Glycine max
  CDS (1)..(825)
atgttgtacataattggtttagggttgggtgatgagaaagacatcactctcaaaggtttggaagctgtgaagaagtgcaacaaggtttacatggaagcctacacttccctcctctcctttggtctctccaccaatggcatctccaacctggaaaaactatacggtaaacccattatccttgctgacagagaaatggtagaagaaaaggcccatgaaattctctctgaagctgatcatggccatgttgctttccttgttgttggggacccttttggggctaccactcacactgaccttgttgttcgagcaaataagatgggaattgaagtcaaagtagtacacaatgcatctgtgatgaatgctattggagtttgtggtctacagctttaccgttatggggagaccgtttctataccattctttacagagacgtggagacctgatagcttttatgaaaagattcaaagaaacctatcaatgggactgcatacactttgcttgttagatattcgtgtgaaggagcccacactagaatctttgtgcaggggaagaaaagcctatgaaccacccaggtatatgacaataaacacagccattgagcagctcttggagattgtgcaagcacatgaagaacctgcctacactgaggatactgagtgtgttgggcttgcacggcttggtaatgaagatcagatgatagtagctggaacaatgaagcagttgcagttgattgattttggagcacctttgcattgccttgttataacaggcccgacccatcccgtggaggaagaaatgctggatttttacagatgcaggacatag

SEQ ID NO: 1640 - protein, 274 aa, Glycine max
MLYIIGLGLGDEKDITLKGLEAVKKCNKVYMEAYTSLLSFGLSTNGISNLEKLYGKPIILADREMVEEKAHEILSEADHGHVAFLVVGDPFGATTHTDLVVRANKMGIEVKVVHNASVMNAIGVCGLQLYRYGETVSIPFFTETWRPDSFYEKIQRNLSMGLHTLCLLDIRVKEPTLESLCRGRKAYEPPRYMTINTAIEQLLEIVQAHEEPAYTEDTECVGLARLGNEDQMIVAGTMKQLQLIDFGAPLHCLVITGPTHPVEEEMLDFYRCRT

SEQ ID NO: 1641 - DNA, 822 bp, Triticum aestivum
  CDS (1)..(822)
atgctctacatagtcggcctaggcctcggcgacgagcgcgacatcacggtgcgggggctcgacgccgtccgccgctgcgccaaggtctacatggaggcctacacctccctcctctctctcggcctcgacccagcctcgctcgccaacctcgagaagatgtacggcaaggagatcacggtcgccgaccgcgagatggtagaggagcgcgcggaccagatgctgagcgaggccgcggaagccgacgtcgccttcctcgtcgtcggcgacccgtttggggcgaccacacacactgatttggttgttcgtgccaagaacatgggggtagaggttaaggttatccacaatgcatctgtcatgaatgctattggcgtttgtgggttgcaactttaccgctatggagagaccatctctatacctttcttcacagagacatggagaccggatagtttctatgagaaaattcagaacagtcgtcgacttggcttgcatactctttgcctactagacatccgtgttaaggagccaacacttgagtccttatgcagaggaaagaaagtgtacgaaccagcaagattcatgaccgtgaacactgcaataagtcagcttttggaggtggaggaactgcatgggggatctgcatatggtccagattcgctatgtatgggtgtagctcgccttggaagcgatgatcagaagattgtggctggccccatgaagaaactactagatgttgattttggaccaccccttcactgtctcattatagtgggagagactcaccctgtggaacaagagatgctagaattctacatgatcaagtag

SEQ ID NO: 1642 - protein, 273 aa, Triticum aestivum
MLYIVGLGLGDERDITVRGLDAVRRCAKVYMEAYTSLLSLGLDPASLANLEKMYGKEITVADREMVEERADQMLSEAAEADVAFLVVGDPFGATTHTDLVVRAKNMGVEVKVIHNASVMNAIGVCGLQLYRYGETISIPFFTETWRPDSFYEKIQNSRRLGLHTLCLLDIRVKEPTLESLCRGKKVYEPARFMTVNTAISQLLEVEELHGGSAYGPDSLCMGVARLGSDDQKIVAGPMKKLLDVDFGPPLHCLIIVGETHPVEQEMLEFYMIK

SEQ ID NO: 1643 - DNA, 822 bp, Zea mays
  CDS (1)..(822)
atgctgtacatcgtgggcctcggcctgggcgacgagcgcgacatcactgtgcgggggctcgatgccgtacgcagctgctccaagatatacatggaggcatacacatccctcctttccctcggcctcgacccggccgcgctcgccaacctggagaagctgtacgggaaggagataacggtcgccgatcgggagatggtggaggagcgtgtcgaccaggtgctaagcgaggctgccgacactgacgtcgccttccttgttgttggcgacccgttcggggcaactacacatactgatctggttgttcgtgccaagaaaatgggagtagaagtgaaggtgatccacaatgcatctgtcatgaatgcaattggagtttgtgggctacaactttaccgctatggagaaactatctcaataccattcttcacagacgaatggagaccagatagtttctatgagaagattcagaacaatcgccagcttgggctgcacacactttgcctgcttgatatccgtgtcaaggagccaacatgggaatctttagccagaggaaagaaagtctatgaaccaccaagattcatgactgtaaacactgcaataagtcagctttttgaggtggaggaagcacgtgggggatatgcatatcgcagggaaacattgtgcataggagtggcacgacttggaagtgatgatcagaagattgttgctgggcctatggagaagctactagatgttgattttggtccaccccttcactgcctgatcatagtgggagagactcatcctttggaagaagagatgctagagttttacatgatcaagtag

SEQ ID NO: 1644 - protein, 273 aa, Zea mays
MLYIVGLGLGDERDITVRGLDAVRSCSKIYMEAYTSLLSLGLDPAALANLEKLYGKEITVADREMVEERVDQVLSEAADTDVAFLVVGDPFGATTHTDLVVRAKKMGVEVKVIHNASVMNAIGVCGLQLYRYGETISIPFFTDEWRPDSFYEKIQNNRQLGLHTLCLLDIRVKEPTWESLARGKKVYEPPRFMTVNTAISQLFEVEEARGGYAYRRETLCIGVARLGSDDQKIVAGPMEKLLDVDFGPPLHCLIIVGETHPLEEEMLEFYMIK

SEQ ID NO: 1645 - DNA, 25 bp, Artificial sequence
  primer
atgctttatttgatcggacttggtc

SEQ ID NO: 1646 - DNA, 23 bp, Artificial sequence
  primer
ttactcgtcgctgtcgtcttctg

SEQ ID NO: 1647 - protein, 324 aa, Artificial sequence
  consensus sequence
  Variant (3)..(5): Xaa in position 3 to 5 is any amino acid
  Variant (10)..(12): Xaa in position 10 to 12 is any amino acid
  Variant (13)..(13): Xaa in position 13 is any or no amino acid
  Variant (15)..(15): Xaa in position 15 is any amino acid
  Variant (17)..(18): Xaa in position 17 to 18 is any amino acid
  Variant (21)..(28): Xaa in position 21 to 28 is any amino acid
  Variant (31)..(31): Xaa in position 31 is any amino acid
  Variant (33)..(33): Xaa in position 33 is any amino acid
  Variant (37)..(45): Xaa in position 37 to 45 is any amino acid
  Variant (46)..(50): Xaa in position 46 to 50 is any or no amino acid
  Variant (52)..(58): Xaa in position 52 to 58 is any amino acid
  Variant (59)..(62): Xaa in position 59 to 62 is any or no amino acid
  Variant (64)..(65): Xaa in position 64 to 65 is any amino acid
  Variant (68)..(74): Xaa in position 68 to 74 is any amino acid
  Variant (75)..(77): Xaa in position 75 to 77 is any or no amino acid
  Variant (79)..(80): Xaa in position 79 to 80 is any amino acid
  Variant (81)..(82): Xaa in position 81 to 82 is any or no amino acid
  Variant (84)..(85): Xaa in position 84 to 85 is any amino acid
  Variant (87)..(88): Xaa in position 87 to 88 is any amino acid
  Variant (92)..(93): Xaa in position 92 to 93 is any amino acid
  Variant (98)..(99): Xaa in position 98 to 99 is any amino acid
  Variant (101)..(102): Xaa in position 101 to 102 is any amino acid
  Variant (105)..(117): Xaa in position 105 to 117 is any amino acid
  Variant (118)..(119): Xaa in position 118 to 119 is any or no amino acid
  Variant (121)..(123): Xaa in position 121 to 123 is any amino acid
  Variant (125)..(125): Xaa in position 125 is any amino acid
  Variant (126)..(126): Xaa in position 126 is any or no amino acid
  Variant (128)..(129): Xaa in position 128 to 129 is any amino acid
  Variant (132)..(133): Xaa in position 132 to 133 is any amino acid
  Variant (135)..(136): Xaa in position 135 to 136 is any amino acid
  Variant (138)..(146): Xaa in position 138 to 146 is any amino acid
  Variant (147)..(155): Xaa in position 147 to 155 is any or no amino acid
  Variant (157)..(158): Xaa in position 157 to 158 is any amino acid
  Variant (159)..(159): Xaa in position 159 is any or no amino acid
  Variant (161)..(162): Xaa in position 161 to 162 is any amino acid
  Variant (164)..(165): Xaa in position 164 to 165 is any amino acid
  Variant (167)..(169): Xaa in position 167 to 169 is any amino acid
  Variant (175)..(176): Xaa in position 175 to 176 is any amino acid
  Variant (180)..(183): Xaa in position 180 to 183 is any amino acid
  Variant (184)..(202): Xaa in position 184 to 202 is any or no amino acid
  Variant (204)..(211): Xaa in position 204 to 211 is any amino acid
  Variant (212)..(213): Xaa in position 212 to 213 is any or no amino acid
  Variant (215)..(229): Xaa in position 215 to 229 is any amino acid
  Variant (230)..(279): Xaa in position 230 to 279 is any or no amino acid
  Variant (281)..(281): Xaa in position 281 is any amino acid
  Variant (283)..(301): Xaa in position 283 to 301 is any amino acid
  Variant (302)..(306): Xaa in position 302 to 306 is any or no amino acid
  Variant (308)..(308): Xaa in position 308 is any amino acid
  Variant (312)..(319): Xaa in position 312 to 319 is any amino acid
  Variant (320)..(320): Xaa in position 320 is any or no amino acid
  Variant (322)..(323): Xaa in position 322 to 323 is any amino acid
MLXXXGLGLXXXXDXTXXGLXXXXXXXXVYXEXYTSXXXXXXXXXXXXXXEXXXXXXXXXXXRXXVEXXXXXXXXXXAXXXXVXXLXXGDPXXATTHXXLXXRAXXXXXXXXXXXXXXXSXXXAXXGXXGLXXYXXGXXXXXXXXXXXXXXXXXXPXXXYXXIXXNXXXGLHTLXXLDIXXXXXXXXXXXXXXXXXXXXXXXMXXXXXXXXXXLXXXXXXXXXXXXXXXXXXXXXXXXXXXXXXXXXXXXXXXXXXXXXXXXXXXXXXXXXXXXXXXXXRXGXXXXXXXXXXXXXXXXXXXXXXXXGXPLHXXXXXXXXXHXXE

SEQ ID NO: 1648 - protein, 26 aa, Artificial sequence
  protein pattern
  Variant (2)..(2): Xaa in position 2 is Thr or Val
  Variant (3)..(3): Xaa in position 3 is Ala, Gly, Pro or Val
  Variant (6)..(6): Xaa in position 6 is Pro, Thr or Val
  Variant (7)..(7): Xaa in position 7 is Phe, Leu or Met
  Variant (8)..(8): Xaa in position 8 is any amino acid
  Variant (9)..(9): Xaa in position 9 is Ala or Ser
  Variant (13)..(14): Xaa in position 13 to 14 is any amino acid
  Variant (15)..(16): Xaa in position 15 to 16 is any or no amino acid
  Variant (18)..(18): Xaa in position 18 is any amino acid
  Variant (19)..(20): Xaa in position 19 to 20 is any or no amino acid
  Variant (22)..(25): Xaa in position 22 to 25 is any amino acid
  Variant (26)..(26): Xaa in position 26 is Ile, Pro or Val
LXXGDXXXXTTHXXXXLXXXAXXXXX

SEQ ID NO: 1649 - protein, 18 aa, Artificial sequence
  protein pattern
  Variant (2)..(4): Xaa in position 2 to 4 is any amino acid
  Variant (5)..(5): Xaa in position 5 is Asp, Gly or Asn
  Variant (6)..(6): Xaa in position 6 is any amino acid
  Variant (10)..(10): Xaa in position 10 is any amino acid
  Variant (11)..(11): Xaa in position 11 is any or no amino acid
  Variant (13)..(13): Xaa in position 13 is any or no amino acid
  Variant (15)..(15): Xaa in position 15 is Ile, Leu or Val
  Variant (16)..(17): Xaa in position 16 to 17 is any amino acid
  Variant (18)..(18): Xaa in position 18 is Asp, Glu, Lys or Arg
NXXXXXHTLXXLXDXXXX

SEQ ID NO: 1650 - protein, 18 aa, Artificial sequence
  protein pattern
  Variant (2)..(2): Xaa in position 2 is any amino acid
  Variant (3)..(3): Xaa in position 3 is Asp, Glu or Asn
  Variant (4)..(4): Xaa in position 4 is any amino acid
  Variant (5)..(5): Xaa in position 5 is Ala, Ile or Val
  Variant (6)..(7): Xaa in position 6 to 7 is any amino acid
  Variant (8)..(8): Xaa in position 8 is Ala, Cys or Ser
  Variant (9)..(10): Xaa in position 9 to 10 is any amino acid
  Variant (11)..(11): Xaa in position 11 is Ile or Val
  Variant (12)..(12): Xaa in position 12 is Phe or Tyr
  Variant (13)..(13): Xaa in position 13 is any amino acid
  Variant (15)..(15): Xaa in position 15 is any amino acid
GXXXXXXXXXXXXEXYTS

SEQ ID NO: 1651 - DNA, 528 bp, Saccharomyces cerevisiae
  CDS (1)..(528)
atggtccttttacacaaaagcacacatatatttcctaccgattttgcctctgtttcacgcgccttttttaatagataccccaatccatactccccccatgtactatccatagacacaatatcaaggaacgttgatcaagaaggaaatttgcgcacaacgaggctgttgaaaaagtccggaaagctgcccacatgggtcaaaccctttttaagaggtataacagaaacatggataatcgaagtttccgtagtgaaccccgctaactccacaatgaaaacttacactaggaatctggatcacactggaatcatgaaggttgaagaatatactacctatcaatttgacagtgctacaagtagtacgatagcagacagccgggtgaagttttcaagtggcttcaatatgggtatcaaatctaaggtagaggattggtcgcgcactaaatttgacgaaaacgttaagaaaagcagaatgggcatggcatttgttatccaaaaactcgaagaggcgagaaatcctcagttttga

SEQ ID NO: 1652 - protein, 175 aa, Saccharomyces cerevisiae
MVLLHKSTHIFPTDFASVSRAFFNRYPNPYSPHVLSIDTISRNVDQEGNLRTTRLLKKSGKLPTWVKPFLRGITETWIIEVSVVNPANSTMKTYTRNLDHTGIMKVEEYTTYQFDSATSSTIADSRVKFSSGFNMGIKSKVEDWSRTKFDENVKKSRMGMAFVIQKLEEARNPQF

SEQ ID NO: 1653 - DNA, 552 bp, Arabidopsis thaliana
  CDS (1)..(552)
atggtaaaagcatacagacaagagcatgtttacaagcatccgtgggagcgggtgagtgctgcttcatggaggaagtttgcagaccctgaaaacaaacgcatcctttctcacatccttgaagtcgataccttgaacaggaaactcgacactgagaccgggaaactccacaccacgcgtgctctcaccatccatgctcctggtccatggtttctccataggatcattggtcaggacatctgtcactgtgttgaatcaacagttgtagatggcaaatcacgttctatgcagctaacaacaaagaacattagtctcaaaaagttcattgaagtggaggagaggataagatatgatccgcatccagataatccatcagcctggactgtttgtagccaggagacaagcattcggatcaaacccttgtcggctctggcctcaatggctgagaaggttgaacagaagtgcgcagagaaattcatgcagaatagcgctaaaggaagagaggttatggagaggatttgtaagtatatggaagcagaatccgctcggatctaa

SEQ ID NO: 1654 - protein, 183 aa, Arabidopsis thaliana
MVKAYRQEHVYKHPWERVSAASWRKFADPENKRILSHILEVDTLNRKLDTETGKLHTTRALTIHAPGPWFLHRIIGQDICHCVESTVVDGKSRSMQLTTKNISLKKFIEVEERIRYDPHPDNPSAWTVCSQETSIRIKPLSALASMAEKVEQKCAEKFMQNSAKGREVMERICKYMEAESARI

SEQ ID NO: 1655 - DNA, 555 bp, Schizosaccharomyces pombe 972h-
  CDS (1)..(555)
atgaagatttttgaaagttgccacttatttcaatatccttttgaacaagtttcagcggctcactggcagaagtatcccaatgagcatgctactcatgtgatagccgtggatactcttgatcgcaaggttttggataatggtgtattgtatacggaacgcttgatcacgtgtcaccaggcccttcctagatggattttaaaattgattgacggtgcgcaagattgttatattcgagaaactagctatgttgacttgaaagcgcgcactttaacacttttaacctcaaacttgacgtttagtgatcgtttgagagtagatgagacggtgacttactcaccccatcctgaactggaagctactgtttttcaacaggaggctcgaattgaagccttagcgtgtatgaagcggttgtcaaacctgatcgaacaatggtcggttgatggttttggaaagaaagcttcccgtggaaaagaaggcttcgaaagtgttttagaaaaaataaacatgtctgtattccaaacgcgaccgtttggttcttctgaagcgaccgcatag

SEQ ID NO: 1656 - protein, 184 aa, Schizosaccharomyces pombe 972h-
MKIFESCHLFQYPFEQVSAAHWQKYPNEHATHVIAVDTLDRKVLDNGVLYTERLITCHQALPRWILKLIDGAQDCYIRETSYVDLKARTLTLLTSNLTFSDRLRVDETVTYSPHPELEATVFQQEARIEALACMKRLSNLIEQWSVDGFGKKASRGKEGFESVLEKINMSVFQTRPFGSSEATA

SEQ ID NO: 1657 - DNA, 537 bp, Apis mellifera
  CDS (1)..(537)
atgaaggaaaacgcggagataacgatccttccatactgttggctgaccgtttgcagagcgttcttcaaccgttatccgaatccgtattcccttcacgttttaacagaggacacggtgcatcgagaaatcaaagatgggaaatttttgagcacgagaatattctgtaaaaccgcatccctgccgaatttgttcaagaaattcgtgaagaaagcccaggtactgatactcgaggaggttatcatcgacctgtacacgaaacgtttgatctcgttaacgagaaatctcgagcacaagaagctgttggtcgcctcggaaacgacagagtacgtaccgagctactacgacccaaataaaactgtaatgacacggcgcacgaccattcaatcacctctgaaaggtctcacgggtcgaacgatcgagaaaatttgtcaaatcacttcgatcagaaactccaagaaagcgatacagggattcttgtacgttcttgcccacgacaatgaaagagccaaacgaggacaggatatcacattcggttaa

SEQ ID NO: 1658 - protein, 178 aa, Apis mellifera
MKENAEITILPYCWLTVCRAFFNRYPNPYSLHVLTEDTVHREIKDGKFLSTRIFCKTASLPNLFKKFVKKAQVLILEEVIIDLYTKRLISLTRNLEHKKLLVASETTEYVPSYYDPNKTVMTRRTTIQSPLKGLTGRTIEKICQITSIRNSKKAIQGFLYVLAHDNERAKRGQDITFG

SEQ ID NO: 1659 - DNA, 642 bp, Aedes aegypti
  CDS (1)..(642)
atggccaagtactacgaaaacaccacgacgttcaactattcctgggagcaggtgacgcagtgcttctggaaccggtacccaaatccgttcagcctgcacgtactctcggaggacaccgtctgccgggagattaagaacgggaagctccacagcaagcggctgctgaccaagacgaaccgagtgccgaaatggggcgagcggttcttcaaggccaagtccgtcaacatccttgaggagtcggtggtggatccgaaggagcgcgtgctagtcacctacacgaggaacatcggcttcaacaagatcatgagcgtcgtcgagaaagtaacctaccgatcgtcaccggacaacccctccaagaccatcgcgacccgatcggcatggatcgactcgtctgtgttcgggttcgccaccgccatccgggcgtttgggctagatcgcttcaaaaagaactgcatgaaaacggccaacggcttcaactacgtcctgcagcacatgtttcccgcccatccgtcttcgctggcggccgtccacaaccaacacctgacgaaggcccagaaaatcaaggaggccgccaaacacgcgtccgaccatgtcaaggcccaagccgaacagtttgtgcaaaatatttccgtgaaaggttga

SEQ ID NO: 1660 - protein, 213 aa, Aedes aegypti
MAKYYENTTTFNYSWEQVTQCFWNRYPNPFSLHVLSEDTVCREIKNGKLHSKRLLTKTNRVPKWGERFFKAKSVNILEESVVDPKERVLVTYTRNIGFNKIMSVVEKVTYRSSPDNPSKTIATRSAWIDSSVFGFATAIRAFGLDRFKKNCMKTANGFNYVLQHMFPAHPSSLAAVHNQHLTKAQKIKEAAKHASDHVKAQAEQFVQNISVKG

SEQ ID NO: 1661 - DNA, 699 bp, Magnaporthe grisea 70-15
  CDS (1)..(699)
atggttctcacccacacaaccaaccacacatactcccacccgtttccaactgtaacccttgccttcttcctccgctactgctcgccgcagatcaacccttttgcggcccatgtactcagtaccgatacaatctcgagccacgtggatgccgatggcagactacacacaactcgcatccacttgaaaaagtcacgtctgcctggggccgtcttcaagttgcttccaacgagtattaccggcggcgggtcaaacaacaaggcatcatatgtgctcgaaacgagcatcgtagacatacgagaaggttggatgaagactgagagtcgaaatctcaactttgtcggagttttatctgtcgtggagaagcagacatacaccacaccgaccgaggcaaacaacaatgctactaccaccaacgtcgaaacaaatgttgtctttcggtctaggcttggggagaagcttagggagaagatcggacagtcacagcagcagcaagagcctcgagagggctggttctcgcgtcttgggaccaagggcatccagcggagtatcgagaacatggcgtctaccaagaccctggatcagcttggcaagagtcgcgagggtatgctggtggtgctcgagaggttgcgtaataccggcctcgtcaacataatggagcttaccagaagagccaaggaagcgcagtccggcacagtctga

SEQ ID NO: 1662 - protein, 232 aa, Magnaporthe grisea 70-15
MVLTHTTNHTYSHPFPTVTLAFFLRYCSPQINPFAAHVLSTDTISSHVDADGRLHTTRIHLKKSRLPGAVFKLLPTSITGGGSNNKASYVLETSIVDIREGWMKTESRNLNFVGVLSVVEKQTYTTPTEANNNATTTNVETNVVFRSRLGEKLREKIGQSQQQQEPREGWFSRLGTKGIQRSIENMASTKTLDQLGKSREGMLVVLERLRNTGLVNIMELTRRAKEAQSGTV

SEQ ID NO: 1663 - DNA, 564 bp, Magnaporthe grisea 70-15
  CDS (1)..(564)
atgaaggtctttacaaacaaggacactttcaactactcatgggaggaggtgtcgacggccaactggaggaaatactgcccatggaacgacaagtcgacgcatgtcatcgccgtcgacaccatctcgcgttccgtcgactcccagaccggtatcctgcgcaccgagaggctcatcacctgccggcaaaacgccccggactgggtgtgcaaagtactcggcgccagcaatggcgagtcgctcatgtacgaggtgtcgtacgtcgacgcggcgaacaaaaaggtcactatggtctcgcagaacatgacgtggtcaaacctgataaacgtccaggagaccgttgtctacagcccgctcaacgacaagcagacccagttcgttcaggacgccaagatcaccgctctgtgcggcggctggcagaagatcaggaactcgatcgaggacgccatagtcacccgtttccgtgagaacgccgccaagggccgcgagggcttcgagtccgtcctggccatgagcaggcgtgtctttgccgaggagagggctcgtcaggttgtcatggctcaatga

SEQ ID NO: 1664 - protein, 187 aa, Magnaporthe grisea 70-15
MKVFTNKDTFNYSWEEVSTANWRKYCPWNDKSTHVIAVDTISRSVDSQTGILRTERLITCRQNAPDWVCKVLGASNGESLMYEVSYVDAANKKVTMVSQNMTWSNLINVQETVVYSPLNDKQTQFVQDAKITALCGGWQKIRNSIEDAIVTRFRENAAKGREGFESVLAMSRRVFAEERARQVVMAQ

SEQ ID NO: 1665 - DNA, 555 bp, Gibberella zeae PH-1
  CDS (1)..(555)
atgaaggtctttagcaacagcgtcaccttcaactactcctgggacgaggtgtccacggccaactggacaaagtacggcccctggaacaacaagtctgagcatgtcatcgctgtcgacacactctcccgcgaagtcgaccccgcgacaggtatcctccgaaccgagcgtctcatcacatgcaagcagagcgtccccgactggatcaagaccatcatcggcggcaccggagacgagagcttcatgtacgaagccagctacgttgaccccgtcaacaagaccgttaccatggtcagccagaacttgacatggagcaacctcgtcaacgtccaggaggaggttgtttacaagcctctcggcaaccaccagacccagttcatccaaaatgccaacatcactgccctgtgcggtggctggcagcgaatcaagaacagcatcgaggacacaatggtttctcacttccgtgagaacgccgtcaagggccgtgagggctttgagcgcgtcttgatgatgagccgcaaggctttcgccgaggagagggctcgccaggttctataa

SEQ ID NO: 1666 - protein, 184 aa, Gibberella zeae PH-1
MKVFSNSVTFNYSWDEVSTANWTKYGPWNNKSEHVIAVDTLSREVDPATGILRTERLITCKQSVPDWIKTIIGGTGDESFMYEASYVDPVNKTVTMVSQNLTWSNLVNVQEEVVYKPLGNHQTQFIQNANITALCGGWQRIKNSIEDTMVSHFRENAVKGREGFERVLMMSRKAFAEERARQVL

SEQ ID NO: 1667 - DNA, 696 bp, Apis mellifera
  CDS (1)..(696)
atggttaaatactacgaaagtagcacaatttttcaatttaattggaatcaagttgcatatggattttggcaaagatatccaaatcctaacagttctcatgtacttacggaagatactatatcgagaaaagttaaaaatggtatattatatagcacacgtcttttgacaaaaactaatagagtacctaaatggggagagagatttgttagcaaaaatatagtaaaaattattgaagagagtatagtggatccaaaaacaaaaactttaacaacatatacaagaaatttaggttacactaaagtcatgagcattgtagagaaggttgtttataaagtatgtgaagaaaactctaattggacagtagcaaaacgatcagcttggattgatagtcaagtatttggattcagtagagctatccaagcatttggattggatagatttaaaaagaattgtactctgatgtataacgggtttaattacgttctagctcatttgtttcctcacacagcacaatatatgaatccatcgctttctcaaatgggttttgctcatctagtcgaagaatttcctggaaagacaagtttagcagaagatttccaacattcgttacaaggtaaagcagaaaaagtaaaagatgctgcgaaaaaggcaactgatttagcaaagaaaaaggctggcaccatttatgctacataa

SEQ ID NO: 1668 - protein, 231 aa, Apis mellifera
MVKYYESSTIFQFNWNQVAYGFWQRYPNPNSSHVLTEDTISRKVKNGILYSTRLLTKTNRVPKWGERFVSKNIVKIIEESIVDPKTKTLTTYTRNLGYTKVMSIVEKVVYKVCEENSNWTVAKRSAWIDSQVFGFSRAIQAFGLDRFKKNCTLMYNGFNYVLAHLFPHTAQYMNPSLSQMGFAHLVEEFPGKTSLAEDFQHSLQGKAEKVKDAAKKATDLAKKKAGTIYAT

SEQ ID NO: 1669 - DNA, 555 bp, Candida glabrata CBS 138
  CDS (1)..(555)
atggttttggttcataggagtgtgcatgtgtttgagaatgactttgcgtctgtgtcctgtgcgttcttcaaccggtacccgaacccatactcgcggacagtgaagtcgatagacacgttgaaccagcaggtgctggacggcaagctgcacacgacgcggttgctgcggaagaccgggaacatgcctgtgtgggctcgtcctttcctcgggaggatatctgagtcctgggtgatagaggtgtctgtggtggacccgcagcgcgggaggatggagacgttcaccaagaacctggaccacaccaggatcatgcaggtggaggagtacagcacatacgactacaacttcgagacgcggaagaccagcgtggtgagccgagtgaagttttccagtgggttcaccacggggctgcgtgagcgtctggagaactggtcgaggtccatattcgacgagaacgtcaagtacagcaggcaaggtatgctgtttgtgatgaagaagatcgaagagaagaggaacaagaggtccttgctgcagcaaatccagaacatcgagccttga

SEQ ID NO: 1670 - protein, 184 aa, Candida glabrata CBS 138
MVLVHRSVHVFENDFASVSCAFFNRYPNPYSRTVKSIDTLNQQVLDGKLHTTRLLRKTGNMPVWARPFLGRISESWVIEVSVVDPQRGRMETFTKNLDHTRIMQVEEYSTYDYNFETRKTSVVSRVKFSSGFTTGLRERLENWSRSIFDENVKYSRQGMLFVMKKIEEKRNKRSLLQQIQNIEP

SEQ ID NO: 1671 - DNA, 525 bp, Kluyveromyces lactis NRRL Y-1140
  CDS (1)..(525)
atggtcctctggcataataattcacatacgtttggaaattcattcgatgctgtcaccatagcattttttaaccgatacccaaacccatatgcctctcatgttttgagtatcgacactctttctagacgtgtcgatgatgatgggagacttatatctattagattgattaaaaagatggggaagcttcccaattgggtgaaaccttttcttggaaagatatctgaatcctggatcattgaacattcagtggtcgataccaagaagggagaaatgctgacttatactaggaatttagatcatacgaagattataaaagtggaagaatatactaggtttgaaaaagacgggaatagcactcaggtgaaatccatggtcaagttcagtagtggatttgggattgggattagaaacagaatcgagagctggtcacatagcaagttcgatgagaatattcagaagagcaggaagggcatgactttcgttttgcaaagactggatctctcgttaaacaaaacttcgagctga

SEQ ID NO: 1672 - protein, 174 aa, Kluyveromyces lactis NRRL Y-1140
MVLWHNNSHTFGNSFDAVTIAFFNRYPNPYASHVLSIDTLSRRVDDDGRLISIRLIKKMGKLPNWVKPFLGKISESWIIEHSVVDTKKGEMLTYTRNLDHTKIIKVEEYTRFEKDGNSTQVKSMVKFSSGFGIGIRNRIESWSHSKFDENIQKSRKGMTFVLQRLDLSLNKTSS

SEQ ID NO: 1673 - DNA, 534 bp, Debaryomyces hansenii CBS767
  CDS (1)..(534)
atggttcaagtatttgagaatgcccatgtgtttaaccacgatttccccacggttagtcttgcatatttgaataggtaccccaatccgtacgcaaagcatgtcttgagtattgatactcttgacagatatatggacacggatgggtgtctcaggaccaccaagataattgtaaagaccgggaggttgcccaagtttatcaagccgtttttagggacgcatttggactcgtggatcatcgagaagaccatcatcaaccccaaaactaaccaaatgctctcatacacatcgaatgtggaccacaggaaattcattaggatcgaggagtacatgaagtactctgcagatagtccatttagtacattggtggagagcaaggtgaggttttcctccaacttgtttggattcaagcagaaaattgaagagtggagccgcaacaggttctcatcaaacatggccaattctagagaaggattgaagtatgtggttgacaaattgaacgagaggaaagaggtatggatgaggagaagtacgtag

SEQ ID NO: 1674 - protein, 177 aa, Debaryomyces hansenii CBS767
MVQVFENAHVFNHDFPTVSLAYLNRYPNPYAKHVLSIDTLDRYMDTDGCLRTTKIIVKTGRLPKFIKPFLGTHLDSWIIEKTIINPKTNQMLSYTSNVDHRKFIRIEEYMKYSADSPFSTLVESKVRFSSNLFGFKQKIEEWSRNRFSSNMANSREGLKYVVDKLNERKEVWMRRST

SEQ ID NO: 1675 - DNA, 549 bp, Yarrowia lipolytica CLIB122
  CDS (1)..(549)
atggtcaagttcttccagtccagccattcccacgacttttccaccgtctccctggcttttttcaaccggtaccccaacccgtacgcctcgcacgtgcttgccgccgacacaattgagcgatatgtggacacagatggaaatctgcacaccacgcgtctaattctcaagcagggccggctgcctaggttcgtcaagcctttcctcaagcacatttctgagtcttggattatcgagaagtctgttgtcgaccccaagcagatggagatggagacctggagctcgaatctcgagcaccgatacatcctcaaggtcgaggagcgaaccacgtatcgacgtgagggcgccggaacctggtcgcagaaccaggtctcctttgttagcaactttgccggctggggagtcaaggaccgaatcgaaaagtggtccctcgaccgatttggggagaacaccgctaagagccgacagggcatggcctttgtcatggacctgctcaaggagaagggtctgatgcatttccagcgagttcagcttggacatgacttcaagtaa

SEQ ID NO: 1676 - protein, 182 aa, Yarrowia lipolytica CLIB122
MVKFFQSSHSHDFSTVSLAFFNRYPNPYASHVLAADTIERYVDTDGNLHTTRLILKQGRLPRFVKPFLKHISESWIIEKSVVDPKQMEMETWSSNLEHRYILKVEERTTYRREGAGTWSQNQVSFVSNFAGWGVKDRIEKWSLDRFGENTAKSRQGMAFVMDLLKEKGLMHFQRVQLGHDFK

SEQ ID NO: 1677 - DNA, 555 bp, Yarrowia lipolytica CLIB122
  CDS (1)..(555)
atgaaattcttcgactcacgacactacttcaactattcgtgggaacaggtgtccatcgccaactggaaaaagtaccccaacgaggtgtccacccatgtgattgcggtggatgttctgcgtcgagaagtggaccccaagtccggcgtgcttcgaaccgagcgactcatcacctgcaaacagtccatccccaagtggcttcttgcgctggtaggaggccaggaggtgtcgtacgtccgagaggtctccgaggtcgaccccaaggcacgaaccgttgtcatgcgatccaccaacatgaccatgaataacctgctgctggtgttcgagacctgcacctactcgcccgaccccgagaaccccgccacaaagaccgtgtttgaccaggaggcccagattaccgcctttgcctcctggaagcgaatctgcaacaagattgaggactggaccgtggagcgatttggccagaacgccatcaagggcaaggccggcttcgagggcgtcctgcagaaggtggccaactcggacgtgttcgcccgagagtccgtctccctgtcttaa

SEQ ID NO: 1678 - protein, 184 aa, Yarrowia lipolytica CLIB122
MKFFDSRHYFNYSWEQVSIANWKKYPNEVSTHVIAVDVLRREVDPKSGVLRTERLITCKQSIPKWLLALVGGQEVSYVREVSEVDPKARTVVMRSTNMTMNNLLLVFETCTYSPDPENPATKTVFDQEAQITAFASWKRICNKIEDWTVERFGQNAIKGKAGFEGVLQKVANSDVFARESVSLS

SEQ ID NO: 1679 - DNA, 651 bp, Anopheles gambiae str. PEST
  CDS (1)..(651)
atgacaaaatactatgaaagtgaaaccgtgtacaactattcctgggagcaggtcacacagggcttctggaaccgatacccgaacccgttcagctcgcacgtactctccgaggacacggtcagccgggaggtgcggaatgggaagctgcacagcaagcggctcctcaccaagacgaaccacgtgccgaagtggggcgagcgcttcttcaaggcaaagtcggtcaacatcgtggaggagtcggtggtcgatccgaacgagcgaacgctcgtcacgtacacgcgtaacattggcttcaacaaaataatgagtgtggtggaaaaggtggtctacaaatcgctcccggaccagccgggcaaaaccatcgccatccggtcggcgtggatcgattcgtccgtgtacggcttcggtaccgccattcgcgcgttcgggctggagcggttcaagaagaattgcgccaaaacggtgagcggcttcaactacgtcctgcagcacatgttcccgaacaatccggtcgcgctggcagcggccgccgccgctgccgccagccaggcctccaaggcccagaagctgcgcgaagcggccaaacacgcatcggaccacatgaaggcgcaggcagaacatttggtacagaacctgtccgtcaagggctag

SEQ ID NO: 1680 - protein, 216 aa, Anopheles gambiae str. PEST
MTKYYESETVYNYSWEQVTQGFWNRYPNPFSSHVLSEDTVSREVRNGKLHSKRLLTKTNHVPKWGERFFKAKSVNIVEESVVDPNERTLVTYTRNIGFNKIMSVVEKVVYKSLPDQPGKTIAIRSAWIDSSVYGFGTAIRAFGLERFKKNCAKTVSGFNYVLQHMFPNNPVALAAAAAAAASQASKAQKLREAAKHASDHMKAQAEHLVQNLSVKG

SEQ ID NO: 1681 - DNA, 567 bp, Aspergillus nidulans FGSC A4
  CDS (1)..(567)
atgaaggtcttttcatctctttgcacgttcgactactcgtgggaggaggtttcaaccgccaactggaggaaatattgtccctggaatgataagtcgacgcatgttgtgggggtagatactctctcgcggggggtggaccccgagacaggaattttgcgaactgagcgattgatcacatgcaaccaatccgtaccgcaatgggtatcgtcgttgtttggaggtagcccgacctcccatgtttacgaggtttcatatgtcgaccctatttccaagaaagtaacaatgtgctcgacaaaccttacatgggccaatgttttgaacgtgcgcgagactgtcatctaccaaccgtcggtgacaaacccttcgtctaagaccgaatttcagcaggaagcgaagataactgctctctgcggaggctggcaaaagattaagaacaaggtggaagaggcaagcgtcgagcgatttagagaaaatgccaagcgtggcagggaaggcttcgaagccgtccttgagatgagtcgacgagttttcagcgagcagcgcgctctcgaatccagcgtggcatga

SEQ ID NO: 1682 - protein, 188 aa, Aspergillus nidulans FGSC A4
MKVFSSLCTFDYSWEEVSTANWRKYCPWNDKSTHVVGVDTLSRGVDPETGILRTERLITCNQSVPQWVSSLFGGSPTSHVYEVSYVDPISKKVTMCSTNLTWANVLNVRETVIYQPSVTNPSSKTEFQQEAKITALCGGWQKIKNKVEEASVERFRENAKRGREGFEAVLEMSRRVFSEQRALESSVA

SEQ ID NO: 1683 - DNA, 585 bp, Candida albicans SC5314
  CDS (1)..(585): transl_table=12
atgaagttatttgaatcagaacattcttttaattacccatgggatcaagttactgctgctaattggcaaaaataccctaatgaattagcctcacatgttatatctgttgatattttacagcgagaaatgattaataacaatacgacattgagaacagaaaggttgattggctgtaaacaacctattccgaaatggttatcgtttgtggtgggaggcgcaactgtgagttatgtgcgtgaagtcagtgaggttgacttggttaataggaccctagtgatgaaatccatgaatttgactatgaataatttattattggtaaaggaaactgttatttataaaccggacgacgaattacctcataacaaaactgtattccatcaaagtgctgagatcactgcatttgcttcgttaagcagactttgtgacaagttggaagattggtcagtggaacggtttggccagaatgccaaatctggtagattagcgtttgaaaatgttttgaataaattgacattgaagtgggaagaaaatgggatctttgagaataacaagatcttgcaggaggttaagaatttactgatttag

SEQ ID NO: 1684 - protein, 194 aa, Candida albicans SC5314
MKLFESEHSFNYPWDQVTAANWQKYPNELASHVISVDILQREMINNNTTLRTERLIGCKQPIPKWLSFVVGGATVSYVREVSEVDLVNRTLVMKSMNLTMNNLLLVKETVIYKPDDELPHNKTVFHQSAEITAFASLSRLCDKLEDWSVERFGQNAKSGRLAFENVLNKLTLKWEENGIFENNKILQEVKNLSI

SEQ ID NO: 1685 - DNA, 615 bp, Strongylocentrotus purpuratus
  CDS (1)..(615)
atgaagcatttcacagcagctactatattcaaacattcatgggaccaagtctcctctgctttctggcagaaatatccaggaccatacagtaaacatgtgctctctgaagatgtagtatctcgctacattagcccagactgtaagctgcacagcactcgtttactcaccaagaccaaccgaatgcctaagtggggcggctttctctttggaggaaactcaagatttgtttctatcgttgaggagagcgttgtggatcccgagaagaagacaatgaccacatacacaaggaatataggctaccagaatttcatggtccttgaggagaagtgtgtattctcgcaatcagaagagaacaaagattggacacagctagagagacatgtatgggtcaactcaagtctctacggcttctctagggccctgatggccttcggtgtagagcgctataaagccaacctgaccaagtctaacaagggcatccagtacatcgtagacaagctgtttgtgcctgagaaagtacctgatactctacctcatgaggtttccaaactcagagacaatgccaaagctaaagctcagaacatggctgccagagctggaggaatggtccagtag

SEQ ID NO: 1686 - protein, 204 aa, Strongylocentrotus purpuratus
MKHFTAATIFKHSWDQVSSAFWQKYPGPYSKHVLSEDVVSRYISPDCKLHSTRLLTKTNRMPKWGGFLFGGNSRFVSIVEESVVDPEKKTMTTYTRNIGYQNFMVLEEKCVFSQSEENKDWTQLERHVWVNSSLYGFSRALMAFGVERYKANLTKSNKGIQYIVDKLFVPEKVPDTLPHEVSKLRDNAKAKAQNMAARAGGMVQ

SEQ ID NO: 1687 - DNA, 639 bp, Tribolium castaneum
  CDS (1)..(639)
atgaccaggttttttgagcaaaccacgatttttaactacacctgggaccaagtggctcaaggcttttggaagcgatatccaaaccccaacagcaaacatgtgctgagtgaagacacagtttgtcgtgatgtgcgttcagggcgcttattttccatacggttgctcagcaaaaccaacccaattccaaagtgggcagagaggttcatcacctccaaacatgtccacattatcgaagaatcaattgttgacccagtgaataaagtctttattacgtacacccggaaccttggctacaccaaagtcatgagcgttacagagaaagttgtctaccaccaaagtgatgaccagcctgggaagaccatagctgtgaggtctgcctggattgattcccaggtcagaggttttagccgagcaatctgtgcatttgggtacgaaaggttcaagaaaaattgctccaaaatggtgggagggttcaaccatgtccttgctagcatgtttccactacaaagcactgttaccacaactcatgccacgataacagcgaccagtaaattgaaagatgcggctaaaaacgcctccgaacttgcgaaatcaaaggcagccccaatttacgcgtctttgcaccccaatcagtcctaa

SEQ ID NO: 1688 - protein, 212 aa, Tribolium castaneum
MTRFFEQTTIFNYTWDQVAQGFWKRYPNPNSKHVLSEDTVCRDVRSGRLFSIRLLSKTNPIPKWAERFITSKHVHIIEESIVDPVNKVFITYTRNLGYTKVMSVTEKVVYHQSDDQPGKTIAVRSAWIDSQVRGFSRAICAFGYERFKKNCSKMVGGFNHVLASMFPLQSTVTTTHATITATSKLKDAAKNASELAKSKAAPIYASLHPNQS

SEQ ID NO: 1689 - DNA, 642 bp, Aedes aegypti
  CDS (1)..(642)
atggccaagtactacgaaaacaccacgacgttcaactattcctgggagcaggtgacgcagtgcttctggaaccggtacccaaatccgttcagcatgcacgtactctcggaggacactgtctgccgggagattaagaacgggaagctccacagcaagcggctgctgaccaagacgaaccgagtgccgaaatggggcgagcggttcttcaaggccaagtccgtcaacatccttgaggagtcggtggtggatccgaaggagcgcgtgctagtcacctacacgaggaacatcggcttcaacaagatcatgagcgtcgtcgagaaagtaacctaccgatcatcaccggacaacccctccaagaccatcgcgacccgatcggcatggatcgactcgtccgtgttcgggttcgccaccgccatccgggcgtttgggctagatcgcttcaaaaagaactgcatgaaaacggccaacggcttcaactacgtcctgcagcacatgtttcccgcccatccgtcttcgctggcggccgtccacaaccaacacctgacgaaggcccagaaaatcaaggaggccgccaaacacgcgtccgaccatgtcaaggcccaagccgaacagtttgtgcaaaatatttccgtgaaaggttga

SEQ ID NO: 1690 - protein, 213 aa, Aedes aegypti
MAKYYENTTTFNYSWEQVTQCFWNRYPNPFSMHVLSEDTVCREIKNGKLHSKRLLTKTNRVPKWGERFFKAKSVNILEESVVDPKERVLVTYTRNIGFNKIMSVVEKVTYRSSPDNPSKTIATRSAWIDSSVFGFATAIRAFGLDRFKKNCMKTANGFNYVLQHMFPAHPSSLAAVHNQHLTKAQKIKEAAKHASDHVKAQAEQFVQNISVKG

SEQ ID NO: 1691 - DNA, 591 bp, Candida albicans
  CDS (1)..(591): transl_table=12
atggtactttattttgaaaataaacatcaatttaaatttgattttgaaactacaagtttagcttattttaatagatatcctaatccatatgctaaacatgtattatcaatagatactattgagtcatatattgataatcaaggtcaattatgtactactagacttatagttaaaactggtcgattaccaaattttattaagccaatattaggtaatagtttaaattcttggattattgaaaaaactataattaatcgacatgataaaacattgatttcttatactagtaatcttgatcatcggaaatttattcgtgttgaagaatatcttaaatattcgggtcatcaagaagataatgataatggtgatggaagaggattgacaaatttggagagtaaagtgaaatttagttcaaatttatttgggtttaaacaaaaaattgaacaatggagtcatcaaaaattttccactaatattaaaaattctcgtgagggattacaatacgttatgatgaaattgaaacaacgaagtaatggattattattacaagagagaaagctaaagccaaagccaccaagtcaatgtgattaa

SEQ ID NO: 1692 - protein, 196 aa, Candida albicans
MVLYFENKHQFKFDFETTSLAYFNRYPNPYAKHVLSIDTIESYIDNQGQLCTTRLIVKTGRLPNFIKPILGNSLNSWIIEKTIINRHDKTLISYTSNLDHRKFIRVEEYLKYSGHQEDNDNGDGRGLTNLESKVKFSSNLFGFKQKIEQWSHQKFSTNIKNSREGLQYVMMKLKQRSNGLLLQERKLKPKPPSQCD

SEQ ID NO: 1693 - DNA, 564 bp, Magnaporthe grisea
  CDS (1)..(564)
atgaaggtctttacaaacaaggacactttcaactactcatgggaggaggtgtcgacggccaactggaggaaatactgcccatggaacgacaagtcgacgcatgtcatcgccgtcgacaccatctcgcgttccgtcgactcccagaccggtatcctgcgcaccgagaggctcatcacctgccggcaaaacgccccggactgggtgtgcaaagtactcggcgccagcaatggcgagtcgctcatgtacgaggtgtcgtacgtcgacgcggcgaacaaaaaggtcactatggtctcgcagaacatgacgtggtcaaacctgataaacgtccaggagaccgttgtctacagcccgctcaacgacaagcagacccagttcgttcaggacgccaagatcaccgctctgtgcggcggctggcagaagatcaggaactcgatcgaggacgccatagtcacccgtttccgtgagaacgccgccaagggccgcgagggcttcgagtccgtcctggccatgagcaagcgtggctttgccgaggagagggctcgtcaggttgtcatggctcaatga

SEQ ID NO: 1694 - protein, 187 aa, Magnaporthe grisea
MKVFTNKDTFNYSWEEVSTANWRKYCPWNDKSTHVIAVDTISRSVDSQTGILRTERLITCRQNAPDWVCKVLGASNGESLMYEVSYVDAANKKVTMVSQNMTWSNLINVQETVVYSPLNDKQTQFVQDAKITALCGGWQKIRNSIEDAIVTRFRENAAKGREGFESVLAMSKRGFAEERARQVVMAQ

SEQ ID NO: 1695 - DNA, 516 bp, Schizosaccharomyces pombe
  CDS (1)..(516)
atgactgcaatatgtactgacaaaaccgagttaaatgcttcctggaatacagtctcttcagcttggctcactagatatccaaatccgtatagtcttcacgtagtctcagctgatgtactcgagcgatatgtggatgatgaaggtcgactatataccgaaagattacttgttaaacagggaagactgcccagatgggcatcggatcttttgaatgttaacaagtcttacatactcgaaagatctgtcattgatccctcaaagcaggaattaaaatccgaaacgttcaatttggatcatgtgaaaattctccgcgtaatagagtacagtcgatttatccaaagctcagaaaactgctcaaaaactatagtagacacgattgccaagtttgtctcacccttaagatttggtcttggtcgtagggttcaaaagtacagtctaaaacgatttcaagaacagctatcgagctctcgtcgcgggcttttatatgtaatccaacaaaagtttcaaccttcttaa

SEQ ID NO: 1696 - protein, 171 aa, Schizosaccharomyces pombe
MTAICTDKTELNASWNTVSSAWLTRYPNPYSLHVVSADVLERYVDDEGRLYTERLLVKQGRLPRWASDLLNVNKSYILERSVIDPSKQELKSETFNLDHVKILRVIEYSRFIQSSENCSKTIVDTIAKFVSPLRFGLGRRVQKYSLKRFQEQLSSSRRGLLYVIQQKFQPS

SEQ ID NO: 1697 - DNA, 25 bp, Artificial sequence
  primer
atggtccttttacacaaaagcacac

SEQ ID NO: 1698 - DNA, 24 bp, Artificial sequence
  primer
tcaaaactgaggatttctcgcctc

SEQ ID NO: 1699 - protein, 192 aa, Artificial sequence
  consensus sequence
  Variant (2)..(8): Xaa in position 2 to 8 is any amino acid
  Variant (10)..(10): Xaa in position 10 is any amino acid
  Variant (11)..(14): Xaa in position 11 to 14 is any or no amino acid
  Variant (16)..(19): Xaa in position 16 to 19 is any amino acid
  Variant (22)..(24): Xaa in position 22 to 24 is any amino acid
  Variant (27)..(28): Xaa in position 27 to 28 is any amino acid
  Variant (30)..(33): Xaa in position 30 to 33 is any amino acid
  Variant (34)..(35): Xaa in position 34 to 35 is any or no amino acid
  Variant (37)..(37): Xaa in position 37 is any amino acid
  Variant (39)..(41): Xaa in position 39 to 41 is any amino acid
  Variant (44)..(50): Xaa in position 44 to 50 is any amino acid
  Variant (52)..(66): Xaa in position 52 to 66 is any amino acid
  Variant (67)..(75): Xaa in position 67 to 75 is any or no amino acid
  Variant (77)..(77): Xaa in position 77 is any amino acid
  Variant (79)..(79): Xaa in position 79 is any amino acid
  Variant (82)..(92): Xaa in position 82 to 92 is any amino acid
  Variant (94)..(101): Xaa in position 94 to 101 is any amino acid
  Variant (103)..(103): Xaa in position 103 is any amino acid
  Variant (105)..(107): Xaa in position 105 to 107 is any amino acid
  Variant (109)..(114): Xaa in position 109 to 114 is any amino acid
  Variant (115)..(123): Xaa in position 115 to 123 is any or no amino acid
  Variant (125)..(150): Xaa in position 125 to 150 is any amino acid
  Variant (151)..(177): Xaa in position 151 to 177 is any or no amino acid
  Variant (179)..(180): Xaa in position 179 to 180 is any amino acid
  Variant (182)..(187): Xaa in position 182 to 187 is any amino acid
  Variant (189)..(191): Xaa in position 189 to 191 is any amino acid
VXXXXXXXYXXXXXNXXXXHVXXXDTXXRXXXXXXGXLXXXRLXXXXXXXPXXXXXXXXXXXXXXXXXXXXXXXXEXSXVDXXXXXXXXXXXNXXXXXXXXVXEXXXYXXXXXXXXXXXXXXXTXXXXXXXXXXXXXXXXXXXXXXXXXXXXXXXXXXXXXXXXXXXXXXXXXXXXXFXXNXXXXXXGXXXV

SEQ ID NO: 1700 - protein, 17 aa, Artificial sequence
  protein pattern
  Variant (2)..(2): Xaa in position 2 is Asp, Glu or Pro
  Variant (3)..(3): Xaa in position 3 is any amino acid
  Variant (4)..(4): Xaa in position 4 is Ala or Ser
  Variant (5)..(5): Xaa in position 5 is any amino acid
  Variant (8)..(8): Xaa in position 8 is Ile, Leu or Val
  Variant (9)..(9): Xaa in position 9 is Ala, Gly, Ser or Thr
  Variant (10)..(10): Xaa in position 10 is any amino acid
  Variant (12)..(12): Xaa in position 12 is any amino acid
  Variant (13)..(13): Xaa in position 13 is Ile, Leu or Val
  Variant (14)..(14): Xaa in position 14 is any amino acid
  Variant (15)..(15): Xaa in position 15 is Arg or Ser
  Variant (16)..(16): Xaa in position 16 is any amino acid
  Variant (17)..(17): Xaa in position 17 is Ile, Met or Val
NXXXXHVXXXDXXXXXX

SEQ ID NO: 1701 - protein, 14 aa, Artificial sequence
  protein pattern
  Variant (2)..(2): Xaa in position 2 is any amino acid
  Variant (3)..(3): Xaa in position 3 is Ser or Thr
  Variant (4)..(4): Xaa in position 4 is any amino acid
  Variant (7)..(7): Xaa in position 7 is Ile or Leu
  Variant (8)..(10): Xaa in position 8 to 10 is any amino acid
  Variant (11)..(11): Xaa in position 11 is Gly, Asn or Gln
  Variant (12)..(13): Xaa in position 12 to 13 is any amino acid
LXXXRLXXXXXXXP

SEQ ID NO: 1702 - DNA, 1113 bp, Glycine max
  CDS (1)..(1113)
atggaggaagttcaagagtctcaaacccaatcatcgctcggtcaagaagaggaaaatgaagtgattactgaaagttcagcatttgttaagggggaaccggcaccagaattcagtagtaaccccccaaaagttgattctgaagttgaggtccttcatgagaaggtcagcaaacaaatcattaaggaaggccatggccagaaaccttccaaatattcaacttgcttcttccattacagggcatgggctgagaaatcacaacacaagtttgaagacacatggcaggagcaacggccaattgagatggtcttaggaaaagaaaagaaagaaatgactgggttgggcattggtgtggcaagcatgaaagctggggagcgtgcgttggtgcgtgtgggctgggaattaggatatggagaggaaggaagcttctcttttccaaatgttccacccaaggcagatttagtttatgaagttgagctcattggctttgatgaaaccaaagaaggcaaagctcgcagtgatatgactgtggaagaaaggattggtgcagcagaccggagaaagatggatggaaatgctttgtatcaggaagaaaaactagaggaggctatgcaacagtatgaaatggccatagcatatatgggagatgacttcatgttccagttgtttgggaagtatagagatatggctctggcagtaaagaatccatgccatcttaacatggcagcctgtttgattaagctgaaccgctacgaagaagccataggacaatgcagcattgtactgggtgaggatgagaacaatgtgaaggcattatttaggcgaggtaaggctagagcagcacttgggcaaacggatactgccagggaagattttctaaaggcaagtaaatatgcccctcaagacaaagcaattgctaaagaattgagattgcttgctgaacatgacaaggctgtttaccaaaagcagaaagagatatataaaggaatatttggaccaaggcctcaaccagttcctaagccaagaaactggctcatacttatttggcagtggttgctttcagtattctatggccttgtcacgctcttcaagcgtgaaaggcataaatctgactaa

SEQ ID NO: 1703 - protein, 370 aa, Glycine max
MEEVQESQTQSSLGQEEENEVITESSAFVKGEPAPEFSSNPPKVDSEVEVLHEKVSKQIIKEGHGQKPSKYSTCFFHYRAWAEKSQHKFEDTWQEQRPIEMVLGKEKKEMTGLGIGVASMKAGERALVRVGWELGYGEEGSFSFPNVPPKADLVYEVELIGFDETKEGKARSDMTVEERIGAADRRKMDGNALYQEEKLEEAMQQYEMAIAYMGDDFMFQLFGKYRDMALAVKNPCHLNMAACLIKLNRYEEAIGQCSIVLGEDENNVKALFRRGKARAALGQTDTAREDFLKASKYAPQDKAIAKELRLLAEHDKAVYQKQKEIYKGIFGPRPQPVPKPRNWLILIWQWLLSVFYGLVTLFKRERHKSD

SEQ ID NO: 1704 - DNA, 1553 bp, Triticum aestivum
  CDS (89)..(1201)
atctgctctgctctcctgatctcctcgactcctccgcctcccaaccaaccacgcccggcgcgtctgcccgcctgcagcgattgccgccatgcccgaagatgccgcgccaatagcccccgcccccgcttctgatctcaccgctggttctagtgatgatgagataacagtagaggatgcttcttttgcgcgtactgaactcccccaagatggcagtgccccacctgtcgtaacaactgatatggaagttctccatgataaagttaagaagcaagtcattaaagaaggccatgggaagataccctcaaaattttctacgtgctttgtgcattacagagcatgggtacaaagctctatgcataaatttgaggatacctggcaagaacagcatccagttgaaattgtcatcggaaaagagaaaaagcaaatgtccggtttgggtattggtgttggtcacatgaaaagtggggaacgtgcactgttgcatgttagctgggagctaggctatgggaaagaaggaagcttttcattcccgaatgtccctccatcagcagaccttatatatgaagttgaactcattggttttgatgatgctaaagagggaaaagcccgtagtgacatgacggtagaagagaggattgaagcagcggataggaggaagcttgagggcaacgattactttaaagagaagaaatttgaggaggctatgcagcaatacgagatggctgttgcgtatatgggagatgatttcatgtttcagttgtttgggaagtacagagatatggctttggctgtgaaaaacccgtgccatctcaacatggctgcttgcctgatcaaacaaaagagatttgacgaagctatcgcacagtgtagcattgtgctgtcagaggacgaaaccaacgtgaaagcactgttcagacgtggaaaagctagagccgagctcggccagacagaatcagcgagggaggactttctgaaagccaagaaacactccccggaagacaaggagatcatgcgggagcttcggtcgctggcggaacaagataaagcgatgtaccagaagcagagggagctatacaaaggtctgtttgggccgaggcctcagcccaaacccaaggccaaaaatttcgccgtcctcttctggcagtggctggtgtcactgctccgttatcttgccaggatgttcacgcgcaagaatgactagggtggctctgatgcaagtgctgctggcggcataccgacacgacaagggaaaacctgatgatacatctatagcttgtggtcaagacacaaccttcctctatatatacttgagtacaattgttttggtatggagttttgccgcgcactttggactggaggggatggtctctttgtgtttatgaagattggaactgcagtttcagtttcagaatgtccttccttccacttggataacagtgattcactgggaaggcagagtgttcagggcctaagatctaggatatctcgtgttgtattactagtatagtgtttgcaagcacattattctggtgaaaacaaaaaaaaaaaaaaaa

SEQ ID NO: 1705 - protein, 370 aa, Triticum aestivum
MPEDAAPIAPAPASDLTAGSSDDEITVEDASFARTELPQDGSAPPVVTTDMEVLHDKVKKQVIKEGHGKIPSKFSTCFVHYRAWVQSSMHKFEDTWQEQHPVEIVIGKEKKQMSGLGIGVGHMKSGERALLHVSWELGYGKEGSFSFPNVPPSADLIYEVELIGFDDAKEGKARSDMTVEERIEAADRRKLEGNDYFKEKKFEEAMQQYEMAVAYMGDDFMFQLFGKYRDMALAVKNPCHLNMAACLIKQKRFDEAIAQCSIVLSEDETNVKALFRRGKARAELGQTESAREDFLKAKKHSPEDKEIMRELRSLAEQDKAMYQKQRELYKGLFGPRPQPKPKAKNFAVLFWQWLVSLLRYLARMFTRKND

SEQ ID NO: 1706 - DNA, 1853 bp, Pinus radiata
  CDS (481)..(1611)
gtggccaatgagattactgaagctgaagacggatatacaacccggaccacattcccaattgaatttgtagcagctcttgtgcatgcccacgtagttctgacatcaaatttaggacgcaacataatgtattcaacttcgcatttcttcttctaacgaccagcggttttctcccttgaagtgaggcttcgtgtcatttaataactaggtagggttttcagaagtggggttcatcgcatttgccagtacttgcaatggtacagcggagagaagggggtgcgaggtacaatattgaaaatggcggatcgtgattatgcgaggacaatattggtcaaattgaattgactggatctcatggttagagagcttagtgggatcgagacgctacagagacaatatacaggaggggtctctcgttcatcactctagacagtgtgtaactgcacttcaacaaatatattttagaaagaatctctgctatttatggagatggacgagattcaggaacagtcccaaccccaatccagtgagaagcaggatatttctcaagaatctgacacaggcaatgataaaacaattaatgctgaaaagatcacatccgagaatgctgaagttgaggaagatgatatgcttcctccaaaagttaatactgaagtggaagttcttcatgataaagttacaaaacaaatcatcaaggaagggagtggaaacaaaccttcacggaattcgacatgcttcttgcactacagagcgtgggctgaaagcactatgcacaagtttcaggacacctggcaagaacaacagccactcgaactggttttgggcagagagaaaaaagaattgagtggctttgccattggtgtggctggcatgaaagctggtgaacgtgccttgcttcatgtggactggcaattaggttatggggaagaagggaacttctcttttccaaatgtaccacctagagccaatcttatatatgaagctgagcttattggttttgaggaagccaaggaaggtaaggcacgtagtgatatgacagtagaggagcgaattgaagcagcagataggagacggcagcaaggtaatgaacttttcaaggaggacaaattagcagaggctatgcaacagtatgaaatggccctagcatacatgggagatgattttatgtttcagttgtttggaaaatacaaggatatggcaaatgctgtgaagaacccttgccatcttaatatggctcaatgtttgttgaagctgaaccgttatgaagaagccattggccaatgtaacatggtattagctgaggatgagaagaatatcaaggctttattcagacgtggtaaggcaagagctactctagggcagactgatgatgcaagagaggactttcagaaggttcggaaattttctcctgaagataaggcagtgatacgagagttgcgtctccttgctgaacatgataagcaggtttatcagaaacagaaggagatgttcaagggtctttttgggcaaaaaccagaacagaaaccaaagaagttacactggtttgttgtgttttggcagtggcttctgtcgatgataagaactatttttaggatgagatccaaaactgactaattaattatggttcaatttgccgatcttgttaataataaatataacttaatttgtctgttgccaataagatctatgcaacaatgctattcgacttggaagttgtgaagtggatcactactggattccgttacattagttattgcaagttggttattatgtacgtttatatcacagaactttgacaattgtctgtgaactacagtattaaatagttttggtgcttgttactcttaaaaaaaaaa

SEQ ID NO: 1707 - protein, 376 aa, Pinus radiata
MEMDEIQEQSQPQSSEKQDISQESDTGNDKTINAEKITSENAEVEEDDMLPPKVNTEVEVLHDKVTKQIIKEGSGNKPSRNSTCFLHYRAWAESTMHKFQDTWQEQQPLELVLGREKKELSGFAIGVAGMKAGERALLHVDWQLGYGEEGNFSFPNVPPRANLIYEAELIGFEEAKEGKARSDMTVEERIEAADRRRQQGNELFKEDKLAEAMQQYEMALAYMGDDFMFQLFGKYKDMANAVKNPCHLNMAQCLLKLNRYEEAIGQCNMVLAEDEKNIKALFRRGKARATLGQTDDAREDFQKVRKFSPEDKAVIRELRLLAEHDKQVYQKQKEMFKGLFGQKPEQKPKKLHWFVVFWQWLLSMIRTIFRMRSKTD

SEQ ID NO: 1708 - DNA, 1673 bp, Glycine max
  CDS (163)..(1296)
gatcaagtgacacacgatacgaacaaaagctgatcaatccagtcaacgtaagagagttccactgtctttccacttccacaattttcatctcccttggtgtttggttcctcttaaaatctatactaatctagttagttttttcttactctcctcaaattgtgtatgcaacaaaaattttgtagaatggaggaagttcaagagtctcaaacccaatcatcgctcggtcaagaagaggaaaatgaagtgattactgaaagttcagcatttgttaagggggaaccggcaccagaattcagtagtaaccccccaaaagttgattctgaagttgaggtccttcatgagaaggtcagcaaacaaatcattaaggaaggtcatggccagaaaccttccaaatattcaacttgcttcttccattacagggcgtgggctgagaaatcacaacacaagtttgaagacacatggcaggagcaacggccaattgagatggtcttaggaaaagaaaagaaagaaatgactgggttgggcattggtgtggcaagcatgaaagctggggagcgggcgttggtgcgtgtgggctgggaattaggatatggagaggaaggaagcttctcttttccaaatgttccacccaaggcagatttagtttatgaagttgagctcattggctttgatgaaaccaaagaaggcaaagctcgcagtgatatgactgtggaagaaaggattggtgcagcagaccggagaaagatggatggaaatgctttgtatcaggaagaaaaactagaggaggctatgcaacagtatgaaatggccatagcatatatgggagatgacttcatgttccagggctgcgaaagacgacagaagggggctctggcagtaaagaatccatgccatcttaacatggcagcctgtttgattaagctgaaccgctacgaagaagccataggacaatgcagcattgtactgggtgaggatgagaacaatgtgaaggcattatttaggcgaggtaaggctagagcagcacttgggcaaacggatactgccagggaagattttctaaaggcaagtaaatatgcccctcaagacaaagcaattgctaaagaattgagattgcttgctgaacatgacaaggctgtttaccaaaagcagaaagagatatataaaggaatatttggaccaaggcctcaaccagttcctaagccaagaaattggctcatacttatttggcagtggttgctttcagtattctatggccttgtcacgctcttcaagcgtcaaaggcataaatctgactaaacaagaagaccattgctgagttgagttgacaattatttacgtgcatcctacgaaaggccacgtcttgtgctactgaggaaataatcatacttctactattttgctttgcttgtggaacaatcaaacgttgaaaaagcagtgctgatttctctcttaggagtcatctttgacaatgctatcaatcgcttatgttgctttcaaatagagtttggtagtttgtctagaaggaacttgttctttaatttaatctctagtaattgaaatgggaaatgatcagtgttgctgaaatcagatagttattttcaaaaagatttgtagtgtgcctttgaaatttgaattaattcatgatcgggtagatctaatgcatggatatttcc

SEQ ID NO: 1709 - protein, 377 aa, Glycine max
MQQKFCRMEEVQESQTQSSLGQEEENEVITESSAFVKGEPAPEFSSNPPKVDSEVEVLHEKVSKQIIKEGHGQKPSKYSTCFFHYRAWAEKSQHKFEDTWQEQRPIEMVLGKEKKEMTGLGIGVASMKAGERALVRVGWELGYGEEGSFSFPNVPPKADLVYEVELIGFDETKEGKARSDMTVEERIGAADRRKMDGNALYQEEKLEEAMQQYEMAIAYMGDDFMFQGCERRQKGALAVKNPCHLNMAACLIKLNRYEEAIGQCSIVLGEDENNVKALFRRGKARAALGQTDTAREDFLKASKYAPQDKAIAKELRLLAEHDKAVYQKQKEIYKGIFGPRPQPVPKPRNWLILIWQWLLSVFYGLVTLFKRQRHKSD

SEQ ID NO: 1710 - DNA, 1349 bp, Magnoliophyta
  CDS (95)..(1192)
ggtcgatccagtcttcgtgagtgacttcgacgacgacgacgagtcacactactcttgagcttctcatacttcacccaggttgatttgggaaataatggatgaatctctggagcatcaaactcaaacacatgaccaagagagcgaaatagttactgaaggaagtgccgttgtgcatagtgagccatctcaagagggtaatgttcctcctaaagttgatagtgaagctgaggtcttggatgagaaagtcagtaagcagattataaaggaaggtcacggttccaaaccatccaagtactctacatgctttttgcactacagggcatggaccaaaaactcgcagcacaaatttgaggatacatggcatgagcagcaacctattgaattggttcttggaaaagagaaaaaagaactagccggtttagccatcggtgttgctagcatgaagtctggtgaacgtgcgcttgtgcatgttggctgggaattagcttataggaaagaaggaaacttttcttttcccaatgttccacctatggcagacttgttatatgaggtggaagttattgggtttgatgaaacaaaggagggaaaagctcgcagtgatatgactgtagaggaaaggattggtgcagcagacagaagaaaaatggatgggaattctctttttaaggaggagaaactggaggaagccatgcaacagtatgaaatggccatagcatacatgggggacgattttatgtttcagctgtatgggaagtaccaggatatggctttagcagttaaaaacccatgccatcttaacatagcagcttgcctcatcaaactaaaacgatacgatgaagcaattggtcactgcaacattgtgttgacagaagaagagaaaaacccaaaagcactgttcagaagagggaaagcaaaggcagagctaggacagatggactcagcacgtgatgatttccgaaaggcacaaaagtatgctcctgacgacaaggcgattagaagagagctacgagcacttgcagagcaagagaaagccttgtaccaaaagcagaaagaaatgtacaaaggaatattcaaagggaaagatgaaggtggtgctaagtcaaagagccttttttggttgatagtgttatggcaatggtttgtttcccttttctcccgtatctttcgacgccacagagttaaagcagattaatgtatgaagaagggtaacaattcaactctaaaagaccaacgtgaaagatctacccccatttcttattagtgagaattttgaaaaatattttatataagagaaaaaaatagtctctattgttttcgattataaattagtaactttatatttttgatcc

SEQ ID NO: 1711 - protein, 365 aa, Magnoliophyta
MDESLEHQTQTHDQESEIVTEGSAVVHSEPSQEGNVPPKVDSEAEVLDEKVSKQIIKEGHGSKPSKYSTCFLHYRAWTKNSQHKFEDTWHEQQPIELVLGKEKKELAGLAIGVASMKSGERALVHVGWELAYRKEGNFSFPNVPPMADLLYEVEVIGFDETKEGKARSDMTVEERIGAADRRKMDGNSLFKEEKLEEAMQQYEMAIAYMGDDFMFQLYGKYQDMALAVKNPCHLNIAACLIKLKRYDEAIGHCNIVLTEEEKNPKALFRRGKAKAELGQMDSARDDFRKAQKYAPDDKAIRRELRALAEQEKALYQKQKEMYKGIFKGKDEGGAKSKSLFWLIVLWQWFVSLFSRIFRRHRVKAD

SEQ ID NO: 1712 - DNA, 1113 bp, Glycine max
  CDS (1)..(1113)
atggaggaacttcaagggtctcaaacccaatcatcgctcggtcaagaagatgaaaatgaagtgattactgaaagttcagcatttgttaaaggggaaccggcaccagaattcagtagtaaccccccaaaagttgattctgaagttgaagtccttcatgagaaggtcaccaagcaaatcattaaggaaggccatggccagaaaccttccaaatattcaacttgcttcttccattacagggcatgggctgagaaatcagaacacaagtttgaagacacatggctggagcaacggccaattgagatggtcttaggaaaagaaaagaaagaaatgactggcttgagcgttggtgtggcaagcatgaaagctggggagcgggcattggtgcgtgtgggctgggaattaggatatggagaggaaggaagcttctcttttccaaatgttccacccaaggcagatttagtttatgaagttgagctcattggctttgatgaaaccaaagaaggcaaagctcgcagtgatatgactgtggaagaaaggattggtgcagcagaccggagaaagatggatggaaatgctttgtatcaggaagaaaaactagaggaggctatgcaacagtatgaaatggccatagcatatatgggagatgacttcatgttccagttgtttgggaagtatagagatatggctctggctgtaaagaatccatgccatcttaacatggcagcctgtttgattaagctgaaccgctacgaagaagctataggacaatgcaacactgtactgggtgaggatgagaacaatgtgaaggcgttatttaggcgaggtaaggctagagcaacacttgggcaaacagatgctgccagggaagattttctaaaggcaactaaatatgcccctcaagacaaagcaattgctaaagaattgagattgcttgctgaacatgacaaggctgtttaccaaaagcagaaagagatatataaaggaatatttggaccaaggcctcaaccagttcctaagccaagaaactggctcatacttatttggcagtggttgctttcagtattctatggccttgtcacgctcttcaagcgtgaaaggcataaatctgactaa

SEQ ID NO: 1713 - protein, 370 aa, Glycine max
MEELQGSQTQSSLGQEDENEVITESSAFVKGEPAPEFSSNPPKVDSEVEVLHEKVTKQIIKEGHGQKPSKYSTCFFHYRAWAEKSEHKFEDTWLEQRPIEMVLGKEKKEMTGLSVGVASMKAGERALVRVGWELGYGEEGSFSFPNVPPKADLVYEVELIGFDETKEGKARSDMTVEERIGAADRRKMDGNALYQEEKLEEAMQQYEMAIAYMGDDFMFQLFGKYRDMALAVKNPCHLNMAACLIKLNRYEEAIGQCNTVLGEDENNVKALFRRGKARATLGQTDAAREDFLKATKYAPQDKAIAKELRLLAEHDKAVYQKQKEIYKGIFGPRPQPVPKPRNWLILIWQWLLSVFYGLVTLFKRERHKSD

SEQ ID NO: 1714 - DNA, 963 bp, Oryza sativa Japonica Group
  CDS (1)..(963)
atggctgtggtggaggaagaagagggctcgccgccggcacccgccgccgccgccgatcccgcctcctctggttcaagtgataatgagataactgtagaggaagcttcttttgtgcatactgaacctccgcaagatggctctgtcccacctgtggtttcctctaatatggaggtccttcatgacaaagttaaaaaacaagtcatcaaagaaggccatggcaagaaaccatcaaagttcgcgacgtgctttttgcactatagagcttgggttcaaggctctctgcataaattcgaggatacttggcaagaacagcatcccattgaactagtaattggaaaagagaaaaaacaaatgtctggtttaggcattggtgttggtaacatgagaagtggggagcgtgcactgttgcatgttggctgggagctaggctatgggaaagaagggagcttttcattcccaaatgtccctccaatggcagatcttttatatgaagttgaacttattgggtttgatgatgtcaaagaggggaaagcccgaagtgacatgacagtagaggaaaggattgaagcagcggacaggaggaagattgagggcaatgagtatttcaaagaaaagaagtttgaggaggccatgcagcaatatgaaatggcgattgcatacatgggagatgacttcatgtttcaattgttcgggaaatacagagatatggccttggctgtgaaaaatccatgtcatctcaacatggccgcatgcctaatcaaactgaagagattcgatgaagctatcgcacagtgtagtattgtgttggcagaggatgaaaacaatgtgaaagcattgttcagacgaggaaaagcaagagctgaacttggtcagacagaatcagcgagggaggacttcctgaaagccaagaaacattccccagaagacaaggagatccagcgtgccagcaataggccaacctag

SEQ ID NO: 1715 - protein, 320 aa, Oryza sativa Japonica Group
MAVVEEEEGSPPAPAAAADPASSGSSDNEITVEEASFVHTEPPQDGSVPPVVSSNMEVLHDKVKKQVIKEGHGKKPSKFATCFLHYRAWVQGSLHKFEDTWQEQHPIELVIGKEKKQMSGLGIGVGNMRSGERALLHVGWELGYGKEGSFSFPNVPPMADLLYEVELIGFDDVKEGKARSDMTVEERIEAADRRKIEGNEYFKEKKFEEAMQQYEMAIAYMGDDFMFQLFGKYRDMALAVKNPCHLNMAACLIKLKRFDEAIAQCSIVLAEDENNVKALFRRGKARAELGQTESAREDFLKAKKHSPEDKEIQRASNRPT

SEQ ID NO: 1716 - DNA, 1224 bp, Physcomitrella patens subsp. patens
  CDS (1)..(1224)
atggggcacgagtatgatgttcaaccgtcggtagaatcagaatcagcggccttgcttgaggagagagaaaaagcagcaagttcagattccgacacagaaaccaaggtccaaaaccaacaagatcacgagagacccattgcaccagctagtaaagttgatgcttccgagacggctaagcatgagacaactgaagagggagacattttggaagaaagagatgaatcattgccaccaagggtgaaatcggagaaagtattaatcaaagagggcgtcagtaagcaagtcatcaaagaagggcagggtgacgggccgcctcctaggcattcaagctgctttgtgcactatcgagcatggacagcgagcacaatgcacaagtttgatgatacttggaatgagcaacaaccccaagagcttaggcttggtcatgagaagaaagtgctcaaagggcttgctataggagtgggcagcatgaaaataggtgaacgcgctctacttcatatcagctacaatcttgcatacggcaaggagggcagcttttcctttcccaatgtgccccccatggcagatgtcctgtacgaggtggagctcataggttaccaagaacctcgagagggaagagtgccaggtgagatggtagtagaggagcgcatcgaggcagcggatcgccggagagtggatggaaacgagttattcaaggaagggaaaattgccgaagccatgcagcaatatgaaatggcactcgcttacatgggtgatgacttcatgtttcaactctttggcaagtaccacgacatggccattgcagtaaaaaatccgtgtcatctcaaccttgctatgtgtatgctcaaaatacaccgctttgaggaagccatcggtcactgctctgtggtgcttgctgaagatccgaagaacaccaaagccttatttcgtcgcgggaaagcacgtgctgagttagggcaaaccgatgcagctaagggagactttgagaaggctcgacagctagagccagacaacaaggacgtgattcgcgagttgcgcttgattgcaaagcaagaacgtgagctctatgataaacaacgagagatgtacaagggcctcttcaaaccgccccctactaccactacttcacagagcagtgcgacgcattggtattcaaaggtttggcagtggattgcacccctcttccgaatcttttccaagcttcaacggtccaaagaggaatga

SEQ ID NO: 1717 - protein, 407 aa, Physcomitrella patens subsp. patens
MGHEYDVQPSVESESAALLEEREKAASSDSDTETKVQNQQDHERPIAPASKVDASETAKHETTEEGDILEERDESLPPRVKSEKVLIKEGVSKQVIKEGQGDGPPPRHSSCFVHYRAWTASTMHKFDDTWNEQQPQELRLGHEKKVLKGLAIGVGSMKIGERALLHISYNLAYGKEGSFSFPNVPPMADVLYEVELIGYQEPREGRVPGEMVVEERIEAADRRRVDGNELFKEGKIAEAMQQYEMALAYMGDDFMFQLFGKYHDMAIAVKNPCHLNLAMCMLKIHRFEEAIGHCSVVLAEDPKNTKALFRRGKARAELGQTDAAKGDFEKARQLEPDNKDVIRELRLIAKQERELYDKQREMYKGLFKPPPTTTTSQSSATHWYSKVWQWIAPLFRIFSKLQRSKEE

SEQ ID NO: 1718 - DNA, 1128 bp, Oryza sativa subsp
  CDS (1)..(1128)
atggctgtggtggaggaagaagagggctcgccgccggcacccgccgccgccgccgatcccgcctcctctggctcaagtgataatgagataactgtagaggaagcttcttttgtgcatactgaacctccgcaagatggctctgtcccacctgtggtttcctctaatatggaggtccttcatgacaaagttaaaaaacaagtcatcaaagaaggccatggcaagaaaccatcaaagttcgcgacgtgctttttgcactatagagcttgggttcaaggctctctgcataaattcgaggatacttggcaagaacagcatcccattgaactagtaattggaaaagagaaaaaacaaatgtctggtttaggcattggtgttggtaacatgagaagtggggagcatgcactgttgcatgttggctgggagctaggctatgggaaagaagggagcttttcattcccaaatgtccctccaatggcagatcttttatatgaagttgaacttattgggtttgatgatgtcaaagaggggaaagcccgaagtgacatgacagtagaggaaaggattgaagcagcggacaggaggaagattgagggcaatgagtatttcaaagaaaagaagtttgaggaggccatgcagcaatatgaaatggcgattgcatacatgggagatgacttcatgtttcaattgttcgggaaatacagagatatggccttggctgtgaaaaatccatgtcatctcaacatggccgcatgcctaatcaaactgaagagattcgatgaagctatcgcacagtgtagtattgtgttggcagaggatgaaaacaatgtgaaagcattgttcagacgaggaaaagcaagagctgaacttggtcagacagaatcagcgagggaggacttcctgaaagccaagaaacattccccagaagacaaggagatccagcgtgagcttcggtctctcgcggaacaggataaagctctgtaccaaaaacagaaggagctgtacaaaggcctctttggtccaaggcccgaacccaagccgaaggcgtcaaattccatcgttcgcttctggcagtggctcgtgtccttgattggttatctcataaaactgttcaaacccaagaatgaatga

SEQ ID NO: 1719 - protein, 375 aa, Oryza sativa subsp
MAVVEEEEGSPPAPAAAADPASSGSSDNEITVEEASFVHTEPPQDGSVPPVVSSNMEVLHDKVKKQVIKEGHGKKPSKFATCFLHYRAWVQGSLHKFEDTWQEQHPIELVIGKEKKQMSGLGIGVGNMRSGEHALLHVGWELGYGKEGSFSFPNVPPMADLLYEVELIGFDDVKEGKARSDMTVEERIEAADRRKIEGNEYFKEKKFEEAMQQYEMAIAYMGDDFMFQLFGKYRDMALAVKNPCHLNMAACLIKLKRFDEAIAQCSIVLAEDENNVKALFRRGKARAELGQTESAREDFLKAKKHSPEDKEIQRELRSLAEQDKALYQKQKELYKGLFGPRPEPKPKASNSIVRFWQWLVSLIGYLIKLFKPKNE

SEQ ID NO: 1720 - DNA, 2157 bp, Oryza sativa subsp
  CDS (1)..(2157)
atggccgtgctggaagaagatccggccccggtacccgccgccgattctacctccggtgctagcgatgatgagataacagtggaagaaacttcctttgtgcatactgagcctcctcaagatggcactgctccacctgtggttacctctgatatggaagtccttaatgataaagtcaaaaagcaagtcatcaaggaaggccatggcaagaaaccctcaaggtttgccacatgctttgttcactatagagcatgggttcaaggttcttcgcacaaattcgaggatacttggcaagaacagcatccaattgaactagtacttggaaaagagaaaaaggaaatgactggtttaggcattggtgtcagtaacatgagaagtggggagcgtgcattgttacatgttaactgggagcttggctatgggaaagaaggaagcttttcattcccaaatgtccctccaatggcagaccttgtatatgaagttgaacttattgggtttgatgatgtcaaagaggttcctaggaagcttacagataatgtaaaactacagggaaaagcccgaagtgatatgacagtggaagaaaggattgaagcagcagacaggaggaagattgaaggcaatgaatatttcaaagaaaagaagttcgaggaggctatgcagcaatatgaaatggcaattgcatacatgggggatgatttcatgtttcaattgtttgggaagtacagagacatggccttagctgtgaaaaatccctgccatctcaacatggccgcatgcctgatcaaactgaagagatttgatgaagctatcgcacagtgtacaattgtgttgtcagaggatgaaaacaacgtgaaagcgttgttcagacgaggaaaagctagagctgaacttggtcaaacagaatcagcaagggaggacttcctgaaggccaagaagtattctccagaagacaaggagatccagcgcgagcttcggtcgctcgcggagcaggataaagctctgtaccagaaacaaaaggagctatacaaaggtctgttcgggccaaggcctgaacccaaaccgaaggcgtcaaatttcctagttctcttctggcgatggctgccccacgccgcctccaatggatcgaagcccgcggatctgaaggaccttatcgccgggctgtacggatcgcagccgctctcttcccccgtcgccgatgaggcgggtgaagaggagatggtgccggtggtggaggacggggacgagttcggagacgatggctgggaattcaaggccgcgccgtcgtcagatggtggacgagcgaatggggatggaattgaggatgtaccaaaatcattgggaagtgaccaggaagatgttagctacctaactagcaagcaagaacaattttcacagatgagatttctctcacgccaatccaaccggattgcatcctccgccgccaatcgcctccagattctattagtcaaagcatcatcaccatcattcctgacagaagactggtcactatttactagtgtggatgaaaatttgaaccatgttcgaactacaaaccacattgaaacttgtaagtccacaggtcctaatgatgcagccatacttgacctgtacaaagaaactgagctggttgatgctgtacacatgacacaaagttcttcagaaagtgtgcagagcccttctgatatgttctcaaataatgaaatgaactcttcatttgaaacagatgaaaatcattcaattaaatcttcaagcgataggactttgattgatttctaccataagctgagggaagaaacactgacagtaatatttcggaatgggaaggattttaaggaaatctgtgagaaactacctgaaggtttttgtatagaggaacatactgcaaaggatgtattcatttctgaactgcttgacagtgccagagaggttcatttgaaggattttgaggaagaatatcatttaatagaaaagataccgatgcatggtgtggtgctttggcaagaatcctgtcaatcaaatgtctgcaacgtagtaatttcccaaggtggccaattctttattgctcttggggagatttacagagttgcacagattctaaatttatccttgcagtccttcaagccctgggttcttgctgatcctggaatggaatggaagtga

SEQ ID NO: 1721 - protein, 718 aa, Oryza sativa subsp
MAVLEEDPAPVPAADSTSGASDDEITVEETSFVHTEPPQDGTAPPVVTSDMEVLNDKVKKQVIKEGHGKKPSRFATCFVHYRAWVQGSSHKFEDTWQEQHPIELVLGKEKKEMTGLGIGVSNMRSGERALLHVNWELGYGKEGSFSFPNVPPMADLVYEVELIGFDDVKEVPRKLTDNVKLQGKARSDMTVEERIEAADRRKIEGNEYFKEKKFEEAMQQYEMAIAYMGDDFMFQLFGKYRDMALAVKNPCHLNMAACLIKLKRFDEAIAQCTIVLSEDENNVKALFRRGKARAELGQTESAREDFLKAKKYSPEDKEIQRELRSLAEQDKALYQKQKELYKGLFGPRPEPKPKASNFLVLFWRWLPHAASNGSKPADLKDLIAGLYGSQPLSSPVADEAGEEEMVPVVEDGDEFGDDGWEFKAAPSSDGGRANGDGIEDVPKSLGSDQEDVSYLTSKQEQFSQMRFLSRQSNRIASSAANRLQILLVKASSPSFLTEDWSLFTSVDENLNHVRTTNHIETCKSTGPNDAAILDLYKETELVDAVHMTQSSSESVQSPSDMFSNNEMNSSFETDENHSIKSSSDRTLIDFYHKLREETLTVIFRNGKDFKEICEKLPEGFCIEEHTAKDVFISELLDSAREVHLKDFEEEYHLIEKIPMHGVVLWQESCQSNVCNVVISQGGQFFIALGEIYRVAQILNLSLQSFKPWVLADPGMEWK

SEQ ID NO: 1722 - DNA, 1149 bp, Oryza sativa subsp
  CDS (1)..(1149)
atggccgtgctggaagaagatccggccccggtacccgccgccgattctacctccggtgctagcgatgatgagataacagtggaagaaacttcctttgtgcatactgagcctcctcaagatggcactgctccacctgtggttacctctgatatggaagtccttaatgataaagtcaaaaagcaagtcatcaaggaaggccatggcaagaaaccctcaaggtttgccacatgctttgttcactatagagcatgggttcaaggttcttcgcacaaattcgaggatacttggcaagaacagcattcaattgaactagtacttggaaaagagaaaaaggaaatgactggtttaggcattggtgtcagtaacatgagaagtggggagcgtgcattgttacatgttaactgggagcttggctatgggaaagaaggaagcttttcattcccaaatgtccctccaatggcagaccttgtatatgaagttgaacttattgggtttgatgatgtcaaagaggttcctaggaagcttacagataatgtaaaactacagggaaaagcccgaagtgatatgacagtggaagaaaggattgaagcagcagacaggaggaagattgaaggcaatgaatatttcaaagaaaagaagttcgaggaggctatgcagcaatatgaaatggcaattgcatacatgggggatgatttcatgtttcaattgtttgggaagtacagagacatggccttagctgtgaaaaatccctgccatctcaacatggccgcatgcctgatcaaactgaagagatttgatgaagctatcgcacagtgtacaattgtgttgtcagaggatgaaaacaacgtgaaagcgttgttcagacgaggaaaagctagagctgaacttggtcaaacagaatcagcaagggaggacttcctgaaggccaagaagtattctccagaagacaaggagatccagcgcgagcttcggtcgctcgcggagcaggataaagctctgtaccagaaacaaaaggagctatacaaaggtctgttcgggccaaggcctgaacccaaaccgaaggcgtcaaatttcctagttctcttctggcgatggctggtctccttaattggctatcttgttaaactgttcaaacgcaaggatgagtag

SEQ ID NO: 1723 - protein, 382 aa, Oryza sativa subsp
MAVLEEDPAPVPAADSTSGASDDEITVEETSFVHTEPPQDGTAPPVVTSDMEVLNDKVKKQVIKEGHGKKPSRFATCFVHYRAWVQGSSHKFEDTWQEQHSIELVLGKEKKEMTGLGIGVSNMRSGERALLHVNWELGYGKEGSFSFPNVPPMADLVYEVELIGFDDVKEVPRKLTDNVKLQGKARSDMTVEERIEAADRRKIEGNEYFKEKKFEEAMQQYEMAIAYMGDDFMFQLFGKYRDMALAVKNPCHLNMAACLIKLKRFDEAIAQCTIVLSEDENNVKALFRRGKARAELGQTESAREDFLKAKKYSPEDKEIQRELRSLAEQDKALYQKQKELYKGLFGPRPEPKPKASNFLVLFWRWLVSLIGYLVKLFKRKDE

SEQ ID NO: 1724 - DNA, 1098 bp, Vitis vinifera
  CDS (1)..(1098)
atggaggatgtggaggagctgcaaagtcaaaaacctgatcaggacgatgaaaatgaaatagttactgaaaatgcagcatttgtgcatggggaacctcttcaagatggtacgggtcctccaaaagttgattctgaagtggaagttcttcatgagaaagtcacaaagcaaatcatgaaggaaggtcatggtcagaaaccatccaaatactcaacatgtttcttgcattacagggcatggactgaaagcacccagcacaagtttgaagacacatggaatgaacaacgtccagttgaaatagtcataggaaaagagaaaaaagaaatgacaggattggctattggtgtctccaacatgaagtctggtgaacgtgcccttttacatgtgggttgggaattgggctatgggaaagaaggaagtttttctttcccgaatgttccgcctatggcagatattttgtatgaagttgagcttattggctttgatgaaactaaagaggggaaagcacgtggtgacatgacggtggaggaaagaattggagcagcagaccgaagaaagatggatggaaatgtttacttcaaggaggaaaaactagaggaggctatgcaacagtatgaaatggccatagcatatatgggagatgacttcatgttccagttgtttgggaagtaccgtgacatggctttggctgtgaagaatccatgccaccttaacatggcagcatgcctgataaagctgaagcgctacgaagaagccattggtcaatgcagcattgtattggcagaggatgaaaacaatgtcaaggcattatttagacgaggaaaagctagagcagaacttgggcaaacagatgctgcccgtgaggacttcagtaaggcccgtaaatatgcacctgaagacaaagccatttcaagggagttacgtttgcttgcagaacatgacaaggctgtttatcagaagcaaaaggagatctacaaaggaatctttggaccaccacctgaacccaaacccaagaaaactaattggctaatcctcttctggcaatggctcgtgtcattactctattccctcttcaaacgggaaagacacaaagctgattaa

SEQ ID NO: 1725 - protein, 365 aa, Vitis vinifera
MEDVEELQSQKPDQDDENEIVTENAAFVHGEPLQDGTGPPKVDSEVEVLHEKVTKQIMKEGHGQKPSKYSTCFLHYRAWTESTQHKFEDTWNEQRPVEIVIGKEKKEMTGLAIGVSNMKSGERALLHVGWELGYGKEGSFSFPNVPPMADILYEVELIGFDETKEGKARGDMTVEERIGAADRRKMDGNVYFKEEKLEEAMQQYEMAIAYMGDDFMFQLFGKYRDMALAVKNPCHLNMAACLIKLKRYEEAIGQCSIVLAEDENNVKALFRRGKARAELGQTDAAREDFSKARKYAPEDKAISRELRLLAEHDKAVYQKQKEIYKGIFGPPPEPKPKKTNWLILFWQWLVSLLYSLFKRERHKAD

SEQ ID NO: 1726 - DNA, 1110 bp, Populus trichocarpa
  CDS (1)..(1110)
atggaggagattccaagccaatcgattggtaaagatgatgaaaatgaaagagctatggaagaagctgcggttgtgcgtggtgagcctttgcaagatgggaatcatcctccgaaagtcgaatccgcggttgaaatacttcaagagaaagtcaccaagcaaatcattaaggaaggtcatggtcagaagccaaccaaatatgcaacatgctttttgcactacagggcatggacagaaagcactcagcacaagttcgatgatacatggcatgaacaacgaccatttgaaatggttttaggaaaagagaagaatgaaatggcgggtttagctgttggtgtttccagtatgaaggctggtgaacgtgccctcttacatgtgggctgggaattaggctatgggaaagaagggaacttttctttcccaaatgttcctcccatggcagatataatatatgaagtcgagcttataggatttgatgaagtcaaagaagggaaagctcgtggtgatatgactgcagaagagaggatcggtgcagcagatcgaagaaaaatggatggaaattctctatttaaggaggaaaaacttgaggaggctatgcagcagtatgaaatggcaattgcatatttgggcgacgactttatgtttcagctgtttggcaagtaccgagacatggcattggcagtgaagaatccatgtcatcttaacatggcggcttgtctgatcaagcttgagcgctatgaagaagccattgcacaatgcaccattgtactggtagaggatgaaaacaatgctaaggctttgttcagaagagggaaagccagagcagagcttgggcagacagatgctgcccgggaagactttctcaaggcacgtaaacatgcacctgaagacaaggcaattttgagggagttgcgtttgctggatgagcatgataaagctatatataagaagcaaaaggagatatatagagggattttcggaccaccaccacagccaaaaccgaagccaactaatgtgctgattcgcatatggcaatggtcaatcctcgtctgccaatggctgctatcactgatttatcgcctcttcaggcgtgaaaggcacaaagccgactaa

SEQ ID NO: 1727 - protein, 369 aa, Populus trichocarpa
MEEIPSQSIGKDDENERAMEEAAVVRGEPLQDGNHPPKVESAVEILQEKVTKQIIKEGHGQKPTKYATCFLHYRAWTESTQHKFDDTWHEQRPFEMVLGKEKNEMAGLAVGVSSMKAGERALLHVGWELGYGKEGNFSFPNVPPMADIIYEVELIGFDEVKEGKARGDMTAEERIGAADRRKMDGNSLFKEEKLEEAMQQYEMAIAYLGDDFMFQLFGKYRDMALAVKNPCHLNMAACLIKLERYEEAIAQCTIVLVEDENNAKALFRRGKARAELGQTDAAREDFLKARKHAPEDKAILRELRLLDEHDKAIYKKQKEIYRGIFGPPPQPKPKPTNVLIRIWQWSILVCQWLLSLIYRLFRRERHKAD

SEQ ID NO: 1728 - DNA, 1098 bp, Arabidopsis thaliana
  CDS (1)..(1098)
atggatgaatctctggagcatcaaactcaaacacatgaccaagagagcgaaatagttactgaaggaagtgccgttgtgcatagtgagccatctcaagagggtaatgttcctcctaaagttgatagtgaagctgaggtcttggatgagaaagtcagtaagcagattataaaggaaggtcacggttccaaaccatccaagtactctacatgctttttgcactacagggcatggaccaaaaactcgcagcacaaatttgaggatacatggcatgagcagcaacctattgaattggttcttggaaaagagaaaaaagaactagccggtttagccatcggtgttgctagcatgaagtctggtgaacgtgcgcttgtgcatgttggctgggaattagcttatgggaaagaaggaaacttttcttttcccaatgttccacctatggcagacttgttatatgaggtggaagttattgggtttgatgaaacaaaggagggaaaagctcgcagtgatatgactgtagaggaaaggattggtgcagcagacagaagaaaaatggatgggaattctctttttaaggaggagaaactggaggaagccatgcaacagtatgaaatggccatagcatacatgggggacgattttatgtttcagctgtatgggaagtaccaggatatggctttagcagttaaaaacccatgccatcttaacatagcagcttgcctcatcaaactaaaacgatacgatgaagcaattggtcactgcaacattgtgttgacagaagaagagaaaaacccaaaagcactgttcagaagagggaaagcaaaggcagagctaggacagatggactcagcacgtgatgatttccgaaaggcacaaaagtatgctcctgacgacaaggcgattagaagagagctacgagcacttgcagagcaagagaaagccttgtaccaaaagcagaaagaaatgtacaaaggaatattcaaagggaaagatgaaggtggtgctaagtcaaagagccttttttggttgatagtgttatggcaatggtttgtttcccttttctcccgtatctttcgacgccacagagttaaagcagattaa

SEQ ID NO: 1729 - protein, 365 aa, Arabidopsis thaliana
MDESLEHQTQTHDQESEIVTEGSAVVHSEPSQEGNVPPKVDSEAEVLDEKVSKQIIKEGHGSKPSKYSTCFLHYRAWTKNSQHKFEDTWHEQQPIELVLGKEKKELAGLAIGVASMKSGERALVHVGWELAYGKEGNFSFPNVPPMADLLYEVEVIGFDETKEGKARSDMTVEERIGAADRRKMDGNSLFKEEKLEEAMQQYEMAIAYMGDDFMFQLYGKYQDMALAVKNPCHLNIAACLIKLKRYDEAIGHCNIVLTEEEKNPKALFRRGKAKAELGQMDSARDDFRKAQKYAPDDKAIRRELRALAEQEKALYQKQKEMYKGIFKGKDEGGAKSKSLFWLIVLWQWFVSLFSRIFRRHRVKAD

SEQ ID NO: 1730 - DNA, 1758 bp, Oryza sativa
  CDS (1)..(1758)
atggcggacgacgcgtacgacgacctcccaatggccggcgcggaggaggaggtggacgacgtgatgaaggacgagctcgacgaggagggggactcctcctcccccgtggcaatgaaggtcggggaggagaaggagatcgggaagcaggggctcaggaagaggctcctcaaggaaggggaaggatgggatcgccccgaatccggcgacgaggtccaagttcactacaccggcactctcctcgacggaaccaagttcgattccagccgcgatcgtggaacccccttcaaattcagcctcggccaaggggaggtgatcaaggggtgggatgagggtatcaagacgatgaagaagggggagcaggcggtgttcaccgttccgccggagctcgcctacggcgaggccggctcgccgccggcgatcccgcccaacgccacgctgcggttcgacgtcgagctgctctcctgggccagcgtcaaggacatctgcaaggacggcggaatcttcaagaaggtgctcgccgagggacacaagtgggagaatcccaaggacctcgacgaggtgctcgtcaagtacgaagcgaggctcgaagacggaactgtggtatcgaaatctgacggtgttgagtttgctgtcaaagatggctatttctgcccggcgctttcaaaggctgtcaagacgatgaagaagggcgagaaggtcctcctcactgtcaagccacaatatggctttggtgagcaaggcaaaccagcttctggagctgaagctgctgtgccgccaaatgctaccctgtacgtcgatcttgagttgctctcctggaagacggtcactctgatcggcgacgataagcgcatcctgaagaaagtcctcaaggaaggggagggctatgagcgccctaacgatggagcagtagttagagtgagatttatcggcaagttggaggacggcactgtgttttccaagaaagggcatgatggtgatgagccatttgagttcaggacagatgaggagcaagtcatcgaagggctggacagaactgtggtcaccatgaagaaaggagaggttgcattggtgagattaccacctcaacatgctttcggatccactgagactaagcaggatcttgctgttgttcctgcaaactccacagtctggtatgaagttgagcttgtctcattcgagaaggagaaagaatcatgggatttgaaggacaatgctgagaagattgaagcagctgccaagaagaaagatgaagggaatgtgtggttcaagatgggcaagtatgctaaggcctccaagagatacgaaaaggctgcgaagtacatcgagtatgacagctccttcactgatgatgagaagaagcaatcgaaagcactcaaggttagttgcaagctcaacaatgctgcttgcaaactgaagctgaaggaatacagggaagcagagaagctctgcaccaaggttttggaactggagagcacaaatgtaaaggccttgtacagaaggacgcaggcatacattgagcttgctgatctggaactagcagagttggatgtcaagaaagcactggagattgatcctgacaacagggatgtgaagatggtgtataagacattgaaggagaagatcaaggagtacaacaagagagacgccaagttctacggcaacatgttcgcgaaatggaggaagctggaacacatggagaacaagaaggtgcctgggaagcaggaggcacagcctatggccattgacagtgccgcttga

SEQ ID NO: 1731 - protein, 585 aa, Oryza sativa
MADDAYDDLPMAGAEEEVDDVMKDELDEEGDSSSPVAMKVGEEKEIGKQGLRKRLLKEGEGWDRPESGDEVQVHYTGTLLDGTKFDSSRDRGTPFKFSLGQGEVIKGWDEGIKTMKKGEQAVFTVPPELAYGEAGSPPAIPPNATLRFDVELLSWASVKDICKDGGIFKKVLAEGHKWENPKDLDEVLVKYEARLEDGTVVSKSDGVEFAVKDGYFCPALSKAVKTMKKGEKVLLTVKPQYGFGEQGKPASGAEAAVPPNATLYVDLELLSWKTVTLIGDDKRILKKVLKEGEGYERPNDGAVVRVRFIGKLEDGTVFSKKGHDGDEPFEFRTDEEQVIEGLDRTVVTMKKGEVALVRLPPQHAFGSTETKQDLAVVPANSTVWYEVELVSFEKEKESWDLKDNAEKIEAAAKKKDEGNVWFKMGKYAKASKRYEKAAKYIEYDSSFTDDEKKQSKALKVSCKLNNAACKLKLKEYREAEKLCTKVLELESTNVKALYRRTQAYIELADLELAELDVKKALEIDPDNRDVKMVYKTLKEKIKEYNKRDAKFYGNMFAKWRKLEHMENKKVPGKQEAQPMAIDSAA

SEQ ID NO: 1732 - DNA, 1128 bp, Oryza sativa
  CDS (1)..(1128)
atggctgtggtggaggaagaagagggctcgccgccggcacccgccgccgccgccgatcccgcctcctctggttcaagtgataatgagataactgtagaggaagcttcttttgtgcatactgaacctccgcaagatggctctgtcccacctgtggtttcctctaatatggaggtccttcatgacaaagttaaaaaacaagtcatcaaagaaggccatggcaagaaaccatcaaagttcgcgacgtgctttttgcactatagagcttgggttcaaggctctctgcataaattcgaggatacttggcaagaacagcatcccattgaactagtaattggaaaagagaaaaaacaaatgtctggtttaggcattggtgttggtaacatgagaagtggggagcgtgcactgttgcatgttggctgggagctaggctatgggaaagaagggagcttttcattcccaaatgtccctccaatggcagatcttttatatgaagttgaacttattgggtttgatgatgtcaaagaggggaaagcccgaagtgacatgacagtagaggaaaggattgaagcagcggacaggaggaagattgagggcaatgagtatttcaaagaaaagaagtttgaggaggccatgcagcaatatgaaatggcgattgcatacatgggagatgacttcatgtttcaattgttcgggaaatacagagatatggccttggctgtgaaaaatccatgtcatctcaacatggccgcatgcctaatcaaactgaagagattcgatgaagctatcgcacagtgtagtattgtgttggcagaggatgaaaacaatgtgaaagcattgttcagacgaggaaaagcaagagctgaacttggtcagacagaatcagcgagggaggacttcctgaaagccaagaaacattccccagaagacaaggagatccagcgtgagcttcggtctctcgcggaacaggataaagctctgtaccaaaaacagaaggagctgtacaaaggcctctttggtccaaggcccgaacccaaaccgaaggcgtcaaattccatcgttcgcttctggcagtggctcgtgtccttgattggttatctcataaaactgttcaaacccaagaatgaatga

SEQ ID NO: 1733 - protein, 375 aa, Oryza sativa
MAVVEEEEGSPPAPAAAADPASSGSSDNEITVEEASFVHTEPPQDGSVPPVVSSNMEVLHDKVKKQVIKEGHGKKPSKFATCFLHYRAWVQGSLHKFEDTWQEQHPIELVIGKEKKQMSGLGIGVGNMRSGERALLHVGWELGYGKEGSFSFPNVPPMADLLYEVELIGFDDVKEGKARSDMTVEERIEAADRRKIEGNEYFKEKKFEEAMQQYEMAIAYMGDDFMFQLFGKYRDMALAVKNPCHLNMAACLIKLKRFDEAIAQCSIVLAEDENNVKALFRRGKARAELGQTESAREDFLKAKKHSPEDKEIQRELRSLAEQDKALYQKQKELYKGLFGPRPEPKPKASNSIVRFWQWLVSLIGYLIKLFKPKNE

SEQ ID NO: 1734 - DNA, 1113 bp, Oryza sativa
  CDS (1)..(1113)
atggccgtgctggaagaagatccggccccggtacccgccgccgattctacctccggtgctagcgatgatgagataacagtggaagaaacttcctttgtgcatactgagcctcctcaagatggcactgctccacctgtggttacctctgatatggaagtccttaatgataaagtcaaaaagcaagtcatcaaggaaggccatggcaagaaaccctcaaggtttgccacatgctttgttcactatagagcatgggttcaaggttcttcgcacaaattcgaggatacttggcaagaacagcattcaattgaactagtacttggaaaagagaaaaaggaaatgactggtttaggcattggtgtcagtaacatgagaagtggggagcgtgcattgttacatgttaactgggagcttggctatgggaaagaaggaagcttttcattcccaaatgtccctccaatggcagaccttgtatatgaagttgaacttattgggtttgatgatgtcaaagagggaaaagcccgaagtgatatgacagtggaagaaaggattgaagcagcagacaggaggaagattgaaggcaatgaatatttcaaagaaaagaagttcgaggaggctatgcagcaatatgaaatggcaattgcatacatgggggatgatttcatgtttcaattgtttgggaagtacagagacatggccttagctgtgaaaaatccctgccatctcaacatggccgcatgcctgatcaaactgaagagatttgatgaagctatcgcacagtgtacaattgtgttgtcagaggatgaaaacaacgtgaaagcgttgttcagacgaggaaaagctagagctgaacttggtcaaacagaatcagcaagggaggacttcctgaaggccaagaagtattctccagaagacaaggagatccagcgcgagcttcggtcgctcgcggagcaggataaagctctgtaccagaaacaaaaggagctatacaaaggtctgttcgggccaaggcctgaacccaaaccgaaggcgtcaaatttcctagttctcttctggcgatggctggtctccttaattggctatcttgttaaactgttcaaacgcaaggatgagtag

SEQ ID NO: 1735 - protein, 370 aa, Oryza sativa
MAVLEEDPAPVPAADSTSGASDDEITVEETSFVHTEPPQDGTAPPVVTSDMEVLNDKVKKQVIKEGHGKKPSRFATCFVHYRAWVQGSSHKFEDTWQEQHSIELVLGKEKKEMTGLGIGVSNMRSGERALLHVNWELGYGKEGSFSFPNVPPMADLVYEVELIGFDDVKEGKARSDMTVEERIEAADRRKIEGNEYFKEKKFEEAMQQYEMAIAYMGDDFMFQLFGKYRDMALAVKNPCHLNMAACLIKLKRFDEAIAQCTIVLSEDENNVKALFRRGKARAELGQTESAREDFLKAKKYSPEDKEIQRELRSLAEQDKALYQKQKELYKGLFGPRPEPKPKASNFLVLFWRWLVSLIGYLVKLFKRKDE

SEQ ID NO: 1736 - DNA, 1686 bp, Brassica napus
  CDS (1)..(1686)
atggatgaagatttcgagatgcctcccgtcggcggaatgaacggcgacgacgagatggacttcggcgacgacgcctccttccccaaagtcggcgaggagaaggagatccagcaaggcttgaagaagaagctcctcaaggaaggcgaaggattcgagactccggagaacggcgatgaagtcgaagtgcactacactggtacgttgctcgatgggaccaagttcgattcaagccgcgacagaggaacgcctttcaaattcactctcggtcaaggtcaggttattaaaggatgggatattggtattaagactatgaagaaaggcgaaaacgctgttttcactatcccttccgagctggcttatggggaatctggctcgccgccgaccatccctgccaatgccacgcttcagtttgatgtggagttgctttcttggtcgagtgtcaaggacatatgcaaagatggtggcgtgtttaagaagattgttgctgcgggggagaagtgggaaatgcctaaggatctcgatgaagttcttgttaagtatgtggctaagcttgaggatggtacggttgttgggaaatctgatggtgttgagttcactgttaaagacggttacttctgccctgcacttgctaaggctgtgaaaaccatgaagaaggcagagaaggttcttctgactgttaaaccacaatatggtttcggggagaagggcaagccagcctctggtggtgaagctgcggttcctccaaacgcgacccttgagatcgagctggagttagtttcctggaagacagtttctgaagtgaccgatgacaacaaggtcatcaagaaaatcttgaaagaaggggaaggatatgagcgtcccaatgagggggcggttgtgaaagtgaaactgatagggaaacttggagatggtactgtgttcctaaagaaaggtcacggtgaaggtgaagagccctttgagttcaaaacagatgaagagcaagtgatcgatgggcttgataaagctctgttgaagatgaagaagggtgaagtggcattggtgaccatagacccagtgtatgcttttggttcaactgagtcaaagcaggaattagctgtggtgccgccaaactcaaccgtctattatgaggttgaccttgtgtctttcgacaaggaaagggaatcgtgggacatgaacactgaggagaagattgaagctgctggtaagaagaaggaagaaggaaatgccaagttcaaagcaggcaaatacgcactcgcttccaagagatacgagaaggctgtcaaatacattgaatacgactcatccttcagcgaggaggagaagaagcaagcaaaagcattgaaagtggcgtgcaatctgaacgatgcagcttgcaaactgaagttgaaagaatacaggcaagctgaaaagctatgcacaaaggtgctagagctggaaagcaccaatgtgaaggccctatacaggagagcgcaggcttacatggagttggctgatttggacttggctgagtttgatgtcaagaaggcccttgaagtcgatcccgacaacagggaagtgaaggtggagcagagaaggctgaaggagaaaatgaaggagtttaacaaaaaggaggccaagttttacggaaacatgtttgcaaaactctctgtaagtatctctctaatcttaccagcacatatttgttga

SEQ ID NO: 1737 - protein, 561 aa, Brassica napus
MDEDFEMPPVGGMNGDDEMDFGDDASFPKVGEEKEIQQGLKKKLLKEGEGFETPENGDEVEVHYTGTLLDGTKFDSSRDRGTPFKFTLGQGQVIKGWDIGIKTMKKGENAVFTIPSELAYGESGSPPTIPANATLQFDVELLSWSSVKDICKDGGVFKKIVAAGEKWEMPKDLDEVLVKYVAKLEDGTVVGKSDGVEFTVKDGYFCPALAKAVKTMKKAEKVLLTVKPQYGFGEKGKPASGGEAAVPPNATLEIELELVSWKTVSEVTDDNKVIKKILKEGEGYERPNEGAVVKVKLIGKLGDGTVFLKKGHGEGEEPFEFKTDEEQVIDGLDKALLKMKKGEVALVTIDPVYAFGSTESKQELAVVPPNSTVYYEVDLVSFDKERESWDMNTEEKIEAAGKKKEEGNAKFKAGKYALASKRYEKAVKYIEYDSSFSEEEKKQAKALKVACNLNDAACKLKLKEYRQAEKLCTKVLELESTNVKALYRRAQAYMELADLDLAEFDVKKALEVDPDNREVKVEQRRLKEKMKEFNKKEAKFYGNMFAKLSVSISLILPAHIC

SEQ ID NO: 1738 - DNA, 1107 bp, Brassica napus
  CDS (1)..(1107)
atggatgaatctcctctggagcagcaaagtcaaactcatgaccaagagaacgaaatagttacagaaggtagcgccgttgtgcatggtgagcctccttctcaagacggcagtgttccccctaaagttgatacccaagtccaagtcctggatgagaaagtcagtaagcagatcataaaggaaggccacggctccaaaccttccaagtactccacatgcttcttgcattatagggcatggaccaaacacacccagcataaatttgaggatacatggcaagagcagcaacctattgaactggttctaggaaaagagaaaaaagaaatgaccggtttggccatgggtgttgctagcatgaagtctggtgaacgtgcgctcttgcatattggctgggaacttggttatgggaaagatggaaacttttcttttcccaatgttcctcctatggctgacttgttgtatgaggttgaagttattggctttgatgaaactaaagagggaaaggctcgcagtgatatgactgtggaggaaaggattggtgcagcagacagaaggaaaatggatggtaataatctgtttaaggaggataaacttgaggaggccatgcaacaatacgaaatggccattgcatacatgggggacgacttcatgtttcagctgtatgggaagtaccaggatatggctttggcagttaagaacccatgccacttaaacatggcagcttgcttgatcaaacttaaacgttacgatgaagcaattggtcactgcaacattgtgttgacagaagaagagaaaaacccaaaggccttgttcagaagagggaaggccaaggcagagctaggacagatggattcagctcgtgaagattttcgaaaagctcaaaagtatgctcctgacgacaacgctattagaagagagctgcgagccattgcggagcaagagaaagctgtgtaccaaaagcaaaaagagatgtacaaaggaatatttggaggagggagagatgaaagtggtgtcaaggcaaagagccgtaacgggttgataatgctatggcagtggttggtgtccctcttcagcagaatcttgggacgtaagagggttaaagcagattaa

SEQ ID NO: 1739 - protein, 368 aa, Brassica napus
MDESPLEQQSQTHDQENEIVTEGSAVVHGEPPSQDGSVPPKVDTQVQVLDEKVSKQIIKEGHGSKPSKYSTCFLHYRAWTKHTQHKFEDTWQEQQPIELVLGKEKKEMTGLAMGVASMKSGERALLHIGWELGYGKDGNFSFPNVPPMADLLYEVEVIGFDETKEGKARSDMTVEERIGAADRRKMDGNNLFKEDKLEEAMQQYEMAIAYMGDDFMFQLYGKYQDMALAVKNPCHLNMAACLIKLKRYDEAIGHCNIVLTEEEKNPKALFRRGKAKAELGQMDSAREDFRKAQKYAPDDNAIRRELRAIAEQEKAVYQKQKEMYKGIFGGGRDESGVKAKSRNGLIMLWQWLVSLFSRILGRKRVKAD

SEQ ID NO: 1740 - DNA, 1653 bp, Brassica napus
  CDS (1)..(1653)
atggatgaagatttcgagatgcctcccgtcggcggaatgaacggcgacgacgagatggacttcggcgacgacgcctccttcctcaaagtcggcgaggagaaggagatccagcaaggcttgaagaagaagctcctcaaggaaggcgaaggattcgagactcctgagaacggcgatgaagtcgaagtgcactacactggtacgttgctcgatgggaccaagttcgattcaagccgcgacagaggaacgcctttcaaattcactctcggtcaaggtcaggttattaaaggatgggatattggtattaagactatgaagaaaggcgaaaacgctgttttcactatcccttccgagctggcttatggggaatctggctcgccgccgaccatccctgctaatgccacgcttcagtttgatgtggagttgctttcttggtcgagtgtcaaggacatatgcaaggatggtggcgtttttaagaagattgttgctgcgggggagaagtgggaaatgcctaaggatctcgatgaagttcttgttaagtatgtggctaagcttgaggatggtacggttgttgggaaatctgatggtgttgagttcactgttaaagacggttacttctgtcctgcacttgctaaggctgtgaaaaccatgaagaaggcagagaaggttcttctgactgttaaaccacaatatggtttcggggagaagggcaagccagcctctggtggtgaagctgcggttcctccaaacgcgacgcttgagatcgagctggagttagtttcctggaagacagtttctgaagtgaccgatgacaacaaggtcatcaagaaaatcttgaaagaaggggaaggatatgagcgtcccaatgagggggcggttgtgaaagtgaaactgatagggaaacttggagatggtactgtgttcctaaagaaaggtcacggtgaaggtgaagagccctttgagttcaaaacagatgaagagcaagtgatcgatgggcttgataaagctgtgttgaagatgaagaagggtgaagtggcattggtgaccatagacccagagtatgcttttggttcaactgagtcaaagcaggaattagctgtggtgccgccaaactcaaccgtctattatgaggttgaccttgtgtctttcgacaaggaaagggaatcgtgggacatgaacactgaggagaagattgaagctgctggtaagaagaaggaagaaggaaatgccaagttcaaagcaggcaaatacgcactcgcttccaagagatacgagaaggctgtcaaatacattgaatacgactcatccttcagcgaggaggagaagaagcaagcaaaagcattgaaagtggcgtgcaatctgaacgatgcagcttgcaaactgaagttgaaagaatacaggcaagctgaaaagctatgcacaaaggtgctagagctggaaagcaccaatgtgaaggccctatacaggagagcgcaggcttacatggagttggctgatttggacttggctgagtttgatgtcaagaaggcccttgaagtcgatcccgacaacagggaagtgaaggtggagcagagaaggctgaaggagaaaatgaaggagtttaacaaaaaggaggccaagttttacggaaacatgtttgcaaaactctctaagtga

SEQ ID NO: 1741 - protein, 550 aa, Brassica napus
MDEDFEMPPVGGMNGDDEMDFGDDASFLKVGEEKEIQQGLKKKLLKEGEGFETPENGDEVEVHYTGTLLDGTKFDSSRDRGTPFKFTLGQGQVIKGWDIGIKTMKKGENAVFTIPSELAYGESGSPPTIPANATLQFDVELLSWSSVKDICKDGGVFKKIVAAGEKWEMPKDLDEVLVKYVAKLEDGTVVGKSDGVEFTVKDGYFCPALAKAVKTMKKAEKVLLTVKPQYGFGEKGKPASGGEAAVPPNATLEIELELVSWKTVSEVTDDNKVIKKILKEGEGYERPNEGAVVKVKLIGKLGDGTVFLKKGHGEGEEPFEFKTDEEQVIDGLDKAVLKMKKGEVALVTIDPEYAFGSTESKQELAVVPPNSTVYYEVDLVSFDKERESWDMNTEEKIEAAGKKKEEGNAKFKAGKYALASKRYEKAVKYIEYDSSFSEEEKKQAKALKVACNLNDAACKLKLKEYRQAEKLCTKVLELESTNVKALYRRAQAYMELADLDLAEFDVKKALEVDPDNREVKVEQRRLKEKMKEFNKKEAKFYGNMFAKLSK

SEQ ID NO: 1742 - DNA, 1722 bp, Brassica napus
  CDS (1)..(1722)
atggctgacgatttcgacatggagattccggcagaggaggcggaggagatggacttggatctcgaggacgatgccgagtctgatccttccctgaaagtgggcgaggagaaggagattgggaagtcaggactgaagaaaaagctcgtcaaggaaggtgaaaagtgggacactcctgagagcggagacgaagttgaagtgcactatacgggaactttgttggacgggaccaagtttgattcaagccgtgacagaggaactcctttcaaattcacgcttggccaagggcaagtgatcaaaggatgggacatggggatcaagacgatgaagaaaggcgagaatgccgttttcaccattcctcccgagctggcatacggtgaaaccggttcaccgcccaccattcctccgaatgctactcttcagtttgatgtggagctgttatcgtggaggagcgttaaggatatttgtggtgatggtggtttgttcaagaaggttattgcggaaggagagaagtgggagaagccaaaggaccttgatgaagtgtacgtcaagtatgaagctcggctcgaggatggaactgttgtgggaagatctgatggtgcaaagttcactgtcatggatggccatttctgtcctgcgatcgctaaggctgtcaagaccatgaaaagaggggaaaaggtgctcctaactgtcaagccacaatatggctttggggaaactggaagagcagcgtccgattgtattcaagctgcagtccctccgaatgcgactcttcagatggaccttgagttggtgtcttggaagacggtggtggaagtaactgatgacaagaaggtcattaagaaaatactgaaggagggagaaggatatgagcgtccgaatgaaggagcagttgtcaaattgaagttgattggtaagcttcaagatggaactgtgttctttaagaaaggtcatggagaagacgaggagccgttcgagttcaagactgatgaagaacaagttattgaagggctggagaaagctgtgatgggcatgaagaagggtgaggtggctctcatcaccatctctcctgaatatgcctttggttcctctgaatcaaaacaggagctagctgtgataccaccagactcgacagtttgctacgaggtcgagctggtatccttcattaaggagaaagagtcctgggacatgaacacacaggaaaagatagaagctgccggcaagaagaaggaagaagggaatactctattcaaggctggaaaatatgcaagagcttcaaaaagatacgagaggggtgtcaagttcatagagtatgactcctctttcgatgaagaggacaaaaagaaggctaaagctctgaagattgcttgtaacctgaacaatgcagcttgcaagctgaaactgaaagattacaaagaggcggcgaaactgtccactaaggtattggagatggacggaagcaacgtgaaggcaatgtacaggagagcacaggcgtatatggagacggctgatcttgatcttgctgagctcgatatcaagaaagtccttgaaatcgatccggacaacaaggaggtgaagatggagtacaagaagctcaaggagaaggtgagggagtacaacaagaaagacgctaagttctacagcaacatgctggccaaaatgctcgagccacataaagaagcacgcaaggatgcacaagcgatgagcattgacgccaaggcatga

SEQ ID NO: 1743 - protein, 573 aa, Brassica napus
MADDFDMEIPAEEAEEMDLDLEDDAESDPSLKVGEEKEIGKSGLKKKLVKEGEKWDTPESGDEVEVHYTGTLLDGTKFDSSRDRGTPFKFTLGQGQVIKGWDMGIKTMKKGENAVFTIPPELAYGETGSPPTIPPNATLQFDVELLSWRSVKDICGDGGLFKKVIAEGEKWEKPKDLDEVYVKYEARLEDGTVVGRSDGAKFTVMDGHFCPAIAKAVKTMKRGEKVLLTVKPQYGFGETGRAASDCIQAAVPPNATLQMDLELVSWKTVVEVTDDKKVIKKILKEGEGYERPNEGAVVKLKLIGKLQDGTVFFKKGHGEDEEPFEFKTDEEQVIEGLEKAVMGMKKGEVALITISPEYAFGSSESKQELAVIPPDSTVCYEVELVSFIKEKESWDMNTQEKIEAAGKKKEEGNTLFKAGKYARASKRYERGVKFIEYDSSFDEEDKKKAKALKIACNLNNAACKLKLKDYKEAAKLSTKVLEMDGSNVKAMYRRAQAYMETADLDLAELDIKKVLEIDPDNKEVKMEYKKLKEKVREYNKKDAKFYSNMLAKMLEPHKEARKDAQAMSIDAKA

SEQ ID NO: 1744 - DNA, 1752 bp, Glycine max
  CDS (1)..(1752)
atggtggtggttttgtcggatgaggatgaattcgacgaggagcccggcgaggttgtcgattcggcgccaccgcagaaggtcggcgaagagagacaattcagcggtttcaagaagaagcttctcaaacgcggacagggttgggaattccccaacttcgacgacgtcgtaactgttcgctgtgttggaattggaacattgctcgatggaacaacgtttgattacactagggagagggatcgacctagaacgtttgctctgggcaaagatgatgttgctgctgggttggaccgtgccattagcactatgaagaaaggggaggtggcattgttcacgttgcccggagatggtggtgatggcgatgtttcgcttgattccgacgactcttcggctgtgcggtttgaggtggagctcgtttcgtggatcacggtggtggatgtttgcaaagatggtggagttgtcaagaaaattctggagaaggggagtggcattgagcgccctggtgatcttgatgaagtgcttgtaaagtatcgggtggtgcttggtgatggcactgttgttgtggagacgctggaaggaggagttgagtttcacatgaaggatggtcatctttttcctatattgccaaaagtaatcatgactatgacaaggggagagaaggctgaattaattctccaaccccagtatgcctttggggagaaggggagagaagctggcagtgggctctgttcaattcctccgaattcagtgctgcatgttaatattgaattggtgtccttcaagcctgtcataaatgttactggtgactccaaggtgattaaaaagattttgaaagaaggggagggtgctttcacagccaatgaaggtgcaaatgttactgtgagcttcacagctatgctagaagatggcactgtatttgagaaaagaggaattggtgaaacacaacccttggaattcataactgatgaggaacaagtaattactggtctagaccgagccgtggcaacaatgaagaagggtgagagagcgataattagcatacatcctgattatgcatttggaaatgttgaagtgagacgagatattgctattgtgccaccaggcgcaaatgtagtctatgacattgagatgatggattttattaaggagaaagcaccatgggaattgaatagtaaggagaaaattgaggtggctgggaagaagaaaaaagaagggaatgtattatttaaagttggcaattatcagcgagcaggaaagaaatatgaaaaggctgctgattttgttgatgaagacggatcctttgggtttgatgagcaaaagcaagctcagacactgaaagtgtcatgctggttgaatagtgcagcttgtagccttaaacttgatgactttcctggagcaatcaagctatgttcacaggtgcttgatgttgaattttgcaatgtgaaagctttttacagacgagcacaagcatatatagaaactggagattatcttttagcagatgtagacatcaagaaagctcttgtggtggacccacaaaacagagatgttaaggtaattcagaagaaattgaagcaacttcaagctgacagtgacaaaaaagatgctaagctatatgaaaacatgcttgcacgtaaaacaaaggacccatctatggctataaagagattgaaggtagagaaagatcagggggaaaatgaagaggttgcaagaatggaaattgacgaagttgctgatagcgcagtgattcaatag

SEQ ID NO: 1745 - protein, 583 aa, Glycine max
MVVVLSDEDEFDEEPGEVVDSAPPQKVGEERQFSGFKKKLLKRGQGWEFPNFDDVVTVRCVGIGTLLDGTTFDYTRERDRPRTFALGKDDVAAGLDRAISTMKKGEVALFTLPGDGGDGDVSLDSDDSSAVRFEVELVSWITVVDVCKDGGVVKKILEKGSGIERPGDLDEVLVKYRVVLGDGTVVVETLEGGVEFHMKDGHLFPILPKVIMTMTRGEKAELILQPQYAFGEKGREAGSGLCSIPPNSVLHVNIELVSFKPVINVTGDSKVIKKILKEGEGAFTANEGANVTVSFTAMLEDGTVFEKRGIGETQPLEFITDEEQVITGLDRAVATMKKGERAIISIHPDYAFGNVEVRRDIAIVPPGANVVYDIEMMDFIKEKAPWELNSKEKIEVAGKKKKEGNVLFKVGNYQRAGKKYEKAADFVDEDGSFGFDEQKQAQTLKVSCWLNSAACSLKLDDFPGAIKLCSQVLDVEFCNVKAFYRRAQAYIETGDYLLADVDIKKALVVDPQNRDVKVIQKKLKQLQADSDKKDAKLYENMLARKTKDPSMAIKRLKVEKDQGENEEVARMEIDEVADSAVIQ

SEQ ID NO: 1746 - DNA, 1113 bp, Glycine max
  CDS (1)..(1113)
atggaggaagttcaagagtctcaaacccaatcatcgctcggtcaagaagaggaaaatgaagtgattactgaaagttcagcatttgttaagggggaaccggcaccagaattcagtagtaaccccccaaaagttgattctgaagttgaggtccttcatgagaaggtcagcaaacaaatcattaaggaaggccatggccagaaaccttccaaatattcaacttgcttcttccattacagggcatgggctgagaaatcacaacacaagtttgaagacacatggcaggagcaacggccaattgagatggtcttaggaaaagaaaagaaagaaatgactgggttgggcattggtgtggcaagcatgaaagctggggagcgtgcgttggtgcgtgtgggctgggaattaggatatggagaggaaggaagcttctcttttccaaatgttccacccaaggcagatttagtttatgaagttgagctcattggctttgatgaaaccaaagaaggcaaagctcgcagtgatatgactgtggaagaaaggattggtgcagcagaccggagaaagatggatggaaatgctttgtatcaggaagaaaaactagaggaggctatgcaacagtatgaaatggccatagcatatatgggagatgacttcatgttccagttgtttgggaagtatagagatatggctctggctgtaaagaatccatgccatcttaacatggcagcctgtttgattaagctgaaccgctacgaagaagccataggacaatgcaacactgtactgggtgaggatgagaacaatgtgaaggcattatttaggcgaggtaaggctagagcagcacttgggcaaacggatactgccagggaagattttctaaaggcaagtaaatatgcccctcaagacaaagcaattgctaaagaattgagattgcttgctgaacatgacaaggctgtttaccaaaagcagaaagagatatataaaggaatatttggaccaaggcctcaaccagttcctaagccaagaaactggctcatacttatttggcagtggttgctttcagtattctatggccttgtcacgctcttcaagcgtgaaaggcataaatctgactaa

SEQ ID NO: 1747 - protein, 370 aa, Glycine max
MEEVQESQTQSSLGQEEENEVITESSAFVKGEPAPEFSSNPPKVDSEVEVLHEKVSKQIIKEGHGQKPSKYSTCFFHYRAWAEKSQHKFEDTWQEQRPIEMVLGKEKKEMTGLGIGVASMKAGERALVRVGWELGYGEEGSFSFPNVPPKADLVYEVELIGFDETKEGKARSDMTVEERIGAADRRKMDGNALYQEEKLEEAMQQYEMAIAYMGDDFMFQLFGKYRDMALAVKNPCHLNMAACLIKLNRYEEAIGQCNTVLGEDENNVKALFRRGKARAALGQTDTAREDFLKASKYAPQDKAIAKELRLLAEHDKAVYQKQKEIYKGIFGPRPQPVPKPRNWLILIWQWLLSVFYGLVTLFKRERHKSD

SEQ ID NO: 1748 - DNA, 1713 bp, Glycine max
  CDS (1)..(1713)
atgggcgaggatttcgagttcccaagtgctggcaacatggaaatgcctgaggaggaagagtttgagagtccgatcctgaaggttggggaggagaaggagattgggaaaatggggctgaagaagaaattgctcaaggaaggtgaaggttgggacacccctgacagtggagaccaagttgaagtgcattatactggaaccttgcttgatggaaccaaatttgattctagccgcgataggggcacccccttcaagttcaagctaggccaagggcaagtgataaagggatgggatgaaggtatcaaaaccatgaagaaaggtgagaatgcccttttcacaatacccccggaattggcttatggagagtctgggtctcctcccactattcccccaaatgcaactctgcagtttgatgtggagttgctgtcttggacaagtgtgaaggacatatgcaaggatgggggaattttgaagaacattattactgaaggggagaaatgggacaatcctaaggacctgcatgaagtgtttgttaagtttgaagctaggcttgaagacgggacagtcatttcaaaatctgatggggtggagttcactgtggaagaggggtatttctgtcctgctttggccaaggctgtgaaaacaatgaagaagggagagaaagttctcttgaatgtgaagccacaatatgcatttggtgagagtggaagaccagcctcaggagatgaaggtgccgtacctccaaatgcttatcttcaattggatcttgagttggtctcgtggaagaccgtgtctgacattaccaaggatagaaaggttctcaagaagactttgaaggaaggggagggatatgaacgaccaaatgatggagctgtagttcaagtgaaactgattggcaagttgcaagatggaactgttttcgttaagaagggctacgttgatgaacagccatttgagttcaaaattgatgaagagcaagtaattgatggacttgaccaagctgtgaagaacatgaagaaaggggaaattgcattgctgatcatacagcctgaatatgcttttggtccatctgggtcctctcaggaattggctaatgttcctcctaattccactgtgtactacgaagttgagctgctttcctttgtaaaggaaaaggaatcgtgggatctgaatacacaagagaagattgaggcagctgggaagaaaaaggaagaagggaatgccttttttaaggttggcaaatatgaaagggcttcaaagagatatgaaaaggccataaagtttgtcgagtatgattcctcctttagtgatgaggagaaacagcaaactaaggcattgaaaatcacatgcaatctcaacaatgcagcctgtaagttgaagctaaaggactacaaacaggcagagaagatgtgcacaaaggttttagagcttgatagtagaaatgtaaaagcactctatcggagggcacaggcatatcttcatcttgtggacttagatctagctgagatggatattaagaaagcccttgagattgagccaaacaacagggatgtgaagatggagtacaaaattttgaagcagaaggtgagagaacacaacaagaaggacgcacagttttacggcagcatatttgcaaaaatgaataaactagaacaagcaagaacagcaacagcaaagcaggagccggtgccaatgactattgacagcaaagcttaa

SEQ ID NO: 1749 - protein, 570 aa, Glycine max
MGEDFEFPSAGNMEMPEEEEFESPILKVGEEKEIGKMGLKKKLLKEGEGWDTPDSGDQVEVHYTGTLLDGTKFDSSRDRGTPFKFKLGQGQVIKGWDEGIKTMKKGENALFTIPPELAYGESGSPPTIPPNATLQFDVELLSWTSVKDICKDGGILKNIITEGEKWDNPKDLHEVFVKFEARLEDGTVISKSDGVEFTVEEGYFCPALAKAVKTMKKGEKVLLNVKPQYAFGESGRPASGDEGAVPPNAYLQLDLELVSWKTVSDITKDRKVLKKTLKEGEGYERPNDGAVVQVKLIGKLQDGTVFVKKGYVDEQPFEFKIDEEQVIDGLDQAVKNMKKGEIALLIIQPEYAFGPSGSSQELANVPPNSTVYYEVELLSFVKEKESWDLNTQEKIEAAGKKKEEGNAFFKVGKYERASKRYEKAIKFVEYDSSFSDEEKQQTKALKITCNLNNAACKLKLKDYKQAEKMCTKVLELDSRNVKALYRRAQAYLHLVDLDLAEMDIKKALEIEPNNRDVKMEYKILKQKVREHNKKDAQFYGSIFAKMNKLEQARTATAKQEPVPMTIDSKA

SEQ ID NO: 1750 - DNA, 1131 bp, Hordeum vulgare
  CDS (1)..(1131)
atgcccgaagatgtcgcgccaataggccccgccccggcccccgcccccgcccccgcttctgatcctaccgctggttccagtgatgatgagataacagtagagaatgcatcttttgtgcataccgaacctccccaagatggcagtgccccacctgtggtaacaactgatatggaagttctccatgataaagttaagaagcaagtcattaaagaaggccatgggaagataccctcaaaattttctacgtgctttgtgcattatagagcatgggtacaaagctctatgcataaatttgaggatacctggcaagaacagcatccagttgaaattgtcatcggaaaagagaaaaagcaaatggctggtttgggtattggtgttggtcacatgaaaggtggggaacgtgcactgttgcatgttagctgggaactaggctatgggaaagaaggaagcttttcattcccgaatgtccctccatcagcagaccttatatatgaagttgaactcattggctttgatgatgctaaagagggaaaagcccgtagtgacatgacggtagaagagaggattgaagcagcagataggaggaagctcgagggcaacgattactttaaagagaagaaatttgaggtggctatgcagcaatatgagatggctgttgcatatatgggagatgatttcatgtttcagttgtttggtaagtacagagatatggctttggctgtgaaaaacccgtgccatctcaacatggctgcatgcctaatcaaacagaagagatttgacgaagctatcgcacagtgcagcattgtgctgtcagaggacgaaaccaacgcgaaagctttgttcagacgtggaaaagctagagccgagctcggccagacagaatccgcgagggaggacttcctgaaagccaagagacactccccggaagacaaggagatcatgcgggagcttcggtcgctagcggaacaagataaagcgctgtaccagaagcagagggagctatacaaaggtctgttcgggccgaggcctcaacccaaacccaaggccaaaaatttcgccgtcctcttctggcagtggctggtgtcactggttcgttatcttgccaggatgttcacgcgcaagaatgactag

SEQ ID NO: 1751 - protein, 376 aa, Hordeum vulgare
MPEDVAPIGPAPAPAPAPASDPTAGSSDDEITVENASFVHTEPPQDGSAPPVVTTDMEVLHDKVKKQVIKEGHGKIPSKFSTCFVHYRAWVQSSMHKFEDTWQEQHPVEIVIGKEKKQMAGLGIGVGHMKGGERALLHVSWELGYGKEGSFSFPNVPPSADLIYEVELIGFDDAKEGKARSDMTVEERIEAADRRKLEGNDYFKEKKFEVAMQQYEMAVAYMGDDFMFQLFGKYRDMALAVKNPCHLNMAACLIKQKRFDEAIAQCSIVLSEDETNAKALFRRGKARAELGQTESAREDFLKAKRHSPEDKEIMRELRSLAEQDKALYQKQRELYKGLFGPRPQPKPKAKNFAVLFWQWLVSLVRYLARMFTRKND

SEQ ID NO: 1752 - DNA, 1680 bp, Hordeum vulgare
  CDS (1)..(1680)
atggacgacgacttcgacatccccgccggcgacgacatgatgatgggagacgggacgggtgacttcggcggcgccgatgggccggggatgaaggtgggcgaggagaaggagatcgggaagcaggggctcaagaagaagctgctcaaggagggcgaagggtgggacacccccgaggtcggcgacgaggtcgaagtccattacactggcaccctccttgatggtaaaaagtttgactccagccgtgatcgtgatgacacattcaagttcaagctgggacaaggtcaagtaataaagggatgggatgaaggcatcaagaccatgaagaaaggggaaaatgcccttttcaccattcctcctgaattggcttatggtgaatctgggtcacctccaactatcccggccaatgccacgctgcagttcgatgttgagctgctttcttggaccagtgtcagggacatttgcaaagatggtggcatattcaagaagatattgaaggagggagataaatgggagaccccaaaggatcctgatgaagtctttgtcaaatatgaggcccggctcgaggatggtactgttgtgtccaagtctgagggggttgaatttactgttaaagatggacacctctgccctgcattggcgaaagctgttaaaaccatgaaaaaaggagagaaggtgctcctcgcggtcaagccacagtatggatttggtgagatgggtagaccagcagctggcgagggaggtgctgtgccaccaaatgctagtcttattattgaccttgagctggtttcatggaagactgtcacagaaataggggatgataagaagatcctcaaaaaagttctcaaggagggcgaaggatatgaacgtcccaatgagggtgcagttgttacagtcaaaataactggaaaacttcaagatggcacagtcttcttaaagaaggggcatgatgaacaagagccatttgaatttaagactgatgaagatgcggttattgagggtcttgatcgtgctgtgctaaacatgaagaagggcgaggttgctcttgtcactattccccctgaatatgcttatggctcgacggagtcaaagcaggatgctatagttccacctaacagtactgtgatttacgaagtggagcttgtatcatttgtaaaggataaggagtcttgggacatggacaactcagagaagattgaggccgctgggaccaagaaagaagaggggaatgccttgttcaaattgggcaaatatgccagagcttccaagcggtatgagaaggctgcaaagatcattgagtatgacacttcgttcagtgaggatgagaaaaagcaatccaagcaactgaagatcacctgcaacttaaacaatgctgcctgcaagctgaagctgaaagactataagcaagccgaaaagctttgcaccaaggttctggaactggacagccgaaatgtcaaggctttgtacagaaggtctcaagcctacactcagcttgcggacctagagttagcagaggttgacattaagaaggcactggaaatcgatcctgaaaacagggatgtgaagttgacatacaagaccctgaaggaaaagatcaaagaaatcaacaagaaggacgccaaattctacagcaatatgttttctaagatgaccaggccttcagcagaagaaagcaaagcttga

SEQ ID NO: 1753 - protein, 559 aa, Hordeum vulgare
MDDDFDIPAGDDMMMGDGTGDFGGADGPGMKVGEEKEIGKQGLKKKLLKEGEGWDTPEVGDEVEVHYTGTLLDGKKFDSSRDRDDTFKFKLGQGQVIKGWDEGIKTMKKGENALFTIPPELAYGESGSPPTIPANATLQFDVELLSWTSVRDICKDGGIFKKILKEGDKWETPKDPDEVFVKYEARLEDGTVVSKSEGVEFTVKDGHLCPALAKAVKTMKKGEKVLLAVKPQYGFGEMGRPAAGEGGAVPPNASLIIDLELVSWKTVTEIGDDKKILKKVLKEGEGYERPNEGAVVTVKITGKLQDGTVFLKKGHDEQEPFEFKTDEDAVIEGLDRAVLNMKKGEVALVTIPPEYAYGSTESKQDAIVPPNSTVIYEVELVSFVKDKESWDMDNSEKIEAAGTKKEEGNALFKLGKYARASKRYEKAAKIIEYDTSFSEDEKKQSKQLKITCNLNNAACKLKLKDYKQAEKLCTKVLELDSRNVKALYRRSQAYTQLADLELAEVDIKKALEIDPENRDVKLTYKTLKEKIKEINKKDAKFYSNMFSKMTRPSAEESKA

SEQ ID NO: 1754 - DNA, 1749 bp, Glycine max
  CDS (1)..(1749)
atggacgaggacttcgacatgccgacggcggaggcaatgggcgaggacttcgacttcgccggcgccaccggcggcgacctcgacggcagcagcagcaaccccatcttgaaggtcggcgaggagaaggagattggaaaagagggtttgaagaagaaactacttaaagaaggtgaaggatgggacactcctgaagttggtgacgaagttcaagttcactatactgggacgttgcttgatggcactaagtttgattccagcagagataggggaactcctttcagtttcacgcttggacaagggcaagttattaaaggatgggatcaaggtattataacgatgaagaaaggtgaaaattcccttttcaccatcccggctgagctagcttatggtgaaactggttctcctccaacaattccccctaatgcaactcttcaatttgatgtggagctgttgtcttggactagtgtgaaagacatatgtaaggatggaggtttatttaagaagatacttaccaagggggagaaatgggagaacccaaaggatcctgatgaagttttagtcaagtatgaagcatgccttgaagatggaactcttgtggcaaaatctgatggagtggagttcacagtcaatgatggttatttttgtcctgctttgtcaaaggctgttaaaaccatgaagaagggagagaaagtgcttctgacagtgaagccacaatatggatttggtgagaagggtaagccagcacatgatgaagaaggtgcagttccaccaaatgcaacattgcagattactcttgagttagtttcttggaagactgtctcagaagtaacggaggacaagaagatcattaagaagatcctcaaggaaggggaaggatatgagcgtccaaatgagggagccattgtgaaattgaaagtaattggtaagctgcaagatggtactttgtttttgaaaaagggccatgacgatgaaggagagctgtttgaattcaaaactgatgaggagcaagtaattgatgggcttgacagagctgtgttgactatgaagaagggtgagatagcattgttgattataggacctgaatatgcttttggttcatcagagtctcagctggaacttgcagtggttccacctaactccacagtatattacgaggttgagctagtatcatttgagaaggagaaggaatcctgggacatggacacgccagagaagattgaagctgctggtaagaagaaagaagaaggaaatgcattatttaaagctggtaaatatgcaagagcttctaaaagatacgagaaggctgtaaagttcatagagtacgatactgcctttagcgaagaggagaagaagagctccaaagccttgaaggttgcctgtaatctaaacaatgcagcatgcaagttgaaattaaaagattataaacaagcagagaaattgtgcacaaaggtactggaccttgagagtactaatgtgaaggctctctatagaagggcccaggcatatatccagttggctgatttagacttggccgaatttgatattaagaaagcgcttgagattgaccctaacaacagggatgtcaagcttgagtacaagactttgaaggaaaagatgaaggagtacaacaaaaaagaggcaaaattttatggaaatatgttcaacaaactgcacaagctagattctcttgacagtaataaaccagcgtcgaaggatgcccaaccgatgaatatcgacagcaaggcataa

SEQ ID NO: 1755 - protein, 582 aa, Glycine max
MDEDFDMPTAEAMGEDFDFAGATGGDLDGSSSNPILKVGEEKEIGKEGLKKKLLKEGEGWDTPEVGDEVQVHYTGTLLDGTKFDSSRDRGTPFSFTLGQGQVIKGWDQGIITMKKGENSLFTIPAELAYGETGSPPTIPPNATLQFDVELLSWTSVKDICKDGGLFKKILTKGEKWENPKDPDEVLVKYEACLEDGTLVAKSDGVEFTVNDGYFCPALSKAVKTMKKGEKVLLTVKPQYGFGEKGKPAHDEEGAVPPNATLQITLELVSWKTVSEVTEDKKIIKKILKEGEGYERPNEGAIVKLKVIGKLQDGTLFLKKGHDDEGELFEFKTDEEQVIDGLDRAVLTMKKGEIALLIIGPEYAFGSSESQLELAVVPPNSTVYYEVELVSFEKEKESWDMDTPEKIEAAGKKKEEGNALFKAGKYARASKRYEKAVKFIEYDTAFSEEEKKSSKALKVACNLNNAACKLKLKDYKQAEKLCTKVLDLESTNVKALYRRAQAYIQLADLDLAEFDIKKALEIDPNNRDVKLEYKTLKEKMKEYNKKEAKFYGNMFNKLHKLDSLDSNKPASKDAQPMNIDSKA

SEQ ID NO: 1756 - DNA, 1113 bp, Triticum aestivum
  CDS (1)..(1113)
atgcccgaagatgccgcgccaatagcccccgcccccgcttctgatctcaccgctggttctagtgatgatgagataacagtagaggatgcttcttttgcgcgtactgaactcccccaagatggcagtgccccacctgtcgtaacaactgatatggaagttctccatgataaagttaagaagcaagtcattaaagaaggccatgggaagataccctcaaaattttctacgtgctttgtgcattacagagcatgggtacaaagctctatgcataaatttgaggatacctggcaagaacagcatccagttgaaattgtcatcggaaaagagaaaaagcaaatgtccggtttgggtattggtgttggtcacatgaaaagtggggaacgtgcactgttgcatgttagctgggagctaggctatgggaaagaaggaagcttttcattcccgaatgtccctccatcagcagaccttatatatgaagttgaactcattggttttgatgatgctaaagagggaaaagcccgtagtgacatgacggtagaagagaggattgaagcagcggataggaggaagcttgagggcaacgattactttaaagagaagaaatttgaggaggctatgcagcaatacgagatggctgttgcgtatatgggagatgatttcatgtttcagttgtttgggaagtacagagatatggctttggctgtgaaaaacccgtgccatctcaacatggctgcttgcctgatcaaacaaaagagatttgacgaagctatcgcacagtgtagcattgtgctgtcagaggacgaaaccaacgtgaaagcgctgttcagacgtggaaaagctagagccgagctcggccagacagaatcagcgagggaggactttctgaaagccaagaaacactccccggaagacaaggagatcatgcgggagcttcggtcgctggcggaacaagataaagcgatgtaccagaagcagagggagctatacaaaggtctgtttgggccgaggcctcagcccaaacccaaggccaaaaatttcgccgtcctcttctggcagtggctggtgtcactggtccgttatcttgccacgatgttcacgggcaagaatgactag

SEQ ID NO: 1757 - protein, 370 aa, Triticum aestivum
MPEDAAPIAPAPASDLTAGSSDDEITVEDASFARTELPQDGSAPPVVTTDMEVLHDKVKKQVIKEGHGKIPSKFSTCFVHYRAWVQSSMHKFEDTWQEQHPVEIVIGKEKKQMSGLGIGVGHMKSGERALLHVSWELGYGKEGSFSFPNVPPSADLIYEVELIGFDDAKEGKARSDMTVEERIEAADRRKLEGNDYFKEKKFEEAMQQYEMAVAYMGDDFMFQLFGKYRDMALAVKNPCHLNMAACLIKQKRFDEAIAQCSIVLSEDETNVKALFRRGKARAELGQTESAREDFLKAKKHSPEDKEIMRELRSLAEQDKAMYQKQRELYKGLFGPRPQPKPKAKNFAVLFWQWLVSLVRYLATMFTGKND

SEQ ID NO: 1758 - DNA, 1662 bp, Zea mays
  CDS (1)..(1662)
atggacgaggacttcgagatgcctcccgccggcgccgatgagatgatgggcgacgacgagatgggcgacttcggcggcgacgagggcccggtgatgaaggtgggcgaggagaaggaggtcggcaaggaggggctcaagaagaagctgctcaaggagggcgagggctgggagactcccgaggtcggcgacgaggttgaagtgcattacacgggcacgctccttgatgggacaaaattcgactcaagccgtgatcgtggagaacccttcaagttcaagcttggacaaggtcaagtgataaagggttgggatcaaggaatcaagaccatgaagaaaggagaaaatgctatttttaccattcctccagagctggcttatggagcatctggttcacctccaactatcccacccaatgcaaccctgcagtttgatgttgagctgctttcatggaccagtgtcaaagacatttgcaaagatggcggcatattcaagaagatccttaaagagggagagaaatgggagaacccaaaggatcctgatgaagtacttgtgaaatatgaggcccgtctggaagatggtactgttgtatccaagtctgagggggttgagtttactgtgaaagatggctacttttgtcctgccctggccaaagctgtcaaaaccatgaaaaaggcagagaaggtgctccttacagtaaagccacaatatggatttggtgagaagggtagaccagcagctggagaggaaggtgctgtgccgccaaatgcttcgctgctcattgaccttgagttgatttcatggaagactgtcacagaaattggggatgataagaaaatccttaagaaggttctcaaggagggagaaggttatgagcgtcccaacgagggtgctgttgttgaagtcaaaattatcggaaagcttcaggatggcgcggtgtttacaaagaaggggcatgacgaagagccatttaaattcaagaccgatgaagaggaagttattgccggtcttgatcgtgctgtgttgaacatgaagaagggcgaggttgctcttgtcacaattcctcctgaatatgcatttggttcaactgagtcaaagcaggatcttgctgttgttccacctaacagcacagtaatatatgaagttgagcttatttcatttgtgaaggacaaggagtcgtgggacttgaacaatgaagagaagattgaggctgctggtaagaagaaagaggaagggaatgcattgttcaaatcgggcaaatatgctagagcttccaagcgatatgagaaggctgccaagtacattgagtacgacacttcgttcagtgaagatgagaagaagcaatccaagcaactgaagatcagctgcaacctaaacaatgctgcctgcaaactgaagttgaaggattacaaggaagctgcgaagctttgcaccaaggttctggaactagacagccaaaatgtcaaggctctctacaggagggtgcaagcttacattcaacttgctgacctagagctagcagaggccgatatcaaaaaggcactggaaatcgatcctgacaacagggatgtcaagttggaatataagatcctgaaggagaagatcaaggagtacaacaagaaggacgccaaattctacagcaacatgttcgccaagatgacaaagtag

SEQ ID NO: 1759 - protein, 553 aa, Zea mays
MDEDFEMPPAGADEMMGDDEMGDFGGDEGPVMKVGEEKEVGKEGLKKKLLKEGEGWETPEVGDEVEVHYTGTLLDGTKFDSSRDRGEPFKFKLGQGQVIKGWDQGIKTMKKGENAIFTIPPELAYGASGSPPTIPPNATLQFDVELLSWTSVKDICKDGGIFKKILKEGEKWENPKDPDEVLVKYEARLEDGTVVSKSEGVEFTVKDGYFCPALAKAVKTMKKAEKVLLTVKPQYGFGEKGRPAAGEEGAVPPNASLLIDLELISWKTVTEIGDDKKILKKVLKEGEGYERPNEGAVVEVKIIGKLQDGAVFTKKGHDEEPFKFKTDEEEVIAGLDRAVLNMKKGEVALVTIPPEYAFGSTESKQDLAVVPPNSTVIYEVELISFVKDKESWDLNNEEKIEAAGKKKEEGNALFKSGKYARASKRYEKAAKYIEYDTSFSEDEKKQSKQLKISCNLNNAACKLKLKDYKEAAKLCTKVLELDSQNVKALYRRVQAYIQLADLELAEADIKKALEIDPDNRDVKLEYKILKEKIKEYNKKDAKFYSNMFAKMTK

SEQ ID NO: 1760 - DNA, 1125 bp, Zea mays
  CDS (1)..(1125)
atggctgtcgtcgaagaagacgctgcggcgtctgcagatcccgccgccgcgtccgatcccgccgctggctccagcgaaaacgagatcacagtagaagaggcttctttcgtgcattctgaacctccccaggatggcagcgccccacccgtggtttcctctgacatggaggcccttcacgacaaggttaagaagcaaatcatcaaagaaggccatggcaggaaaccgctgaagttcgcgacgtgctttgtgcactatagagcatgggttcaaggatcatcgcataaatttgaggatacctggcaagagcaacatccaattgaactagtacttggaaaagagaaaaaacaaatgtctggtttaggcatcggtgttggcagcatgaaaagcggggagcgtgcattgttgcatgttggttgggagctaggctatggcaaagaaggaagtttttcattcccaaatgtccctccaatggcagaccttgtttatgaagttgaactcattggatttgatgatgttaaagagggtaaatcccgaagtgacatgacagttgaagagaggattgcagctgcagacaggagaaagattgagggcaatgcatatttcaaagaaaagaagcttgaggaggccatgcagcaatatgaaatggcgattgcatacatgggagatgatttcatgtttcaattatttggaaagtacagagacatggccttggctgtgaaaaatccatgccatctcaatatggctgcatgcctgatcaaactaaagagattcgatgaagctattgcgcagtgtagcattgttttgacagaagatgaaagtaatgtcaaagcgctgttcaggcgaggaaaagctaaatctgaacttggccagacagaatcagcgagggaagatttcctcaaagcgaagaagtactccccagaagacaaggagatcattcgggagctccgtttgctcgcggaacaagacaaggcactataccagaagcagaaggagctctacaaaggtctctttgggccaagtcctgaagcgaaaccgaagaaggcaaagtacctcgttgtgttttggcagtgcctggtgtcatttatcctttatctggctgggatgttcaaacggaagaacgagtag

SEQ ID NO: 1761 - protein, 374 aa, Zea mays
MAVVEEDAAASADPAAASDPAAGSSENEITVEEASFVHSEPPQDGSAPPVVSSDMEALHDKVKKQIIKEGHGRKPLKFATCFVHYRAWVQGSSHKFEDTWQEQHPIELVLGKEKKQMSGLGIGVGSMKSGERALLHVGWELGYGKEGSFSFPNVPPMADLVYEVELIGFDDVKEGKSRSDMTVEERIAAADRRKIEGNAYFKEKKLEEAMQQYEMAIAYMGDDFMFQLFGKYRDMALAVKNPCHLNMAACLIKLKRFDEAIAQCSIVLTEDESNVKALFRRGKAKSELGQTESAREDFLKAKKYSPEDKEIIRELRLLAEQDKALYQKQKELYKGLFGPSPEAKPKKAKYLVVFWQCLVSFILYLAGMFKRKNE

SEQ ID NO: 1762 - DNA, 20 bp, Artificial sequence
  primer
atggaggaagttcaagagtc

SEQ ID NO: 1763 - DNA, 21 bp, Artificial sequence
  primer
ttagtcagatttatgcctttc

SEQ ID NO: 1764 - protein, 332 aa, Artificial sequence
  consensus sequence
  Variant (2)..(8): Xaa in position 2 to 8 is any amino acid
  Variant (9)..(16): Xaa in position 9 to 16 is any or no amino acid
  Variant (19)..(29): Xaa in position 19 to 29 is any amino acid
  Variant (30)..(41): Xaa in position 30 to 41 is any or no amino acid
  Variant (44)..(44): Xaa in position 44 is any amino acid
  Variant (46)..(48): Xaa in position 46 to 48 is any amino acid
  Variant (52)..(52): Xaa in position 52 is any amino acid
  Variant (54)..(55): Xaa in position 54 to 55 is any amino acid
  Variant (56)..(56): Xaa in position 56 is any or no amino acid
  Variant (58)..(83): Xaa in position 58 to 83 is any amino acid
  Variant (85)..(92): Xaa in position 85 to 92 is any amino acid
  Variant (93)..(94): Xaa in position 93 to 94 is any or no amino acid
  Variant (96)..(100): Xaa in position 96 to 100 is any amino acid
  Variant (103)..(105): Xaa in position 103 to 105 is any amino acid
  Variant (107)..(108): Xaa in position 107 to 108 is any amino acid
  Variant (111)..(111): Xaa in position 111 is any amino acid
  Variant (114)..(114): Xaa in position 114 is any amino acid
  Variant (117)..(121): Xaa in position 117 to 121 is any amino acid
  Variant (123)..(125): Xaa in position 123 to 125 is any amino acid
  Variant (127)..(127): Xaa in position 127 is any amino acid
  Variant (128)..(128): Xaa in position 128 is any or no amino acid
  Variant (130)..(135): Xaa in position 130 to 135 is any amino acid
  Variant (136)..(136): Xaa in position 136 is any or no amino acid
  Variant (140)..(144): Xaa in position 140 to 144 is any amino acid
  Variant (150)..(151): Xaa in position 150 to 151 is any amino acid
  Variant (153)..(155): Xaa in position 153 to 155 is any amino acid
  Variant (158)..(162): Xaa in position 158 to 162 is any amino acid
  Variant (163)..(176): Xaa in position 163 to 176 is any or no amino acid
  Variant (178)..(178): Xaa in position 178 is any amino acid
  Variant (181)..(181): Xaa in position 181 is any amino acid
  Variant (183)..(183): Xaa in position 183 is any amino acid
  Variant (186)..(188): Xaa in position 186 to 188 is any amino acid
  Variant (190)..(191): Xaa in position 190 to 191 is any amino acid
  Variant (194)..(195): Xaa in position 194 to 195 is any amino acid
  Variant (198)..(199): Xaa in position 198 to 199 is any amino acid
  Variant (201)..(203): Xaa in position 201 to 203 is any amino acid
  Variant (205)..(207): Xaa in position 205 to 207 is any amino acid
  Variant (210)..(210): Xaa in position 210 is any amino acid
  Variant (212)..(213): Xaa in position 212 to 213 is any amino acid
  Variant (215)..(217): Xaa in position 215 to 217 is any amino acid
  Variant (219)..(220): Xaa in position 219 to 220 is any amino acid
  Variant (222)..(225): Xaa in position 222 to 225 is any amino acid
  Variant (227)..(228): Xaa in position 227 to 228 is any amino acid
  Variant (229)..(230): Xaa in position 229 to 230 is any or no amino acid
  Variant (232)..(232): Xaa in position 232 is any amino acid
  Variant (234)..(234): Xaa in position 234 is any amino acid
  Variant (236)..(237): Xaa in position 236 to 237 is any amino acid
  Variant (239)..(239): Xaa in position 239 is any amino acid
  Variant (242)..(242): Xaa in position 242 is any amino acid
  Variant (246)..(247): Xaa in position 246 to 247 is any amino acid
  Variant (250)..(253): Xaa in position 250 to 253 is any amino acid
  Variant (256)..(258): Xaa in position 256 to 258 is any amino acid
  Variant (260)..(261): Xaa in position 260 to 261 is any amino acid
  Variant (264)..(268): Xaa in position 264 to 268 is any amino acid
  Variant (270)..(270): Xaa in position 270 is any amino acid
  Variant (274)..(274): Xaa in position 274 is any amino acid
  Variant (277)..(278): Xaa in position 277 to 278 is any amino acid
  Variant (280)..(282): Xaa in position 280 to 282 is any amino acid
  Variant (284)..(288): Xaa in position 284 to 288 is any amino acid
  Variant (290)..(291): Xaa in position 290 to 291 is any amino acid
  Variant (293)..(294): Xaa in position 293 to 294 is any amino acid
  Variant (297)..(300): Xaa in position 297 to 300 is any amino acid
  Variant (302)..(308): Xaa in position 302 to 308 is any amino acid
  Variant (310)..(311): Xaa in position 310 to 311 is any amino acid
  Variant (312)..(312): Xaa in position 312 is any or no amino acid
  Variant (314)..(314): Xaa in position 314 is any amino acid
  Variant (316)..(317): Xaa in position 316 to 317 is any amino acid
  Variant (319)..(322): Xaa in position 319 to 322 is any amino acid
  Variant (324)..(327): Xaa in position 324 to 327 is any amino acid
  Variant (329)..(331): Xaa in position 329 to 331 is any amino acid
EXXXXXXXXXXXXXXXPPXXXXXXXXXXXXXXXXXXXXXXXKVXKXXXKEGXGXXXPXXXXXXXXXXXXXXXXXXXXXXXXXXEXXXXXXXXXXEXXXXXGLXXXVXXMKXGEXALXXXXXEXXXGXXEXXXXXXXVPPXXXXXYEVELXXFXXXKEXXXXXXXXXXXXXXXXXXXTXEEXIXAAXXXKXXGNXXFKXXKXXXAXXXYEXAXXYXXXDXXFXXXXKXXXXAXAXKXXCXLNXAACXXKLXXXXEAXXXCXXVLXXXXXNXKALXRRXXAXXXLXXXXXAXXDXXKAXXXXPXXXXXXXEXXXLXEXXKXXXXKXXXXYXXXF

SEQ ID NO: 1765 - protein, 55 aa, Artificial sequence
  protein pattern
  Variant (2)..(5): Xaa in position 2 to 5 is any amino acid
  Variant (6)..(7): Xaa in position 6 to 7 is any or no amino acid
  Variant (9)..(9): Xaa in position 9 is any amino acid
  Variant (12)..(12): Xaa in position 12 is any amino acid
  Variant (16)..(16): Xaa in position 16 is any amino acid
  Variant (17)..(17): Xaa in position 17 is Ile or Leu
  Variant (19)..(20): Xaa in position 19 to 20 is any amino acid
  Variant (21)..(21): Xaa in position 21 is Asp, Glu or Arg
  Variant (22)..(22): Xaa in position 22 is Phe or Tyr
  Variant (23)..(23): Xaa in position 23 is Asp, Glu, Lys or Arg
  Variant (24)..(24): Xaa in position 24 is Glu or Gln
  Variant (26)..(28): Xaa in position 26 to 28 is any amino acid
  Variant (30)..(30): Xaa in position 30 is Asn, Ser or Thr
  Variant (31)..(31): Xaa in position 31 is any amino acid
  Variant (34)..(35): Xaa in position 34 to 35 is any amino acid
  Variant (36)..(36): Xaa in position 36 is Asp or Glu
  Variant (37)..(37): Xaa in position 37 is Glu or Ser
  Variant (38)..(38): Xaa in position 38 is any amino acid
  Variant (40)..(40): Xaa in position 40 is Ala, Pro or Val
  Variant (44)..(44): Xaa in position 44 is Phe or Tyr
  Variant (47)..(47): Xaa in position 47 is Ala, Gly or Thr
  Variant (48)..(48): Xaa in position 48 is any amino acid
  Variant (50)..(52): Xaa in position 50 to 52 is any amino acid
  Variant (54)..(54): Xaa in position 54 is Ala, Gly or Val
  Variant (55)..(55): Xaa in position 55 is Asp or Gln
AXXXXXXCXLNXAACXXKXXXXXXAXXXCXXVLXXXXXNXKALXRRXXAXXXLXX

SEQ ID NO: 1766 - protein, 58 aa, Artificial sequence
  protein pattern
  Variant (2)..(3): Xaa in position 2 to 3 is any amino acid
  Variant (4)..(4): Xaa in position 4 is any or no amino acid
  Variant (6)..(6): Xaa in position 6 is any or no amino acid
  Variant (8)..(8): Xaa in position 8 is Leu or Met
  Variant (9)..(9): Xaa in position 9 is Asp, Asn or Thr
  Variant (10)..(10): Xaa in position 10 is Asn, Thr or Val
  Variant (11)..(11): Xaa in position 11 is Glu, Pro, Gln or Ser
  Variant (13)..(13): Xaa in position 13 is Lys or Arg
  Variant (15)..(15): Xaa in position 15 is Ala, Glu or Gly
  Variant (18)..(18): Xaa in position 18 is Asp or Gly
  Variant (19)..(19): Xaa in position 19 is any amino acid
  Variant (20)..(20): Xaa in position 20 is Lys or Arg
  Variant (22)..(22): Xaa in position 22 is any amino acid
  Variant (23)..(23): Xaa in position 23 is Asp or Glu
  Variant (26)..(26): Xaa in position 26 is Ala, Asp, Glu, Asn, Ser or Thr
  Variant (27)..(27): Xaa in position 27 is any amino acid
  Variant (28)..(28): Xaa in position 28 is Phe or Tyr
  Variant (29)..(31): Xaa in position 29 to 31 is any amino acid
  Variant (33)..(33): Xaa in position 33 is any amino acid
  Variant (34)..(34): Xaa in position 34 is Ala or Glu
  Variant (35)..(35): Xaa in position 35 is any amino acid
  Variant (37)..(38): Xaa in position 37 to 38 is any amino acid
  Variant (39)..(39): Xaa in position 39 is Gln or Arg
  Variant (42)..(42): Xaa in position 42 is any amino acid
  Variant (43)..(43): Xaa in position 43 is Ala or Gly
  Variant (44)..(44): Xaa in position 44 is Ala, Ile or Val
  Variant (45)..(46): Xaa in position 45 to 46 is any amino acid
  Variant (47)..(47): Xaa in position 47 is Ile, Met or Val
  Variant (48)..(48): Xaa in position 48 is Glu or Gly
  Variant (49)..(49): Xaa in position 49 is any amino acid
  Variant (51)..(52): Xaa in position 51 to 52 is any amino acid
  Variant (54)..(54): Xaa in position 54 is Asp, Gln or Ser
  Variant (55)..(56): Xaa in position 55 to 56 is any amino acid
  Variant (57)..(57): Xaa in position 57 is Asp, Glu or Gly
  Variant (58)..(58): Xaa in position 58 is Lys or Arg
KXXXSXDXXXXEXIXAAXXXKXXGNXXXXXXKXXXAXXXYEXXXXXXXXDXXFXXXXX

SEQ ID NO: 1767 - protein, 40 aa, Artificial sequence
  protein pattern
  Variant (2)..(2): Xaa in position 2 is any amino acid
  Variant (3)..(3): Xaa in position 3 is Ala, Gly or Val
  Variant (5)..(5): Xaa in position 5 is any or no amino acid
  Variant (7)..(9): Xaa in position 7 to 9 is any amino acid
  Variant (10)..(13): Xaa in position 10 to 13 is any or no amino acid
  Variant (15)..(15): Xaa in position 15 is Lys or Arg
  Variant (16)..(16): Xaa in position 16 is any amino acid
  Variant (19)..(19): Xaa in position 19 is any amino acid
  Variant (21)..(21): Xaa in position 21 is Ile, Leu or Val
  Variant (22)..(22): Xaa in position 22 is Phe, Leu or Val
  Variant (23)..(23): Xaa in position 23 is any amino acid
  Variant (24)..(24): Xaa in position 24 is Ile or Val
  Variant (25)..(25): Xaa in position 25 is Asp, Gly, Asn, Pro or Ser
  Variant (26)..(26): Xaa in position 26 is any amino acid
  Variant (27)..(27): Xaa in position 27 is Glu, Asn or Gln
  Variant (29)..(29): Xaa in position 29 is Ala or Gly
  Variant (32)..(32): Xaa in position 32 is any amino acid
  Variant (33)..(33): Xaa in position 33 is Ala, Glu, Ser or Thr
  Variant (35)..(35): Xaa in position 35 is Asn or Ser
  Variant (36)..(36): Xaa in position 36 is any amino acid
  Variant (37)..(37): Xaa in position 37 is Pro or Ser
  Variant (38)..(38): Xaa in position 38 is any amino acid
  Variant (39)..(39): Xaa in position 39 is Ile or Pro
  Variant (40)..(40): Xaa in position 40 is Asn or Pro
GXXIXGXXXXXXXMXXGEXAXXXXXXXLXYGXXGXXXXXX

SEQ ID NO: 1768 - protein, 15 aa, Artificial sequence
  protein pattern
  Variant (3)..(3): Xaa in position 3 is any amino acid
  Variant (4)..(4): Xaa in position 4 is Ala or Ser
  Variant (5)..(5): Xaa in position 5 is Asp or Thr
  Variant (6)..(6): Xaa in position 6 is Ile, Leu or Val
  Variant (7)..(7): Xaa in position 7 is any amino acid
  Variant (12)..(12): Xaa in position 12 is Leu or Val
  Variant (13)..(13): Xaa in position 13 is Ile, Leu or Val
  Variant (14)..(14): Xaa in position 14 is Gly or Ser
PPXXXXXYEVEXXXF

SEQ ID NO: 1769 - protein, 18 aa, Artificial sequence
  protein pattern
  Variant (2)..(5): Xaa in position 2 to 5 is any amino acid
  Variant (6)..(6): Xaa in position 6 is Ala or Ser
  Variant (7)..(7): Xaa in position 7 is any amino acid
  Variant (8)..(8): Xaa in position 8 is Ala, Thr or Val
  Variant (9)..(10): Xaa in position 9 to 10 is any amino acid
  Variant (11)..(11): Xaa in position 11 is Ser or Thr
  Variant (12)..(12): Xaa in position 12 is any amino acid
  Variant (13)..(13): Xaa in position 13 is His or Lys
  Variant (15)..(15): Xaa in position 15 is any amino acid
  Variant (17)..(17): Xaa in position 17 is Asp or Lys
  Variant (18)..(18): Xaa in position 18 is Thr or Val
FXXXXXXXXXXXXKXEXX

SEQ ID NO: 1770 - protein, 23 aa, Artificial sequence
  protein pattern
  Variant (2)..(6): Xaa in position 2 to 6 is any or no amino acid
  Variant (8)..(8): Xaa in position 8 is Ile, Leu or Val
  Variant (10)..(12): Xaa in position 10 to 12 is any amino acid
  Variant (13)..(13): Xaa in position 13 is Ser or Val
  Variant (14)..(14): Xaa in position 14 is any amino acid
  Variant (16)..(16): Xaa in position 16 is Asp or Gln
  Variant (17)..(17): Xaa in position 17 is Ile or Val
  Variant (18)..(18): Xaa in position 18 is any amino acid
  Variant (20)..(20): Xaa in position 20 is Asp or Glu
  Variant (22)..(22): Xaa in position 22 is any amino acid
  Variant (23)..(23): Xaa in position 23 is Gly, Ile, Leu or Val
VXXXXXEXLXXXXXKXXXKXGXX

SEQ ID NO: 1771 - protein, 16 aa, Artificial sequence
  protein pattern
  Variant (2)..(2): Xaa in position 2 is any or no amino acid
  Variant (4)..(4): Xaa in position 4 is Phe, Ile or Val
  Variant (5)..(5): Xaa in position 5 is any amino acid
  Variant (7)..(7): Xaa in position 7 is Ala or Val
  Variant (8)..(8): Xaa in position 8 is any amino acid
  Variant (9)..(9): Xaa in position 9 is Glu, Lys or Arg
  Variant (10)..(10): Xaa in position 10 is any amino acid
  Variant (11)..(11): Xaa in position 11 is Ala, Asp or Ser
  Variant (13)..(15): Xaa in position 13 to 15 is any or no amino acid
EXDXXKXXXXXPXXXD

SEQ ID NO: 1772 - DNA, 1080 bp, Synechocystis sp.
  CDS (1)..(1080): transl_table=11
atggtggatgagtttgatctgcccccggaaatcattgaccgccgggtacggaagatgaaaatgatctccccttccaacatcgaggtcaacatcggtcagaccctcaaggacgacgaatatatcggcatgtgccgccgggaagtgctggatggttttctccgggaacgggcggagaaactgggtacaaaagtcattaatggcaccgtttataaattagacattcctagcaaagatagtgatccctacaccctccactatgccgaccacagcgttggtggcaccactggggaaatgaaaatcctaaaagtagatgtggtgattggggctgatggcgctaactctcgcattgccaaagccattgacgctggggattacaactatgcgatcgccttccaagagcggattcgtctgccggaagacaaaatggcctactacgatgaactagcagaaatgtatgtgggcgatgacgtttctccggatttctacgcctgggtattcccaaaatatgaccacgtggcggtgggcaccggcaccatgaaggtgaacaaagcccgcatcaaagacttacaggctggcatccgcaccagggctgccaaaaaactagaaggcggagaaatcatcaaagtggaagcccatcccattcctgaacatccccggccccggcgggtggttggtcgagtagccctagtgggggatgccgctggtaccgtcaccaaatcctctggggaaggcatttactttgccgccaaatccgcccgtatgtgtgcggaaaccattgtggccaccagcaataatggccaacgggtgcccaccgaagccgatctgaaacaatacatcaaacaatgggataaacgctacggcgctacctatttggtgttggatattctgcaacgggtcttctatcgcaccgatgccaccagagaagcctttgtggaaatgtgttccgacatcgatgtgcaaaagctaacttttgacagttacctgtacaaaaccgtggtacccgccaatccattggtgcaaatgaaaattaccgccaaaaccattggtagcttgctccggggtaacgctttagccccttaa

SEQ ID NO: 1773 - protein, 359 aa, Synechocystis sp.
MVDEFDLPPEIIDRRVRKMKMISPSNIEVNIGQTLKDDEYIGMCRREVLDGFLRERAEKLGTKVINGTVYKLDIPSKDSDPYTLHYADHSVGGTTGEMKILKVDVVIGADGANSRIAKAIDAGDYNYAIAFQERIRLPEDKMAYYDELAEMYVGDDVSPDFYAWVFPKYDHVAVGTGTMKVNKARIKDLQAGIRTRAAKKLEGGEIIKVEAHPIPEHPRPRRVVGRVALVGDAAGTVTKSSGEGIYFAAKSARMCAETIVATSNNGQRVPTEADLKQYIKQWDKRYGATYLVLDILQRVFYRTDATREAFVEMCSDIDVQKLTFDSYLYKTVVPANPLVQMKITAKTIGSLLRGNALAP

SEQ ID NO: 1774 - DNA, 1953 bp, Glycine max
  CDS (265)..(1653)
  misc_feature (1919)..(1919): n is a, g, c or t
  misc_feature (1950)..(1950): n is a, g, c or t
ccacgcgtccggtatctttttagttcaatccattgatggagtgtggagtgtgaagtatgaagagagcataacgtggcagcaccagaagcactcaaaataaaaagcaacgcccctcatcatcccaaaatctatccactttaaatcaccaccctcgatcctacccatccaacggccacaaaccccctcaaatcccaacccatatcccctcaaacacacataaaattagagttccatagtctcactctttactcgccactcgtaacaatgaactccatagccttcaaatccttcgtcggcctccgccagtcctcgccggaggccccacatttcgctgcccagtcccgccccgccactccccaccgcaaattccgcgtcgtggccggaaaattcagccccaggctgaacggccggaacctccgcgtggcggtggtgggcggcggtcccgccggaggagccgccgcggagacgctggcgaagggcggcgtggagacgttcctgatcgagcgaaaaatggacaactgcaagccgtgcggcggcgccatcccgctgtgcatggtgggggagttcgaccttccgctggacatcatcgaccggcgcgtgacgaagatgaagatgatatcgccgtcgaacgtggcggtggacatcgggaggacgctgaagccgcacgagtacatcggcatggtgcggcgcgaggtgctcgacgcttacctaagggaccgcgccaaggagaacggcgccaacgtcatcaacggcttgttcttgaaaatggatattcctaaggataataactccccctacgttctgcattactctagctacgacgggaaaaccaatggagctggtgagaagcgtaccttggaagttgacgctgtcattggcgccgatggggccaattctagagtcgccaagtctatcgatgccggtgattatgagtatgccatcgcttttcaggagagggtaagaattccggatgataagatggtgtattacgagaatcttgcggagatgtacgtgggggatgatgtttctccggatttctatggatgggtgtttccgaaatgtgaccatgtggctgttggcactggtaccgtgacacacaagggagacatcaagaagttccaactagcaacaaggaaaagagcagaggacaagattttgggaggcaagatcatccgagtggaggctcaccctatcccggaacatcctcggccgcgaaggttgtcgggaagagtggcgttggttggtgatgctgctggctatgtaaccaaatgctctggagaggggatctattttgcagccaagagtggcaggatgtgtgcagaggcaattgttgaaggttctgagaatggaaaaaggatggtggaagaaggggacttgaggaagtacttggagaagtgggacaagacttattggccaacttacaaggtcttggatattcttcagaaggtgttttataggtccaaccctgcaagggaagcgtttgtggagatgtgtgctgatgagtatgtgcagaagatgacctttgatagctatttgtacaagacggtggtgcctggcaatccattggaggatctgaaattggccattaacaccattgggagcttagtgagagccaatgcaataaggagggagatgaagaaacttaatgtatgacaataatagtctcagtttgactctcatatatttgccattcatttttgcattgcgtgtttcctagtggacatgatctccttataattaagtgataattaactatatatgtgtaagcaaaaaaggattgaattttcatgcaatcccataccggtatgtataccttttatctacaatgatgtaagcgaagcaaggggttgattgaaatactaggtactagcaaaagtttacttctcagatacttttgccattggtttagggcggcctgnaaaaaaaaaaaaaaaaaaaaaaaaaaaaaanaaa

SEQ ID NO: 1775 - protein, 462 aa, Glycine max
MNSIAFKSFVGLRQSSPEAPHFAAQSRPATPHRKFRVVAGKFSPRLNGRNLRVAVVGGGPAGGAAAETLAKGGVETFLIERKMDNCKPCGGAIPLCMVGEFDLPLDIIDRRVTKMKMISPSNVAVDIGRTLKPHEYIGMVRREVLDAYLRDRAKENGANVINGLFLKMDIPKDNNSPYVLHYSSYDGKTNGAGEKRTLEVDAVIGADGANSRVAKSIDAGDYEYAIAFQERVRIPDDKMVYYENLAEMYVGDDVSPDFYGWVFPKCDHVAVGTGTVTHKGDIKKFQLATRKRAEDKILGGKIIRVEAHPIPEHPRPRRLSGRVALVGDAAGYVTKCSGEGIYFAAKSGRMCAEAIVEGSENGKRMVEEGDLRKYLEKWDKTYWPTYKVLDILQKVFYRSNPAREAFVEMCADEYVQKMTFDSYLYKTVVPGNPLEDLKLAINTIGSLVRANAIRREMKKLNV

SEQ ID NO: 1776 - DNA, 1796 bp, Glycine max
  CDS (43)..(1431)
tcagctacgtaggcccccccccccctcctctcactcgtcaccatgaactccatagccttcaaatccttcgtcggcctccgccagtcctcgccggaggccccgcatttcgccgcccagccaagacccgccactccccaccgcaaattccgcgtcttggctggaaaattcagccccaagctcaatggccggaacctccgcgtggcggtggtgggaggcggtccggctggcggggccgccgcggagacgctggcgaagggcggcgtggagacgttcctgatcgagcgaaagatggacaactgcaagccgtgcggtggcgccatcccgctgtgcatggtgggggagttcgacctgccgctggacatcatcgaccggcgcgtgacgaagatgaagatgatatcgccgtcgaacgtggcggtggacatcgggaggacgctgaagccgcacgagtacatcggcatggtgcggcgcgaggtgctggacgcttacctcagggaccgcgccaaggagtacggtgcgaacgtcatcaatggcttgttcttgaaaatggatattcctaaggataagaactccccctacgttctgcattactctagctacgatggcaaaaccaatggggctggtgagaagcgtaccttggaagttgacgctgtcattggcgctgacggggctaattctagagtcgccaagtctattgatgccggtgattatgagtatgccatcgcttttcaggagagggtaaaaatcccggatgataagatggtgtattacgagaaccttgcggagatgtacgtgggcgatgatgtttctccagatttctacgggtgggtgtttccaaaatgtgaccatgtggctgtaggcactggaactgtgacacacaagggggacatcaagaagttccaactagcaacaaggaaaagagcagaggacaagattttgggaggcaagatcatccgagtggaggctcaccctatcccggaacatcctcggccacgaaggttgttggggagagtggcgctggttggcgacgctgctggctacgtaaccaaatgctccggagaggggatctattttgcagccaagagtgggaggatgtgtgcagaggcaattgttgaaggttctgagaatgggaaaaggatggtggaagaaggggacttgaggaagtacttggagaagtgggacaagacttattggccaacttacaaggtcttggatattcttcagaaggtgttttataggtccaaccctgcaagggaagcgtttgtggagatgtgtgctgatgagtatgtgcagaagatgacctttgatagctacttgtacaagacagtggtgcctggcaatccattggaggatctgaaattggccattaacaccattgggagcttagtgagggccaatgccataaggagggagatgaacaaacttaacgtatgacaataatagtcattatcatatttatcattcatttttgctttgtgtttttcctagtggacatgatctccttataattaagtgataattaactatatatgtgtaagaaaaaggattgaatttcatgcaatcccataaccggtatttgtaccttttatctgcaatgatgtaaaatgctagagtactagcaaagatttacttctcaaaaaaaaaaaaaaaaaaatcggttatgtcagctagatttaaagatttaggctctcaagtggtgctgttagtgactcatttagtggcttaagctattccaaattgaaaatatacgtgtaaaatatgttgctatatatccatgccaatgatgaaatgccaactat

SEQ ID NO: 1777 - protein, 462 aa, Glycine max
MNSIAFKSFVGLRQSSPEAPHFAAQPRPATPHRKFRVLAGKFSPKLNGRNLRVAVVGGGPAGGAAAETLAKGGVETFLIERKMDNCKPCGGAIPLCMVGEFDLPLDIIDRRVTKMKMISPSNVAVDIGRTLKPHEYIGMVRREVLDAYLRDRAKEYGANVINGLFLKMDIPKDKNSPYVLHYSSYDGKTNGAGEKRTLEVDAVIGADGANSRVAKSIDAGDYEYAIAFQERVKIPDDKMVYYENLAEMYVGDDVSPDFYGWVFPKCDHVAVGTGTVTHKGDIKKFQLATRKRAEDKILGGKIIRVEAHPIPEHPRPRRLLGRVALVGDAAGYVTKCSGEGIYFAAKSGRMCAEAIVEGSENGKRMVEEGDLRKYLEKWDKTYWPTYKVLDILQKVFYRSNPAREAFVEMCADEYVQKMTFDSYLYKTVVPGNPLEDLKLAINTIGSLVRANAIRREMNKLNV

SEQ ID NO: 1778 - DNA, 1404 bp, Arabidopsis thaliana
  CDS (1)..(1404)
atggcgacgacggttacactcaaatccttcaccggacttcgtcaatcatcaacggagcaaacaaacttcgtctctcatgtaccgtcatcactttctctccctcaacgacggacctctctccgagtaaccgcagccagagccactcccaaactctccaaccgtaaactccgtgtcgccgtcatcggtggtggaccagcaggcggggcagctgcagagactctagcacaaggaggaatcgagacgattctcatcgagcgtaagatggacaattgcaagccttgcggtggcgcgattcctctctgtatggtcggagaattcaacttgccgttggatattattgatcggagagtgacgaagatgaagatgatttcgccgtcgaacattgctgttgatattggtcgtacgcttaaggagcatgagtatataggtatggtgagaagagaagttcttgatgcttatctgagagagagagctgagaagagtggagccactgtgattaacggtctcttccttaagatggatcatccggagaattgggactcgccgtacactttgcattacactgagtacgatggtaaaactggagctacagggacgaagaaaacaatggaggttgatgctgtcattggagctgatggagctaactctagggttgctaaatctattgatgctggtgattacgactacgcaattgcatttcaggagaggattaggattcctgatgagaaaatgacttactatgaggatttagctgagatgtatgttggagatgatgtgtcgccggatttctatggttgggtgttccctaagtgcgaccatgtagctgttggaacaggtactgtgactcacaaaggtgacatcaagaagttccagctcgcgaccagaaacagagctaaggacaagattcttggagggaagatcatccgtgtggaggctcatccgattcctgaacatccgagaccacgtaggctctcgaaacgtgtggctcttgtaggtgatgctgcagggtatgtgactaaatgctctggtgaagggatctactttgctgctaagagtggaagaatgtgtgctgaagccattgtcgaaggttcacagaatggtaagaagatgattgacgaaggggacttgaggaagtacttggagaaatgggataagacatacttgcctacctacagggtacttgatgtgttgcagaaagtgttttacagatcaaatccggctagagaagcgtttgtggagatgtgtaatgatgagtatgttcagaagatgacattcgatagctatctgtacaagcgggttgcgccgggtagtcctttggaggatatcaagttggctgtgaacaccattggaagtttggttagggctaatgctctaaggagagagattgagaagcttagtgtttaa

SEQ ID NO: 1779 - protein, 467 aa, Arabidopsis thaliana
MATTVTLKSFTGLRQSSTEQTNFVSHVPSSLSLPQRRTSLRVTAARATPKLSNRKLRVAVIGGGPAGGAAAETLAQGGIETILIERKMDNCKPCGGAIPLCMVGEFNLPLDIIDRRVTKMKMISPSNIAVDIGRTLKEHEYIGMVRREVLDAYLRERAEKSGATVINGLFLKMDHPENWDSPYTLHYTEYDGKTGATGTKKTMEVDAVIGADGANSRVAKSIDAGDYDYAIAFQERIRIPDEKMTYYEDLAEMYVGDDVSPDFYGWVFPKCDHVAVGTGTVTHKGDIKKFQLATRNRAKDKILGGKIIRVEAHPIPEHPRPRRLSKRVALVGDAAGYVTKCSGEGIYFAAKSGRMCAEAIVEGSQNGKKMIDEGDLRKYLEKWDKTYLPTYRVLDVLQKVFYRSNPAREAFVEMCNDEYVQKMTFDSYLYKRVAPGSPLEDIKLAVNTIGSLVRANALRREIEKLSV

SEQ ID NO: 1780 - DNA, 1221 bp, Nostoc sp. PCC 7120
  CDS (1)..(1221): transl_table=11
ttgacactacgggttgctgttgttgggtcaggcccagctggttcctctgctgctgaaacactagccaaagctgggattgagacctacctgtttgagcgcaaattggataacgccaaaccctgtgggggggcgattcccttatgtatggtaagcgagtttgacttaccaccagaaattattgatcgtcaagtgcggaagatgaaaatgatttcaccttccaatcgtgaagttgatatcaatctgataaaagaagacgaatatataggaatgtgccggcgtgaagtcctagatggcttcttacgcaatcgcgcggcaaaattaggggcaaatttaattaatgccaccgttcataaagttgatatacctggaaataacagcgacccatacaccattcattatgttgaccataatgaaggcggcgcacaaggtgtcacaaaaactttaaaagtagatttgattattggtgcagatggggctaattcccgcattgccaaagaaatggatgcaggggattataattatgcgatcgctttccaagagcgtatccgcttacccgaagataaaatggcatattacaacgaccttgccgaaatgtatgtaggcaatgacgtttccacagacttttatgcctgggtattccccaaatatgaccacgtagccgtcggtactggcacaatgcaggtacacaaagccagcatcaaacagttacaggctggtatccgcacccgtgctagcgaaaaattagcaggtggtaaaatcatcaaagtagaagcccacccaatccccgaacatccacgtcctcgacgtgttgttggtcgcatagccttggttggagacgctgctggctacgttaccaagtcttctggtgaagggatttactttgctgctaaatctgggcggatgtgtgcagaaaccattgtagaagtttctcaaaatggtagtcgtattcccacagaaaacgaactcaagatttatctcaaacgctgggataaaaaatacggactcacttacaaagtgttggacatcttacaaacagtattttaccgctccgatgccacccgtgaggcatttgtagagatgtgtggagacttggatgtacaaaaactgactttcgacagctatctgtataagacagtcgtccctgctaaccccatcacccagttaaaaattactgccaagacaattggtagtctcatccgtggtaacgctttagcaccctaa

SEQ ID NO: 1781 - protein, 406 aa, Nostoc sp. PCC 7120
MTLRVAVVGSGPAGSSAAETLAKAGIETYLFERKLDNAKPCGGAIPLCMVSEFDLPPEIIDRQVRKMKMISPSNREVDINLIKEDEYIGMCRREVLDGFLRNRAAKLGANLINATVHKVDIPGNNSDPYTIHYVDHNEGGAQGVTKTLKVDLIIGADGANSRIAKEMDAGDYNYAIAFQERIRLPEDKMAYYNDLAEMYVGNDVSTDFYAWVFPKYDHVAVGTGTMQVHKASIKQLQAGIRTRASEKLAGGKIIKVEAHPIPEHPRPRRVVGRIALVGDAAGYVTKSSGEGIYFAAKSGRMCAETIVEVSQNGSRIPTENELKIYLKRWDKKYGLTYKVLDILQTVFYRSDATREAFVEMCGDLDVQKLTFDSYLYKTVVPANPITQLKITAKTIGSLIRGNALAP

SEQ ID NO: 1782 - DNA, 1152 bp, Chlorobium tepidum TLS
  CDS (1)..(1152): transl_table=11
atgctgtatgatgtcgcaatcataggaggaggtccgtcgggcgcggcggctgcggagattctggccagggctggccactcgaccatcctcatcgaacgcaaccttgccaacgtcaagccgtgcggcggcgcgattccacttggcttgatcgaagagttcgatattcccgacgagctggtcgagaagaagctgacccgcatgagcgtgcgctcgccgaaaggcgaaaccatcttcatgcacatgccgaacggctacgtcggcatggtgcgccgcgagcggttcgaccgctaccttcgcgaaaaggcgcagaaggcgggtgcggaggtggtcgaagcgctggtcaaaaagatcgaacgctcggttgatcgcttcacgctccaacttttcaacaaagagggcgaggctctgccgccggtcgaagcttcgtacgtcatcggcgcagatggcgcaaactcgaagaccgccgacgagctgggctttccaccgaacgacctcaaggtgatcgccatgcagcagcgcttccactactgcgacgagctgaagccctatgaggagctggtggagatctggttcgacggtgaggtttcgcccgatttctacggctggatcttcccgaagaccgaccacatcgctatcggaacgggaaccgaggagcaccgcaatgacatcaagcagttgcagcaccgcttcgtcgagaagatcggcatcgccgaaaagccgtacctcaacgaggctgccaagattccgatgaagccgcgccgctccttcacgcaggagcgcgccatcctcgtcggcgacgcggcggggctggtgactccggccaacggcgaaggtatcttcttcgccatgcgctccggcaagctcggcgcggaggcgatgatcgagcgtatccgcaacaacacgccgctttcgagctacgaaaagaaattccgcaagctctactcaccaatcttcttcggcctgcaggtgctccagtcggtttactacaagagcgaccgcctgcgcgagagcttcgtggcgatctgccgagacaaggatgtgcagggcatcaccttcgactcgtacctctacaaaaagatggtccccgcgccgtggagcgtgcagatgaagatcatggccaagaacatctaccacctcgcgaagggttcgtaa

SEQ ID NO: 1783 - protein, 383 aa, Chlorobium tepidum TLS
MLYDVAIIGGGPSGAAAAEILARAGHSTILIERNLANVKPCGGAIPLGLIEEFDIPDELVEKKLTRMSVRSPKGETIFMHMPNGYVGMVRRERFDRYLREKAQKAGAEVVEALVKKIERSVDRFTLQLFNKEGEALPPVEASYVIGADGANSKTADELGFPPNDLKVIAMQQRFHYCDELKPYEELVEIWFDGEVSPDFYGWIFPKTDHIAIGTGTEEHRNDIKQLQHRFVEKIGIAEKPYLNEAAKIPMKPRRSFTQERAILVGDAAGLVTPANGEGIFFAMRSGKLGAEAMIERIRNNTPLSSYEKKFRKLYSPIFFGLQVLQSVYYKSDRLRESFVAICRDKDVQGITFDSYLYKKMVPAPWSVQMKIMAKNIYHLAKGS

SEQ ID NO: 1784 - DNA, 1209 bp, Thermosynechococcus elongatus BP-1
  CDS (1)..(1209): transl_table=11
ttgtcacttcgggtagcagtagtcggtgggggtccagcgggttcctcagccgccgaaaccttagccaaagccggaatccaaacctatctctttgaacgtaaattagacaatgccaagccctgtggcggtgcgatccccctgtgcatggtcagtgaatttgacctaccaccggaaatcattgaccgccgcgtgcgcaaaatgaaaatgatttccccctccaacattgaggtgaacattggccataccctcaaggagcacgagtatatcggtatgtgccgccgcgaggtcctcgatagctttatgcgcaatcgggcagcggatttgggcgccaacttgatcaatggcactgtctttaagctagaacagcccaccaccagcgatcggccctacaccctccactatgtccaagaggatggcacagctcagaccctcgaagtggatgtggtgattggtgccgatggggcaaattctcgcattgccaaagaaattgatgccggcgattacaactatgccattgcctaccaggaacggattcgcctacctgaggacaaaatggcttactacaacgagttggcagaaatgtacgtgggggatgacgtgtcccctgacttttatgcgtgggttttcccgaaatatgaccatgtagccgtgggcacgggcacgatgaaggtcaacaaagaccgtattcgggaattgcaagcaggaatccgcagccgcgctgctgccaaactggaaggagggcaaattattaaagtggaagcccaccccattcctgagcatcctcggcctcggcgagttgtcggtcgcgtcgctcttgtgggggatgcggctggtaccgtgaccaagtcctccggagaaggcatttactttgccgccaagtccgcccgcatgtgtgctgaaacgattgtcgagacctccaacggcggtcgccgtatccctacggaagccgatctcaagctctacctgaagcgctgggacaaagcctacggcatgacctatcttgttttggatctgctgcaacgggtcttttatcgctccgatgccacccgtgaggcttttgtggagatgtgtagcgatcttgatgtgcaaaagctcaccttcgatagctacctctacaagaccgttgtacccgctaatcccttagtgcagttgaaaattactgcaaaaacgattggcagcctgatgcggggaaacgcccttgccccctag

SEQ ID NO: 1785 - protein, 402 aa, Thermosynechococcus elongatus BP-1
MSLRVAVVGGGPAGSSAAETLAKAGIQTYLFERKLDNAKPCGGAIPLCMVSEFDLPPEIIDRRVRKMKMISPSNIEVNIGHTLKEHEYIGMCRREVLDSFMRNRAADLGANLINGTVFKLEQPTTSDRPYTLHYVQEDGTAQTLEVDVVIGADGANSRIAKEIDAGDYNYAIAYQERIRLPEDKMAYYNELAEMYVGDDVSPDFYAWVFPKYDHVAVGTGTMKVNKDRIRELQAGIRSRAAAKLEGGQIIKVEAHPIPEHPRPRRVVGRVALVGDAAGTVTKSSGEGIYFAAKSARMCAETIVETSNGGRRIPTEADLKLYLKRWDKAYGMTYLVLDLLQRVFYRSDATREAFVEMCSDLDVQKLTFDSYLYKTVVPANPLVQLKITAKTIGSLMRGNALAP

SEQ ID NO: 1786 - DNA, 1344 bp, Prochlorococcus marinus subsp. marinus str. CCMP1375
  CDS (1)..(1344): transl_table=11
atgttgcgtgttgcagtaatcggaggaggcccaagtggttcctgtacagctgaaatccttgccaaggcaggtattaaaacatggattttcgaaagaaagctagacaatgcaaaaccatgtggtggagcaattccgttatgcatggtttcagagtttgagcttcctgattcaataattgatagaaaagtcagaaacatgcgaatgatttcaccttccaatagagaagtagatattagtctggacaaagtttatggagaaacagaaaacgaatacataggaatgtgtagaagagaagtcatggatgcatttatgaggaatcgtgctgctgaattaggagcaattcttgtaaatggactagtgacaaaaattgaaactggtactaatcgacaagggccatatactctcaattactcagattattccagtggagatgcaaagggtgaagccaaaacattagaagttgacttgatcgttggtgctgatggtgccaatagtcgagtagcaaaagcaatggatgcaggtgattacaacgtagccattgcttttcaagagagaattaagctaccagaaaaagagatgtcttattacgaagatctggctgaaatgtatgtaggcactgatgtctcccctgatttctatggttgggtattccctaaattcgaccatgtagcagtaggaacaggcacaatgcaaaaaaaccaagctcttattaaagacctacaagaaggggtaagagaacgtgcacaaaaaagactagtaaatggagaagtgataaaagtagaagcgcatccaatccctgaacacccaaggccaagacgtgtggttggaaggatggccttagttggtgatgccgcggggtatgtaactaagagctcaggagaaggtatatatttcgctgccaaaagtggcaggatgtgtgcagaagaaatagtaagtgccagtcaaggtggaagtaaaattcctaccgaagatgatctgaaaaaatatataaaaaaatgggataaaaaatatggcgcaacgtacaaagtactagaaatactacagaatatcttttattccaacgatggagcgcgtgaagcgtttgtagaaatgtgtgatgatatagatgtacaacgacttacgtttgatagctatctatacaaaactgtagtagccatgaaaccattacaacaattaaagctaacattcatgactctaggatctgtcttaagaggccgtgccctggcgccgaagagttataagcctgtgccaagcactgtaagaggggatgaagaagtaaacaaaatgctagccgttagcacaattaaaggcggtataaaagtaggaaaaaagaaagtaaaataa

SEQ ID NO: 1787 - protein, 447 aa, Prochlorococcus marinus subsp. marinus str. CCMP1375
MLRVAVIGGGPSGSCTAEILAKAGIKTWIFERKLDNAKPCGGAIPLCMVSEFELPDSIIDRKVRNMRMISPSNREVDISLDKVYGETENEYIGMCRREVMDAFMRNRAAELGAILVNGLVTKIETGTNRQGPYTLNYSDYSSGDAKGEAKTLEVDLIVGADGANSRVAKAMDAGDYNVAIAFQERIKLPEKEMSYYEDLAEMYVGTDVSPDFYGWVFPKFDHVAVGTGTMQKNQALIKDLQEGVRERAQKRLVNGEVIKVEAHPIPEHPRPRRVVGRMALVGDAAGYVTKSSGEGIYFAAKSGRMCAEEIVSASQGGSKIPTEDDLKKYIKKWDKKYGATYKVLEILQNIFYSNDGAREAFVEMCDDIDVQRLTFDSYLYKTVVAMKPLQQLKLTFMTLGSVLRGRALAPKSYKPVPSTVRGDEEVNKMLAVSTIKGGIKVGKKKVK

SEQ ID NO: 1788 - DNA, 1332 bp, Prochlorococcus marinus subsp. pastoris str. CCMP1986
  CDS (1)..(1332): transl_table=11
atgttgagagttgctgttatcggtggaggaccaagtggttcatgtgctgctgaaatacttgctaaatctggtataaaaacttggctttttgaaagaaaattagataatgcaaaaccttgtggaggagccattcctctttgtatggttgaggaatttgacttgccagaaactattatagatagaaaagtaagacatatgaaaatgatatctccctctaatagagaagttgatattagcttggataatgtttatggcaaaagtgataatgaatatataggaatgtgcagaagagaggtaatggatgcatttatgagaaacagagcttctgaacttggggcaacattaattaatggattagttacttcaattgatactgggaatgataatcaaggtccatacaaactttcatattcagatttttcttctggagacaagaaaggagaacttaaagagttaactgtagatctcttaataggagctgacggggccaacagcagagttgctaaagctatggatgctggcgattacaaagtagcaattgcattccaagaaagaattaaattgcctaaagaagaaatgagttactacgaagatctcgcggagatgtatgtaggaacagatgtttctcctgatttttatggttgggtatttcctaaatatgatcatgtcgcagtcgggacaggtacaatgcaaaaaaaccaatccttaataaaaggccttcaagaaggagtaaggaatagagcaaaaaaaaggcttgtgaatggtgaagttataaaagttgaagcacatcctattcctgagcatccaagacctcgaagagttgtaggtagaatggctctggtaggagatgcagcaggttatgtaacaaaaagctctggagaaggtatttattttgctgctaaaagtggaagaatgtgtgctgaagaaatagttgaagcttcaaaaaatgggcaagaaattccatcagaaaaagatttaaaaaattatttaaaaaaatgggacaaaaaatatggaacaacttacaaggtactagaaattcttcaaaatattttttatagaaatgattcggctagagaagcttttgtagaaatgtgtgatgacatggatgttcaaagactcacttttgatagttacctgtataaacgagttgttgcgatgaaaccccttcagcaaattaaacttaccatgcttactcttggatcaattttaagaggaaaagcactagcaccactaaagtataaaccagttaatagtgctgtaagagaagaaaaagaagttgaaaaaatgttaaagaactattcaattaaaggtggaattaaagttaagaattaa

SEQ ID NO: 1789 - protein, 443 aa, Prochlorococcus marinus subsp. pastoris str. CCMP1986
MLRVAVIGGGPSGSCAAEILAKSGIKTWLFERKLDNAKPCGGAIPLCMVEEFDLPETIIDRKVRHMKMISPSNREVDISLDNVYGKSDNEYIGMCRREVMDAFMRNRASELGATLINGLVTSIDTGNDNQGPYKLSYSDFSSGDKKGELKELTVDLLIGADGANSRVAKAMDAGDYKVAIAFQERIKLPKEEMSYYEDLAEMYVGTDVSPDFYGWVFPKYDHVAVGTGTMQKNQSLIKGLQEGVRNRAKKRLVNGEVIKVEAHPIPEHPRPRRVVGRMALVGDAAGYVTKSSGEGIYFAAKSGRMCAEEIVEASKNGQEIPSEKDLKNYLKKWDKKYGTTYKVLEILQNIFYRNDSAREAFVEMCDDMDVQRLTFDSYLYKRVVAMKPLQQIKLTMLTLGSILRGKALAPLKYKPVNSAVREEKEVEKMLKNYSIKGGIKVKN

SEQ ID NO: 1790 - DNA, 1407 bp, Prochlorococcus marinus str. MIT 9313
  CDS (1)..(1407): transl_table=11
atgctgcgtgttgccgttgtcggtggtggtcccagtggatcctgcgccgcagaagttcttgccaaagcaggtatccagacctggctattcgaacgcaaactcgataacgccaagccttgtggtggagcgattcctctttgcatggtggatgaattcgacctgcccgagtcgatcatcgaccgcaaggttcgcaacatgagaatgatctctccatcaaaccgtgaggtggatatcactctggacaaggtttacagcccagacgacaagagtgaatacatcggcatgtgccgcagagaggtcatggatgcctttatgcgagatcgcgccgccagcctcggaactaacttgattaatggactcgttaccaaaatcgacactggctctaatcgtcaaggtccatacacaatcacctattccgactattcaactggtaaatccactggtgaagccaaaagcctcgaggttgacctcattattggcgctgatggagccaacagccgtgtagcaacagccatggatgccggtgactacaacgtggccattgcattccaagagcgcatcaagctgccaaatgaagaaatggcttactacgaagatcttgctgaaatgtatgtaggcactgatgtgtcaccagacttctacggttgggtgttccccaagtacgaccacgttgccgttggcacgggcaccatgcagaaaaatcagaccttaataaaaagcttgcaaaaaggagtacgcgaacgggctaagaaacgacttgttcatggagaagtgatcaaagttgaagcccacccgattcctgagcatcctcgtccacgcagggttgttggccgcatggcccttgttggagatgcagcgggctacgtcaccaaaagctctggcgaaggcatctactttgctgccaaaagtggccgcatgtgtgctgaacagatcgtggaatcgagtcggtctggtgaattaatcccctcagaagctgatctcaagaaatatctgaaaaaatgggatcgtaaatacggttctacttacatcgttctgtcaatactccaagccatcttttactcgaatgacactgccagagaagcctttgtcgccatgtgcgatgacatggatgtgcaacgcctcacctttgatagttacctctacaaaaaagttgttgcgatgaatccatggcaacagatcaaactcacactgctaactgtggatgcactcgcacggggaattttccgtaatcaaacaagctataaacctgttcccagtgctgtgcgtagcgacgaagaagtgaatgccatgctggagatcaaaaccatcaccggcggtatcaaggtagacaacaacaaagatgcctccaagcaaaatttggcatcagaacaagaagaacgtgaccctgctgtttcaaacaaatcctaa

SEQ ID NO: 1791 - protein, 468 aa, Prochlorococcus marinus str. MIT 9313
MLRVAVVGGGPSGSCAAEVLAKAGIQTWLFERKLDNAKPCGGAIPLCMVDEFDLPESIIDRKVRNMRMISPSNREVDITLDKVYSPDDKSEYIGMCRREVMDAFMRDRAASLGTNLINGLVTKIDTGSNRQGPYTITYSDYSTGKSTGEAKSLEVDLIIGADGANSRVATAMDAGDYNVAIAFQERIKLPNEEMAYYEDLAEMYVGTDVSPDFYGWVFPKYDHVAVGTGTMQKNQTLIKSLQKGVRERAKKRLVHGEVIKVEAHPIPEHPRPRRVVGRMALVGDAAGYVTKSSGEGIYFAAKSGRMCAEQIVESSRSGELIPSEADLKKYLKKWDRKYGSTYIVLSILQAIFYSNDTAREAFVAMCDDMDVQRLTFDSYLYKKVVAMNPWQQIKLTLLTVDALARGIFRNQTSYKPVPSAVRSDEEVNAMLEIKTITGGIKVDNNKDASKQNLASEQEERDPAVSNKS

SEQ ID NO: 1792 - DNA, 1353 bp, Synechococcus sp. WH 8102
  CDS (1)..(1353): transl_table=11
atgttgcgtgttgcggttatcggcggcggtcctagcggatcctgcgctgccgaaattcttgccaaagctggaatccaaacctggctgtttgaacgcaagctggacaacgccaagccctgtggtggtgcgattcctctttgcatggtcgaggaatttgacctgccggacgacatcatcgaccgcaaggtccgcaacatgaagatgatttccccttccaatcgggaggtggacatcaaactcgatccccttggttacgacgacaacgcctacatcggcatgtgccgtcgtgaggtgtttgacgcctacctgcgcaaccgtgccgctgaccttggcaccacgctggtgaatggactggttcagaaaatcgacaccggcagcaaccgccagggtccgtacacgcttcattacgccgactacagcggcggtggaccaaccggtgaccagaaaaccctcgacgtggatctgatcatcggcgccgatggggccaactcccgggtcgccaaggccatggatgccggtgactacaacgtggccatcgccttccaggagcggatcaaactgccggctgaggagatgacctactacgaagatctggccgagatgtatgtcggcaccgacgtttcaccagacttctacgcctgggtcttccccaaatacgaccacgtggccgtgggcaccggcaccatgcagcagaaccagagcctgatcaaaggtctgcagaagggcattcgggagcgggcgaacaagcgcctgttcaaaggcgaagtgatcaaggtcgaagcccatccgatccccgagcacccccgtccccgccgtgtggtgggacggatggctcttgtgggtgacgccgccggctacgtcaccaagagttccggtgagggcatttatttcgccgccaagagtggacggatgtgcgcggaggccatcgttgagatctccaagaacggcacggtgattcccaccgagaagcaaatcaaatccacctatctcaagcggtgggaccgcaagtacggggctacgtacgccgttctcgacatccttcagcgcatcttttaccgcaacgacgcagctcgggaggccttcgtcgaaatgtgcgacgacagggacgttcagaagctcaccttcgacagctacctctacaagcgcgtggtgctgatgaacccttggcagcagatgaagctgacgctccgcaccctcggcagcctgctgcgcggtgaagcgctggcaccgtcgaactacacccccgtgccatcagcggtgggtcgctccgatggagacttcctggctgaagaagccgttcaggccgtcaaggctcaggccaaacgcgaagacaaaaaagccaccgtcagctga

SEQ ID NO: 1793 - protein, 450 aa, Synechococcus sp. WH 8102
MLRVAVIGGGPSGSCAAEILAKAGIQTWLFERKLDNAKPCGGAIPLCMVEEFDLPDDIIDRKVRNMKMISPSNREVDIKLDPLGYDDNAYIGMCRREVFDAYLRNRAADLGTTLVNGLVQKIDTGSNRQGPYTLHYADYSGGGPTGDQKTLDVDLIIGADGANSRVAKAMDAGDYNVAIAFQERIKLPAEEMTYYEDLAEMYVGTDVSPDFYAWVFPKYDHVAVGTGTMQQNQSLIKGLQKGIRERANKRLFKGEVIKVEAHPIPEHPRPRRVVGRMALVGDAAGYVTKSSGEGIYFAAKSGRMCAEAIVEISKNGTVIPTEKQIKSTYLKRWDRKYGATYAVLDILQRIFYRNDAAREAFVEMCDDRDVQKLTFDSYLYKRVVLMNPWQQMKLTLRTLGSLLRGEALAPSNYTPVPSAVGRSDGDFLAEEAVQAVKAQAKREDKKATVS

SEQ ID NO: 1794 - DNA, 1197 bp, Gloeobacter violaceus PCC 7421
  CDS (1)..(1197): transl_table=11
gtgacacttcgagtagcggtggtgggttcgggtcctggcggttcgagcgccgccgaaatttgtgcgaaggccgggtttgaaacttatctcatcgagaagaacctgagcaacgccaaaccctgcggcggggcgattccgctgtgcatggtaagcgagttcgatttgcccagcgagatcatcgaccggcgtgtgcgcaacatgtcgatgattgccccgagcaaccacgcggtggacatctcccttaccaagcaggacgaatacatcggcatgtgccgccgcgaggtgctggatgggttcttgcgcaaccgggccgcttcggtgggagcgcacctcatcgagggcaccttcaccgaactcaagcgcggcaccccctacgttctggagtaccgcgacaaggacggcaacgcccgctccctcaaagcggacatcgtgatcggtgccgacggctttcactcaaagatcgccaagaccatcgacgccggggacgtgccctacgccatcgcctttcaagagcgcatcgagttgccgcccgagaagatggcctactacgaagaccgcgccgagatgtacctgggttttgacgtctcgcccgatttttatgcctggatctttccgaagtcgaatcacgtcgccgtcggcaccggcaccatgtcccccaacaaagacggcatccgccggatgcagaaggcgctgcgcgagcgggcgggggccaaaatcgccgggggcaagattatcaaaattgaagcgcacccgctgccggagcgctcgcgcccgcgccgggtggtagaccgggtaatgctggtgggcgacgctgcgggctacgtcaccaaatcgagcggcgaaggcatctacttcgccgccaagtccggccgcatggccgcccagacgatcgtcgaggcggccgcaggcggcaagctgccctccgaagcgcaattgggcgaatatgtgcggcgctgggaccgccagtacggcctcacctaccgggtgctctcgatcctgcaggatgtcttctaccgcagcgacgccacccgcgaggcgttcgtcgagatgtgcgccgaccgcgacgtgcagcggctgacgttcgattcgtacctgtacaagaccgtggtccccgccggtcccttcgtgcagaccaagatcaccctcaagacgctcggctcgctactgcggggcaatgccctctcccccacccgctag

SEQ ID NO: 1795 - protein, 398 aa, Gloeobacter violaceus PCC 7421
MTLRVAVVGSGPGGSSAAEICAKAGFETYLIEKNLSNAKPCGGAIPLCMVSEFDLPSEIIDRRVRNMSMIAPSNHAVDISLTKQDEYIGMCRREVLDGFLRNRAASVGAHLIEGTFTELKRGTPYVLEYRDKDGNARSLKADIVIGADGFHSKIAKTIDAGDVPYAIAFQERIELPPEKMAYYEDRAEMYLGFDVSPDFYAWIFPKSNHVAVGTGTMSPNKDGIRRMQKALRERAGAKIAGGKIIKIEAHPLPERSRPRRVVDRVMLVGDAAGYVTKSSGEGIYFAAKSGRMAAQTIVEAAAGGKLPSEAQLGEYVRRWDRQYGLTYRVLSILQDVFYRSDATREAFVEMCADRDVQRLTFDSYLYKTVVPAGPFVQTKITLKTLGSLLRGNALSPTR

SEQ ID NO: 1796 - DNA, 1206 bp, Rhodopseudomonas palustris CGA009
  CDS (1)..(1206): transl_table=11
atgagtgatagctccgcaatttatgatgtcgttgtcgtcggcggcggccctgccggcgctactgcggcgtgcgatctggcgcgcgccggcaagcgggtggtgctgctcgaccgcgccggccgcatcaagccgtgcggcggcgcgatcccgccgcgcgcgatccgcgatttcgcgattcccgacagcatgctggtcgccaagatcaacgccgcgcggatggtgtcgccgagcaatgtcgaagtcgacatgccgatcgacggcggcttcgtcggcatggtcgaccgcgagcatttcgacgagtggctgcgccagcgcgccgcgaccgtcggcgccgaacggcgcaccggcctgttcaagcggttcagccgcgacgagtccggcgtcaacaccgtgcactatgaagggcgcggccccgacggttcgatgatcgaccagacggtgcgctgccgtgcgatcatcggcgccgatggcgcggtgtccggcgtggcgcggcagttcctgaaggatgccgaccgcgtgccgttcgtgttcgcctatcacgagatcatcaaggcgccgacggcggagcagaaggccgcctatgaaagccgccgctgcgacgtgtactaccagggccacgtctcgccggacttctacggctgggtgttcccgcacggcaatacggtcagcgtcggcaccggctcgatgcacaagggcttctcgctgcgcgattcggtcgcggagctgcgcaagcagaccggcctcgacgaggtcgagaccatccgcaaggaaggcgcgccgatcccgctgcatccgctgccgcgctgggacgacggccacagcgtgctgctcgccggcgatgcggcgggcgtggtcgcgccggcctcgggcgagggcatctactacgcgctgctcggcggccggctcgccgccgaagcggtcgaggaattcctgcagaccgccgacgccaaggcgctgaagctggcgcgcaagcgcttcatgcgcggcaacggttcggtgttccggatcctcggcctgatgcagtggtattggtacgccaacgacaagcgccgcgaacaattcgtcagcatctgccgcgatcgcgacgtgcagaagttgacgtgggacgcctacatgaacaaaaagctggtccgggcgaagccgatcgcccacgtccggatcttcttcaagaacctggcccacatgacggggctggcttcggtctga

SEQ ID NO: 1797 - protein, 401 aa, Rhodopseudomonas palustris CGA009
MSDSSAIYDVVVVGGGPAGATAACDLARAGKRVVLLDRAGRIKPCGGAIPPRAIRDFAIPDSMLVAKINAARMVSPSNVEVDMPIDGGFVGMVDREHFDEWLRQRAATVGAERRTGLFKRFSRDESGVNTVHYEGRGPDGSMIDQTVRCRAIIGADGAVSGVARQFLKDADRVPFVFAYHEIIKAPTAEQKAAYESRRCDVYYQGHVSPDFYGWVFPHGNTVSVGTGSMHKGFSLRDSVAELRKQTGLDEVETIRKEGAPIPLHPLPRWDDGHSVLLAGDAAGVVAPASGEGIYYALLGGRLAAEAVEEFLQTADAKALKLARKRFMRGNGSVFRILGLMQWYWYANDKRREQFVSICRDRDVQKLTWDAYMNKKLVRAKPIAHVRIFFKNLAHMTGLASV

SEQ ID NO: 1798 - DNA, 1515 bp, Chlamydomonas reinhardtii
  CDS (1)..(1515)
atggccgccactatgcagatgaacaagcaggccacgcgccaggctgctcagcagggccgcgtcgcccctttcaaggcgaccggtgttgtgcgcaaggtcgctcagctgcccagctccaccttctccggcgtgaccgtgcctcagcgtcagttcgctgtcagcggtgcccgcagcgtgtcgcgcgccgtgcagtcggtgttcgctgttaaggatggcgctgccctggagggccgcaagctccgcgttgccgtcatcggcggtggcccgtcgggtgcctgcgctgcggagaccctggctaagggtggtgtggagaccttcctgctggagcgcaagctggacaactgcaagccctgcggtggtgccatccctctgtgcatggttgaggagttcgacctgcccatggagattattgaccggcgcgtcaccaagatgaagatgatctccccctccaaccgcgaggtcgatgtgggcaagaccctcagcgagaccgagtggattggcatgtgccgccgcgaggtgtttgatgactacctgcgcaaccgtgcccagaagctgggcgccaacatcgtgaacggcctgttcatgcgctcggagcagcagagcgctgagggccccttcaccatccactacaacagctacgaggatggcagcaagatgggcaagcccgccaccctggaggtcgacatgatcatcggtgccgacggcgccaacagccgcatcgccaaggagatcgacgccggcgagtacgactacgccattgccttccaggagcgcatccgcatccccgacgacaagatgaagtactatgagaacctggctgagatgtacgtgggtgacgacgtgtcccccgacttctacggctgggtgttccccaagtacgaccacgtcgcggtcggcaccggcaccgtggtcaacaagaccgccatcaagcagtaccagcaggccacccgtgaccgctccaaggtcaagaccgagggcggcaagatcatccgtgtggaggcacaccccatccccgagcacccccgcccccgccgctgcaagggccgtgttgccctggtcggcgacgctgccggctacgtgaccaagtgctcgggtgagggcatctacttcgccgccaagtcgggccgcatggccgccgaggctattgtggagggctccgccaacggcaccaagatgtgcggcgaggacgccatccgcgtctacctggacaagtgggaccgcaagtactggaccacctacaaggtgctggacatcctgcagaaggtgttctaccgctccaaccctgcccgcgaggccttcgtggagctgtgcgaggacagctacgtgcagaagatgaccttcgactcgtacctgtacaagaccgtggtgcccggcaaccccctggacgacgtcaagctgctggtgcgcaccgtgtcttccatcctgcgctccaacgccctgcgcagcgtcaactccaagtcggtgaacgtgtcgttcggctccaaggcgaacgaggagcgcgtcatggctgcgtaa

SEQ ID NO: 1799 - protein, 504 aa, Chlamydomonas reinhardtii
MAATMQMNKQATRQAAQQGRVAPFKATGVVRKVAQLPSSTFSGVTVPQRQFAVSGARSVSRAVQSVFAVKDGAALEGRKLRVAVIGGGPSGACAAETLAKGGVETFLLERKLDNCKPCGGAIPLCMVEEFDLPMEIIDRRVTKMKMISPSNREVDVGKTLSETEWIGMCRREVFDDYLRNRAQKLGANIVNGLFMRSEQQSAEGPFTIHYNSYEDGSKMGKPATLEVDMIIGADGANSRIAKEIDAGEYDYAIAFQERIRIPDDKMKYYENLAEMYVGDDVSPDFYGWVFPKYDHVAVGTGTVVNKTAIKQYQQATRDRSKVKTEGGKIIRVEAHPIPEHPRPRRCKGRVALVGDAAGYVTKCSGEGIYFAAKSGRMAAEAIVEGSANGTKMCGEDAIRVYLDKWDRKYWTTYKVLDILQKVFYRSNPAREAFVELCEDSYVQKMTFDSYLYKTVVPGNPLDDVKLLVRTVSSILRSNALRSVNSKSVNVSFGSKANEERVMAA

SEQ ID NO: 1800 - DNA, 1569 bp, Physcomitrella patens subsp. patens
  CDS (1)..(1569)
atggcctccctccaggttgctctcactgcttccacttcttccttcgcatgcacctctcgtgctgctgctgctgcttcttcttcttacggggagtccgtccctgcattagctccccgtgctagtagtaatgctcgaagtgcgggatttgttgttgcgaccgggagggtgagtctcagggcgttcgaggggttgcgaggattgagcggtggtttagtagcgtcccccgtggagagcctgaaggtggcgaggagcagcagtgggggagatgatgctggataccagcctctccgggtgtatgctgcgagggggagtaagaagattgaagggcggaagctgcgagtggcagttgtgggaggcggccctgcgggtgggtgcgctgccgagacgctggcgaagggcggaattgagacgtttctgatcgagcggaagttggacaatgcgaagccgtgcggaggggctatcccgctgtgcatggttggggagttcgacctgccgcctgaaattattgaccgcaaggtgactaagatgaagatgatttcgccttccaatgtggctgtggatgtgggtaagacattgaacgacgacgagtacattggcatggtgaggagggaggtgttggactcgttcttgcgggagcgcgcggtgaagaatggggcgactatcatcaacgggctttttttgaggatggacgtgcccaaggacgaaaacaccccctacaaattgcattacacgaatttcgacggggcttcgaaggtgggtacacctggcgtgttggaggtggacgccgtgattggagctgatggtgccaacagcagggttgccaaggatatcgatgcgggtgagtacgactacgccatcgctttccaggagaggattaaaattcctgacgacaagatggagtactacgagaatttggcagagatgtatgtgggcgacgacgtgtcgccagatttctacggttgggtgttccccaagtgtgaccatgttgcggttggaactggaacggtgatcaacaagccagccatcaagaaataccagacggcgacgaggaaccgggcaaaggacaagattgctggagggaagattattagagtagaggctcatccaattccagagcaccctaggcctcgcagggcgagtaaccgggtggcgttgatcggggatgcggcagggtatgttaccaagtgctctggggagggaatttacttcgctgccaagtccgggcgcatgtgtgctgaggcgatcgtggagggatccgccaatggtactcgcatggtggacgaatcagacttgagaacatacctggaaaagtgggataagaagtactgggccacatataaggtgttggacattcttcagaaggttttctacagatcgaaccctgcccgagaggcgttcgtggagatgtgcgccgatgactatgtgcagaagatgacgttcgacagctatctgtacaaggtggtggtgcctggaaacccattggacgacatcaagttggcaatcaacacaatcgggagtttgattagagccaacgccttgcgcaaggagtcggagaagatgaccgtgtag

SEQ ID NO: 1801 - protein, 522 aa, Physcomitrella patens subsp. patens
MASLQVALTASTSSFACTSRAAAAASSSYGESVPALAPRASSNARSAGFVVATGRVSLRAFEGLRGLSGGLVASPVESLKVARSSSGGDDAGYQPLRVYAARGSKKIEGRKLRVAVVGGGPAGGCAAETLAKGGIETFLIERKLDNAKPCGGAIPLCMVGEFDLPPEIIDRKVTKMKMISPSNVAVDVGKTLNDDEYIGMVRREVLDSFLRERAVKNGATIINGLFLRMDVPKDENTPYKLHYTNFDGASKVGTPGVLEVDAVIGADGANSRVAKDIDAGEYDYAIAFQERIKIPDDKMEYYENLAEMYVGDDVSPDFYGWVFPKCDHVAVGTGTVINKPAIKKYQTATRNRAKDKIAGGKIIRVEAHPIPEHPRPRRASNRVALIGDAAGYVTKCSGEGIYFAAKSGRMCAEAIVEGSANGTRMVDESDLRTYLEKWDKKYWATYKVLDILQKVFYRSNPAREAFVEMCADDYVQKMTFDSYLYKVVVPGNPLDDIKLAINTIGSLIRANALRKESEKMTV

SEQ ID NO: 1802 - DNA, 1557 bp, Physcomitrella patens subsp. patens
  CDS (1)..(1557)
atggcgacgcttcaagctgctgttgcgccctcggctgcttccttcgcttctagcactcgcgccgtagtcccgaatggagagtgtgtctctgcattggcgcctcggggcagtcagtgctcacgaggcttgggtcgcgctgcttcgagcgggcgcagcatttcgttgaagtcgttcgatggcctgcgagggttgaatggcggaggcttggtgtccgctgtggaggccctgaggagtgagaggagtgttgtggaggaaggagtgggataccagccgcttcgagtttatgctgcgagagggagtaagaagattgaggggcgtaagctgcgagtggcggtcgtgggaggtggtccagcgggcgggtgcgccgcggagacgcttgccatgggcggaatcgagacgtttttgattgagcggaagttggataatgcgaagccgtgcgggggagcgattccgttgtgcatggtgggagaatttgatttgcctcccgagatcattgaccgcaaagtgacgaagatgaaaatgatttctccctccaatgtcgcggtggatgtgggcaagacgttgaacgatgatgagtacattggcatggtgaggcgtgaggtgttggactctttcctccgggagagagcccagaagaacggggctactatcatcaatggactttttctgaggatggaagtgccgaaggataatgacagcccttacaaactccactacaccaatttcgacggctcgtcaaaggttgggacaccagctgtgttagaggtggacgctgtgattggagccgacggtgcgaacagcagggtagcaaaggacattgacgctggggagtatgattatgccattgcgtttcaagagagaatcaaaattccggcggataagatggagtactatgagaacttagcagagatgtatgtgggcgacgacgtgtcaccggatttctacgggtgggtgtttccgaaatgcgatcacgttgccgtggggacaggaacggtcatcaacaagccctctatcaagaagtatcagaccgcgacgaggaaccgtgctaaggataagattgccggagggaagatcattagggtggaggcacatcctattccagagcacccgagacctcgcagggtgagcagccgagtggcattggtcggagatgcggcagggtacgtaacgaagtgctccggagagggcatctacttcgcagccaagtccgggcgcatgtgcgcggaggccatagtggagggatcagcaaatggaacgcgcatggtggatgagtcggatttgagagtgtacttggacaagtgggacaagaagtactgggcgacttacaaggtgttggacattctgcagaaggtattctacaggtcgaacccagcgcgggaggcattcgtggagatgtgcgcggatgattacgtgcagaagatgacatttgacagctacctgtacaaagtggtggtgcctggaaatcctttggacgatatcaagctggcggtcaacacgatcggcagcctcatcagagccaatgcgttgcgcaaagagtctgagaagatgacagtctga

SEQ ID NO: 1803 - protein, 518 aa, Physcomitrella patens subsp. patens
MATLQAAVAPSAASFASSTRAVVPNGECVSALAPRGSQCSRGLGRAASSGRSISLKSFDGLRGLNGGGLVSAVEALRSERSVVEEGVGYQPLRVYAARGSKKIEGRKLRVAVVGGGPAGGCAAETLAMGGIETFLIERKLDNAKPCGGAIPLCMVGEFDLPPEIIDRKVTKMKMISPSNVAVDVGKTLNDDEYIGMVRREVLDSFLRERAQKNGATIINGLFLRMEVPKDNDSPYKLHYTNFDGSSKVGTPAVLEVDAVIGADGANSRVAKDIDAGEYDYAIAFQERIKIPADKMEYYENLAEMYVGDDVSPDFYGWVFPKCDHVAVGTGTVINKPSIKKYQTATRNRAKDKIAGGKIIRVEAHPIPEHPRPRRVSSRVALVGDAAGYVTKCSGEGIYFAAKSGRMCAEAIVEGSANGTRMVDESDLRVYLDKWDKKYWATYKVLDILQKVFYRSNPAREAFVEMCADDYVQKMTFDSYLYKVVVPGNPLDDIKLAVNTIGSLIRANALRKESEKMTV

SEQ ID NO: 1804 - DNA, 1575 bp, Physcomitrella patens subsp. patens
  CDS (1)..(1575)
atggcttctctccaggccgttatcaccgcttcccctgcctccttcgctgcgtcctctagagccgtctcctcccactcggagactgctgccgtcttggtgccttgcgccagcatttcctcccgaggcgtgagcacttcttgcctgggctttgttgcctccagcgggcgtaatgcttcgttgaagtccttcgagggcttgaggggtttgaatgccagtggacccacctccgccgtggagagcctgaaggccgagagaagaagcaatgtggttgaagaagccggataccagcctcttcgggtgtatgccgcgaggggaagtaaaaagattgaggggcgaaagttgcgagtggcagttgtcggaggtggccctgccggtggatgcgctgcggagactcttgccaagggcggaattgagacatttctcattgagcgaaagttggataatgctaagccatgtgggggagctattcccctttgcatggtcggagaattcgacctgccgcccgaaattatcgaccgcaaagtgacgaagatgaaaatgatttcgccttccaatgttgctgtcgatgttggtaagactctgaacgacgacgagtatattggtatggttaggcgagaggtgttggactcgttcttgagggagagggctcaaaagaacggagcgtccatcatcaacgggctgttcttgagaatggaggttcccaaggataatgatagcccctataggctgcattacaccaattttgatggctcttcgaagataggaactcctgcggtgttggaagtcgatgctgtaattggagctgacggtgccaacagcagggtggccaaggacattgacgctggtgagtacgactacgccatcgctttccaagaaaggattaagattcctgaggataagatggagtactatgagaacttggcagagatgtatgtcggtgacgatgtgtcgccagacttctacgggtgggtgttcccgaagtgtgaccacgttgcagtcggaacggggacggtcatcaacaagccagccatcaaaaagtaccagacggccacgaggaaccgggcgaaggacaagattgccggaggaaagatcatcagggttgaggcacaccccattccggagcacccaaggcctcgcagggcgagcgacagagtggcgttagttggggacgcggctggatacgtgacgaagtgctccggggagggtatctactttgctgctaagtctggacgcatgtgtgctgaggctattgtggaaggctccgccaacggaactcgtatgattgacgagtcagatttgaggacatatctagataaatgggacaagaagtactgggcaacttacaaggtgctggacatattgcagaaggttttctacaggtccaaccctgccagagaggcattcgtcgagatgtgcgccgacgactacgtgcaaaagatgacgtttgatagttatttgtacaaggtggtggtgcctggaaacccattggacgacctgaagctagcagttaacactatcgggagcctgatcagagccaatgcattgcgcaaggagtctgagaagatgaccgtatag

SEQ ID NO: 1805 - protein, 524 aa, Physcomitrella patens subsp. patens
MASLQAVITASPASFAASSRAVSSHSETAAVLVPCASISSRGVSTSCLGFVASSGRNASLKSFEGLRGLNASGPTSAVESLKAERRSNVVEEAGYQPLRVYAARGSKKIEGRKLRVAVVGGGPAGGCAAETLAKGGIETFLIERKLDNAKPCGGAIPLCMVGEFDLPPEIIDRKVTKMKMISPSNVAVDVGKTLNDDEYIGMVRREVLDSFLRERAQKNGASIINGLFLRMEVPKDNDSPYRLHYTNFDGSSKIGTPAVLEVDAVIGADGANSRVAKDIDAGEYDYAIAFQERIKIPEDKMEYYENLAEMYVGDDVSPDFYGWVFPKCDHVAVGTGTVINKPAIKKYQTATRNRAKDKIAGGKIIRVEAHPIPEHPRPRRASDRVALVGDAAGYVTKCSGEGIYFAAKSGRMCAEAIVEGSANGTRMIDESDLRTYLDKWDKKYWATYKVLDILQKVFYRSNPAREAFVEMCADDYVQKMTFDSYLYKVVVPGNPLDDLKLAVNTIGSLIRANALRKESEKMTV

SEQ ID NO: 1806 - DNA, 1341 bp, Prochlorococcus marinus str. AS9601
  CDS (1)..(1341): transl_table=11
atgttgagggtagctgttattggtggaggtccaagtggttcatgtgcggcagaaatactagctaaagctggaataaaaacttggctcttcgagagaaaattagataatgcaaaaccatgcggaggagcaattccactttgcatggtggaagaatttgatttacctgagtcaattattgatagaaaagtaaggcatatgagaatgatatccccatcaaatagagaggtagatattagcttagatagagtttatgggaaaagtgataatgagtttattgggatgtgtagaagagaagttatggatgcctttatgcgcaatagagcgtcagatcttggtgctactttaataaatggattagttacttcaattgatactggcgataataatcaagggccatataagctttcctactcagatttcaccaatggagataaaaaaggggaactcaaagagcttactgttgaccttttaatcggagctgatggagccaatagcagagtagcaaaagcaatggatgcaggagattacaaagttgccattgcatttcaggaaagaattaaattgcctaaagaagaaatgggttactacgaagatcttgctgaaatgtatgttggaacagatgtttctcctgatttttatgggtgggtatttcctaaatatgatcatgtggctgtgggcacaggaaccatgcagaagaatcagtcattaattaaaggacttcaagagggtgtaagaaatagagcaaagaaaagacttgttaatggtgaagtaataaaggtagaagctcaccctattccagagcatccaaggccaagaagggtagttgggagaatggcattggttggtgatgcagctggttatgttacaaaaagttctggagagggtatttattttgctgcaaaaagcggaagaatgtgtgctgaagaaattgttgaagcatcaaaaaatggtcaagtaattccatcagaaaaagatttaaaaaactatcttaaaaaatgggataaaaaatatggcacaacttataaggtgctagaaatccttcaaaatattttctacagaaatgattctgctagagaagcctttgttgagatgtgtgatgacatggatgttcaaagacttacttttgatagttacttatacaaaagagttgtctctatgaaaccattacagcaacttaaaattacgatgcttacacttggttcgattttaagagggaaagccctagcgcctctaaaatataaacctgttgatagtgctgttagggaaaataaagaggtagaaaaaatgctagaaaattattcaataaagggagggattaaagttaagagttcaaaagtgtaa

SEQ ID NO: 1807 - protein, 446 aa, Prochlorococcus marinus str. AS9601
MLRVAVIGGGPSGSCAAEILAKAGIKTWLFERKLDNAKPCGGAIPLCMVEEFDLPESIIDRKVRHMRMISPSNREVDISLDRVYGKSDNEFIGMCRREVMDAFMRNRASDLGATLINGLVTSIDTGDNNQGPYKLSYSDFTNGDKKGELKELTVDLLIGADGANSRVAKAMDAGDYKVAIAFQERIKLPKEEMGYYEDLAEMYVGTDVSPDFYGWVFPKYDHVAVGTGTMQKNQSLIKGLQEGVRNRAKKRLVNGEVIKVEAHPIPEHPRPRRVVGRMALVGDAAGYVTKSSGEGIYFAAKSGRMCAEEIVEASKNGQVIPSEKDLKNYLKKWDKKYGTTYKVLEILQNIFYRNDSAREAFVEMCDDMDVQRLTFDSYLYKRVVSMKPLQQLKITMLTLGSILRGKALAPLKYKPVDSAVRENKEVEKMLENYSIKGGIKVKSSKV

SEQ ID NO: 1808 - DNA, 1338 bp, Prochlorococcus marinus str. MIT 9515
  CDS (1)..(1338): transl_table=11
atgttgagagttgctgttatcggtggaggtccaagtggttcatgtgctgctgaaatacttgcaaaatctgggataaaaacatggatttttgagaggaagttagataatgccaaaccttgtggaggcgctattcctctttgtatggtagaagaatttgatttgccagaatcaattattgatagaaaagttagaaatatgaaaatgatctccccatccaatagagaagtagatattattttggatgatatttacccaggaagtaaaaaagagtatatagggatgttaaggcgcgaagttatggattcattcatgagaaatcgcgctgcagatctgggagcaaccttagtcaatggcctggtatccaaaatagaaaccggtacgaacaagcaagggccatacacacttcattacaatgaaattcttaatgatcaatccgaagtaaaaggaaaacagctagaggttgatttaattgttggtgccgatggtgcaacgagtagagttgcaaaggctatggatgctggcgattataactatgcggtagcaatccaagaaaggataaaacttcccaaggaagagatgaaatattacgaagatagagcagaaatgtatgtaggaactgatgtatcaccagatttttatggttgggtatttccaaaatacgaccacgttgcagctggaaccggaacaatgaaacagaatggaggtttaataaaaagccttcaaattggtgtaagagaaagagcaaagaaaagactagttaatggtgaagtcataaaagttgaagctcatcctattcccgaacatccaagaccaagaagagttgtaggaagaatggctttagttggagatgctgctggttacgtaaccaaaagttcaggagaagggatatattttgcggcaaaaagtggaaggatgtgtgctgagcaaattgtcgaatcaagtcaaaatggaaaaatcatccctactgaaaaagatttaaaaatatacttaaaaaagtgggataagaaatatggaacaacttatacagttttagatatcctccaacgaattttttacacaagtgatggagctagggaagcatttgtagagatgtgtggtgacatggatgtacagagacttacatttgatagttacctctacaagacggtagtagcaatgaaaccacttcaacaattaaaacttactcttttaactctaggatctgttttaagaggtaaggcattagcgccaagcacatacaagccagtcccaagtgctgtaagagatgacaaggaagttgataagatgttggcggttagctcaattaaaggtgggattaaaaaaaataaaagtcaataa

SEQ ID NO: 1809 - protein, 445 aa, Prochlorococcus marinus str. MIT 9515
MLRVAVIGGGPSGSCAAEILAKSGIKTWIFERKLDNAKPCGGAIPLCMVEEFDLPESIIDRKVRNMKMISPSNREVDIILDDIYPGSKKEYIGMLRREVMDSFMRNRAADLGATLVNGLVSKIETGTNKQGPYTLHYNEILNDQSEVKGKQLEVDLIVGADGATSRVAKAMDAGDYNYAVAIQERIKLPKEEMKYYEDRAEMYVGTDVSPDFYGWVFPKYDHVAAGTGTMKQNGGLIKSLQIGVRERAKKRLVNGEVIKVEAHPIPEHPRPRRVVGRMALVGDAAGYVTKSSGEGIYFAAKSGRMCAEQIVESSQNGKIIPTEKDLKIYLKKWDKKYGTTYTVLDILQRIFYTSDGAREAFVEMCGDMDVQRLTFDSYLYKTVVAMKPLQQLKLTLLTLGSVLRGKALAPSTYKPVPSAVRDDKEVDKMLAVSSIKGGIKKNKSQ

SEQ ID NO: 1810 - DNA, 1332 bp, Prochlorococcus marinus str. NATL1A
  CDS (1)..(1332): transl_table=11
atgttaagagttgctgttattggcggtggacctagtggatcatgcgctgcagaaattttagctaaggcaggaattaaaacttggattttcgagagaaagcttgataacgcaaaaccatgcggaggagcgattccattgtgtatggtttctgaatttgatcttcccgaatcaattattgataggaaagtcaggaatatgaaaatgatatccccatcaaacagagaagtagatattattttggatgatatctatccaggaagcgataaagaatatataggtatgttgaggcgtgaggtgatggattcattcatgagaaatcgcgctgctgaacttggagcaacattagtaaatggattggtatcaaaaatagaaactggtactaacaaacaaggtccctatacacttcattacaccgaaatccttaacgacaaatcggaagagaaaggtaagcaactggaagtggatctaattgttggagcagatggcgcaacaagcagagttgcaaaagcaatggatgcaggtgattacaactatgcagtagcaattcaagaaaggataaagcttcctaaagaggaaatgaagtattacgaagacagggccgaaatgtatgtaggaactgacgtatcgccagatttctatggttgggtctttccaaaatatgaccatgtagcagctggaacaggaacaatgaaacaaaatggtggtttaataaaaagtctccaaattggcgtcagagaaagagcgaagaagagactcgtaaatggagaagtaatcaaagtagaagctcatccaattcctgaacatcccagaccaagaagagttgttggaagaatggctctagtcggcgatgcggctggttatgtaaccaaaagctcaggagaaggaatttattttgcggccaaaagtggaaggatgtgtgctgagcaaattgtcgaatcaagtcaaaatggaaaaatcatacctacggaaaatgatctcaaaaaatatctaaaaaaatgggataaaaagtatggaattacatatacagttttagatattctccaaagaattttctacaccagtgatggagcaagagaggcctttgtagagatgtgtggtgacatggatgttcaaagacttacatttgatagttatctctacaaaactgtagttgcaatgaagccgcttcaacaattaaaacttaccctactaacaattggttctgttttaagagggaaagcattagcaccaagcacatataagccagtacctagtgcagtcagagatgataaagaagttaataaaatgttagcggtaagttcaattaaaggtggtattaaagccagtaaataa

SEQ ID NO: 1811 - protein, 443 aa, Prochlorococcus marinus str. NATL1A
MLRVAVIGGGPSGSCAAEILAKAGIKTWIFERKLDNAKPCGGAIPLCMVSEFDLPESIIDRKVRNMKMISPSNREVDIILDDIYPGSDKEYIGMLRREVMDSFMRNRAAELGATLVNGLVSKIETGTNKQGPYTLHYTEILNDKSEEKGKQLEVDLIVGADGATSRVAKAMDAGDYNYAVAIQERIKLPKEEMKYYEDRAEMYVGTDVSPDFYGWVFPKYDHVAAGTGTMKQNGGLIKSLQIGVRERAKKRLVNGEVIKVEAHPIPEHPRPRRVVGRMALVGDAAGYVTKSSGEGIYFAAKSGRMCAEQIVESSQNGKIIPTENDLKKYLKKWDKKYGITYTVLDILQRIFYTSDGAREAFVEMCGDMDVQRLTFDSYLYKTVVAMKPLQQLKLTLLTIGSVLRGKALAPSTYKPVPSAVRDDKEVNKMLAVSSIKGGIKASK

SEQ ID NO: 1812 - DNA, 1407 bp, Prochlorococcus marinus str. MIT 9303
  CDS (1)..(1407): transl_table=11
atgctgcgtgttgccgttgtcggtggtggtccaagtggatcctgcgccgcagaagttcttgccaaagcaggtatccagacctggctattcgaacgcaaactcgataacgccaagccttgtggtggagcgattcctctttgcatggtggatgaattcgacctgcccgagtcgatcatcgaccgcaaggttcgcaacatgagaatgatctctccatcaaaccgtgaggtagatatcactctggacaaggtttacagcccagacgacaagagtgaatacatcggtatgtgccgtagagaggtcatggatgcctttatgcgagatcgcgccgccagcctcggaactaacttgattaatggactcgttaccaaaatcgacactggctctaatcgtcaaggtccatacacaatcacctattccgactattcaactggtaaatccactggtgaagccaaaagcctcgaggttgacctcattattggtgctgatggagccaacagccgtgtagcaacagccatggatgccggtgactacaacgtcgccattgcattccaagagcgcatcaagctgccaaatgaagaaatggcttactacgaagaccttgctgaaatgtatgtaggcactgatgtgtcaccagatttctacggctgggtgttccccaagtacgaccacgttgccgttggcacaggcaccatgcaaaaaaatcagaccctaataaaaagcttgcaaaaaggagtacgcgaacgagctaagaaacgacttgtgcatggagaggtgatcaaagttgaagcccacccgattcctgagcatcctcgtccacgcagggttgttggccgtatggcccttgttggagatgcagcgggctacgtcaccaaaagctctggcgaaggcatctactttgctgccaaaagtggccgcatgtgtgctgagcagatcgtggaatcgagtcgttctggtgaattaatcccctccgaagccgatctcaagaaatatctgaaaaagtgggaccgtaaatacggtgccacttacatcgttctgtcaatactccaagccatcttctactcgaatgacactgccagagaagcctttgtcgctatgtgcgatgacatggacgtgcaacgcctcaccttcgatagttacctctacaaaaaagttgttgcgatgaatccatggcaacagatcaaactcacactgctaactgtggatgcactcgcacggggaattttccgtaatcaaacaagctataaacctgttcccagtgctgtgcgtagcgacgaagaagtgaatgccatgctggcgatcaaaaccatcaccggcggtatcaaagttgacaacaacaaagatgcctccaagcaaaacttggcatcagaacaaggagaacgtgaccctgctgtttcaaaaaaatcctaa

SEQ ID NO: 1813 - protein, 468 aa, Prochlorococcus marinus str. MIT 9303
MLRVAVVGGGPSGSCAAEVLAKAGIQTWLFERKLDNAKPCGGAIPLCMVDEFDLPESIIDRKVRNMRMISPSNREVDITLDKVYSPDDKSEYIGMCRREVMDAFMRDRAASLGTNLINGLVTKIDTGSNRQGPYTITYSDYSTGKSTGEAKSLEVDLIIGADGANSRVATAMDAGDYNVAIAFQERIKLPNEEMAYYEDLAEMYVGTDVSPDFYGWVFPKYDHVAVGTGTMQKNQTLIKSLQKGVRERAKKRLVHGEVIKVEAHPIPEHPRPRRVVGRMALVGDAAGYVTKSSGEGIYFAAKSGRMCAEQIVESSRSGELIPSEADLKKYLKKWDRKYGATYIVLSILQAIFYSNDTAREAFVAMCDDMDVQRLTFDSYLYKKVVAMNPWQQIKLTLLTVDALARGIFRNQTSYKPVPSAVRSDEEVNAMLAIKTITGGIKVDNNKDASKQNLASEQGERDPAVSKKS

SEQ ID NO: 1814 - DNA, 1341 bp, Prochlorococcus marinus str. MIT 9301
  CDS (1)..(1341): transl_table=11
atgttgagggtagctgttattggtggaggtccaagtggttcatgtgctgcagaaatacttgctaaagctggaataaaaacttggctcttcgagagaaaattagataatgcgaaaccatgtggaggagctatacctctttgtatggtagaagaatttgatttgcctgagtcaattattgatagaaaagtaaggcatatgagaatgatatctccatcaaatagagaggtagacataagtctagatagagtttatgggaaaagcgataatgaatttattgggatgtgtagaagggaagttatggatgcttttatgcgtaatagagcatcagatcttggggcaacactaataaatggattagttacttctattcatactggtgataataatcaagggccatataaactctcctattcagatttcacgaatggagataaaaaaggagaacttaaggaacttactgttgaccttttaatcggtgctgatggagctaatagtagagtggcaaaagctatggatgcaggggattacaaagttgcgattgcatttcaagagagaattaaactccctaaagaagaaatgagttactacgaagatcttgctgaaatgtatgtcggaactgatgtttctcctgatttttatgggtgggtatttcctaaatatgatcatgttgctgtaggaactggaaccatgcaaaagaatcagtcattaataaaaggacttcaagagggtgtaagaaaccgggcaaagaaaagacttgttaatggtgaagtaattaaggtagaagcacaccctatccctgagcatccaaggccaagaagagtagttgggagaatggcattggttggtgatgcagctggctatgttacaaaaagttctggagagggtatttattttgctgcaaaaagtggaagaatgtgtgctgaggaaattgttgaagcatcaaaaaacggtcaagtaattccatcagaaaaagatttaaaaaactatcttaaaaagtgggataaaaaatatggcacaacttataaggtgctagaaatcctccaaaatattttctacagaaatgattctgcaagagaagcctttgttgagatgtgtgatgacatggatgtgcaaagacttacttttgatagttatttatacaaaaaagttgtctccatgaagccattacagcaactaaaaattacaatgcttacacttggctcgattttacgagggaaagccttagcgcctttaaaatataaacccgttgatagtgccgtcagggaaaataaagaagtagaaaaaatgctagaaaattattcgataaagggaggcattaaagttaagagttcaaaagtgtaa

SEQ ID NO: 1815 - protein, 446 aa, Prochlorococcus marinus str. MIT 9301
MLRVAVIGGGPSGSCAAEILAKAGIKTWLFERKLDNAKPCGGAIPLCMVEEFDLPESIIDRKVRHMRMISPSNREVDISLDRVYGKSDNEFIGMCRREVMDAFMRNRASDLGATLINGLVTSIHTGDNNQGPYKLSYSDFTNGDKKGELKELTVDLLIGADGANSRVAKAMDAGDYKVAIAFQERIKLPKEEMSYYEDLAEMYVGTDVSPDFYGWVFPKYDHVAVGTGTMQKNQSLIKGLQEGVRNRAKKRLVNGEVIKVEAHPIPEHPRPRRVVGRMALVGDAAGYVTKSSGEGIYFAAKSGRMCAEEIVEASKNGQVIPSEKDLKNYLKKWDKKYGTTYKVLEILQNIFYRNDSAREAFVEMCDDMDVQRLTFDSYLYKKVVSMKPLQQLKITMLTLGSILRGKALAPLKYKPVDSAVRENKEVEKMLENYSIKGGIKVKSSKV

SEQ ID NO: 1816 - DNA, 1206 bp, Bradyrhizobium sp. ORS278
  CDS (1)..(1206): transl_table=11
atgagcacctcgtccgagacgttcgatgtcgtagtcgtcggcggcggtcccgccggcgccaccgccgccaatgatctggcccgtcagggccatcacgtgctgctgctcgacaaagcgggccgcatcaagccatgcggcggcgccatcccgccgcggctcatcagcgagttcgaaattcccgaccatctgctggtggcgcggatttcctcggcgcgcatggtgtcgccaagcaaccgcgacgtcgacatgccgatcgacggcggcttcgtcggcatggtcgatcgcgagcattatgacgaatggctgcgggcccgcgcggccgagggcggcgcggtccgccgcaccgggacattcagccacatcgcccgcgatgccgatggcacggcggtggtgcattacgagcgccgcatggatgatggcagcgtgcgcgaggacagcgtccgcgcccgtgccgtgatcggcgccgacggcgcggtgtcggcggtggcacggcaatgcatcccggagggcgccgagatccgctacgtgttcgcctatcacgagatcgtccgctcgccggagcgtggccatccgctgttcgacgccacgcgctgcgacgtcgtctatcgcggacaactctcgccggacttctacagctgggtcttcccgcacggcgcgacgaccagcatcggcaccggcagcgcgcataagggattctcgctgcgcggctcggtggcccagttccggaaagtcgcggggctcgacgatctcgagacgatccgccgcgagggcgcgccgatcccgttgaggccgctgtcgcgctgggacaacggccgcgacgtcgtgctcgccggtgatgccgccggcgtggtcgcacccgcctccggcgagggcatctattacgcgatggccggcggccgcgccgcggcggatgccgtcgcgctgttcctcaagaccggcgatgctgcagccctcgccaccgcccgcaaggctttcatgcgcaagcacggcgcggtgttcttcatcctcggcatgatgcagcgctactggtacacgaacgacgcccgccgcgagcgtttcgtcgccatctgccgtgacaaggacgtccagcagctgacctgggacgcctacatgaacaaggaactggtgaaggcgaagccgctgtcgcatgtccgcatcttcttcaagaacatcgcccacctcaccggacttgcgaaggcggcttag

SEQ ID NO: 1817 - protein, 401 aa, Bradyrhizobium sp. ORS278
MSTSSETFDVVVVGGGPAGATAANDLARQGHHVLLLDKAGRIKPCGGAIPPRLISEFEIPDHLLVARISSARMVSPSNRDVDMPIDGGFVGMVDREHYDEWLRARAAEGGAVRRTGTFSHIARDADGTAVVHYERRMDDGSVREDSVRARAVIGADGAVSAVARQCIPEGAEIRYVFAYHEIVRSPERGHPLFDATRCDVVYRGQLSPDFYSWVFPHGATTSIGTGSAHKGFSLRGSVAQFRKVAGLDDLETIRREGAPIPLRPLSRWDNGRDVVLAGDAAGVVAPASGEGIYYAMAGGRAAADAVALFLKTGDAAALATARKAFMRKHGAVFFILGMMQRYWYTNDARRERFVAICRDKDVQQLTWDAYMNKELVKAKPLSHVRIFFKNIAHLTGLAKAA

SEQ ID NO: 1818 - DNA, 1374 bp, Synechococcus sp. WH 7803
  CDS (1)..(1374): transl_table=11
atgctgagagttgccgtcgtcggaggtggtccgagcggatcctgcgcagccgagattctggccaaggctggcatcagcacctggttgttcgagcgaaagctcgacaacgccaaaccttgtggtggagcgattcctctctgcatggtcgaggaattcgatctgccggaatcgatcatcgaccgcaaggtgcggaacatgaaaatgatctccccctccaacaaggaggtggatatcaagcttgatccgctcgggtacgacgacaacgcttatatcgggatgtgccgccgtgaggttttcgatgccttcatgcgcaaccgtgccgctgaccttggcacaaccctggtcaatggtcttgttcagaagatcgacaccggcaatgcacgtcagggtccttacaccctgcattacgccgactacagctcggggggtccgaccggcgaactgaaaacccttgaggtggacctgatcatcggagccgacggtgccaattcccgtgtggccaaagcaatggatgctggtgattacaacgtggccatcgcatttcaggaacgcatcaaactgcctcctgaagagatgacttactacgaagatctcgccgagatgtacgtcgggaccgacgtctctcccgatttttacgcctgggtctttccgaaatacgaccatgtggccgtgggaacagggaccatgcaacagaaccagtccctgatcaaggggttgcaaaagggaatccgtgagcgcgcccgcaagcgcttgttcaaaggtgaagtgatcaaagttgaagcccatccgattccggaacatcccagaccgcgtcgtgtcgttgggcgaatggctctggtgggtgatgctgccggttacgtcaccaagagctccggtgaaggcatctactttgctgccaaaagtgggcggatgtgcgctgaagccattgttgagatttcagcgaacggcagccgcgtccccactgaaaaggagatcaagtccacctatctcaagcgttgggatcgtaagtacggagccacctacgccgttctcgacattcttcaacggattttctatcgcaacgatgcggcccgcgaagcattcgtcgaaatgtgtgacgaccgggatgtgcagaaactcacgtttgacagctatctgtacaagagggtggtgttgatgaatccctggcagcaaatcaaactcaccctgcgtacccttggcagcctgcttcgtggtgaagcccttgctcctgctggttacgacgctgttccctccgctgtggggcggtcagagggagatttcctggccgatgaagcagcccaggccattaaggcgcaggctcacaacgaatccaccgcagagccgaaagagcgccccaccgtcaccacaggctga

SEQ ID NO: 1819 - protein, 457 aa, Synechococcus sp. WH 7803
MLRVAVVGGGPSGSCAAEILAKAGISTWLFERKLDNAKPCGGAIPLCMVEEFDLPESIIDRKVRNMKMISPSNKEVDIKLDPLGYDDNAYIGMCRREVFDAFMRNRAADLGTTLVNGLVQKIDTGNARQGPYTLHYADYSSGGPTGELKTLEVDLIIGADGANSRVAKAMDAGDYNVAIAFQERIKLPPEEMTYYEDLAEMYVGTDVSPDFYAWVFPKYDHVAVGTGTMQQNQSLIKGLQKGIRERARKRLFKGEVIKVEAHPIPEHPRPRRVVGRMALVGDAAGYVTKSSGEGIYFAAKSGRMCAEAIVEISANGSRVPTEKEIKSTYLKRWDRKYGATYAVLDILQRIFYRNDAAREAFVEMCDDRDVQKLTFDSYLYKRVVLMNPWQQIKLTLRTLGSLLRGEALAPAGYDAVPSAVGRSEGDFLADEAAQAIKAQAHNESTAEPKERPTVTTG

SEQ ID NO: 1820 - DNA, 1335 bp, Prochlorococcus marinus str. MIT 9215
  CDS (1)..(1335): transl_table=11
atgttgagagttgctgttatcggtggaggtccaagtggttcatgtgctgctgaaatacttgcaaagtctggaataaaaacttggctttttgagagaaaattagataatgcaaaaccttgcggaggagctattccactttgcatggtagaagaatttgatttacctgaatcaattattgatagaaaagttaggaatatgaaaatgatttccccctcaaatagagaagtagatattattttggatgacatttatcccggaagcaaaaaagagtatataggtatgttgagacgcgaagttatggattcattcatgagaaatcgtgctgcagatcttggagctacattagtcaatggattggtatcaaaaatagagaccggtacgaacaaacaaggtccatacacacttcattacactgagacccttaatgatgaatctgaagtgaaaggaaagcagctagaggtagatttaattgttggtgcagatggcgcaacaagtagagttgccaaagctatggatgctggcgattacaattatgcagtagcaattcaggaaaggataaaacttcctaaagaagagatgaaatattacgaagacagagcggaaatgtatgttggaacagatgtatcccctgatttttatggctgggtatttccaaaatacgaccacgttgcagctggaaccggaacaatgaaacagaatgggggtttaataaaaagccttcaaattggtgtaagagaaagagcaaaaaaaaggttggttaatggtgaagtcataaaagttgaagctcatcctattcctgaacatccaagaccaagaagagtggtagggagaatggctttggttggagatgcagctggttacgtaactaaaagctcgggagaagggatatattttgcagccaaaagtggaagaatgtgtgccgaacaaattgtcgaatctagtcaaaatgggaaaataattcctacagaaaaagatttaaaaatatatttaaaaaagtgggataagaaatatggaacaacctatacagttttagatattctgcaacgaattttttacacaagtgatggagctagggaagcttttgttgaaatgtgtggtgatatggatgttcagagactcacatttgatagttatctctataaaacggtggtggcaatgaaaccacttcaacaattaaaactgaccttcttaacacttgggtctgttttgagaggcaaagcattagcaccaaaaacatataaaccagtaccaagtgcagtaagagatgataaggaagttgataaaatgttggctgttagttcaatcaaaggtggaataaaaaaaaataaaacttaa

SEQ ID NO: 1821 - protein, 444 aa, Prochlorococcus marinus str. MIT 9215
MLRVAVIGGGPSGSCAAEILAKSGIKTWLFERKLDNAKPCGGAIPLCMVEEFDLPESIIDRKVRNMKMISPSNREVDIILDDIYPGSKKEYIGMLRREVMDSFMRNRAADLGATLVNGLVSKIETGTNKQGPYTLHYTETLNDESEVKGKQLEVDLIVGADGATSRVAKAMDAGDYNYAVAIQERIKLPKEEMKYYEDRAEMYVGTDVSPDFYGWVFPKYDHVAAGTGTMKQNGGLIKSLQIGVRERAKKRLVNGEVIKVEAHPIPEHPRPRRVVGRMALVGDAAGYVTKSSGEGIYFAAKSGRMCAEQIVESSQNGKIIPTEKDLKIYLKKWDKKYGTTYTVLDILQRIFYTSDGAREAFVEMCGDMDVQRLTFDSYLYKTVVAMKPLQQLKLTFLTLGSVLRGKALAPKTYKPVPSAVRDDKEVDKMLAVSSIKGGIKKNKT

SEQ ID NO: 1822 - DNA, 1350 bp, Prochlorococcus marinus str. MIT 9211
  CDS (1)..(1350): transl_table=11
atgttgaggatagcagttatcggtggtgggccaagtggttcctgtgcagcagaaattcttgcaaaggcagggattaagacatggatatttgaacgaaaattggacaacgccaaaccatgtggaggagcaatccctttatgcatggtttcagagtttgacttgcctgattcaattattgacaggaaggttagaaatatgaggatgatttcaccctctaatagagaagttaatataagcttagataaggtctatggcgaaaatgataatgaatatataggcatgtgccgaagggaagtaatggatgcctttatgaggaatcgtgcagctgatcttggagcgaccttaataaatgggttggtcactaaaatagagacaggaactaacaaacaaggaccatataccctttcatattctgatttttctaatggcgagacaaccggagaaaacaaaaaattagaagtagatctaataattggtgcagatggggccaatagtcgagtagccaaggcgatggatgctggtgactacaatgttgcaatcgcctttcaagaacgtataaagctccccaaaaaagaaatgggatattacgaagatttagctgaaatgtacgttggtacggatgtatctccagacttctatggatgggttttccctaaatatgaccatgtagcagtagggacaggaacaatgcaaaagaatcagtcgttaataaaaagtcttcaagagggtgtaaggcaaagagcacaaaaaaggctagttaatggggaagtcattaaagttgaagctcacccaataccagagcaccctcgcccaagaagagtcgttggaaggatggctctagttggagatgcagctggttatgtaaccaaaagttctggggagggaatttattttgcagctaaaagtgggcgaatgtgtgcagaagaaatagtagaagctagtaaaaatggagccaagataccaacagaacaagatctaaaaaaatatcttaaaaagtgggataaaaaatacggaactacttataaggttcttgaaatacttcaaaatattttttattcaaatgatggagcaagagaagcttttgtagaaatgtgtgatgacatggacgtacaaagattaacttttgacagctatctttataagaccgttgtagcaatgaagccttggcagcaattaaaactaacattccttacacttggctcagttctacggggaagagcgttagcacctaaatcgtataagccagttgcaagcgctgttagagatgaagaagaggttaaaaagatgcttgcagttagcacaattaaagggggaataaaagtcaaaaacacccctcagaaagtcagttaa

SEQ ID NO: 1823 - protein, 449 aa, Prochlorococcus marinus str. MIT 9211
MLRIAVIGGGPSGSCAAEILAKAGIKTWIFERKLDNAKPCGGAIPLCMVSEFDLPDSIIDRKVRNMRMISPSNREVNISLDKVYGENDNEYIGMCRREVMDAFMRNRAADLGATLINGLVTKIETGTNKQGPYTLSYSDFSNGETTGENKKLEVDLIIGADGANSRVAKAMDAGDYNVAIAFQERIKLPKKEMGYYEDLAEMYVGTDVSPDFYGWVFPKYDHVAVGTGTMQKNQSLIKSLQEGVRQRAQKRLVNGEVIKVEAHPIPEHPRPRRVVGRMALVGDAAGYVTKSSGEGIYFAAKSGRMCAEEIVEASKNGAKIPTEQDLKKYLKKWDKKYGTTYKVLEILQNIFYSNDGAREAFVEMCDDMDVQRLTFDSYLYKTVVAMKPWQQLKLTFLTLGSVLRGRALAPKSYKPVASAVRDEEEVKKMLAVSTIKGGIKVKNTPQKVS

SEQ ID NO: 1824 - DNA, 1224 bp, Synechococcus sp. PCC 7002
  CDS (1)..(1224): transl_table=11
ttggtactacgggtcgctgttgtgggaggagggccagccggttcttccgccgccgaaatcttagctaaagctggcatcgaaacctacattttcgagcgcaaactggacaatgccaaaccctgcggtggggcgattcccctctgtatggttgacgaatttgacttacccccggagatcatcgaccgtcgtgtgcggaaaatgaagatgatttccccttccaatatcgaagtcaacattggtcaaaccctcaaggacgatgaatacatcgggatgtgccgccgcgaagtgatggatagcttcatgcgcaaccgagccgctgacctcggcgcaacgctgatcaacggtaccgttttcaaacttgagatccccaacaacaataccgatccctacgtcctccactactccgaccactccaacggcgaagtgaaaggggaaatgaaaaccctgaaggtggatttggttgtcggtgctgatggagccaactcccgtgtggccaaagccatcgatgctggtgattataactatgcgatcgccttccaagagcggattcgtcttcccgaagacaaaatggcctactacgaagaactggccgaaatgtatgtcggtgacgatgtatcccctgacttctacgcttgggtcttcccgaaatatgaccacgtggctgttgggactggcaccatgaaagtcaaccaagccaaaatcaagcaattacaagctggcatccgggcccgcgcggcgaaacgcctcgaaggtggcgaaatcatcaaagtagaagcccaccccattcccgaacaccccagaccccggcgcgttgttggtcgtgtcgccctcgttggtgatgcagccggtactgtaaccaagtcctctggtgaaggcatttactttgcggccaaatcagcgcggatgtgtgccgaggtgatcgtcgaagcttctaacaacggtcagcgcgttcccaccgaagccgatctcaagcaatacctgaagcgttgggataagcagtacggtgcgacttacctcgtcctggacattctccagcgggttttctaccgttccgatgccacccgcgaagcctttgtggaaatgtgtgctgacatcgatgtgcagaagctcacctttgacagctacctgtacaagaccgttgttcctgctaatcctctcaagcagatgaagattaccgcgaaaaccattggtagtctgctgcggggtaatgcgttagcaccctag

SEQ ID NO: 1825 - protein, 407 aa, Synechococcus sp. PCC 7002
MVLRVAVVGGGPAGSSAAEILAKAGIETYIFERKLDNAKPCGGAIPLCMVDEFDLPPEIIDRRVRKMKMISPSNIEVNIGQTLKDDEYIGMCRREVMDSFMRNRAADLGATLINGTVFKLEIPNNNTDPYVLHYSDHSNGEVKGEMKTLKVDLVVGADGANSRVAKAIDAGDYNYAIAFQERIRLPEDKMAYYEELAEMYVGDDVSPDFYAWVFPKYDHVAVGTGTMKVNQAKIKQLQAGIRARAAKRLEGGEIIKVEAHPIPEHPRPRRVVGRVALVGDAAGTVTKSSGEGIYFAAKSARMCAEVIVEASNNGQRVPTEADLKQYLKRWDKQYGATYLVLDILQRVFYRSDATREAFVEMCADIDVQKLTFDSYLYKTVVPANPLKQMKITAKTIGSLLRGNALAP

SEQ ID NO: 1826 - DNA, 1221 bp, Cyanothece sp. ATCC 51142
  CDS (1)..(1221): transl_table=11
ttggttttacgggtagctgttgtcggttcagggccggccggatcttccgccgccgaaacattagcaaaagctggcatagaaacatatttatttgaacgaaaattagataacgctaaaccttgtgggggtgctattcccctatgtatggtaagcgagtttgatttaccccctgaaattattgatcgacgggtgcggaagatgaaaatgatctccccatccaatattgaagttgatattaatcttgatcgccaagacgaatacatcggaatgtgtcgtcgggaagtgctggacggtttcttgagagatcgcgctgctaggttgggggctaacctgattaatggaacggtttatcaattagatattccgaaaacaagcaacggtgcttataccctccattatgccgatcattctaacggtaacgctgtaggagaaaagaaaaccctgcaagtggatgtggttatcggtgcagatggggcaaactcccgcattgccaaagccattgatgcaggggactataattatgcgatcgctttccaagagcgtatccgcttacctcaagacaaaatggcttactacgaagacttagcagagatgtatgtgggtaaagatgtttcccccgacttctacgcttgggtattccctaaatacgaccatgtggccgtaggaacgggaaccatgaaggttaacaaaacccttatcaaagacctacaagccggtattcgcgcccgtgcagcccgcagactcgaaggcggtgagattattaaagtagaagcccatcctatccccgaacatccccgtccccgtcgtgtcgtgggtcgtgtggcgttggtaggagacgcagccggcactgttaccaagtcctctggggaaggtatctatttcgctgccaaatcagcccgtatgtgtgctgaaaccatcgtggaaatgagcaacgccggtcaacgtattcccaccgaagaggatttaaaagtctatctcaagcgttgggataagcaatacggtatgacttaccttgttttagatatcctacaacgggtcttctatcgtacggatgctacccgtgaggcgtttgttgaaatgtgtgcggataaggatgtacaacggatgacctttgatagttatctctacaaaaccgttgtcccggctaaccccctagtacaaatgaaaattaccgctaaaaccatcggtagtttactacgaggcaacgctttagccccatag

SEQ ID NO: 1827 - protein, 406 aa, Cyanothece sp. ATCC 51142
MVLRVAVVGSGPAGSSAAETLAKAGIETYLFERKLDNAKPCGGAIPLCMVSEFDLPPEIIDRRVRKMKMISPSNIEVDINLDRQDEYIGMCRREVLDGFLRDRAARLGANLINGTVYQLDIPKTSNGAYTLHYADHSNGNAVGEKKTLQVDVVIGADGANSRIAKAIDAGDYNYAIAFQERIRLPQDKMAYYEDLAEMYVGKDVSPDFYAWVFPKYDHVAVGTGTMKVNKTLIKDLQAGIRARAARRLEGGEIIKVEAHPIPEHPRPRRVVGRVALVGDAAGTVTKSSGEGIYFAAKSARMCAETIVEMSNAGQRIPTEEDLKVYLKRWDKQYGMTYLVLDILQRVFYRTDATREAFVEMCADKDVQRMTFDSYLYKTVVPANPLVQMKITAKTIGSLLRGNALAP

SEQ ID NO: 1828 - DNA, 1221 bp, Nostoc punctiforme PCC 73102
  CDS (1)..(1221): transl_table=11
ttgacactacgggttgctgttattgggtcaggccctgctggttcatctgccgcagaaacactggcagcctctgggattgaaacctacctatttgagcggaagctggataatgcaaagccttgtgggggcgcaattcccctatgtatggtgagtgaatttgacttaccaccagagattatcgatcgccgggtacggaagatgaaaatgatttcgccttccaatcgggaggttgatatcaatctgataaatgaagatgaatatataggaatgtgccgccgggaagtgctggatggctttttgcgcgatcgcgcggcaaaattaggcgcaaatttaattaatgccactgttcataaacttgatataccaggaaacaataccgatccctataccatccattacgttgaccatacagaaggtatatcacaggggattgccaaaaccctgaaggtggatttaatcattggggcggatggggctaattctcgcgttgccaaagaaatggacgctggggattacaattatgcgatcgctttccaagagcgaattcgcttacccgaagacaaaatggcctactataacgacctcgccgaaatgtatgtcggtgatgacgtttcgaccgatttctacgcttgggttttccccaaatatgaccacgtagctgtcggtactggcacaatgcacatcaataaagccagcatcaaacagttacaagctggtatccgcgcccgtgcttccgaaaaattggcaggcggtaaaatcatcaaagtagaagcgcaccccattcctgaacatccccgtccccgtcgtgtcgttggtcgcatcgctttggtgggagatgctgctggttacgttaccaagtcctctggtgaaggtatttattttgccgctaaatctgggcggatgtgtgccgaaaccattgtagaagcatctaacagtggtagccgtattcctacagaaggcgacctcaagatttacctgaagcgttgggataaaagatacggactcacctacaaggtgttggacattctgcaaagtgtgttctatcgttccgacgctacccgcgaagcgtttgtggaaatgtgtgatgacctcgatgtacaacggctaacattcgatagctatctgtataaaacggttgtcccagctaatcccatcacccaattgaagattactgccaaaaccattggtagtctaattcggggtaatgcccttgcaccttaa

SEQ ID NO: 1829 - protein, 406 aa, Nostoc punctiforme PCC 73102
MTLRVAVIGSGPAGSSAAETLAASGIETYLFERKLDNAKPCGGAIPLCMVSEFDLPPEIIDRRVRKMKMISPSNREVDINLINEDEYIGMCRREVLDGFLRDRAAKLGANLINATVHKLDIPGNNTDPYTIHYVDHTEGISQGIAKTLKVDLIIGADGANSRVAKEMDAGDYNYAIAFQERIRLPEDKMAYYNDLAEMYVGDDVSTDFYAWVFPKYDHVAVGTGTMHINKASIKQLQAGIRARASEKLAGGKIIKVEAHPIPEHPRPRRVVGRIALVGDAAGYVTKSSGEGIYFAAKSGRMCAETIVEASNSGSRIPTEGDLKIYLKRWDKRYGLTYKVLDILQSVFYRSDATREAFVEMCDDLDVQRLTFDSYLYKTVVPANPITQLKITAKTIGSLIRGNALAP

SEQ ID NO: 1830 - DNA, 1374 bp, Synechococcus elongatus PCC 6301
  CDS (1)..(1374): transl_table=11
gtggatcctgtcgttctgttaacgtctgtttcagctttgacacagacgcaaaagccctgtcggggccgacgaaatgcccgtgataggatcccaacctgtagccaagaaacgttagagggcaaagcgttggcacttcgggtggctgtggtcggcggcggaccggcgggatcttgtgcagcggaaacgctcgtcaaagccggtattgagacttatctaatcgagcgcaagttggacaacgcaaagccctgcggcggtgcaatcccgctctgcatggtcagcgagttcgacctgccggcggagatcatcgatcgccgcgtgcgcaacatgaaaatgatttcgccgtccaaccgcgaggtcaacatcaatctcgacaatgccgacgaatacatcggcatgacccgtcgggaggtactggatggcttcctgcgcgatcgcgcggccaagctgggcaccaagctgatcaacggtacgctcttccgtttggaactgccgaagggcgatcgcgatccctacgtgctgcactacgccgatcactccaacggcagtctagaaggcattccttcgaccctagaagtggatgtggtgattggggcggatggcgctaactcgcgtatcgccaaagcgatcgatgcgggcgattacaactacgcgattgctttccaagagcgcatccgtctgcctgaagacaagatgcattactacgaaaatctggcggaaatgtacgtcggtggcgacgtttcgcccgacttctacgcgtgggtgttccccaaatacgaccacgtagcagtcggtacgggcacgatgcatgtcaaccaacgcctgatcaagaagctgcaagcaggcattcgcgctcgggctgcaaaccgtttggaaggcggcaagatcatcaaggtcgaagcacacccgatccccgagcatccgcgtccgcgtcgggttgttggccgggcagcactagttggcgatgcggccggctacgtgactaagtcttcaggtgaaggcatctacttcgcggccaaatcgggtcggatgtgtgccgaaacgatcgtcgaaacctcgaacaacggcgctcgcattcctaccgaagcggatctgaagcagtatctgcgtcgctgggacaaaaaatacggcaccacctacaaagtgctggacttgctgcaaaccgtcttctatcgctcggatgcaacccgtgaagccttcgtggaaatgtgcgacgacaaagatgtgcagcgtctgaccttcgacagctacctctacaaaaccgtggtgccggccaatcccttagtgcagctaaaaatcacggccaaaaccctcggtagcttgctacgcggcaatgccttggcaccagcggaatataaaccgatcgatgcggcttaa

SEQ ID NO: 1831 - protein, 457 aa, Synechococcus elongatus PCC 6301
MDPVVLLTSVSALTQTQKPCRGRRNARDRIPTCSQETLEGKALALRVAVVGGGPAGSCAAETLVKAGIETYLIERKLDNAKPCGGAIPLCMVSEFDLPAEIIDRRVRNMKMISPSNREVNINLDNADEYIGMTRREVLDGFLRDRAAKLGTKLINGTLFRLELPKGDRDPYVLHYADHSNGSLEGIPSTLEVDVVIGADGANSRIAKAIDAGDYNYAIAFQERIRLPEDKMHYYENLAEMYVGGDVSPDFYAWVFPKYDHVAVGTGTMHVNQRLIKKLQAGIRARAANRLEGGKIIKVEAHPIPEHPRPRRVVGRAALVGDAAGYVTKSSGEGIYFAAKSGRMCAETIVETSNNGARIPTEADLKQYLRRWDKKYGTTYKVLDLLQTVFYRSDATREAFVEMCDDKDVQRLTFDSYLYKTVVPANPLVQLKITAKTLGSLLRGNALAPAEYKPIDAA

SEQ ID NO: 1832 - DNA, 1188 bp, Thermococcus kodakarensis KOD1
  CDS (1)..(1188): transl_table=11
atgacctggaagtacgacgtcgttgttgtcggttctggtatcgctggccccatagttgccaggaacgtcgctaaagctggtttctccgtccttctcatcgataagaagtgggctataggtactccaaagcagtgcgccgaggcaataagcattaaggtcttcgacaagtacgacatcccctacgacaagcgcttcatcaaccgcgagatttacggtgctaagctctactccccgagcggctacgagctcgaaatgcgctacaaggaagtcagcggagtgatccttgagaggaaggtcttcgacaagatgctagcttattatgcagccaaagcaggcgccgatgttctcgcgaggaccgaggcgctcgatgtcataagaaaggacggcaagatagttggaatcaaagccaagcatgaggacgagccggtcgagatttacgccgatatcatagttgcggccgacggcgttgagagcaccatagcgaggaaagcgggcataaacacctacgctccgccgcatgagttcgactcaggctacgagtacgagatgctcatagagggctttgatccagacttgattcatctctggttcggcaacgaggttgctcccaggggctacgtctgggtcttcccgaaggacgaagacagggccaacgtcggcattggcatcaactcggacaatccaaagacagctaaatactacctcgacaagtggctcgaggaaaacaacattccagcaaagaagctccttgaaataaatgtcggactcatacccgttggaggctttgtcaaagaactcgctaaagataacgtggtcgttgtaggggatgccgctagacaggtaaaccccatgcacggcggcggaatggccgaggcgatggaggctgggacgatagctagcaagtggattgtcaaggccctcgaagaggagaacctctcactcctccagaactacacaaaggagtggtgggagaccgacggaaagcggctcgaaaaggttctcaaggtcaggcgcgttaccgagaagctcacggatgaggacctcgacctcttcatacagatcctcagcggtgcagatgccgagaagatagccagcggagattacgccgaggtcatcaaggccctattgaagcacccgaaggttctgatgagcaagaggaggctcagcctcctcaaggagcttctttaa

SEQ ID NO: 1833 - protein, 395 aa, Thermococcus kodakarensis KOD1
MTWKYDVVVVGSGIAGPIVARNVAKAGFSVLLIDKKWAIGTPKQCAEAISIKVFDKYDIPYDKRFINREIYGAKLYSPSGYELEMRYKEVSGVILERKVFDKMLAYYAAKAGADVLARTEALDVIRKDGKIVGIKAKHEDEPVEIYADIIVAADGVESTIARKAGINTYAPPHEFDSGYEYEMLIEGFDPDLIHLWFGNEVAPRGYVWVFPKDEDRANVGIGINSDNPKTAKYYLDKWLEENNIPAKKLLEINVGLIPVGGFVKELAKDNVVVVGDAARQVNPMHGGGMAEAMEAGTIASKWIVKALEEENLSLLQNYTKEWWETDGKRLEKVLKVRRVTEKLTDEDLDLFIQILSGADAEKIASGDYAEVIKALLKHPKVLMSKRRLSLLKELL

SEQ ID NO: 1834 - DNA, 1257 bp, Anabaena variabilis ATCC 29413
  CDS (1)..(1257): transl_table=11
atgctttcggtaaatgtgaagattgggagaagacctttgacactacgggttgctgttgttgggtcaggcccagctggttcctctgctgctgaaacactagccaaagctgggattgagacctacctgtttgagcgcaaattggataacgccaaaccctgtgggggggcgattcccttatgtatggtaagtgagtttgacttaccaccagaaattattgatcgtcaagtgcggaagatgaaaatgatttcaccttccaatcgtgaagttgatatcaatctgataaaagaagacgaatatataggaatgtgccgccgtgaagtcctagatggcttcttacgcaatcgcgcggcaaaattaggggcaaatttaattaatgccaccgttcataaagttgatatacctggaaataacagcgacccatacaccattcattatgttgaccataatgaaggcggcgcacaaggtgtcacaaaaactttaaaagtagatttgattattggtgcagatggggctaattcccgcattgccaaagaaatggatgctggggattataattatgcgatcgccttccaagagcgtatccgcttacccgaagataaaatggcatattacaacgaccttgccgaaatgtatgtaggcaatgacgtttccacagacttttatgcctgggtattccccaaatatgaccacgtagccgtcggtactggcacaatgcaggtacacaaagccagcatcaagcagctacaggctggtatccgcgcccgcgctagcgaaaaattagcaggcggtaaaatcatcaaagtagaagcccacccaatccccgaacatccccgtcctcggcgtgttgttggtcgcatagccttagttggagacgctgctggctatgttaccaagtcctctggtgaagggatttacttcgctgctaaatctgggcggatgtgtgcagaaaccattgtagaagtttctcaaaatggtagtcgcattcccacagaaaacgaactcaagatttatctcaaacgctgggataaaaaatacggactcacgtacaaagtactggacatcttgcaaacagtattttaccgctccgatgccacccgtgaggcatttgtagagatgtgtgctgacttagatgtacaaaagctgacttttgacagctatctgtataaaacagtcgtccccgcgaaccccatcacccagttaaaaattactgccaagacaattggtagtctcatccgtggtaacgctttagcaccctaa

SEQ ID NO: 1835 - protein, 418 aa, Anabaena variabilis ATCC 29413
MLSVNVKIGRRPLTLRVAVVGSGPAGSSAAETLAKAGIETYLFERKLDNAKPCGGAIPLCMVSEFDLPPEIIDRQVRKMKMISPSNREVDINLIKEDEYIGMCRREVLDGFLRNRAAKLGANLINATVHKVDIPGNNSDPYTIHYVDHNEGGAQGVTKTLKVDLIIGADGANSRIAKEMDAGDYNYAIAFQERIRLPEDKMAYYNDLAEMYVGNDVSTDFYAWVFPKYDHVAVGTGTMQVHKASIKQLQAGIRARASEKLAGGKIIKVEAHPIPEHPRPRRVVGRIALVGDAAGYVTKSSGEGIYFAAKSGRMCAETIVEVSQNGSRIPTENELKIYLKRWDKKYGLTYKVLDILQTVFYRSDATREAFVEMCADLDVQKLTFDSYLYKTVVPANPITQLKITAKTIGSLIRGNALAP

SEQ ID NO: 1836 - DNA, 1368 bp, Synechococcus sp. CC9605
  CDS (1)..(1368): transl_table=11
atgttgcaagttgcggtgatcggtggtggccccagtggctcctgtgctgccgaaattctggccaaggcgggaattgagacttggctattcgagcgcaaactcgacaacgccaaaccctgtggtggggctattccgctctgcatggtcgaggagtttgacctgcccgacgaaatcatcgaccgaaaggtccgcaacatgaagatgatttccccttccaacagggaggtggacatcaaactcgatcccctcggctacgacgaaaacgcctacatcggcatgtgccgtcgtgaggtgttcgatgccttcctgcgcaaccgtgctgccgatctgggcacaaccctgatcaatggactggtgcagaagatcgacaccggtgcagaccgtcagggcccctacaccatccattacgccgactacagcggcggtggcccaaccggtgaacagaagaccctggctgtggatctgatcattggtgccgatggcgccaactcccgggtggcgaaagccatggacgccggggattacaacgtggccatcgccttccaggagcggatcaagcttcctgctgaggagatgacctactacgaaaatctggctgagatgtacgtcggaacagacgtctcacctgacttctacgcctgggtgttccccaaatacgatcacgtggccgttggaacgggaaccatgcagcagaaccagagcctaatcaaaggtctgcaaaggggcatccgggagcgggccaacaagcgtctgttccagggtgaagtgatcaaggtggaagcccacccgattcctgagcacccccgtccccgtcgcgtcgtgggccgcatggcgctagtgggcgatgccgccggctacgtcaccaagagctccggtgaaggcatctacttcgcagccaagagcggccggatgtgtgccgaagcgattgtggaaatttccaacaacggtgcttccatccccactgagaagcagatcaagtcgacctacctcaagcgctgggaccgcaaatacggcgccacttatgtggtgctcgatatcctgcagcgaatcttctaccgcaacgacgctgcccgggaagcctttgtcgaaatgtgcgacgacaaggacgtgcagaagctgaccttcgacagctacctgtataagcgggtggtgatgatgaacccctggcagcagatcaagctgaccctccgcaccctgggcagcctgatccggggcgaggcccttgctccctccgattacaaccctgttccttcggccgttggccgttccgatggcgatttcctagcggaggaagctgcccagcagatcaaggctcaggctggcgaatccaagggttccgagtggaaggaaaaggccggcgtttcctga

SEQ ID NO: 1837 - protein, 455 aa, Synechococcus sp. CC9605
MLQVAVIGGGPSGSCAAEILAKAGIETWLFERKLDNAKPCGGAIPLCMVEEFDLPDEIIDRKVRNMKMISPSNREVDIKLDPLGYDENAYIGMCRREVFDAFLRNRAADLGTTLINGLVQKIDTGADRQGPYTIHYADYSGGGPTGEQKTLAVDLIIGADGANSRVAKAMDAGDYNVAIAFQERIKLPAEEMTYYENLAEMYVGTDVSPDFYAWVFPKYDHVAVGTGTMQQNQSLIKGLQRGIRERANKRLFQGEVIKVEAHPIPEHPRPRRVVGRMALVGDAAGYVTKSSGEGIYFAAKSGRMCAEAIVEISNNGASIPTEKQIKSTYLKRWDRKYGATYVVLDILQRIFYRNDAAREAFVEMCDDKDVQKLTFDSYLYKRVVMMNPWQQIKLTLRTLGSLIRGEALAPSDYNPVPSAVGRSDGDFLAEEAAQQIKAQAGESKGSEWKEKAGVS

SEQ ID NO: 1838 - DNA, 1341 bp, Prochlorococcus marinus str. MIT 9312
  CDS (1)..(1341): transl_table=11
atgttgagggtagctgttattggaggaggtccaagtggatcatgtgctgcagaaatacttgccaaagcaggaataaaaacttggctcttcgagagaaaattagataatgcgaaaccatgtggaggagctattcctctttgcatggtagaggaatttgatttacctgagtcgattattgacaggaaagtaagacatatgagaatgatatctccatcaaatagagaggtagatattagtttggataaggtttatggcaaaagtgataatgaatttataggaatgtgcagaagagaagtaatggatgctttcatgagaaacagggcttctgatctaggagctacattaataaatggattagttacttcgattgatacagggaataataaccaaggtccatataaacttgtatattctgattattcttctggagataaaaaaggagagttgaaagaacttacagttgaccttttaattggggcagacggagccaatagtagagtcgctaaagctatggatgcaggagattataaagtagctattgcatttcaagagagaataaagttacctaaagaagaaatgagttactatgaagatcttgctgaaatgtatgtaggaactgacgtatctcctgatttctatgggtgggtatttcctaaatatgatcatgttgccgtaggaacagggacaatgcaaaagaatcaattattaataaagggactacaggaaggagttaggaatagagcaaaaaaaagacttgtaaatggggaggttatcaaagtagaagcacatcctattcctgagcatcccaggccaagaagagttgttgggagaatggctttagtaggagatgctgctggttatgttacgaagagttctggagagggaatatattttgctgcaaagagcggtagaatgtgtgcagaagaaatcgttgaagcatctaaaaatggagaagttataccttcagaaaatgatttaaaaaattacttaaaaaaatgggataaaaagtatggagcgacatataaggtactagaaattctacaaaatattttttataggaacgattctgctagagaagcttttgtagaaatgtgtgatgatatggatgttcaaagactcacttttgatagttatttatataaaaaagttgttgcgatgaaaccaatacaacaaattaaacttacgttgcttactcttggttcaattttaagaggaaaagcacttgctccattaaagtacaaacctgttgatagtgctgtgagagaagagaaagaagttgaaacaatgcttaaaaagtattcaattaaaggtggtattaaggttaagagttcaaaagtgtaa

SEQ ID NO: 1839 - protein, 446 aa, Prochlorococcus marinus str. MIT 9312
MLRVAVIGGGPSGSCAAEILAKAGIKTWLFERKLDNAKPCGGAIPLCMVEEFDLPESIIDRKVRHMRMISPSNREVDISLDKVYGKSDNEFIGMCRREVMDAFMRNRASDLGATLINGLVTSIDTGNNNQGPYKLVYSDYSSGDKKGELKELTVDLLIGADGANSRVAKAMDAGDYKVAIAFQERIKLPKEEMSYYEDLAEMYVGTDVSPDFYGWVFPKYDHVAVGTGTMQKNQLLIKGLQEGVRNRAKKRLVNGEVIKVEAHPIPEHPRPRRVVGRMALVGDAAGYVTKSSGEGIYFAAKSGRMCAEEIVEASKNGEVIPSENDLKNYLKKWDKKYGATYKVLEILQNIFYRNDSAREAFVEMCDDMDVQRLTFDSYLYKKVVAMKPIQQIKLTLLTLGSILRGKALAPLKYKPVDSAVREEKEVETMLKKYSIKGGIKVKSSKV

SEQ ID NO: 1840 - DNA, 1242 bp, Rhodospirillum rubrum ATCC 11170
  CDS (1)..(1242): transl_table=11
atggacgccgtcgtcgccacgcaaacgccggccgaggtcttcgatgtggtcgtcgtcggtggtggtccggccggggcgacggcggcgaccgatctggcgcgggccggtcggcgtgtcgccctgcttgatcccgaaggccggcccaagccctgtggcggcgccattcccccccggctgatgagcgaattcgccatccccgatgatctgccctgcgcccaggtcagcggtgcccgcgccctggcgccctcgggccgggtggtcgatatgccgatcaccggcgcggtggtgtcgatggtcgatcgcgccgttttcgatccctggctgcgcgcccgcgcccatcaggccggcgcctgccgcctgcatggccgcttcgagggctttgatcgccaggaggacggcgcgctggtggtgctttggcgccccgagggggcggcggtggccaataggatcgtggcgcgctatgtggttggcgccgatggcgcgcgctcgaaagtcgctgccctcgccgttgccggcgccgcgccgccctgcgtcgccgcctatcacgaaatcatccgcgccccggccgcgcccgcggccagtgctccgacacccgcgacggcggcggggccggcctatgacccggcgcgctgcgatgtgatttatcgcggcgacatctcgcccgatttctacggctggatctttccccatggcgagacgttaagcatcgggtcgggaacggcggtcaaaggcttctcgttgcgcgaggctgtcgccctgctgcgccgggaagccggattggacggactggaggtggtgcggcgcgaaggcgctcccattccgttgcggccgcgcaagcgctgggataacggccgcgatgtcgtgctgatcggcgatgccgccggggtggtcgccccggcttcgggcgaggggatctattacgccatggccagcggcaagatggcggccgaggcgcttggcgaggctttggccggcgccggtcccgccgccctggcccaggttcgccgccggtttctcaaggcccatggcaagacgttttggtcgcttggcctgctccagcgcttctggtaccgcagcgaccgctggcgcgagagtttcgttgccatctgcgccgatcgcgacgtccagcgtctggtctggcaatcctatctgaccaaggatctggcgcgcggcaacatgggggcttacatgcggattttcttcaaggatgtcgcccatctgatcggcatcgccaagtcttga

SEQ ID NO: 1841 - protein, 413 aa, Rhodospirillum rubrum ATCC 11170
MDAVVATQTPAEVFDVVVVGGGPAGATAATDLARAGRRVALLDPEGRPKPCGGAIPPRLMSEFAIPDDLPCAQVSGARALAPSGRVVDMPITGAVVSMVDRAVFDPWLRARAHQAGACRLHGRFEGFDRQEDGALVVLWRPEGAAVANRIVARYVVGADGARSKVAALAVAGAAPPCVAAYHEIIRAPAAPAASAPTPATAAGPAYDPARCDVIYRGDISPDFYGWIFPHGETLSIGSGTAVKGFSLREAVALLRREAGLDGLEVVRREGAPIPLRPRKRWDNGRDVVLIGDAAGVVAPASGEGIYYAMASGKMAAEALGEALAGAGPAALAQVRRRFLKAHGKTFWSLGLLQRFWYRSDRWRESFVAICADRDVQRLVWQSYLTKDLARGNMGAYMRIFFKDVAHLIGIAKS

SEQ ID NO: 1842 - DNA, 1221 bp, Trichodesmium erythraeum IMS101
  CDS (1)..(1221): transl_table=11
ttgactttaagggttgctgttgtaggttcaggtccagcgggttcctctgctgccgagactttagtaaaagcaggtattgaaacttatttatttgagcgaaaactaaataacgctaagccttgtggtggagctattcccctatgtatggtcagtgaatttgatctcccaccagaaattatcgatcgccgagttagaaaaatgaaaatgatatctccctccaatgttgaggtagatattcatatagaaaaagaagatgaatatatcggtatgtgccgtcgggaagtattagatggcttcctcagagaccgggcggcttccctaggagctaacctcattaatggtactgtttataaacttgatcttcctaataatgatagagaaccctacactattcattattctgaccattcacaaggagatattcaaggaacggctaaaaccttaaaagtagatttagttattggagcagatggggcaaactcccgtgtggctaaagctattgatgctggagactataactacgcgatcgctttccaagagcgtatccgcctccctgaccatcttatggcatactacgaagaccttgcagaaatgtatgtgggggatgatgtttccccagacttctacgcttgggtatttcctaaatatgaccacgtggctgtaggtactggtacaatgaaggttcaccaggcaaaaattaaacagctacaagcaggtattcgagctcgtgcagctaaacgcctcgaaggtggccaaataattaaggtagaagctcatcctattcctgaacatcctcgtccccatagggttcgtggcagagttgctttagtcggagatgctgcgggtactgttactaagtcttctggtgagggtatctattttgcagctaagtctgctcggatgtgtgctgaaactattgttgaggcttctaacaatggtgctattattcctactgaagcagacttaaagctttatctgaaacggtgggataagaaatatggcatgacttacaaagtattggatattttgcagagggtattctatcgttctgatgcgactcgagaggcatttgtggaaatgtgcgctgatagggatgtgcagaaattaacttttgatagttatttgtacaagactgttgttcctgctaaccctttaattcaaatgaagataactgctaaaactattggtagtatgctccggggtcatgctttagctccgtaa

SEQ ID NO: 1843 - protein, 406 aa, Trichodesmium erythraeum IMS101
MTLRVAVVGSGPAGSSAAETLVKAGIETYLFERKLNNAKPCGGAIPLCMVSEFDLPPEIIDRRVRKMKMISPSNVEVDIHIEKEDEYIGMCRREVLDGFLRDRAASLGANLINGTVYKLDLPNNDREPYTIHYSDHSQGDIQGTAKTLKVDLVIGADGANSRVAKAIDAGDYNYAIAFQERIRLPDHLMAYYEDLAEMYVGDDVSPDFYAWVFPKYDHVAVGTGTMKVHQAKIKQLQAGIRARAAKRLEGGQIIKVEAHPIPEHPRPHRVRGRVALVGDAAGTVTKSSGEGIYFAAKSARMCAETIVEASNNGAIIPTEADLKLYLKRWDKKYGMTYKVLDILQRVFYRSDATREAFVEMCADRDVQKLTFDSYLYKTVVPANPLIQMKITAKTIGSMLRGHALAP

SEQ ID NO: 1844 - DNA, 1389 bp, Synechococcus sp. CC9311
  CDS (1)..(1389): transl_table=11
atgctgagagttgccgttgtcggtggtggaccgagcggatcttgtgccgcagaagtgcttgcacgggccggcatcaagacttggttattcgagagaaagctcgataacgccaagccttgcgggggagcgattccgctttgcatggttgaggaattcgatcttcccgattcgatcatcgatcgaaaagttcggaacatgaagatgatttccccttccaatcgtgaggtggatatcaagttggatccactcggttatgacgacaacgcctacatcggcatgtgtcggcgcgaggttttcgactccttcctccgcaaccgagctgccgatctaggcaccacccttattaatggtttggtgcaaaagatcgacaccggcaacaaacgccaaggtccttacaccctccattacgccgattacagcgctggcggtcctaccggcgaaatgaaaagcctggaagtggatctcatcattggcgccgatggagccaactcccgcgtcgctaaagcgatggacgcaggtgactacaaggtggcgatcgcgttccaagagcgcatcaaactgccagcagaagagatggcttactacgaagatctcgccgagatgtatgtaggaacagatgtctcacccgacttctatgcctgggtcttccctaagtacgaccacgtcgccgttgggactggaaccatgcaacaaaatcaatccttgattaagggtcttcagaaaggcatccgcgaacgcgctcgtaaacgcttgttcaagggcgaagtcatcaaggttgaagcacacccaattcccgaacatcctcgccctcgcagagtggtaggccgtatggctcttgtgggagatgcagctggatacgtcaccaaaagttctggagaagggatttacttcgctgcaaaaagcggtcggatgtgtgcagaagcgatcgttgaaatctccaaaaatggcacccagatgcccactgaaaaggagatcaagaacacctacctgaagcgatgggatcgcaagtacggagcaacgtacatcgtgctcgacatacttcaacgcatcttctatcgcaccgatgcagctcgagaagcattcgttgaaatgtgcgatgaccaagacgtccagaagctcactttcgacagctatctgtacaaaaaggtggtgatgatgaatccctggcaacaggtcaaactaaccgctcggactctgggaagtcttttacgcggtcaagccctagccccctcttcttacgactccgttccttcagccgtagggcgatcggatggagacttccttgccgacgaagccgcccaagcgatcaaagcgcagacctcgggccatgcgccaaaaaaaagtgaggcagatatcgaggaagagcgttccaaggtcactacaggctga

SEQ ID NO: 1845 - protein, 462 aa, Synechococcus sp. CC9311
MLRVAVVGGGPSGSCAAEVLARAGIKTWLFERKLDNAKPCGGAIPLCMVEEFDLPDSIIDRKVRNMKMISPSNREVDIKLDPLGYDDNAYIGMCRREVFDSFLRNRAADLGTTLINGLVQKIDTGNKRQGPYTLHYADYSAGGPTGEMKSLEVDLIIGADGANSRVAKAMDAGDYKVAIAFQERIKLPAEEMAYYEDLAEMYVGTDVSPDFYAWVFPKYDHVAVGTGTMQQNQSLIKGLQKGIRERARKRLFKGEVIKVEAHPIPEHPRPRRVVGRMALVGDAAGYVTKSSGEGIYFAAKSGRMCAEAIVEISKNGTQMPTEKEIKNTYLKRWDRKYGATYIVLDILQRIFYRTDAAREAFVEMCDDQDVQKLTFDSYLYKKVVMMNPWQQVKLTARTLGSLLRGQALAPSSYDSVPSAVGRSDGDFLADEAAQAIKAQTSGHAPKKSEADIEEERSKVTTG

SEQ ID NO: 1846 - DNA, 1236 bp, Nostoc punctiforme PCC 73102
  CDS (1)..(1236): transl_table=11
ttgggagaaagacctttgacactacgggttgctgttattgggtcaggccctgctggttcatctgccgcagaaacactggcagcctctgggattgaaacctacctatttgagcggaagctggataatgcaaagccttgtgggggcgcaattcccctatgtatggtgagtgaatttgacttaccaccagagattatcgatcgccgggtacggaagatgaaaatgatttcgccttccaatcgggaggttgatatcaatctgataaatgaagatgaatatataggaatgtgccgccgggaagtgctggatggctttttgcgcgatcgcgcggcaaaattaggcgcaaatttaattaatgccactgttcataaacttgatataccaggaaacaataccgatccctataccatccattacgttgaccatacagaaggtatatcacaggggattgccaaaaccctgaaggtggatttaatcattggggcggatggggctaattctcgcgttgccaaagaaatggacgctggggattacaattatgcgatcgctttccaagagcgaattcgcttacccgaagacaaaatggcctactataacgacctcgccgaaatgtatgtcggtgatgacgtttcgaccgatttctacgcttgggttttccccaaatatgaccacgtagctgtcggtactggcacaatgcacatcaataaagccagcatcaaacagttacaagctggtatccgcgcccgtgcttccgaaaaattggcaggcggtaaaatcatcaaagtagaagcgcaccccattcctgaacatccccgtccccgtcgtgtcgttggtcgcatcgctttggtgggagatgctgctggttacgttaccaagtcctctggtgaaggtatttattttgccgctaaatctgggcggatgtgtgccgaaaccattgtagaagcatctaacagtggtagccgtattcctacagaaggcgacctcaagatttacctgaagcgttgggataaaagatacggactcacctacaaggtgttggacattctgcaaagtgtgttctatcgttccgacgctacccgcgaagcgtttgtggaaatgtgtgatgacctcgatgtacaacggctaacattcgatagctatctgtataaaacggttgtcccagctaatcccatcacccaattgaagattactgccaaaaccattggtagtctaattcggggtaatgcccttgcaccttaa

SEQ ID NO: 1847 - protein, 411 aa, Nostoc punctiforme PCC 73102
MGERPLTLRVAVIGSGPAGSSAAETLAASGIETYLFERKLDNAKPCGGAIPLCMVSEFDLPPEIIDRRVRKMKMISPSNREVDINLINEDEYIGMCRREVLDGFLRDRAAKLGANLINATVHKLDIPGNNTDPYTIHYVDHTEGISQGIAKTLKVDLIIGADGANSRVAKEMDAGDYNYAIAFQERIRLPEDKMAYYNDLAEMYVGDDVSTDFYAWVFPKYDHVAVGTGTMHINKASIKQLQAGIRARASEKLAGGKIIKVEAHPIPEHPRPRRVVGRIALVGDAAGYVTKSSGEGIYFAAKSGRMCAETIVEASNSGSRIPTEGDLKIYLKRWDKRYGLTYKVLDILQSVFYRSDATREAFVEMCDDLDVQRLTFDSYLYKTVVPANPITQLKITAKTIGSLIRGNALAP

SEQ ID NO: 1848 - DNA, 1242 bp, Crocosphaera watsonii WH 8501
  CDS (1)..(1242): transl_table=11
atggaaattaggagaatagccttggttttacgggtagctgttgtcggttcagggccggccggatcttccgccgccgaaacattagcaaaagctggcatagaaacatatttatttgaaagaaaattagataacgctaaaccctgtgggggtgctattcccctatgtatggtaagcgaatttgatttaccccccgaaattatcgatcgccgggtgcggaagatgaaaatgatctccccatccaacgtagaagttgatattaacctcgatcgccaagacgaatatattgggatgtgtcgtcgggaagttctcgatggcttcctaagggatcgggccgctgggttaggggctaacctgatcaatggtacggtttatcaactagagatacccaaaacaagcgagggtgcttatactctccattatgcggatcattccaacgggaactctgtaggagaaaggaaaagcctagaagtcgatctagttattggtgctgatggtgctaactctcgggttgctaaggccatcgatgctggagactataattatgcgatcgccttccaagagcgtatccgcttgccccaggataaaatgacctactatgaagacctagcagagatgtatgtagggaaagatgtttcccccgacttctacgcttgggtattccccaaatacgatcatgtggctgtgggaacaggaaccatgaaggtcaataaaaacatgatcaaaggtttacaagcaggaatacgcgcccgtgctgcccgcagactcgaaggtggtgagatcattaaagtagaggctcatcccatcccagaacatccccgtccccgtcgtgtagtgggtcgtgtggccttggttggagacgctgccggaacagttaccaagtcctctggggaaggtatctatttcgcggcaaaatcagcccgtatgtgtgctgaaaccatcgtggaaatgagtaacgctggtcaacgcattcccacggaagatgatttaaaagtgtatctcaaacgttgggataagcaatatggtatgacttatctagtcttagatatcctacaaagggtcttctatcgtaccgatgccacccgtgaagcgtttgtagaaatgtgtgcggataaggatgtacaacggatgacctttgatagttatctctacaaaaccgttgtcccggctaaccccttagtgcaaatgaaaattaccgctaaaactatcggtagtttactaagaggtcacgctttagcaccttag

SEQ ID NO: 1849 - protein, 413 aa, Crocosphaera watsonii WH 8501
MEIRRIALVLRVAVVGSGPAGSSAAETLAKAGIETYLFERKLDNAKPCGGAIPLCMVSEFDLPPEIIDRRVRKMKMISPSNVEVDINLDRQDEYIGMCRREVLDGFLRDRAAGLGANLINGTVYQLEIPKTSEGAYTLHYADHSNGNSVGERKSLEVDLVIGADGANSRVAKAIDAGDYNYAIAFQERIRLPQDKMTYYEDLAEMYVGKDVSPDFYAWVFPKYDHVAVGTGTMKVNKNMIKGLQAGIRARAARRLEGGEIIKVEAHPIPEHPRPRRVVGRVALVGDAAGTVTKSSGEGIYFAAKSARMCAETIVEMSNAGQRIPTEDDLKVYLKRWDKQYGMTYLVLDILQRVFYRTDATREAFVEMCADKDVQRMTFDSYLYKTVVPANPLVQMKITAKTIGSLLRGHALAP

SEQ ID NO: 1850 - DNA, 1140 bp, Prosthecochloris aestuarii DSM 271
  CDS (1)..(1140): transl_table=11
atgcgttacgatgtcgctgtcataggaggagggccatcaggagctgtcgctgcagccatactggcaaaagcgggcctgtcaaccgtccttatagagagaaaccttgccaatgtcaagccatgcggcggagcgattcccctcggcctgattgaagagttcaacattcccgatccactcgtagagaaaaaactttcaaaaatgagtgtgcgctcccccaggggacgaaaaatttctatggagatgcccaacggttacgtcggtatggtacgccgggaacgtttcgacagctatttgcgggaccgggcagttcgcctcggcgccgatatcgtcgaggctcttgtcagggagatcaaaccggcctcaaacggccatagcatccacctctcgaaaggccatgcccctatcgaagccgacttcatcatcggcgcggatggagcaaattccaaaacagcagaagagctggattttcccgctaacgaactgcaggtgattgccatgcagcagcgtttccactatagcgatacgctcaagccctatgaagatctggttgaaatctggtttgatggtgaagtatcgccggatttttacggctggatttttccgaaaacagatcacatcgctatcggcacaggcactgaattcaggaaacatgacctgaaatcgctgcagaaacgatttattgaaaaaatcggcatcaccgacaagccatatctcgacgaggcagcaaaaattcccatgaagccgaggaaatcctttacccaggaccgtgcaatcctggttggtgacgcagccggcctggtaacaccagccaacggcgagggcatcttcttcgccatgagatcgggcaaactgggggccgaagctatgattgagcgcatcaggaacaacaagccattgcgctcctatgaaaaaaagttccgaaaactctactcgcagatcttcttcggtctccaggtgcttcagtcggtctactataaaaacgatcgtctgagggaaagttttgtcgctatctgccaggatgatgacgtccagcagatcaccttcgattcctacctctataaaaagatggtgcctgcgccctggagtgttcagatgaaaattttcggcaaaaacatctatcacctgacaaagggttcctga

SEQ ID NO: 1851 - protein, 379 aa, Prosthecochloris aestuarii DSM 271
MRYDVAVIGGGPSGAVAAAILAKAGLSTVLIERNLANVKPCGGAIPLGLIEEFNIPDPLVEKKLSKMSVRSPRGRKISMEMPNGYVGMVRRERFDSYLRDRAVRLGADIVEALVREIKPASNGHSIHLSKGHAPIEADFIIGADGANSKTAEELDFPANELQVIAMQQRFHYSDTLKPYEDLVEIWFDGEVSPDFYGWIFPKTDHIAIGTGTEFRKHDLKSLQKRFIEKIGITDKPYLDEAAKIPMKPRKSFTQDRAILVGDAAGLVTPANGEGIFFAMRSGKLGAEAMIERIRNNKPLRSYEKKFRKLYSQIFFGLQVLQSVYYKNDRLRESFVAICQDDDVQQITFDSYLYKKMVPAPWSVQMKIFGKNIYHLTKGS

SEQ ID NO: 1852 - DNA, 1209 bp, Erythrobacter sp. NAP1
  CDS (1)..(1209): transl_table=11
atgagcgagaaaatctacgatgtcgtcgtcgttggcggaggccccgctggcgcaaccgctgcaaacgatctcgcgcttgcgggccattcggtgctgctgatggagcgagggggacggatcaaaccgtgcggtggagccattccgccccgtgcgctcgacgatttcgacattccgcaatcgctactggtcgcgcgcgctcgttcagctcgcatgatcgcgccctcgggacgcgccgtcgatatgccggtcggcgagatcggctatgtcggcatggtcgaccgcgaggagttcgatgagtggctgcgtgagcgtgcccgtatgtccggcgtggagcgcctgaccgccactttcgacaaggtcgagcgcgacgagcatgcgcacccaatcgtaaccttcaggcgcgaacgcggcgggccaatcgaaaaggtccgtgcacgctgcatcatcggcgcagacggagcacgctcctccgttgccaagcagtgcctgcccgatgcggaacgggtcaaatgcgtcttcgcctatcacgagatcatcaagtcgccgcaaatgggcatgatcgcaaacgatgatgcctacgatccagaccgctgcgacgtcttctatcaaggcaagctctcgcccgatttctatgcgtgggtgttcccgcatggcgatacggctagcatcggcgtcggcagcgcaaacaaaggcttttcgttgcgcggcgcggtttccgaaatgcgcagtgagctcgacctcacccgctgcgagacgatccgccgcgaaggcgcgcccattcccttgaagccgttgaagcgctgggacaatggagcagacgtcatcgtcgcgggcgacgccgccggcattgtcgccccggcatcgggcgagggcatctattacgcgatggtcggcggacgctactccgctgaggcggcatcgcaaatgctcctgaccggcgaggccaaggcgctcaagacagcgcgcaaacgctttatgaaggatcacggccgcgttttctggatcctcgggatcatgcagtatttctggtattcgagcgacaagaggcgcgagcgtttcgtcgatatgtgcgacgacaaggacgtccagcacctcacctggcaggcctacatgaacaagaagctggtccggaaaaaaccgctcgcccatgtgaagatattcctgaaggacacagcgcacctgctcggcctcagaccggcgagttcgtaa

SEQ ID NO: 1853 - protein, 402 aa, Erythrobacter sp. NAP1
MSEKIYDVVVVGGGPAGATAANDLALAGHSVLLMERGGRIKPCGGAIPPRALDDFDIPQSLLVARARSARMIAPSGRAVDMPVGEIGYVGMVDREEFDEWLRERARMSGVERLTATFDKVERDEHAHPIVTFRRERGGPIEKVRARCIIGADGARSSVAKQCLPDAERVKCVFAYHEIIKSPQMGMIANDDAYDPDRCDVFYQGKLSPDFYAWVFPHGDTASIGVGSANKGFSLRGAVSEMRSELDLTRCETIRREGAPIPLKPLKRWDNGADVIVAGDAAGIVAPASGEGIYYAMVGGRYSAEAASQMLLTGEAKALKTARKRFMKDHGRVFWILGIMQYFWYSSDKRRERFVDMCDDKDVQHLTWQAYMNKKLVRKKPLAHVKIFLKDTAHLLGLRPASS

SEQ ID NO: 1854 - DNA, 1374 bp, Synechococcus sp. RS9917
  CDS (1)..(1374): transl_table=11
atgcttcgagttgccgtcgtcggtgggggtccttccggatcctgtgctgcagaaatcctcgccaaagccggcatccagacctggctcttcgagcgaaaactcgacaatgccaaaccctgcggcggggccatcccgttgtgcatggtggatgaattcgagattcctgatcacatcatcgaccgcaaggtgcggaacatgaaaatgatctccccctccaatcgagaggtggacatcaaactcgatccgctcggttacgaccagaacgcctacatcggcatgtgccggcgtgaggtgtttgatgccttcctgcgcaaccgggccgccgagctcggtaccaccctggtgaatggtctggtgcagaagatcgacaccggcaatcaacgccagggcccctacaccctccactacgccgactacagcagtggtggacccaccggggagatcaaaagtctggaggtggacctgatcattggtgccgacggtgctaattcccgtgtcgccaaagcgatggacgccggcgactacaacgtggcgatcgcctttcaggagcggatcaagcttcctgccgaagagatggcctattacgaggatctcgccgaaatgtatgtgggcaccgatgtgtcccctgatttctatgcttgggtgtttcccaagtacgaccatgtggcggtcggaaccggcaccatgcagcagaaccagtcgctgatcaaagggctgcagaaagggattcgggagcgagccagcaagcgcctcttcaagggtgaagtgatcaaggtggaagcccatccgatccccgaacatccccgtccccgccgggtggtgggacggatggccctggttggcgatgcggccggctatgtgaccaagagctctggtgaggggatctacttcgccgccaagagcggccgcatgtgcgcggaggcgattgtggaaatctcaggcaacggtgcccgcatccccaccgaaaaggagatcaaatccacctatttgaagcgctgggaccgcaaatatggcgccacctacgccgttctcgacattctgcagcgcattttctatcgcaatgacgctgcccgcgaagccttcgtggaaatgtgcgatgaccgcgacgtgcagaagctgaccttcgacagctacctctacaagcgggtggtgatgatgaatccctggcaacagatcaagctgacccttcgcaccctgggcagcctgctgcgcggcgaggccctggccccctccgactacgacccggttccctcagcggtgggacgatcggatggcgatttcctcgcccaggaagcggccgaagcgatcaaggcgaaggcccaggcccaggccagcgacagcagcgatcacaaagaaaccgccaccatcgcctga

SEQ ID NO: 1855 - protein, 457 aa, Synechococcus sp. RS9917
MLRVAVVGGGPSGSCAAEILAKAGIQTWLFERKLDNAKPCGGAIPLCMVDEFEIPDHIIDRKVRNMKMISPSNREVDIKLDPLGYDQNAYIGMCRREVFDAFLRNRAAELGTTLVNGLVQKIDTGNQRQGPYTLHYADYSSGGPTGEIKSLEVDLIIGADGANSRVAKAMDAGDYNVAIAFQERIKLPAEEMAYYEDLAEMYVGTDVSPDFYAWVFPKYDHVAVGTGTMQQNQSLIKGLQKGIRERASKRLFKGEVIKVEAHPIPEHPRPRRVVGRMALVGDAAGYVTKSSGEGIYFAAKSGRMCAEAIVEISGNGARIPTEKEIKSTYLKRWDRKYGATYAVLDILQRIFYRNDAAREAFVEMCDDRDVQKLTFDSYLYKRVVMMNPWQQIKLTLRTLGSLLRGEALAPSDYDPVPSAVGRSDGDFLAQEAAEAIKAKAQAQASDSSDHKETATIA

SEQ ID NO: 1856 - DNA, 1392 bp, Synechococcus sp. WH 5701
  CDS (1)..(1392): transl_table=11
gtggtgggtggcggcccgagcggttcctgcgtagccgaagtgctagcgaaagcaggaatcgaaacctggctcttcgaacgcaagcttgacaatgccaagccttgtggtggtgccattccactttgcatggtcgaagaattcgatcttcccgagtcgatcatcgatcgcaaggttcgcaacatgcgcatgatctccccctccaatcgtgaggtggatatccatcttgaaaacgaaaacgaatacattggtatgtgccgccgggagatccttgatggattcctgcgcaaccgtgccgctgagctcggggcccatctgatcaatggtctggttcagtcgatcgacaccggttccgcccgccagggtccctacaccctccactacgccgactactccggcggtggccccaccggcgagatcaagagcctcgaagtggatctgatcgtgggtgccgatggcgccaacagtcgcgtggccaaggccatggacgccggtgactacaacgtcgccatcgccttccaggagcgcatccgcctgcccaaggaggagatgagctactacgaggatctcgccgagatgtatgtcggcactgacgtctcccccgatttctatgcctgggtcttccccaagtacgaccacgtggccgtggggaccggaacgatgcagaagaaccaggcgctgatcaagagcctgcagaagggcatccgtaagcgggccagtgcccggcttctgcgcggtgaggtgatcaaggtggaagctcacccgattcccgaacatccaaggccccgtcgtgtcgtgggccgcatggccctggtgggggatgccgctggctacgtcaccaagagttcaggagaagggatctacttcgctgccaagagcggccgcatgtgcgccgaacagatcgttgccgccagtgcttccggagccaagatccccacggaagcggatctcaaggtctacatccgcaagtgggacaagcagtacggcgccacctacaaggtgctggaaatcctccagaacattttctatcgcaacgatgcggcccgcgaagcctttgtcgagatgtgcgacgacaaggacgtgcagcgtctcaccttcgacagctatctctacaagcgggtggtgatgatgaatccctggcagcagatcaagctcaccctgctcaccctcggtgccgtgctgcgcggcaatgccctggctccacagtcgtacaaacctgtgcccagcgtggtccgcagccccgaggaaatggaagcctggctggccaccctggcccaggaatcagagcagcagcagggcgtgggcaaagccaggcgagaacctctggcccaacccgtggtggccaaccctcaggtgagcgaggagcgtgaacccgcgctggccgccaagggctga

SEQ ID NO: 1857 - protein, 463 aa, Synechococcus sp. WH 5701
MVGGGPSGSCVAEVLAKAGIETWLFERKLDNAKPCGGAIPLCMVEEFDLPESIIDRKVRNMRMISPSNREVDIHLENENEYIGMCRREILDGFLRNRAAELGAHLINGLVQSIDTGSARQGPYTLHYADYSGGGPTGEIKSLEVDLIVGADGANSRVAKAMDAGDYNVAIAFQERIRLPKEEMSYYEDLAEMYVGTDVSPDFYAWVFPKYDHVAVGTGTMQKNQALIKSLQKGIRKRASARLLRGEVIKVEAHPIPEHPRPRRVVGRMALVGDAAGYVTKSSGEGIYFAAKSGRMCAEQIVAASASGAKIPTEADLKVYIRKWDKQYGATYKVLEILQNIFYRNDAAREAFVEMCDDKDVQRLTFDSYLYKRVVMMNPWQQIKLTLLTLGAVLRGNALAPQSYKPVPSVVRSPEEMEAWLATLAQESEQQQGVGKARREPLAQPVVANPQVSEEREPALAAKG

SEQ ID NO: 1858 - DNA, 1374 bp, Synechococcus sp. WH 7805
  CDS (1)..(1374): transl_table=11
atgctgagagttgccgtcgtcggaggtggtccgagcggatcctgcgcagctgaaattcttgccaaggctggcatcagcacctggttgtttgagcgaaagctcgacaatgccaaaccctgtgggggagccattccgctttgcatggtcgaggaattcgatcttccggagtcgattatcgaccgcaaggttcgaaacatgaagatgatatccccctccaacaaggaggttgatattcagcttgatccactcgggtacgacgataatgcctatatcggcatgtgccgccgagaggtcttcgatgctttcatgcgcaaccgggctgctgagctcggcacaaccctgatcaacggtcttgtccagaagatcgacacgggcagcgctcgtcaaggtccgtacacccttcattacgccgactacagctctggtggaccaaccggtgagttaaaaaccctcgaggtggatttgatcattggcgccgacggggctaattcccgtgtcgccaaagccatggatgctggcgattacaacgtggccatcgccttccaggaacgcatcaagcttcctcctgaagagatgacctattacgaggatctcgccgagatgtacgtcggaaccgacgtttctcccgatttctacgcatgggtttttccgaaatacgaccacgtggccgttggaaccgggaccatgcaacagaatcagtccctaatcaagggattgcaaaaaggaattcgtgagcgggcccgcaaacgcctgttcaagggcgaagtgatcaaagttgaagctcatccgattccggaacatcccagaccccgtcgcgttgttggtcggatggccctggttggtgacgccgccggttatgtgaccaagagctccggtgaaggcatctacttcgcagcgaaaagtggccggatgtgtgccgaagccatcgttgagatttcagcgaacggcagccgcgtacccacggaaaaagagatcaaatccacgtacctcaagcgttgggacagaaagtacggagccacttacgccgttctcgacattctccagcgaattttctaccggaatgacgcggcgcgagaggcattcgtggaaatgtgcgatgaccgagatgtacagaaactcacctttgacagctatctgtataagagggtggtgatgatgaatccgtggcaacaggtgaaactcaccctgcgcacccttggaagtttgcttcggggtgaggccctcgccccagctggttacgacgccgttccttccgctgtgggacgttcggagggagattttctagcggatgaagcggctcaggccatcaaggctcaggttcacactgaatcgtcaacagagacgaaggaacgaccgaccgtcacaactgggtga

SEQ ID NO: 1859 - protein, 457 aa, Synechococcus sp. WH 7805
MLRVAVVGGGPSGSCAAEILAKAGISTWLFERKLDNAKPCGGAIPLCMVEEFDLPESIIDRKVRNMKMISPSNKEVDIQLDPLGYDDNAYIGMCRREVFDAFMRNRAAELGTTLINGLVQKIDTGSARQGPYTLHYADYSSGGPTGELKTLEVDLIIGADGANSRVAKAMDAGDYNVAIAFQERIKLPPEEMTYYEDLAEMYVGTDVSPDFYAWVFPKYDHVAVGTGTMQQNQSLIKGLQKGIRERARKRLFKGEVIKVEAHPIPEHPRPRRVVGRMALVGDAAGYVTKSSGEGIYFAAKSGRMCAEAIVEISANGSRVPTEKEIKSTYLKRWDRKYGATYAVLDILQRIFYRNDAAREAFVEMCDDRDVQKLTFDSYLYKRVVMMNPWQQVKLTLRTLGSLLRGEALAPAGYDAVPSAVGRSEGDFLADEAAQAIKAQVHTESSTETKERPTVTTG

SEQ ID NO: 1860 - DNA, 1356 bp, Synechococcus sp. RS9916
  CDS (1)..(1356): transl_table=11
atgctgcgagttgccgtcgtcgggggtggtccgagtggatcctgcgccgccgagattcttgccaaagctggcattcaaacctggttgtttgagcgcaagctcgacaacgccaagccctgtggtggtgcaattccgttgtgcatggtcgaagaattcgacctgcccgacgagatcatcgaccgcaaagtgcggaacatgaagatgatctccccctccaatcgtgaggtggacatcaagcttgatcccctcggctacgacgacaacgcctacatcggcatgtgtcgccgtgaggtgtttgatgcctttctcaggaatcgcgcagcagacctcggcaccaccctggtgaatggtctggttcagaaaattgacaccggcagcaaccgccaggggccttacatcctccattacgccgattacagcggcggcggtcccaccggagaacagaagtccctggaagtcgatctgatcattggcgccgacggtgccaattcccgggtcgctaaggccatggacgctggcgattacaacgtggcgattgccttccaggagcgcatcaagcttcccgcggaggagatgacctactacgaagacttggccgaaatgtatgtgggcactgatgtgtcccctgacttctacgcctgggttttccccaagtacgaccacgtcgctgtcggcaccggcacgatgcagcagaaccagtccttgatcaaaggcctgcaaaaaggtatccgtgagcgcgccaacaaacgcctcttcaaaggtgaggtgatcaaggtcgaagcacatccgatccccgagcatccccgtccccgcagggtcgttggtcgcatggcactcgtgggagatgccgctggttacgtcactaagagctctggcgaaggcatctatttcgccgccaagagcggtcggatgtgcgcagaggccattgttgaaatctccaacaacggtcagcgcattcccactgagaaagagatcaagtcgacctacctcaagcgctgggacaagaaatacggcgccacttatgccgtcctcgacatcctccagcgcatcttctatcgcaacgatgcagcccgcgaggccttcgtggagatgtgcgatgacatggatgtgcagaagctgacctttgacagctatctgtacaagcgggtggtgatgatgaacccctggcagcagatcaagctcaccctgcgcaccttgggaagcctgctgcgtggagaagccctggctccgtctgaatacggtcctgtgccttctgcagttggacgctccgatggggatttcctcgccgaggaggccgcccaagcgatccgcgcccaggcgaaagacaaagacaaagaaactgcaggagtgaactaa

SEQ ID NO: 1861 - protein, 451 aa, Synechococcus sp. RS9916
MLRVAVVGGGPSGSCAAEILAKAGIQTWLFERKLDNAKPCGGAIPLCMVEEFDLPDEIIDRKVRNMKMISPSNREVDIKLDPLGYDDNAYIGMCRREVFDAFLRNRAADLGTTLVNGLVQKIDTGSNRQGPYILHYADYSGGGPTGEQKSLEVDLIIGADGANSRVAKAMDAGDYNVAIAFQERIKLPAEEMTYYEDLAEMYVGTDVSPDFYAWVFPKYDHVAVGTGTMQQNQSLIKGLQKGIRERANKRLFKGEVIKVEAHPIPEHPRPRRVVGRMALVGDAAGYVTKSSGEGIYFAAKSGRMCAEAIVEISNNGQRIPTEKEIKSTYLKRWDKKYGATYAVLDILQRIFYRNDAAREAFVEMCDDMDVQKLTFDSYLYKRVVMMNPWQQIKLTLRTLGSLLRGEALAPSEYGPVPSAVGRSDGDFLAEEAAQAIRAQAKDKDKETAGVN

SEQ ID NO: 1862 - DNA, 1194 bp, marine gamma proteobacterium HTCC2080
  CDS (1)..(1194): transl_table=11
atgtccaatacagattatgacgtagtggttatcggcggaggtccatcaggcgctagcgctgcagagcacttagcaaaacaaaactatcgtgtactcctgctagaacgggcgtttcgaataaagccttgtggaggcgctattccaccctgcttaatcgacgagtttgaaatacctgaagatcttttagtcgcccgcatacgctcggcacgaatgatatcgcccaccgaaaaaaaggtggacatgcctgtcggtgaaacttttgtgggtatggttgatcgcgatgtctttgacccttggttgcgtgagcgagcagtcacagcgggtgccgaactccgtatcggcgctttcaaagcactgcactacgatgacgacggcgtcttacacattgattttcagagcaaagaagcagggcttgagaacgtaagcgttaccactcgcagtgtgattggtgccgatggcgcacgctcgaacgtagcccggcaggccattccctgtagtaaaaacgcgcgatgggttctcgcctatcacgaaatcgtggaggcacctgccgcaaacgatgagctttatgatggtgatcgctgcgatgtgtggtaccagggtgacctttctccagatttttatgcttgggtcttcccccatggtcgtcacgccagcattggtgttggcagtgagaccgatggcttctcagcgcggaactcggtggcgaccttacgagctaaaacaggactagatacctgccagacagttcgccgagagggtgcaccgataccaatgaagcctctaaaacgatgggacgacggaaaaggggttttattatctggcgatgcagccggtgtcgttgcaccagcatcaggggaaggcatttattacgccatgctttgtggcaaaattgcagcgcaaactattgatgaatttttgcaggtgggcgatgcccgaattcttggtgacgcacgccgccaatttatgaagctgcacggcaaaactttctgggcgctgggtctgctgcaacgtatttggtaccgatcggacaagcgccgtgagaaattcgtgagcatgtgtcaggacaaagatgtgcaagagctgacttggcaggcctacactcaaaaacagctggttaaacgacgtaaaactgcgcacttaagggttgccctgaaggacattggtaatcttataggcctcacgcgagcgtcctaa

SEQ ID NO: 1863 - protein, 397 aa, marine gamma proteobacterium HTCC2080
MSNTDYDVVVIGGGPSGASAAEHLAKQNYRVLLLERAFRIKPCGGAIPPCLIDEFEIPEDLLVARIRSARMISPTEKKVDMPVGETFVGMVDRDVFDPWLRERAVTAGAELRIGAFKALHYDDDGVLHIDFQSKEAGLENVSVTTRSVIGADGARSNVARQAIPCSKNARWVLAYHEIVEAPAANDELYDGDRCDVWYQGDLSPDFYAWVFPHGRHASIGVGSETDGFSARNSVATLRAKTGLDTCQTVRREGAPIPMKPLKRWDDGKGVLLSGDAAGVVAPASGEGIYYAMLCGKIAAQTIDEFLQVGDARILGDARRQFMKLHGKTFWALGLLQRIWYRSDKRREKFVSMCQDKDVQELTWQAYTQKQLVKRRKTAHLRVALKDIGNLIGLTRAS

SEQ ID NO: 1864 - DNA, 1218 bp, Cyanothece sp. PCC 8801
  CDS (1)..(1218): transl_table=11
gtgttaagggtcgccgttgttggttcaggaccggctgggtcttccgcagccgaaacattagtaaaagctggaatagaaacctatttatttgagcgtaaattagacaacgctaaaccctgcggtggtgctattcccctgtgtatggtcagtgaatttgacctacccccagaaattatcgatcgccgggtgagaaaaatgaaaatgatctccccgtctaacgtcgctgttgatatcaacctagataacgaagatgaatatattgggatgtgtcgtcgggaagtccttgatgggtttttacgcgatcgcgcagccaaattaggggcaaatttaatcaatgggacagtctataaactcgatattcccaccaatagcaccgacccctacactctccattatgccgaccattccaacggcaacgcccaaggggaaatgaaaaccctcaaggtagatgtcgtgatcggggctgatggggctaattcccgcattgccaaagccattgacgcgggagattataactatgcgatcgccttccaagaacgcatccgtctcccccaagataaaatggcctactacgaagatctcgccgagatgtacgtcggtactgatgtttcccctgacttctacgcttgggtattccctaaatacgaccatgtagccgtcggtacaggcacgatgaaggtcaataaagccctcattaaagacctacaggcaggaatccgtacccgtgcagcccatcgcctagaagggggcgaaatcatcaaagtggaagcccatcccatccctgaacatccccgtccccgtcgcgtggtcggtcgtgtcgcgttggtaggagacgcagccggaaccgttaccaagtcctctggagagggaatctattttgcggcgaaatccgcccgtatgtgcgcggaaaccattgtagaaatgagcaacgccggtcagcgcatccccaccgaagacgacttaaaagtgtacctcaaacggtgggataagaagtatggtatgacctacttagttctcgatatcctgcaacgggtattctatcgtactgatgcttcccgtgaggcctttgtggaaatgtgcgccgataaggatgtgcaacggatgacctttgatagttatctctacaaaactgttgtacccgctaatcctttagtccagatgaaaattaccgctaaaaccatcggtagtttgctacggggtcatgctttagccccttaa

SEQ ID NO: 1865 - protein, 405 aa, Cyanothece sp. PCC 8801
MLRVAVVGSGPAGSSAAETLVKAGIETYLFERKLDNAKPCGGAIPLCMVSEFDLPPEIIDRRVRKMKMISPSNVAVDINLDNEDEYIGMCRREVLDGFLRDRAAKLGANLINGTVYKLDIPTNSTDPYTLHYADHSNGNAQGEMKTLKVDVVIGADGANSRIAKAIDAGDYNYAIAFQERIRLPQDKMAYYEDLAEMYVGTDVSPDFYAWVFPKYDHVAVGTGTMKVNKALIKDLQAGIRTRAAHRLEGGEIIKVEAHPIPEHPRPRRVVGRVALVGDAAGTVTKSSGEGIYFAAKSARMCAETIVEMSNAGQRIPTEDDLKVYLKRWDKKYGMTYLVLDILQRVFYRTDASREAFVEMCADKDVQRMTFDSYLYKTVVPANPLVQMKITAKTIGSLLRGHALAP

SEQ ID NO: 1866 - DNA, 1218 bp, Cyanothece sp. PCC 7424
  CDS (1)..(1218): transl_table=11
gtgttaagggttgctgttgttggttcaggtccggctggctcctctgcggcggaaacactagccaaagctggaatagaaacgtatttgtttgaacgcaagctagacaatgcgaagccttgcggtggggctattcccctgtgcatggtgagtgaatttgacctaccgccagaaattatcgatcgacgggtgagaaaaatgaaaatgatctccccctccaatatcgaagtcgatattaatttagacaaccaagaagaatatattggaatgtgccgtcgggaagttctcgatgggtttatgcggaaccgggcagccaaattaggggcaaatttaattaatggtacggtttatcagttagatattcccaacaatagcaccgatccttatgtccttcattatgccgatcactccaacggcgaggccaaagggatcatgaaaaccctaaaagttgatgtggttatcggtgcagacggggctaactctcgcattgctaaggccattgatgcaggggactataattatgcgatcgctttccaagagcgtattcggttgcccgaagataaaatgacatattacaacgacttagcagaaatgtatgtcggtaaagatgtctctcctgacttttatgcctgggtattccccaaatatgaccatgttgccgtcggaaccggaaccatgaaggttaacaaggcaattatcaaagatttacaagccggtattcgtacccgtgccgcccggaaattagaagggggacaaattatcaaagttgaggcgcatcccatcccagaacatccccgtcctcgtcgggttgtgggtagagtcgctttagtgggagatgctgccggtacggtaacaaaatcttctggagaagggatctattttgccgctaagtctgctcggatgtgtgcggaaaccattatagaaacctctaacgccggacaacgcattcctacagaagatgacctcaagctttatctcaagcgttgggataaaaaatatggtatgacttatctggtgctagatctcctgcaacgagtcttctatcggagtgatgctagccgggaagcctttgtagaaatgtgttccgataaggatgttcaacggttaacttttgatagttatttatataaaaccgttgttcctgctaaccccttaattcaaatgaagattactgcaaaaactctcggtagtcttttaagaggtcatgctttagccccttaa

SEQ ID NO: 1867 - protein, 405 aa, Cyanothece sp. PCC 7424
MLRVAVVGSGPAGSSAAETLAKAGIETYLFERKLDNAKPCGGAIPLCMVSEFDLPPEIIDRRVRKMKMISPSNIEVDINLDNQEEYIGMCRREVLDGFMRNRAAKLGANLINGTVYQLDIPNNSTDPYVLHYADHSNGEAKGIMKTLKVDVVIGADGANSRIAKAIDAGDYNYAIAFQERIRLPEDKMTYYNDLAEMYVGKDVSPDFYAWVFPKYDHVAVGTGTMKVNKAIIKDLQAGIRTRAARKLEGGQIIKVEAHPIPEHPRPRRVVGRVALVGDAAGTVTKSSGEGIYFAAKSARMCAETIIETSNAGQRIPTEDDLKLYLKRWDKKYGMTYLVLDLLQRVFYRSDASREAFVEMCSDKDVQRLTFDSYLYKTVVPANPLIQMKITAKTLGSLLRGHALAP

SEQ ID NO: 1868 - DNA, 1344 bp, Vitis vinifera
  CDS (1)..(1344)
  misc_feature (267)..(267): m is a or c
  misc_feature (555)..(555): y is t or c
  misc_feature (567)..(567): y is t or c
  misc_feature (576)..(576): y is t or c
  misc_feature (624)..(624): y is t or c
  misc_feature (666)..(666): y is t or c
atggcctccatttccctcaaaaccttcgtcggactccgtcagtcctcatcggacacttacaattccggccatgttttccccgtcaagcatcttcctgctcaacccgcttcccggggtctccgcattgttgctggtaagttcagccccaaggtcactggccggaatcttagagtcgctgtcgtcggaggtggtccggccggagggtctgctgctgagacactggccaagggcggcatcgagacgttcttgatagagcggaagctcgamaactgcaagccttgtggcggcgccatacctctgtgcatggtcggagagttcgatcttcctttggacatcatcgaccggcgtgtcaccaagatgaagatgatctctccctcgaatgtcgccgtcgacatcggccaaacgttgaagccccacgagtacatcggaatggttcgccgcgaagtcctcgattcctatctgcgggagcgtgcttccgcctccggagccaccgtcatcaacggtctcttccttaagatggacgcccccaaaggcgccaccgccccttacgtcctycattacaccggytacgacagyaagaccggtggagtgggcgagcggcgcacgttggaggtggacgccgaytacgcgattgcctttcaggagagaattaaaatcccggacgayaaaatggtgtactacgagaatttggctgaaatgtacgtcggtgacgacgtgtcgccggacttttacgggtgggtgttcccgaaatgcgaccacgtagccgtaggcaccggcacggtgacccacaaatcagacattaagaagtttcagctagctactcggctaagagccaaggagaagatactgggtggaaagatcatccgtgtggaggcccaccctattcctgaacaccctcgccctcgcaggttagcggggagagttgctctggtgggagatgcagcagggtatgtcaccaaatgctccggtgaaggtatctactttgcagcaaagagtggtagaatgtgtgcagaggcgatagtggaggggtcagagaatgggaagaggatggtggacgagggagacctaaggaagtatttggagaagtgggataaaacctattggccaacttacaaggtgttggatgtgctgcaaaaggtgttctatcgatcaaatccagccagggaggcctttgtggagatgtgcgcggatgagtatgtgcagaagatgacctttgacagctatttgtataagaaggtggtacccgggaacccattggaggatttgaagctggctgtgaatactatcgggagcttggtgagggccaatgctcttaggagggagatggataagatgagcgtatga

SEQ ID NO: 1869 - protein, 447 aa, Vitis vinifera
  misc_feature (89)..(89): The Xaa at location 89 stands for Asp, or Glu.
MASISLKTFVGLRQSSSDTYNSGHVFPVKHLPAQPASRGLRIVAGKFSPKVTGRNLRVAVVGGGPAGGSAAETLAKGGIETFLIERKLXNCKPCGGAIPLCMVGEFDLPLDIIDRRVTKMKMISPSNVAVDIGQTLKPHEYIGMVRREVLDSYLRERASASGATVINGLFLKMDAPKGATAPYVLHYTGYDSKTGGVGERRTLEVDADYAIAFQERIKIPDDKMVYYENLAEMYVGDDVSPDFYGWVFPKCDHVAVGTGTVTHKSDIKKFQLATRLRAKEKILGGKIIRVEAHPIPEHPRPRRLAGRVALVGDAAGYVTKCSGEGIYFAAKSGRMCAEAIVEGSENGKRMVDEGDLRKYLEKWDKTYWPTYKVLDVLQKVFYRSNPAREAFVEMCADEYVQKMTFDSYLYKKVVPGNPLEDLKLAVNTIGSLVRANALRREMDKMSV

SEQ ID NO: 1870 - DNA, 1404 bp, Vitis vinifera
  CDS (1)..(1404)
atggcctccatttccctcaaaaccttcgtcggactccgtcagtcctcatcggacacttacaattccggccatgttttccccgtcaagcatcttcctgctcaacccgcttcccggggtctccgcattgttgctggtaagttcagccccaaggtcactggccggaatcttagagtcgctgtcgtcggaggtggtccggccggagggtctgctgctgagacactggccaagggcggcatcgagacgttcttgatagagcggaagctcgacaactgcaagccttgtggcggcgccatacctctgtgcatggtcggagagttcgatcttcctttggacatcatcgaccggcgtgtcaccaagatgaagatgatctctccctcgaatgtcgccgtcgacatcggccaaacgttgaagccccacgagtacatcggaatggttcgccgcgaagtcctcgattcctatctgcgggagcgtgcttccgcctccggagccaccgtcatcaacggtctcttccttaagatggacgcccccaaaggcgccaccgccccttacgtcctccactacaccggctacgacagcaagaccggtggagtgggcgagcggcgcacgttggaggtggacgccgtcatcggcgctgacggtgccaactcgcgggtggcgaagttcatcggcgccggtgattacgactacgcgattgcctttcaggagagaattaaaatcccggacgacaaaatggtgtactacgagaatttggctgaaatgtacgtcggtgacgacgtgtcgccggacttttacgggtgggtgttcccgaaatgcgaccacgtagccgtaggcaccggcacggtgacccacaaatcagacattaagaagtttcagctagctactcggctaagagccaaggagaagatactgggtggaaagatcatccgtgtggaggcccaccctattcctgaacaccctcgccctcgcaggttagcggggagagttgctctggtgggagatgcagcagggtatgtcaccaaatgctccggtgaaggtatctactttgcagcaaagagtggtagaatgtgtgcagaggcgatagtggaggggtcagagaatgggaagaggatggtggacgagggagacctaaggaagtatttggagaagtgggataaaacctattggccaacttacaaggtgttggatgtgctgcaaaaggtgttctatcgatcaaatccagccagggaggcctttgtggagatgtgcgcggatgagtatgtgcagaagatgacctttgacagctatttgtataagaaggtggtacccgggaacccattggaggatttgaagctggctgtgaatactatcgggagcttggtgagggccaatgctcttaggagggagatggataagatgagcgtatga

SEQ ID NO: 1871 - protein, 467 aa, Vitis vinifera
MASISLKTFVGLRQSSSDTYNSGHVFPVKHLPAQPASRGLRIVAGKFSPKVTGRNLRVAVVGGGPAGGSAAETLAKGGIETFLIERKLDNCKPCGGAIPLCMVGEFDLPLDIIDRRVTKMKMISPSNVAVDIGQTLKPHEYIGMVRREVLDSYLRERASASGATVINGLFLKMDAPKGATAPYVLHYTGYDSKTGGVGERRTLEVDAVIGADGANSRVAKFIGAGDYDYAIAFQERIKIPDDKMVYYENLAEMYVGDDVSPDFYGWVFPKCDHVAVGTGTVTHKSDIKKFQLATRLRAKEKILGGKIIRVEAHPIPEHPRPRRLAGRVALVGDAAGYVTKCSGEGIYFAAKSGRMCAEAIVEGSENGKRMVDEGDLRKYLEKWDKTYWPTYKVLDVLQKVFYRSNPAREAFVEMCADEYVQKMTFDSYLYKKVVPGNPLEDLKLAVNTIGSLVRANALRREMDKMSV

SEQ ID NO: 1872 - DNA, 1401 bp, Vitis vinifera
  CDS (1)..(1401)
atggcagctgctactcctctttacctgcaaaacaaaccccaccaccatcatcatcatcatctatcttctctcttttcttcttcgcttcctttctccatcaaaacaaatcctttctccacctctaaaccctcctctctcatcatttcttctatatctaatccacctctctctggccgtaagctccgagccgccgtcatcggaggcggccccgcaggatcctctgcggccgagactctcgctgccggcggcatcgagaccttcctctttgaacgcagccccgcctcctccaagccctgcggcggcgccatccccctctgcatgctcgaagagttctccattccgccggagctcgtagaccggagagtcacccgcatgaagatcatctccccctccaacctcaccgtcgacttcggcaaaaccctcaagcccaacgagtacatcgccatgcttcgccgcgaggtcctcgactcattcctccgccgccgagccgagtccgccggcgccaccgcaatcaccgccctcgtcacctccctcgacctcccctcctccccggcatcaccgtacgtcatccactacaacgccggcggatcccgccactccctggccgtcgacgtggtgatcggagccgacggggccaacagccgtgtcgcgaaatccatcaaggccggcgactacagctgtgctatcgccttccaagaacgaatcaaactcccggaggagaaaatggagtattaccaagacctagcggagatgtacgtaggaaacgacgtgtcgccggatttctacgcctgggtattcccgaaatgcgaccatgtggcagtgggcacgggcacggtgtgctcaaagcagaatattaagttgtaccaaagaggaatccgagaaagggttgaacccaagatcagcggaggaaaagtgatcaaagtagaggcccatcccataccagagcacccacgccctgtccgtatccgaggccgcgtggccttagtgggggacgccgcagggtacgtgacaaagtgctcgggcgagggcatatattttgctgcaaagtcgggaaaaatgtgcgcagaggccatattaaaagcctccgaaggagggttgaggatgataagcgaggaggatttaaggagggagtatctgaaggagtgggatgggaagtacttggtgacatacaggttgctggatttgttgcatagggtgttctacgggagcaatgcggcgagggaggcgttggtggagctgtgtgggaacgaatatgtgcagaggatgacgtttgagagctatttgtacaagaggttggctgagggggatgggtgggaggatgctaagatggttttcaatacatttgggagtttgataaggtgtaagattgtggggagagacgtacaggctttgagggtgtga

SEQ ID NO: 1873 - protein, 466 aa, Vitis vinifera
MAAATPLYLQNKPHHHHHHHLSSLFSSSLPFSIKTNPFSTSKPSSLIISSISNPPLSGRKLRAAVIGGGPAGSSAAETLAAGGIETFLFERSPASSKPCGGAIPLCMLEEFSIPPELVDRRVTRMKIISPSNLTVDFGKTLKPNEYIAMLRREVLDSFLRRRAESAGATAITALVTSLDLPSSPASPYVIHYNAGGSRHSLAVDVVIGADGANSRVAKSIKAGDYSCAIAFQERIKLPEEKMEYYQDLAEMYVGNDVSPDFYAWVFPKCDHVAVGTGTVCSKQNIKLYQRGIRERVEPKISGGKVIKVEAHPIPEHPRPVRIRGRVALVGDAAGYVTKCSGEGIYFAAKSGKMCAEAILKASEGGLRMISEEDLRREYLKEWDGKYLVTYRLLDLLHRVFYGSNAAREALVELCGNEYVQRMTFESYLYKRLAEGDGWEDAKMVFNTFGSLIRCKIVGRDVQALRV

SEQ ID NO: 1874 - DNA, 1413 bp, Populus trichocarpa
  CDS (1)..(1413)
atggcttcttccattgtcttcaaatccttcaccggactccggcactcctcccaggaacatcccaaagtactccattcccacacaaaccccatatcctctttctcataccgccgctttcgaatcacagccagcaagtctagtccgaagctccaaaaccgcaacctccgagtagccgtcatcggcggcggtcctgccggtggtgccgctgcagaaacattagccaaaggaggcattgaaacatacctcatcgaacgaaagctggacaactgcaagccatgcggtggtgccatccctttgtgcatggtgggtgagttcgacctcccactggacattatagatcggagagtgaccaagatgaagatgatctctccttctaatgtggccgttgatattggacgaactttgaagcctcacgagtacattggcatggtgaggcgtgaggtgcttgatgcttacttgagagaaagagcatcaacgaatggggctaaagtgataaatggtttgttcttgaaaatggacattcctaaaaaaggtagtgaaaatattaattcaccctatgtcttgcattatactgagtatgatgggaagaaaggtggaactggagagaggaaaactttggaggttgatgtggttattggagctgatggggcaaattcgcgtgttgccaagtccattgatgctggtgattatgactacgctattgcttttcaggagagaataaaaatccccagtgataaaatggtgtactatgagaatttagctgagatgtatgttggtgacgatgtatcaccagatttctacgggtgggtcttccccaaatgtgaccatgttgctgttggaactggcacggtgacacacaaaggtgacataaaaaaatttcaactagccacaagaaacagagccagggacaagatccttggtggtaagattatacgagtggaagcacacccaataccagaacacccccggcctcgcagattatcagggagggtagcgttagtgggtgatgcagctgggtatgtaaccaaatgctccggtgagggtatctatttcgcagctaaaagtggtagaatgtgcgcggaggcaatagttgagggttctggaaatggcaagaggatggtggatgaaagtgacctgaggaaatatctggagaaatgggacaagacatactggcctacatacaaggtgttggatgtgttgcagaaagttttctatagatcaaacccagctagagaagcttttgtggagatgtgcgcggatgagtacgtgcaaaagatgacatttgatagctatttgtacaagagggtagtgcctgggaaccccttggaggatttgaagttagctgtgaataccattgggagcttggtgagggctaacgcactcagaagggaaatggacaagcttagtgcatga

SEQ ID NO: 1875 - protein, 470 aa, Populus trichocarpa
MASSIVFKSFTGLRHSSQEHPKVLHSHTNPISSFSYRRFRITASKSSPKLQNRNLRVAVIGGGPAGGAAAETLAKGGIETYLIERKLDNCKPCGGAIPLCMVGEFDLPLDIIDRRVTKMKMISPSNVAVDIGRTLKPHEYIGMVRREVLDAYLRERASTNGAKVINGLFLKMDIPKKGSENINSPYVLHYTEYDGKKGGTGERKTLEVDVVIGADGANSRVAKSIDAGDYDYAIAFQERIKIPSDKMVYYENLAEMYVGDDVSPDFYGWVFPKCDHVAVGTGTVTHKGDIKKFQLATRNRARDKILGGKIIRVEAHPIPEHPRPRRLSGRVALVGDAAGYVTKCSGEGIYFAAKSGRMCAEAIVEGSGNGKRMVDESDLRKYLEKWDKTYWPTYKVLDVLQKVFYRSNPAREAFVEMCADEYVQKMTFDSYLYKRVVPGNPLEDLKLAVNTIGSLVRANALRREMDKLSA

SEQ ID NO: 1876 - DNA, 1401 bp, Mesembryanthemum crystallinum
  CDS (1)..(1401)
atggcgtcatcaatggcgttcaagcccttcactggtctccgccaatcaaccctcaccaccccagaaacaacaaccaccacccccatcacattcaccaaactcccctcctcaaaaaccgccattagagccgccatcaccagccccaagctcaccggccggaacctcagagtcgccgtcatcggcggcggcccagccggcggctcagcagccgaaacgctagccaaaaacggcatcgagacgttcctcatcgagcggaaactcgacaactgcaagccctgtggtggcgcaattccgctctgcatggtgggagaattcgacctcccacttgacatcattgaccggagagtgacgaagatgaagatgatttctccttcgaatgtggcggttgatattgggcgtactttgaagccgcatgaatatattgggatggtgaggagagaggttttggatgagtatttgagggaaagagctgctgggtttggtgcaacggtaataaatgggttgtttttgaagatggatttgcctgaggggaaggatgggagctataagttgcattatacgggttatgatgcgaaatcgggtggggctggggagaggaggatgcttgaggttgatgctgttattggagctgatggggcgaattcgagggttgcgaaggcgattggtgctggggattatgagtatgctattgcttttcaggaaaggatcaagatacccgatgcaaagatgcaatactatgaggacctagcagagatgtatgttggagacgatgtatccccggacttctacgggtgggtattccccaaatgtgaccatgtggcggtgggtacagggacagtgacccacaaatcagacatcaagaagttccagctagcaacccgaacccgagccatggacaagatccagggtggaaagatcatccgggtagaggctcaccctatcccagagcacccaaggccaaagagggtgcttgatcgggttgcattggttggggacgcggctgggtatgtgaccaagtgctcaggtgaggggatctactttgcggccaagagtgggcggatgtgcgcagaggcgattgtggagggatccgccaatgggaagaggatggtggacgagtcggacctgaggaagtacttggagaagtgggacaagaagtactggcctacctacaaggtccttgatattctgcagaaggtgttctaccgctccaacccggcaagagaggcgttcgtggagatgtgtgcggacgagtatgtgcagaagatgacctttgacagctacttgtataagacagttgtgcccgggaacccgttggatgacttgaagctcgcggttaggaccgtggggagccttgtccgggcgtacgggttgaggagagaaatggagaagattgaggcttag

SEQ ID NO: 1877 - protein, 466 aa, Mesembryanthemum crystallinum
MASSMAFKPFTGLRQSTLTTPETTTTTPITFTKLPSSKTAIRAAITSPKLTGRNLRVAVIGGGPAGGSAAETLAKNGIETFLIERKLDNCKPCGGAIPLCMVGEFDLPLDIIDRRVTKMKMISPSNVAVDIGRTLKPHEYIGMVRREVLDEYLRERAAGFGATVINGLFLKMDLPEGKDGSYKLHYTGYDAKSGGAGERRMLEVDAVIGADGANSRVAKAIGAGDYEYAIAFQERIKIPDAKMQYYEDLAEMYVGDDVSPDFYGWVFPKCDHVAVGTGTVTHKSDIKKFQLATRTRAMDKIQGGKIIRVEAHPIPEHPRPKRVLDRVALVGDAAGYVTKCSGEGIYFAAKSGRMCAEAIVEGSANGKRMVDESDLRKYLEKWDKKYWPTYKVLDILQKVFYRSNPAREAFVEMCADEYVQKMTFDSYLYKTVVPGNPLDDLKLAVRTVGSLVRAYGLRREMEKIEA

SEQ ID NO: 1878 - DNA, 1389 bp, Ostreococcus tauri
  CDS (1)..(1389)
atggtgagacgcagccacgcccggacgagatcgtatcagcgttgctgcaggcgtcatgttgagcgcaaaatttcaagcttctctgagtggcatcaggccgcctcgcgaggtttggtctatgcgtctggcgcgcctctcactgatcgaaaattgcgcgttgcggttatcggtggtggccctgccggagcgtgtgccgctgaaaccctcgccaagggaggttgcgaaacgtacttgatcgaacgcaaaatggacaactgcaagccctgtggtggtgccattccgttgtgcatggtcggcgagttcgatttgccggaagagatcattgatcgcaaggtcacgaagatgaagatgatttcgccgtcgaaccgtgccgtggacgttggtcaaactctgaacgacaaggagtacatcggtatgtgtcgccgggaagtcatggatgacttcttgcgcaagcgcgcaaacagccttggagcgaacctcgtcaacggcttgttcatgaagattgaagatcccggccaagggaatggacctattctggttcagtacaacgattacgaagaagaaagtaagactggcgttccgaaaactctcgaggtggacgtcgtgattggtgcggatggggccaactcgcgagtggccaagtgcatcgatgccggcgaatacgattacgccatcgctttccaagagcgtatcaaaattccggatgaaaagatggaatactacaaggacctcgcagaaatgtacgttggtgatgacgtgtcccctgatttctatggttgggtatttccgaagtacgaccacgttgccgtcggaaccggtaccgtcgtgaacaagacggccatcaagcagtatcagaccgccatgagaaacagagcggaagagaagtgtgagggtggtaaaatcattcgtgtggaggcgcaccccattccggaacatccgagacctaacagagtgaagggccgtgttgcactggttggtgacgcggcgggatacgtcaccaagtgcagtggtgaaggcatctacttcgccgctaaatcgggccgtatggcggccgaggcggtcgttgagcagtctatgaatggaacaaaagaaattgacgagtctgaccttcgagtgtacttggacaagtgggatcgcaagtattgggcaacttacaaggtgctcgacattttgcaaaaggtcttctaccgctccaaccctgcccgcgaggcgttcgttgagatgtgcgcggatgaatatgtgcagaagatgacttttgactcttatctgtacaaaaccgtggttcctggaaatccgctcgacgacgccaaacttcttgcaaacacagtagcgtcgctggtgcggtccaacgctcttcgaatcgcctccaaaagtgggatcggcgcctga

SEQ ID NO: 1879 - protein, 462 aa, Ostreococcus tauri
MVRRSHARTRSYQRCCRRHVERKISSFSEWHQAASRGLVYASGAPLTDRKLRVAVIGGGPAGACAAETLAKGGCETYLIERKMDNCKPCGGAIPLCMVGEFDLPEEIIDRKVTKMKMISPSNRAVDVGQTLNDKEYIGMCRREVMDDFLRKRANSLGANLVNGLFMKIEDPGQGNGPILVQYNDYEEESKTGVPKTLEVDVVIGADGANSRVAKCIDAGEYDYAIAFQERIKIPDEKMEYYKDLAEMYVGDDVSPDFYGWVFPKYDHVAVGTGTVVNKTAIKQYQTAMRNRAEEKCEGGKIIRVEAHPIPEHPRPNRVKGRVALVGDAAGYVTKCSGEGIYFAAKSGRMAAEAVVEQSMNGTKEIDESDLRVYLDKWDRKYWATYKVLDILQKVFYRSNPAREAFVEMCADEYVQKMTFDSYLYKTVVPGNPLDDAKLLANTVASLVRSNALRIASKSGIGA

SEQ ID NO: 1880 - DNA, 1401 bp, Brassica rapa subsp
  CDS (1)..(1401)
atggcgacgtttgcgctcaaatccttcaccggacttcgccaatccccaacggaccagataactttcgtctccaatgtcccgtcgtccctctctcgctcccagcgacggacatccctcaaagtaaccgcatcaagagcaagccccaagctcgctaaccgcagcctccgcgtcgccgtcatcggcggaggcccggcaggaggagctgccgccgagactctcgcccaaggaggcatcgagacgatcctcatcgagcgcaagatggacaactgcaagccctgcggcggcgcgatccctctctgcatggtcggagaattcaacttgccgctggacatcatcgacaggagggtcaccaagatgaagatgatctctccgtcgaacatcgccgtcgacattggccgtacgctcaaggagcatgagtacataggtatggtgaggagagaggttcttgaccagtacctgagggagagggcggagaagagtggagccaccgttatcaacggtcttttcctcaagatggatttacctgaggagtgggactcgccgtacgtgttgcattacacggagtatgatgggaagacgggagctacgggacagaagaagacgatggaggttgacgccgttatcggagctgacggtgctaactctagagttgccaagtctatcggtgccggagactatgactacgccatcgcgtttcaggagaggattagaatcccagatgataagatgacgtactacgaggatctagctgagatgtacgtcggtgatgacgtgtcgccagacttttacgggtgggttttccctaaatgcgaccatgtagctgttggaacgggaaccgttactcacaaaggtgacatcaagaagttccagctggcgacaagaaacagagccaaggacaagattctaggaggcaagatcatccgcgtggaggctcaccctattcccgaacacccgcgaccacgcaggctctccaagcgtgtggctcttgtcggtgatgctgcagggtacgtgactaagtgctccggcgaagggatctacttcgctgcaaagagtggaagaatgtgtgctgaagccatcgttgaaggttcacagaacggtaagaagatgattgatgaaagtgatttgaggaagtacttggagaaatgggacaagacgtacttgcctacgtacagggtgcttgatgtgttgcagaaagtgttttacagatcgaatccggctagagaagcgtttgtggagatgtgcggtgatgagtatgttcagaagatgacgtttgatagttatctgtacaagagggtggcaccgggtagtcctttggaggatttgaagttggctgtgaacaccattgggagtgtgtttagagctaatgctctaaggagagagattgagaagctaaatgtttaa

SEQ ID NO: 1881 - protein, 466 aa, Brassica rapa subsp
MATFALKSFTGLRQSPTDQITFVSNVPSSLSRSQRRTSLKVTASRASPKLANRSLRVAVIGGGPAGGAAAETLAQGGIETILIERKMDNCKPCGGAIPLCMVGEFNLPLDIIDRRVTKMKMISPSNIAVDIGRTLKEHEYIGMVRREVLDQYLRERAEKSGATVINGLFLKMDLPEEWDSPYVLHYTEYDGKTGATGQKKTMEVDAVIGADGANSRVAKSIGAGDYDYAIAFQERIRIPDDKMTYYEDLAEMYVGDDVSPDFYGWVFPKCDHVAVGTGTVTHKGDIKKFQLATRNRAKDKILGGKIIRVEAHPIPEHPRPRRLSKRVALVGDAAGYVTKCSGEGIYFAAKSGRMCAEAIVEGSQNGKKMIDESDLRKYLEKWDKTYLPTYRVLDVLQKVFYRSNPAREAFVEMCGDEYVQKMTFDSYLYKRVAPGSPLEDLKLAVNTIGSVFRANALRREIEKLNV

SEQ ID NO: 1882 - DNA, 1389 bp, Olea europaea
  CDS (1)..(1389)
atggcttccattgctctcaaatccttcatcggactccgccaaaccacatcggaaaacaaatcaatagttctaacgaaacccaacacccaaacctaccataaaatccgtataaatgcctcaaaaacaagcccaagagtcaacggaaggaacctcaaagttgcggtggtgggaggtggcccggctggtggagccgcagcggagacactcgctaaaggtggcatagagacgatcctgttcgaacggaagatggacaactgcaagccatgtggtggtgctattccactttgtatggtgggggaatttgacttgccactggatatcatcgatcggagagtcacgaaaatgaagatgatttctccatctaatgtggctgttgacattggccagacccttaaaccccacgagtatattgggatggtccgccgtgaagtcctcgacgcctacctccgcgaccgagcagccaccgccggagctaccgtaattaacggtctcttgttgaaaatggacctgcccaaatccacaggttcaccctataagttacattacacggattacaacgccaaaaccggaggcgccggcgagaaaaagacaatggaggctgacgccgtcatcggcgccgacggtgctaattcccgagtggcaaagaacataaacgcaggtgaatacgagtacgccattgcatttcaagaacgcatcaaaatctcagatgacaaaatgaagtattacgaaaatctagctgaaatgtacgtaggcgatgacgtttcacctgatttctacggctgggttttcccaacatgtgatcatgtagctgtcggcacaggcacagtaacccacaaaggcgacatcaagaaactccaaattgctccacgattgagagccagagacaaaattgaaggtggaaaaatcataagagtggaggcacctcctataccagagcatccccggccaaggcgtgtgctcgaccgagtagcgctagtcggagatgcagccgggtacgtcacaaaatgctccggtgaggggatatattttgctgccaagagtggaagaatgtgtgcagaggcaatagttgaagggtcagaaaatgggataagaatggtggatgagagtgatttgaggaagtatttagagaaatgggacaaaacatattggcctccatacaaagtactggatgttcttcagaaggtattttccaggtcaaatccaccaagggaggcatttgtagaaatgtgtgctgatgaatatgtgcaaaaaatgacatttgatagctatttgtacaagaaagtggtgcctgggaatccccttgacgacttgaaattggctgtgaatccaattgggagtttggtgagggcaaatcccctaaggagggagatggagaagctaagtgtatga

SEQ ID NO: 1883 - protein, 462 aa, Olea europaea
MASIALKSFIGLRQTTSENKSIVLTKPNTQTYHKIRINASKTSPRVNGRNLKVAVVGGGPAGGAAAETLAKGGIETILFERKMDNCKPCGGAIPLCMVGEFDLPLDIIDRRVTKMKMISPSNVAVDIGQTLKPHEYIGMVRREVLDAYLRDRAATAGATVINGLLLKMDLPKSTGSPYKLHYTDYNAKTGGAGEKKTMEADAVIGADGANSRVAKNINAGEYEYAIAFQERIKISDDKMKYYENLAEMYVGDDVSPDFYGWVFPTCDHVAVGTGTVTHKGDIKKLQIAPRLRARDKIEGGKIIRVEAPPIPEHPRPRRVLDRVALVGDAAGYVTKCSGEGIYFAAKSGRMCAEAIVEGSENGIRMVDESDLRKYLEKWDKTYWPPYKVLDVLQKVFSRSNPPREAFVEMCADEYVQKMTFDSYLYKKVVPGNPLDDLKLAVNPIGSLVRANPLRREMEKLSV

SEQ ID NO: 1884 - DNA, 1206 bp, Thiocapsa roseopersicina
  CDS (1)..(1206): transl_table=11
atgacaaatcttgaaacattcgacgttgtaatcgtcggcggcgggcccgccggtgcaaccgctgcaaccgatttggcccggcgcggccggcgcgtccttctgctcgatcgcggcgggcgcatcaagccctgcggcggcgccattccgccgcaagcgatgcgtgagttcgagattcccgaatccatgctggcgaaccaggtcaactcagcgcgaatggtctccccgtccgatcagcgtgtggacatgcccatcaacggcggctacgtcggcatggtggatcgcgagcatttcgacgagtggcttcgggaacgcgccgcgcaagccggggccgagagacggaccggaaccttcgaggcggtcgagcgcgacaccgacggtacggcactcatccgctatcgaccgggcgccgggcgcagcggcaacgagtccgagcgggtccgcgcgcgcgccgtgatcggcgccgacggggcacactcgtccgtcggcaagcagtgtgtgccgggcgcagacatgatcaaatatgtcgccgcgtatcatgagatcgtgcggaccccggccaacggcggtccggccgatttcgacggcacgcgctgcgatgtctactaccaaggcgacatctcgccggacttctacggctgggtcttcccgcacggggacacgaccagcgtcggtgtgggcactgcggtcgaaggcttctctctgaaaagcgcgaccaccgagctgcggcggcgcgccggattggagcacgccgagaccctacgccgggagggcgcgcccatcccgctgaaaccgctcaagcgctgggacaacggacgcgatctggtcctggccggcgatgccgccggtgtcgtggctcccgcctctggcgagggcatctattacgcgctggtcggcggacggctggccggggacgcggtcgacacctttctcgccaccggcgatgcgcgtgcgctcaagacggcacgggcgcgcttcatgaaggcacacggcaaggtcttctgggtgctcgggatgatgcagtacttctggtactccagcgataagcgtcgcgagcgcttcgtgagcatgtgcaaagacccggacgtgcaatctctgacctgggatgcctacatgaacaagcgtctggtccgcgccaagccggcggcccatctgcgggtcttcttcaaggatatggcgcacctcttgggcttcgtctcggcacgctga

SEQ ID NO: 1885 - protein, 401 aa, Thiocapsa roseopersicina
MTNLETFDVVIVGGGPAGATAATDLARRGRRVLLLDRGGRIKPCGGAIPPQAMREFEIPESMLANQVNSARMVSPSDQRVDMPINGGYVGMVDREHFDEWLRERAAQAGAERRTGTFEAVERDTDGTALIRYRPGAGRSGNESERVRARAVIGADGAHSSVGKQCVPGADMIKYVAAYHEIVRTPANGGPADFDGTRCDVYYQGDISPDFYGWVFPHGDTTSVGVGTAVEGFSLKSATTELRRRAGLEHAETLRREGAPIPLKPLKRWDNGRDLVLAGDAAGVVAPASGEGIYYALVGGRLAGDAVDTFLATGDARALKTARARFMKAHGKVFWVLGMMQYFWYSSDKRRERFVSMCKDPDVQSLTWDAYMNKRLVRAKPAAHLRVFFKDMAHLLGFVSAR

SEQ ID NO: 1886 - DNA, 1389 bp, Triticum aestivum
  CDS (1)..(1389)
atgacgtccctctcctcgtccgcggccgcggcgcgcgccaccttcctcccttcctcctgccgggcgcggccggcgggcggcaggaggtcgcagctcctcgtgacacgcgcggcggcgtccagccccaagctccccggcgggcggaagctgcgggtggcggtcgtgggagggggccccgcgggcggcgcggccgcggaggcgctcgccaagggcggcgtggagacggtgctcatcgagcgcaagatggacaactgcaagccgtgcggcggggccatcccgctctgcatggtgtccgagttcgacctgccgctggacctcgtcgacaggagggtcaccaagatgaagatgatttcgccctccaacgtcgccgtcgacatcggccgcacgctcgcgccgcacgagtacattggcatggtcaggcgcgaggtgctcgacgacttcctccgtaaccgcgcgcagaaggccggcgccgaggtcctcaatggcctcttcctaaggtatgaggcgcccaaggagcgcaacggcacgtacacggtgcactacaatcactacgacagctccaacggcaaggtgggcggcgagaagcggtcgttcgaggtggacgcgatcgtgggcgcggacggcgccaactcccgcgtggccaaggacatgggcgcgggcgactacgagtacgccatcgcgttccaggagcgcgtcaagatccccgacgacaagatgcgctactacgaggagcgcgccgagatgtacgtcggcgacgacgtctcccccgacttctacggctgggtgttccccaagtgcgaccacgtcgccgtcggcaccggcaccgtcacccacaaggccgacatcaagaagttccaggccgccacccgcctccgcgccaaggataagatcgagggcggcaagatcatccgcgtcgaggctcaccccatccccgagcaccccaggcccaagagggtgtcggggcgggtgacgctggtgggcgacgcggcggggtacgtgaccaagtgctccggcgaggggatctacttcgcggcgaagagcgggcggatgtgcgcggaggcgatcgtggccgggtcggcgaacgggacgcggctggtggacgagagcgacctgcgcaagtacctggcggagttcgaccggctctactggccgacgtacaaggtgctggacatcctgcagaaggtgttctaccgctccaacgcggcgcgggaggcgttcgtggagatgtgcgccgacgactacgtgcagcggatgaccttcgacagctacctctacaagcgcgtcgtggcgggcaaccccatcgaggacatcaagctcgccgtcaacaccatcggcagcctcgtcagggccaccgcgctgcgccgggagatggggaagctcaccttgtga

SEQ ID NO: 1887 - protein, 462 aa, Triticum aestivum
MTSLSSSAAAARATFLPSSCRARPAGGRRSQLLVTRAAASSPKLPGGRKLRVAVVGGGPAGGAAAEALAKGGVETVLIERKMDNCKPCGGAIPLCMVSEFDLPLDLVDRRVTKMKMISPSNVAVDIGRTLAPHEYIGMVRREVLDDFLRNRAQKAGAEVLNGLFLRYEAPKERNGTYTVHYNHYDSSNGKVGGEKRSFEVDAIVGADGANSRVAKDMGAGDYEYAIAFQERVKIPDDKMRYYEERAEMYVGDDVSPDFYGWVFPKCDHVAVGTGTVTHKADIKKFQAATRLRAKDKIEGGKIIRVEAHPIPEHPRPKRVSGRVTLVGDAAGYVTKCSGEGIYFAAKSGRMCAEAIVAGSANGTRLVDESDLRKYLAEFDRLYWPTYKVLDILQKVFYRSNAAREAFVEMCADDYVQRMTFDSYLYKRVVAGNPIEDIKLAVNTIGSLVRATALRREMGKLTL

SEQ ID NO: 1888 - DNA, 1389 bp, Lotus japonicus
  CDS (1)..(1389)
atgaactccatcgccctcaaatccttcgtcggactccgccaatcctcgccggaagccccccatttctccgtccagcttaagcccaatgccccccgccgcaacttcaaagtcctcgccggaaaattcagccccaagctccagggccggaacctccgcgtggcggttgtcggaggcggcccagctggtggagctgcggcggagactctctccaaggccggaatagaaacgttcctcatcgagcgtaagatggataactgcaaaccctgcggcggagctattccgctgtgcatggtgggtgagttcgacctcccgcttgacatcatcgaccgcagggtaaccaagatgaagatgatttcgccgtcgaatgtggctgttgacattggccggacgctgaagccgcatgagtatattggtatggttaggcgtgaggtgctggatgcttacctgagggaccgggcgaagcagaatggggcggagattatcaatgggttgttcttgaaaatggatgttccggtggataaggtgacgccgtatgtgcttcattacaccgcatatgacggcaaaactggtgggcttggtgagaaacggaccttggaggttgatgctgtcattggagctgatggggcgaactcaagggttgctaagtccattgatgctggtgattatgaatatgccattgcatttcaggagaggataaaaattccggatgataaaatggcttactatgaggaccttgcggagatgtatgtgggtgatgatgtttctcctgatttttacgggtgggtgtttcctaaatgtgatcatgtggctgttggcactggcactgtgacacacaagggagacatcaagaagttccaactagcaaccaggaaaagagctgaggacaagattttggggggcaagatcatccgagtggaggcacaccccatccctgaacatccaaggccgcgaagattgaagggaagagtagccctggtgggcgatgctgctggctatgtgaccaaatgctctggggaaggaatctatttcgcagccaagagcgggaggatgtgtgcagaggcgatcgttgaaggttcagagaatgggaagaggttggtggaagaaggggacttgagaaagtacttggagaagtgggataagacttattggccaacttacaaggtcttggatgtgcttcagaaggtgttttacaggtctgaccctgcgagggaagcgtttgtggagatgtgtgctgatgagtatgtgcagaagatgacctttgatagctatttgtacaagacagtggcacctggaaatccattgcaggatatcaagttggctattaacaccattgggagcttggtgagggccaatgctctgaagagggagatggaaaaacttaatgtatga

SEQ ID NO: 1889 - protein, 462 aa, Lotus japonicus
MNSIALKSFVGLRQSSPEAPHFSVQLKPNAPRRNFKVLAGKFSPKLQGRNLRVAVVGGGPAGGAAAETLSKAGIETFLIERKMDNCKPCGGAIPLCMVGEFDLPLDIIDRRVTKMKMISPSNVAVDIGRTLKPHEYIGMVRREVLDAYLRDRAKQNGAEIINGLFLKMDVPVDKVTPYVLHYTAYDGKTGGLGEKRTLEVDAVIGADGANSRVAKSIDAGDYEYAIAFQERIKIPDDKMAYYEDLAEMYVGDDVSPDFYGWVFPKCDHVAVGTGTVTHKGDIKKFQLATRKRAEDKILGGKIIRVEAHPIPEHPRPRRLKGRVALVGDAAGYVTKCSGEGIYFAAKSGRMCAEAIVEGSENGKRLVEEGDLRKYLEKWDKTYWPTYKVLDVLQKVFYRSDPAREAFVEMCADEYVQKMTFDSYLYKTVAPGNPLQDIKLAINTIGSLVRANALKREMEKLNV

SEQ ID NO: 1890 - DNA, 1389 bp, Medicago truncatula
  CDS (1)..(1389)
atgagctccatcgccctcaaatccttcctcggcctccgcatttcctcaccagaaaccccccaattctcctaccgccccaaacccatcacccaccgccgcaagttcaccgtcgtcgctgcagcaaccagcccaaaaatcgatggccgaaacctccgtgttgccgtcatcggcggtggtccagctggaggtgcagcagcagaaacacttgcaaaaggtggcatagaaaccttcctcattgaacgtaaaatggacaactgcaaaccatgtggaggagccattcctctatgcatggttggtgagttcgaccttccactagacatcatagaccgccgtgttaccaagatgaagatgatttctccgtcgaatgtcgccgtcgacattggtaggacacttaagtctcatgagtatattggtatggtgaggcgtgaggtgcttgatgattatcttagaaatagggctaaggaaaatggagcgaatattattaatgggttgtttttgaaaatggatattcctaaagaaaagaatgctccttatgttcttcattattcttcttatgatgggaaaactggtggggttggtgaaaaaactactttggaagttgatgttgttattggtgctgatggagctaattctagagttgctaagtctattgatgctggtgattatgaatatgctattgcatttcaggagaggataaaaatcccggatgataaaatggcttactatgaggatcttgcggagatgtacgtgggtgacgacgtttctcctgatttctatggttgggtattcccgaaatgtgaccatgttgctgtcggcaccggaactgtgacacacaagggagacatcaagaagttccaactagcaacaaggaaaagagccgaggacaagatcttagggggcaagattatccgcgtggaggctcaccctataccggaacatccaaggccacgaagattgtcagggagggtcgcgcttgtgggtgatgctgctggctacgtgaccaaatgttccggagaaggaatctattttgcagccaagagtgggaggatgtgtgcagaggcaattgtgcagggttcggcgaatggaaagaggatggttgaagaaggggatttgaggaaatatttggagaaatgggacaagacttactggcctacttacaaggttttggatattcttcagaaggtgttctataggtccaatcctgctagggaagcttttgttgaaatgtgtgctgatgaatatgtgcagaagatgacatttgatagttatctgtacaagactgttgtgcctgggagtccattggaagatatcaagttggctatcaacaccattggaagcttggttagggctaatgctctaaggagggagatggacaaacttaatgtatga

SEQ ID NO: 1891 - protein, 462 aa, Medicago truncatula
MSSIALKSFLGLRISSPETPQFSYRPKPITHRRKFTVVAAATSPKIDGRNLRVAVIGGGPAGGAAAETLAKGGIETFLIERKMDNCKPCGGAIPLCMVGEFDLPLDIIDRRVTKMKMISPSNVAVDIGRTLKSHEYIGMVRREVLDDYLRNRAKENGANIINGLFLKMDIPKEKNAPYVLHYSSYDGKTGGVGEKTTLEVDVVIGADGANSRVAKSIDAGDYEYAIAFQERIKIPDDKMAYYEDLAEMYVGDDVSPDFYGWVFPKCDHVAVGTGTVTHKGDIKKFQLATRKRAEDKILGGKIIRVEAHPIPEHPRPRRLSGRVALVGDAAGYVTKCSGEGIYFAAKSGRMCAEAIVQGSANGKRMVEEGDLRKYLEKWDKTYWPTYKVLDILQKVFYRSNPAREAFVEMCADEYVQKMTFDSYLYKTVVPGSPLEDIKLAINTIGSLVRANALRREMDKLNV

SEQ ID NO: 1892 - DNA, 1206 bp, Bradyrhizobium sp
  CDS (1)..(1206): transl_table=11
atgagcacctcgtccgagacgttcgatgtcgtagtcgtcggcggcggtcccgccggcgccaccgccgccaatgatctggcccgtcagggccatcacgtgctgctgctcgacaaagcgggccgcatcaagccatgcggcggcgccatcccgccgcggctcatcagcgagttcgaaattcccgaccatctgctggtggcgcggatttcctcggcgcgcatggtgtcgccaagcaaccgcgacgtcgacatgccgatcgacggcggcttcgtcggcatggtcgatcgcgagcattatgacgaatggctgcgggcccgcgcggccgagggcggcgcggtcctccgcaccgggacattcagccacatcgcccgcgatgccgatggcacggcggtggtgcattacgagcgccgcatggatgatggcagcgtgcgcgaggacagcgtccgcgcccgtgccgtgatcggcgccgacggcgcggtgtcggcggtggcacggcaatgcatcccggagggcgccgagatccgctacgtgttcgcctatcacgagatcgtccgctcgccggagcgtggccatccgctgttcgacgccacgcgctgcgacgtcgtctatcgcggacaactctcgccggacttctacagctgggtcttcccgcacggcgcgacgaccagcatcggcaccggcagcgcgcataagggattctcgctgcgcggctcggtggcccagttccggaaagtcgcggggctcgacgatctcgagacgatccgccgcgagggcgcgccgatcccgttgaggccgctgtcgcgctgggacaacggccgcgacgtcgtgctcgccggtgatgccgccggcgtggtcgcacccgcctccggcgagggcatctattacgcgatggccggcggccgcgccgcggcggatgccgtcgcgctgttcctcaagaccggcgatgctgcagccctcgccaccgcccgcaaggctttcatgcgcaagcacggcgcggtgttcttcatcctcggcatgatgcagcgctactggtacacgaacgacgcccgccgcgagcgtttcgtcgccatctgccgtgacaaggacgtccagcagctgacctgggacgcctacatgaacaaggaactggtgaaggcgaagccgctgtcgcatgtccgcatcttcttcaagaacatcgcccacctcaccggacttgcgaaggcggcttag

SEQ ID NO: 1893 - protein, 401 aa, Bradyrhizobium sp
MSTSSETFDVVVVGGGPAGATAANDLARQGHHVLLLDKAGRIKPCGGAIPPRLISEFEIPDHLLVARISSARMVSPSNRDVDMPIDGGFVGMVDREHYDEWLRARAAEGGAVLRTGTFSHIARDADGTAVVHYERRMDDGSVREDSVRARAVIGADGAVSAVARQCIPEGAEIRYVFAYHEIVRSPERGHPLFDATRCDVVYRGQLSPDFYSWVFPHGATTSIGTGSAHKGFSLRGSVAQFRKVAGLDDLETIRREGAPIPLRPLSRWDNGRDVVLAGDAAGVVAPASGEGIYYAMAGGRAAADAVALFLKTGDAAALATARKAFMRKHGAVFFILGMMQRYWYTNDARRERFVAICRDKDVQQLTWDAYMNKELVKAKPLSHVRIFFKNIAHLTGLAKAA

SEQ ID NO: 1894 - DNA, 1401 bp, Prunus persica
  CDS (1)..(1401)
atggcttccattgctcccaagtccttcatcggactccgccaagcctccgcagaaaagccccatttcacaatccaagcaaaacccatttctctaaacccttcaatccaccggaggctccaggtcaatgccgccaaaaccagcccaaaagtcacgggtcgaaacctcagggtcgccgtcgtcggaggtggcccggcaggcggctccgccgctgagaccctcgccaaaggcggcatcgagacgttcctaatcgagcgaaagatggacaactgtaagccctgcggcggcgcaatcccgctctgcatggtgggtgaatttgacctcccattggacatcatcgaccgccgggtcaccaagatgaagatgatttcgccgtccaatgtggcagttgacattggtcaaactctgaagccgcacgagtacattgggatggcgaggcgtgaggtgctggaccagtacttgaggaacagggcgagtgagaatggggcgactgtgataaatgggttgtttctgaagatggagaaaccgggagatggggaagcgccgtacgttctgcattacacagagtatgatgggaaggtcggtggggctggtgtgaaaaaaaatttggaggttgatgctgtgattggagctgatggagctaattctagagtggctaagagtattgacgctggtgattatgagtatgccattgcctttcaggagagaatcaaaatccctgatgataaaatggtgtactatgagaatcttgctgagatgtatgttggtgatgatgtctcaccggacttttacgggtgggtgttcccccaatgtgaccatgtaccagttggtaccggcactgtgactccccaaggaaacttcaagaaattccaacttgcaacaagaaacagatccaaggacaagatattaggtggcaaattcctgcgagtggaggcgcatccaattcccgaacacccccgcccacgaaggttagcaggcagagtagcacttgttggtgatgcagctgggtatgtgacaaaatgttcaggtgaaggcttttactttgcaccaaagattattaggatgtgtgcagagccaatagttgagggttcggagaatggaaagaggatggtaaatgaggcggatttaaggaagtacttggagaagtgggacaagacttactggcctacttataaggtgttggatgtgttgcagaaggtgttttataggtcgaacccggcgagggaggcttttgtggagatgtgcgcagatgagtatgtgcagaagatgacctttgacagctatttgtataagagggtggtgcctgggaatccttgggaggatttgaagttggcagtgaataccattgggagcttggtaagggctaatgcacttaggagggagatggaaaaacttaatgtatga

SEQ ID NO: 1895 - protein, 466 aa, Prunus persica
MASIAPKSFIGLRQASAEKPHFTIQAKPISLNPSIHRRLQVNAAKTSPKVTGRNLRVAVVGGGPAGGSAAETLAKGGIETFLIERKMDNCKPCGGAIPLCMVGEFDLPLDIIDRRVTKMKMISPSNVAVDIGQTLKPHEYIGMARREVLDQYLRNRASENGATVINGLFLKMEKPGDGEAPYVLHYTEYDGKVGGAGVKKNLEVDAVIGADGANSRVAKSIDAGDYEYAIAFQERIKIPDDKMVYYENLAEMYVGDDVSPDFYGWVFPQCDHVPVGTGTVTPQGNFKKFQLATRNRSKDKILGGKFLRVEAHPIPEHPRPRRLAGRVALVGDAAGYVTKCSGEGFYFAPKIIRMCAEPIVEGSENGKRMVNEADLRKYLEKWDKTYWPTYKVLDVLQKVFYRSNPAREAFVEMCADEYVQKMTFDSYLYKRVVPGNPWEDLKLAVNTIGSLVRANALRREMEKLNV

SEQ ID NO: 1896 - DNA, 1404 bp, Arabidopsis thaliana
  CDS (1)..(1404)
atggcgacgacggttacactcaaatccttcaccggacttcgtcaatcatcaacggagcaaacaaacttcgtctctcatgtaccgtcatcactttctctccctcaacgacggacctctctccgagtaaccgcagccagagccactcccaaactctccaaccgtaaactccgtgtcgccgtcatcggtggtggaccagcaggcggggcagctgcagagactctagcacaaggaggaatcgagacgattctcatcgagcgtaagatggacaattgcaagccttgcggtggcgcgattcctctctgtatggtcggagaattcaacttgccgttggatattattgatcggagagtgacgaagatgaagatgatttcgccgtcgaacattgctgttgatattggtcgtacgcttaaggagcatgagtatataggtatggtgagaagagaagttcttgatgcttatctgagagagagagctgagaagagtggagccactgtgattaacggtctcttccttaagatggatcatccggagaattgggactcgccgtacactttgcattacactgagtacgatggtaaagctggagctacagggacgaagaaaacaatggaggttgatgctgtcattggagctgatggagctaactctagggttgctaaatctattgatgctggtgattacgactacgcaattgcatttcaggagaggattaggattcctgatgagaaaatgacttactatgaggatttagctgagatgtatgttggagatgatgtgtcgccggatttctatggttgggtgttccctaagtgcgaccatgtagctgttggaacaggtactgtgactcacaaaggtgacatcaagaagttccagctcgcgaccagaaacagagctaaggacaagattcttggagggaagatcatccgtgtggaggctcatccgattcctgaacatccgagaccacgtaggctctcgaaacgtgtggctcttgtaggtgatgctgcagggtatgtgactaaatgctctggtgaagggatctactttgctgctaagagtggaagaatgtgtgctgaagccattgtcgaaggttcacagaatggtaagaagatgattgacgaaggggacttgaggaagtacttggagaaatgggataagacatacttgcctacctacagggtacttgatgtgttgcagaaagtgttttacagatcaaatccggctagagaagcgtttgtggagatgtgtaatgatgagtatgttcagaagatgacattcgatagctatctgtacaagcgggttgcgccgggtagtcctttggaggatatcaagttggctgtgaacaccattggaagtttggttagggctaatgctctaaggagagagattgagaagcttagtgtttaa

SEQ ID NO: 1897 - protein, 467 aa, Arabidopsis thaliana
MATTVTLKSFTGLRQSSTEQTNFVSHVPSSLSLPQRRTSLRVTAARATPKLSNRKLRVAVIGGGPAGGAAAETLAQGGIETILIERKMDNCKPCGGAIPLCMVGEFNLPLDIIDRRVTKMKMISPSNIAVDIGRTLKEHEYIGMVRREVLDAYLRERAEKSGATVINGLFLKMDHPENWDSPYTLHYTEYDGKAGATGTKKTMEVDAVIGADGANSRVAKSIDAGDYDYAIAFQERIRIPDEKMTYYEDLAEMYVGDDVSPDFYGWVFPKCDHVAVGTGTVTHKGDIKKFQLATRNRAKDKILGGKIIRVEAHPIPEHPRPRRLSKRVALVGDAAGYVTKCSGEGIYFAAKSGRMCAEAIVEGSQNGKKMIDEGDLRKYLEKWDKTYLPTYRVLDVLQKVFYRSNPAREAFVEMCNDEYVQKMTFDSYLYKRVAPGSPLEDIKLAVNTIGSLVRANALRREIEKLSV

SEQ ID NO: 1898 - DNA, 1179 bp, Unknown
  uncultured proteobacterium
  CDS (1)..(1179): transl_table=11
  misc_feature (1149)..(1149): r is g or a
  misc_feature (1151)..(1151): m is a or c
  misc_feature (1152)..(1152): m is a or c
atgtttgatgttgttgtaatcggtggaggcccttcaggggcgacggcggccgaagatttggcacgttcaggccatcatgttgccctgctggaccgtgaaggtcgcattaaaccctgtggcggcgcaataccaccgcgccttattgaggacttcgcaattcccagctcgcaaattgtcgcacggatcaataccgcgcggatgatctctccaacgcagcgcaaggttgatattcctattgagaatggctttgtgggcatggttgatcgcgaacactttgacccgtttctgcgccgccgggcgcaaggggccggggccacttggttgacgggaacctttttgcgtattgagcgggatgccgaccatccgactgtgatctaccgcgacaaggacagtggtgaggagcggcgcttggcgtgcaaagtcatcattggtgccgatggcgcacgctcaaaggtggccaaatcagaagtcccaaatggcgataaaatcccctatgtgatcgcctatcatgagattattgaagccccgctggagggcatgagttacgatccgaagcgatgcgacgttatttatgacggggccatatcgccagatttttacggatgggtgtttccgcatggaaaatctgccagtgttggaatgggcaccggtattgagggtgtcgatttgaaaaaggcgacagccgagctgcgcgccgcccacggtttgagcgattgcaagaccattcggcgcgagggtgcgccgatccccttgcgtcccctggattgttgggacaatggcaccgatgtggttttggctggggatgcggcgggggtggttgctccgtcttccggtgagggtatctactacgcgatggttggcggtcgggtggccgccacggcggccagcgcctttttgaccaccgggcgcgcgaaagacctacaattggcgcgcaagctgtttatgcgggaacataaaagcgtcttcaaagtcctaggtgcgatgcaaaacgcctattatcgcagtgacgagcgccgcgagcgctttgtgtccctttgccatgatatcgatgtgcaaaaactgacatttgaagcctatatgaacaaacgcttggttgcggcccgacctatggcgcatcttaagattggtttgaaaaatctggcgcatttrammcggcttatttcagaagatcgtgtctga

SEQ ID NO: 1899 - protein, 392 aa, Unknown
  uncultured proteobacterium
  misc_feature (384)..(384): The Xaa at location 384 stands for Asn, Lys, or Thr.
MFDVVVIGGGPSGATAAEDLARSGHHVALLDREGRIKPCGGAIPPRLIEDFAIPSSQIVARINTARMISPTQRKVDIPIENGFVGMVDREHFDPFLRRRAQGAGATWLTGTFLRIERDADHPTVIYRDKDSGEERRLACKVIIGADGARSKVAKSEVPNGDKIPYVIAYHEIIEAPLEGMSYDPKRCDVIYDGAISPDFYGWVFPHGKSASVGMGTGIEGVDLKKATAELRAAHGLSDCKTIRREGAPIPLRPLDCWDNGTDVVLAGDAAGVVAPSSGEGIYYAMVGGRVAATAASAFLTTGRAKDLQLARKLFMREHKSVFKVLGAMQNAYYRSDERRERFVSLCHDIDVQKLTFEAYMNKRLVAARPMAHLKIGLKNLAHLXRLISEDRV

SEQ ID NO: 1900 - DNA, 1203 bp, Rhodocyclus gelatinosus
  CDS (1)..(1203): transl_table=11
atgcaactggagaccttcgatgtcgtcgtcgtcggcggcggtccggctggcgccacggcggccacggagatcgcgcggcagggccgcagcgtgctgctgctcgaccgtgccggccgcatcaaaccctgcggcggcgcgatcccgccgcgtgcgatccgcgacttcggcattcccgacgagctgatcgtcgccaaggcgctgtgcgcccggatgatctcgccgaccgacgtcaaggtcgacatccacatcgagaacggctacgtcggcctcgtcgaccgcgagcagttcgacgaatggctgcgcgagcgtgcgcgccagtgcggcgcggtgcgccgcaccggcaccttcgagcgcatcgaccgcgacgccgacggctgcgccatcgtgcgctaccgcccgcacgagaagggcgaacgcggcgaaggccaggaggccgcggtgcgcgcccgggcgatcatcggcgccgacggcgcacgctccgaggtggcacgccagcagatctcgtgcgcgcacgaggtcgagtacgtcttcgcctaccacgagatcatcgaggcgccggaacccggccaccccgactacgacccctcgcgttgcgacgtctactaccgcggcacgatctcgccggacttctacggctgggtcttcccgcacggcaagacgatgagcgtgggcaccggcagcgccgacaagggcttctcgctgcgcaacgcgacggccaagctgcgcgaggacgccggcctggcgaactgcaagacgatccgccgcgaaggcgcgccgatcccgctgaagccgctgcgctgctgggacaacggccgcgacgtcgtgctcgccggcgacgcctcgggcgtcgtcgcgccggcctcgggcgagggcatctactacgcgctggccggcggccgcttcgccgccgaggcggtgctggagatgctgcgcaccggcgacgccaaggcgctggccggcgcgcgccgcaacttcatgcgcgagcacggccgcgtgttctggatcctcggcatcctgcagcgcttctggtactccagcgacaagcgccgcgagcgtttcgtcagcatctgcaaggacaaggacgtgcagcagctgaccttcgactcgtacatgaacaagcggctgacgcggcgcaagccgatggcccacgtgcgcatcttcttcaaggacatcgcgcacctgctgggcctggcgcgggtctga

SEQ ID NO: 1901 - protein, 400 aa, Rhodocyclus gelatinosus
MQLETFDVVVVGGGPAGATAATEIARQGRSVLLLDRAGRIKPCGGAIPPRAIRDFGIPDELIVAKALCARMISPTDVKVDIHIENGYVGLVDREQFDEWLRERARQCGAVRRTGTFERIDRDADGCAIVRYRPHEKGERGEGQEAAVRARAIIGADGARSEVARQQISCAHEVEYVFAYHEIIEAPEPGHPDYDPSRCDVYYRGTISPDFYGWVFPHGKTMSVGTGSADKGFSLRNATAKLREDAGLANCKTIRREGAPIPLKPLRCWDNGRDVVLAGDASGVVAPASGEGIYYALAGGRFAAEAVLEMLRTGDAKALAGARRNFMREHGRVFWILGILQRFWYSSDKRRERFVSICKDKDVQQLTFDSYMNKRLTRRKPMAHVRIFFKDIAHLLGLARV

SEQ ID NO: 1902 - DNA, 1389 bp, Glycine max
  CDS (1)..(1389)
atgaactccatagccttcaaatccttcgtcgggctccgccagtcctcgccggaggccccgcatttcgccgcccagccaagacccgccactccccaccgcaaattccgcgtcttggctggaaaattcagccccaagctcaatggccggaacctccgcgtggcggtggtgggaggcggtccggctggcggggccgccgcggagacgctggcgaagggcggcgtggagacgttcctgatcgagcgaaagatggacaactgcaagccgtgcggtggcgccatcccgctgtgcatggtgggggagttcgacctgccgctggacatcatcgaccggcgcgtgacgaagatgaagatgatatcgccgtcgaacgtggcggtggacatcgggaggacgctgaagccgcacgagtacatcggcatggtgcggcgcgaggtgctggacgcttacctcagggaccgcgccaaggagtacggtgcgaacgtcatcaatggcttgttcttgaaaatggatattcctaaggataagaactccccctacgttctgcattactctagctacgatggcaaaaccaatggggttggtgagaagcgtaccttggaagttgacgctgtcattggcgctgacggggctaattctagagtcgccaagtctattgatgccggtgattatgagtatgccatcgcttttcaggagagggtaaaaatcccggatgataagatggtgtattacgagaacctggcggagatgtacgtgggcgatgatgtttctccagatttctacgggtgggtgtttccaaaatgtgaccatgtggctgtaggcactggaactgtgacacacaagggggacatcaagaagttccaactagcaacaaggaaaagagcagaggacaagattttgggaggcaagatcatccgagtggaggctcaccctatcccggaacatcctcggccacgaaggttgttggggagagtggcgctggttggcgacgctgctggctacgtaaccaaatgctccggagaggggatctattttgcagccaagagtgggaggatgtgtgcagaggcaattgttgaaggttctgagaatgggaaaaggatggtggaagaaggggacttgaggaagtacttggagaagtgggacaagacttattggccaacttacaaggtcttggatattcttcagaaggtgttttataggtccaaccctgcaagggaagcgtttgtggagatgtgtgctgatgagtatgtgcagaagatgacctttgatagctacttgtacaagacagtggtgcctggcaatccattggaggatctgaaattggccattaacaccattgggagcttagtgagggccaatgccataaggagggagatgaacaaacttaacgtatga

SEQ ID NO: 1903 - protein, 462 aa, Glycine max
MNSIAFKSFVGLRQSSPEAPHFAAQPRPATPHRKFRVLAGKFSPKLNGRNLRVAVVGGGPAGGAAAETLAKGGVETFLIERKMDNCKPCGGAIPLCMVGEFDLPLDIIDRRVTKMKMISPSNVAVDIGRTLKPHEYIGMVRREVLDAYLRDRAKEYGANVINGLFLKMDIPKDKNSPYVLHYSSYDGKTNGVGEKRTLEVDAVIGADGANSRVAKSIDAGDYEYAIAFQERVKIPDDKMVYYENLAEMYVGDDVSPDFYGWVFPKCDHVAVGTGTVTHKGDIKKFQLATRKRAEDKILGGKIIRVEAHPIPEHPRPRRLLGRVALVGDAAGYVTKCSGEGIYFAAKSGRMCAEAIVEGSENGKRMVEEGDLRKYLEKWDKTYWPTYKVLDILQKVFYRSNPAREAFVEMCADEYVQKMTFDSYLYKTVVPGNPLEDLKLAINTIGSLVRANAIRREMNKLNV

SEQ ID NO: 1904 - DNA, 1395 bp, Nicotiana tabacum
  CDS (1)..(1395)
atggcttccattgctctcaaaactttcaccggcctccgtcaatcctcgccggaaaacaattccattactctttctaaatccctccccttcacccaaacccaccgtaggctccgaatcaatgcttccaaatccagcccaagagtcaacggccgcaatcttcgtgttgcggtggtgggcggtggtcctgctggtggcgccgccgctgaaacactcgccaagggaggaattgaaaccttcttaatcgaacgcaaaatggacaactgcaaaccctgcggtggggccatcccactttgcatggtgggagaatttgacctccctttggatatcattgaccggaaagttacaaagatgaagatgatttccccatccaacgttgctgttgatattggtcagactttaaagcctcacgagtacatcggtatggtgcgccgcgaagtactcgatgcttacctccgtgaccgcgctgctgaagccggagcctctgttctcaacggcttgttcctcaaaatggacatgcccaaagctcccaacgcaccttacgtccttcactacacagcttacgactccaaaactaatggcgcgggggagaagcgtaccctggaagttgacgccgttatcggcgctgacggtgcaaattcccgtgtcgcaaaatccataaacgccggtgactacgagtacgctattgcattccaagaaaggattaaaatttccgatgataaaatgaagtattacgagaatttagctgaaatgtacgtgggtgatgacgtgtcccctgatttttacgggtgggttttccccaaatgtgaccacgttgccgttggcactggcacagtcacccacaaagctgacatcaaaaaattccagctagctacaagattgagagctgattccaaaatcaccggcggaaaaattatccgggtcgaggcccacccgattccagaacacccaagacccagaagattacaagacagagttgcattggttggtgatgcggcagggtacgtgaccaaatgttcgggcgaagggatttacttcgcggcaaagagtggacgtatgtgtgctgaagcaattgttgaagggtcagaaatgggaaaaagaatggtggacgagagtgatttgaggaagtatttggagaaatgggacaagacttattggccaacgtacaaggtgcttgatatattgcagaaggtattttacaggtcgaatccggcgagggaagcatttgttgaaatgtgcgcagatgagtatgtgcagaagatgacatttgacagctatttgtacaagaaagtagcaccaggaaacccaattgaagacttgaagcttgctgtgaataccattggaagtttggtgagagctaatgcactaagaagggaaatggacaagctcagtgtataa

SEQ ID NO: 1905 - protein, 464 aa, Nicotiana tabacum
MASIALKTFTGLRQSSPENNSITLSKSLPFTQTHRRLRINASKSSPRVNGRNLRVAVVGGGPAGGAAAETLAKGGIETFLIERKMDNCKPCGGAIPLCMVGEFDLPLDIIDRKVTKMKMISPSNVAVDIGQTLKPHEYIGMVRREVLDAYLRDRAAEAGASVLNGLFLKMDMPKAPNAPYVLHYTAYDSKTNGAGEKRTLEVDAVIGADGANSRVAKSINAGDYEYAIAFQERIKISDDKMKYYENLAEMYVGDDVSPDFYGWVFPKCDHVAVGTGTVTHKADIKKFQLATRLRADSKITGGKIIRVEAHPIPEHPRPRRLQDRVALVGDAAGYVTKCSGEGIYFAAKSGRMCAEAIVEGSEMGKRMVDESDLRKYLEKWDKTYWPTYKVLDILQKVFYRSNPAREAFVEMCADEYVQKMTFDSYLYKKVAPGNPIEDLKLAVNTIGSLVRANALRREMDKLSV

SEQ ID NO: 1906 - DNA, 1176 bp, Rhodobacter capsulatus
  CDS (1)..(1176): transl_table=11
atgaaatacgatgctttcgttgtcgggggcggtcctgcgggatcgacggcggcatgggatatggcccgcgcgggtctcaaggtggccctgctcgaccgcgccggtcggatcaagccctgcggcggcgcgatcccgccgcggctgatccgcgacttcgacattcccgaccatttgctggtggcgaaaatcacctcggcgcggatgatctcgcccaccggtcgtttcgtcgacatcccgatcgagaacggcttcgtcggcatggtcgaccgcgaggattacgacgaatggctgcgcgagcgcgcgggcaaggcgggggccgagcgtctcaccggcacctggctgcgcattgaacgcgacagcggcaagaccgtggtggtgtggcgcgacaaggtcacgggcgaggaaatgaaggccgagacccgggtggtgatcggcgccgatggcgcaaattcgcaggtccgcaacgaagtgcccgcgacgaagatcccgctcgtcttcgcctatcacgagatcatcaaggcgccgacgacggtggcgaattacgacccgacgcgctgcgatgtttactatgacggccggatcagcccggatttctacggctgggtcttcccgcatggcaagacggcctcgatcggcatggggacggaactgcccgatgtcagcctgaaggattgcacgaccctgctgcggcagatgtccgggctcgacaaggaagagacgatccgcaaggaaggcgcgccgatcccgctgcagccgctcgatgtctgggacaatggcaaggatgtggtgctttcgggcgatgccgcgggcgtcgtggcgccctcctcgggcgaggggatctattacgcccatgccggtggccgctacgccgccgaagccgcgatggccttcctgaaatcgggcaaaccggccgatctgaagctggcgcgggcgggcttcatgaaagagcatggcaccgtcttcaaggtgctgcggatgatgcaggacaagtattaccacagcgatgaccgccgcgaacggtttgtctcgctttgccatgacgtcgatgtgcagcgcatgacgttcgagagctacatgaacaagaagatgaccaagttccagccgctgaagaacctgaagatcggcttcaagaacctcgcgcatctctccggcctcgtgccgccgcaatggacctga

SEQ ID NO: 1907 - protein, 391 aa, Rhodobacter capsulatus
MKYDAFVVGGGPAGSTAAWDMARAGLKVALLDRAGRIKPCGGAIPPRLIRDFDIPDHLLVAKITSARMISPTGRFVDIPIENGFVGMVDREDYDEWLRERAGKAGAERLTGTWLRIERDSGKTVVVWRDKVTGEEMKAETRVVIGADGANSQVRNEVPATKIPLVFAYHEIIKAPTTVANYDPTRCDVYYDGRISPDFYGWVFPHGKTASIGMGTELPDVSLKDCTTLLRQMSGLDKEETIRKEGAPIPLQPLDVWDNGKDVVLSGDAAGVVAPSSGEGIYYAHAGGRYAAEAAMAFLKSGKPADLKLARAGFMKEHGTVFKVLRMMQDKYYHSDDRRERFVSLCHDVDVQRMTFESYMNKKMTKFQPLKNLKIGFKNLAHLSGLVPPQWT

SEQ ID NO: 1908 - DNA, 1224 bp, Synechocystis sp
  CDS (1)..(1224): transl_table=11
ttggtattacgggtagcagtcgttggaggaggccccgctggttcttccgccgccgaaattttagtaaaagccggaattgaaacctacctgtttgagcgtaagctagacaacgccaaaccctgtggtggagcaattcccctctgtatggtggatgagtttgatctgcccccggaaatcattgaccgccgggtacggaagatgaaaatgatctccccttccaacatcgaggtcaacatcggtcagaccctcaaggacgacgaatatatcggcatgtgccgccgggaagtgctggatggttttctccgggaacgggcggagaaactgggtacaaaagtcattaatggcaccgtttataaattagacattcctagcaaagatagtgatccctacaccctccactatgccgaccacagcgttggtggcaccactggggaaatgaaaatcctaaaagtagatgtggtgattggggctgatggcgctaactctcgcattgccaaagccattgacgctggggattacaactatgcgatcgccttccaagagcggattcgtctgccggaagacaaaatggcctactacgatgaactagcagaaatgtatgtgggcgatgacgtttctccggatttctacgcctgggtattcccaaaatatgaccacgtggcggtgggcaccggcaccatgaaggtgaacaaagcccgcatcaaagacttacaggctggcatccgcaccagggctgccaaaaaactagaaggcggagaaatcatcaaagtggaagcccatcccattcctgaacatccccggccccggcgggtggttggtcgagtagccctagtgggggatgccgctggtaccgtcaccaaatcctctggggaaggcatttactttgccgccaaatccgcccgtatgtgtgcggaaaccattgtggccaccagcaataatggccaacgggtgcccaccgaagccgatctgaaacaatacatcaaacaatgggataaacgctacggcgctacctatttggtgttggatattctgcaacgggtcttctatcgcaccgatgccaccagagaagcctttgtggaaatgtgttccgacatcgatgtgcaaaagctaacttttgacagttacctgtacaaaaccgtggtacccgccaatccattggtgcaaatgaaaattaccgccaaaaccattggtagcttgctccggggtaacgctttagccccttaa

SEQ ID NO: 1909 - protein, 407 aa, Synechocystis sp
MVLRVAVVGGGPAGSSAAEILVKAGIETYLFERKLDNAKPCGGAIPLCMVDEFDLPPEIIDRRVRKMKMISPSNIEVNIGQTLKDDEYIGMCRREVLDGFLRERAEKLGTKVINGTVYKLDIPSKDSDPYTLHYADHSVGGTTGEMKILKVDVVIGADGANSRIAKAIDAGDYNYAIAFQERIRLPEDKMAYYDELAEMYVGDDVSPDFYAWVFPKYDHVAVGTGTMKVNKARIKDLQAGIRTRAAKKLEGGEIIKVEAHPIPEHPRPRRVVGRVALVGDAAGTVTKSSGEGIYFAAKSARMCAETIVATSNNGQRVPTEADLKQYIKQWDKRYGATYLVLDILQRVFYRTDATREAFVEMCSDIDVQKLTFDSYLYKTVVPANPLVQMKITAKTIGSLLRGNALAP

SEQ ID NO: 1910 - DNA, 1374 bp, Oryza sativa
  CDS (1)..(1374)
atggccgccgccgtcgccgccgccgcctgccactccccggcgcgcctcgtggtcacctgctcgagctccgccacgcccgcgccgccgcggcgcccgctgcgggtggccgtggtgggcggcggccccgcgggcgcgtcggcggccgaggcgctggcgtcggcgggcgcgcaggcgttcctcctcgagcgcaacccgtcgggcgccaagccctgcggcggcgccatcccgctctgcatgctcgacgagttcgccatcccgcgtgacctcgtcgaccgccgcgtcacccgcatgcgcgtcctctcgccgtccaacctcgccgccgacttctcccgcgcgctgcccccgggcgcccacatccccatgctccgccgcgaggtgctcgactccttcctccgccgccgcgccgccgacgccggcgccaccctcgtcccgggcctcgtcacctcgctctccctccccgccgaccccgccaccgacccttacctcgtccactacatctcctccgactccggtggcccctcctcctcccggtgcgtcctcgaggtcgacgccgtcatcggcgcggacggcgccaacagccgtgtcgcccgcgaggtcggcgcgggggactactcgacggccatcgcgttccaggagcgcatccgcctccccgacgaggccatggcctactacgacgacctcgccgagatgtacgtcggcggcgacgtctccccggacttctacggctgggtcttccccaagtgcgaccacgtcgccgtcgggacgggcacggtggccgccaagccggagatcaagaggctccagtcgggcatccgcgcgcgcgcggcgggcaaggtcgccggcggccgcgtggtcagggtggaggcgcacccgatcccggagcacccgcgcccccgccgcgtggtggggcgcgtggcgctcgtcggcgacgcggcgggctacgtcacccggtgctccggcgagggcatctacttcgcggccaggtcggggcgcctctgcggccgcgccatggccgacgagtggcggctcaccggcgcggtgacggaggccgggatacgggcgggatacctccggcggtgggacgacgagttccgccccacgttccggttcctggacctgctgcagcgggtgttctacggcgggaacgccgggagggaggcgctggtggagatgtgcgccgacgagcacgtgcagcgccggacgttcgacagctacctgcacaagcggatggcgcccgccgagccgtggggggacctccgcctgctgtggcgcacggcggcggccatggtgcgctgcggcgtgctcggcagggaggtcgagcgcctccgccgtctcgagcagcaggccgccgaccaggtgctcctccgccattga

SEQ ID NO: 1911 - protein, 457 aa, Oryza sativa
MAAAVAAAACHSPARLVVTCSSSATPAPPRRPLRVAVVGGGPAGASAAEALASAGAQAFLLERNPSGAKPCGGAIPLCMLDEFAIPRDLVDRRVTRMRVLSPSNLAADFSRALPPGAHIPMLRREVLDSFLRRRAADAGATLVPGLVTSLSLPADPATDPYLVHYISSDSGGPSSSRCVLEVDAVIGADGANSRVAREVGAGDYSTAIAFQERIRLPDEAMAYYDDLAEMYVGGDVSPDFYGWVFPKCDHVAVGTGTVAAKPEIKRLQSGIRARAAGKVAGGRVVRVEAHPIPEHPRPRRVVGRVALVGDAAGYVTRCSGEGIYFAARSGRLCGRAMADEWRLTGAVTEAGIRAGYLRRWDDEFRPTFRFLDLLQRVFYGGNAGREALVEMCADEHVQRRTFDSYLHKRMAPAEPWGDLRLLWRTAAAMVRCGVLGREVERLRRLEQQAADQVLLRH

SEQ ID NO: 1912 - DNA, 1392 bp, Oryza sativa
  CDS (1)..(1392)
atgacctcgctgtcgtcctccgccgccgcggcgcgcgccaccttcgtcatgccgtcgtcggttcgtgggggcatgagccgcggcaggaggatggcgaggctggtgacgcgcgcggcggcgtcgagcccgaagctcccgagcgggcggcggctgcgggtggcggtggtcggaggcggacccgcgggcggcgcggcggcggaggcgctggccaagggcggcgtggagacggtgctcatcgaacggaagctggacaactgcaagccctgcggcggggccatcccgctgtgcatggtgtcggagttcgacctgccgctggacctcgtcgacaggaaggtgaggaagatgaagatgatttcgccgtccaacgtcgccgtcgacatcggcggcacgctcgcgccgcacgagtacatcggcatggtccgccgcgaggtgctcgacgcctacctccgctcccgcgccgagggggccggcgccgaggtcgtcaatggtctcttcctgaggtatgaggcgcccaaggaacccaacgggtcgtacgtggtgcactacaaccactacgacagctccaacggcaaggccggcggcgagaagcggacgttcgaggtggacgcgatcgtgggcgcggacggcgccaactcccgcgtcgccaaggacatgggcgccggcgactacgagtacgccatcgcgttccaggagcgcgtcaagatccccgacgacaagatgaagtactacgaggagcgcgccgagatgtacgtcggcgacgacgtctcgccggacttctacggctgggtgttccccaagtgcgaccacgtcgccgtcggcaccggcaccgtcacccacaagcccgacatcaagaagttccaggccgccacccgccttcgcgccaaggaccggatcgagggcggcaagatcatccgcgtcgaggctcaccccatccccgagcacccgaggcctaagagggtggcggggagggtgacgctggtgggggacgcggcggggtacgtgacaaagtgctccggcgaggggatctacttcgcggcgaagagcgggcggatgtgcgcggaggcgatcgtggccgggtcggcgaacgggacgcggatggtggaggagagcgacctgcgcaggtacctggccgagttcgaccgcctctactggccgacgtacaaggtgctcgacgtgctccagaaggtgttctaccgctccaacgccgcccgcgaggcgttcgtcgagatgtgcgccgacgactacgtccagaggatgaccttcgacagctacctctacaagcgcgtcgtgccgggcaacccgctcgacgacatcaagctcgccgtcaacaccatcggcagcctcgtccgcgccaccgccctccgccgcgagatggagaaggtcaccttgtga

SEQ ID NO: 1913 - protein, 463 aa, Oryza sativa
MTSLSSSAAAARATFVMPSSVRGGMSRGRRMARLVTRAAASSPKLPSGRRLRVAVVGGGPAGGAAAEALAKGGVETVLIERKLDNCKPCGGAIPLCMVSEFDLPLDLVDRKVRKMKMISPSNVAVDIGGTLAPHEYIGMVRREVLDAYLRSRAEGAGAEVVNGLFLRYEAPKEPNGSYVVHYNHYDSSNGKAGGEKRTFEVDAIVGADGANSRVAKDMGAGDYEYAIAFQERVKIPDDKMKYYEERAEMYVGDDVSPDFYGWVFPKCDHVAVGTGTVTHKPDIKKFQAATRLRAKDRIEGGKIIRVEAHPIPEHPRPKRVAGRVTLVGDAAGYVTKCSGEGIYFAAKSGRMCAEAIVAGSANGTRMVEESDLRRYLAEFDRLYWPTYKVLDVLQKVFYRSNAAREAFVEMCADDYVQRMTFDSYLYKRVVPGNPLDDIKLAVNTIGSLVRATALRREMEKVTL

SEQ ID NO: 1914 - DNA, 1720 bp, Zea mays
  CDS (142)..(1437)
agtgctcacactcgagcacgtcgagctcaaaggtgaggccgttagccaggaatcccggcaacaatgacttccctttcctccgccgtggcactgccgtcctcgtgccgggcccggccggcggggggaagccggagggcgcggatggtggtgacgcgcgcggcggcgtcgagcccgaagctgccgaacgggcggcggctgcgggtggcggtggtgggaggcggccccgccggtggcgccgcggcggaggcgctggccaagggcggcgtggagacggtgctgatcgagcggaagatggacaactgcaagccctgcggcggcgctatcccgctgtgcatggtgtcggagttcgacctgccgctcgacctcgtggaccgcaaggtgaggaagatgaagatgatttcgccgtccaacgtcgccgtcgacatcggccgcacgctcgcgccccacgagtacatcgggatggtcaggcgcgaggtgctcgacgcctacctccgctcacgggcacagtccgtcggcgcggaggtcgtcaacggcctcttcctaaggtacgaggcgcccaaagagccgaacggctcgtacgtggtgcactacaaccactacgacggcagcaacggcaaggtcggcggcgagaagcggtcgttcgaggtggacgcgatcgtgggcgcggacggcgccaactctcgcgtggccaaggacatgggcgcgggcgactacgagtacgccatcgcgttccaggagcgcgtcaagatccccgacgacaagatggtgtactacgaggagcgcgcggagatgtacgtcggcgacgacgtctctcccgacttctacggctgggtgttccccaagtgcgaccacgtcgccgtcggcaccggcaccgtcacgcacaaggccgacatcaagaagtttcaggccgccacgcgcctccgcgccaaggacaagattgagggcggcaagatcatccgcgtcgaggcgcaccccatccccgagcaccccaggcctaagagggtgtccgggcgggtgacgctggtgggcgatgccgcggggtacgtgaccaagtgctctggcgagggcatctacttcgcggcgaagagcgggcggatgtgcgccgaggccatcgtggcgggctccgccaacgggacgcggatggtggaggagagcgacctgcgcaagtacctggccgagttcgaccgcctctactggcccacttacaaggtgctggacatcctgcagaaggtgttctaccgctccaacgcggcgcgcgaggccttcgtggagatgtgcgccgacgactacgtgcagaagatgaccttcgacagctacctctacaagcgcgtcgtgccgggcaacccgctcgacgacatcaagctcgccgtcaacaccatcggcagcctcgtcagggccaccgcactgcgccgggagatggagaaggtcaccttgtgagccgccgcccgcgacgtcattgccgtcgaaatggtgtcgcagctgatcggccggtgtattagtagagatttgcggctgatcgggttaatttaggccaacatgcgtgggcagtgggcgcggagaggaagagaaacaagttgtgcaagtgcagcaagtagatcaaaagtgctgcctgtttgtatcgatggatcctgcaacatatagcatctggtgatgttgagaattcggagcagttcatcgactggattctgacgccggcaagcatcgacgtcaatgaatgtct

SEQ ID NO: 1915 - protein, 431 aa, Zea mays
MVVTRAAASSPKLPNGRRLRVAVVGGGPAGGAAAEALAKGGVETVLIERKMDNCKPCGGAIPLCMVSEFDLPLDLVDRKVRKMKMISPSNVAVDIGRTLAPHEYIGMVRREVLDAYLRSRAQSVGAEVVNGLFLRYEAPKEPNGSYVVHYNHYDGSNGKVGGEKRSFEVDAIVGADGANSRVAKDMGAGDYEYAIAFQERVKIPDDKMVYYEERAEMYVGDDVSPDFYGWVFPKCDHVAVGTGTVTHKADIKKFQAATRLRAKDKIEGGKIIRVEAHPIPEHPRPKRVSGRVTLVGDAAGYVTKCSGEGIYFAAKSGRMCAEAIVAGSANGTRMVEESDLRKYLAEFDRLYWPTYKVLDILQKVFYRSNAAREAFVEMCADDYVQKMTFDSYLYKRVVPGNPLDDIKLAVNTIGSLVRATALRREMEKVTL

SEQ ID NO: 1916 - DNA, 1338 bp, Zea mays
  CDS (1)..(1338)
atggccgccgccgcctgctattcgccagcgcgcatcatcatctcctgctcagccaccaccacctcctcatcgtcgtcagcgcgcacgctgcgcgtcgccgtagtggggggtggccccgcgggcgcgtcggctgccgaggcgctggcctcggcgggggcccggacgttcctcctcgagcgcagccccgcgggcgccaagccctgcggcggtgccatcccactctgtatgctggacgagttcgccatcccgcgggacctcgttgaccgccgcgtcacccggatgcgcgtgctctccccctccaacctcgcagccgacttctcccgcgcgctgccccccggggcgcacatccccatgctccgccgcgaggtgctcgactccttcctccgccgccgcgccgtcgaggccggggccgagctcgtcccgggcctcgtcacctcgctctcgctccccgcggggcccgccgacccctacctcgtccactacatctcgtcctccccggagggcgtgggagcgggacggagcgtgctggaggtggacgccatcgtcggcgcggacggcgccaacagccgcgtggcgcgcgaggtcggggccggggactacacgacggccatcgcgttccaggagcgcatccgcctccccgacgccggcatggcgtactacgacgacctcgccgagatgtacgtgggcggggacgtgtccccggacttctacggctgggtgttccccaagtgcgaccacgtggccgtcgggaccggcaccgtcgccgccaagccggagatcaagcgcctccagtccggcatccgggcgcgcgcgggccccaagatcgccggcggccgcgtagtcaaggtggaggcccacccgatcccagagcacccgcgcccgcgccgcgtcgtggggcgcgtggccctagtcggcgacgcggcggggtacgtcacgcggtgctccggcgagggcatctacttcgcggcaaagtcggggcggctgtgcgggcaggccatggcggaggagtgggcgcgcacgggctccgtgacggaggccgggctgaggcgcggctacctgcggcgttgggacgacgagttcctgctcatgttccggttcctggacctgctgcagcgcgtgttctacggcgggaatgccggccgcgaggcgctggtggagatgtgctccgacgactacgtgcagcggcggacgttcgaaagctacctgtacaagcggatggtgcctggcgagccgtggggcgacctccggctgctgtggcggacggtggccagcatggtgcgctgcggcgtcatcggcagggaggtggagcgcctgcgacggctggagctgcaaggctag

SEQ ID NO: 1917 - protein, 445 aa, Zea mays
MAAAACYSPARIIISCSATTTSSSSSARTLRVAVVGGGPAGASAAEALASAGARTFLLERSPAGAKPCGGAIPLCMLDEFAIPRDLVDRRVTRMRVLSPSNLAADFSRALPPGAHIPMLRREVLDSFLRRRAVEAGAELVPGLVTSLSLPAGPADPYLVHYISSSPEGVGAGRSVLEVDAIVGADGANSRVAREVGAGDYTTAIAFQERIRLPDAGMAYYDDLAEMYVGGDVSPDFYGWVFPKCDHVAVGTGTVAAKPEIKRLQSGIRARAGPKIAGGRVVKVEAHPIPEHPRPRRVVGRVALVGDAAGYVTRCSGEGIYFAAKSGRLCGQAMAEEWARTGSVTEAGLRRGYLRRWDDEFLLMFRFLDLLQRVFYGGNAGREALVEMCSDDYVQRRTFESYLYKRMVPGEPWGDLRLLWRTVASMVRCGVIGREVERLRRLELQG

SEQ ID NO: 1918 - DNA, 1389 bp, Glycine max
  CDS (1)..(1389)
atgaactccatagccttcaaatccttcgtcggcctccgccagtcctcgccggaggccccacatttcgctgcccagtcccgccccgccactccccaccgcaaattccgcgtcgtggccggaaaattcagccccaggctgaacggccggaacctccgcgtggcggtggtgggcggcggtcccgccggaggagccgccgcggagacgctggcgaagggcggcgtggagacgttcctgatcgagcgaaaaatggacaactgcaagccgtgcggcggcgccatcccgctgtgcatggtgggggagttcgaccttccgctggacatcatcgaccggcgcgtgacgaagatgaagatgatatcgccgtcgaacgtggcggtggacatcgggaggacgctgaagccgcacgagtacatcggcatggtgcggcgcgaggtgctggacgcttacctcagggaccgcgccaaggagtacggtgcgaacgtcatcaatggcttgttcttgaaaatggatattcctaaggataagaactccccctacgttctgcattactctagctacgatggcaaaaccaatggggctggtgagaagcgtaccttggaagttgacgctgtcattggcgctgacggggctaattctagagtcgccaagtctattgatgccggtgattatgagtatgccatcgcttttcaggagagggtaaaaatcccggatgataagatggtgtattacgagaaccttgcggagatgtacgtgggcgatgatgtttctccagatttctacgggtgggtgtttccaaaatgtgaccatgtggctgtaggcactggaactgtgacacacaagggggacatcaagaagttccaactagcaacaaggaaaagagcagaggacaagattttgggaggcaagatcatccgagtggaggctcaccctatcccggaacatcctcggccacgaaggttgttggggagagtggcgctggttggcgacgctgctggctacgtaaccaaatgctccggagaggggatctattttgcagccaagagtgggaggatgtgtgcagaggcaattgttgaaggttctgagaatgggaaaaggatggtggaagaaggggacttgaggaagtacttggagaagtgggacaagacttattggccaacttacaaggtcttggatattcttcagaaggtgttttataggtccaaccctgcaagggaagcgtttgtggagatgtgtgctgatgagtatgtgcagaagatgacctttgatagctacttgtacaagacagtggtgcctggaaatccattggaggatctgaaattggccattaacaccattgggagcttagtgagggccaatgccataaggagggagatgaacaaacttaacgtatga

SEQ ID NO: 1919 - protein, 462 aa, Glycine max
MNSIAFKSFVGLRQSSPEAPHFAAQSRPATPHRKFRVVAGKFSPRLNGRNLRVAVVGGGPAGGAAAETLAKGGVETFLIERKMDNCKPCGGAIPLCMVGEFDLPLDIIDRRVTKMKMISPSNVAVDIGRTLKPHEYIGMVRREVLDAYLRDRAKEYGANVINGLFLKMDIPKDKNSPYVLHYSSYDGKTNGAGEKRTLEVDAVIGADGANSRVAKSIDAGDYEYAIAFQERVKIPDDKMVYYENLAEMYVGDDVSPDFYGWVFPKCDHVAVGTGTVTHKGDIKKFQLATRKRAEDKILGGKIIRVEAHPIPEHPRPRRLLGRVALVGDAAGYVTKCSGEGIYFAAKSGRMCAEAIVEGSENGKRMVEEGDLRKYLEKWDKTYWPTYKVLDILQKVFYRSNPAREAFVEMCADEYVQKMTFDSYLYKTVVPGNPLEDLKLAINTIGSLVRANAIRREMNKLNV

SEQ ID NO: 1920 - DNA, 1389 bp, Glycine max
  CDS (1)..(1389)
atgaactccatagccttcaaatccttcgtcggcctccgccagtcctcgccggaggccccgcatttcgccgcccagccaagacccgccactccccaccgcaaattccgcgtcttggcaggaaaattcagccccaagctcaatggccggaacctccgcgtggcggtggtgggaggcggtccggctggcggggccgccgcggagacgctggcgaagggcggcgtggagacgttcctgatcgagcgaaagatggacaactgcaagccgtgcggtggcgccatcccgctgtgcatggtgggggagttcgacctgccgctggacatcatcgaccggcgcgtgacgaagatgaagatgatatcgccgtcgaacgtggcggtggacatcgggaggacgctgaagccgcacgagtacatcggcatggtgcggcgcgaggtgctggacgcttacctcagggaccgcgccaaggagaacggcgccaacgtcatcaacggcttgttcttgaaaatggatattcctaaggataataactccccctacgttctgcattactctagctacgacgggaaaaccaatggagctggtgagaagcgtaccttggaagttgacgctgtcattggcgccgatggggccaattctagagtcgccaagtctatcgatgccggtgattatgagtatgccatcgcttttcaggagagggtaagaattccggatgataagatggtgtattacgagaatcttgcggagatgtacgtgggggatgatgtttctccggatttctatggatgggtgtttccgaaatgtgaccatgtggctgttggcactggtaccgtgacacacaagggagacatcaagaagttccaactagcaacaaggaaaagagcagaggacaagattttgggaggcaagatcatccgagtggaggctcaccctatcccggaacatcctcggccgcgaaggttgtcgggaagagtggcgttggttggtgatgctgctggctatgtaaccaaatgctctggagaggggatctattttgcagccaagagtggcaggatgtgtgcagaggcaattgttgaaggttctgagaatggaaaaaggatggtggaagaaggggacttgaggaagtacttggagaagtgggacaagacttattggccaacttacaaggtcttggatattcttcagaaggtgttttataggtccaaccctgcaagggaagcgtttgtggagatgtgtgctgatgagtatgtgcagaagatgacctttgatagctatttgtacaagacggtggtgcctggcaatccattggaggatctgaaattggccattaacaccattgggagcttagtgagagccaatgcaataaggagggagatgaagaaacttaatgtatga

SEQ ID NO: 1921 - protein, 462 aa, Glycine max
MNSIAFKSFVGLRQSSPEAPHFAAQPRPATPHRKFRVLAGKFSPKLNGRNLRVAVVGGGPAGGAAAETLAKGGVETFLIERKMDNCKPCGGAIPLCMVGEFDLPLDIIDRRVTKMKMISPSNVAVDIGRTLKPHEYIGMVRREVLDAYLRDRAKENGANVINGLFLKMDIPKDNNSPYVLHYSSYDGKTNGAGEKRTLEVDAVIGADGANSRVAKSIDAGDYEYAIAFQERVRIPDDKMVYYENLAEMYVGDDVSPDFYGWVFPKCDHVAVGTGTVTHKGDIKKFQLATRKRAEDKILGGKIIRVEAHPIPEHPRPRRLSGRVALVGDAAGYVTKCSGEGIYFAAKSGRMCAEAIVEGSENGKRMVEEGDLRKYLEKWDKTYWPTYKVLDILQKVFYRSNPAREAFVEMCADEYVQKMTFDSYLYKTVVPGNPLEDLKLAINTIGSLVRANAIRREMKKLNV

SEQ ID NO: 1922 - DNA, 1374 bp, Zea mays
  CDS (1)..(1374)
atgacttccctctcctccgcggtggcactgccgtcctcgtgccgggcccggccggcggggggcagccggagggcgcggatggtggtgacgcgcgcggcggcgtcgagcccgaagctgccgaacgggcggcggctgcgggtggctgtggtgggaggcggccccgccggtggcgccgcggcggaggcgctggccaagggcggcgtggagacggtgctaatcgagcggaagatggacaactgcaagccctgcggcggcgccatcccgctgtgcatggtgtcggagttcgacctgccgctcgaccttgtggaccgcaaggtgaggaagatgaagatgatttcgccgtccaacgtcgccgtcgacatcggccgcacgctcgcgccccacgagtacatcgggatggtcaggcgcgaggtgctcgacgcctacctccgctcacgggcacagtccgtcggcgcggaggtcgtcaacggcctcttcctaaggtacgaggcgcccaaagagccgaacggctcgtacgtggtgcactacaaccactacgacggcagcaacggcaaggtcggcggcgagaagcggtcgttcgaggtggacgcgatcgtgggcgcggacggcgccaactctcgcgtggccaaggacatgggcgcgggcgactacgagtacgccatcgcgttccaggagcgcgtcaagatccccgacgacaagatggtgtactacgaggagcgcgcggagatgtacgtcggcgacgacgtctctcccgacttctacggctgggtgttccccaagtgcgaccacgtcgccgtcggcaccggcaccgtcacgcacaaggccgacatcaagaagtttcaggccgccacgcgcctccgcgccaaggacaagattgagggcggcaagatcatccgcgtcgaggcgcaccccatccccgagcaccccaggcctaagagggtgtccgggcgggtgacgctggtgggcgacgccgcggggtacgtgaccaagtgctccggcgagggcatctacttcgcggcgaagagcgggcggatgtgcgccgaggccatcgtggcgggctccgccaacgggacgcggatggtggaggagagcgacctgcgcaagtacctggccgagttcgaccgcctctactggcccacttacaaggtgctggacatcctgcagaaggtgttctaccgctccaacgcggcgcgcgaggccttcgtggagatgtgcgccgacgactacgtgcagaagatgaccttcgacagctacctctacaagcgcgtcgtgccgggcaacccgctcgacgacatcaagctcgccgtcaacaccatcggcagcctcgtcagggccaccgcactgcgccgggagatggagaaggtcaccttgtga

SEQ ID NO: 1923 - protein, 457 aa, Zea mays
MTSLSSAVALPSSCRARPAGGSRRARMVVTRAAASSPKLPNGRRLRVAVVGGGPAGGAAAEALAKGGVETVLIERKMDNCKPCGGAIPLCMVSEFDLPLDLVDRKVRKMKMISPSNVAVDIGRTLAPHEYIGMVRREVLDAYLRSRAQSVGAEVVNGLFLRYEAPKEPNGSYVVHYNHYDGSNGKVGGEKRSFEVDAIVGADGANSRVAKDMGAGDYEYAIAFQERVKIPDDKMVYYEERAEMYVGDDVSPDFYGWVFPKCDHVAVGTGTVTHKADIKKFQAATRLRAKDKIEGGKIIRVEAHPIPEHPRPKRVSGRVTLVGDAAGYVTKCSGEGIYFAAKSGRMCAEAIVAGSANGTRMVEESDLRKYLAEFDRLYWPTYKVLDILQKVFYRSNAAREAFVEMCADDYVQKMTFDSYLYKRVVPGNPLDDIKLAVNTIGSLVRATALRREMEKVTL

SEQ ID NO: 1924 - DNA, 21 bp, Artificial sequence
  primer
atggtggatgagtttgatctg

SEQ ID NO: 1925 - DNA, 20 bp, Artificial sequence
  primer
ttaaggggctaaagcgttac

SEQ ID NO: 1926 - protein, 431 aa, Artificial sequence
  consensus sequence
  Variant (2)..(2): Xaa in position 2 is any amino acid
  Variant (6)..(6): Xaa in position 6 is any amino acid
  Variant (11)..(11): Xaa in position 11 is any amino acid
  Variant (13)..(14): Xaa in position 13 to 14 is any amino acid
  Variant (18)..(18): Xaa in position 18 is any amino acid
  Variant (21)..(22): Xaa in position 21 to 22 is any amino acid
  Variant (24)..(25): Xaa in position 24 to 25 is any amino acid
  Variant (27)..(27): Xaa in position 27 is any amino acid
  Variant (29)..(29): Xaa in position 29 is any amino acid
  Variant (32)..(33): Xaa in position 32 to 33 is any amino acid
  Variant (34)..(34): Xaa in position 34 is any or no amino acid
  Variant (36)..(36): Xaa in position 36 is any amino acid
  Variant (39)..(40): Xaa in position 39 to 40 is any amino acid
  Variant (50)..(51): Xaa in position 50 to 51 is any amino acid
  Variant (54)..(55): Xaa in position 54 to 55 is any amino acid
  Variant (57)..(60): Xaa in position 57 to 60 is any amino acid
  Variant (61)..(62): Xaa in position 61 to 62 is any or no amino acid
  Variant (65)..(65): Xaa in position 65 is any amino acid
  Variant (67)..(68): Xaa in position 67 to 68 is any amino acid
  Variant (70)..(70): Xaa in position 70 is any amino acid
  Variant (77)..(78): Xaa in position 77 to 78 is any amino acid
  Variant (81)..(86): Xaa in position 81 to 86 is any amino acid
  Variant (87)..(94): Xaa in position 87 to 94 is any or no amino acid
  Variant (99)..(99): Xaa in position 99 is any amino acid
  Variant (104)..(104): Xaa in position 104 is any amino acid
  Variant (106)..(108): Xaa in position 106 to 108 is any amino acid
  Variant (110)..(110): Xaa in position 110 is any amino acid
  Variant (113)..(115): Xaa in position 113 to 115 is any amino acid
  Variant (118)..(121): Xaa in position 118 to 121 is any amino acid
  Variant (123)..(132): Xaa in position 123 to 132 is any amino acid
  Variant (133)..(140): Xaa in position 133 to 140 is any or no amino acid
  Variant (142)..(144): Xaa in position 142 to 144 is any amino acid
  Variant (146)..(153): Xaa in position 146 to 153 is any amino acid
  Variant (154)..(163): Xaa in position 154 to 163 is any or no amino acid
  Variant (166)..(166): Xaa in position 166 is any amino acid
  Variant (167)..(167): Xaa in position 167 is any or no amino acid
  Variant (180)..(182): Xaa in position 180 to 182 is any amino acid
  Variant (183)..(184): Xaa in position 183 to 184 is any or no amino acid
  Variant (187)..(187): Xaa in position 187 is any amino acid
  Variant (189)..(189): Xaa in position 189 is any amino acid
  Variant (190)..(190): Xaa in position 190 is any or no amino acid
  Variant (194)..(194): Xaa in position 194 is any amino acid
  Variant (198)..(200): Xaa in position 198 to 200 is any amino acid
  Variant (202)..(203): Xaa in position 202 to 203 is any amino acid
  Variant (204)..(204): Xaa in position 204 is any or no amino acid
  Variant (206)..(206): Xaa in position 206 is any amino acid
  Variant (208)..(208): Xaa in position 208 is any amino acid
  Variant (209)..(219): Xaa in position 209 to 219 is any or no amino acid
  Variant (221)..(223): Xaa in position 221 to 223 is any amino acid
  Variant (230)..(230): Xaa in position 230 is any amino acid
  Variant (238)..(238): Xaa in position 238 is any amino acid
  Variant (244)..(244): Xaa in position 244 is any amino acid
  Variant (245)..(245): Xaa in position 245 is any or no amino acid
  Variant (255)..(258): Xaa in position 255 to 258 is any amino acid
  Variant (259)..(261): Xaa in position 259 to 261 is any or no amino acid
  Variant (264)..(265): Xaa in position 264 to 265 is any amino acid
  Variant (267)..(269): Xaa in position 267 to 269 is any amino acid
  Variant (271)..(271): Xaa in position 271 is any amino acid
  Variant (274)..(276): Xaa in position 274 to 276 is any amino acid
  Variant (277)..(279): Xaa in position 277 to 279 is any or no amino acid
  Variant (281)..(282): Xaa in position 281 to 282 is any amino acid
  Variant (284)..(284): Xaa in position 284 is any amino acid
  Variant (299)..(300): Xaa in position 299 to 300 is any amino acid
  Variant (303)..(304): Xaa in position 303 to 304 is any amino acid
  Variant (305)..(305): Xaa in position 305 is any or no amino acid
  Variant (313)..(313): Xaa in position 313 is any amino acid
  Variant (317)..(317): Xaa in position 317 is any amino acid
  Variant (332)..(332): Xaa in position 332 is any amino acid
  Variant (335)..(335): Xaa in position 335 is any amino acid
  Variant (337)..(341): Xaa in position 337 to 341 is any amino acid
  Variant (342)..(342): Xaa in position 342 is any or no amino acid
  Variant (344)..(347): Xaa in position 344 to 347 is any amino acid
  Variant (348)..(348): Xaa in position 348 is any or no amino acid
  Variant (350)..(353): Xaa in position 350 to 353 is any amino acid
  Variant (354)..(355): Xaa in position 354 to 355 is any or no amino acid
  Variant (357)..(358): Xaa in position 357 to 358 is any amino acid
  Variant (359)..(360): Xaa in position 359 to 360 is any or no amino acid
  Variant (362)..(363): Xaa in position 362 to 363 is any amino acid
  Variant (365)..(366): Xaa in position 365 to 366 is any amino acid
  Variant (369)..(369): Xaa in position 369 is any amino acid
  Variant (372)..(373): Xaa in position 372 to 373 is any amino acid
  Variant (376)..(377): Xaa in position 376 to 377 is any amino acid
  Variant (380)..(384): Xaa in position 380 to 384 is any amino acid
  Variant (393)..(393): Xaa in position 393 is any amino acid
  Variant (395)..(396): Xaa in position 395 to 396 is any amino acid
  Variant (399)..(400): Xaa in position 399 to 400 is any amino acid
  Variant (409)..(409): Xaa in position 409 is any amino acid
  Variant (412)..(414): Xaa in position 412 to 414 is any amino acid
  Variant (416)..(419): Xaa in position 416 to 419 is any amino acid
  Variant (421)..(424): Xaa in position 421 to 424 is any amino acid
  Variant (426)..(430): Xaa in position 426 to 430 is any amino acid
LXVAVXGGGPXGXXAAEXLAXXGXXTXLXERXXXNXKPXXCGGAIPLCMXXEFXXPXXXXXXDRXVXXMXMISPSNXXVDXXXXXXXXXXXXXXYIGMXRREVXDXXXRXRAXXXGAXXXXGXXXXXXXXXXXXXXXXXXYXXXYXXXXXXXXXXXXXXXXXXVDXXIGADGANSRVAKXXXXXAGXYXXAIAXQERXXXPXXXMXYXXXXXXXXXXXXYXXXAEMYVGXDVSPDFYXWVFPKXXDHVAVGTGTXXXXXXXIKXXQXXXRXRAXXXXXXGXXIXVEAHPIPEHPRPRRXXGRXXXLVGDAAGXVTKXSGEGIYFAAKSGRMXAEXIXXXXXXGXXXXXEXXXXXXYXXXXDXXYXXTYXVLXXLQXXFYXXXXXREAFVEMCXDXXVQXXTFDSYLYKXVVXXXPXXXXKXXXXTXXXXXR

SEQ ID NO: 1927 - protein, 34 aa, Artificial sequence
  protein pattern
  Variant (2)..(4): Xaa in position 2 to 4 is any or no amino acid
  Variant (10)..(10): Xaa in position 10 is any amino acid
  Variant (14)..(14): Xaa in position 14 is Cys or Ser
  Variant (19)..(19): Xaa in position 19 is Phe or Ile
  Variant (23)..(23): Xaa in position 23 is Ala or Pro
  Variant (25)..(25): Xaa in position 25 is any amino acid
  Variant (26)..(26): Xaa in position 26 is Ala, Gly or Ile
  Variant (27)..(27): Xaa in position 27 is Lys or Arg
  Variant (29)..(29): Xaa in position 29 is Ala or Cys
  Variant (31)..(31): Xaa in position 31 is Glu or Gln
  Variant (32)..(32): Xaa in position 32 is any amino acid
  Variant (33)..(33): Xaa in position 33 is Ile or Val
  Variant (34)..(34): Xaa in position 34 is Ile, Leu or Val
VXXXGDAAGXVTKXSGEGXYFAXKXXXMXAXXXX

SEQ ID NO: 1928 - protein, 24 aa, Artificial sequence
  protein pattern
  Variant (3)..(3): Xaa in position 3 is Asp, Glu, Asn or Gln
  Variant (4)..(4): Xaa in position 4 is Asp, Glu or Asn
  Variant (5)..(5): Xaa in position 5 is any amino acid
  Variant (12)..(12): Xaa in position 12 is any amino acid
  Variant (16)..(16): Xaa in position 16 is Pro or Thr
  Variant (20)..(20): Xaa in position 20 is Ala or Gly
YYXXXAEMYVGXDVSXDFYXWVFP

SEQ ID NO: 1929 - protein, 26 aa, Artificial sequence
  protein pattern
  Variant (2)..(2): Xaa in position 2 is any or no amino acid
  Variant (6)..(6): Xaa in position 6 is Phe or Leu
  Variant (8)..(8): Xaa in position 8 is Ala or Glu
  Variant (9)..(9): Xaa in position 9 is Leu or Met
  Variant (11)..(11): Xaa in position 11 is Ala, Asp, Glu, Gly, Asn or Ser
  Variant (13)..(14): Xaa in position 13 to 14 is any amino acid
  Variant (17)..(17): Xaa in position 17 is Lys or Arg
  Variant (18)..(18): Xaa in position 18 is any amino acid
  Variant (21)..(21): Xaa in position 21 is Asp or Glu
  Variant (25)..(25): Xaa in position 25 is His or Tyr
AXREAXVXXCXDXXVQXXTFXSYLXK

SEQ ID NO: 1930 - protein, 14 aa, Artificial sequence
  protein pattern
  Variant (13)..(13): Xaa in position 13 is any or no amino acid
VEAHPIPEHPRPXR

SEQ ID NO: 1931 - protein, 20 aa, Artificial sequence
  protein pattern
  Variant (2)..(2): Xaa in position 2 is any or no amino acid
  Variant (4)..(4): Xaa in position 4 is any or no amino acid
  Variant (6)..(7): Xaa in position 6 to 7 is any amino acid
  Variant (9)..(9): Xaa in position 9 is any amino acid
  Variant (10)..(10): Xaa in position 10 is Ile or Met
  Variant (12)..(12): Xaa in position 12 is Ala or Ser
  Variant (16)..(16): Xaa in position 16 is any amino acid
  Variant (17)..(17): Xaa in position 17 is Ala, Glu or Thr
  Variant (19)..(19): Xaa in position 19 is Asp or Asn
  Variant (20)..(20): Xaa in position 20 is Phe, Ile or Val
DXRXVXXMXXIXPSNXXVXX

SEQ ID NO: 1932 - protein, 14 aa, Artificial sequence
  protein pattern
  Variant (2)..(2): Xaa in position 2 is Ala, Gly or Pro
  Variant (4)..(4): Xaa in position 4 is any amino acid
  Variant (9)..(9): Xaa in position 9 is Phe, Leu or Met
  Variant (11)..(11): Xaa in position 11 is Ala, Asp, Glu, Gly, Gln or Ser
  Variant (12)..(12): Xaa in position 12 is Phe or Tyr
  Variant (13)..(13): Xaa in position 13 is Leu or Met
IXMXRREVXDXXXR

SEQ ID NO: 1933 - protein, 14 aa, Artificial sequence
  protein pattern
  Variant (2)..(2): Xaa in position 2 is any amino acid
  Variant (3)..(3): Xaa in position 3 is Ile, Leu or Val
  Variant (4)..(4): Xaa in position 4 is Ile or Val
  Variant (10)..(10): Xaa in position 10 is Asn or Thr
  Variant (13)..(13): Xaa in position 13 is Ile or Val
DXXXGADGAXSRXA

SEQ ID NO: 1934 - protein, 14 aa, Artificial sequence
  protein pattern
  Variant (2)..(3): Xaa in position 2 to 3 is any or no amino acid
  Variant (6)..(7): Xaa in position 6 to 7 is any or no amino acid
  Variant (11)..(11): Xaa in position 11 is Ile or Val
  Variant (12)..(12): Xaa in position 12 is Glu, Lys or Arg
  Variant (13)..(13): Xaa in position 13 is Ile or Leu
YXXAIXXQERXXXP

SEQ ID NO: 1935 - protein, 14 aa, Artificial sequence
  protein pattern
  Variant (2)..(2): Xaa in position 2 is Phe or Tyr
  Variant (3)..(4): Xaa in position 3 to 4 is any amino acid
  Variant (6)..(6): Xaa in position 6 is Asp, Glu, Gly or Ser
  Variant (7)..(7): Xaa in position 7 is Ile, Leu or Val
  Variant (10)..(10): Xaa in position 10 is any amino acid
  Variant (11)..(11): Xaa in position 11 is any or no amino acid
  Variant (13)..(13): Xaa in position 13 is any or no amino acid
TXXXLXXLQXXFXY

SEQ ID NO: 1936 - protein, 10 aa, Artificial sequence
  protein pattern
  Variant (4)..(4): Xaa in position 4 is Ala or Pro
  Variant (5)..(5): Xaa in position 5 is Ala or Val
  Variant (10)..(10): Xaa in position 10 is Met or Val
DHVXXGTGTX

SEQ ID NO: 1937 - protein, 17 aa, Artificial sequence
  protein pattern
  Variant (2)..(3): Xaa in position 2 to 3 is any amino acid
  Variant (4)..(4): Xaa in position 4 is Asp or Gln
  Variant (5)..(5): Xaa in position 5 is any amino acid
  Variant (6)..(6): Xaa in position 6 is Lys or Arg
  Variant (7)..(7): Xaa in position 7 is Ile or Leu
  Variant (8)..(10): Xaa in position 8 to 10 is any amino acid
  Variant (12)..(12): Xaa in position 12 is Ala, Ile, Leu or Val
  Variant (13)..(13): Xaa in position 13 is Ala, Asp, Gly or Ser
  Variant (14)..(14): Xaa in position 14 is Ala or Ser
  Variant (15)..(15): Xaa in position 15 is Ile, Leu, Met or Val
  Variant (16)..(16): Xaa in position 16 is any amino acid
PXXXXXXXXXTXXXXXR

SEQ ID NO: 1938 - DNA, 1524 bp, Synechocystis sp.
  CDS (1)..(1524): transl_table=11
atggtccctagcaatgctgaatctcaatccgtagttgtaattggtgctggcattggtggtctgacaacggcggccctgttagcccaacagggttatcgagtcaaagtttatgaacaggcggccatagtggggggttgtgcatccacctttcggcgacggggttttattttcgatgtgggggccacccaggtggcgggcctagagccagggggaattcaccaccgcattttccgccagttgcaagtggatttgccggaagcaaccctgtgcgatcccgcctgtgcagtttttttgccaggggaaaagcaaccgattaacgtttggcatgatcctgagcgatggcaaagggaaagggaacagcaatttccagggagtggcagattttggcagttgctacaaacgttgttccaaattagttggcgtttccaggggcgagatcctgtattgcccccccgcagtatgtgggatttgggccagttgttgggggcattgcggccggataccctactcacggctccctttgtgcctctcacggtgggggataccctccgattattgggtttggggtcagaccaaaggttaaaaacttttcttgatttacagttaaaactctattcccaggtgggggctgatgagacagctttgttatacgccgctacggccttgagcgtttcccaagggccccagggtctatggcatctccagggcagtatgcaaaccctaggcgatcgcctggtggaagcgctgaaaaaccatggaggggaattattttgcagtcagcgagtagagcagatccattgtggccaaggctatgtagagggggtgacggtgcgggacgtaaggagcggagaagtacgtcaagaaaaagcccagcaggtggtggccaatttaacggtgcagaatttactccaagcactagatcaaccattacccggttatcaaaaaagagtgactaatttaccctcgggctcgggtgcttttgtcatctatttaggcgtcaaggaagatgccattcccccagactgtgctccccatctacagtttttgtacgatcaccaaggccccattggcgaaaataattctctctttgtcagtgttagtaaaccaggggatggccgggctccccggggctgtagaactgtaattgcttcttccttcaccgacgtggccccctggtggaatgcttcccgggaacaatatcaggctctcaaggaaagttacacaaccacggcgatctccagattgggagaatatttcaatttggatgaatccaccattgttcaccaagaaagtgccactccccgcacatttgaccgttacactgcccgggaccaaggcatcgtcggcggagtaggccagcgtttgaccacctttgggccctttggctttgctccccgtacccccattcgtaacctttggctagtgggggattccgtgcatccgggggaaggcaccgctggggtaagttacagcgccctcaccattgcccggcaaatttgtgccagtggagcaacaaactcctaa

SEQ ID NO: 1939 - protein, 507 aa, Synechocystis sp.
MVPSNAESQSVVVIGAGIGGLTTAALLAQQGYRVKVYEQAAIVGGCASTFRRRGFIFDVGATQVAGLEPGGIHHRIFRQLQVDLPEATLCDPACAVFLPGEKQPINVWHDPERWQREREQQFPGSGRFWQLLQTLFQISWRFQGRDPVLPPRSMWDLGQLLGALRPDTLLTAPFVPLTVGDTLRLLGLGSDQRLKTFLDLQLKLYSQVGADETALLYAATALSVSQGPQGLWHLQGSMQTLGDRLVEALKNHGGELFCSQRVEQIHCGQGYVEGVTVRDVRSGEVRQEKAQQVVANLTVQNLLQALDQPLPGYQKRVTNLPSGSGAFVIYLGVKEDAIPPDCAPHLQFLYDHQGPIGENNSLFVSVSKPGDGRAPRGCRTVIASSFTDVAPWWNASREQYQALKESYTTTAISRLGEYFNLDESTIVHQESATPRTFDRYTARDQGIVGGVGQRLTTFGPFGFAPRTPIRNLWLVGDSVHPGEGTAGVSYSALTIARQICASGATNS

SEQ ID NO: 1940 - DNA, 1512 bp, Nostoc sp. PCC 7120
  CDS (1)..(1512): transl_table=11
atgtctaatattgttaagcaaaataaaccccgtgtagtcgtgattggtgcgggaataggcggactaacggctggtgcattattagcccatcgcggttacagcgtcctcatattagaccaagcccttgttcctgggggttgtgcttccacatttaaacgccaaggattcacctttgatgtgggtgcaactcaggttgcaggcttagaaccagggggaatccatcaccgcatcttttcggaactggaaatagatttaccagatgcaacaccttgtgaccctgcttgtgcagtttatttaccgggggaaaatacacctatcaatgtttggcgcgacccaaaaaagtggcaggaagaacgccaaagacaatttcctgggagtgaaccattttggcaattgatggctactttatttgatgccagttgggagtttcaaggacgtgacccagttttaccgccgcgtaatttgtgggatttgtggcagttaacccaggcggtacgtcctagtaccttagttactgtacccttcacactatttaccgtgggtgacgctttaaggttgtgtggtttgggaaatgaccaccgactgaggacatttttagatttgcaactcaaactatattctcaagtcaacgctgaggagacggctttactttatgctgcaacggcgttgagtgtgtcccaactaccacagggattatttcacctagaaggtagtatgcaggtattaagcgatcgcctagtcgaagcgttagaaagagatggcggtaaattattgatgcgtcataccgttgaacaaatcaaagtggaaaacggtaaagcatctgctgtcgtcatcagaaaccaaaaaacaggggaagtttggacagaagaagcagaccacatagttgctaacgtgactgtgcagaacctagtgcaactattaggcgacaaggctccatcaggttataagcagcgtgtcaataaactcccccaagcatcaggggcgtttgttgtgtatttgggtgtagatgctagtgctatcccgcccgaatgtcccccccatttgcagtttttatatgatgctgatggtgtgattggggagaataattctttgtttgtgtcggtgagtcatgctggtgatggtcgcgcgccagaaggaaaagctacaattattgcctcatctttcgtagaccccgaacggtggtggagtacggaagattaccctggtttgaaacagaaatttacccaagaagcgatcgccaaattagcccaatacttttatctcaaaccagagactattatttatcaagaagctgctacaccgcgtacctttgcccattacacagcacgcgatcgcggtatagtcggtggtattggtcaaagaatccccacattcggcccctttggttttgccaatcgtacacccattgaccatctgtggttagtcggtgactctacccacccaggtgaagggacagccggcgtaagctactcggctttaactgtagttaggcaaattaatcatagtcattag

SEQ ID NO: 1941 - protein, 503 aa, Nostoc sp. PCC 7120
MSNIVKQNKPRVVVIGAGIGGLTAGALLAHRGYSVLILDQALVPGGCASTFKRQGFTFDVGATQVAGLEPGGIHHRIFSELEIDLPDATPCDPACAVYLPGENTPINVWRDPKKWQEERQRQFPGSEPFWQLMATLFDASWEFQGRDPVLPPRNLWDLWQLTQAVRPSTLVTVPFTLFTVGDALRLCGLGNDHRLRTFLDLQLKLYSQVNAEETALLYAATALSVSQLPQGLFHLEGSMQVLSDRLVEALERDGGKLLMRHTVEQIKVENGKASAVVIRNQKTGEVWTEEADHIVANVTVQNLVQLLGDKAPSGYKQRVNKLPQASGAFVVYLGVDASAIPPECPPHLQFLYDADGVIGENNSLFVSVSHAGDGRAPEGKATIIASSFVDPERWWSTEDYPGLKQKFTQEAIAKLAQYFYLKPETIIYQEAATPRTFAHYTARDRGIVGGIGQRIPTFGPFGFANRTPIDHLWLVGDSTHPGEGTAGVSYSALTVVRQINHSH

SEQ ID NO: 1942 - DNA, 1545 bp, Thermosynechococcus elongatus BP-1
  CDS (1)..(1545): transl_table=11
atggcaaagcatgtggtcgtcattggcggcggcattggtggtctgacgacagcagccttgttggcccgacggggctaccgcgttcaactatttgaacaggcggcccaattaggcggctgtgcttcaacctttcagcggcgtggctttacctttgatgtgggtgccacccaagtggcgggtctggagccgggggggatccatgcccagatttttgctgaattggagatgcctctgccgcccgcaaccccctgtgaccccgcctgtgcggtgtatctgccgcaggaaacaacgcccattcatgtttggcgcgatcgcgatcgctggcgactagaacgtcaacgccactttcccggcagtgagcgattttggcaaggccttgaacaactttttgccattagttggcgatttcagcagcggcagccaattttgcccccccgcaatggctttgatctgtggcaactggtgcaagccctccgtcccgataccctcctcacggtgcccttcagtctaatgacggtaaccgattggctgaatctctgtggtctggggagcgatcgccggctgcggcaatttctggatctgcaactcaagctctactcccaagtggacgccagtgaaacagcattgctctatgcggccaccgccctctgcctttcccaggagccccacggtctttaccatctccacggcagtatgcaggttctcagtgatttgctagccaatgccttgcggcgggatggcggccaaatctacacccgtcatcgggtgcatgacattgcagtcgagggagggcgtgccgtcgccgtccaggtggaaaacctaaaaacaaaaaccttggagcgcgttgaagccgatcacattgtggccaatgtccctgcccaaaacctgccccaactccttggcgatgcccttccccctggctatgcccgccgcctaaaaagactgcctccggcctccggtgcctttgtcctctatctgggagtgaaggaggccgccattccggaagtctgtccaccccacctgcaatttctctacgatcctcaggggccaattggcgaaaacaactccctctttgtttctgtgagtcaaccccaggatggccgtgctccccagggctatcgtaccctgattgcctccagttttactgaaccgaatttctggcggcagcccgacttagattacaccgccaccaaggcacaatatacccaaacagctctggaacgcctaggggaattctttgatctgcggcctgagtacattgtccactgcgaagcggccactccccgcaccttctggcgctacacggcacgaatagatggcattgtcggtggcatcagtcaacgcctgagtacctttggcccctttggcttggcaagccgcacccccattccccacctgtggttagtgggagattccgtgcatccgggggaaggcactgccggcgtcagctatggtgcccgtgcccttgtccaacaggtggttgccagtgatagcaattttggtaaaagtcactataatagagggacactgaggctaatcaattga

SEQ ID NO: 1943 - protein, 514 aa, Thermosynechococcus elongatus BP-1
MAKHVVVIGGGIGGLTTAALLARRGYRVQLFEQAAQLGGCASTFQRRGFTFDVGATQVAGLEPGGIHAQIFAELEMPLPPATPCDPACAVYLPQETTPIHVWRDRDRWRLERQRHFPGSERFWQGLEQLFAISWRFQQRQPILPPRNGFDLWQLVQALRPDTLLTVPFSLMTVTDWLNLCGLGSDRRLRQFLDLQLKLYSQVDASETALLYAATALCLSQEPHGLYHLHGSMQVLSDLLANALRRDGGQIYTRHRVHDIAVEGGRAVAVQVENLKTKTLERVEADHIVANVPAQNLPQLLGDALPPGYARRLKRLPPASGAFVLYLGVKEAAIPEVCPPHLQFLYDPQGPIGENNSLFVSVSQPQDGRAPQGYRTLIASSFTEPNFWRQPDLDYTATKAQYTQTALERLGEFFDLRPEYIVHCEAATPRTFWRYTARIDGIVGGISQRLSTFGPFGLASRTPIPHLWLVGDSVHPGEGTAGVSYGARALVQQVVASDSNFGKSHYNRGTLRLIN

SEQ ID NO: 1944 - DNA, 1500 bp, Prochlorococcus marinus subsp. marinus str. CCMP1375
  CDS (1)..(1500): transl_table=11
atgcttgagcaatcagtaattgtaattggtggtgggatagctggtttaaccgcaggagccttattggctcatgaagggatcaatgtaactttgcttgaggcacataatcaagtaggtgggtgtgcaggtacatttcgacgaggaccttatatttttgatgttggagcaacacaagttgctggctttgaaagaggcggtattcatgagcgaattttcagacatcttcaatggcctttacctagcgcagatgtcctagaccctgcttgtgtagtccaccttggggatgggaagagaccaatacatctctggcacgatccttccaaatggcaagaagaaagaaaggatcaattccctgggagtgagcttttttggtatttatgtagtcaattacatcaaagcaattggtcctttgcttgcaatgatccgattctgcctattcaaaattactgggatttaaagcagtttgttaaagcaacgaggccgatgaatgtattgtctggattcttcagccggtcatctgtcactgacctcctttggctttgtgcatgtaatcaagataaacgattgaaagcatttttagacttgcaactaaaactttattctcaagagctaagtgatgaaacagctgctttatatggagcaactgttcttcaaatggcgcaggctccacttgggttatatcaccttcatgggtctatgcaaaaacttagcgatcatttacttgcttgttttttacgagatggtggaaatttattattaggtcataaagttgtagaaatagtaaaaaaaaatgagaacagtggatggaagttaaaagtaatcaacaaacaattgtcgttaaactttcaagcatcagatttgatatttacccttcccccacagagtctattagacttagttgttggattgcctctaaaatatcgccatagattagagaatctatcacaaccctctggagctattgttttttatggcgcaattaaacggtgtcatcttcctttaaacattgcagggcatattcaagtaatgtctgataaacaaggttcattatttatttctattagtcaagaaggggatggccgtgctcctgttggtgaagcaactgtcattgcaagtgcttttacagatgtttcaccttggatgtcttgcaatgaagttgaatatcgaatacaaaaaaaattggctctaacaaacattacggaagttttaaatacagagttaaatattgaacatgagaattggcagcataaagaattagcaactccaaaaagttttgcaaaatggacaggtcgtcctcaaggtattgttggtggtttagggcagaagccaacaatttttggaccttttggattatctagtagaactcctatgaatggtttatggttatgtggtgattctatttaccctggtgaaggtacagcgggagtaagtcagtcttctgttatggcttgtaagcaattcatgtctgaaaaggggctagaattaaatttaagtcgataa

SEQ ID NO: 1945 - protein, 499 aa, Prochlorococcus marinus subsp. marinus str. CCMP1375
MLEQSVIVIGGGIAGLTAGALLAHEGINVTLLEAHNQVGGCAGTFRRGPYIFDVGATQVAGFERGGIHERIFRHLQWPLPSADVLDPACVVHLGDGKRPIHLWHDPSKWQEERKDQFPGSELFWYLCSQLHQSNWSFACNDPILPIQNYWDLKQFVKATRPMNVLSGFFSRSSVTDLLWLCACNQDKRLKAFLDLQLKLYSQELSDETAALYGATVLQMAQAPLGLYHLHGSMQKLSDHLLACFLRDGGNLLLGHKVVEIVKKNENSGWKLKVINKQLSLNFQASDLIFTLPPQSLLDLVVGLPLKYRHRLENLSQPSGAIVFYGAIKRCHLPLNIAGHIQVMSDKQGSLFISISQEGDGRAPVGEATVIASAFTDVSPWMSCNEVEYRIQKKLALTNITEVLNTELNIEHENWQHKELATPKSFAKWTGRPQGIVGGLGQKPTIFGPFGLSSRTPMNGLWLCGDSIYPGEGTAGVSQSSVMACKQFMSEKGLELNLSR

SEQ ID NO: 1946 - DNA, 1506 bp, Prochlorococcus marinus subsp. pastoris str. CCMP1986
  CDS (1)..(1506): transl_table=11
atgtcaaagactgaaattgttgttgttggtgctggtatagccgggctaacttctgcggcaattttatcaaaactagggctttcagtgactttgattgagtcgcatactcaatcgggaggttgtgcaggaacctttaaaagaaaaagatatatttttgatgttggagcaactcaagtcgccggtctggaagaagggggaatacactctaagatttttaaatttttagacattcctcttcctgaagcatccatcttaaacccagcttgcattgttgacttaaaagatggcagcaagccaattcctatctggtatgacaaagatgaatggattaaggagagggagatgcagttcccaggtagtcgtcaattttggcaactatgtaatttaattcatcagagtaattggacttttgctaataataacccagtattacccgtcaagaattattgggattttttgcaacttcttacagcattagttccaacgaatttagttacaggaatattgattagatctactatctttgatcttttacgtttttgtggattatctaataatgaaagattaattaagtttcttaatttgcaattaaagctttattcacaagaagatgtttataacactgcagctctatatggttctacagtgttgcaaatgtgtcaaaaaccacatggtttatggcatttaaaaaaatcaatgcaaactttaagtgatgctttagaagattcattaaaaaaaaggggagttaatattgttttcgggcaaaaagtaaattccattaattttgattatgaaaaaaagagttggaaagtttgtgcatcatctaagcaagagaagatggtttacttcgcagatgatgtaatttatacacctcctccacaatctcttttgaaacatctagaaaatcctctagataataattataattataaaaaaagaatacaaagtcttcctgatccaagcggtgcgttagtcttttattcagctttaaaaaaagaacatattaaagtaatctcttccaatcattatcagtttgtttcaaatgaattagggtcactttttgtatccataagtgaggagggagatggaagagctccaaaaggcgagattacattgatagcaagtctttttacaaaaacgaatgactggtttagtttagataaacatgactatataaagaaaaaaaaggagtatttacaaaaaatatcaatggcacttgaaaaccaatttgatattgcttctgaaaattggcttcataaggaattggctactccattaggatttgaaaggtggactaacaggccaaatgggatagtaggtggtctaggtcaaaatcctgatatttttggattatttgggttatcaagtagaactccttttaaaggtttatggttatgtggcgattctatttatccaggagaagggacagcgggtgttagtcagtcagcagtaatggttgcaaggcaaattttagcttctaaaggaattaatgatttttatttataa

SEQ ID NO: 1947 - protein, 501 aa, Prochlorococcus marinus subsp. pastoris str. CCMP1986
MSKTEIVVVGAGIAGLTSAAILSKLGLSVTLIESHTQSGGCAGTFKRKRYIFDVGATQVAGLEEGGIHSKIFKFLDIPLPEASILNPACIVDLKDGSKPIPIWYDKDEWIKEREMQFPGSRQFWQLCNLIHQSNWTFANNNPVLPVKNYWDFLQLLTALVPTNLVTGILIRSTIFDLLRFCGLSNNERLIKFLNLQLKLYSQEDVYNTAALYGSTVLQMCQKPHGLWHLKKSMQTLSDALEDSLKKRGVNIVFGQKVNSINFDYEKKSWKVCASSKQEKMVYFADDVIYTPPPQSLLKHLENPLDNNYNYKKRIQSLPDPSGALVFYSALKKEHIKVISSNHYQFVSNELGSLFVSISEEGDGRAPKGEITLIASLFTKTNDWFSLDKHDYIKKKKEYLQKISMALENQFDIASENWLHKELATPLGFERWTNRPNGIVGGLGQNPDIFGLFGLSSRTPFKGLWLCGDSIYPGEGTAGVSQSAVMVARQILASKGINDFYL

SEQ ID NO: 1948 - DNA, 1512 bp, Prochlorococcus marinus str. MIT 9313
  CDS (1)..(1512): transl_table=11
atggctgaggactcaatcatcgtgatcgggggcggcattgccggcctaacggcaacagccctcttagccaagcaaggattacccgtcaccttggtggaagcgcaccatcaacctggagggtgtgccggcaccttcagacgaggtccctatatcttcgatgtgggtgccacccaggttgctggcctagaacccagtggcagccatgaacgcatctataggcatctgaacctgcccatgccacaagcggagctactcaaccccgcttgtgcagtggatctcgccgacggatcccaacccattcagctctggcatgatccaaagcgctgggaacaagaatggcgatatcacttccctggcagtgactccttctgggctctgactgccaagctccaccaaagcaactggggctttgccagccatgatccggtcgtcacaccccgcaacgcttgggacttaggccaactgcttcaagctctgcgtccagcaacaatcacctcagggctattgagcagcctgacagtggcagatctcttaaagctatgcggctgtgagcaggatcagcgccttcgcaaattcttagacctccagatcaagctctattcgcaagaaccgctcgatcgcacagccgccctctatggagccaccgtgttgcaaatggctcaagcacctcttgggctctggcatctgcagggatcgatgcaaaaactcagcgatgacctaatgcatgccctgcagcgggatggcggccaggtattgctgcgccatcgtgtggtgggcctagaactagctacgcggggcatggcttggacagtcagcatcaaaacccccaatggcaaggctttagaactgaccacaccagatgtggtatgcagtctgcctcctcaatgcctgagatcgctgatgccacaaggaacaggcatgcccaaggcctatcgccaaaggctaatgaaattacctcaacccagtggagctttggtgttctacggagccatcgatcgcagcgccctgcctaagaactgtcctgtccatctgcaaagagcctccaagacacccggctccctgttcgtatcaatcagccgtgagggagatggccgtgctcccgctggtcaagccacagtgattgcaagtgtgttcaccgccacagcggagtggtggggcctaactgaatccacctatcaagaacgcaagcaaacagccctgttagccatccgccaaacacttgaaagttggttagatctcgcacctgaagcttggcagcatcaagaactagccacacccaggagctttgcacattggactggtcggcccaatggaattgtgggtggccttgggcagcacccttcacaatttgggcccttcggactagcaagccgcactcccatgcgagggctctggctctgtggcgactcaattcaccctggtgaaggtactgcaggggtgagcatctcggcactcatgacctgtcgccagctcatggctcagcgaggtcatcagttgcgggtggcgaattga

SEQ ID NO: 1949 - protein, 503 aa, Prochlorococcus marinus str. MIT 9313
MAEDSIIVIGGGIAGLTATALLAKQGLPVTLVEAHHQPGGCAGTFRRGPYIFDVGATQVAGLEPSGSHERIYRHLNLPMPQAELLNPACAVDLADGSQPIQLWHDPKRWEQEWRYHFPGSDSFWALTAKLHQSNWGFASHDPVVTPRNAWDLGQLLQALRPATITSGLLSSLTVADLLKLCGCEQDQRLRKFLDLQIKLYSQEPLDRTAALYGATVLQMAQAPLGLWHLQGSMQKLSDDLMHALQRDGGQVLLRHRVVGLELATRGMAWTVSIKTPNGKALELTTPDVVCSLPPQCLRSLMPQGTGMPKAYRQRLMKLPQPSGALVFYGAIDRSALPKNCPVHLQRASKTPGSLFVSISREGDGRAPAGQATVIASVFTATAEWWGLTESTYQERKQTALLAIRQTLESWLDLAPEAWQHQELATPRSFAHWTGRPNGIVGGLGQHPSQFGPFGLASRTPMRGLWLCGDSIHPGEGTAGVSISALMTCRQLMAQRGHQLRVAN

SEQ ID NO: 1950 - DNA, 1503 bp, Synechococcus sp. WH 8102
  CDS (1)..(1503): transl_table=11
ttgacggcaaccggtgtgatcgtgatcggtggcggcatcgctgggctcaccgccgcggcgctgctggccaagcaggggctgccggtgacgctgctggaggcacatcaccagccggggggctgtgcaggcaccttccgccgagggccgtggacctttgacgtgggcgccacccaggtggccgggctcgaaccgggcggcagccacgcccgactgctgctgcatcttggcctgccactgccggaagccgaggtcctcgatcctggctgcgtggtggacctgggggatggttccgagcccatccccctctggcatgatcccgagcgctggaacgaagaacgccgtcgccagtttcccggcagcgatgccttctggagcctctgtgagctgatccatcgcagcaactggggcttcgccggtcgtgatccggtggtcacgcctcgctccctctgggacctgcgccaactggtttccgccctgcgcccgatcaccgtggcgtcgggtctgctgacgggcttgaccatggccgacctgctcggcctctgcggttgcggcgacgacccgcgcctgcgacggtttctcgacctccagctcaagctgtattcccaggagcccgcggaccggaccgcagcgctctacggcgccacggtgctgcagatggcccaggcacccctggggctctggcatctgcagggctccatgcaggttctcagtgatcagctggtgcaggcgatcgagacccagggcggccgcgtgctgatgcgccatcgggtcaccgccctcgagcccacaggccagggctggcgggtggtggtggacagtcccgcaggccgtgatcagaaccacatggccgccgatctggtctgcagcctgccgcctcagtgcctgttggagctgatccctgaggccgttatgcccgggggttaccggcaacgcctgagccagctgccggaacccagtggcgccctggtgctctacggcgtggtgcggcgggcggcattgcccagcgcctgcccgggccatctgcaacggggttccgacgatccaggttccctgttcgtctcgatcagccgcgagggtgacggacgcgcaccggcgggtcaggccaccctcatcgccagcgtgttcacccccaccgcggactggtgcagccttgaggaggagccgtaccaggcccgcaaaagccagtgcctggaggccatgcgacgggagctcaaccactggcttgatctgcagccccaggactggttgcacgtggaattggccaccccccggggattcgccggttggaccgggcgaccgcgggggatggtggggggactcggccagcatccgagccgcttcgggcccttcggtctggcagggcgctcgccgatggaagggctctggctctgcggcgacagcctccaccccggagaaggaacggccggcgtcaccctttcagccctcaatgcctgccggcagctggtggcagcgcgcggcggcgagttgcagctcaggggttga

SEQ ID NO: 1951 - protein, 500 aa, Synechococcus sp. WH 8102
MTATGVIVIGGGIAGLTAAALLAKQGLPVTLLEAHHQPGGCAGTFRRGPWTFDVGATQVAGLEPGGSHARLLLHLGLPLPEAEVLDPGCVVDLGDGSEPIPLWHDPERWNEERRRQFPGSDAFWSLCELIHRSNWGFAGRDPVVTPRSLWDLRQLVSALRPITVASGLLTGLTMADLLGLCGCGDDPRLRRFLDLQLKLYSQEPADRTAALYGATVLQMAQAPLGLWHLQGSMQVLSDQLVQAIETQGGRVLMRHRVTALEPTGQGWRVVVDSPAGRDQNHMAADLVCSLPPQCLLELIPEAVMPGGYRQRLSQLPEPSGALVLYGVVRRAALPSACPGHLQRGSDDPGSLFVSISREGDGRAPAGQATLIASVFTPTADWCSLEEEPYQARKSQCLEAMRRELNHWLDLQPQDWLHVELATPRGFAGWTGRPRGMVGGLGQHPSRFGPFGLAGRSPMEGLWLCGDSLHPGEGTAGVTLSALNACRQLVAARGGELQLRG

SEQ ID NO: 1952 - DNA, 1524 bp, Gloeobacter violaceus PCC 7421
  CDS (1)..(1524): transl_table=11
atgaccgaaaaaacggcaggccgccacccgcgcgactgtcaagttgtcgtgatcggagctggaattggcggattgacggccggggcgcttctggccgcccgcggcttcgatgtactggtactcgaacaggcttttgtaccgggggggtgcgcctcgacttttaagcggcgcgggttcaccttcgacgtcggggctacccaggtggcggggctcgaaccgggtggggtgcacgagcgcatcttccgcgaactcggggtggagccgcccgccgcccggccctgcgacccggcctgtgcggtgtacctaccgcaggaaacggagcctatctgcctgtggcgcgacccggagcgctggcgcgcagagcgcatccgtcactttcccggcagtgagcgcttctgggcgaagctggaccagctctttgaattgagttgggatttcaactcgcgcgaaccgctgctgccgccggtacgacccgaggagtacctggccctggccgccaagctcagaccccgcacgctgctgaccttgccctacaccctgcgcaccgtcgcggacctgctcagagactacaagcttgcggatgaccggcggctcaggcggttcctggacatgcagctcaaactctactcgaccgtcgaggcggaccagaccgccgcgctgtacggggcggtttccctgggaattacctgtgatccgcgggggctctttcacctcgaaggcagcatgcagaccctcagcgaccgcctggtggaggcgctgcgccaacacaacggccggcttttgaccggccagaaggtgacggccatccacacccgccacggcctggccgccggggtcaccgtgcacgaccgccgcagcgagcgcgactgggaagtgcgcgccgctcagatcgtggcgaatgtgcccgtctggagcctgccggaactggccggtccggccctcactaaaaattatcgcgagcgagtcgacaagctcccggaggccccgggagccttcgtcgtttacctgggtgtgcgctcggaggccgttccggtggactgcccgccccatctgcagtttctgtacgattacgacggcccagtggctgaaaacaactcgctgttcgtctcggtgagtcagcccggcgacggccgggccccccagggctgctccacaatcatcgcctccagcttcaccgatgccaaagcctggagtgccgcggcggactacaccgcgatgaaggagcgctacacccgcactgccatcgagttgcttggccggtactttcctgacctcgaagcccacctggtgcacgttgaagcggccacaccgcgcacctttgagcactttaccgcccgcccccacggcttcgtgggcggtatcggtcagcgcccgagtcagttcggtcctttttcgctctccaaccgcacgccggtcgaaaacctctggctggtgggcgatagcacccaccccggggagggcacggccggggtgagctattcagcactcaactgtgtgaagctgctcgaaacctccgtttcctga

SEQ ID NO: 1953 - protein, 507 aa, Gloeobacter violaceus PCC 7421
MTEKTAGRHPRDCQVVVIGAGIGGLTAGALLAARGFDVLVLEQAFVPGGCASTFKRRGFTFDVGATQVAGLEPGGVHERIFRELGVEPPAARPCDPACAVYLPQETEPICLWRDPERWRAERIRHFPGSERFWAKLDQLFELSWDFNSREPLLPPVRPEEYLALAAKLRPRTLLTLPYTLRTVADLLRDYKLADDRRLRRFLDMQLKLYSTVEADQTAALYGAVSLGITCDPRGLFHLEGSMQTLSDRLVEALRQHNGRLLTGQKVTAIHTRHGLAAGVTVHDRRSERDWEVRAAQIVANVPVWSLPELAGPALTKNYRERVDKLPEAPGAFVVYLGVRSEAVPVDCPPHLQFLYDYDGPVAENNSLFVSVSQPGDGRAPQGCSTIIASSFTDAKAWSAAADYTAMKERYTRTAIELLGRYFPDLEAHLVHVEAATPRTFEHFTARPHGFVGGIGQRPSQFGPFSLSNRTPVENLWLVGDSTHPGEGTAGVSYSALNCVKLLETSVS

SEQ ID NO: 1954 - DNA, 1818 bp, Physcomitrella patens subsp. patens
  CDS (1)..(1818)
atggccatctcaaatccgcatttcagcaccctggggttggccagccctatctgcgaatcctctagaaaaaaatctcctctctcttgctcattctctaagacaatcgctcatcttcctcagcagctttgtgccgcaacttttcagcttcagagttttgaggggaatagcatccatactcgagcttgcgacaggggagctcgagcagcggttgctgctgacacctcaccgatttcaaccaaaggcgtctctggaactgaggaatacgatgccattgttataggctctggcattgggggccttgttgccgctactcaattggcagttcgaggggctcgggtcgtccttctggagaaatacgtcgtcccaggtgggagctccagttactttcaaagggatggctacactttcgatgtaggttcctctgtgatgtttgggttcagcgacaaaggctccattaatttggtaacaaaatccctggcagccgtcggacgttcattggaattgatcgaggatccagtgacagtgcactaccacctccctggtgatttgtccgtgcaagtgcaccgggagtatgacaagttcctcgtggagctcattagccggttccctcacgaggaggtcggtatccgcgccttctacgatgtagcctggcaggtgtttaattccttgaatgcgttggagctcaaatctttagaggagcctctgtatctattcggacagttcttcaagaaccccgtcgcttgcttgacgctcgcgtattacctacctcagaatgcaggtgacatagccaggaaatacatgaaggaccccaacctgttggctttcatagacgccgagtgcttcattgtgagcactgtggacgcctgccggacgcccatgatcaatgccagtatggtaatgtgcgacagacattacggaggtatcaactacccgaaaggaggagtggggcggattgcactggagcttgcagatggcctcgtggagcatggtggccatttgaagtacaaagccaatgtgacgcaaattcttatgaaggacgggaaggcagtaggagtgcagttgtccaacggggaaacgctctatgcgaaaacagttatctcgaatgctacgagatgggacacttttcagaaattgctgaaggctgaggatatgccgcaggaggaaaagaatttccagaagttgtatcggaagtcgccttctttcttatctattcacatgggcgtgaaggccgaggttctgcctcatggtaccgaatgccaccacctagtactcgaggatgagtggttgaagctggaggagccgtatcaaaccatctttttgagcattccaaccgttctagatacctcccttgcgccgcctgggcgccatatccttcacatttttacaacggcatggattgacgactggcagggcttgtctccggctgattatgaagcgaagaaggaggcagtcgctgacaagattgtgagcagattagaggccactctatttccgggtctcaaggatgctacgacgtttcgtgaggttggcactccgaaaacacatcggcggtatttggcgagggatgacggtacttatgggcccattccagctgggaagcccaagggattgcttggtatgcctttcaacaccacggctgtagagggactgtactgcgtaggcgacagttgcttcccaggtcagggtgtcattgctgtcgcgttctccggcactatgtgtgctcatcgtgttgctgcagatcttggttttgagaagaggaatgccgtcctggacaagggactgagctctctcttagcctggttccggacgttagcgtag

SEQ ID NO: 1955 - protein, 605 aa, Physcomitrella patens subsp. patens
MAISNPHFSTLGLASPICESSRKKSPLSCSFSKTIAHLPQQLCAATFQLQSFEGNSIHTRACDRGARAAVAADTSPISTKGVSGTEEYDAIVIGSGIGGLVAATQLAVRGARVVLLEKYVVPGGSSSYFQRDGYTFDVGSSVMFGFSDKGSINLVTKSLAAVGRSLELIEDPVTVHYHLPGDLSVQVHREYDKFLVELISRFPHEEVGIRAFYDVAWQVFNSLNALELKSLEEPLYLFGQFFKNPVACLTLAYYLPQNAGDIARKYMKDPNLLAFIDAECFIVSTVDACRTPMINASMVMCDRHYGGINYPKGGVGRIALELADGLVEHGGHLKYKANVTQILMKDGKAVGVQLSNGETLYAKTVISNATRWDTFQKLLKAEDMPQEEKNFQKLYRKSPSFLSIHMGVKAEVLPHGTECHHLVLEDEWLKLEEPYQTIFLSIPTVLDTSLAPPGRHILHIFTTAWIDDWQGLSPADYEAKKEAVADKIVSRLEATLFPGLKDATTFREVGTPKTHRRYLARDDGTYGPIPAGKPKGLLGMPFNTTAVEGLYCVGDSCFPGQGVIAVAFSGTMCAHRVAADLGFEKRNAVLDKGLSSLLAWFRTLA

SEQ ID NO: 1956 - DNA, 1506 bp, Prochlorococcus marinus str. AS9601
  CDS (1)..(1506): transl_table=11
atgagaaattctgaagttattgttattggcgccggtatagcaggactaacttctgcagcgattttatcaaaacaaggcttatcagtgaccttaatcgaatctcatactcaagccggaggatgtgccggtacttttaaaagaaagaattatactttcgatgttggcgcaactcaggttgcaggtttagagaagggaggaatacattatagaatttttgattttttagatattccatctccagaagccacaattttagaccctgcttgcattgttgatttaaatgatggtggtaatcctatacctatttggtatgaaaaaagtaaatggattgttgaacgagaaatgcagtttcctgggagtcaaagattttggaaactttgttccctaatacatgaaagtaattggatatttgctaataacaatcctgtattaccaataagcaatttttgggatttttctcaacttcttaaagcactagttccttcaaaccttgtcacaggtatcttacttaaatctactatttttgatctattgcggatatgtggattatccaagaatgagcgcttgattaaattcttaaatcttcaactaaaactttattctcaagaggatgtttataatactgctgcattatatggatctactgttcttcagatgtgtcaacagccatatggtctgtggcatcttaaaaaatctatgcagtctttaagtgaatcattagaaagttcattgattaaaactggagttaatttattttttggacaagaagtaaattctataacttttgacgacgtaaatatgtgttggcaagtatctgctaattcgaaaaaaaaatcatttatttaccaagcaaaagatgtgatttatactgcccctccacagtctttgctcaagcatttgaaagatcctttagaaagaaaaaaaaattataaaaatcgacttaataatttgcctaatccaagtggagctgtagttttttattcagccttaaaaaaggaacatattaaaaaaacattctccaatcattatcaatttgtttcgaaagaattttgttccttatttgtatcaattagtgatgatggtgatggaagagcgccaaaaggtgaagttactttaattgccagtatctttaccaaaactaaagattgggttgacctagataaacaaacttatttaaagaagaaaaatagtttcatgaaaaaaatatcccttgaattggaaagtcaatttgatattgatcctgataaatggctacatagggaattagcaactccattgggctttgaaagatggacaaaaagacctaatggaatagtaggggggcttggtcaaaatccagatatttttggtttatttggattatcaagtaggacaccttttgaaggtttatggttatgtggagattcgatttatccaggagaggggactgcaggtgttagtcagtctgcattaatggtttcaaggcaaattttagcttccaaaggtgtaaaaaattttagtttataa

SEQ ID NO: 1957 - protein, 501 aa, Prochlorococcus marinus str. AS9601
MRNSEVIVIGAGIAGLTSAAILSKQGLSVTLIESHTQAGGCAGTFKRKNYTFDVGATQVAGLEKGGIHYRIFDFLDIPSPEATILDPACIVDLNDGGNPIPIWYEKSKWIVEREMQFPGSQRFWKLCSLIHESNWIFANNNPVLPISNFWDFSQLLKALVPSNLVTGILLKSTIFDLLRICGLSKNERLIKFLNLQLKLYSQEDVYNTAALYGSTVLQMCQQPYGLWHLKKSMQSLSESLESSLIKTGVNLFFGQEVNSITFDDVNMCWQVSANSKKKSFIYQAKDVIYTAPPQSLLKHLKDPLERKKNYKNRLNNLPNPSGAVVFYSALKKEHIKKTFSNHYQFVSKEFCSLFVSISDDGDGRAPKGEVTLIASIFTKTKDWVDLDKQTYLKKKNSFMKKISLELESQFDIDPDKWLHRELATPLGFERWTKRPNGIVGGLGQNPDIFGLFGLSSRTPFEGLWLCGDSIYPGEGTAGVSQSALMVSRQILASKGVKNFSL

SEQ ID NO: 1958 - DNA, 1506 bp, Prochlorococcus marinus str. MIT 9515
  CDS (1)..(1506): transl_table=11
atgtttaagactgatattgttgtagttggtgctggtatagcaggattaacttctgctgctattttatcaaaactagggctttcagtgactctgattgaatcacatactcaatcgggaggttgtgctggaacattcaagagaaaaaattatatttttgatgttggtgccactcaagtagcaggattagaagaaggggggatacactctaaaatttttaaatttctaaatattcctctccctgaagcctcaatattaaatccagcttgtatcgttgatttaaatgatggaagtaaggcaatacctatttggtatgacaaaaatgaatggattaaagagagggagatgcagtttccagggagtcgtaaattttggcaattatgtaatttaattcatcagagcaattggactttcgcgaacaataatcctgtattacctattaggaatttttgggatttttcacaacttctcaaagcattagttccaacgaatctagtaacaggaatattgctaaaatctactatttttgaccttttacgactttgtggattatcaaatgacgagagattaattaagtttcttaatttgcaattaaagctttattcacaagaagatgttcataacacagcagctctatatggttctacagtattacaaatgtgtcaaaaaccgcatggtctgtggcatttaaaaaaatctatgcaggttctaagtgaggctttagaacattccttaaaaaacacaggagtcgatatttttttcgagcaacaagtaaattctataaaatatgatgattcaagaaagatttggcaagtttgtgcaaaatctaagcttggggaagtggattactacgcagataatgtaatttatacaccaccaccacaatctcttttgaaacatctaaaaaattctctagatgaaaatcataattatagaaatacaataaaacgccttcctaagccaagtggtgctttagtgttctattcggctttaaaaaaaaagcatattaaattaatctcatcaaatcattatcaagttgtttctgatgaattgggatcactttttatttctataagtgaggatggagatgggagagctccaaagggcgaagtgacattgatagctagtatttttactaaaacaaatgactggtttgatttagataaaactgcatatagcaataaaaaaaaggactatctcaaaaaaatttcgattgtactagaaaatcaatttgatatttcttctgaaaattggctccataaggaattagccactccaatgggttttgaaagatggactaataggccaaatggaatagtaggtggtttaggtcaaaatcctgatatttttggattatttggtttatcaagtagaactccattcgagggtttatggttatgtggggattctatttatcctggagagggtacagctggtgttagtcagtccgcactaatggttgcaagacaaattctagcttctaaaggaattaatgattttcatttatga

SEQ ID NO: 1959 - protein, 501 aa, Prochlorococcus marinus str. MIT 9515
MFKTDIVVVGAGIAGLTSAAILSKLGLSVTLIESHTQSGGCAGTFKRKNYIFDVGATQVAGLEEGGIHSKIFKFLNIPLPEASILNPACIVDLNDGSKAIPIWYDKNEWIKEREMQFPGSRKFWQLCNLIHQSNWTFANNNPVLPIRNFWDFSQLLKALVPTNLVTGILLKSTIFDLLRLCGLSNDERLIKFLNLQLKLYSQEDVHNTAALYGSTVLQMCQKPHGLWHLKKSMQVLSEALEHSLKNTGVDIFFEQQVNSIKYDDSRKIWQVCAKSKLGEVDYYADNVIYTPPPQSLLKHLKNSLDENHNYRNTIKRLPKPSGALVFYSALKKKHIKLISSNHYQVVSDELGSLFISISEDGDGRAPKGEVTLIASIFTKTNDWFDLDKTAYSNKKKDYLKKISIVLENQFDISSENWLHKELATPMGFERWTNRPNGIVGGLGQNPDIFGLFGLSSRTPFEGLWLCGDSIYPGEGTAGVSQSALMVARQILASKGINDFHL

SEQ ID NO: 1960 - DNA, 1518 bp, Prochlorococcus marinus str. NATL1A
  CDS (1)..(1518): transl_table=11
atgtctgaagaatctatcattgttgttgggggagggatagctggcttaacaggtgctgctcttctctctaaagagggttatcaggtaactttggtcgaagcacatagtcaattaggtggttgtgcaggaacttttaaaagaggttcttatacctttgatgttggcgctacccaagttgcaggtcttgagagaggaggaattcatcatcgtttatttaattatttagatattcctttacctgatgcaaaaattttggatcctggctgttcagtcactctcggtgatgggagtaggccaatcaatctttggcatgatccattgagatggcagaaagaaagacaagaacagtttcctgggagtgaaatcttctggtcattatgttctaaaattcatgaaagtaactgggaatttgtcgaaagagatccaatacttccggtaagaaatttttgggatttaagtcaattaattagagccatacgtccttcaaatctttttactggttttctgagtaagttaactattacagacttgcttaaaataactggttgtcataaagatagacgtctacgaagttttttagaccttcaattaaaactttactctcaagagccagcaagtagaacggcagctttatacggtgcaactgttcttcaaatggcccaatctcctagaggtctatggcatcttcatggatcaatgcaaattcttagcgatttgttgaaagatagtttcttgagagatggtggaagccttttgattgggcatagagtgaccaaaataataaggaaagaaaattcaaatatttttgatgtcaatgtgattgatagaagaaagaatttgatacggatgaaagcatcagatattgtttttagcttgcctcctcaatcacttttagatttaattcctattgatggaggtttatctacaacataccgtgaaagtataaaaaatttacctaaacccagtggtgctattgtattttacggagctctccgtcgtgtagatttgcccgttgattgtccaggtcatattcaagtatttgatgagcattttggttctttatttatttctatcagtatggaaaatgatcaacgtgcaccagttgggatggccactttaatagcaagtgtatttgtagatattgatcaatggtctaatctagatagtcaatcatatatcagaaaaaaaaatgttgtatcgaaacagattagagctattttagatcacaagtttgatttgctagagacgagttgggatcatcaagaactttctaccccaagaagttttgaaaggtggactggacgtcctagtggaatagtcggagggcttggtcaacatccagatcaatttggtccttttggcctgtcaagtagaacccctctcagaggtttatggctttgtggagattctatataccctggtgaaggtaccgctggcgtaagtcaatcagctttgatggttgtaagacaattattggaatctaaaggtagacatctaaacatccctgtctttaattag

SEQ ID NO: 1961 - protein, 505 aa, Prochlorococcus marinus str. NATL1A
MSEESIIVVGGGIAGLTGAALLSKEGYQVTLVEAHSQLGGCAGTFKRGSYTFDVGATQVAGLERGGIHHRLFNYLDIPLPDAKILDPGCSVTLGDGSRPINLWHDPLRWQKERQEQFPGSEIFWSLCSKIHESNWEFVERDPILPVRNFWDLSQLIRAIRPSNLFTGFLSKLTITDLLKITGCHKDRRLRSFLDLQLKLYSQEPASRTAALYGATVLQMAQSPRGLWHLHGSMQILSDLLKDSFLRDGGSLLIGHRVTKIIRKENSNIFDVNVIDRRKNLIRMKASDIVFSLPPQSLLDLIPIDGGLSTTYRESIKNLPKPSGAIVFYGALRRVDLPVDCPGHIQVFDEHFGSLFISISMENDQRAPVGMATLIASVFVDIDQWSNLDSQSYIRKKNVVSKQIRAILDHKFDLLETSWDHQELSTPRSFERWTGRPSGIVGGLGQHPDQFGPFGLSSRTPLRGLWLCGDSIYPGEGTAGVSQSALMVVRQLLESKGRHLNIPVFN

SEQ ID NO: 1962 - DNA, 1512 bp, Prochlorococcus marinus str. MIT 9303
  CDS (1)..(1512): transl_table=11
atggctgaggactcaatcatcgtgatcgggggcggcattgccggcctaacggcaacagccctcttagccaagcaaggattacccgtcaccctggtggaagcgcaccatcaacctggaggttgtgccggcaccttcaggcgaggtccctatatcttcgatgtaggggccactcaggttgccggcctagaacccagtggcagccatgaacgcatctataggcatctcaacctgaccatgccacaagcggagctactcaatcccgcttgtgcagttgatctcgccgacggatcccaacccattcagctctggcatgatccaaagcgctgggaacaagaatggagatatcacttccctggcagtgaggccttctgggctctgactgccaagctccaccaaagcaactggggctttgccagccatgatccggtggtcacaccccgcaacgcttgggatttaggccaactacttcaggcgctgcgtccagcaacaatcacctcagggctattgagcagcctgacagtggcagatctcttaaagctatgcggctgtgcgcaggatcagcgccttcgcaaattcctagacctccagatcaagctctattcgcaagaaccgctcgatcgcacagccgccctctatggagccaccgttttgcaaatggctcaagcacctcttgggctctggcatctgcagggatcgatgcaaaaactcagcgatgacctaatgcatgccctgaagcgggatggcggccaggtattgctgcgccatcgtgtggtgggcctagaagtagctgcgcggggcatggcttggacagtcagcatcaaaacccccaatggcaaggctttagaactgaccacaccagatgtggtatgcagtctgcctcctcaatgcctgagatcgctgatgccacaaggagcaggcatgcccaaggcctatcgccaaaggctaatgaaattacctcaacccagtggagctttggtgttctacggggccatcgatcgcagcgccctacctaagaactgtcctgtccatctgcaaagagcctccaagacacccggctccctgttcgtatcaatcagccgtgagggagatggccgtgctcccgctggacaagccacagtgattgcaagtgtgttcaccgccacagcggagtggtgtggcctaactgaatccacctatcaagaacgcaagcaaacggccctgttagccatccgccaaacacttgaaagttggttagatctcgcacctgaagattggcagcatcaagaactagccacacccaggagctttgcacattggactggtcggcccaatggaattgtgggtggccttgggcagcacccttcacaatttgggcccttcggactagcaagccgaactcccatgcgagggctctggctctgtggcgactcaattcaccctggtgaaggtactgcaggggtgagcatctcggcactcatgacctgtcgccagctcatggctcagcgaggtcatcagttacgggtggcgaattga

SEQ ID NO: 1963 - protein, 503 aa, Prochlorococcus marinus str. MIT 9303
MAEDSIIVIGGGIAGLTATALLAKQGLPVTLVEAHHQPGGCAGTFRRGPYIFDVGATQVAGLEPSGSHERIYRHLNLTMPQAELLNPACAVDLADGSQPIQLWHDPKRWEQEWRYHFPGSEAFWALTAKLHQSNWGFASHDPVVTPRNAWDLGQLLQALRPATITSGLLSSLTVADLLKLCGCAQDQRLRKFLDLQIKLYSQEPLDRTAALYGATVLQMAQAPLGLWHLQGSMQKLSDDLMHALKRDGGQVLLRHRVVGLEVAARGMAWTVSIKTPNGKALELTTPDVVCSLPPQCLRSLMPQGAGMPKAYRQRLMKLPQPSGALVFYGAIDRSALPKNCPVHLQRASKTPGSLFVSISREGDGRAPAGQATVIASVFTATAEWCGLTESTYQERKQTALLAIRQTLESWLDLAPEDWQHQELATPRSFAHWTGRPNGIVGGLGQHPSQFGPFGLASRTPMRGLWLCGDSIHPGEGTAGVSISALMTCRQLMAQRGHQLRVAN

SEQ ID NO: 1964 - DNA, 1506 bp, Prochlorococcus marinus str. MIT 9301
  CDS (1)..(1506): transl_table=11
atgagaaattccgaagttattgttgttggcgcgggtatagcaggattaacttctgctgcgattttatcaaaacaaggtttatcagttaatttaatcgaatctcatactcaatcaggaggatgtgcaggtactttcaaaagaaaaaattatatttttgatgttggtgcaactcaagttgcgggtttagagaaaggaggaatacattcgagaatttttaattttttagatattccatctcctgaagcgacaattttagatcctgcttgcatagttgatttaaatgatggaggtaagcccatacctatttggtatgaaaaaagtaaatggattgctgaacaagaaatgcagtttccagggagtggtaaattttggaagctttgtgctctcattcatcaaagtaattggatatttgccaacaataatcctgtattaccagtaagtaatttttgggatttttctcaacttcttaaagcactagtaccgtcgaatctcgtcacaggtatcttactaaaatcaactatttttgatttgttgcgaatatgtggattatccaataatgagcgcttgataaaattcttaaatcttcaattaaaactttattctcaagaggacgttcataatacagccgcattatatggatctactgttcttcaaatgtgtcaacagccacatggtctgtggcatcttaaaaaatctatgcagtctttaagtgaatcattagaaagttcattgaggaaaactgaagctaatctaatttttggacaaaaagttaattctataaattttgatgaggaaaatatgtgttggaaagtatctgctaattcgaaaaaaaaatcttttatttaccaagcaaaagatttgatttataccgcgcctccacaatctttgctcaatcatttgaaagatcctttaaaaagaaaaaagaagtatcaaaatcgaatcaataatttgcctgatccaagtggagctgtagttttttattcagcattaaaaagagaacatattaaaaaaactttctccaatcattatcaatttgtgtccaaagaatttacttcggtatttgtatctattagtgatgatggtgatggaagagcacctaatggtgaggttactttaatcgcgagtatctttaccaagactaaaaattggtttgatctagataaacaaacttatttaaaaaagaaaaatgatttcatgaaaaaattatcgcttgaattggaaagtcaatttgatattgatcctgaaaattggctacatagggaattagcaactccattgggatttgaaaaatggacaaatagacctaatggaatagtaggtgggcttggccagaatcctgatatttttggtttatttggactatcaagtaggacaccttttgaaggtttatggctatgtggagattcgatttatcctggagagggcactgcaggtgttagtcagtctgcattaatggtttcaaggcaaattttagcttctagaggtataaaaaattttagtttataa

SEQ ID NO: 1965 - protein, 501 aa, Prochlorococcus marinus str. MIT 9301
MRNSEVIVVGAGIAGLTSAAILSKQGLSVNLIESHTQSGGCAGTFKRKNYIFDVGATQVAGLEKGGIHSRIFNFLDIPSPEATILDPACIVDLNDGGKPIPIWYEKSKWIAEQEMQFPGSGKFWKLCALIHQSNWIFANNNPVLPVSNFWDFSQLLKALVPSNLVTGILLKSTIFDLLRICGLSNNERLIKFLNLQLKLYSQEDVHNTAALYGSTVLQMCQQPHGLWHLKKSMQSLSESLESSLRKTEANLIFGQKVNSINFDEENMCWKVSANSKKKSFIYQAKDLIYTAPPQSLLNHLKDPLKRKKKYQNRINNLPDPSGAVVFYSALKREHIKKTFSNHYQFVSKEFTSVFVSISDDGDGRAPNGEVTLIASIFTKTKNWFDLDKQTYLKKKNDFMKKLSLELESQFDIDPENWLHRELATPLGFEKWTNRPNGIVGGLGQNPDIFGLFGLSSRTPFEGLWLCGDSIYPGEGTAGVSQSALMVSRQILASRGIKNFSL

SEQ ID NO: 1966 - DNA, 1515 bp, Synechococcus sp. WH 7803
  CDS (1)..(1515): transl_table=11
atggacagctcccgcgacgcgattgtgatcggaggcggaattgccggcctcactgccgcggccttgctggcccgcgaagggctgtcggtaaccctcttggaagcccatcaccagcttggaggctgcgctggaacgttcaagcgagggcgctacaccttcgacgttggcgccacgcaggtggcaggtctggaaccgggtggaagccatgcccgcctgttccgccatttgggcctggagccaccggccgcggaacgcctcgaccctggctgtgtggtgaatctgaatgatggatcaccccccatccacctctggcatgacccccaacgctggcgggaggaacggtcgcgtcaattccctggaacggagcggttctgggatctctgcagctggattcatcgccagaactggcaattcgccgcagccgaccccgtgctgcccgtgcgttcaggctgggatctgagccggacgctcaaggcactcacccccggcaatctcgcctcagcacccctcagcctgctcactgttgccgaccttctgagactctgcggctgcgccagcaaccttcgcttgcgccgttttctcgatctccagctcaggctctattcccagcagccggccgatcaaacggcagcgctctatggagccaccgttctgcagatgtgtcaggcccccttaggcctctggcacctgcagggatcgatgcagagcctgagcgaccagctcttgcgctcccttcagcgcgatggcgccgaggtgcttctacgccatcgcgccgtcttgatggagcgacagcacagcggcgacagctggaccgtgcagatcgagcaaccgggcggtgggcaacggtccctgcaagcggccgatgtggtgtgcagtcttccgcctcagtgcttgccctctttaattccagacagcaacctgctcggcgcgtcctatcgccgccacctgcaaaccctcgacgctccgagtggggcgctggtgttctacggagccgtgcaccggcgtgatcttcctgaagcctgtccaggccatctgcagtgcgactgggacactcccggatcactctttctctcgatcagcagcgagggggatggccgtgcccccgctggcgaggccacagtgatcgccagcgtgttcaccacccctgagggatggcatgacttgccggaagaggcctaccagaagcgcaaacaaaccgtgcttgggcagatgcgccgcggggttgaagaagccctgacgctttcggccgaggcctggctgcacagcgagttgtccaccccccgcggcttcgcttactggacaggtcgcccgaagggcgtggtgggcggactgggacaaagcccagatcgctttggtccgttcggtttggccagtcgcagtccgatccgcaagctctggctctgcggtgattcgattcaccccggcgaaggaaccgcaggcgtgacgctgtctgccctgatggcctgcagtcaactgatgcaggaacgaggccggacgctcaccctggcggactga

SEQ ID NO: 1967 - protein, 504 aa, Synechococcus sp. WH 7803
MDSSRDAIVIGGGIAGLTAAALLAREGLSVTLLEAHHQLGGCAGTFKRGRYTFDVGATQVAGLEPGGSHARLFRHLGLEPPAAERLDPGCVVNLNDGSPPIHLWHDPQRWREERSRQFPGTERFWDLCSWIHRQNWQFAAADPVLPVRSGWDLSRTLKALTPGNLASAPLSLLTVADLLRLCGCASNLRLRRFLDLQLRLYSQQPADQTAALYGATVLQMCQAPLGLWHLQGSMQSLSDQLLRSLQRDGAEVLLRHRAVLMERQHSGDSWTVQIEQPGGGQRSLQAADVVCSLPPQCLPSLIPDSNLLGASYRRHLQTLDAPSGALVFYGAVHRRDLPEACPGHLQCDWDTPGSLFLSISSEGDGRAPAGEATVIASVFTTPEGWHDLPEEAYQKRKQTVLGQMRRGVEEALTLSAEAWLHSELSTPRGFAYWTGRPKGVVGGLGQSPDRFGPFGLASRSPIRKLWLCGDSIHPGEGTAGVTLSALMACSQLMQERGRTLTLAD

SEQ ID NO: 1968 - DNA, 1506 bp, Prochlorococcus marinus str. MIT 9215
  CDS (1)..(1506): transl_table=11
atgagaaagtccgaagttattgttgtaggcgccggaatagcagggctaacttctgcagcgattttatcaaaacaaggcttatcagtgactttaatcgaatctcatactcaatcaggaggatgtgccggtacttttaaaagaaagaattatatttttgatgttggcgcaactcaggttgctggtttggagaagggaggaatacattctagaatttttgattttttagatattccatccccagaagccacaattttagaccctgcttgtattgttgatttaaatgatgatggtaatcctatccctatttggtatgaaaaaagtaaatggattgctgaaagagaaatgcagtttccaggaagtcaaagattttggaaactttgtaccctcatacatgaaagtaattggatatttgctaataataatcctgtattaccaataagtaatttttgggatttttctcaacttcttaaagcactagtaccttcaaaccttgtcacaagtatcttacttaaatctactatttttgatctattgcgtatatgtggattatccaagaatgagcgcttgattagattcttaaatcttcaactaaaactttattctcaagaggacgtttataatactgcagcattatatggatctaccgttcttcaaatgtgtcaacagccatacggtttgtggcaccttcaaaaatctatgcagtctttaagtgaagcattagaaagttcattgattaaaactggagtaaatttaatttttgggcaagaagttaattcaataacttttgacgatgtaaatatgtgttggaaagtatctgctaattcgaaaaaaaaatcttttatttaccaagcaaaagatgtgatttatactgcgcccccacaatgtttgcttaagcatttgaaagatcctttaaaaagaaaaaaaaattataaaaatcgacttaataatttgcctgagccaagtggagctgtagttttttattcagcattaaaaaaagaacatattaaaaaaatatgctccaatcattatcaatttgtttcgaaagaattttgttcgttatttgtatcaattagtaatgatggtgatggaagagcaccaaaaggtgaggttactttaattgcgagcatctttaccaagactaaagattggtttgatctagatcagcaagcttacttaaagaagaaaaatggtttcatgaaaaaaatatcccttgaattggaaaatcaatttgatattgatcctgaaaattggctacatagggaattagcaactccattgggctttgaaaaatggaccaatagacctaatggaatagtaggggggcttggtcaaaatccagatatttttggtttatttggattatcaagtaggacaccgtttgaaggtttatggctatgtggagattcgatttatccaggagagggaaccgcaggtgttagtcagtctgcattaatggtttcaaggcaagttttagcttccaaaggtttaggtaattttagtttataa

SEQ ID NO: 1969 - protein, 501 aa, Prochlorococcus marinus str. MIT 9215
MRKSEVIVVGAGIAGLTSAAILSKQGLSVTLIESHTQSGGCAGTFKRKNYIFDVGATQVAGLEKGGIHSRIFDFLDIPSPEATILDPACIVDLNDDGNPIPIWYEKSKWIAEREMQFPGSQRFWKLCTLIHESNWIFANNNPVLPISNFWDFSQLLKALVPSNLVTSILLKSTIFDLLRICGLSKNERLIRFLNLQLKLYSQEDVYNTAALYGSTVLQMCQQPYGLWHLQKSMQSLSEALESSLIKTGVNLIFGQEVNSITFDDVNMCWKVSANSKKKSFIYQAKDVIYTAPPQCLLKHLKDPLKRKKNYKNRLNNLPEPSGAVVFYSALKKEHIKKICSNHYQFVSKEFCSLFVSISNDGDGRAPKGEVTLIASIFTKTKDWFDLDQQAYLKKKNGFMKKISLELENQFDIDPENWLHRELATPLGFEKWTNRPNGIVGGLGQNPDIFGLFGLSSRTPFEGLWLCGDSIYPGEGTAGVSQSALMVSRQVLASKGLGNFSL

SEQ ID NO: 1970 - DNA, 1512 bp, Prochlorococcus marinus str. MIT 9211
  CDS (1)..(1512): transl_table=11
atgactaatgagcaagtaattgttgttggaggcggaatcgcagggttaactgcatctgctttattggctcatgaaggatttaatgtaattcttttagaatcccattatcagacaggagggtgtgcagggacgtttaaaagaggaaattacgtttttgatgtaggtgcaactcaaattgcaggattagagaaaggaggtattcatgaacggctatttagatatcttgattggcctcaacctttggggtcaattctcgatccaggttgtgaagtagaccttagagacggctctcggccaataaaaatctggcatgatcctgtgcgatgggagatagaacgaaatcaacaatttccaggtagtaagcgtttttggtctctttgcagtttgattcaccaaagcaattggtcttttgcagaaaaagacacagtattaccagtttcagacttttgggattttaagcagttcatcagttcagttgagcctttaacctttttgtttggcttattaagtaggtcatcagtttctgatcttctttggctctgttcttgccctcaagatcaacggctccagaaatttcttgatttacaacttcaactttattctcaagaaaaagcagatcaaacagctgcactttatggcgccactgtgcttcagatggcacaggcaccacgtggcttatggcatttgcagggttctatgaagagtttgagtgatgcattggaatcttgcttgcttcgtgatggaggtaaattacttctgaggcataaagttactgcgatagagacaattagtacgacagattcttggattgtagatgttgtcgatggtaatggttctacatcccaactggttgcttctgacttagtattcactcttcctcctcaatgtcttttggggttaacatcaggcaattcatctttacctactaactatcgggaccgcatagctaaattacctcaacctaatggcgcgatagttttttatggagcgatttcgcgtcagtaccttcaagaaattcattcaaaccattatcaattctttgtagaagatcttggctcattattcctttcgattagttgtgaaggagatggtcgtgcacctctaggtgaggcaactatcattgcaagtgcttttacttctgtagatttctgggcatctttggatgatcagatttaccgaaaagaaaaacaagtgtttttgcagaaaattttaaaagccatcaaatcagtttttaatattcatcctgatgattggttacataaagaattggcaactccaagaagttttgcaaaatggacaggccggccacaaggaattgtaggtggattgggacagaggccaactacttttggcccgtttggattatctagtagatctcctgtgaagggtttatggctctgtggagattcaatttatccgggggaaggcactgctggagtttcgcaatctgcattaatggcctgccgacagctaatggctaccaaggggcaccctttcagattacccaaatag

SEQ ID NO: 1971 - protein, 503 aa, Prochlorococcus marinus str. MIT 9211
MTNEQVIVVGGGIAGLTASALLAHEGFNVILLESHYQTGGCAGTFKRGNYVFDVGATQIAGLEKGGIHERLFRYLDWPQPLGSILDPGCEVDLRDGSRPIKIWHDPVRWEIERNQQFPGSKRFWSLCSLIHQSNWSFAEKDTVLPVSDFWDFKQFISSVEPLTFLFGLLSRSSVSDLLWLCSCPQDQRLQKFLDLQLQLYSQEKADQTAALYGATVLQMAQAPRGLWHLQGSMKSLSDALESCLLRDGGKLLLRHKVTAIETISTTDSWIVDVVDGNGSTSQLVASDLVFTLPPQCLLGLTSGNSSLPTNYRDRIAKLPQPNGAIVFYGAISRQYLQEIHSNHYQFFVEDLGSLFLSISCEGDGRAPLGEATIIASAFTSVDFWASLDDQIYRKEKQVFLQKILKAIKSVFNIHPDDWLHKELATPRSFAKWTGRPQGIVGGLGQRPTTFGPFGLSSRSPVKGLWLCGDSIYPGEGTAGVSQSALMACRQLMATKGHPFRLPK

SEQ ID NO: 1972 - DNA, 1500 bp, Synechococcus sp. PCC 7002
  CDS (1)..(1500): transl_table=11
atgagtaagagcaagattgcggtcattggggcgggcattggcggtttaacggcgggggctttgttggcgaaacggggctacgatgtcacggtttatgaacaggcggcgatcgccgggggctgtgcgtccacttttaagcgtcggggttttaccttcgatgtaggggcgacccaggtggcgggcttagaagtaggagggattcaccagcgtatttttcaagaattgggcgtcgctttacccgaagcaacggtttgtgatccggcttgtgcggtgtttttaccgggcgaaacagaacccatcaacgtttggcgtgatgcggaaaagtgggaagctgaacgactcaaacagtttcccacgagcaaaaatttttggcatttattaaaaattttatttgcggcgagttggcaatttcaaggccgcgatccggtggtgccaccccgtaatccttgggatattttgcagttaatcaaggcatttcgtttaaatacgttgatcacagttccctttgctttgatgacggttttagacgcgttgaaattatgtaatgttgccgcagatcaaagattaaaaacttttttggatttgcagttaaagctgtactcccaagttgatagttccgaaactgcactactctacggtgcgacggccctcgccgtttcccaaacgccccaaggtttatttcatctccagggtagtatgcaagccttgagcgatcgcctgatcgaagccctcgaaaaacatggggggaaattactcactcgccaccgcattaaggaaattaacttgggtcaaagcaagcctcaattaacagtctttgatcagcgtcaaaatgaaattgttacacaagcttttgatcatgtagtcgcgaacaccacggttcaagatttaattaaaatttcagagcatccgcccaaatcaatttttaaaaaaatctatcaaaaacgcattgaaaatttgccagatccatcgggagcctttgttgtttacttaggggttaaggaagcggcaattcccaagaattgtccacctcacctgcaatttctctatgattatgaccaagcaattggcgaaaataattccctctttgtttcggtgagtaagccgaatgatggtcgcgccccagagggtcaccggacgattatcgcctcctcttttgtcgatcctgatccttggtttgggaaagattacgccgaactgaaagagcgttacacccaggaggcgatcgccaaattaaatcgctattttgacctttccccagaaaatatcattgttcaagaagccggaacgccgcgcacctttgctttctatacggctcgacacaaaggctttgttggtggcgtgggacagcgaatttctacctttgcgccctttggattcgccaccagaacaccgtttaaaaatgtttggctcgtgggagattctgtccatccgggagaaggtacagctggggtaagttattctgccctgaccgctgtacgccaaattgaacaggtcagctaa

SEQ ID NO: 1973 - protein, 499 aa, Synechococcus sp. PCC 7002
MSKSKIAVIGAGIGGLTAGALLAKRGYDVTVYEQAAIAGGCASTFKRRGFTFDVGATQVAGLEVGGIHQRIFQELGVALPEATVCDPACAVFLPGETEPINVWRDAEKWEAERLKQFPTSKNFWHLLKILFAASWQFQGRDPVVPPRNPWDILQLIKAFRLNTLITVPFALMTVLDALKLCNVAADQRLKTFLDLQLKLYSQVDSSETALLYGATALAVSQTPQGLFHLQGSMQALSDRLIEALEKHGGKLLTRHRIKEINLGQSKPQLTVFDQRQNEIVTQAFDHVVANTTVQDLIKISEHPPKSIFKKIYQKRIENLPDPSGAFVVYLGVKEAAIPKNCPPHLQFLYDYDQAIGENNSLFVSVSKPNDGRAPEGHRTIIASSFVDPDPWFGKDYAELKERYTQEAIAKLNRYFDLSPENIIVQEAGTPRTFAFYTARHKGFVGGVGQRISTFAPFGFATRTPFKNVWLVGDSVHPGEGTAGVSYSALTAVRQIEQVS

SEQ ID NO: 1974 - DNA, 1506 bp, Cyanothece sp. ATCC 51142
  CDS (1)..(1506): transl_table=11
atgtctcaagaagttatcgttataggagcaggaattggcggattaaccgccggggcattactcgcccgtcggggttatgatgttaccgtgtacgaacaggcttacgttccggggggttgtgcctcaacctttaaacgtcggaggtttaccttcgatgtgggcgcgacacaagtggcagggttagaaccgagtggcattcatcaccgtatctttgcagaattagacattgacttaccccctgtaaccccttgcgatcctgcgtgtgccgtttttttgccccaagaaacccaacccatcaatgtctggcgtgatcccgaaaaatggcaacaagaaagacaaaaacagttccccaaaagcgaacccttttggcaattattagctaaactatttcaagccagttggaagtttcaagggcgagatccggtgttaccccctcgcaacctttgggatgtctggcaactaactactgctttgcggttagataccttgatcactgttccctttactttcatgacggttggggatgccttacgtttatatggattatataacgatcgccgattaaaaacctttttggatttacaattaaaactgtattctcaagtcgatgccgacgaaaccgccttattatatgcagccacagcattaggggtatcccaggaacctcaaggactgtatcatttacaaggaagtatgcaagtattaagcgatcgcttggttgaagggttagaaaaacatgggggaaaactattcaccggccattgtgttgaaaaaatagaaacccttgagagtaataaaactcaagttatcatccgtcagcgaaaaacaggggaaaccttcacgaaaacagccgatcacgtcgttgcgaatgttcccgtacaaaatttagttaagataattgatagccctaggaaatctagatttaacttctatcagcaacgggtggaaaaactccccgaagcctccggggcctttgttatttacttgggggtaacagatgaagccattcccgaaaattgtccccctcatctacaatttttctatgagtatgacggacccattggggaaaataattccttgtttgtttcagtcagtaaacctggagatggtagggccccagagggacaaagaacgattattgcatcgagttttaccgatactcagatatggaacaatattagtgaagagaactatcaacaattaaaacaagaatataccattgaagcgatcgcccgtttaagtaattattttcagcttaattccgatacgattattcatcaagaagcggccacccctcgcacttttgcctattataccgccagagataaaggcatcgtcggagggattggtcaacgggtgtctacctttggtccttttggtatcgctacccgtaccccgatcaaaaatctctggttagtgggagactccacccaccccggagaaggaaccgcaggggtcagttattcagcgttaaccgcagttagacaaattgaacagaacggttaa

SEQ ID NO: 1975 - protein, 501 aa, Cyanothece sp. ATCC 51142
MSQEVIVIGAGIGGLTAGALLARRGYDVTVYEQAYVPGGCASTFKRRRFTFDVGATQVAGLEPSGIHHRIFAELDIDLPPVTPCDPACAVFLPQETQPINVWRDPEKWQQERQKQFPKSEPFWQLLAKLFQASWKFQGRDPVLPPRNLWDVWQLTTALRLDTLITVPFTFMTVGDALRLYGLYNDRRLKTFLDLQLKLYSQVDADETALLYAATALGVSQEPQGLYHLQGSMQVLSDRLVEGLEKHGGKLFTGHCVEKIETLESNKTQVIIRQRKTGETFTKTADHVVANVPVQNLVKIIDSPRKSRFNFYQQRVEKLPEASGAFVIYLGVTDEAIPENCPPHLQFFYEYDGPIGENNSLFVSVSKPGDGRAPEGQRTIIASSFTDTQIWNNISEENYQQLKQEYTIEAIARLSNYFQLNSDTIIHQEAATPRTFAYYTARDKGIVGGIGQRVSTFGPFGIATRTPIKNLWLVGDSTHPGEGTAGVSYSALTAVRQIEQNG

SEQ ID NO: 1976 - DNA, 1515 bp, Nostoc punctiforme PCC 73102
  CDS (1)..(1515): transl_table=11
atgtccagcatttctcttgacaaaagtaactctcatgtcattgttatcggtgccggaataggtggacttacagctggagcattattagctcatagaggttacagcgtcttagttttggatcaggcccttgtaccaggaggctgtgcttcgacgtttaaacggcagggatttacctttgatgtgggagcaactcaggtggcggggttggaaccagggggaattcaccaccgcattttctcagaattgtcaatagatttaccgcaagcaacgccttgcgatcctgcttgtgcagtgtatttacctggggaaagcacaccaattaatgtctggcgcgaccaagagaaatggcaagaggaacgacaaagacagttccccggtagcgaaccgttttggcaattgatggcaactttatttgatgccagttgggaatttcaaggacgcgatccggtgctaccaccacgtaatttatgggatttgtggcaactagcgcaagcggtgcgtcccagtacattaattaccgtacccttcactttgtttacggtgggagatgctttacggttatgtggattgggaaatgaccaacgactgagaacttttttagatttgcaactaaagctatactcccaggtagatgcagaacaaacagcattactttacgccgccacagcgttgagtgtatcccaactgccccaaggattgtttcacctccaaggaagtatgcaggtattaagcgatcgcttggtacaatccttagaaagagatggcggcaaattgttgatgcgccacactgtagaagaaatcaaagtagaaagcggcaaagctactgctgtagtcattagaaatcagaaaactggcgaagtctggacagaagccgccaaccacatagttagcaacgtcaccgtgcaaaacttggtgcagttattaggagaacaagcaccatctggatataaaaaccgggtggaaaaactaccccaagcatcgggtgcgtttgtggtgtatttaggtgtagatgctagcgcgattccgcctgggtgtcctccccacctacaatttttgtacgatgtcaatggtcccattggcgagaataattccctgtttgtttctgtcagtcatcctggagacggtcgcgcaccagaagggaaagcgacaattattgcttcttcatttgtcgatcctgcacagtggtgggagactgaagattatgaaggactaaaagaaaagtttacccaagaagcgatcgctcgtcttgcccaatacttctatctcaaaccagaaacgattattcatcaagaagcggcaacaccacgcacttttgcccattttacagcccgcgatcgcggtatagttggtggcatcggtcaaagaatacccacctttggcccctttgggtttgccaatcgtacaccaatccagcatctgtggttagtaggtgactccacccatccaggcgaaggtactgctggggtgagttattcagcgctgacagtagtcaggcaaatcgaatcgcaaatgtaa

SEQ ID NO: 1977 - protein, 504 aa, Nostoc punctiforme PCC 73102
MSSISLDKSNSHVIVIGAGIGGLTAGALLAHRGYSVLVLDQALVPGGCASTFKRQGFTFDVGATQVAGLEPGGIHHRIFSELSIDLPQATPCDPACAVYLPGESTPINVWRDQEKWQEERQRQFPGSEPFWQLMATLFDASWEFQGRDPVLPPRNLWDLWQLAQAVRPSTLITVPFTLFTVGDALRLCGLGNDQRLRTFLDLQLKLYSQVDAEQTALLYAATALSVSQLPQGLFHLQGSMQVLSDRLVQSLERDGGKLLMRHTVEEIKVESGKATAVVIRNQKTGEVWTEAANHIVSNVTVQNLVQLLGEQAPSGYKNRVEKLPQASGAFVVYLGVDASAIPPGCPPHLQFLYDVNGPIGENNSLFVSVSHPGDGRAPEGKATIIASSFVDPAQWWETEDYEGLKEKFTQEAIARLAQYFYLKPETIIHQEAATPRTFAHFTARDRGIVGGIGQRIPTFGPFGFANRTPIQHLWLVGDSTHPGEGTAGVSYSALTVVRQIESQM

SEQ ID NO: 1978 - DNA, 1572 bp, Synechococcus elongatus PCC 6301
  CDS (1)..(1572): transl_table=11
atgcctgttgagcctccttcggttgcggtcattggtgcaggcattggcggtttaacggcggcagcgctcctagcagcgcgaggcttcaccgtcacggtttatgaacaagccgcgatcgcgggtggatgtgcttcgacttttcggcggcgtggcttcaccttcgacgtcggggcgactcaagttgcaggcttggaaccgggtggtattcacgcccaaatcttcgcggaactgggactggaattaccggtagccaaaatttgcgatccagcctgcgcggtttggctccccggcgaatcggaacccgtgcgcgtttggcacgatcgcgatcgctggaaagcagaacgagagcgttggtttcctggcagtgaaccgttctggtcgttgatgcagcagctctttcagttgggctggcaatttcaacagcgtcagccagtgttgccgccgcgcaacctttgggatttgcagcagttgattagcgcagtgcgccccgaaaccttgctgacggcaccctatgcgctgctgaccgtcgggcaggtcttgaatctgctgggtctggggggcgatcgccgcctcaagacgtttctggatattcagctcaagctctattcccagtgcggtgccgatgaaacagcagtgctctacgctgcgactgccttggctctctcgcaagcgccctacgggctctatcacctcgaaggcagcatgcaagtcctcagcgatcgcctgctggaagggctggagaagcacggcggccaaattcgctaccggcaacgggtagaagcgatcgaaaccatgggcgatcgcgtgcggggcatccgagtgcgtgatcaacggacgcagtctgtcgaagcgatcgcggcggatcatgtcgtcgccaatgtcactgctgcggatttactacggctcctcggatcagcggtcgaaaccctaccggccttgaacggctatcaacagcgcctagcgaaaactcccactccctctggcgcgtttgtcctctaccttggcgtggatgctgccgctcttccggtggactgtccgccccacctgcaattcctgtttgatccggcaggccctcttggcgaaaacaattccctcttcgtttctgtcagtcgccccgatgatggtcgggcacccgcgggacaagccacgatcgttgcttcgactttcacggatctcgatcgctggagccagaccgaagactacgctgctctcaagcaggactacaccgagacaatgttggcgcgcctgggtcaatatttcgacctgcggcctgagcatctccgtcatgtggaagctgggacgccgcgtacctttgcccgctacaccgatcgcgatcgtggcagtgtcggggggttaggcatgcgagtgagtacctttgggcccttcggctttgccaatcgcacgccggtgaaaaatctctggctggtcggcgactccacccatcctggcgaaggcactgccggcgtcagctattcggcccaaacggtgatgcgacaaattctggcgcagcatcctgaagtccagccagcaaaaacccgccagccggagccagcgggtttgttacagcgctag

SEQ ID NO: 1979 - protein, 523 aa, Synechococcus elongatus PCC 6301
MPVEPPSVAVIGAGIGGLTAAALLAARGFTVTVYEQAAIAGGCASTFRRRGFTFDVGATQVAGLEPGGIHAQIFAELGLELPVAKICDPACAVWLPGESEPVRVWHDRDRWKAERERWFPGSEPFWSLMQQLFQLGWQFQQRQPVLPPRNLWDLQQLISAVRPETLLTAPYALLTVGQVLNLLGLGGDRRLKTFLDIQLKLYSQCGADETAVLYAATALALSQAPYGLYHLEGSMQVLSDRLLEGLEKHGGQIRYRQRVEAIETMGDRVRGIRVRDQRTQSVEAIAADHVVANVTAADLLRLLGSAVETLPALNGYQQRLAKTPTPSGAFVLYLGVDAAALPVDCPPHLQFLFDPAGPLGENNSLFVSVSRPDDGRAPAGQATIVASTFTDLDRWSQTEDYAALKQDYTETMLARLGQYFDLRPEHLRHVEAGTPRTFARYTDRDRGSVGGLGMRVSTFGPFGFANRTPVKNLWLVGDSTHPGEGTAGVSYSAQTVMRQILAQHPEVQPAKTRQPEPAGLLQR

SEQ ID NO: 1980 - DNA, 1518 bp, Prochlorococcus marinus str. NATL2A
  CDS (1)..(1518): transl_table=11
atgtctgaagaatctatcattgttgttgggggagggatagctggcttaacaggtgctgctcttctttctaaagagggttatcaggtaactttggtcgaagcacatagtcaattaggtggttgtgcaggaacttttaaaagaggttcttatacctttgatgttggtgctacccaagttgcaggtctggagaggggaggaattcatcatcgtttatttaattatttagatattcctttacctgatgcaaaaattttggatcctggctgttcagttactctcggtgatgggagtaggccaatcaatctttggcatgatccattgagatggcagaaagaaagacaagaacagtttcctgggagtgaaatcttctggtcattatgttctaaaattcatgaaagtaactgggaatttgtcgaaagagatccaatacttccggtaagaaatttttgggatttaagtcaattaattagagccatacgtccttcaaatcttttaactggtttcttgagtaagttgactattgcagacttgcttacaataaccggttgtcataaagatagacgtctacgaagttttttagaccttcaattaaaactttactctcaagagccagcaagtagaacggcagctttatacggtgcaactgttcttcaaatggcccaatctcctagaggtctatggcatcttcatggatcaatgcaaattcttagcgatttattgaaagatagttttttgagagatggtggaagccttttgattgggcatagagtgaccaaaataataaggaaagaaaattcaaatgtttttgatgtcaaagtgcttgatagaagaaagaatttgttacagatgaaagcatcagatattgtttttagcttgcctcctcaatctcttttagatttaattcctattgatggaggtttatctacaacataccgtgaaagtataaaaaaattacctaaacctagtggtgccgttgtattttacggagctctccgtcgtgtagatttgcccgttgattgtccaggtcatattcaagtatttgatgagcattttggttctttatttatttctatcagtttggaaaatgatcaacgtgcaccaattgggatggccactttaatagcaagtgtatttgtagatattgatcaatggtctaatctagatagtcaagcatataccagaaaaaaaagtgtcgtatcgaaacagattagagctattttagatcacaagtttgatttgctagagacgagttgggatcatcaagaactttctaccccaagaagctttgaaaggtggacaggacgtcctagtggaatagtcggagggcttggtcaacatccagatcaatttggtccttttggcttgtcaagtagaacccctctcaaaggtttatggctttgtggagattctatataccctggtgaaggtaccgctggcgtcagtcaatcagctttgatggttgtaagacaactattggaatctaaaggtagacatctaaatatccctgtctttaattag

SEQ ID NO: 1981 - protein, 505 aa, Prochlorococcus marinus str. NATL2A
MSEESIIVVGGGIAGLTGAALLSKEGYQVTLVEAHSQLGGCAGTFKRGSYTFDVGATQVAGLERGGIHHRLFNYLDIPLPDAKILDPGCSVTLGDGSRPINLWHDPLRWQKERQEQFPGSEIFWSLCSKIHESNWEFVERDPILPVRNFWDLSQLIRAIRPSNLLTGFLSKLTIADLLTITGCHKDRRLRSFLDLQLKLYSQEPASRTAALYGATVLQMAQSPRGLWHLHGSMQILSDLLKDSFLRDGGSLLIGHRVTKIIRKENSNVFDVKVLDRRKNLLQMKASDIVFSLPPQSLLDLIPIDGGLSTTYRESIKKLPKPSGAVVFYGALRRVDLPVDCPGHIQVFDEHFGSLFISISLENDQRAPIGMATLIASVFVDIDQWSNLDSQAYTRKKSVVSKQIRAILDHKFDLLETSWDHQELSTPRSFERWTGRPSGIVGGLGQHPDQFGPFGLSSRTPLKGLWLCGDSIYPGEGTAGVSQSALMVVRQLLESKGRHLNIPVFN

SEQ ID NO: 1982 - DNA, 1518 bp, Anabaena variabilis ATCC 29413
  CDS (1)..(1518): transl_table=11
atgtctaatattgttaagcaagacaaaccccgtgtagtcgtgattggtgcgggaattggtggactgacggctgctgcattattagcccatcgtggctacagcgttctcatcttagaccaagccctcgttcctgggggttgtgcttctacatttaaacgccaaggattcacctttgatgtgggtgcaactcaggttgcaggcttagaaccggggggaatccatcaccgcatcttttccgaactggaaatagatttaccagatgcaacgccttgtgaccccgcttgtgcagtttatttacctggggaaaatacacccatcaatgtctggcgcgacccccaaaaatggcaagaagaacgccaaaaacaatttcctgggagtgaaccattttggcaactcatgactactttatttaatgccagttgggagtttcaaggacgcgatccagttttaccgccgcgtaatttgtgggatttgtggcagttaacccaagcagtaagacctagtaccttcgttactgtaccctttacattatttactgtgggtgatgctttaaggttgtgtgggttgggaaatgaccaccgactaagaacgtttttagatttgcaactcaagctatattctcaagtcaacgctgaagagacagctttactttatgcggcaacggcgttgagtgtgtcccaactaccacagggattgtttcacctagaaggtagtatgcaggtattgagcgatcgcctagtcgaagctttagaaagagatggtggtaaattgttgatgcgtcataccgttgaacaaattaaagtagaaaacggtaaagcctctgctgtcgttatcagaaaccaaaaaacaggggaagtttggacagaagcagcagaccacgtagttgctaacgtgactgtgcagaacttagtgcaactcttgggtgacaagactccatcaggctataaacagcgcgttaataaactcccccaagcatcaggggcatttgtcctgtatttaggtgtagatgctagcgctatcccaaccgagtgtcccccccacttgcaatttttatatgatgctgatggcccaattggggaaaataattctttgtttgtgtcggtgagtcatgctggtgacggtcgcgcgccagaaggacaagccacaattattgcctcatctttcgtagatcccaaacagtggtggagtacggaagattacccaggtttgaaacagaaatttacccaagaagcgatcgccaaattagcccagtacttttatctcaaaccagagacaattatttatcaagaagctgccacaccgcgcacctttgcccattacaccggacgcgatcgcggtatagtcggcggtattggtcaaagaatccccacatttggcccctttggttttgcgaatcgtacccccattgaccatctatggttagttggtgactctacccacccaggagaaggaacagcaggtgtaagctattcggccttgactgtagttaggcaaattagtcatagtcaaaaatattga

SEQ ID NO: 1983 - protein, 505 aa, Anabaena variabilis ATCC 29413
MSNIVKQDKPRVVVIGAGIGGLTAAALLAHRGYSVLILDQALVPGGCASTFKRQGFTFDVGATQVAGLEPGGIHHRIFSELEIDLPDATPCDPACAVYLPGENTPINVWRDPQKWQEERQKQFPGSEPFWQLMTTLFNASWEFQGRDPVLPPRNLWDLWQLTQAVRPSTFVTVPFTLFTVGDALRLCGLGNDHRLRTFLDLQLKLYSQVNAEETALLYAATALSVSQLPQGLFHLEGSMQVLSDRLVEALERDGGKLLMRHTVEQIKVENGKASAVVIRNQKTGEVWTEAADHVVANVTVQNLVQLLGDKTPSGYKQRVNKLPQASGAFVLYLGVDASAIPTECPPHLQFLYDADGPIGENNSLFVSVSHAGDGRAPEGQATIIASSFVDPKQWWSTEDYPGLKQKFTQEAIAKLAQYFYLKPETIIYQEAATPRTFAHYTGRDRGIVGGIGQRIPTFGPFGFANRTPIDHLWLVGDSTHPGEGTAGVSYSALTVVRQISHSQKY

SEQ ID NO: 1984 - DNA, 1503 bp, Synechococcus sp. CC9605
  CDS (1)..(1503): transl_table=11
gtgagagattccagcgtgatcgtggtgggcggcgggatcgctggcttaacggcagcggcactgctggcccgcgacggcgtcgacgtcacgctgctggaagcgcatcaacaaccgggggggtgtgcaggaacattccggcggggtccatgggtgttcgatgttggggcgacccaggtggctgggttggagcccggaggaagtcatgcgcgactgcttaagcatctgaacatgcctctgcccagcgcagagcttctggacccaggttgtgtggtcgacctgggcgatggctcccctcccatttcgctctggcatgacccggaagcctgggccgctgaacgtgagcgtcaatttccaggcagccaccgcttctggagcctttgccaccagttgcattccagcaactggcagttcgccagcgaagaccccgtggtgacaccgcgttccctctgggatctcggcacattgctgcgggccctgcggcccgcaacgctggcatcgggactgttcacaggtctgaccattgccgatctgttgcggctgtgtgggtgcggtgacgatcaacggctgcggcgctttctcgacctccagctgaagctgtactcccaggaaccggccgatcgcacggcggcgctgtacggcgcaaccgtcctgcacatggcccaagcaccactcgggctctggcatctggagggatcgatgcaggtgttgagcaatcagctggtggccgccattgagcgcgacggcgggacggtgctgatgcagcatcgggtcaccaagctgcagcccagctcatccggttggcaggtgacgatcagcaccggcaagggcgcggaacaccaacggagcagccgggatgtggtctgcagcctccccccccaatgcctgctggagctgatcgaaccggatcagctgccgaacgggtaccgcaagcgactggacaacctgcatgcaccgagtggtgcgctggtgctctacggagcggtgcggcgtgatgcactcccacatccctgcccaggccatctccagcggggctgcgcatccccggggcctctgttcgtctccatcagccgcgagggcgatgggcgtgcgccccaggggcaggccaccttgattgccagcgtgtttaccccaacgggcgactggtgccgcttgccggagccggagtaccaacagcgcaaaatagggatgctcaagctgatccaagccgagctgaaccgctggctgtccctcgaagacgacgcctggttgcacgctgaactggcaacaccaaggggcttcgccggctggacgggtcgtcccaacggcatggtcggaggccttggacagcatccaagccggttcggccccttcggcctggcaggacgaacgcccatgccgggtctttggctctgcggcgacagcctccatccaggcgagggcacagcgggagtgagcctgtcggccctcaacgcctgccgtcagctcagggccgagcggggacaaccgctcagctttcggagctga

SEQ ID NO: 1985 - protein, 500 aa, Synechococcus sp. CC9605
MRDSSVIVVGGGIAGLTAAALLARDGVDVTLLEAHQQPGGCAGTFRRGPWVFDVGATQVAGLEPGGSHARLLKHLNMPLPSAELLDPGCVVDLGDGSPPISLWHDPEAWAAERERQFPGSHRFWSLCHQLHSSNWQFASEDPVVTPRSLWDLGTLLRALRPATLASGLFTGLTIADLLRLCGCGDDQRLRRFLDLQLKLYSQEPADRTAALYGATVLHMAQAPLGLWHLEGSMQVLSNQLVAAIERDGGTVLMQHRVTKLQPSSSGWQVTISTGKGAEHQRSSRDVVCSLPPQCLLELIEPDQLPNGYRKRLDNLHAPSGALVLYGAVRRDALPHPCPGHLQRGCASPGPLFVSISREGDGRAPQGQATLIASVFTPTGDWCRLPEPEYQQRKIGMLKLIQAELNRWLSLEDDAWLHAELATPRGFAGWTGRPNGMVGGLGQHPSRFGPFGLAGRTPMPGLWLCGDSLHPGEGTAGVSLSALNACRQLRAERGQPLSFRS

SEQ ID NO: 1986 - DNA, 1506 bp, Prochlorococcus marinus str. MIT 9312
  CDS (1)..(1506): transl_table=11
atgagaaagtctgaagttattgttgtaggcgccggtatagcaggacttacttctgcagcgattttatcaaaacaaggcttatcagtaactttaatcgaatctcatactcaatccggaggatgtgccggtacttttaaaagaaagaattatatttttgatgttggtgcaactcaggttgcgggtttagagaagggaggaatacattctagaatttttgaatttttagatattccatccccagaagccaaaattttagaccctgcttgcattgttgatttaaatgatggtgctaatcctatacctatttggtatgaaaaaagtaaatggattgctgaacgagaaatgcagtttcctgggagtcaaagattttggaaactttgtactctcatacatgaaagtaattggatatttgctaataataatcctgtattaccaataagtaatttttgggatttttctcaagttcttaaagcactagtaccttcaaaccttgtcacaggtatcttacttaaatctactatttttgatttattgcggatatgtggattatctaagaatgaacgattgattaaattcttaaatcttcaactaaaactttattctcaagaggacgtttataatactgcagctttatatggatctactgttcttcagatgtgtcaacagccacatggtctgtggcatcttaaaaaatctatgcagtctttaagtgaatcattagaaggttcattgattaaaactggagttaatttaatttttgggcaagaagttaattctataacttttgacaacgtaaatatgtgttggaaagtatctgctaattcgaaaaaaaaatcatttatttaccaagcaaaagatgtgatttataccgcgcctccacaatctttactcaagcatttgaaagatcctttagaacgaaaaaaaaattataaaaatcgacttaataatttgcctaatccaagtggagctatagttttttattcagcattaaaaaaagaacatattaaaaaaacattctccaatcattatcaatttgtttcgaaagaattttgttcgttatttgtatcaattagtgatgatggtgatggaagagcgccaaaaggtgaggttactttaattgcgagtatctttgccaagactaaagattggtttgatctagataaacaaacttacttaaagaagaaaaatagtttcatgaaaaaaatatcgcttgaattggaaagtcaatttgatattgatcctgaaaaatggcttcatagggaattagcaactccattgggctttgaaaaatggacaaaaagacctaatggaatagtaggcgggcttggtcaaaaaccagatatttttggtttatttggattatcaagtaggacaccttttgaaggtttatggctatgtggagattctatttatccaggagaggggactgcaggtgttagtcagtctgcattaatggtttcaaggcaaattttagcttccaaaggtataaaaaattttagtttataa

SEQ ID NO: 1987 - protein, 501 aa, Prochlorococcus marinus str. MIT 9312
MRKSEVIVVGAGIAGLTSAAILSKQGLSVTLIESHTQSGGCAGTFKRKNYIFDVGATQVAGLEKGGIHSRIFEFLDIPSPEAKILDPACIVDLNDGANPIPIWYEKSKWIAEREMQFPGSQRFWKLCTLIHESNWIFANNNPVLPISNFWDFSQVLKALVPSNLVTGILLKSTIFDLLRICGLSKNERLIKFLNLQLKLYSQEDVYNTAALYGSTVLQMCQQPHGLWHLKKSMQSLSESLEGSLIKTGVNLIFGQEVNSITFDNVNMCWKVSANSKKKSFIYQAKDVIYTAPPQSLLKHLKDPLERKKNYKNRLNNLPNPSGAIVFYSALKKEHIKKTFSNHYQFVSKEFCSLFVSISDDGDGRAPKGEVTLIASIFAKTKDWFDLDKQTYLKKKNSFMKKISLELESQFDIDPEKWLHRELATPLGFEKWTKRPNGIVGGLGQKPDIFGLFGLSSRTPFEGLWLCGDSIYPGEGTAGVSQSALMVSRQILASKGIKNFSL

SEQ ID NO: 1988 - DNA, 1554 bp, Trichodesmium erythraeum IMS101
  CDS (1)..(1554): transl_table=11
atgtcctctaaaaatactagacaaaaatctaaagttgtggtatgtggtgcaggtattggtggcctcacaacagcagctttactggcccatagaggctacgaagtccaaatatttgaccaagctattattcccggtggctgtgcctcaactttcaaacggcggggttttaccttcgatgtcggtgcaactcaagtcgcaggcttagaacccggtggcatccatcaccgcattttctcggaattggaaatagacatcccgaacgccaccaattgcgatcctgcctgtgccgtatttctccccggagaaacagaacccataaatgtttggcgagaccctgaaaaatggcaagaagaaagacaacgacaatttccaggcagcgaacccctttggcaattaatgacaaaactgtttgaggcaagttggaaatttcaaggtcgcgacccagttttgcctccccgaaatatttgggatctctggcagttagtcaaagcagtacgcccagatactctaattacagtaccatttactttaatgacagtagcagatgcgttacaattatgtggtttaaatgataacctaaggttaaaaactttcctagatttacaattgaaactttattctcaagttggtacagaagaaacagctttactttatgctgccactgctttagctgtttctcaagctcctcaaggcttgtaccatcttgagggaagtatgcaggaattgagcgatcgcctagttgcagccctaaaaagagacggagccaaattgttcatgggtcatactgttgaaaacatacatgtagataatggcaaagctaacgctgtcaggatcagaaatcagaaaactggggaaacttgggtagaaactgccgaccatgttgtggcaaacgtgactgtacaaaacttagtaaaattagtagccaacgaaaatcaaccacacactttagactcaatggctggttacaaacggcgagttgataaactgccatctccctggggtgcatttatagtgtatttaggggtcgatgaaagcgctattcccacaaactgcccgcctcacttgcaatttttctataattatgatggtcctataggggaaaataattctttgtttgtatcagtgagtcatcctggagatggtcgcgctcccactggtaaagcaacaattactgcttcaagctttactgatactcagatatggcgacatagccaaaattatcaggagttgaaacagaaatatatggaggaagcgatcgctcatttaagtggatattttgacttaaggccagaaacaatagtttatcaggaagctgcaacacctcgtactttcgtgaagtttacagcacgggatgaaggtattgttggtggtgtcggtcagcgtctggcaaacttcggaccttttggaattgctaataggactcccatccaggacttgtggttagtaggagactcaactcatccgggagagggtacagcgggagtttcttattcagcattgactgtagtgcgacagattgacgcagaggaagggtttacagggtttttcagttga

SEQ ID NO: 1989 - protein, 517 aa, Trichodesmium erythraeum IMS101
MSSKNTRQKSKVVVCGAGIGGLTTAALLAHRGYEVQIFDQAIIPGGCASTFKRRGFTFDVGATQVAGLEPGGIHHRIFSELEIDIPNATNCDPACAVFLPGETEPINVWRDPEKWQEERQRQFPGSEPLWQLMTKLFEASWKFQGRDPVLPPRNIWDLWQLVKAVRPDTLITVPFTLMTVADALQLCGLNDNLRLKTFLDLQLKLYSQVGTEETALLYAATALAVSQAPQGLYHLEGSMQELSDRLVAALKRDGAKLFMGHTVENIHVDNGKANAVRIRNQKTGETWVETADHVVANVTVQNLVKLVANENQPHTLDSMAGYKRRVDKLPSPWGAFIVYLGVDESAIPTNCPPHLQFFYNYDGPIGENNSLFVSVSHPGDGRAPTGKATITASSFTDTQIWRHSQNYQELKQKYMEEAIAHLSGYFDLRPETIVYQEAATPRTFVKFTARDEGIVGGVGQRLANFGPFGIANRTPIQDLWLVGDSTHPGEGTAGVSYSALTVVRQIDAEEGFTGFFS

SEQ ID NO: 1990 - DNA, 1530 bp, Synechococcus sp. CC9311
  CDS (1)..(1530): transl_table=11
atgcaaaaacgcgacgacgtaatcgtggtcggcggtggcatcgctggactcactgcagcggccctgctggcacgcgacggtgtttcagtcactcttttagaggcgcactatcagccgggtggttgtgcagggaccttccgtcgcggtgagtacatttttgatgtcggtgccacccaagtggccggcctcgagcctggtggcagccacgcccgcatctttcaacatctggatctgcccttaccagaggccgaactacttgatccaggctgcgtggtcgacctggccgatggatccagcccagtgcgcctttggcacgaccccctgcgctggcagcaggaacgacaacagcaatttccaggcagcgaaaggttctggcagatctgcagctttcttcaccaaagcaattggcaatttgctgctgccgaccctgttttacccattcgcaatggctgggatttccagcaaacgcttgctgcgatcaatccaggaaatctgctcagcgctcccctgagtttctgcacagtcaaggacctcttaaacctgtctggctgcggcagtgatcaacgcctgcgtcgctttctcgatctacagctcaggctctactcccaacaacccgccgatcaaaccgcagcgctatatggagcgacggtgttgcaaatgacccaagcccctcttggcctctggcaccttcatggatcgatgcaggtgctgagtgaacttctggcgtctggactgaagcgcgatggagggaccatgcttctgcgtcaccgcgtgcagcagcttcaacacaactccgatggttcaggctggcaactgcgcgttgaaggaccagaccgaaaggagcagatctttcaagctgacgatgtcatcagtacgctccctcctcagtgcctccctgagctcatcgctcctgaaggcagcgctgaccagacccccatgccggcgccctatcgccaacatctcaaggagctcaaggctcccagtggggcccttgtgttctatggcgccatcgacagggattgcctaccggacgattgtccaggccattgccaacgggatgcaagcgatcccggctctgtgtttatctctatcagccgtgagggagatggcagggcgccgaaagggcaagccacagtgattgccagtgtgtttacaacccctaatggttggttctcctgctcagagcctgagtaccaaagcaaaaagaaagcctgtcaagccaaaatccgcaacgaagtggaagtcgccttgagtttgtctgaccacacctggcgacatcaggagttagcaacaccacggggctttctccgctggaccaatcggcccaatggcattgtcggcggtttagggcaatctcccagtcgtttcggcccctttggcctggcgagccgcacaccgatgcctgggctctggctctgtggagattccattcatccaggtgagggaacggcaggagtcactctgtctgccctcatggcctgcagacagttgttagctcaacgcggccaaacccttcagctgcacagttga

SEQ ID NO: 1991 - protein, 509 aa, Synechococcus sp. CC9311
MQKRDDVIVVGGGIAGLTAAALLARDGVSVTLLEAHYQPGGCAGTFRRGEYIFDVGATQVAGLEPGGSHARIFQHLDLPLPEAELLDPGCVVDLADGSSPVRLWHDPLRWQQERQQQFPGSERFWQICSFLHQSNWQFAAADPVLPIRNGWDFQQTLAAINPGNLLSAPLSFCTVKDLLNLSGCGSDQRLRRFLDLQLRLYSQQPADQTAALYGATVLQMTQAPLGLWHLHGSMQVLSELLASGLKRDGGTMLLRHRVQQLQHNSDGSGWQLRVEGPDRKEQIFQADDVISTLPPQCLPELIAPEGSADQTPMPAPYRQHLKELKAPSGALVFYGAIDRDCLPDDCPGHCQRDASDPGSVFISISREGDGRAPKGQATVIASVFTTPNGWFSCSEPEYQSKKKACQAKIRNEVEVALSLSDHTWRHQELATPRGFLRWTNRPNGIVGGLGQSPSRFGPFGLASRTPMPGLWLCGDSIHPGEGTAGVTLSALMACRQLLAQRGQTLQLHS

SEQ ID NO: 1992 - DNA, 1506 bp, Crocosphaera watsonii WH 8501
  CDS (1)..(1506): transl_table=11
gtgtctaaacaagctatagtcgtgggagcaggaattgggggcttaacggccggggcattactagcccgtcgagggtatgatgtaagcttatatgaacaggcttatgtacctgggggttgtgcctcaaccttcaaacgtcgggggtttaccttcgatgtgggagcaacccaagtggcagggttagaacccggaggcattcatcaccgcatttttgaagaattagagattgacttacccccggttactccctgtgatcccgcttgtgcggtttttttacccggagaaacccaaccgatcaatgtttggcgtgatcctgaaaaatggcaacaagaaagacaacaacagttccccggaagcgaacccttttggcaattattagctaaactatttcaagcaagttggcagtttcaagggcgagatcctgtcttacctcctcgcaacctttgggatctttggcaactcaccagcgcgctacggttagatactttaattacagttccttttaccttgatgacggtgggggatgctttacggttgtatggaatatataacgatcgcagattaaaaaccttccttgatttacagttaaaattatattctcaagtggatactgatgaaaccgctttattgtatgcagctacagcgttaggagtatcccaggaaccccaaggattatatcatttacaagggagtatgcaggtattgagcgatcgcttagtagaagggttaaaaaaatacggcggaaaactcttcaccggccattctgttgagaaaatagaaacccttaaggataagaaaactaaagttactattcgtgttcgcaaaacaggggaaaccatcaccaaaatagcagatcatgtggtgactaatgttcctgtacaaaatttagtaaaaatgattgatacaccgactaaacctgggtttaacctgtatcaacaaagggttgataaactgcccgaagcgtctggggcctttgttatttatttgggggttgatgaaaaagctatccccgaaagttgtccccctcatctgcaatttttctatgattatgatggcattattggggaaaataattccttgtttgtttctgtgagtaaacctggagatggtagggcaaaaaaaggacaaagaacaattattgcctctagtttcaccgatactcaaatatggaacaatataagtgaagagaaatatcaacaattaaaacaacaatatagccaagaagcgatcgcccgtttgagtaactatttccacctcaatgctgacactattattcaccaagaagcagccacccctcgcacttttgcctactatacagctagggataaagggatagtaggaggtgttggccaacgggtgtctacttttggtccgtttggtatcgctacccgtaccccgatgaaaaatatttggttagtgggagactctacccaccccggagaaggtacagcaggggtcagttattcggccttaactgctgttagacaaatcgaaaggatgacctaa

SEQ ID NO: 1993 - protein, 501 aa, Crocosphaera watsonii WH 8501
MSKQAIVVGAGIGGLTAGALLARRGYDVSLYEQAYVPGGCASTFKRRGFTFDVGATQVAGLEPGGIHHRIFEELEIDLPPVTPCDPACAVFLPGETQPINVWRDPEKWQQERQQQFPGSEPFWQLLAKLFQASWQFQGRDPVLPPRNLWDLWQLTSALRLDTLITVPFTLMTVGDALRLYGIYNDRRLKTFLDLQLKLYSQVDTDETALLYAATALGVSQEPQGLYHLQGSMQVLSDRLVEGLKKYGGKLFTGHSVEKIETLKDKKTKVTIRVRKTGETITKIADHVVTNVPVQNLVKMIDTPTKPGFNLYQQRVDKLPEASGAFVIYLGVDEKAIPESCPPHLQFFYDYDGIIGENNSLFVSVSKPGDGRAKKGQRTIIASSFTDTQIWNNISEEKYQQLKQQYSQEAIARLSNYFHLNADTIIHQEAATPRTFAYYTARDKGIVGGVGQRVSTFGPFGIATRTPMKNIWLVGDSTHPGEGTAGVSYSALTAVRQIERMT

SEQ ID NO: 1994 - DNA, 1533 bp, Synechococcus sp. RS9917
  CDS (1)..(1533): transl_table=11
atggagccagcacaagacgtggttgtgatcggcggcggaatcgccggtctgacggccacagcgctcctggcccgccatggcctgcgggtcaccctgctggaggcccatcaccagctcggtggctgtgccggcaccttccggcgtggcccctacacctttgatgtgggtgccacccaggtggccgggctggagccggggggcagccatgcgcgaatcctggcccacctggagctggccttgcccgccgccgaaccgctcgatcccggctgcgtggtggacctggccgatggcacggaaccgatccggctctggcgccagccagagcgctggaagcaggaacgggagtggcactttccaggcagcgcacccttctgggcgctctgcgaacggctgcatcgcagcaactgggccttcgccgtccaagatccggtgctgccggtccgctccggctgggatctgctccagaccctgggagcgatcgggcccggcaacctcgccagtgcacccctgagcctgctcagcgtggcggatctgctccgactcagtagctgccagcaccacgagcggctgcgtcgctttctcgatctgcaattgcggctctactcccaggagccggcggcgcgcacggcggctctgtatggcgccacggtgctgcagatggcccaggagccccagggactctggcatcttcagggctccatgcagaccctgagcgatcagttggccaccgccatcaggcgcgatggcggcaccctgctgctgcgccatcgggtggtggccctggagcgccatccggcgcggggtgcctggcaggtgcgggcgcaacgcgccaacggcgacaccctgaacctggaggccgccgatgtggtgtgcagcctgccgccccagtgcctgcccagcctgatcccggcggtctccgctggcggcagccgcgacccgatgcccccctcctatcggcgccatctcaagcacttgaacgcccccagcggcgccctggtgctgtatgcagccgtctcccgttcgtcgctcccagccgactgccccgcccatctccagcgcgatggcaacacgcctggatcgctgtttgtgtcggtgagccgagagggcgatggacgcgctccccagggcgaagccaccctgattgccagcgtgttcaccgatcccgacagctggtgcgacctagccgatcccgagtaccggcaacgcaagcaggacgtgcaacagacgatcgtgaccaccctccaggactggctcggtatcaccccggagcagtggcggcatcaggagctggccacgccccgctcctttgccttctggaccggccgcccccgaggcatcgtgggcggtcttggtcagagcccggcacgcttcggtccgttcggcctggcgagtcgcaccccggtggccaatctctggctctgcggcgacgcgatccacccaggcgagggcacggcgggcgtcagcctttcggccctgatggcctgtcggcagctcacagcccagcgcggcctgccgctggagctgaagcactga

SEQ ID NO: 1995 - protein, 510 aa, Synechococcus sp. RS9917
MEPAQDVVVIGGGIAGLTATALLARHGLRVTLLEAHHQLGGCAGTFRRGPYTFDVGATQVAGLEPGGSHARILAHLELALPAAEPLDPGCVVDLADGTEPIRLWRQPERWKQEREWHFPGSAPFWALCERLHRSNWAFAVQDPVLPVRSGWDLLQTLGAIGPGNLASAPLSLLSVADLLRLSSCQHHERLRRFLDLQLRLYSQEPAARTAALYGATVLQMAQEPQGLWHLQGSMQTLSDQLATAIRRDGGTLLLRHRVVALERHPARGAWQVRAQRANGDTLNLEAADVVCSLPPQCLPSLIPAVSAGGSRDPMPPSYRRHLKHLNAPSGALVLYAAVSRSSLPADCPAHLQRDGNTPGSLFVSVSREGDGRAPQGEATLIASVFTDPDSWCDLADPEYRQRKQDVQQTIVTTLQDWLGITPEQWRHQELATPRSFAFWTGRPRGIVGGLGQSPARFGPFGLASRTPVANLWLCGDAIHPGEGTAGVSLSALMACRQLTAQRGLPLELKH

SEQ ID NO: 1996 - DNA, 1554 bp, Synechococcus sp. WH 5701
  CDS (1)..(1554): transl_table=11
atgccggccgctcctgccgctcagcgcttggccgtcagcccctcccctacggatgcaccactgctggatgtgacagtcatcggcggcggcatcgccgggctgagcgccgccgcgctgctggcccgggagggtctctcggtgcagctgctggaggcccaccaccagacgggaggctgcgccggcacctttcgccgtggcgcctatgtcttcgatgtgggagccacccaggtggcggggctggagcccgggggcatccatgaccggctgttccgacatctgggggtcgaggcgccggcggccactccgctcgatccaggttgcgtggtggatctcagcgacggccagccgcccgtcagcctgtggcgtgatccccagcgctggcaccaggaacggcaacggcagttccctggcagcgaacgcttctggagcctgtgcgccgcactgcatggggccaactggtcgttcgcggggcgccatccggtgctgcctccccgcagcctctgggacctgggacagttgctgggggcactgaggcccgccaatctcgccagcggggccctggccctcgccagcgtggccgacctgctgcgcctcagcggctgcagcagcgaccagcgtctgcggcgcttcctcgatctgcagctgcgcctctactcccaggaaccggccgagggcaccgccgccctctacggcgccagcgtgctgaccatggcccaggcgccgctgggcctgtggcaccttcagggctcgatgcaagccctcagcaccagtctcgaaaccgccctggccgccctgggcggcgagctgcggttgcgccatcgggtcacgagtctgcagccggcgcaaccgcagggctggtccgtgcggggtcaggggccgggcgggcgcccattcacccgcctcagccgtgatgtggtggtggcgctgcccccccaggccctgaccgatctgctgggggaggcgatgcctggggcctaccgcgagcgcatcagcggctttcccgaccccagtggggcgctggtcttctatggcgccgttgagcgcgccctgctgccagaggggtgtccggcccatctgcagatcgactgggcggatccagggtcgctcttcgtgtcggtgagccgcgagggggatgggcgggcgccagccgggcaggccacggtgatcgccagcgtgttcaccccggcgcgcccctggctggagctggagagggaggcctatgcgttggccaaggctgaggccatggcccagatccagaacggcctggagctgaacctggggctcgacgccacggactggcgtcaccgggaactggcaacaccccggggatttgcccgctggaccgggcggcccttcggcttcgtgggcgggctggggcagcacccctcccgcttcgggcccttcggcctggccagtcgcacccccctgccggggctttggctctgcggcgacagcatccacccgggcgagggcaccgcgggggtgagcctttcggcgttgatggccagcaggcaactgctgcaggctcggggaaaagacctggccttgccctag

SEQ ID NO: 1997 - protein, 517 aa, Synechococcus sp. WH 5701
MPAAPAAQRLAVSPSPTDAPLLDVTVIGGGIAGLSAAALLAREGLSVQLLEAHHQTGGCAGTFRRGAYVFDVGATQVAGLEPGGIHDRLFRHLGVEAPAATPLDPGCVVDLSDGQPPVSLWRDPQRWHQERQRQFPGSERFWSLCAALHGANWSFAGRHPVLPPRSLWDLGQLLGALRPANLASGALALASVADLLRLSGCSSDQRLRRFLDLQLRLYSQEPAEGTAALYGASVLTMAQAPLGLWHLQGSMQALSTSLETALAALGGELRLRHRVTSLQPAQPQGWSVRGQGPGGRPFTRLSRDVVVALPPQALTDLLGEAMPGAYRERISGFPDPSGALVFYGAVERALLPEGCPAHLQIDWADPGSLFVSVSREGDGRAPAGQATVIASVFTPARPWLELEREAYALAKAEAMAQIQNGLELNLGLDATDWRHRELATPRGFARWTGRPFGFVGGLGQHPSRFGPFGLASRTPLPGLWLCGDSIHPGEGTAGVSLSALMASRQLLQARGKDLALP

SEQ ID NO: 1998 - DNA, 1515 bp, Synechococcus sp. WH 7805
  CDS (1)..(1515): transl_table=11
atggacaactcccgcgacgcgattgtgatcggaggcggcattgccggcctcaccgccgcggccttgctggctcgcgaagggttatcagtgaccctcttggagtcccaccaccagctcggaggctgcgctggaacattcaagcgggggcgctacaccttcgatgtcggcgccacccaggtggcaggtcttgaaccgggcggaagccatgcccgactgttccgccatctcggcctggagccacctttcgcggaacgcctcgatccaggctgtgtggtgaatctgaatgacgggtcaccccccatccacctctggcatgacccccaacgctggcgggaggaacggacgcgccacttccctggaacggagcggttctgggaactgtgcagctggatccatcgccagaactggcaattcgccgcagccgacccagtactgcccgtgcgttcaggctgggatctgagccgaacactcaaagcactcacacccggcaatctcgccacggcccctctcagtcttctcaccgttgccgatcttcagagactctgcggctgcggcagcaatcaacgcctgcgccgttttctcgacctgcagctccggctgtactcccagcaacctgccgatcgaacagcagcgctctacggagccaccgtcctgcagatgtgccaggcaccccttggcctctggcacctgcagggttccatgcagagcctcagcgaccatctcctggcctcccttcagcgggatggcgccgagatactcctacgccatcgcgctgtcttgctggagcgaaaccgaaccagcggcggctggacggtgcagatggagctgccaggaggtgagcgacggtctctgcaagcagccgatgtggtgtgcagtcttccgcctcagtgcttgccctctttgattccagacaagaatgttctcggcgagtcctatcgccgccggctccaaacccttcacgctcccagtggggcactggtgttctacggagcggtgcaccgacgcgatcttcctgaagcctgtccaggccatctgcagtgcgattgggacacaccagggtcactcttcctctcgatcagcagggatggcgatggccgtgctccggctggagaggccacggtgatcgccagcgtgttcaccacccctgagggttggcacgacctgccggaggaggactaccagaaacgcaaacagactgtgctggaacagatgcgccgcggtgttgaaaacgccctgacgcttcctgccgaggcctggctccacaccgagctgtccaccccccgcggcttcgcctactggacgggtcgcccaaagggtgttgtaggcggtctgggacaaagtccggatcgcttcggtccattcggtctggccagtcgcagtccgatcagcaagctttggctctgtggtgattcgattcaccccggtgagggaaccgcgggagtgacactgtcggccctgatggcttgcagtcagctgatggaggaacgaggccgaacaatcaccctggcggactga

SEQ ID NO: 1999 - protein, 504 aa, Synechococcus sp. WH 7805
MDNSRDAIVIGGGIAGLTAAALLAREGLSVTLLESHHQLGGCAGTFKRGRYTFDVGATQVAGLEPGGSHARLFRHLGLEPPFAERLDPGCVVNLNDGSPPIHLWHDPQRWREERTRHFPGTERFWELCSWIHRQNWQFAAADPVLPVRSGWDLSRTLKALTPGNLATAPLSLLTVADLQRLCGCGSNQRLRRFLDLQLRLYSQQPADRTAALYGATVLQMCQAPLGLWHLQGSMQSLSDHLLASLQRDGAEILLRHRAVLLERNRTSGGWTVQMELPGGERRSLQAADVVCSLPPQCLPSLIPDKNVLGESYRRRLQTLHAPSGALVFYGAVHRRDLPEACPGHLQCDWDTPGSLFLSISRDGDGRAPAGEATVIASVFTTPEGWHDLPEEDYQKRKQTVLEQMRRGVENALTLPAEAWLHTELSTPRGFAYWTGRPKGVVGGLGQSPDRFGPFGLASRSPISKLWLCGDSIHPGEGTAGVTLSALMACSQLMEERGRTITLAD

SEQ ID NO: 2000 - DNA, 1734 bp, Synechococcus sp. RS9916
  CDS (1)..(1734): transl_table=11
atgcagcgcagccaaacccatctgctcggcttcaagcatcgccgcgtcaccctgcttcgcaaacaaacagcgaccatcgctgagctgcaaccgccaggcctgctgactgcagcccccaccaagggcatggcactgatccaggctggccccggccaacaacgccgaatcggccttcaggagtcgttccaattcaggctgcatccacggccccacccgctgcactgccagcatgccgccatggagcacgaccaggacgtgatcgtgatcggcggtggcatcgccggtctcaccgctgccgccctgctcgcccatgcaggcacccgcgtgaccctgctcgaggcgcatcaccaactaggcggctgcgccggtacgttccggcgagggccttacacctttgatgtcggcgccacccaggtcgcaggctttgaggtcggtggcagccatgcgcgcatcttccgccacctgcagttgccgctccccgctgcagagcagctcgatcccggctgcgttgtggatctcgccgacggcagtgatccgatcaggatttggcacgagccgacccgctggcaccaggaacggctgcggcaatttcctggttcagaacggttctgggccctctgtgcctggctgcaccgccacaactggtcgtttgccgaacaggatccagtgctaccggtccgcagcggctgggatctccagcgcaccctgcaagccgtcggactcggcaccctggccagcgccccattcagtctgatgaccgtagcggatctgctgcgactcaccggctgcgctcagcaacaacgcctgcgccgcttcctcgacctccagctgcggctgtactcccaagagccctgtgagcgcaccgcagcgctctacggcgccaccgtgctgcaaatggtgcaagcccccctggggctttggcatctgcagggatcgatgcaggtgttgagcgagcaactcgccggtgcggtgcgccgtgacggaggcacgattcaactgcgccagcgggtcacccagctggaacgctgcgacgcggacggatggcgtgtgcacagccaacatcccgatggtcgtcgccagagcttgcactgcaacgagttgatcagcagtcttccgccccaatgcctgccagcgctgacgccgatgcctgagggatacaagcagcgcatcaacaggttgaaagcaccgagcggtgcactggtgctttacggcgcggtgaatcgtgattgcttgcctgctgactgccccgcccacctgcaacgggatgggcaggatcctggctccctgttcgtgtccatcagccgagatggagatggtcgtgccccgaaaggtcaagccaccgtgatcgccagtgtgttcaccgacccagatcgatgggttgatctatcggaaacggaacaccaggaacgcaaggccagcgcgctgcagaagatgtgcagcacgctcgagcattggctcggcttcccgtcagacgcctggaatcacgtcgagctctccacccccagggcctttgcccactggaccggacggccccagggaatcgttggtgggctcggccaacaccccagccgctttggcccctttggcctcgccagccgcacgccgatgcctgacctctggctctgcggtgattcgatctaccccggagaaggcactgccggagtcagcctgtcggcgctgatggcctgccaacagctaatggccgcgcggggacaatcgttgaccctccgctaa

SEQ ID NO: 2001 - protein, 577 aa, Synechococcus sp. RS9916
MQRSQTHLLGFKHRRVTLLRKQTATIAELQPPGLLTAAPTKGMALIQAGPGQQRRIGLQESFQFRLHPRPHPLHCQHAAMEHDQDVIVIGGGIAGLTAAALLAHAGTRVTLLEAHHQLGGCAGTFRRGPYTFDVGATQVAGFEVGGSHARIFRHLQLPLPAAEQLDPGCVVDLADGSDPIRIWHEPTRWHQERLRQFPGSERFWALCAWLHRHNWSFAEQDPVLPVRSGWDLQRTLQAVGLGTLASAPFSLMTVADLLRLTGCAQQQRLRRFLDLQLRLYSQEPCERTAALYGATVLQMVQAPLGLWHLQGSMQVLSEQLAGAVRRDGGTIQLRQRVTQLERCDADGWRVHSQHPDGRRQSLHCNELISSLPPQCLPALTPMPEGYKQRINRLKAPSGALVLYGAVNRDCLPADCPAHLQRDGQDPGSLFVSISRDGDGRAPKGQATVIASVFTDPDRWVDLSETEHQERKASALQKMCSTLEHWLGFPSDAWNHVELSTPRAFAHWTGRPQGIVGGLGQHPSRFGPFGLASRTPMPDLWLCGDSIYPGEGTAGVSLSALMACQQLMAARGQSLTLR

SEQ ID NO: 2002 - DNA, 1500 bp, Cyanothece sp. PCC 8801
  CDS (1)..(1500): transl_table=11
atgactaagcgcgtgatcgtcatcggagccggaattggaggactaaccgcaggagctttattagcccgtcgcggctatgatgtcactatctatgaacaagccttcattccagggggatgcgcctccactttcaaacgcaaaggctttaccttcgatgtaggagctacccaagtcgcgggattagaacccggaggcattcatcagcgcatttttgctgaattaggcgtagaattgcccgaagcgaccccttgtgaccctgcctgtgccgtctttttacccggagaaagccaacccattaacgtttggcgcgatcgcacaaaatggcaagccgaaagacaacgacaattccccaacagcgaacccttttggcaattattagccaaactcttcgaggcgagttggaaattccaaagccgagatcccgtactaccaccgcgaaatgtctgggatctctggcaattaatctctgcgatgcgcccagataccctaattaccgttcccttcgccctaatgacggtgggggatgcgttacgcttgtatgggttagcaggagataaacgcctcaaaaccttcctagatctgcaattaaagctctattctcaggttaacgccgatgaaaccgctttattgtacgcagcaacagccctagcggtttcccagactccccaagggttgtatcatctacaagggagtatgcaggtattaagcgatcgccttgtcgaagccttagaaaagcacgggggaagactgctcaccggccattgtgtccaacagattgaaacccaagaaaatcaatcacaaagcgtaaccattcttcaacaaaaaacgggaaaaatcttgaccaatacggccgatcacatcgttgctaacgtcaccgtccaaaaccttattaaattactcaccccctcaccctcctggggactctatcaaaaacgagtagaaaagctaccagacccatcgggagcgtttgtcgtgtatttaggggttgatcgccaggccattcctgatgactgtccgccccatttacaatttctctatgaccaaaatggtgtgattggagagaacaattctctgtttgtttccgtcagtaaaccaggagacggacgagctcccgaaggccaagcaactcttattgcttcaaccttcacaaataccaaaatttggagaaatattagtcaagaaacctatcaaaccctcaaagcgcaatatacttcagaagcgatcgcccgtttaaattccttctttgacctgaccccggagacgatcattcatcaagaagctgccactccctgtacgtttgaacggtttaccgccagagaacaagggatagtcggcggtataggtcagcgtgtttttacctttggcccctttggcgtggccacacgaaccccttttaggaatctctggttagtgggagactcaacccatccaggggaaggaactgccggggtgagttattctgctttaacggtggttcgacaaatcgcatcgagttgttaa

SEQ ID NO: 2003 - protein, 499 aa, Cyanothece sp. PCC 8801
MTKRVIVIGAGIGGLTAGALLARRGYDVTIYEQAFIPGGCASTFKRKGFTFDVGATQVAGLEPGGIHQRIFAELGVELPEATPCDPACAVFLPGESQPINVWRDRTKWQAERQRQFPNSEPFWQLLAKLFEASWKFQSRDPVLPPRNVWDLWQLISAMRPDTLITVPFALMTVGDALRLYGLAGDKRLKTFLDLQLKLYSQVNADETALLYAATALAVSQTPQGLYHLQGSMQVLSDRLVEALEKHGGRLLTGHCVQQIETQENQSQSVTILQQKTGKILTNTADHIVANVTVQNLIKLLTPSPSWGLYQKRVEKLPDPSGAFVVYLGVDRQAIPDDCPPHLQFLYDQNGVIGENNSLFVSVSKPGDGRAPEGQATLIASTFTNTKIWRNISQETYQTLKAQYTSEAIARLNSFFDLTPETIIHQEAATPCTFERFTAREQGIVGGIGQRVFTFGPFGVATRTPFRNLWLVGDSTHPGEGTAGVSYSALTVVRQIASSC

SEQ ID NO: 2004 - DNA, 1533 bp, Cyanothece sp. PCC 7424
  CDS (1)..(1533): transl_table=11
atgccgagtcatcagcaacataacaaacctcacattattgtcattggtgcaggaattgggggattaaccgccggcgcattattagcccgtcgaggctatgaagtgacgatatatgatcaagccattgtacccggtggttgtgcttcaacctttaaaagacgagggtttacctttgatgtcggggcgactcaggtagccggattagaacccggaggcattcataaacggatttttgacgaattagaagttgaacttcccccggcgacaccctgtgatccggcttgtgccgtatttttaccaggggaagcacaaccgattaatgtatggcgagatccagatcaatggaagctcgaaagacaaaaacagtttccggcaagtgagcctttttggcaattaattgataaattatttcaacccagttggaaattccaagccagagatcccgtcttaccccctcgtaatctttgggatatctggcaattagtctctgctgtgcgcttagataccctgattactgttccttttaccctgatgacggtgggagatgccttaaaattatatggattatacggggataaacggctgaaaaccttcctcgatatgcaattaaagctgtattctcaagttgacgctgacgaaaccgcccttttatatgctgccaccgctttatcggtttcttctcatccccaagggttatatcatcttcaaggcagtatgcaagtattaagcgatcgcctagtggaaggattagaaaaatatggcggtaaattattcatgcgccataccgtagaacagattaacaccgactccggaagagtgaggggggtaaaaatccgtaatcaaaaaacgggggaagtctttatacaatacgccgatcatatcgtagctaatgtaacggcacaaaatttagtcaaactggttgaggataaggcttttaatcaattgggataccaacagagaatcgaaaaactcgccgaaccttccggggcgtttgtcatctatttaggggtcgatcgccgagggattcccaaagagtgtccccctcatttacaatttttgtatgagtatgatggtgttattggggaaaataattccctgtttgtatctgtcagtaagccgggagatgggagggccccagaaggaaaagcgacaattatagcctcttcctttaccgatgcgtctatgtggtggaaaggaacaaaagaaacctatgaacacttaaaacaccagtatacctcggaagcgatcgcccggttagggacatattttgatctgagtccaaagatgatcctacatcaagaaaccgcgactcctcgcacctttgcccggtttaccgccagagacaaggggatagttggaggaataggccagagaatctcaacatttggcccctttgggatagggactcgtaccccggttaaaaatctgtggttagtaggagactcaacccatcccggcgaagggacagccggagtcagttactctgccttaacggtagttaaacaaattgatgctatctttaaacttcaataa

SEQ ID NO: 2005 - protein, 510 aa, Cyanothece sp. PCC 7424
MPSHQQHNKPHIIVIGAGIGGLTAGALLARRGYEVTIYDQAIVPGGCASTFKRRGFTFDVGATQVAGLEPGGIHKRIFDELEVELPPATPCDPACAVFLPGEAQPINVWRDPDQWKLERQKQFPASEPFWQLIDKLFQPSWKFQARDPVLPPRNLWDIWQLVSAVRLDTLITVPFTLMTVGDALKLYGLYGDKRLKTFLDMQLKLYSQVDADETALLYAATALSVSSHPQGLYHLQGSMQVLSDRLVEGLEKYGGKLFMRHTVEQINTDSGRVRGVKIRNQKTGEVFIQYADHIVANVTAQNLVKLVEDKAFNQLGYQQRIEKLAEPSGAFVIYLGVDRRGIPKECPPHLQFLYEYDGVIGENNSLFVSVSKPGDGRAPEGKATIIASSFTDASMWWKGTKETYEHLKHQYTSEAIARLGTYFDLSPKMILHQETATPRTFARFTARDKGIVGGIGQRISTFGPFGIGTRTPVKNLWLVGDSTHPGEGTAGVSYSALTVVKQIDAIFKLQ

SEQ ID NO: 2006 - DNA, 1710 bp, Vitis vinifera
  CDS (1)..(1710)
atgggattggagggttacaagcatggtggtgttgaattaggggtctataggtggagtaggagtggaagctgtgttgtgaggcctagatcagtgctgagtgtggatgaagtggtagagagggaagggaatggaagaacaggagaggaaaagcaatacgatgccattgttatcgggtcgggaattggagggttggttgcggcaacacagctggcagtgaagggagctagggtgttggtgctggagaagtatgtgattcctggtgggagctctgggttctaccagagagatgggtatacgtttgatgttgggtcttctgtgatgtttggtttcagcgataagggaaatttaaatttaataacccaagcactggaagcagttggatgtaagatgcaggtgatacctgatccaactactgtccatttccatttacccagtaacctttcggtccgagtacatagacaatacggtgaattcattgcagaacttaccaagaattttccccatgaaaaggaagggatcctcaaattctacaatgaatgttggaagatcttcaatgccctaaactcattggaattgaagtcacttgaggagccaatctaccttttcggacagttctttcagaagcctcttgaatgcttgacacttgcctattatttgccccaaaatgctggagacatagcccgcaagtacataaaggatccccagctgttatctttcatagatgctgagtgttttatagtgagcacagttaatgctttgcagacaccaatgatcaatgcgagcatggttctatgtgataggcattttgggggaattaactaccctgttggtggtgttggtggaattgctaagtccttggcaaaaggtctagttgaaaatggcagtgaaatactttataaggcaaatgtgactagcattatattggcgcagggaaaggccgtgggagtgaagctttcagatggaagggagttctttgccaaaaccatagtatctaatgctactagatgggatacatttggaaagcttttaaagggtgaagaacttccaaaagaagaggtgaactttcaaaaggtctatgttaaggccccatcatttctttccattcacatgggggttaaagctgaggttttgccacctgatacagattgccaccattttgttcttgagaatgactggtcaaggttagaggagccatatggaagcatatttttgagcattccaactatgcttgatgcatcattggctccagaaggtcgccatattcttcatatttttacaacttctcccatagaggactggaagggactccctctaaaagactatgaggcaaagaaagaacttgtggcagatgaaatcataagcagattggaaaaaaaactatttccggggctcaaatcatccattgtttttaaggaggtagggacaccaaaaacacacaggcgttatcttgctcgagataatggcacgtatggaccaatgcctcgcagaacacctaagggattattgggaatgccattcaatacaactgctatacatggtctctactgtgttggggatagctgctttccaggacaaggtgttatagctgtagccttttcaggtgtaatgtgtgcacaccgagtggctgcagatattgggcttgagaagaagtccccagtgctggatgctgcccttcttcgactacttggttggttaaggacattggcatag

SEQ ID NO: 2007 - protein, 569 aa, Vitis vinifera
MGLEGYKHGGVELGVYRWSRSGSCVVRPRSVLSVDEVVEREGNGRTGEEKQYDAIVIGSGIGGLVAATQLAVKGARVLVLEKYVIPGGSSGFYQRDGYTFDVGSSVMFGFSDKGNLNLITQALEAVGCKMQVIPDPTTVHFHLPSNLSVRVHRQYGEFIAELTKNFPHEKEGILKFYNECWKIFNALNSLELKSLEEPIYLFGQFFQKPLECLTLAYYLPQNAGDIARKYIKDPQLLSFIDAECFIVSTVNALQTPMINASMVLCDRHFGGINYPVGGVGGIAKSLAKGLVENGSEILYKANVTSIILAQGKAVGVKLSDGREFFAKTIVSNATRWDTFGKLLKGEELPKEEVNFQKVYVKAPSFLSIHMGVKAEVLPPDTDCHHFVLENDWSRLEEPYGSIFLSIPTMLDASLAPEGRHILHIFTTSPIEDWKGLPLKDYEAKKELVADEIISRLEKKLFPGLKSSIVFKEVGTPKTHRRYLARDNGTYGPMPRRTPKGLLGMPFNTTAIHGLYCVGDSCFPGQGVIAVAFSGVMCAHRVAADIGLEKKSPVLDAALLRLLGWLRTLA

SEQ ID NO: 2008 - DNA, 1560 bp, Microcystis aeruginosa PCC 7806
  CDS (1)..(1560): transl_table=11
ctgctaacatatcataactactctagaagagccataattgttaagaaaatgacgcaaattaccgttattggtgcagggattggcggactaacggcggcggcattattggcgcgtcgaggttatcaagtcacagtatatgatcaggcgcttgtccccgggggttgtgcctcgactttttcccgtcggggttttacttttgacgtgggggcaactcaagtggcaggattagaagtagggggcattcatcagcgcatttttgccgaattagggatagatttacccgattctgtcccctgcgatcccgcctgtgccgtttttctgccgggggaaaccactccgatcaatgtctggcgcgatcggcaaaagtggcaagaggaaagacaaaaacaatttccgggcagcgaacctttttggcaattattacaaaaactctttcaagcaagttggcgttttcaaagtcgcgatccagttttacccccgcgcaactggtgggatttagggcaattaatcgccgctttgcgtgtagatactgccattaccttcccctttactttgatgactgtgggcgatgctctgcgattatacggcttagagagggataaacgcctaaaaacctttctggatctccagttaaagctttattcccaagttactgccgatgaaaccgctttactttatgccgccaccgctttagcagtttctcagtctccccaaggtttatcccaccttcagggtagtatgcaagtattaagcgatcgcctagtaacagctttggaaaaatacggcggtaaattgcaaatgcgccacacagtggaaaaaatactgacagaaaagggaaaagccacgggaattatcgtcagaaatcaaaaaaatggtcaaatatatccagaaatggccgatgagattgtcgctaatatcccgatccaaaatttaccacaattaatcgatcgcgaagccattcccagtctttatcaccggagaatcgaaaaacttccccccgcatccggtgcttttgtggtttacttaggagtcgatcgcgctgctattccccccgattgtcctccccatttgcaattcctctacgattacgatggcataatcggcgaaaataactctttgtttgtttccgtgagtaaagaaggagatggccgcgctccagtgggaaaagcgacgattattgcttcttccttcaccgataccagtctttggtggcaaaaaggagaagataattatcagcaattaaaagcagcatacacccaagaggcgatcaatcgtctcggtaattatttccatcttagtcctgatcacatcgttcacatcgaatcagctacacctcgcacttttgaacggtttacggggcgaaatcagggcattgtcggcggtattggtcaaagattgtccacttttggcccttttggagtagcgacgcgcactccgatcccccatctttggttggtgggagattccacccatccgggagaaggcactgccggagtcagctattcggcactcacggtagttagacagattgagaatcaattaagtagtcgtgcaaaataa

SEQ ID NO: 2009 - protein, 519 aa, Microcystis aeruginosa PCC 7806
MLTYHNYSRRAIIVKKMTQITVIGAGIGGLTAAALLARRGYQVTVYDQALVPGGCASTFSRRGFTFDVGATQVAGLEVGGIHQRIFAELGIDLPDSVPCDPACAVFLPGETTPINVWRDRQKWQEERQKQFPGSEPFWQLLQKLFQASWRFQSRDPVLPPRNWWDLGQLIAALRVDTAITFPFTLMTVGDALRLYGLERDKRLKTFLDLQLKLYSQVTADETALLYAATALAVSQSPQGLSHLQGSMQVLSDRLVTALEKYGGKLQMRHTVEKILTEKGKATGIIVRNQKNGQIYPEMADEIVANIPIQNLPQLIDREAIPSLYHRRIEKLPPASGAFVVYLGVDRAAIPPDCPPHLQFLYDYDGIIGENNSLFVSVSKEGDGRAPVGKATIIASSFTDTSLWWQKGEDNYQQLKAAYTQEAINRLGNYFHLSPDHIVHIESATPRTFERFTGRNQGIVGGIGQRLSTFGPFGVATRTPIPHLWLVGDSTHPGEGTAGVSYSALTVVRQIENQLSSRAK

SEQ ID NO: 2010 - DNA, 1749 bp, Blakeslea trispora
  CDS (1)..(1749)
atgtctgatcaaaagaagcatattgttgtcattggtgccggtattggcggaactgctactgctgctcgtcttgctcgtgaaggttttcgagttactgttgttgaaaagaacgacttttccggtggccgttgttcattcattcatcacgatggtcatcgctttgatcagggtccctcactctatttgatgcctaagctttttgaagatgcatttgctgatttggatgaacgtattggtgatcatttggatttgcttcgctgtgacaataactataaggttcattttgacgacggtgatgccgtacaactctcttccgatttaaccaagatgaagggcgaattggaccgtattgagggtccccttggatttggtagattcttggatttcatgaaggaaacacatgtccattatgaacaaggtacatttattgctatcaagcgcaactttgaaaccatttgggatttgattcgtcttcagtatgtgcctgaaatctttcgcttgcacttgtttggtaagatctatgaccgagccagtaaatatttccaaaccaagaaaatgcgtatggcttttacttttcaaacaatgtatatgggtatgtcgccttatgatgctccagcagtttacagtttgttacaatacaccgagtttgctgaaggtatctggtatcctcgtggtggtttcaacatggttgttcagaagcttgagtctatcgcctccaaaaagtacggtgctgaattcagatatcaatcgcctgttgctaaaattaacactgtcgataaagacaagcgtgtaaccggtgtcactttggaaagcggagaagtcattgaagccgatgcagtcgtatgtaatgcggatcttgtttatgcttatcaccatctgttacctccttgcaattggacaaagaagacattagcctcaaagaaactcacttcatcatctatttcgttttattggtccatgtcaacaaaggtgcctcaattagacgtacacaatatcttcttggctgaagcctacaaggaaagttttgatgagattttcaacgacttcggtttgccctctgaagcttcattctatgtcaacgttccatctcgaattgatgaatctgccgcacctcccaacaaggactccattattgtgttggttccaattggccatatgaagagtaagacaggaaacagtgctgaagaaaattatcctgagttggtaaaccgtgcacgcaagatggttctggaagttatcgaacgtcgtttgggagtaaacaactttgctaatttgattgaacatgaagaagtgaatgatcctagtgtttggcaaagcaagtttaacctttggagaggttctattcttggtctttctcatgatgtgttccaagttctctggttcagacctagtaccaaggattccacaaaccgttatgataatcttttctttgtcggagctagtacacatccaggtactggtgttcctatcgttcttgctggaagtaagcttacttccgaccaagtctgtaaaagctttggccagaatcccttaccaagaaagttacaagatagccaaaagaagtatgctcctgaacaaactcgtaagaccgaaagccattggatctattattgtcttgcttgttactttgttactttcctctttttctatttcttcccaagagatgatactacaactcctgcttctttcattaaccaacttttacctaacgttttccaaggacaaaacagcaacgatattcgcatttag

SEQ ID NO: 2011 - protein, 582 aa, Blakeslea trispora
MSDQKKHIVVIGAGIGGTATAARLAREGFRVTVVEKNDFSGGRCSFIHHDGHRFDQGPSLYLMPKLFEDAFADLDERIGDHLDLLRCDNNYKVHFDDGDAVQLSSDLTKMKGELDRIEGPLGFGRFLDFMKETHVHYEQGTFIAIKRNFETIWDLIRLQYVPEIFRLHLFGKIYDRASKYFQTKKMRMAFTFQTMYMGMSPYDAPAVYSLLQYTEFAEGIWYPRGGFNMVVQKLESIASKKYGAEFRYQSPVAKINTVDKDKRVTGVTLESGEVIEADAVVCNADLVYAYHHLLPPCNWTKKTLASKKLTSSSISFYWSMSTKVPQLDVHNIFLAEAYKESFDEIFNDFGLPSEASFYVNVPSRIDESAAPPNKDSIIVLVPIGHMKSKTGNSAEENYPELVNRARKMVLEVIERRLGVNNFANLIEHEEVNDPSVWQSKFNLWRGSILGLSHDVFQVLWFRPSTKDSTNRYDNLFFVGASTHPGTGVPIVLAGSKLTSDQVCKSFGQNPLPRKLQDSQKKYAPEQTRKTESHWIYYCLACYFVTFLFFYFFPRDDTTTPASFINQLLPNVFQGQNSNDIRI

SEQ ID NO: 2012 - DNA, 1749 bp, Blakeslea trispora
  CDS (1)..(1749)
atgtctgatcaaaagaagcatattgttgtcattggtgccggtattggcggaactgctactgctgctcgtcttgctcgtgaaggttttcgagttactgttgttgaaaagaacgacttttccggtggccgttgttcattcattcatcacgatggtcatcgctttgatcagggtccctcactctatttgatgcctaagctttttgaagatgcatttgctgatttggatgaacgtattggtgatcatttggatttgcttcgctgtgacaataactataaggttcattttgacgacggtgatgccgtacaactctcttccgatttaaccaagatgaagggcgaattggaccgtattgagggtccccttggatttggtagattcttggatttcatgaaggaaacacatgtccattatgaacaaggtacatttattgctatcaagcgcaactttgaaaccatttgggatttgattcgtcttcagtatgtgcctgaaatctttcgcttgcacttgtttggtaagatctatgaccgagccagtaaatatttccaaaccaagaaaatgcgtatggcttttacttttcaaacaatgtatatgggtatgtcgccttatgatgctccagcagtttacagtttgttacaatacaccgagtttgctgaaggtatctggtatcctcgtggtggtttcaacatggttgttcagaagcttgagtctatcgcctccaaaaagtacggtgctgaattcagatatcaatcgcctgttgctaaaattaacactgtcgataaagacaagcgtgtaaccggtgtcactttggaaagcggagaagtcattgaagccgatgcagtcgtatgtaatgcggatcttgtttatgcttatcaccatctgttacctccttgcaattggacaaagaagacattagcctcaaagaaactcacttcatcatctatttcgttttattggtccatgtcaacaaaggtgcctcaattagacgtacacaatatcttcttggctgaagcctacaaggaaagttttgatgagattttcaacgacttcggtttgccctctgaagcttcattctatgtcaacgttccatctcgaattgatgaatctgccgcacctcccaacaaggactccattattgtgttggttccaattggccatatgaagagtaagacaggaaacagtgctgaagaaaattatcctgagttggtaaaccgtgcacgcaagatggttctggaagttatcgaacgtcgtttgggagtaaacaactttgctaatttgattgaacatgaagaagtgaatgatcctagtgtttggcaaagcaagtttaacctttggagaggttctattcttggtctttctcatgatgtgttccaagttctctggttcagacctagtaccaaggattccacaaaccgttatgataatcttttctttgtcggagctagtacacatccaggtactggtgttcctatcgttcttgctggaagtaagcttacttccgaccaagtctgtaaaagctttggccagaatcccttaccaagaaagttacaagatagccaaaagaagtatgctcctgaacaaactagtaagaccgaaagccattggatctattattgtcttgcttgttactttgttactttcctctttttctatttcttcccaagagatgatactacaactcctgcttctttcattaaccaacttttacctaacgttttccaagtacaaaacagcaacgatattcgcatttaa

SEQ ID NO: 2013 - protein, 582 aa, Blakeslea trispora
MSDQKKHIVVIGAGIGGTATAARLAREGFRVTVVEKNDFSGGRCSFIHHDGHRFDQGPSLYLMPKLFEDAFADLDERIGDHLDLLRCDNNYKVHFDDGDAVQLSSDLTKMKGELDRIEGPLGFGRFLDFMKETHVHYEQGTFIAIKRNFETIWDLIRLQYVPEIFRLHLFGKIYDRASKYFQTKKMRMAFTFQTMYMGMSPYDAPAVYSLLQYTEFAEGIWYPRGGFNMVVQKLESIASKKYGAEFRYQSPVAKINTVDKDKRVTGVTLESGEVIEADAVVCNADLVYAYHHLLPPCNWTKKTLASKKLTSSSISFYWSMSTKVPQLDVHNIFLAEAYKESFDEIFNDFGLPSEASFYVNVPSRIDESAAPPNKDSIIVLVPIGHMKSKTGNSAEENYPELVNRARKMVLEVIERRLGVNNFANLIEHEEVNDPSVWQSKFNLWRGSILGLSHDVFQVLWFRPSTKDSTNRYDNLFFVGASTHPGTGVPIVLAGSKLTSDQVCKSFGQNPLPRKLQDSQKKYAPEQTSKTESHWIYYCLACYFVTFLFFYFFPRDDTTTPASFINQLLPNVFQVQNSNDIRI

SEQ ID NO: 2014 - DNA, 1749 bp, Blakeslea trispora
  CDS (1)..(1749)
atgtctgatcaaaagaagcatattgttgtcattggtgccggtattggcggaactgctactgctgctcgtcttgctcgtgaaggttttcgagttactgttgttgaaaagaacgacttttccggtggccgttgttcattcattcatcacgatggtcatcgctttgatcagggtccctcactctatttgatgcctaagctttttgaagatgcatttgctgatttggatgaacgtattggtgatcatttggatttgcttcgctgtgacaataactataaggttcattttgacgacggtgatgccgtacaactctcttccgatttaaccaagatgaagggcgaattggaccgtattgagggtccccttggatttggtagattcttggatttcatgaaggaaacacatgtccattatgaacaaggtacatttattgctatcaagcgcaactttgaaaccatttgggatttgattcgtcttcagtatgtgcctgaaatctttcgcttgcacttgtttggtaagatctatgaccgagccagtaaatatttccaaaccaagaaaatgcgtatggcttttacttttcaaacaatgtatatgggtatgtcgccttatgatgctccagcagtttacagtttgttacaatacaccgagtttgctgaaggtatctggtatcctcgtggtggtttcaacatggttgttcagaagcttgagtctatcgcctccaaaaagtacggtgctgaattcagatatcaatcgcctgttgctaaaattaacactgtcgataaagacaagcgtgtaaccggtgtcactttggaaagcggagaagtcattgaagccgatgcagtcgtatgtaatgcggatcttgtttatgcttatcaccatctgttacctccttgcaattggacaaagaagacattagcctcaaagaaactcacttcatcatctatttcgttttattggtccatgtcaacaaaggtgcctcaattagacgtacacaatatcttcttggctgaagcctacaaggaaagttttgatgagattttcaacgacttcggtttgccctctgaagcttcattctatgtcaacgttccatctcgaattgatgaatctgccgcacctcccaacaaggactccattattgtgttggttccaattggccatatgaagagtaagacaggaaacagtgctgaagaaaattatcctgagttggtaaaccgtgcacgcaagatggttctggaagttatcgaacgtcgtttgggagtaaacaactttgctaatttgattgaacatgaagaagtgaatgatcctagtgtttggcaaagcaagtttaacctttggagaggttctattcttggtctttctcatgatgtgttccaagttctctggttcagacctagtaccaaggattccacaaaccgttatgataatcttttctttgtcggagctagtacacatccaggtactggtgttcctatcgttcttgctggaagtaagcttacttccgaccaagtctgtaaaagctttggccagaatcccttaccaagaaagttacaagatagccaaaagaagtatgctcctgaacaaactcgtaagaccgaaagccattggatctattattgtcttgcttgttactttgttactttcctctttttctatttcttcccaagagatgatactacaactcctgcttctttcattaaccaacttttacctaacgttttccaagtacaaaacagcaacgatattcgcatttag

SEQ ID NO: 2015 - protein, 582 aa, Blakeslea trispora
MSDQKKHIVVIGAGIGGTATAARLAREGFRVTVVEKNDFSGGRCSFIHHDGHRFDQGPSLYLMPKLFEDAFADLDERIGDHLDLLRCDNNYKVHFDDGDAVQLSSDLTKMKGELDRIEGPLGFGRFLDFMKETHVHYEQGTFIAIKRNFETIWDLIRLQYVPEIFRLHLFGKIYDRASKYFQTKKMRMAFTFQTMYMGMSPYDAPAVYSLLQYTEFAEGIWYPRGGFNMVVQKLESIASKKYGAEFRYQSPVAKINTVDKDKRVTGVTLESGEVIEADAVVCNADLVYAYHHLLPPCNWTKKTLASKKLTSSSISFYWSMSTKVPQLDVHNIFLAEAYKESFDEIFNDFGLPSEASFYVNVPSRIDESAAPPNKDSIIVLVPIGHMKSKTGNSAEENYPELVNRARKMVLEVIERRLGVNNFANLIEHEEVNDPSVWQSKFNLWRGSILGLSHDVFQVLWFRPSTKDSTNRYDNLFFVGASTHPGTGVPIVLAGSKLTSDQVCKSFGQNPLPRKLQDSQKKYAPEQTRKTESHWIYYCLACYFVTFLFFYFFPRDDTTTPASFINQLLPNVFQVQNSNDIRI

SEQ ID NO: 2016 - DNA, 1713 bp, Gibberella fujikuroi
  CDS (1)..(1713)
atgagcgacattaagaaatctgttattgttattggtgctggtgtcggtggtgtttctactgctgcgagacttgcaaaagctggcttcaaagtcactatcctcgagaagaatgactttaccggtggacgttgctctctaatccacaacgatggccaccgcttcgatcaaggtccatctcttcttctcctccctcgcttcttccacgagatcttccaagacctaggaacatctctaactgctgagggcgttgagcttttgaaatgtgaacccaattacaacatctggttcggcgacggttcatcttttgagatgtctactgatctcaccaagatgaagaaagctatcgaagccgttgaaggtatcgatggttttgagaggtacctcggttttcttcaggagtcgcatcgacattatgaagtcagtgttgagtctgtgctgcgaagaaactttcctagtattttgagcttggcgagacctgaggtgctgttcaatctgttcaatattcatccccttgagagtatctggacgagagcgagcaagtacttctggactgagaggttaagaagagtctttacattcggaagcatgtacatgggcatgagtccgtttgatgcgccaggaacgtatagcttgcttcagtatactgagcttgctgagggtatcctatatcctcgaggtggattccacaaggtcgttgaggcactggttaacgttggtcagcgtctcggtgtcgagtaccgtctctccactggcgtcaagtccatttctattgaccaagcaaccggcaaggcaaacggtgtcgttctgagcgacggaacacatttaccttcagacattgtcatctcaaacgccgaccttgtctatacttacaacaacctccttcctaagaccagctacgcagactcgctatcaaaacgagaaacctcctgcagtagtatctctttctactggtctgcttctaagatcgttcctgaactcaacgctcacaacatcttccttgcggatgagtaccaggagtcttttgacagcatcttcaaggagcacctcattccttcagaaccatccttctatgtcaatgttccttcacgcatcgacccttcagctgctcctgaaggtaaggactctatagtcgtccttgtacccgttggccatcttctgtcagattctgaaggaacacatcgtggtttgtccaagtctggaaattctggtggccttgaaacaagccaggactgggataagatgatctctctggcccgtgacacagtcatcgcaacaatgcgtgcgagaataggcgttgatcttgctcctctcattgaaaacgaaatcatcaacactcccttcacgtggcaagagaagttcaacctcgacaagggtgctattcttggcttgagccactccatcatgaatgttctcgccttccgacctggtactcagcactccaagtacaagaacttatactttgctggtgccagcacacatcctggtactggtgttcctgtctgcattgctggtagtaagattgttgcagagcagattctcaaggattcaggtttcaagaacaaccagatcccctgggctcaggatactaccaagtctcccaagggtggactggataagatgagcgattcgtctttgactctgttccaagggttcttgggggctctggttgcgattttgctggcttattattatcttgtcattgctgcgaattag

SEQ ID NO: 2017 - protein, 570 aa, Gibberella fujikuroi
MSDIKKSVIVIGAGVGGVSTAARLAKAGFKVTILEKNDFTGGRCSLIHNDGHRFDQGPSLLLLPRFFHEIFQDLGTSLTAEGVELLKCEPNYNIWFGDGSSFEMSTDLTKMKKAIEAVEGIDGFERYLGFLQESHRHYEVSVESVLRRNFPSILSLARPEVLFNLFNIHPLESIWTRASKYFWTERLRRVFTFGSMYMGMSPFDAPGTYSLLQYTELAEGILYPRGGFHKVVEALVNVGQRLGVEYRLSTGVKSISIDQATGKANGVVLSDGTHLPSDIVISNADLVYTYNNLLPKTSYADSLSKRETSCSSISFYWSASKIVPELNAHNIFLADEYQESFDSIFKEHLIPSEPSFYVNVPSRIDPSAAPEGKDSIVVLVPVGHLLSDSEGTHRGLSKSGNSGGLETSQDWDKMISLARDTVIATMRARIGVDLAPLIENEIINTPFTWQEKFNLDKGAILGLSHSIMNVLAFRPGTQHSKYKNLYFAGASTHPGTGVPVCIAGSKIVAEQILKDSGFKNNQIPWAQDTTKSPKGGLDKMSDSSLTLFQGFLGALVAILLAYYYLVIAAN

SEQ ID NO: 2018 - DNA, 1737 bp, Arabidopsis thaliana
  CDS (1)..(1737)
atggccgccaatttctgcggcttgacgcttcagtctccgtttctctataactttagtcgcccaacgatcagatcttcttccttcatacggtcttcgtcttcttcatcagcctcttccaatggcaatcttaaagaacccttctctggggagcctgaagcagatgttgtggtaattggaagtgggataggaggattatgttgtggtgcattgttagctagatatgatcaggatgtgattgttttggagagtcatgaccatcccggtggcgctgctcattcctttgagatcaaagggtacaagtttgactcaggtccttctctgttttctggtttacaatcgcgaggtcctcaagcaaatccacttgctcaagttcttgatgctttaggggaatcatttccatgtaagaaatatgattcttggatggtttacttacccgaaggtgatttcttgtcacgaataggccctacggatttctttaaggatcttgagaaatatgccggtccaagcgcagtgcaggagtgggaaaagcttcttgtgggtgcctatggagcaatactccctctgtcttctgctgctatggcgttaccaccattgtctattcgcggggatcttggtgttctctccacagctgctgctagatatgctccttcgcttttaaaatcttttatcaaaatgggtcctaaaggagcgttgggagcgacaaaacttctccgcccgttctcggagatcgttgattctttggagttaaaagacccgtttatacgaaactggattgatcttctcgcattcctgctcgcaggggtcaaatctgatggcatactttcagcagagatgatctacatgtttgcagaatggtacaagccaggctgcacattggagtaccctattgatggcaccggtgctgtggttgaagcgcttgtccgtggcttggagaagtttggtggacgtctatctcttaaaagtcatgtcgaaaacattgttatcgagaatggtaaagctgttggagtcaagctaaggaatggtcaatttgttcgagctagaaaagctgtggttagcaatgcatcgatgtgggatactttaaagctcttacctccaggagctctcccagaatcatatgtaaaaggtgtgaacacaacacctcaatgtgaatcattcatgcatcttcacttgggattcgacgcagagggaatagcagatgatcttgagattcatcatatcgttgtgaatgactgggaccgcggtgtggatgctgaccagaatgtggttctgatatctgtccctagtgttcttagcccaaaccttgcaccaccgggaaaacatgttctacacgcttactgtcctggaaccgaacctttcggtctgtgggaaggtcttgatagaagaagtgccgagtacaagaatctcaaatcccaacggtccgaggtgatgtggagagcggttgagcgggcattagggctagggttcaaaagagaaaagtgcgaggtgagtttggttggaacaccattgacgcatcagaggtttctaaggaggaatagaggaacatatgggcctgcaatagaggcaggtaaaggtacttttcctggccattccactcccattccgcagcttttgtgttgcggtgactcgacctttcccgggatcggagttcctgcagtggcagctagcggcgcgattgtggcgaattcgctagttcctgtttccaagcattcacagcttcttgatgccattggcttgtag

SEQ ID NO: 2019 - protein, 578 aa, Arabidopsis thaliana
MAANFCGLTLQSPFLYNFSRPTIRSSSFIRSSSSSSASSNGNLKEPFSGEPEADVVVIGSGIGGLCCGALLARYDQDVIVLESHDHPGGAAHSFEIKGYKFDSGPSLFSGLQSRGPQANPLAQVLDALGESFPCKKYDSWMVYLPEGDFLSRIGPTDFFKDLEKYAGPSAVQEWEKLLVGAYGAILPLSSAAMALPPLSIRGDLGVLSTAAARYAPSLLKSFIKMGPKGALGATKLLRPFSEIVDSLELKDPFIRNWIDLLAFLLAGVKSDGILSAEMIYMFAEWYKPGCTLEYPIDGTGAVVEALVRGLEKFGGRLSLKSHVENIVIENGKAVGVKLRNGQFVRARKAVVSNASMWDTLKLLPPGALPESYVKGVNTTPQCESFMHLHLGFDAEGIADDLEIHHIVVNDWDRGVDADQNVVLISVPSVLSPNLAPPGKHVLHAYCPGTEPFGLWEGLDRRSAEYKNLKSQRSEVMWRAVERALGLGFKREKCEVSLVGTPLTHQRFLRRNRGTYGPAIEAGKGTFPGHSTPIPQLLCCGDSTFPGIGVPAVAASGAIVANSLVPVSKHSQLLDAIGL

SEQ ID NO: 2020 - DNA, 1740 bp, Mucor circinelloides f
  CDS (1)..(1740)
atgtccaagaaacacattgtcattatcggtgctggcgtgggtggcacggctacagctgctcgtttggcccgcgaaggcttcaaggtcactgtggtggagaaaaacgactttggtggcggccgctgctccttgatccatcaccagggccatcgctttgatcagggcccgtcgctctacctgatgcccaagtactttgaggacgcctttgccgatctggacgagcgcattcaagaccacctggagctgctgcgatgcgacaacaactacaaggtgcactttgacgacggtgagtcgatccagctgtcgtctgacttgacacgcatgaaggctgaattggaccgcgtggagggcccccttggttttggccgattcctggatttcatgaaagagacacacatccactacgaaagcggcaccctgattgcgctcaagaagaatttcgaatccatctgggacctgattcgcatcaagtacgctccagagatctttcgcttgcacctgtttggcaagatctacgaccgcgcttccaagtacttcaagaccaagaagatgcgcatggcattcacgtttcagaccatgtatatgggcatgtcgccctacgatgcgcctgctgtctacagcctgttgcagtacaccgagttcgctgaaggcatctggtatccccgtggcggcttcaacatggtggttcagaagctagaggcgattgcaaagcaaaagtacgatgccgagtttatctacaatgcgcctgttgccaagattaacaccgatgatgccaccaaacaagtgacaggtgtaaccttggaaaatggccacatcatcgatgccgatgcggttgtgtgtaacgcagatctggtctatgcttatcacaatctgttgcctccctgccgatggacgcaaaacacactggcttccaagaaattgacgtcttcttccatttccttctactggtccatgtccaccaaggtgcctcaattggacgtgcacaacatctttttggccgaggcttatcaggagagctttgacgaaatcttcaaggactttggcctgccttctgaagcctccttctacgtcaatgtgccctctcgcatcgatccttctgctgctcccgacggcaaggactctgtcattgtcttggtgcctattggtcatatgaagagcaagacgggcgatgcttccaccgagaactacccggccatggtggacaaggcacgcaagatggtgctggctgtgattgagcgtcgtctgggcatgtcgaatttcgccgacttgattgagcatgagcaagtcaatgatcccgctgtatggcagagcaagttcaatctgtggagaggctcaattctgggtttgtctcatgatgtgcttcaggtgctgtggttccgtcccagcacaaaggattctaccggtcgttatgataacctattctttgtgggtgcaagcacgcatcccggaactggtgttcccattgtccttgcaggaagcaagctcacctctgaccaagttgtcaagagctttggaaagacgcccaagccaagaaagatcgagatggagaacacgcaagcacctttggaggagcctgatgctgaatcgacattccctgtgtggttctggttgcgcgctgccttttgggtcatgtttatgttcttttacttcttccctcaatccaatggccaaacgcccgcatcttttatcaataatttgttacctgaagtattccgcgttcataactctaatgtcatttaa

SEQ ID NO: 2021 - protein, 579 aa, Mucor circinelloides f
MSKKHIVIIGAGVGGTATAARLAREGFKVTVVEKNDFGGGRCSLIHHQGHRFDQGPSLYLMPKYFEDAFADLDERIQDHLELLRCDNNYKVHFDDGESIQLSSDLTRMKAELDRVEGPLGFGRFLDFMKETHIHYESGTLIALKKNFESIWDLIRIKYAPEIFRLHLFGKIYDRASKYFKTKKMRMAFTFQTMYMGMSPYDAPAVYSLLQYTEFAEGIWYPRGGFNMVVQKLEAIAKQKYDAEFIYNAPVAKINTDDATKQVTGVTLENGHIIDADAVVCNADLVYAYHNLLPPCRWTQNTLASKKLTSSSISFYWSMSTKVPQLDVHNIFLAEAYQESFDEIFKDFGLPSEASFYVNVPSRIDPSAAPDGKDSVIVLVPIGHMKSKTGDASTENYPAMVDKARKMVLAVIERRLGMSNFADLIEHEQVNDPAVWQSKFNLWRGSILGLSHDVLQVLWFRPSTKDSTGRYDNLFFVGASTHPGTGVPIVLAGSKLTSDQVVKSFGKTPKPRKIEMENTQAPLEEPDAESTFPVWFWLRAAFWVMFMFFYFFPQSNGQTPASFINNLLPEVFRVHNSNVI

SEQ ID NO: 2022 - DNA, 1848 bp, Daucus carota
  CDS (1)..(1848)
atgtctactagcatctttgaaaccccattaccaagaagtgatctttttttatgtagcaacagtttattgtctcaaaattataaactttttgataattccaggagttttgggttgaaaagcctcagacccagatgtcagaaagatggacttttgtatccaaagcccttgaattttgggttttgtagggtgagtaggagaaagaggaagcctaattttgtgttgaattctgtgctgagtgttgataaagagttggagagtgatgaaactgtgggattgggtaggagtagagagtatgatgctattgtgattgggtctgggattggtggtttggttgcagcaacacagttggctgtgaagggtgctaaggttctagtgcttgaaaagtatttgattcctggtgggagctctggatattacgaaagagatggttttacattcgatgttggatcatctgtgatgtttggcttcagtgataaggggaatcttaacttgataactcaagcattggcggcagttggctgtaagatggaggtgatacctgaccccagtactgtccattttcatctacctagtaatctttctgtcctagtacatagagaatataatgagttcttctccgaactgacaagcaaatttccacatgaaaaggaaggaatatttaaattttatggtgaatgctggaagatttttaatgccttgaactcattggaactgaagtcactcgaggaaccaatctacctgtttgggcagttctttaaaaagcctatggaatgcctaacactggcatactatttgcctcaaaatgctggagacatagctcggaagttcataaaagatccggaggttctgtcctttatagatgctgagtgctttattgtgagtaccgttaatgcgttgaagacaccaatgatcaacgcaagcatggttctgtgtgacagacactatgggggaattaactatcctgttggtggggttggtgggatcgcaaaatcattagcaaaaggattagtcgaccagggaagcgaaatacaatacaaagcaaatgttaagagcattatagttgaaaatggaaaagccgtaggagttcggctggcgaatggaaatgagatatttgctaagaacataatttcaaatgctaccagatgggatacttttgggaagcttctaaaacaggatgaattacctaaagaagaagaaaattttcagaaactttacataaaggccccgtcatttctttctattcacttgggagttaaatctgatgttttgcctccagatacggattgccaccattttgtgctcgaggatgattggtcaaatttagaggttccatatggtagtatattcctgagcattccgactgtccttgattcatcattagctccagaagggaatcatattcttcacatatttacaacttcttccatagaggactggcaggggatgtctcaaaaagattatgagaagaagaaggagcttgtagctgacgagattataagccgactggaaaagaaactatttcctggtctccagtcttccattgttttaaaggaggtcgggacacctaagacacacaggcgctaccttgctcgtgatagtggtacctatggacctatgccacagggtaccccaaagggtttactaggaatgccatttaatacaactgcaattgacggtttgtactgtgtgggggatagttgctttccaggacaaggtgttatagccgttgcattctcaggagtgatgtgtgctcatcgagttgctgctgatttagggcttgagcagaaatctcccattttggatgctgctctccttcgtctactgggttggttcaggacactagcataa

SEQ ID NO: 2023 - protein, 615 aa, Daucus carota
MSTSIFETPLPRSDLFLCSNSLLSQNYKLFDNSRSFGLKSLRPRCQKDGLLYPKPLNFGFCRVSRRKRKPNFVLNSVLSVDKELESDETVGLGRSREYDAIVIGSGIGGLVAATQLAVKGAKVLVLEKYLIPGGSSGYYERDGFTFDVGSSVMFGFSDKGNLNLITQALAAVGCKMEVIPDPSTVHFHLPSNLSVLVHREYNEFFSELTSKFPHEKEGIFKFYGECWKIFNALNSLELKSLEEPIYLFGQFFKKPMECLTLAYYLPQNAGDIARKFIKDPEVLSFIDAECFIVSTVNALKTPMINASMVLCDRHYGGINYPVGGVGGIAKSLAKGLVDQGSEIQYKANVKSIIVENGKAVGVRLANGNEIFAKNIISNATRWDTFGKLLKQDELPKEEENFQKLYIKAPSFLSIHLGVKSDVLPPDTDCHHFVLEDDWSNLEVPYGSIFLSIPTVLDSSLAPEGNHILHIFTTSSIEDWQGMSQKDYEKKKELVADEIISRLEKKLFPGLQSSIVLKEVGTPKTHRRYLARDSGTYGPMPQGTPKGLLGMPFNTTAIDGLYCVGDSCFPGQGVIAVAFSGVMCAHRVAADLGLEQKSPILDAALLRLLGWFRTLA

SEQ ID NO: 2024 - DNA, 1848 bp, Solanum lycopersicum
  CDS (1)..(1848)
atgtgtaccttgagttttatgtatcctaattcacttcttgatggtacctgcaagactgtagctttgggtgatagcaaaccaagatacaataaacagagaagttcttgttttgaccctttgataattggaaattgtactgatcagcagcagctttgtggcttgagttggggggtggacaaggctaagggaagaagagggggtactgtttccaatttgaaagcagttgtagatgtagacaaaagagtggagagctatggcagtagtgatgtagaaggaaatgagagtggcagctatgatgccattgttataggttcaggaataggtggattggtggcagcgacgcagctggcggttaagggagctaaggttttagttctggagaagtatgttattcctggtggaagctctggcttttacgagagggatggttataagtttgatgttggttcatcagtgatgtttggattcagtgataagggaaacctcaatttaattactcaagcattggcagcagtaggacgtaaattagaagttatacctgacccaacaactgtacatttccacctgccaaatgacctttctgttcgtatacaccgagagtatgatgacttcattgaagagcttgtgagtaaatttccacatgaaaaggaagggattatcaaattttacagtgaatgctggaagatctttaattctctgaattcattggaactgaagtctttggaggaacccatctacctttttggccagttctttaagaagccccttgaatgcttgactcttgcctactatttgccccagaatgctggtagcatcgctcggaagtatataagagatcctgggttgctgtcttttatagatgcagagtgctttatcgtgagtacagttaatgcattacaaacaccaatgatcaatgcaagcatggttctatgtgacagacattttggcggaatcaactaccccgttggtggagttggcgagatcgccaaatccttagcaaaaggcttggatgatcacggaagtcagatactttatagggcaaatgttacaagtatcattttggacaatggcaaagctgtgggagtgaagctttctgacgggaggaagttttatgctaaaaccatagtatcgaatgctaccagatgggatacttttggaaagcttttaaaagctgagaatctgccaaaagaagaagaaaatttccagaaagcttatgtaaaagcaccttcttttctttctattcatatgggagttaaagcagatgtactcccaccagacacagattgtcaccattttgtcctcgaggatgattggacaaatttggagaaaccatatggaagtatattcttgagtattccaacagttcttgattcctcattggccccagaaggacaccatattcttcacatttttacaacatcgagcattgaagattgggagggactctctccgaaagactatgaagcgaagaaagaggttgttgctgaaaggattataagcagacttgaaaaaacactcttcccagggcttaagtcatctattctctttaaggaggtgggaactccaaagacccacagacgataccttgctcgtgatagtggtacctatggaccaatgccacgcggaacacctaagggactcctgggaatgcctttcaataccactgctatagatggtctatattgtgttggcgatagttgcttcccaggacaaggtgttatagctgtagccttttcaggagtaatgtgcgctcatcgtgttgcagctgacttagggtttgaaaaaaaatcagatgtgctggacagtgctcttcttagactacttggttggttaaggacactagcatga

SEQ ID NO: 2025 - protein, 615 aa, Solanum lycopersicum
MCTLSFMYPNSLLDGTCKTVALGDSKPRYNKQRSSCFDPLIIGNCTDQQQLCGLSWGVDKAKGRRGGTVSNLKAVVDVDKRVESYGSSDVEGNESGSYDAIVIGSGIGGLVAATQLAVKGAKVLVLEKYVIPGGSSGFYERDGYKFDVGSSVMFGFSDKGNLNLITQALAAVGRKLEVIPDPTTVHFHLPNDLSVRIHREYDDFIEELVSKFPHEKEGIIKFYSECWKIFNSLNSLELKSLEEPIYLFGQFFKKPLECLTLAYYLPQNAGSIARKYIRDPGLLSFIDAECFIVSTVNALQTPMINASMVLCDRHFGGINYPVGGVGEIAKSLAKGLDDHGSQILYRANVTSIILDNGKAVGVKLSDGRKFYAKTIVSNATRWDTFGKLLKAENLPKEEENFQKAYVKAPSFLSIHMGVKADVLPPDTDCHHFVLEDDWTNLEKPYGSIFLSIPTVLDSSLAPEGHHILHIFTTSSIEDWEGLSPKDYEAKKEVVAERIISRLEKTLFPGLKSSILFKEVGTPKTHRRYLARDSGTYGPMPRGTPKGLLGMPFNTTAIDGLYCVGDSCFPGQGVIAVAFSGVMCAHRVAADLGFEKKSDVLDSALLRLLGWLRTLA

SEQ ID NO: 2026 - DNA, 1794 bp, Oryza sativa
  CDS (1)..(1794)
atggcttccgccgccttggcctcccgcgcgctgccgcctccgccccgccactgcgctcgccgcccgcgcgctccaccgaccaccgccccacggccacgacgcggatgcgcggccgccgctcgtcccgcgcgctgcagggcggtggccgccgacgagcgccccgcggacccctccatccccgagggcgaggacggcgcgctctccggggaggcggagaggccggaggcggacgtcgtcgtcatcgggagcgggatcggcgggctgtgctgcgcggggctcctggcgaggtataaccaggacgtgctcgtgctcgagagccatgaccgccccggaggcgccgcgcactcgtttgacatcaagggcttcaacttcgactcgggcccttccctgttctccggcttccagtccagaggcccccaggccaatcccctcgcccaggtccttgatgcgctaggcgaatcagttccatgtgcctcatatgattcctggatggtttatgtacctgaaggccagttcctttcgcggataggtccaactgatttcctcaaggaccttgatgaatttgttggtgctgatgcagtccaggagtggaaaaagcttcttgatgcagttattcctatctctgcagctgcaatggctttgcctccactttccattcgaggtgatttaggtgttctctccacatctgctggtagatatgctccttctctgttgaaatcaatcctgcaaatgggacctcaaggggctcttggtgctacaaaacttctaagacctttctcagagatcgttgattcattgggcctgaaaaacccctttgttcgtaattggatcgatctcttgtgttttctacttgctggagtcaaatctgatggtgctctttctgcagaaatggtttatatgtttgcagaatggtataaaccaggatgctcgcttgagtatcctcttgagggaagcggagcaataatagatgctcttgtgcgaggaataaaaaaatttggtggcaggcttgctcttcgttcgcatgttgaaaagattttaattgagaatggtcgagcagttggtgtcaagctacaaagtggacaaattgtgcgcgcaaggaaagcagttgttagcaatgcatctatgtgggatactttggatttgctgccaccagatgctgtcccaagatcatatcaagacaaagtgaaagcaactccacaatgtgaatcatttatgcatctccacttgggttttgatgtcgagaatgccagagaggaccttggaatccatcatattgtggttaatgattggaacaaaggagttgatgctgaccagaacgttgtattgatatcagttcctactgttcttggaaatggcttagcaccgcctggaaagcacgtcctacatgcttatacaccaggaacagaacctttcagtttgtgggaaggactagataggaaaagcgccgagtatcgaaggctgaaagaagaacgctctgaggtgatgtggaaagccgtggagcttgcccttggtccaagatttagcagagaaaaatgcgatgtgaagctggttggatcaccattaacacacaagaggttcctccgaagaaatagaggaacctatggtccagccataaaagctggggaggccactttccctgggcaggcaacacctataccccagctattctgctgtggtgactcgacttttccaggcatcggtgtaccggccgtcgctgcaagtggtgcaattgtcgcaaacacgctagtctccgtgtcacaacattcagagcttcttgatgctgttggaatttga

SEQ ID NO: 2027 - protein, 597 aa, Oryza sativa
MASAALASRALPPPPRHCARRPRAPPTTAPRPRRGCAAAARPARCRAVAADERPADPSIPEGEDGALSGEAERPEADVVVIGSGIGGLCCAGLLARYNQDVLVLESHDRPGGAAHSFDIKGFNFDSGPSLFSGFQSRGPQANPLAQVLDALGESVPCASYDSWMVYVPEGQFLSRIGPTDFLKDLDEFVGADAVQEWKKLLDAVIPISAAAMALPPLSIRGDLGVLSTSAGRYAPSLLKSILQMGPQGALGATKLLRPFSEIVDSLGLKNPFVRNWIDLLCFLLAGVKSDGALSAEMVYMFAEWYKPGCSLEYPLEGSGAIIDALVRGIKKFGGRLALRSHVEKILIENGRAVGVKLQSGQIVRARKAVVSNASMWDTLDLLPPDAVPRSYQDKVKATPQCESFMHLHLGFDVENAREDLGIHHIVVNDWNKGVDADQNVVLISVPTVLGNGLAPPGKHVLHAYTPGTEPFSLWEGLDRKSAEYRRLKEERSEVMWKAVELALGPRFSREKCDVKLVGSPLTHKRFLRRNRGTYGPAIKAGEATFPGQATPIPQLFCCGDSTFPGIGVPAVAASGAIVANTLVSVSQHSELLDAVGI

SEQ ID NO: 2028 - DNA, 1761 bp, Oryza sativa
  CDS (1)..(1761)
atgccgctcctcctcctcgccgccgcgcgcccgtgcgccccgctcctcgctccctccgccgccggagcagtagtaggccggccgtccaccgcccgcccactgggacgagggaccaggagaggcgcgggcgcggcggcggcggctgcggtggcggcggagaagacggtggtgaaggcggaggaggaggaggagggtgggggagagtacgacgcgatcgtggtggggtcggggatcggggggatggtggcggcgacgcagctggcggcgaagggggcgagggtgctggtgctggagaagtacgtcatccccggggggagctccgggtactaccgccgcgacgggttcaccttcgacgtcggctcctccgtcatgttcggcttctccgacaaggggaacttgaatttgattacacaagcactagaagcagttgggcataagatggaagttataccggatccttctacggttcatttccacctacctggtgacctctcagttcttgtgcatagagagtatgatgacttcgtcacggagctggttaataaatttcctcatgaaaaggaaggaatcctgaaattctatggcacatgttggaagatcttcaattcattaaattctttggagctgaagtcccttgaggagcctctatatctttttgggcaattttttcaaaagcctctggaatgtttgacgctagcttattatctgccacagaatgctggggatattgctcgcaagttcataaaagatcagcagttactctccttcatagatgctgagtgctttattgtgagcacagtcaatgccttgcaaacacccatgattaatgcaagcatggtcttgtgcgataggcacttcgggggaattaactatccagttggtggtgttggtggtattgctatgtccttggcagatgggcttgttgacaaaggcagtgaaatacgctacaaggctaatgtgaccaatgtaattttagaaaatggcaaagctgttggagtcaggttatcaaatgggaaggagttctttgctaaaacagtgatatcgaatgctaccagatgggatacatttggtaaactcttgaaagttgaagagcttccagaagaggagaaaaacttccaaaagaattatgttaaagcaccatcattcctttccattcatatgggtgtcaaagcctcagttttgcctgctgatactgattgccaccattttgtacttgaggatgactgggctaatttggagaagccttatggaagcatatttttaagtatccctacagtgcttgacccatccttggctcccgaaggacaccatatacttcatatttttacaactgcagggatagaggattgggaaggtctgtccaggaaggattatgagaagaaaaaggagcttgtggcgacagagataataaagaggcttgaaaaaaagctgttccctggtcttcaggattcaatagtcctcaaggaggtaggctcaccaaaaacacaccgaagatttcttgcgcgaaatgatggtacatatggacccatgccacggggtaaaccaaagggattgctagcaatgcctttcaatactacttcaatagatggcttgtactgtgttggcgacagctgttttcctgggcaaggtgtaattgctgtggcattttcagggatcatgtgtgctcatcgagttgcagctgatattggactggaacaaagatctcctgtactagatgcgggtcttcttgggctcctcagatggttgagaacgcttgcttag

SEQ ID NO: 2029 - protein, 586 aa, Oryza sativa
MPLLLLAAARPCAPLLAPSAAGAVVGRPSTARPLGRGTRRGAGAAAAAAVAAEKTVVKAEEEEEGGGEYDAIVVGSGIGGMVAATQLAAKGARVLVLEKYVIPGGSSGYYRRDGFTFDVGSSVMFGFSDKGNLNLITQALEAVGHKMEVIPDPSTVHFHLPGDLSVLVHREYDDFVTELVNKFPHEKEGILKFYGTCWKIFNSLNSLELKSLEEPLYLFGQFFQKPLECLTLAYYLPQNAGDIARKFIKDQQLLSFIDAECFIVSTVNALQTPMINASMVLCDRHFGGINYPVGGVGGIAMSLADGLVDKGSEIRYKANVTNVILENGKAVGVRLSNGKEFFAKTVISNATRWDTFGKLLKVEELPEEEKNFQKNYVKAPSFLSIHMGVKASVLPADTDCHHFVLEDDWANLEKPYGSIFLSIPTVLDPSLAPEGHHILHIFTTAGIEDWEGLSRKDYEKKKELVATEIIKRLEKKLFPGLQDSIVLKEVGSPKTHRRFLARNDGTYGPMPRGKPKGLLAMPFNTTSIDGLYCVGDSCFPGQGVIAVAFSGIMCAHRVAADIGLEQRSPVLDAGLLGLLRWLRTLA

SEQ ID NO: 2030 - DNA, 1827 bp, Glycine max
  CDS (1)..(1827)
atgctcaattcctctttcctctccctttctgaacacaccttttcccacacaccccatcatttcccaacaaggtctgcttctcaaaaccccaaccttcatccaaagtttcaatctttagcctttggaaaccgtggagggagtgaatttccatctgggtcttgctccaatacccccagaagaaaaggggtgttggttgtgcggtcaaagtcaacgctgggagtagaagaagtggtggtaaagggaggaggagtgaagggtaagggtgaagagtttgatgcaattgtgatagggtctgggattggagggttggttgcagggacacagctggcagtgaagggtgccagagttttggttttggagaagtatgtgattcctggtggaagctctgggttttaccagagagatggctatacttttgatgtggggtcttctgtcatgtttggtttcagtgataagggtaatctcaatttgataacacaagcgttggaagcagttggttgtcggatgcaagtggtgcctgatccaacaaccgtttacttccatctaccaaataacctttctgttcgagtgcacaaagaatatgataaatttattgaagaattgaccagttactttccccatgaaaaggagggtattctcaaattctacggtgaatgctggaagatttttgatgccctgaattcgttggaattgaagtcactagaagagccactctacctttttggacagttttttcagaagccacttgaatgcttgacactagcctattatttgcctcaaaatgctggagccatagctcggaagtacattcaagatccacagttgttgtctttcatagatgcagagtgttttatagtgagcacagtcaatgctttgcagacaccaatgatcaatgctgccatggttctatgtgacagacactttggtgggattaactaccctcttgggggtgttggtgggatagcaaagtccttaccaaaaggtctcgttgatcagggtagcgagatagtttacaaagcaaatgtcaccagtattataattgagcagggcaaagctgtaggtgtgaggctttcaaatggcagagagttctttgccaaaactataatatcaaatgctaccagatgggatacatttggaaagttactgaagggcgttccacttccgaaagaagaagagaacttccagaaagtttatgttaaagctccatcttttctttcaattcacatgggggttaaagctgaggttttgccgccagatacagactgtcaccattttgtgcttgagagcaactggtccaaattggaggagccatatggaagtatctttctaagtataccaactgttcttgattcatcattggctcctgaaggccgtcatatccttcatatattcacaacttcttccatggaggactgggagggtctctcaagagtagaatatgaggcaaagaagcagcttgtagcagatgaaatcacaagcagattagagaataaattgtttcctggtcttagatcatccattgattttatggaggtagggacacctaagacacaccggcgatacctggctcgtgatgagggaacttatggtccaatgccacgcagaatcccaaaggggttattgggaatgccattcaataccacaggcatagatggtctttactgtgttggcgatagctgcttccctggacaaggtgttattgctgtagctttctcaggagttatgtgtgctcatcgagtagctgcagatattgggctggagaagaagtcacctgtgttggattccatgctgcttcggttgcttggttggttaaggacaatggcatga

SEQ ID NO: 2031 - protein, 608 aa, Glycine max
MLNSSFLSLSEHTFSHTPHHFPTRSASQNPNLHPKFQSLAFGNRGGSEFPSGSCSNTPRRKGVLVVRSKSTLGVEEVVVKGGGVKGKGEEFDAIVIGSGIGGLVAGTQLAVKGARVLVLEKYVIPGGSSGFYQRDGYTFDVGSSVMFGFSDKGNLNLITQALEAVGCRMQVVPDPTTVYFHLPNNLSVRVHKEYDKFIEELTSYFPHEKEGILKFYGECWKIFDALNSLELKSLEEPLYLFGQFFQKPLECLTLAYYLPQNAGAIARKYIQDPQLLSFIDAECFIVSTVNALQTPMINAAMVLCDRHFGGINYPLGGVGGIAKSLPKGLVDQGSEIVYKANVTSIIIEQGKAVGVRLSNGREFFAKTIISNATRWDTFGKLLKGVPLPKEEENFQKVYVKAPSFLSIHMGVKAEVLPPDTDCHHFVLESNWSKLEEPYGSIFLSIPTVLDSSLAPEGRHILHIFTTSSMEDWEGLSRVEYEAKKQLVADEITSRLENKLFPGLRSSIDFMEVGTPKTHRRYLARDEGTYGPMPRRIPKGLLGMPFNTTGIDGLYCVGDSCFPGQGVIAVAFSGVMCAHRVAADIGLEKKSPVLDSMLLRLLGWLRTMA

SEQ ID NO: 2032 - DNA, 1764 bp, Zea mays
  CDS (1)..(1764)
atgccgccgctcgccgcgcgcctccacgccccgcttctcctcgtccccgccgcctcccctcgccccgccacgcgtctctgcgcagcgagcgggccccgcggcgtcggcggtttcaggagaggcgcgttggcctcggagaagccgccggttgtggccgtcgcggagaaagcgggcggcgagggtggaggaggacagggcgagggtccgtatgacgcgattgtgatcgggtctgggatcgggggcctggtggcggcgacgcagctcgcggccaagggtgcgcgggtgctggtcctcgagaagtacctcatccccgggggaagctctgggtactaccgccgcgacgggttcacgttcgacgtcggctcctctgtcatgttcggcttctccgacaagggtaacttgaatttgatcacacaagcattggaagcagttgggcgtaagatggaagttctacctgacccttctacagttcatttccatctacctggtgatctctctgtccttgtgcatcgaaagtatgaagacttcatcaatgaactgatcagcaaattccctcacgagaaagaagggataattaagttctatggcacatgctggaagatcttcaattcactaaattcgttggagctgaagtctctagaggagcccctttatctttttggtcaatttttccagaagcctttggaatgcttaactctagcttattatttgccacagaatgctggggatattgctcgcaagttcataaaagatcaggagctactctccttcatagatgctgagtgttttattgtgagcacagtcaatgccttgcaaacacccatgataaatgcaagcatggtcttgtgcgataggcactttgggggaattaattatccagttggtggcgttggtggtatcgcattatccctggcagatggccttgttgaaaagggcagcgaaatccgttacaaggcgaatgtaaccaatgttgttcttgaaaatggaaaggctgttggggtgaggttgtcaaatgggaaggagttctttgctaaaacggtgatatcaaatgccactagatgggacacatttggaaaactcttgaaagaaaaagaacttccagaagaggagaaaaactttcaaaagaattatgtcaaggcaccatcattcctttcaattcatatgggtgtcaaagcatcagttcttcctgctggtactgactgccaccattttgtacttgaggataattggaataatttggaaaaaccctatggaagcatatttttaagtattcctacagttcttgatccatcattagctcccgaaggacaccatatacttcatatatttactactgcaggcatagaagcctgggagggtatttctaggaaggaatatgaagagaaaaaagagatggtggccaacgagattataagaaagcttgaaaagaagttgtttcctggtcttcaagattcaatagtcctcaaagaggtaggctcaccaaagactcaccggagatttcttgctcgaaatgatggtacatatggaccaatgccgcggggtaaacccaagggcttacttgctatgcctttcaatactacttcaatagatggcctttactgtgttggtgacagctgttttcccggacaaggtgtaatagctgtagcattctcagggatcatgtgcgctcaccgagtcgctgcagatattggactagagcaaaaatctccggctctagatgctggtcttcttgggctactcagatggttgagaacacttgcatag

SEQ ID NO: 2033 - protein, 587 aa, Zea mays
MPPLAARLHAPLLLVPAASPRPATRLCAASGPRGVGGFRRGALASEKPPVVAVAEKAGGEGGGGQGEGPYDAIVIGSGIGGLVAATQLAAKGARVLVLEKYLIPGGSSGYYRRDGFTFDVGSSVMFGFSDKGNLNLITQALEAVGRKMEVLPDPSTVHFHLPGDLSVLVHRKYEDFINELISKFPHEKEGIIKFYGTCWKIFNSLNSLELKSLEEPLYLFGQFFQKPLECLTLAYYLPQNAGDIARKFIKDQELLSFIDAECFIVSTVNALQTPMINASMVLCDRHFGGINYPVGGVGGIALSLADGLVEKGSEIRYKANVTNVVLENGKAVGVRLSNGKEFFAKTVISNATRWDTFGKLLKEKELPEEEKNFQKNYVKAPSFLSIHMGVKASVLPAGTDCHHFVLEDNWNNLEKPYGSIFLSIPTVLDPSLAPEGHHILHIFTTAGIEAWEGISRKEYEEKKEMVANEIIRKLEKKLFPGLQDSIVLKEVGSPKTHRRFLARNDGTYGPMPRGKPKGLLAMPFNTTSIDGLYCVGDSCFPGQGVIAVAFSGIMCAHRVAADIGLEQKSPALDAGLLGLLRWLRTLA

SEQ ID NO: 2034 - DNA, 23 bp, Artificial sequence
  primer
atggtccctagcaatgctgaatc

SEQ ID NO: 2035 - DNA, 20 bp, Artificial sequence
  primer
ttaggagtttgttgctccac

SEQ ID NO: 2036 - protein, 532 aa, Artificial sequence
  consensus sequence
  Variant (2)..(2): Xaa in position 2 is any amino acid
  Variant (4)..(4): Xaa in position 4 is any amino acid
  Variant (7)..(7): Xaa in position 7 is any amino acid
  Variant (10)..(12): Xaa in position 10 to 12 is any amino acid
  Variant (14)..(14): Xaa in position 14 is any amino acid
  Variant (17)..(18): Xaa in position 17 to 18 is any amino acid
  Variant (20)..(21): Xaa in position 20 to 21 is any amino acid
  Variant (23)..(25): Xaa in position 23 to 25 is any amino acid
  Variant (27)..(31): Xaa in position 27 to 31 is any amino acid
  Variant (34)..(39): Xaa in position 34 to 39 is any amino acid
  Variant (41)..(44): Xaa in position 41 to 44 is any amino acid
  Variant (49)..(53): Xaa in position 49 to 53 is any amino acid
  Variant (55)..(58): Xaa in position 55 to 58 is any amino acid
  Variant (60)..(78): Xaa in position 60 to 78 is any amino acid
  Variant (79)..(80): Xaa in position 79 to 80 is any or no amino acid
  Variant (83)..(85): Xaa in position 83 to 85 is any amino acid
  Variant (87)..(104): Xaa in position 87 to 104 is any amino acid
  Variant (105)..(106): Xaa in position 105 to 106 is any or no amino acid
  Variant (108)..(111): Xaa in position 108 to 111 is any amino acid
  Variant (114)..(126): Xaa in position 114 to 126 is any amino acid
  Variant (127)..(143): Xaa in position 127 to 143 is any or no amino acid
  Variant (145)..(163): Xaa in position 145 to 163 is any amino acid
  Variant (165)..(194): Xaa in position 165 to 194 is any amino acid
  Variant (195)..(199): Xaa in position 195 to 199 is any or no amino acid
  Variant (201)..(202): Xaa in position 201 to 202 is any amino acid
  Variant (204)..(209): Xaa in position 204 to 209 is any amino acid
  Variant (210)..(210): Xaa in position 210 is any or no amino acid
  Variant (213)..(218): Xaa in position 213 to 218 is any amino acid
  Variant (220)..(222): Xaa in position 220 to 222 is any amino acid
  Variant (224)..(227): Xaa in position 224 to 227 is any amino acid
  Variant (229)..(234): Xaa in position 229 to 234 is any amino acid
  Variant (235)..(236): Xaa in position 235 to 236 is any or no amino acid
  Variant (238)..(242): Xaa in position 238 to 242 is any amino acid
  Variant (244)..(251): Xaa in position 244 to 251 is any amino acid
  Variant (252)..(252): Xaa in position 252 is any or no amino acid
  Variant (254)..(259): Xaa in position 254 to 259 is any amino acid
  Variant (260)..(260): Xaa in position 260 is any or no amino acid
  Variant (262)..(269): Xaa in position 262 to 269 is any amino acid
  Variant (271)..(307): Xaa in position 271 to 307 is any amino acid
  Variant (308)..(310): Xaa in position 308 to 310 is any or no amino acid
  Variant (312)..(352): Xaa in position 312 to 352 is any amino acid
  Variant (353)..(362): Xaa in position 353 to 362 is any or no amino acid
  Variant (364)..(372): Xaa in position 364 to 372 is any amino acid
  Variant (373)..(379): Xaa in position 373 to 379 is any or no amino acid
  Variant (381)..(381): Xaa in position 381 is any amino acid
  Variant (383)..(383): Xaa in position 383 is any amino acid
  Variant (385)..(389): Xaa in position 385 to 389 is any amino acid
  Variant (391)..(392): Xaa in position 391 to 392 is any amino acid
  Variant (393)..(393): Xaa in position 393 is any or no amino acid
  Variant (396)..(396): Xaa in position 396 is any amino acid
  Variant (398)..(411): Xaa in position 398 to 411 is any amino acid
  Variant (412)..(420): Xaa in position 412 to 420 is any or no amino acid
  Variant (422)..(425): Xaa in position 422 to 425 is any amino acid
  Variant (426)..(435): Xaa in position 426 to 435 is any or no amino acid
  Variant (437)..(439): Xaa in position 437 to 439 is any amino acid
  Variant (441)..(465): Xaa in position 441 to 465 is any amino acid
  Variant (466)..(467): Xaa in position 466 to 467 is any or no amino acid
  Variant (469)..(470): Xaa in position 469 to 470 is any amino acid
  Variant (473)..(480): Xaa in position 473 to 480 is any amino acid
  Variant (482)..(483): Xaa in position 482 to 483 is any amino acid
  Variant (485)..(486): Xaa in position 485 to 486 is any amino acid
  Variant (489)..(495): Xaa in position 489 to 495 is any amino acid
  Variant (496)..(498): Xaa in position 496 to 498 is any or no amino acid
  Variant (500)..(504): Xaa in position 500 to 504 is any amino acid
  Variant (506)..(509): Xaa in position 506 to 509 is any amino acid
  Variant (510)..(512): Xaa in position 510 to 512 is any or no amino acid
  Variant (514)..(516): Xaa in position 514 to 516 is any amino acid
  Variant (520)..(521): Xaa in position 520 to 521 is any amino acid
  Variant (524)..(524): Xaa in position 524 is any amino acid
  Variant (526)..(528): Xaa in position 526 to 528 is any amino acid
  Variant (530)..(531): Xaa in position 530 to 531 is any amino acid
VXGXGIXGLXXXAXLAXXGXXVXXXEXXXXXGGXXXXXXRXXXXFDVGXXXXXGXXXXGXXXXXXXXXXXXXXXXXXXXXDPXXXVXXXXXXXXXXXXXXXXXXXXEXXXXFPXXXXXXXXXXXXXXXXXXXXXXXXXXXXXXWXXXXXXXXXXXXXXXXXXXLXXXXXXXXXXXXXXXXXXXXXXXXXXXXXXXXXXXLXXFXXXXXXXYSXXXXXXTXXXYXXXXLXXXXXXXXGXXXXXGXXXXXXXXXLXXXXXXXGXXXXXXXXVXXXXXXXXXXXXXXXXXXXXXXXXXXXXXXXXXXXXXXXXLXXXXXXXXXXXXXXXXXXXXXXXXXXXXXXXXXXXXXXXXXXXXXXXXXXXHXXXXXXXXXXXXXXXXSXFXSXXXXXDXXXAPXGXXXXXXXXXXXXXXXXXXXXXXXWXXXXXXXXXXXXXXYXXXKXXXXXXXXXXXXXXXXXXXXXXXXXXXEXXTPXXXXXXXXRXXGXXGGXXXXXXXXXXFXXXXXTXXXXXXXLXXXGDSXXPGXGXXXVXXS

SEQ ID NO: 2037 - protein, 54 aa, Artificial sequence
  protein pattern
  Variant (2)..(3): Xaa in position 2 to 3 is any amino acid
  Variant (5)..(5): Xaa in position 5 is Ala or Gly
  Variant (8)..(8): Xaa in position 8 is Thr or Val
  Variant (9)..(10): Xaa in position 9 to 10 is Ala, Gly, Ser or Thr
  Variant (11)..(11): Xaa in position 11 is Ala or Thr
  Variant (12)..(12): Xaa in position 12 is any amino acid
  Variant (14)..(14): Xaa in position 14 is Ala or Ser
  Variant (15)..(16): Xaa in position 15 to 16 is any amino acid
  Variant (18)..(19): Xaa in position 18 to 19 is any amino acid
  Variant (21)..(21): Xaa in position 21 is any amino acid
  Variant (22)..(22): Xaa in position 22 is Ile, Leu or Val
  Variant (23)..(23): Xaa in position 23 is any amino acid
  Variant (24)..(24): Xaa in position 24 is Asp or Glu
  Variant (25)..(29): Xaa in position 25 to 29 is any amino acid
  Variant (32)..(32): Xaa in position 32 is Cys or Ser
  Variant (33)..(33): Xaa in position 33 is Ala or Ser
  Variant (34)..(34): Xaa in position 34 is Gly or Ser
  Variant (35)..(35): Xaa in position 35 is any amino acid
  Variant (36)..(36): Xaa in position 36 is Phe or Tyr
  Variant (37)..(37): Xaa in position 37 is any amino acid
  Variant (39)..(40): Xaa in position 39 to 40 is any amino acid
  Variant (41)..(41): Xaa in position 41 is Phe, Trp or Tyr
  Variant (42)..(42): Xaa in position 42 is any amino acid
  Variant (47)..(47): Xaa in position 47 is Ala or Ser
  Variant (48)..(48): Xaa in position 48 is Ser or Thr
  Variant (49)..(49): Xaa in position 49 is any amino acid
  Variant (50)..(50): Xaa in position 50 is Ile, Met or Val
  Variant (51)..(51): Xaa in position 51 is any amino acid
  Variant (53)..(53): Xaa in position 53 is Phe or Leu
  Variant (54)..(54): Xaa in position 54 is Glu or Ser
GXXIXGLXXXXXLXXXGXXVXXXXXXXXXGGXXXXXXRXXXXFDVGXXXXXGXX

SEQ ID NO: 2038 - protein, 22 aa, Artificial sequence
  protein pattern
  Variant (2)..(6): Xaa in position 2 to 6 is any or no amino acid
  Variant (9)..(9): Xaa in position 9 is any amino acid
  Variant (10)..(10): Xaa in position 10 is Phe, His or Tyr
  Variant (13)..(13): Xaa in position 13 is Glu or Gln
  Variant (15)..(15): Xaa in position 15 is Thr or Val
  Variant (16)..(16): Xaa in position 16 is Ala or Ile
  Variant (17)..(17): Xaa in position 17 is Ala or Gly
  Variant (19)..(19): Xaa in position 19 is Ala, Ser or Thr
  Variant (20)..(20): Xaa in position 20 is any amino acid
  Variant (22)..(22): Xaa in position 22 is Ala, Gly or Ser
GXXXXXDSXXPGXGXXXVXXSX

SEQ ID NO: 2039 - protein, 21 aa, Artificial sequence
  protein pattern
  Variant (2)..(2): Xaa in position 2 is any amino acid
  Variant (3)..(3): Xaa in position 3 is Ala, Gly or Ser
  Variant (6)..(6): Xaa in position 6 is any amino acid
  Variant (7)..(7): Xaa in position 7 is Ala, Gly, Ser or Thr
  Variant (8)..(8): Xaa in position 8 is Phe or His
  Variant (9)..(10): Xaa in position 9 to 10 is any amino acid
  Variant (11)..(11): Xaa in position 11 is Phe, Trp or Tyr
  Variant (12)..(13): Xaa in position 12 to 13 is any amino acid
  Variant (15)..(16): Xaa in position 15 to 16 is any amino acid
  Variant (18)..(19): Xaa in position 18 to 19 is any amino acid
  Variant (21)..(21): Xaa in position 21 is Gly or Pro
EXXTPXXXXXXXXRXXGXXGX

SEQ ID NO: 2040 - protein, 21 aa, Artificial sequence
  protein pattern
  Variant (2)..(2): Xaa in position 2 is Ala or Val
  Variant (4)..(5): Xaa in position 4 to 5 is any amino acid
  Variant (6)..(6): Xaa in position 6 is Ala, Cys, Gly, Ser, Thr or Val
  Variant (7)..(8): Xaa in position 7 to 8 is any amino acid
  Variant (10)..(10): Xaa in position 10 is any amino acid
  Variant (12)..(14): Xaa in position 12 to 14 is any or no amino acid
  Variant (16)..(16): Xaa in position 16 is any or no amino acid
  Variant (18)..(18): Xaa in position 18 is Ala, Gly, Ile or Leu
  Variant (19)..(20): Xaa in position 19 to 20 is any amino acid
  Variant (21)..(21): Xaa in position 21 is Pro, Gln, Ser or Thr
TXLXXXXXPXGXXXLXHXXXX

SEQ ID NO: 2041 - protein, 14 aa, Artificial sequence
  protein pattern
  Variant (2)..(3): Xaa in position 2 to 3 is any amino acid
  Variant (5)..(5): Xaa in position 5 is Ile or Leu
  Variant (6)..(6): Xaa in position 6 is Asp or Asn
  Variant (7)..(7): Xaa in position 7 is any amino acid
  Variant (8)..(8): Xaa in position 8 is Glu or Gln
  Variant (9)..(10): Xaa in position 9 to 10 is any amino acid
  Variant (11)..(11): Xaa in position 11 is Ile or Leu
  Variant (12)..(12): Xaa in position 12 is any amino acid
  Variant (14)..(14): Xaa in position 14 is Gln or Thr
LXXFXXXXXXXXSX

SEQ ID NO: 2042 - DNA, 111 bp, Saccharomyces cerevisiae
  CDS (1)..(111)
atgcaaccatctaccgctaccgccgctccaaaagaaaagaccagcagtgaaaagaaggacaactatattatcaaaggtgtcttctgggacccagcatgtgttattgcttag

SEQ ID NO: 2043 - protein, 36 aa, Saccharomyces cerevisiae
MQPSTATAAPKEKTSSEKKDNYIIKGVFWDPACVIA

SEQ ID NO: 2044 - DNA, 117 bp, Saccharomyces pastorianus
  CDS (1)..(117)
atgcaaccagtcaccaccatctctgcccaagcttctcaaaaggacaagtcttccgagaagaaagacaactatatcatcaagggtctgttctgggatcctgcctgtgttatcgcttaa

SEQ ID NO: 2045 - protein, 38 aa, Saccharomyces pastorianus
MQPVTTISAQASQKDKSSEKKDNYIIKGLFWDPACVIA

SEQ ID NO: 2046 - DNA, 114 bp, Saccharomyces pastorianus
  CDS (1)..(114)
atgcaaccaatcgccaccgtctccgccgcttcaaaagacaagaccagcaacgaaaagaaggacaactacatcgtcaagggtgtgttctgggccccagcctgtgtcatcgtctag

SEQ ID NO: 2047 - protein, 37 aa, Saccharomyces pastorianus
MQPIATVSAASKDKTSNEKKDNYIVKGVFWAPACVIV

SEQ ID NO: 2048 - DNA, 111 bp, Saccharomyces paradoxus
  CDS (1)..(111)
atgcaaccatctaccgttaccgccgctccaaaagataagaccagcgctgaaaagaaggacaactacattatcaaaggcgtgttctgggacccagcatgtgtcattgcttag

SEQ ID NO: 2049 - protein, 36 aa, Saccharomyces paradoxus
MQPSTVTAAPKDKTSAEKKDNYIIKGVFWDPACVIA

SEQ ID NO: 2050 - DNA, 117 bp, Saccharomyces cerevisiae
  CDS (1)..(117)
atgcaaccgatcaccactgcttccacacaagccactcagaaggataaatcctctgaaaagaaagacaactatataatcaagggcctcttctgggatcccgcctgtgttatcgcttaa

SEQ ID NO: 2051 - protein, 38 aa, Saccharomyces cerevisiae
MQPITTASTQATQKDKSSEKKDNYIIKGLFWDPACVIA

SEQ ID NO: 2052 - DNA, 22 bp, Artificial sequence
  primer
atgcaaccatctaccgctaccg

SEQ ID NO: 2053 - DNA, 24 bp, Artificial sequence
  primer
ctaagcaataacacatgctgggtc

SEQ ID NO: 2054 - protein, 38 aa, Artificial sequence
  consensus sequence
  Variant (4)..(4): Xaa in position 4 is any amino acid
  Variant (5)..(5): Xaa in position 5 is any or no amino acid
  Variant (7)..(8): Xaa in position 7 to 8 is any amino acid
  Variant (10)..(13): Xaa in position 10 to 13 is any amino acid
  Variant (15)..(15): Xaa in position 15 is any amino acid
  Variant (16)..(16): Xaa in position 16 is any or no amino acid
  Variant (18)..(18): Xaa in position 18 is any amino acid
  Variant (29)..(29): Xaa in position 29 is any amino acid
MQPXXTXXAXXXXKXXSXEKKDNYIIKGXFWDPACVIA

SEQ ID NO: 2055 - protein, 29 aa, Artificial sequence
  protein pattern
  Variant (2)..(2): Xaa in position 2 is Ala, Ser or Thr
  Variant (3)..(3): Xaa in position 3 is Pro or Gln
  Variant (5)..(5): Xaa in position 5 is Asp or Glu
  Variant (7)..(7): Xaa in position 7 is any or no amino acid
  Variant (9)..(9): Xaa in position 9 is Ala or Ser
  Variant (20)..(20): Xaa in position 20 is Leu or Val
AXXKXKXSXEKKDNYIIKGXFWDPACVIA

SEQ ID NO: 2056 - DNA, 678 bp, Saccharomyces cerevisiae
  CDS (1)..(678)
atgaaagcagacgcgaaacaaataacacatctactcaaacctcttcgacttttattattgggggctccagggtcaggtaaagggacacagacttcgagattactaaagcaaattccacaattatcttcaatttcgtcaggcgacattttacgtcaggaaataaaatctgaatctaccctaggccgagaggctactacctacattgctcaaggcaagttattaccggatgatctcataacgcgtctgataacttttcgtctttcggcattgggttggttaaaaccatctgccatgtggttgctcgatggatttcctcgaactactgcgcaagcttctgccttagacgagctgctgaaacagcatgacgccagcttgaatctagtggtagagctagatgtacccgaatccaccatattagaaaggatcgagaacagatatgttcacgttcctagtgggagagtgtataacttacaatataatcctcccaaagtgccaggattagacgatatcaccggagaaccattgaccaagaggcttgatgacacagcggaagtgtttaaaaaaaggctagaagagtacaagaaaacaaatgagcctttaaaagattattacaaaaaaagtgggatttttggtaccgtctctggggaaacatcagatattatcttccgaaattattga

SEQ ID NO: 2057 - protein, 225 aa, Saccharomyces cerevisiae
MKADAKQITHLLKPLRLLLLGAPGSGKGTQTSRLLKQIPQLSSISSGDILRQEIKSESTLGREATTYIAQGKLLPDDLITRLITFRLSALGWLKPSAMWLLDGFPRTTAQASALDELLKQHDASLNLVVELDVPESTILERIENRYVHVPSGRVYNLQYNPPKVPGLDDITGEPLTKRLDDTAEVFKKRLEEYKKTNEPLKDYYKKSGIFGTVSGETSDIIFRNY

SEQ ID NO: 2058 - DNA, 1095 bp, Triticum aestivum
  CDS (164)..(889)
cccacgcgtccgcggacgcgtgggcaaacctgcagcccctccccctaatctcattgcctgtttccacccacccaccggcttcaccttccgaatctcggacgcctccgcgccggtcgcagggcacgcgactcgagttgtttccgttccgtcggcgggggaagagatggcggcgaacctagaggacgtgccgtcggtggatctcatcaccgaggtgctccgccgcgccaagtgcagctccaagcccgacaagcgcatcatcctcatcggtccacctggctctggaaagggtacgcagtcgccccttattaaggatgaatattgcttgtgccatttagccactggtgatatgctgagggctgctgttgctgctaagactcctctggggatcaaggctaaagaagctatgaacaagggagagcttgtttcagatgacttggttgttgggattatcgatgaagccatgaagaaaccctcttgccagaaaggttttatccttgatggcttccctagaactgttgttcaagcacaaaagctcgatgacatgctggcaaagcaaggtgctaaagttgacaaggttttaaacttcgcaattgatgatgcaatattggaagaacgaattactggccgctggatacacccatcgagtggcagatcttaccatacaaagtttgctcctccgaagactcctggagttgatgatgttaccggagagcccttgattcaaaggaaagatgacacagctgcggttttaaagtcaaggcttgaggctttccatatgcaaaccgaacctgtgattgactactactccaacccacgcgtccgggcaaatcttcatgcggagaaaccaccaaaggaagtgaccgttgaggtgcagaaagccctttcatgaagcagcccattttcacattgaaaacggcatgtaccaaagcccttgcctgggttcctagaactaggaagtaataaactgataccggcaccgtatgattcacattttccgcctgcaatgtgcgtgattgcaccattttgttacagcttttgcaagctcatgattggtccgagcaatttaaccgtgcaaatgaacattcttttatacat

SEQ ID NO: 2059 - protein, 241 aa, Triticum aestivum
MAANLEDVPSVDLITEVLRRAKCSSKPDKRIILIGPPGSGKGTQSPLIKDEYCLCHLATGDMLRAAVAAKTPLGIKAKEAMNKGELVSDDLVVGIIDEAMKKPSCQKGFILDGFPRTVVQAQKLDDMLAKQGAKVDKVLNFAIDDAILEERITGRWIHPSSGRSYHTKFAPPKTPGVDDVTGEPLIQRKDDTAAVLKSRLEAFHMQTEPVIDYYSNPRVRANLHAEKPPKEVTVEVQKALS

SEQ ID NO: 2060 - DNA, 1239 bp, Triticum aestivum
  CDS (228)..(953)
gtggtccccacggccggaaggccagcgcgaggacttgtgcgccgcacgccaaacagcaggcacgcgagtcgagtcgttcccgttggtgcggccggcggaggaagagatggcgacgggcctcgaggaagtgcgtgcggggcagctcgagataggacttgtgcgccgcacgccaaacagcaggcacgcgagtcgagtcgttcccgttgttgcggccggcggaggaagagatggcgacgaacatcgaggacgtgccttcggtggagctcatgaccgagctgctccgccgcgccaagtgcagctccaagcccgacaagcgcatcatcctcgtcggtccacctggctctggaaagggaacacagtctccccttattaaggatgaatattgtttgtgccatttagccactggcgatatgctgagggctgctgtcgccgctaagactcctctgggtatcaaggctaaagaagctatggacaagggagagcttgtttcagatgacttggttgttgggattattgatgaagccatgaaaaaaccttcatgtcaaaaaggttttatccttgatggcttccctagaactgttgttcaagcacaaaagctcgatgaaatgctggcaaagcaaggtgctaaggttgacaaggttctaaattttgcaattgatgatgcaatattggaagaacgaattactggccgttggatacacccatcgagtggtagatcttaccatacaaaatttgctcctcctaagactccaggagttgatgatgtttcgggagaacccttaattcaaagaaaagatgacacagctgaggtcttgaagtcaaggcttgaagctttccacatacaaactgaacctgtgattgactactactccaagaatggcttagtggcaaatcttcatgcggagaaaccaccaaaggaagtgaccgccgaggtgcagaaagctctttcgtgaagggcctgtttcaccttgaaagtgacatgtaacaaaaccccggctgggtttcttacaagttttaaactcataccggcatcctatgtttctcattttctgtctgcatgtgcactattgcacaatttcattacagcttttgctagctcggaatttttctgaataattttgtttggaatgagaagtttttattagcggtacagagataattacagcaactcatccttagaaatatttcttataattaaggcaactcgtccttagaaatatttaaggccgcggccgctct

SEQ ID NO: 2061 - protein, 241 aa, Triticum aestivum
MATNIEDVPSVELMTELLRRAKCSSKPDKRIILVGPPGSGKGTQSPLIKDEYCLCHLATGDMLRAAVAAKTPLGIKAKEAMDKGELVSDDLVVGIIDEAMKKPSCQKGFILDGFPRTVVQAQKLDEMLAKQGAKVDKVLNFAIDDAILEERITGRWIHPSSGRSYHTKFAPPKTPGVDDVSGEPLIQRKDDTAEVLKSRLEAFHIQTEPVIDYYSKNGLVANLHAEKPPKEVTAEVQKALS

SEQ ID NO: 2062 - DNA, 1058 bp, Gossypium hirsutum
  CDS (26)..(760)
caaaaaagtaaaaaagagatcggaaatggcgaccaattcaatgaacttggaagatataccgtctgaatcggtgatgagtgagcttcttcgccgtatgaaatgcgcctccaagccagataagcgtctcatcctcattggtccaccgggatcgggaaaaggtactcaatctccaataattaaggatgagtactgcctgtgtcacttggccactggtgatatgctgagagctgctgttgctgctaaaacccctctcggtatcaaggccaaggaggctatggataagggtgaacttgtttccgatgacttagttgttggcattattgatgaagcaatgaagaaaccttcatgtaaaaaaggtttcattctcgatggatttccgaggactgtaggccaagcacagaagcttgatgacatgcttggaaagcaaggagtcaaaattgataaggtgcttgattttgcgattgatgatgcagtcttggaggagcggattactggtcgttggatccaccctgctagcggtaggacctatcatacgaaatttgcacctcctaaagttcccggccttgatgatgtgaccggggaacctttggtgcagcgaaaagatgatactgcagcagttctcaagtcaaggcttgatgcatttcacaagcaaacccaaccggtgattgattattattccgagaagggaatagtcgcaaagcttcatgcggaaaagcctcagaaagaggttacggacgaagttaagaaagtactttcatgacgaaaccctcattacggacgagattcgtataaggtgatttacacatgaacattggttcttttgcaaacagggaccccccaaaaaattgagaaatttcatggatttttactcgtgtttcgagtacacattcggattcattgttatgccattgctttttttggcccaaatatcagctgttgtttgttcaagtattggtgatgattatgatacttgaaataatgatatacttatagattgacaactgattactaattaatgtattattaccactcaaatggttttttgtaaataatttttt

SEQ ID NO: 2063 - protein, 244 aa, Gossypium hirsutum
MATNSMNLEDIPSESVMSELLRRMKCASKPDKRLILIGPPGSGKGTQSPIIKDEYCLCHLATGDMLRAAVAAKTPLGIKAKEAMDKGELVSDDLVVGIIDEAMKKPSCKKGFILDGFPRTVGQAQKLDDMLGKQGVKIDKVLDFAIDDAVLEERITGRWIHPASGRTYHTKFAPPKVPGLDDVTGEPLVQRKDDTAAVLKSRLDAFHKQTQPVIDYYSEKGIVAKLHAEKPQKEVTDEVKKVLS

SEQ ID NO: 2064 - DNA, 1016 bp, Zea mays
  CDS (72)..(797)
ccttccgaatctcggacgcctccgcgccggccgcagggcacgcgacttccgttccggcggcgggggaagagatggcggcgaacctcgaggacgtgccgtcggtggatctcatcaccgaggtgctccgccgcgccaagtgcagctccaagcccgacaagcgcatcatcctcgtcggtccacctggctctggaaagggtacgcagtcgccccttattaaggatgaatactgcttgtgccatttagccactggtgatatgctgagagctgctgttgctgctaagactcctctggggatcaaggctaaagaagctatgaacaagggagagcttgtttcagatgacttggttgttgggattatcgatgaagccatgaagaaaccctcatgccagaagggttttatccttgatggcttccctagaactgttgttcaagcacaaaagcttgatgacatgctggcaaagcaaggcgctaaagttgacaaggttttgaacttcgcaattgatgatgcaatattggaagaacgaattactggccgctggatacacccatcgagtggcagatcttaccatacaaagtttgctcctccgaagactcctggagttgatgatgttaccggagagcccttgattcaaaggaaagatgacacagctgcggttttaaagtcaaggcttgaggctttccatatgcaaaccgaacctgtgattgactactactccaagaatggcttggtggcaaatcttcatgcggagaaaccaccaaaggaagtgaccgttgaggtgcagaaagccctttcatgaagcagcccattttcacattgaaaacggcatgtaccaaagcccttgcctgggttcctagaactaggaagtaataaactgataccggcaccgtatgattcacattttccgcctgcaatgtgcgtgattgcaccattttgttacagcttttgcaagctcatgattggtccgagcaatttaaccgtgcaaatgaacattcttttatgaaaaaaaaaaaaaaaa

SEQ ID NO: 2065 - protein, 241 aa, Zea mays
MAANLEDVPSVDLITEVLRRAKCSSKPDKRIILVGPPGSGKGTQSPLIKDEYCLCHLATGDMLRAAVAAKTPLGIKAKEAMNKGELVSDDLVVGIIDEAMKKPSCQKGFILDGFPRTVVQAQKLDDMLAKQGAKVDKVLNFAIDDAILEERITGRWIHPSSGRSYHTKFAPPKTPGVDDVTGEPLIQRKDDTAAVLKSRLEAFHMQTEPVIDYYSKNGLVANLHAEKPPKEVTVEVQKALS

SEQ ID NO: 2066 - DNA, 1311 bp, Glycine max
  CDS (166)..(894)
attgaacaaaggagacgacaaacgtgtgtagctaaacaaagggcaagagacggcgagttgagttttgaaagcgtgtgcgtgggagggtccgaagttggagatagtgattctggttctgttctgttcttctttctactcacaacaacatcagaatcagaaacaacaatggccaacactaacttggaagatgttccctctctggatctcatgactgagctccttcgtcgtctcaagtgctcttccaaacctgacaagcgtcttattctcattggcccacctggatctgggaaaggcacccagtcaccaatcataaaagatgagtactgcttatgccacttagctactggtgatatgttaagagcagctgtagcagctaagacccctcttggtgtcaaggctaaagaagctatggataagggagaacttgtttctgatgacttggttgttggcattatagatgaagcaatgaaaaaaccttcatgtcagaaaggtttcattcttgatggttttccaagaactgtggtccaagcacagaagcttgatgagatgctgcaaaaccaaggagttaaagttgataaggtgctcaattttgcaattgatgatgcaatccttgaggagcgaattactggtcgctggatacacccatccagtggcagaacctaccatacaaaatttgctcctcctaaggttcttggtgttgatgatgttactggtgaaccacttatccagcgcaaggatgacactgcagctgttcttaagttaagactggaggcatttcacaagcaaaccgaaccggttattgattactattcaaagaagggccttgttgctaatcttcatgctgagaaaccacccaaagaggtgacagttgaagtggagaaagtgctgtcttaaaacatagttcatcttttgatctcgggcttgaactgcaattgttcttttttcgctataggaaaacttttcgttgccaatttgtattttaatatactctgaaatccgcttacctttcagctttactgcaaatgccggctgttctcaaacccacattcgaagaccaactttgatgaatcaaaaagtctatttattttgaattttggtctctttcttttttctgcatgaatttccactcgacattcgcaggtgtttacgcacccgtgaaacttttgatttcatgaactagttggcaaaatttgagctacttattgttgggaagcatttgtgctgcttttgaaggtgtgaaatgaaaaattgtaagaaataattgtttggtctgtgtttcattattttatttctatatattgtgatattaaa

SEQ ID NO: 2067 - protein, 242 aa, Glycine max
MANTNLEDVPSLDLMTELLRRLKCSSKPDKRLILIGPPGSGKGTQSPIIKDEYCLCHLATGDMLRAAVAAKTPLGVKAKEAMDKGELVSDDLVVGIIDEAMKKPSCQKGFILDGFPRTVVQAQKLDEMLQNQGVKVDKVLNFAIDDAILEERITGRWIHPSSGRTYHTKFAPPKVLGVDDVTGEPLIQRKDDTAAVLKLRLEAFHKQTEPVIDYYSKKGLVANLHAEKPPKEVTVEVEKVLS

SEQ ID NO: 2068 - DNA, 678 bp, Glycine max
  CDS (1)..(678)
atgtactgggttcttcagttactggaggagaaaatgagagacaatttgcttttcggcccacctggatctggaaaaggcacccagtcaccaatcataaaagatgagtactgcttatgccacttagctaccggtgatatgttaagagcagctgtagcagctaagacccctcttggtgtcaaggctaaagaagctatggataagggagaacttgtttctgatgacttggttgttggcattatagatgaagcaatgaagaaaccatcatgtcagaaaggtttcattcttgatggttttccaagaactgtggtccaagcacagaagcttgatgagatgctgcaaaaacaaggagttaaagttgataaggtgctcaattttgcaattgatgatgcaatccttgaggagcgaattactggtcgctggatacacccatccagtggcagaacttaccatacaaaattttcccctccaaaggttcttggtgttgatgatgttactggtgaaccacttatccagcgcaaggatgacactgcggctgttcttaagtcaagactggaggcatttcacaagcaaaccgaaccggttattgattactattcaaagaagggccttgttgctaatcttcatgctgagaaaccacccaaagaggtgacagttgaagtggagaaagtgctgtcttaa

SEQ ID NO: 2069 - protein, 225 aa, Glycine max
MYWVLQLLEEKMRDNLLFGPPGSGKGTQSPIIKDEYCLCHLATGDMLRAAVAAKTPLGVKAKEAMDKGELVSDDLVVGIIDEAMKKPSCQKGFILDGFPRTVVQAQKLDEMLQKQGVKVDKVLNFAIDDAILEERITGRWIHPSSGRTYHTKFSPPKVLGVDDVTGEPLIQRKDDTAAVLKSRLEAFHKQTEPVIDYYSKKGLVANLHAEKPPKEVTVEVEKVLS

SEQ ID NO: 2070 - DNA, 994 bp, Glycine max
  CDS (160)..(888)
acagccagtcacctaacatttgtagctaaacaaagggcaagagacggcgagttgagttttgaaagcgtgtgcgtgggagggtccgaagttggagatagtgattctggttctgttctgttcttctttctactcacaacaacatcagaatcagaaacaacaatggccaacactaacttggaagatgttccctctctggatctcatgactgagctccttcgtcgtctcaagtgctcttccaaacctgacaagcgtcttattctcattggcccacctggatctggaaaaggcacccagtcaccaatcataaaagatgagtactgcttatgccacttagctaccggtgatatgttaagagcagctgtagcagctaagacccctcttggtgtcaaggctaaagaagctatggataagggagaacttgtttctgatgacttggttgttggcattatagatgaagcaatgaagaaaccatcatgtcagaaaggtttcattcttgatggttttccaagaactgtggtccaagcacagaagcttgatgagatgctgcaaaaacaaggagttaaagttgataaggtgctcaattttgcaattgatgatgcaatccttgaggagcgaattactggtcgctggatacacccatccagtggcagaacttaccatacaaaattttcccctccaaaggttcttggtgttgatgatgttactggtgaaccacttatccagcgcaaggatgacactgcggctgttcttaagtcaagactggaggcatttcacaagcaaaccgaaccggttattgattactattcaaagaagggccttgttgctaatcttcatgctgagaaaccacccaaagaggtgaccgttgaagtggagaaagtgctgtcttaaaacagagttcatcccctgatctcgggcttgaactgcaattgtttttttttttttcgcaatcgaatgacttttgtagtcaacatggtcgcccggcggatctgcggtc

SEQ ID NO: 2071 - protein, 242 aa, Glycine max
MANTNLEDVPSLDLMTELLRRLKCSSKPDKRLILIGPPGSGKGTQSPIIKDEYCLCHLATGDMLRAAVAAKTPLGVKAKEAMDKGELVSDDLVVGIIDEAMKKPSCQKGFILDGFPRTVVQAQKLDEMLQKQGVKVDKVLNFAIDDAILEERITGRWIHPSSGRTYHTKFSPPKVLGVDDVTGEPLIQRKDDTAAVLKSRLEAFHKQTEPVIDYYSKKGLVANLHAEKPPKEVTVEVEKVLS

SEQ ID NO: 2072 - DNA, 729 bp, Glycine max
  CDS (1)..(729)
atggccaacactaacttggacgatgttccctctctggatctcatgactgagctccttcgtcgcttcaagtgctcttccaaacctgacaagcgtcttattctcattggcccacctggatctgggaaaggcacccagtcaccaatcataaaagatgagtactgcttatgccacttagctactggtgatatgttaagagcagctgtagcagctaagacccctcttggtgtcaaggctaaagaagctatgaataagggagaacttgtttctgatgacttggttgttggcattatagatgaagcaatgaaaaaaccttcatgtcagaaaggtttcattcttgatggttttccaagaactgtggtccaagcacagaagcttgatgagatgctgcaaaaccaaggagttaaagttgataaggtgctcaattttgcaattgatgatgcaatccttgaggagcgaattactggtcgctggatacacccatccagtggcagaacctaccatacaaaatttgctcctcctaaggttcttggtgttgatgatgttactggtgaaccacttatccagcgcaaggatgacactgcagctgttcttaagttaagactggaggcatttcacaagcaaaccgaaccggttattgattactattcaaagaagggccttgttgctaatcttcatgctgagaaaccacccaaagaggtgacagttgaagtggagaaagtgctgtcttaa

SEQ ID NO: 2073 - protein, 242 aa, Glycine max
MANTNLDDVPSLDLMTELLRRFKCSSKPDKRLILIGPPGSGKGTQSPIIKDEYCLCHLATGDMLRAAVAAKTPLGVKAKEAMNKGELVSDDLVVGIIDEAMKKPSCQKGFILDGFPRTVVQAQKLDEMLQNQGVKVDKVLNFAIDDAILEERITGRWIHPSSGRTYHTKFAPPKVLGVDDVTGEPLIQRKDDTAAVLKLRLEAFHKQTEPVIDYYSKKGLVANLHAEKPPKEVTVEVEKVLS

SEQ ID NO: 2074 - DNA, 564 bp, Synechocystis sp. PCC 6803
  CDS (1)..(564): transl_table=11
atggctatggctaaaggtttaatttttctgggggcccccggctctggtaaaggtacccaggcggtgggattggcggagaccttgggcattccccatatttccactggagatatgctacgtcaggcgatcgccgatggcacggagttgggtaaccaggccaaaggttacatggacaagggagaattggtgcccgatcagttaattcttgggttaattgaagagcgcttgggccataaagatgctaaggctggctggattctagatggctttccccgtaacgtcaaccaagcaatttttctcgatgagttgttggttaatattggtcaccgtacccattgggtcattaacttaaaagttcccgacgaagtaattgtagaacgcctgttggcccgggggcgggcggacgataacgaaaccaccattcgcaatcggctgttggtttacacagagcaaactgctcccctcatggcctattaccaagaacagggcaaactttactcccttgacggtaaccagccggtagaagccattgccaccaacctggaaaaattggttaaaccttag

SEQ ID NO: 2075 - protein, 187 aa, Synechocystis sp. PCC 6803
MAMAKGLIFLGAPGSGKGTQAVGLAETLGIPHISTGDMLRQAIADGTELGNQAKGYMDKGELVPDQLILGLIEERLGHKDAKAGWILDGFPRNVNQAIFLDELLVNIGHRTHWVINLKVPDEVIVERLLARGRADDNETTIRNRLLVYTEQTAPLMAYYQEQGKLYSLDGNQPVEAIATNLEKLVKP

SEQ ID NO: 2076 - DNA, 723 bp, Drosophila melanogaster
  CDS (1)..(723)
atggcgccgaatgcagcagtaccagtggagcgatatgagcctgagaacatcgggatcaacgccattctcctggggccgccgggttccggcaaaggaacgcaggctcccctgctgaaggagaagttctgcgtgtgccacctgtcgaccggcgacatgctgcgggcggagatttcatccggttcgaagctgggagccgagttgaagaaggtcatggatgccggcaaactggtctccgacgacctggtcgtggacatgatcgactccaacctggacaagcccgagtgcaagaatggattcctcctggacggattccccaggactgtcgttcaagctgagaagctcgacacattgctggacaagaggaaaaccaacttggatgctgtcatcgagtttgccatcgacgacagtctgttggtgaggcgcatcactggccgcttgatccaccaggccagcgggcgttcgtatcacgaagagtttgcccctccaaagaagccaatgacggacgatgtcactggagagcccctaatccgtcgcagcgatgacaacgccgaggctctgaagaagcgactggaagcatatcacaagcagacaaagccgctggtcgactactacggcctgaggggtctgcacttcaaggtggacgccgccaagaagtccagcgacgtcttctccaccatcgactctatattccaacgcaagcgtcctgcccagatccagttatga

SEQ ID NO: 2077 - protein, 240 aa, Drosophila melanogaster
MAPNAAVPVERYEPENIGINAILLGPPGSGKGTQAPLLKEKFCVCHLSTGDMLRAEISSGSKLGAELKKVMDAGKLVSDDLVVDMIDSNLDKPECKNGFLLDGFPRTVVQAEKLDTLLDKRKTNLDAVIEFAIDDSLLVRRITGRLIHQASGRSYHEEFAPPKKPMTDDVTGEPLIRRSDDNAEALKKRLEAYHKQTKPLVDYYGLRGLHFKVDAAKKSSDVFSTIDSIFQRKRPAQIQL

SEQ ID NO: 2078 - DNA, 651 bp, Drosophila melanogaster
  CDS (1)..(651)
atgtttacgaaaatctttcgcgctgtgataatcggagcccccggctcgggcaaaggaactatttcggaattgatctgcaagaaccatggatgtgtgcacatctccacgggggacattctgcgccagaacatcataaaaaacacagaacttggaaaaaaggccaagcagtacattgctgaaggtaaactggtgcccgacgcgattgtgaccaagacgatgctggcccggataaccgaggtaggcaacaggtcgtacatcctagacggattcccgcgcaatatagcccaggccgaggcactggctgcacgcgagcaaatcgatgccgtgatcacgctggacgttccacatagtgtgattatcgaccgggtcaagaatcgctggatccatgcgccctccggcagggtgtacaatattggcttcaagaatcccaaagtgcctggcaaagatgatgtgacgggggagccgctgatgcaacgcgaagatgataaaccccatgtggtggccaagcgactggagctctacgatgaggtgatgagcccggtaatagcctggtacgaaaagaagggtctggttgccactttcaagggaaaacagacaaaggagatctggccgatgatggagcttttcctcaacgaccgcataaatgcgtaa

SEQ ID NO: 2079 - protein, 216 aa, Drosophila melanogaster
MFTKIFRAVIIGAPGSGKGTISELICKNHGCVHISTGDILRQNIIKNTELGKKAKQYIAEGKLVPDAIVTKTMLARITEVGNRSYILDGFPRNIAQAEALAAREQIDAVITLDVPHSVIIDRVKNRWIHAPSGRVYNIGFKNPKVPGKDDVTGEPLMQREDDKPHVVAKRLELYDEVMSPVIAWYEKKGLVATFKGKQTKEIWPMMELFLNDRINA

SEQ ID NO: 2080 - DNA, 771 bp, Nitrosomonas europaea ATCC 19718
  CDS (1)..(771): transl_table=11
gtgccgatctgcctgacccggctgcttgcaacggcttttcacaggctatccgcggcacacaccactgcgggatgttcaccatccccgacaatactcaaggaggccaacattcgtatcatcttactgggcgcgccaggagcgggcaaaggcacgcaggcaagttttatccgtgaatgtttttccataccccagatttctaccggcgatattctccgtaatgctgtaaaagcagggacagagctgggcatgatggcaaaaaaaatcatggaatccggcggtctggtgccagatgaaatcatcatcgatctggtacgcaagcgaattgaagaaccggattgtgccaatggctttctattcgatggtttcccccgcaccattcctcaggctgatgcactcaggacggccaacgtacacatagatcatgtcatcgaaattgatgtgcccgatgccgaaatcataaagcgtttgtccgggcgtcgtgtacatccgccatcaggccggatttatcatatcgagttcaatccgccggcagtcgccgaccgggatgatgttaccggcgaggcactggttctacgtgaggatgaccgggaagaaaccgtgcgtaagcgcctgcaggtctatcatgaacaaacccggccattggttggatactacttcgaatgggcgaacagcggtgatcccaatgcgccaggttacatcaaaattgccggaaccggcaatgtagaagccatacaggaaaatattatcgcagcactcaaacagaccaaatga

SEQ ID NO: 2081 - protein, 256 aa, Nitrosomonas europaea ATCC 19718
MPICLTRLLATAFHRLSAAHTTAGCSPSPTILKEANIRIILLGAPGAGKGTQASFIRECFSIPQISTGDILRNAVKAGTELGMMAKKIMESGGLVPDEIIIDLVRKRIEEPDCANGFLFDGFPRTIPQADALRTANVHIDHVIEIDVPDAEIIKRLSGRRVHPPSGRIYHIEFNPPAVADRDDVTGEALVLREDDREETVRKRLQVYHEQTRPLVGYYFEWANSGDPNAPGYIKIAGTGNVEAIQENIIAALKQTK

SEQ ID NO: 2082 - DNA, 750 bp, Strongylocentrotus purpuratus
  CDS (1)..(750)
atggctgccgcaatcaagagtcaggatccagttatgcatgagccagaggaagagggagtacctcaagggatctgtggagtactccttggcccaccaggagctggaaaaggagtccaggcacccaagcttgcagagaagtactgcgtatgtcacctggcaacgggtgacatgctgagggcggtcatcgcctcaggctcggacctcggtaagaagctgaaggtggtgttggacagcggtaagctggtcagcgatgagctggtggtggagatgattgataacaagctgggtgcacccgagtgcaggaatggcttccttctagatggcttcccaaggaccgttgtccaggctgagaagctggacgaacttctcacaaagaggaagactgccctggactcagtagtcgagttcggcattgacgattcactgcttgtgaaacgaatcaccggacggctgatccacaagcccagtgggaggtcttatcacacagaatttagccctccaaagaagcctatgactgatgatgtaactggtgagccactgatcaagcgatcagacgacaacgaggtaacgttgaaaacacgccttgaagcctaccacaagcagactgcacctctcgttgattattactccaaacgagggatccatcaacgtgtcgatgctgctagagcacctgacgccgtcttcgcaagcatccagacaatttttgctaaagcgcagactggaagaaaagataaagttgtattcatttga

SEQ ID NO: 2083 - protein, 249 aa, Strongylocentrotus purpuratus
MAAAIKSQDPVMHEPEEEGVPQGICGVLLGPPGAGKGVQAPKLAEKYCVCHLATGDMLRAVIASGSDLGKKLKVVLDSGKLVSDELVVEMIDNKLGAPECRNGFLLDGFPRTVVQAEKLDELLTKRKTALDSVVEFGIDDSLLVKRITGRLIHKPSGRSYHTEFSPPKKPMTDDVTGEPLIKRSDDNEVTLKTRLEAYHKQTAPLVDYYSKRGIHQRVDAARAPDAVFASIQTIFAKAQTGRKDKVVFI

SEQ ID NO: 2084 - DNA, 732 bp, Strongylocentrotus purpuratus
  CDS (1)..(732)
atgccgcctgtagctcaacccaagccccaatttgacgatcttccagatggaatcaaggccatcttgttagggccaccaggagcaggcaagggaacccaggcacccaagcttgcagagaagtactgcgtatgtcacctggcaacgggtgacatgctgagggcggtcatcgcctcaggctcggacctcggtaagaagctgaaggtggtgttggacagcggtaagctggtcagcgatgagctggtggtggagatgattgataacaagctgggtgcacccgagtgcaggaatggcttccttctagatggcttcccaaggaccgttgtccaggctgagaagctggacgaacttctcacaaagaggaagactgccctggactcagtagtcgagttcggcattgacgattcactgcttgtgaaacgaatcaccggacggctgatccacaagcccagtgggaggtcttatcacacagaatttagccctccaaagaagcctatgactgatgatgtaactggtgagccactgatcaagcgatcagacgacaacgaggtaacgttgaaaacacgccttgaagcctaccacaagcagactgcacctctcgttgattattactccaaacgagggatccatcaacgtgtcgatgctgctagagcacctgacgccgtcttcgcaagcatccagacaatttttgctaaagcgcagactggaagaaaagataaagttgtattcatttga

SEQ ID NO: 2085 - protein, 243 aa, Strongylocentrotus purpuratus
MPPVAQPKPQFDDLPDGIKAILLGPPGAGKGTQAPKLAEKYCVCHLATGDMLRAVIASGSDLGKKLKVVLDSGKLVSDELVVEMIDNKLGAPECRNGFLLDGFPRTVVQAEKLDELLTKRKTALDSVVEFGIDDSLLVKRITGRLIHKPSGRSYHTEFSPPKKPMTDDVTGEPLIKRSDDNEVTLKTRLEAYHKQTAPLVDYYSKRGIHQRVDAARAPDAVFASIQTIFAKAQTGRKDKVVFI

SEQ ID NO: 2086 - DNA, 732 bp, Strongylocentrotus purpuratus
  CDS (1)..(732)
atgccgcctgtagctcaacccaagccccaatttgacgatcttccagatggaatcaaggccatcttgttagggccaccaggagcaggcaagggaacccaggcacccaagcttgcagagaagtactgcgtatgtcaccttgcaacgggtgacatgctgagggcggtcatcgcctcaggctcggacctcggtaagaagctgaaggtggtgttggacagcggtaagctggtcagcgatgagctggtggtggagatgattgataacaagctgggtgcacctgagtgcaagaatggcttccttctagatggcttcccaaggaccgttgtccaggctgagaagctggacgaacttctcacaaagaggaagactgccctggactcagtagtcgagttcggcattgacgattcacttcttgtgaaacgaatcaccggacggctgatccacaagcccagtgggaggtcttatcacacagaattcagccctccaaagaagcctatgactgatgatgtaactggtgagccactgatcaaacgatcagacgacaacgaggtaacgttgaaaacacgccttgaagcctaccacaagcagactgcacctctcgttgattattactccaaacgagggatccatcaacgggtagatgctgctagagcacccgacgcagtcttcgcaagcatccagtccatttttgctaaagcacagactggaagaaaagataaagttgtattcatttga

SEQ ID NO: 2087 - protein, 243 aa, Strongylocentrotus purpuratus
MPPVAQPKPQFDDLPDGIKAILLGPPGAGKGTQAPKLAEKYCVCHLATGDMLRAVIASGSDLGKKLKVVLDSGKLVSDELVVEMIDNKLGAPECKNGFLLDGFPRTVVQAEKLDELLTKRKTALDSVVEFGIDDSLLVKRITGRLIHKPSGRSYHTEFSPPKKPMTDDVTGEPLIKRSDDNEVTLKTRLEAYHKQTAPLVDYYSKRGIHQRVDAARAPDAVFASIQSIFAKAQTGRKDKVVFI

SEQ ID NO: 2088 - DNA, 918 bp, Nasonia vitripennis
  CDS (1)..(918)
atgcgcccgtcatatattattaacaattgggaaatgataaaaaatatgacgctgaacatacgtgcgatcgggatagtcgcatcacttgtcattgcatggtgcttaaaacactattggtgcactgattgcatttcgctggacagagatagtatttttcaatcatgccaatcggacggtaaacaggcggatctcggtcgtcagcaagaggatcaggacacagggtcaacgaccaaaacagctatggttggtgtaagctactctaggatggcagcccaggcggcctttcgggcggttatcttgggcgctccgggttccggcaagggcaccatatctgcccgcatcgtcaaacagtttgacgtcaagcacatatccagcggtgacaagcttaggtaccacatcgccaatcagaccgacctcggcaagaaagtgaagaaatacttggattccggaatgcttgtgccggacgaaacgatgatagcgcttatcagcgaagagatcaaaactttggaaggtcgaaattggcttttggacggattccccagaacacgtgcgcaagccgaggctttgcaaaaaatttacccgctctcgctcgtgatcaacgttgatgtacctgattctgtaattgtagagcgacttaagaatcgctgggttcacttgcccagcggtcgagtttacaatattggattcaacgatccgaaagtgccgggtagagacgacgtgacgggggaacttctggtccagcgacccgacgaccagccggaagtcgtccaggagaggcttcacgtttacgcgacgaaaaccaaaccgctcatcgactactacaagcagctgaacgtgctcaagtcgtttgctggcaatacgactgacagcatgtggccagcgatcaaggaaaccatcggacaataccttggacgatag

SEQ ID NO: 2089 - protein, 305 aa, Nasonia vitripennis
MRPSYIINNWEMIKNMTLNIRAIGIVASLVIAWCLKHYWCTDCISLDRDSIFQSCQSDGKQADLGRQQEDQDTGSTTKTAMVGVSYSRMAAQAAFRAVILGAPGSGKGTISARIVKQFDVKHISSGDKLRYHIANQTDLGKKVKKYLDSGMLVPDETMIALISEEIKTLEGRNWLLDGFPRTRAQAEALQKIYPLSLVINVDVPDSVIVERLKNRWVHLPSGRVYNIGFNDPKVPGRDDVTGELLVQRPDDQPEVVQERLHVYATKTKPLIDYYKQLNVLKSFAGNTTDSMWPAIKETIGQYLGR

SEQ ID NO: 2090 - DNA, 750 bp, Nasonia vitripennis
  CDS (1)..(750)
atggcacccaaaactgaatcattgccaaaggaaaatgttgaagaaccgtcgcgaggaatcaatgccgtgttgttgggaccacccggtagtggaaaaggcactcaggcacctatgttgaaagaacgctactgtgtttgccacctttccactggagacatgttgagagcggaaattcaatcgggttctgctcttggagctgaactaaaaaaagttatggatgccggaaaactcgtcagcgatgatttggttgtcaatatgattgataaaaatcttgaaaagcccgagtgccagcgtggattcctcttggatggtttcccacgaactgttccacaagcagagaagttagatgagatgctggaaaaaaagaaaacaaagcttgatgctgtcattgagtttggcattgatgataacttgttggttaagagaataactggtcgcttgattcatccggctagtgggagatcctatcacgaagaattcgcgccaccaaaagttgctatgaaagatgacataactggtgagccactgattaaaagatctgatgacaatgctgaagctcttaaaaaacgtcttgcttcatatcactctcaaactcagccacttgttgactactatgctcttcgtggcatccataattatgtgaatgctgccaagtctagtgaacaagtattcaaagatatagacactatctttcttactgctattactgcggaccaaaagaagggtttcttcagcagactcttttcttaa

SEQ ID NO: 2091 - protein, 249 aa, Nasonia vitripennis
MAPKTESLPKENVEEPSRGINAVLLGPPGSGKGTQAPMLKERYCVCHLSTGDMLRAEIQSGSALGAELKKVMDAGKLVSDDLVVNMIDKNLEKPECQRGFLLDGFPRTVPQAEKLDEMLEKKKTKLDAVIEFGIDDNLLVKRITGRLIHPASGRSYHEEFAPPKVAMKDDITGEPLIKRSDDNAEALKKRLASYHSQTQPLVDYYALRGIHNYVNAAKSSEQVFKDIDTIFLTAITADQKKGFFSRLFS

SEQ ID NO: 2092 - DNA, 654 bp, Aedes aegypti
  CDS (1)..(654)
atgagcagaaacttattcagagcggtaattatgggagccccaggctctggcaaaggtacagtatctgcacgtattgtgaagacattcaacatgaagcatatctctagtggtgacatgcttcggaataatattgaaaagagtaccgagctaggcaagatagccgagaaatacatcaaagaagggaaactggtgccagacattcatattacaaagtgtatcctgggtgaactagcgcaactaaaatccagttcgtggctattggatggctttccgcgaacaccggaacaagccgaggatttatggcgccaggagaagatagattcagttatcaatttggatgtacctttcgatgtcatcgtggaccgattacgcagccgttgggtccatctacccagtggtagggtgtacaacattggattcaacgatccaaaggtaccgggtaaagatgatgtaaccggcgaacctcttagccaacgaccagatgatgatccagtggcggtgagaaaacggttggagatctacgacgcatgtactaggccattgaatgaatacttccatcagcagggagtattagtgacttttagtggtaaaaccacagatgaaatctggccgaatgtaaaaaaatatctcgaaagcaaaatcgtaaagtcatag

SEQ ID NO: 2093 - protein, 217 aa, Aedes aegypti
MSRNLFRAVIMGAPGSGKGTVSARIVKTFNMKHISSGDMLRNNIEKSTELGKIAEKYIKEGKLVPDIHITKCILGELAQLKSSSWLLDGFPRTPEQAEDLWRQEKIDSVINLDVPFDVIVDRLRSRWVHLPSGRVYNIGFNDPKVPGKDDVTGEPLSQRPDDDPVAVRKRLEIYDACTRPLNEYFHQQGVLVTFSGKTTDEIWPNVKKYLESKIVKS

SEQ ID NO: 2094 - DNA, 774 bp, Physcomitrella patens subsp. patens
  CDS (1)..(774)
atggccgccgcggcgcagttggaggatgttcccaacgactctctcttccacgaggtcatgcggcgtctcaagtgcgccccgaagcaggagaagcgcgtcattcttgtggggcctcctggatgcgggaaaggaacccagtcccccattttgaaggaggagcactgtttgtgccatttggctacgggtgatatgttgcgcgctgctgtggcgcagaagacgcctctgggtttggaggcgaaggctgctatggaaaagggtgcattggtgtccgatgacttagtggttggcatcatcgatgatgctttgaaacggccatcttgttccaagggatttatccttgatggatttcctcgcactgtcgttcaagctcagaagttagatgcagctcttgaaaagcagggtgtgaagatcgacaaggtgttgaactttgagatcgatgatgccattctggaggagcgaataactggtcgatggattcatcccgctagtggccgatcgtaccactccaagttcgcacctccgaaggtggagggccgtgatgatatcaccggagagcctttgattcagcgcaaggacgacactgtggaggttttgcagaagagactgacgtcattccacgagcagaccacacccgtgattgattactaccagcaaaagggtgtggtgaagaatatcgaagcggcgaaaccagcgaacgaggtcactgattacatccggaaaacccttgactcacccaacgtggttgctgaagagattcggaaggttcttgcctga

SEQ ID NO: 2095 - protein, 257 aa, Physcomitrella patens subsp. patens
MAAAAQLEDVPNDSLFHEVMRRLKCAPKQEKRVILVGPPGCGKGTQSPILKEEHCLCHLATGDMLRAAVAQKTPLGLEAKAAMEKGALVSDDLVVGIIDDALKRPSCSKGFILDGFPRTVVQAQKLDAALEKQGVKIDKVLNFEIDDAILEERITGRWIHPASGRSYHSKFAPPKVEGRDDITGEPLIQRKDDTVEVLQKRLTSFHEQTTPVIDYYQQKGVVKNIEAAKPANEVTDYIRKTLDSPNVVAEEIRKVLA

SEQ ID NO: 2096 - DNA, 729 bp, Physcomitrella patens subsp. patens
  CDS (1)..(729)
atggcagcacccaacttggaggatgttgggtccgctgccctgttcgctgagatgctgcgccgcttcaagtgtgccaccaaaggagagaagcgcatcattcttgtgggtcccccagggtgtggaaaggggacgcaatcgccgttcattaaggaggagtattgcctttgtcatctggctactggtgacatgcttcgcaatgcagctattaaaggaacacccttaggactggaggtcaaagcggccatggaatcagggaaacttgtttctgatgatctagtagtaggtattattgatgatgcattgaaaaggcctgcttgcgagaagggtttcatcttagacggcttcccgcgcacggttgtccaagctgaaaagttggatgctatgcttgcgagacaaaatcagcaaattgatagagtgctgaatttcgctattccggacgcggtacttgtggagcgagtcacagggaggtgggtacatccacccagtggtcgctcttatcacaccaagtttgctgcaccaaaagttcctggtcgagacgatattacaggagagccattgatacagcgcaaagacgacaacatcaacacgctcaagagcaggcttgaggcatttcacaaacaaactagccctgtcattgaatattatacaaggaagcataaagtgacaactttgacagctgattcctcattcagtgaagtttcaagacaaattgagagtgcccttcagtaa

SEQ ID NO: 2097 - protein, 242 aa, Physcomitrella patens subsp. patens
MAAPNLEDVGSAALFAEMLRRFKCATKGEKRIILVGPPGCGKGTQSPFIKEEYCLCHLATGDMLRNAAIKGTPLGLEVKAAMESGKLVSDDLVVGIIDDALKRPACEKGFILDGFPRTVVQAEKLDAMLARQNQQIDRVLNFAIPDAVLVERVTGRWVHPPSGRSYHTKFAAPKVPGRDDITGEPLIQRKDDNINTLKSRLEAFHKQTSPVIEYYTRKHKVTTLTADSSFSEVSRQIESALQ

SEQ ID NO: 2098 - DNA, 735 bp, Physcomitrella patens subsp. patens
  CDS (1)..(735)
atggctgccgctgctgctaatctggaggatgtgcccaacgatgtgctcttccatgagcttctgcgccgcatgaagtgtgcccccaaacaggagaagcgcctcatccttgttgggcctccgggatgtgggaagggaacccaatcgcccattctcaaggaggagcactgcctgtgccatttggccacgggcgacatgctgcgcgcagcggtagctaagcagacgcctttagggttacaagccaaggctgctatggaccagggcgcgctggtttccgatgacttagtggtaggaattatcgaggaggctttgaaacggccgtcatgttcaaagggttttattcttgatggcttcccccgcactgttgtccaagcacagaagttggatgccgctcttgagaagcaaggcgtaaaggttgacaaggttctgaactttgagattgaagattctgtccttgaagagcgtattactgggcggtggattcaccccgctagtggccgatcttatcactccaagtttgcacccccgaaggtgcctggccgtgatgacattactggagagcctttgttgcagcgcaaggatgacactgtggaagtgcttaagaagaggctatcgtcgttccacgaacagaccacacccgtcattgagtactacctgaaaaagggtgtcgtgaggaacattgaagctgcgaagccagctaatgtcgtcactcaggagattcagaaagccatctcctga

SEQ ID NO: 2099 - protein, 244 aa, Physcomitrella patens subsp. patens
MAAAAANLEDVPNDVLFHELLRRMKCAPKQEKRLILVGPPGCGKGTQSPILKEEHCLCHLATGDMLRAAVAKQTPLGLQAKAAMDQGALVSDDLVVGIIEEALKRPSCSKGFILDGFPRTVVQAQKLDAALEKQGVKVDKVLNFEIEDSVLEERITGRWIHPASGRSYHSKFAPPKVPGRDDITGEPLLQRKDDTVEVLKKRLSSFHEQTTPVIEYYLKKGVVRNIEAAKPANVVTQEIQKAIS

SEQ ID NO: 2100 - DNA, 651 bp, Culex quinquefasciatus
  CDS (1)..(651)
atgagtgcgccgcggttgtttcgggccgtgatcatgggcgcgcccggttccggcaagggcacggtgtcgtcgcggatcgtcaaaacgctaaacatggagcacatctcgagcggggacctgctgcgagccaacatcgagcagcgaaccgaacttggggtgattgcggacaagttcatccgggagggcaagctgctgccggacgtttacataaccaagtgtatcctgggggagctgcagaagctgaagggtcgttcctggttgctggacgggttcccgcgtacgctggagcaggccggtgacttgtggcgggaggagaagattgacgccgtgatcaatttggacgttccgtttgaggtgattatcgatcggctgcggagtaggtgggtgcatctgcccagtgggagggtgtacaatatcgggttcaacgatccgaaggtgccgggcaaggacgacgagacgggtgaggcgttgagccagcgaccggacgacaatccggtggcggtgaggaagcggctggagatttacgatgcttgcacgcggccgttgaatgagtactttaaacagaagggcgttttggcgaccttttccggccggacaaccgacgaaatttggcccagcgtgaagcagtatttggaggagaaaatcaagtaa

SEQ ID NO: 2101 - protein, 216 aa, Culex quinquefasciatus
MSAPRLFRAVIMGAPGSGKGTVSSRIVKTLNMEHISSGDLLRANIEQRTELGVIADKFIREGKLLPDVYITKCILGELQKLKGRSWLLDGFPRTLEQAGDLWREEKIDAVINLDVPFEVIIDRLRSRWVHLPSGRVYNIGFNDPKVPGKDDETGEALSQRPDDNPVAVRKRLEIYDACTRPLNEYFKQKGVLATFSGRTTDEIWPSVKQYLEEKIK

SEQ ID NO: 2102 - DNA, 726 bp, Culex quinquefasciatus
  CDS (1)..(726)
atggccccaaccgcagcagtgccgctggcgaaaccgagccaagaatcgccggtcggaatcaacgccatcctgctgggaccgcccggctccggcaagggaacacaggcccctctgctgaaggaaaagttctgcgtgtgtcacctgtccaccggggacatgctgcgggcggaaatcgccgccggctcgaagatcggtgcccagctgaagaaggtcatggacgagggcaagctggtgtcggacgacctggtcgtggacatgatcgactcgaacctggacaagcccgagtgtcggaacggatttctgctggacggattcccccggacggtggtgcaggccgaaaagttggaccagctgctggacaagcgcaacaccggactggacgccgtgatcgagttcggcatcgacgattccctgctggtgcgtcgcatcaccggccgactaatccaccaggccagcggtcgctcgtaccacgaggagttccacccaccgaaggtcgccatgaccgacgacgtgaccggcgagccgttgatgcgtcgcagcgatgacaatgcccatgccctcgtcaagcgactggagtcgtaccacaagcagacgaaaccgctggccgattactacgccctgcgcggtctgcacttccgggtggacgccgcccggagcgcatcgcaagtgtttgagcacattgacagtatcttcatgaagcagcggtcagcacggttgggactgtaa

SEQ ID NO: 2103 - protein, 241 aa, Culex quinquefasciatus
MAPTAAVPLAKPSQESPVGINAILLGPPGSGKGTQAPLLKEKFCVCHLSTGDMLRAEIAAGSKIGAQLKKVMDEGKLVSDDLVVDMIDSNLDKPECRNGFLLDGFPRTVVQAEKLDQLLDKRNTGLDAVIEFGIDDSLLVRRITGRLIHQASGRSYHEEFHPPKVAMTDDVTGEPLMRRSDDNAHALVKRLESYHKQTKPLADYYALRGLHFRVDAARSASQVFEHIDSIFMKQRSARLGL

SEQ ID NO: 2104 - DNA, 723 bp, Anopheles gambiae str. PEST
  CDS (1)..(723)
atggcaccgaatgcagcagagctgaaagtgaaacccgcatcggattcgaccggcattaatgccatactgctgggacctcccggttccggaaaaggaacacaggcgccactattaaaggaaaaatattgtgtatgtcacctttcgaccggggatatgcttcgagcagaaatagcgtccggttcgaagctgggcgcgcagctcaaaaaggtgatggatgagggcaagttggtatccgatgagctagtggtggatatgatcgattccaacctggacaagccggaatgtcgcaatggttttctgttggacggtttcccacgtacggtagtacaggcggagaaattggataatctgcttgaaaaacgcaacaccggcctggacgcagtaattgagttcggcatcgatgatagtctgctggtgcgtcgtattaccggacgcctgatccatcaggcaagcggacggtcttaccatgaggaatttgcgccacccaaggtgcctatgcgcgacgacgaaacgggagagcctttgatgcgccgcagtgatgacaacgcgcaggcactggtgaaacgtcttgaatcgtatcaccgacaaaccaagcctctggccgattactatgcgttgcgaggattgcatttccgcgtggatgccgcaaaaagtgcatcggacgtgtttgctaatatcgacagcatctttaccaaacagcgtgctcatcgattaggattctaa

SEQ ID NO: 2105 - protein, 240 aa, Anopheles gambiae str. PEST
MAPNAAELKVKPASDSTGINAILLGPPGSGKGTQAPLLKEKYCVCHLSTGDMLRAEIASGSKLGAQLKKVMDEGKLVSDELVVDMIDSNLDKPECRNGFLLDGFPRTVVQAEKLDNLLEKRNTGLDAVIEFGIDDSLLVRRITGRLIHQASGRSYHEEFAPPKVPMRDDETGEPLMRRSDDNAQALVKRLESYHRQTKPLADYYALRGLHFRVDAAKSASDVFANIDSIFTKQRAHRLGF

SEQ ID NO: 2106 - DNA, 591 bp, Anopheles gambiae str. PEST
  CDS (1)..(591)
atggccagtggaaagttgtttcgtgccataattatgggagcccccggatcgggcaaggggaccgtttctggccgcatcgtgaaagcgttcagcctgaaacacatcagcagtggcgatttgcttcgagcgaacatcgaaaagcgcacggaactgggcctgatcgcggacaagtacatccgggaaggcaaactggtgccggacatttacataacgaagtgcatcctgagcgagctcgaacaaatacgctcccactcgtggctgttggacggtttcccccgtacgcgcgaacaggcggacgatctgtggaatcaggagcgcatcgattcggtaatcaatttggacgtgccgtttgaggtgatcatcgaacgtatccagagccgctgggtgcatctgcctagcggccggccgctaagccaacggccggacgatactccggtggcggtgcggaagcggctcgaggtgtacgatgcgtgcacgcggcccatcaacgagtacttcgacaagaagggcgtgctggtgacgtttaagggtagcacaacggacgaaatttggccacatgtgaggaaatatcttgaggcaaagatacagtga

SEQ ID NO: 2107 - protein, 196 aa, Anopheles gambiae str. PEST
MASGKLFRAIIMGAPGSGKGTVSGRIVKAFSLKHISSGDLLRANIEKRTELGLIADKYIREGKLVPDIYITKCILSELEQIRSHSWLLDGFPRTREQADDLWNQERIDSVINLDVPFEVIIERIQSRWVHLPSGRPLSQRPDDTPVAVRKRLEVYDACTRPINEYFDKKGVLVTFKGSTTDEIWPHVRKYLEAKIQ

SEQ ID NO: 2108 - DNA, 810 bp, Magnaporthe grisea 70-15
  CDS (1)..(810)
atgcgcctccgaaaggcagcgcgtgtcattcttgttggtgcgccgggagtggggaagggtacacagtcggaacgcctcctccagcggttcccgcagctatcgtccatcagttccggtgacttacttcgcagcaatgttaaaagcaggacgccactcggcatcaaggtcgaaagtaccatgaaagctggtggtcttgtatctgacgatctaatcctccgcctcatcagcaatgagttcaacaaacgaggctggctcttcgccgacccagccaccaaggcctcctcgatcatgacgcttgcatccgcgtccgccgtggccgatcagtccgcattcagccacgacaccgacgtcttcctgggaaacaacaccggagggcctccaccacggctttcggacaatcccgccgcatcattcctgctggacgggtttccgcgcacggccgcgcaggccgagcgcctggaccatgtcgtgcccatcaacctcgccgtgagcatcaggacgccctttgaggtcatcatgcagcgcatctctggccgctgggtccacgagccgagcgggagggtctacaacgacacattcaacgctccccaggtgcccgggcgcgacgacgtcacgggcgagccgctcgtcaggaggcccgacgacagcgaagaggtatatcgacagcgcttccaaaagttccaggagacgagtgagccgctgctggagcactacgctcgcaagggcgttttgtgggaggtgaacggcatgagcagtgatgaaatcagcccaaagctgttcaaggagtttgagagacgatttttggagtaa

SEQ ID NO: 2109 - protein, 269 aa, Magnaporthe grisea 70-15
MRLRKAARVILVGAPGVGKGTQSERLLQRFPQLSSISSGDLLRSNVKSRTPLGIKVESTMKAGGLVSDDLILRLISNEFNKRGWLFADPATKASSIMTLASASAVADQSAFSHDTDVFLGNNTGGPPPRLSDNPAASFLLDGFPRTAAQAERLDHVVPINLAVSIRTPFEVIMQRISGRWVHEPSGRVYNDTFNAPQVPGRDDVTGEPLVRRPDDSEEVYRQRFQKFQETSEPLLEHYARKGVLWEVNGMSSDEISPKLFKEFERRFLE

SEQ ID NO: 2110 - DNA, 807 bp, Gibberella zeae PH-1
  CDS (1)..(807)
atgaacctgaacaaggccgctcgagtcatcctctttggtgcccctggtgttggcaaaggaacacagagcgagcgcttgctctcgcgcttccctcaactcaaccaaatcagtactggtgatctacttcgtcgaaatgtcaaggataggacaccactcggcatcaaggtcgagaacaccatgaagtctggcggcctcgtggctgacgatttaatcctacgacttatttccaacgaattttatactcgtggctggcttgctaagaatggccctcctaacgttatgaccctttcgtccgaggcaacagcactcgagcattctttcaacagcaacgccggtgtcgaatcttttatcaacgcacctttcctcgacgggcacagaccatctgacagctccaacgacccctcagcttcttttatcctcgacggtttccctcgaacagcatcccaggccggccctcttgacaaacttatccccattaacttggtggtctcactcaagacacccgtgtccgtcatcctggagcgcattctcggacgttgggtccatgaaccttccggtcgtgtctacaacaccagcttcaatgcgcccaagatccacgggatggatgacatcaccggcgagcccttgattcagcgccctgatgactctgaggaagtttaccgcgcccgatacaagaagttccaagagaccagcgagcctgtcctgaaccactatgctcaaaagggcgtactggttgagattgagggcatgagcagcgacgagattagcccaaagctatttgccgagtttgagaggcgcttcgtctaa

SEQ ID NO: 2111 - protein, 268 aa, Gibberella zeae PH-1
MNLNKAARVILFGAPGVGKGTQSERLLSRFPQLNQISTGDLLRRNVKDRTPLGIKVENTMKSGGLVADDLILRLISNEFYTRGWLAKNGPPNVMTLSSEATALEHSFNSNAGVESFINAPFLDGHRPSDSSNDPSASFILDGFPRTASQAGPLDKLIPINLVVSLKTPVSVILERILGRWVHEPSGRVYNTSFNAPKIHGMDDITGEPLIQRPDDSEEVYRARYKKFQETSEPVLNHYAQKGVLVEIEGMSSDEISPKLFAEFERRFV

SEQ ID NO: 2112 - DNA, 756 bp, Candida glabrata CBS 138
  CDS (1)..(756)
atgagtttgcgactagccaggcctttgcggttattgttactgggggcacctgggtctgggaaaggaacacagacctctaagcttctgaaggtgttacctgagcttaagagtgtttcttcgggggatatcctgagacatgagttgaagtcaggcaccgagcttggtgtgttggcggccaagtacattgcgcaggggaagttgattccggacaaggtcatcacacaggtgctcatagcgcacttgtctaaggagaagtggctgaacccgcagtcatcgtggcttctggacgggtttccaagaactgagagacaggctttctctttagatagtacattgggggaaaacaacgcaaagctaaatttggttgtagagctagatgtccccgaggaggttatcctagagagaatcgataacagatatatccatgtgggtagtggaagggtctacaacttgcagtacaacccacctaaagttgccggtaaggatgatgttactggcgagccactggtgaaaagatcagatgataacgtccaggtattcaagaagaggatgaaagagtacaagaaaactctcggcccgatcaaggaacattacgccaagcagggtatactggcaaccatatctggggatacttcagacatcattttcccaaagctgtgtgccctgatcaaccagcattttggtgctaaggaacaacaactgcatcacgaagcctttgaatcaaagaaggaacagaaaatccagccaagattatga

SEQ ID NO: 2113 - protein, 251 aa, Candida glabrata CBS 138
MSLRLARPLRLLLLGAPGSGKGTQTSKLLKVLPELKSVSSGDILRHELKSGTELGVLAAKYIAQGKLIPDKVITQVLIAHLSKEKWLNPQSSWLLDGFPRTERQAFSLDSTLGENNAKLNLVVELDVPEEVILERIDNRYIHVGSGRVYNLQYNPPKVAGKDDVTGEPLVKRSDDNVQVFKKRMKEYKKTLGPIKEHYAKQGILATISGDTSDIIFPKLCALINQHFGAKEQQLHHEAFESKKEQKIQPRL

SEQ ID NO: 2114 - DNA, 684 bp, Kluyveromyces lactis NRRL Y-1140
  CDS (1)..(684)
atgtcagttctcagaccattaagattgttactactgggtgcacccggttctggtaaaggtactcagacctcgaaactgttgaaagaattcggatccatcaaggctatctcatctggagatttgctacgtaaacagattgaacatggcacaccgttaggtttaagtgcctcctcgtatattgagaaaggccagttgttacccgatgatttgatcaccggagttgtgtgtgacgaattgaagtcacgtggctggttaaatccaaatgctacttggttactagatgggttcccacgtaccgtgggtcaagctgaagtgttagacaagtcattgttggaacacgatgcctcattaaaccttgtcgtggagctagacgtgcctcatgaagtgatcttggagagaatcgaaaaccgttacgttcacgttccaagtggaagagtttataatttgcaatataaccctcccaaagtcgacggaaaggacgatatcaccggtgaacctttgaccaagagacccgacgatactgcagaggtgtttggcaagaggctagaacagtacaacaagacagtgaccccattgaaggaacattacttgaagcaaggtattctgtcaaccatttccggtaacactagtgacattatatacccgaaactagtatcgctaatcctacaaaaattcgcaaactaa

SEQ ID NO: 2115 - protein, 227 aa, Kluyveromyces lactis NRRL Y-1140
MSVLRPLRLLLLGAPGSGKGTQTSKLLKEFGSIKAISSGDLLRKQIEHGTPLGLSASSYIEKGQLLPDDLITGVVCDELKSRGWLNPNATWLLDGFPRTVGQAEVLDKSLLEHDASLNLVVELDVPHEVILERIENRYVHVPSGRVYNLQYNPPKVDGKDDITGEPLTKRPDDTAEVFGKRLEQYNKTVTPLKEHYLKQGILSTISGNTSDIIYPKLVSLILQKFAN

SEQ ID NO: 2116 - DNA, 684 bp, Debaryomyces hansenii CBS767
  CDS (1)..(684): transl_table=12
atgcctctcgttaaaccgcctagattgttattgttaggagcaccaggatccgggaaaggtactcaaacaactaagttattgctccagtttccaaaaataaactcattatcatctggagatattttgagaaatcagataaactcgggcactagtattggcctcgaggcatctaagtatatcaaaaatggtaaattagttccagatacaacgatggtgagattaattaccaaacagttacacgagatggattggttagacaaaaaagctgcttggttattagatggatttccccgtacgtcaaaccaggctgttgcattagacaacacgttgcatacaaataattccaatataaacatggttgttgaattggatgtggatcaaaaggtcattttggaaagaatagaggctaggtgggtgcatgttcccagtggtagagtttataatttagactacaatccaccaagggtgcctttcaaagatgatatcacaggtgagccattatcaaaacgtgaagatgacacagcagaagtgtttcaaaaaagattagatcaatataataaggagattggttcattgaaggatttctacaataataaagatgtcttgtacaaagttagcggttctacatctgatgtcatattccctaagttgtctaatttgatattgcaaaactttggggtctaa

SEQ ID NO: 2117 - protein, 227 aa, Debaryomyces hansenii CBS767
MPLVKPPRLLLLGAPGSGKGTQTTKLLLQFPKINSLSSGDILRNQINSGTSIGLEASKYIKNGKLVPDTTMVRLITKQLHEMDWLDKKAAWLLDGFPRTSNQAVALDNTLHTNNSNINMVVELDVDQKVILERIEARWVHVPSGRVYNLDYNPPRVPFKDDITGEPLSKREDDTAEVFQKRLDQYNKEIGSLKDFYNNKDVLYKVSGSTSDVIFPKLSNLILQNFGV

SEQ ID NO: 2118 - DNA, 687 bp, Yarrowia lipolytica CLIB122
  CDS (1)..(687)
atgaccactgcactgacccgatccgcacgactgctgcttgtgggcgctcccggcgctggcaagggcacactcactgaccgtctgctcaccaacttctctggtttggaagcaatctctaccggtgatttgctgcgacgagagatcaagaacgagagcaagattggcgttgctgctcgatccatcattaaggccggagggctggtccccgacaacacaatcagccagctgctgcagaccgagctggagaccaagggctggctcaatgctgacagctcatggatcctcgacggcttccctcggaaccgagcccaggccgaggtgctggacgagatgctgctgccccacaaggccaacctgtcccatgtcgtgcagctggacgtgcccgaggaagtgattctggaccgaatcgagaaccgatgggtgcatcttgcctctggccgaatctacaacctcaccttcaaccctcccaaggtggctggcaaggacgacgtgactggagaacccctgtctaagcgagaggacgacaagcccgaggtgttcaagaagcgacttgtggcatacaaacaagagactgagccattgttcgagttctacgagaagcgaggcgtcctggtgactctcaagggagagacctccaacattatttggcccaagctcgagcagctcatcaagactgagtactgttaa

SEQ ID NO: 2119 - protein, 228 aa, Yarrowia lipolytica CLIB122
MTTALTRSARLLLVGAPGAGKGTLTDRLLTNFSGLEAISTGDLLRREIKNESKIGVAARSIIKAGGLVPDNTISQLLQTELETKGWLNADSSWILDGFPRNRAQAEVLDEMLLPHKANLSHVVQLDVPEEVILDRIENRWVHLASGRIYNLTFNPPKVAGKDDVTGEPLSKREDDKPEVFKKRLVAYKQETEPLFEFYEKRGVLVTLKGETSNIIWPKLEQLIKTEYC

SEQ ID NO: 2120 - DNA, 759 bp, Apis mellifera
  CDS (1)..(759)
atggctccgcgtgtagaaacaatatcaaaagaaattttagaatttccaaaagatataccgaaaaatggaattaatgcagttttattaggaccacctggtagtggtaagggtacacaggcaccattattgaaagaacgttattgtgtatgtcatctatctacaggcgatatgcttagagcagaaattaattctggatctgctcttggagcagaaattaaaaaaataattgatgagggtaaattagtcagtgatgatcttgtagttaatatgattgatcataatttaaacaaacctgaatgtaaacgtggttttttgttggatggttttcctagaagtgttccgcaagctgaaaaacttgatcaaatgttaaaaaagagacaaactaaattagatgctgtgatagagtttggaattgatgataatttgttaataaaaagaatcacaggtcgtttaattcatcctacaagtggtagatcataccatgaagaatttgctcctcctaaagaatatatgaaagatgatattactggagaaccattaattagaagatctgatgataatgtagaagcattgaagaaacgattatgcacatatcatacagaaactgaacctttgattgattattatgctttacaagggattcactattacgttaatgcagctcgatctagtaaagatgtttttaaagatattgattgcattttcctaaaagcaactaaacaacaggaaaaaaaaggtttctttagtcggttcttttaa

SEQ ID NO: 2121 - protein, 252 aa, Apis mellifera
MAPRVETISKEILEFPKDIPKNGINAVLLGPPGSGKGTQAPLLKERYCVCHLSTGDMLRAEINSGSALGAEIKKIIDEGKLVSDDLVVNMIDHNLNKPECKRGFLLDGFPRSVPQAEKLDQMLKKRQTKLDAVIEFGIDDNLLIKRITGRLIHPTSGRSYHEEFAPPKEYMKDDITGEPLIRRSDDNVEALKKRLCTYHTETEPLIDYYALQGIHYYVNAARSSKDVFKDIDCIFLKATKQQEKKGFFSRFF

SEQ ID NO: 2122 - DNA, 675 bp, Apis mellifera
  CDS (1)..(675)
atggtagcactatccacgtggtgtgccaaggctgcggctttcagggccgtgatattaggtgcccctgcttctggtaagggcaccatgtcagctagaattgttgaacaatttaaattaactcatatatcaagtggcgataagttaagacttcatatgaataataaaactgaattgggcaaagcagtctcgaattatgtactttccggtaaattcgttcctgatgatataatgatttcaatgataaacgaagaaatcaaagcggttgggaaacaaaattggttattagacggatttccaagaacgttaacgcaagcggaaaagctacaaaaaatacatccaattaatttggttctttatctggatgttcccttcgaagtgatattgaatcgtgtgaaaaacagatgggttcatttgcccagtggaagggtatataatattggattcaacagtcccaaagtaccgggtaaagatgatgtgactggcgaacctttaagcaaaagggacgatgataaaatcgaaattgtagaaaaaagactacaagaatattcaaatgcgactaaaccaattttaacattttatagtaatttaggattgttaaatacttttcaaggtaatactaccgatgaaatatggccgaatattaagaaagtcgtcgcaaaatttttgttacaatag

SEQ ID NO: 2123 - protein, 224 aa, Apis mellifera
MVALSTWCAKAAAFRAVILGAPASGKGTMSARIVEQFKLTHISSGDKLRLHMNNKTELGKAVSNYVLSGKFVPDDIMISMINEEIKAVGKQNWLLDGFPRTLTQAEKLQKIHPINLVLYLDVPFEVILNRVKNRWVHLPSGRVYNIGFNSPKVPGKDDVTGEPLSKRDDDKIEIVEKRLQEYSNATKPILTFYSNLGLLNTFQGNTTDEIWPNIKKVVAKFLLQ

SEQ ID NO: 2124 - DNA, 711 bp, Aspergillus nidulans FGSC A4
  CDS (1)..(711)
atgaccctcacaaccaggcagctcaagaaagctgcacggatcatcctcatcggcgctccgggggtggggaagggaacgcaaacggagaggctcctgtccaaatttcctgaacttgcttctataagctcaggcgacctcttgcgagagaatgtccggaggaggacagcactcgggcgggaagcagaagccacaattcaagcaggaaacctcgttcccgactccatgattctcaacctcatctcttccgaatttaactccagaggctggctctccaaatcacaatcatcaggctcgtctgtttccccctcagcgtccttcatcttagacgggtttcctcgcaccgcctcccaggccgcgagcttggactccctggtccccatcaactttgtcgtccacttagtcactccaccctctattattctctcccggatagcgtcgcgctgggtccacgagccgtctggaagggtgtacaataccgatttcaatgctccaaaggtccccggaaaggacgacgtaacaggagaaccattgactcagagggaagacgattcaatagagacatggaaacaacgactacataaattcgaagaaacaagcaaagctctacttcaacactatcaacaaaagggctgtctttggcgcgtggaaggcaactccagtgacgagatcactccgaagcttctagcggagtttgagcggaaattctgctag

SEQ ID NO: 2125 - protein, 236 aa, Aspergillus nidulans FGSC A4
MTLTTRQLKKAARIILIGAPGVGKGTQTERLLSKFPELASISSGDLLRENVRRRTALGREAEATIQAGNLVPDSMILNLISSEFNSRGWLSKSQSSGSSVSPSASFILDGFPRTASQAASLDSLVPINFVVHLVTPPSIILSRIASRWVHEPSGRVYNTDFNAPKVPGKDDVTGEPLTQREDDSIETWKQRLHKFEETSKALLQHYQQKGCLWRVEGNSSDEITPKLLAEFERKFC

SEQ ID NO: 2126 - DNA, 867 bp, Ustilago maydis 521
  CDS (1)..(867)
atggcgagcaccatcacggctcggatcttgcgcaccgcctcagctccagtatccgtgtctggactcagcttacctcgggggagtattcgacgattcagcttatcccaagcacgtggcaacagtgcagcggatacgcagatgcgaatgctcattgttggctcgcccggttccggcaagggaacgcaatccagccgtcttctcaagcactacagcttctcggttctatctgcaggtgacgttctgcgatcgcacatccaacagaaaaccgagatcggcttgaaagcagatgctgtgatcaaatcgggatctctgatgccggacagcgtcatgatggatctgattggatccgaagtttgctcgctctcgtcgcgcgattggctgctcgatggattcccgcgcacgctcggacaagcccaaatgctggattctctactcggatcgcaagccaaaccgctctcgcttgtcgtcaacctcgacgttcccgaaaccgtcatcctcgaccgaatcttgcaacgctggactcacttaccctcaggtcgtgtctacaacctcagctataacccgcccaagacccccggcaaagacgacatcaccggcgaacctctctcgaaaagacaagacgacaacgtcgaaactttcggcaaaaggttgaaatccttccacaaacaaaccgaacccatgctccaacattacagagagaaatccaggagcgtgctggatatcgattgtagagtacagcaggtaggcgatacgctgcaagacggtggagagctatttgtcaatctgagaggcgatgagagcaatcagatctggcctcatctgttgaacatcgtccagttgagattcccacagttgcagaaggcatag

SEQ ID NO: 2127 - protein, 288 aa, Ustilago maydis 521
MASTITARILRTASAPVSVSGLSLPRGSIRRFSLSQARGNSAADTQMRMLIVGSPGSGKGTQSSRLLKHYSFSVLSAGDVLRSHIQQKTEIGLKADAVIKSGSLMPDSVMMDLIGSEVCSLSSRDWLLDGFPRTLGQAQMLDSLLGSQAKPLSLVVNLDVPETVILDRILQRWTHLPSGRVYNLSYNPPKTPGKDDITGEPLSKRQDDNVETFGKRLKSFHKQTEPMLQHYREKSRSVLDIDCRVQQVGDTLQDGGELFVNLRGDESNQIWPHLLNIVQLRFPQLQKA

SEQ ID NO: 2128 - DNA, 663 bp, Strongylocentrotus purpuratus
  CDS (1)..(663)
atgtctcgtctgataagagctatgatcatgggaccacccggatcagggaagggcacgatgtcatctcggatagccaaagaattcaagctgaaccatctttcaagtggagatcttcttcggagtcagattcaacagcagacagctgttggactcctagccaagcagtttattgataaaggaagtctcgttccagatgatgtcatggttaagctcatcacacatgagctgaatggactaccaccaaattggttattagatggtttcccacgaactgtggcacaagcagaggctttgtcaaagaatcagcaaattgatactgttatgaacctagatgtgccctttgatgtcatagttcagaggttagaatggcggtggatacacccagggagtgatcgtgtctacaacttggactggaatcctcccaaagtaccttttaaggatgataaaacaggagaggatttggttcagagagaggatgacaaaccagagacagtaagagcaagacttgatctttatcaacaactcacaaaaccagtcctagaattctacagatccaaaggggttttaaccgagttccacggtacagagaccaatcagatctggcctcatgtccaagacttcttatcaggtcttctccagcatcctaccaagcaaagtgaatga

SEQ ID NO: 2129 - protein, 220 aa, Strongylocentrotus purpuratus
MSRLIRAMIMGPPGSGKGTMSSRIAKEFKLNHLSSGDLLRSQIQQQTAVGLLAKQFIDKGSLVPDDVMVKLITHELNGLPPNWLLDGFPRTVAQAEALSKNQQIDTVMNLDVPFDVIVQRLEWRWIHPGSDRVYNLDWNPPKVPFKDDKTGEDLVQREDDKPETVRARLDLYQQLTKPVLEFYRSKGVLTEFHGTETNQIWPHVQDFLSGLLQHPTKQSE

SEQ ID NO: 2130 - DNA, 750 bp, Strongylocentrotus purpuratus
  CDS (1)..(750)
atggctgccgcaatcaagagtcaggatccagttatgcaggagccagaggaagagggagtaccgcaagggatctgtggagtactccttggtccaccaggagctggaaaaggagtccaggcacccaagcttgcagagaagtactgcgtatgtcaccttgcaacgggtgacatgctgagggcggtcatcgcctcaggctcggacctcggtaagaagctgaaggtggtgttggacagcggtaagctggtcagcgatgagctggtggtggagatgattgataacaagctgggtgcacctgagtgcaagaatggcttccttctagatggcttcccaaggaccgttgtccaggctgagaagctggacgaacttctcacaaagaggaagactgccctggactcagtagtcgagttcggcattgacgattcacttcttgtgaaacgaatcaccggacggctgatccacaagcccagtgggaggtcttatcacacagaattcagccctccaaagaagcctatgactgatgatgtaactggtgagccactgatcaaacgatcagacgacaacgaggtaacgttgaaaacacgccttgaagcctaccacaagcagactgcacctctcgttgattattactccaaacgagggatccatcaacgggtagatgctgctagagcacccgacgcagtcttcgcaagcatccagtccatttttgctaaagcacagactggaagaaaagataaagttgtattcatttga

SEQ ID NO: 2131 - protein, 249 aa, Strongylocentrotus purpuratus
MAAAIKSQDPVMQEPEEEGVPQGICGVLLGPPGAGKGVQAPKLAEKYCVCHLATGDMLRAVIASGSDLGKKLKVVLDSGKLVSDELVVEMIDNKLGAPECKNGFLLDGFPRTVVQAEKLDELLTKRKTALDSVVEFGIDDSLLVKRITGRLIHKPSGRSYHTEFSPPKKPMTDDVTGEPLIKRSDDNEVTLKTRLEAYHKQTAPLVDYYSKRGIHQRVDAARAPDAVFASIQSIFAKAQTGRKDKVVFI

SEQ ID NO: 2132 - DNA, 669 bp, Candida albicans SC5314
  CDS (1)..(669): transl_table=12
atgaacccgcttcgaattctactcttgggtgcaccaggctcaggcaagggcacacagacgtcgaggttgttaaagcggtttacccaattacaatcgttgtcttctggtgatatcttgcgaaaccaaatacgtctggggtcagcaattggcggggaagcacagacgtatataaaaaatgggtcgttggtccctgacaatataatggttggtcttattactgcagagttggaaaagaaaaagtggttaacccaaagttctagctggttattggatgggtttcctaggactgtcaaccaagcaagggagttggatcgtgtgattcacgatcgtgctaattttaatttggtggttgagttggatgttgaccagaaagttattttacagcgaattgaggccagatggatccatgaggctagtgggagagtgtacaatttagactataacccgccaaaagtgccattcaaagatgacgttacgggcgaggcattgaccaaacgccaagacgatactgcacaagtgtttcaaaaacggttggaccagtataatgaggagattgagcctctcaaagtgttttacaagcagcaagggttgttgtatacagttagtggcgacacttctgatataatctaccccaagttggagaatttaatagtagataaaattatgtag

SEQ ID NO: 2133 - protein, 222 aa, Candida albicans SC5314
MNPLRILLLGAPGSGKGTQTSRLLKRFTQLQSLSSGDILRNQIRSGSAIGGEAQTYIKNGSLVPDNIMVGLITAELEKKKWLTQSSSWLLDGFPRTVNQARELDRVIHDRANFNLVVELDVDQKVILQRIEARWIHEASGRVYNLDYNPPKVPFKDDVTGEALTKRQDDTAQVFQKRLDQYNEEIEPLKVFYKQQGLLYTVSGDTSDIIYPKLENLIVDKIM

SEQ ID NO: 2134 - DNA, 678 bp, Tribolium castaneum
  CDS (1)..(678)
atggcaacaaaactgttcaaatctgtgattttgggcgccccagcgtccggcaaaggcacaatatcctcccgtatcgtgaaaaacttcaacctggagcacatctcaagcggggacaagctaagactgaacatacaaaaccaaacacccgtggggaaagaagtcgcaaagtatctccaatcaggccaattggtacccgacgatttaatgatcaaatttataacaggggagatccaagcagttgggaataaaccgtggctgcttgacggcttcccgaggacagtcacccaagccggtgctctgtggtcggtccagaccctggacgttgtcctgaacctggtggtgcccttcgacgtgatcattgaacgggtcaaagggcgatgggtgcatttgcccagtgggagggtgtacaacacggatttcaacgcgcctaaagtgccaggaaaggatgacgtcacgggagaggatttggtgcaacgggaggacgataagcccgaagttgtgaggaagcggctggagcactacgagaaattaacgaggcctgtggttgactattacagggataagggcgttctacaggagtttcaagggaacacgtctgatgagatctggcccaaggtgctagactgtctcgccacgtacataccgctcaacatcacggcgcagaaatcgaagatttaa

SEQ ID NO: 2135 - protein, 225 aa, Tribolium castaneum
MATKLFKSVILGAPASGKGTISSRIVKNFNLEHISSGDKLRLNIQNQTPVGKEVAKYLQSGQLVPDDLMIKFITGEIQAVGNKPWLLDGFPRTVTQAGALWSVQTLDVVLNLVVPFDVIIERVKGRWVHLPSGRVYNTDFNAPKVPGKDDVTGEDLVQREDDKPEVVRKRLEHYEKLTRPVVDYYRDKGVLQEFQGNTSDEIWPKVLDCLATYIPLNITAQKSKI

SEQ ID NO: 2136 - DNA, 720 bp, Tribolium castaneum
  CDS (1)..(720)
atgccttcagttgccgtgccaaaaatttcccgggaagagggcccaattggcattaatgccatactattggggcccccaggctcgggtaagggaactcaagcccccaaactgaaagaaaagtattgtgtgtgccacctttcaaccggagacatgctgcgtgctgaaatccagtctggctcagttctcggagccaaactgaagaaaatcatggacgaagggaagctcgtaagcgacgatcttgttgttaacatgatcgatagcaaccttgacaaacccgaatgcaagaacggattcttgctggatgggttcccgcgaaccgtggtgcaggctgaaaagcttgacgatttgctggagaagagggacacgagtttagacgctgtgatagaatttggaatagacgacagtttacttgtgcgccgcattacgggccgattaatccatccaaagagtggccgttcatatcacgaggagttccatccgcccaggaaacccatgacagacgacgttaccggtgagccccttgtgagacgctccgatgacacggcagaggctctgaagaagcgtctccaagcgtatcacacacaaactaggcctcttgtcgattattaccaaattcgggggatccaccaccgcatcgatgcgtccaaagccgccaacgaggtgttcagtaaaatcgacagcattttcatgcgggcacgcaagtcgagaattggattttaa

SEQ ID NO: 2137 - protein, 239 aa, Tribolium castaneum
MPSVAVPKISREEGPIGINAILLGPPGSGKGTQAPKLKEKYCVCHLSTGDMLRAEIQSGSVLGAKLKKIMDEGKLVSDDLVVNMIDSNLDKPECKNGFLLDGFPRTVVQAEKLDDLLEKRDTSLDAVIEFGIDDSLLVRRITGRLIHPKSGRSYHEEFHPPRKPMTDDVTGEPLVRRSDDTAEALKKRLQAYHTQTRPLVDYYQIRGIHHRIDASKAANEVFSKIDSIFMRARKSRIGF

SEQ ID NO: 2138 - DNA, 537 bp, Dichelobacter nodosus VCS1703A
  CDS (1)..(537): transl_table=11
atgaacattattattttgggtgcacccggttctggaaaaggaacacaatctactgaattaattaaaaaatataatctacaacacttatcaaccggtgatatgttacgcgcagaaattaacgcgcaatcagaattaggtttagcagcaaaaaaaattatggacgccggcgaacttgtctctgacgatatcgtcatcaatatgatcaaacaacgcttaagtgaccgcggcgcattatttgatggttttccgcggacaatcgcgcaagccgaatctttagacaaattattggctgaacggcaacaaaaaattgattacgtcattatgttagacgtcaacacggaagaaatcgtaaaaagaatgctggcgcgtggacgcgcggacgataacgaaaccacgattcgcaatcgtttatccgtttttgaacaacaaaccaaaccgcttatcgattattaccgcgctcaaggtaaattgcacacagttttaggcagcggcagcattaccgaaatcagccaacgcattcatcacgtcattaaataa

SEQ ID NO: 2139 - protein, 178 aa, Dichelobacter nodosus VCS1703A
MNIIILGAPGSGKGTQSTELIKKYNLQHLSTGDMLRAEINAQSELGLAAKKIMDAGELVSDDIVINMIKQRLSDRGALFDGFPRTIAQAESLDKLLAERQQKIDYVIMLDVNTEEIVKRMLARGRADDNETTIRNRLSVFEQQTKPLIDYYRAQGKLHTVLGSGSITEISQRIHHVIK

SEQ ID NO: 2140 - DNA, 705 bp, Salmonella enterica subsp. arizonae serovar 62:z4,z23:--
  CDS (1)..(705): transl_table=11
atggtggtatcgtttagcgcttttttaaaaatatcgacaacctttgaggggattttcgtaatgcgtattattctgcttggcgctccgggcgcgggtaaaggaactcaggctcagttcatcatggagaaatatggtattccgcaaatctccaccggcgatatgctgcgcgccgcagtgaaatcaggctccgagctgggcaaacaggcgaaagatatcatggacgccggtaaactggtgaccgatgaactggtgatcgcgctggttaaagagcgcatcgcacaggaagactgccgtaacggctttctgctggacggttttccgcgcacgatcccgcaggctgacgcgatgaaagacgcgggtattgtggtggattacgtgctggaatttgacgtaccggacgaattgatcgttgaccgtattgtcggtcgtcgcgtacacgccgcgtctggccgcgtttaccacgttaagtttaatccgccgaaagtagaaggcaaagatgacgtcaccggtgaagatctgacaactcgtaaagacgatcaggaagagaccgttcgcaaacgtctggtggaatatcatcagatgaccgcgccgctgattggctactaccagaaagaagcggaagcgggcaacactaaatacgccaaagttgacggtacgcaggccgttgccgacgtgcgtgctgacctggaaaaaattctcggttaa

SEQ ID NO: 2141 - protein, 234 aa, Salmonella enterica subsp. arizonae serovar 62:z4,z23:--
MVVSFSAFLKISTTFEGIFVMRIILLGAPGAGKGTQAQFIMEKYGIPQISTGDMLRAAVKSGSELGKQAKDIMDAGKLVTDELVIALVKERIAQEDCRNGFLLDGFPRTIPQADAMKDAGIVVDYVLEFDVPDELIVDRIVGRRVHAASGRVYHVKFNPPKVEGKDDVTGEDLTTRKDDQEETVRKRLVEYHQMTAPLIGYYQKEAEAGNTKYAKVDGTQAVADVRADLEKILG

SEQ ID NO: 2142 - DNA, 648 bp, Exiguobacterium sibiricum 255-15
  CDS (1)..(648): transl_table=11
atgaatcttgtattgatgggcttgccgggtgctggaaaaggaacgcaggctgcgaaaattatcgaagactacgccattccacacatctcgacaggcgacatgttccgtgcggcgatcaaagatcaaacaccgctcgggcaggaagcgaaatcgtacatggataaaggggaactcgttccggacgaggtcacaatcggcatcgtacgtgagcgtctcgccaaagaagactgtgccaatggttttcttcttgacggtttcccacgcacagtgaaacaagcggatgctcttgaagtattgcttgcggatctaaataaacaaatcgatcacgtcgttcacatcggtgtgaacccggagaaacttgtccctcgtttgacaggccgccggatttgcccgacatgtggagcaacgtatcatgtcatctataacccaccaaaagtggagggtgtctgtgatatcgacggatcagcacttgttcaacgtgaagatgatcaagaagaaacggttcgccgtcgtcttgaagtcaacgtcgctcaagcgcaacctttgattgacttttacgctgaaaaagggtatcttcgtaatttggacggtgatcgtccgattaatgaagtttattccgatgttcaagcacttcttggtggtcagtaa

SEQ ID NO: 2143 - protein, 215 aa, Exiguobacterium sibiricum 255-15
MNLVLMGLPGAGKGTQAAKIIEDYAIPHISTGDMFRAAIKDQTPLGQEAKSYMDKGELVPDEVTIGIVRERLAKEDCANGFLLDGFPRTVKQADALEVLLADLNKQIDHVVHIGVNPEKLVPRLTGRRICPTCGATYHVIYNPPKVEGVCDIDGSALVQREDDQEETVRRRLEVNVAQAQPLIDFYAEKGYLRNLDGDRPINEVYSDVQALLGGQ

SEQ ID NO: 2144 - DNA, 552 bp, Nostoc punctiforme PCC 73102
  CDS (1)..(552): transl_table=11
gtgacgcgactaatcttcttgggaccacctggagctggtaagggaacacaagctcaatcattggcgggacacttaaatattccccatatttctactggggaaatattaagacaagctatgaaagagcaaactcatctgggaatcaaagctcaaaactatgtaaatagcggcgagttagtacccgatcagctagtgcaggacttggtacaggagcgcctcaaccaaccagatgcagaaaatggttggattcttgatggttttccccgtaaagtgacgcaagcagcttttctagaagaattgctggaaacaatacatcagagtggcgaaagggtagttaatctagatgcaccagatgatgttgtggtagaacgtttgttagctagagggcgaaaagatgataccgaagaggtgattcgtcgtcggttagaagtgtaccgcgctgaaactgcacctttaattgattattatcgcgatcgccaaaaacttttaacagtcaatggcaatcagtcccaagaagaagtcactactgaactgcaaaaggtaatcgcttga

SEQ ID NO: 2145 - protein, 183 aa, Nostoc punctiforme PCC 73102
MTRLIFLGPPGAGKGTQAQSLAGHLNIPHISTGEILRQAMKEQTHLGIKAQNYVNSGELVPDQLVQDLVQERLNQPDAENGWILDGFPRKVTQAAFLEELLETIHQSGERVVNLDAPDDVVVERLLARGRKDDTEEVIRRRLEVYRAETAPLIDYYRDRQKLLTVNGNQSQEEVTTELQKVIA

SEQ ID NO: 2146 - DNA, 696 bp, Candidatus Protochlamydia amoebophila UWE25
  CDS (1)..(696): transl_table=11
atgattatgataaaaagcacaaaacctctagtcagtactcaagcagccgttgctttaattttacttggccctccaggctcgggaaaaggaactcaagcaaaaagacttgcgcatgaatatcaaattcctcacatctctagcggcgatctttttagagagcatatgtcaaaagaaacgattatcggtttgaaggcaaaagaatttattcaagcaggaaaattagtgcccgacgaatttgtaatggatatgctgtttgatcgacttgcccatccagattgtgctagaggatatttactagatggttttcctcgtactgtcgcacaagcagaagctttagctggtaaacgggatataaaaatccctctgattgttttatatttagaagttcccgatgcagtgattgttaagcgagcagaaggtcggcttgtttgtaagaattgcggaatggtttataatctttattcttcttctcctcgtcttcctggagtttgtgataaatgtgggggagagatttatcgtcgtccagatgatgatgccaacatagttttaaaaagattagaagtttatcatgagttgacaagccctcttattcaatattatactgatcaaggaattctgttaaaatttgatggaaatcaaaattctgatacggtttattaccagttgaaaaaatctattaatgaaaagtacttataa

SEQ ID NO: 2147 - protein, 231 aa, Candidatus Protochlamydia amoebophila UWE25
MIMIKSTKPLVSTQAAVALILLGPPGSGKGTQAKRLAHEYQIPHISSGDLFREHMSKETIIGLKAKEFIQAGKLVPDEFVMDMLFDRLAHPDCARGYLLDGFPRTVAQAEALAGKRDIKIPLIVLYLEVPDAVIVKRAEGRLVCKNCGMVYNLYSSSPRLPGVCDKCGGEIYRRPDDDANIVLKRLEVYHELTSPLIQYYTDQGILLKFDGNQNSDTVYYQLKKSINEKYL

SEQ ID NO: 2148 - DNA, 645 bp, Mannheimia succiniciproducens MBEL55E
  CDS (1)..(645): transl_table=11
atgaaaattattcttttaggcgcaccgggcgcaggcaaaggaacacaagctcaatttatcatgaacaaattcggtatcccgcaaatctcaacgggggatatgttccgcgccgcaatcaaagcgggcaccgaattaggtaaacaagctaaagcattaatggatgaaggcaaattagtgcctgacgaattaaccgtcgccctggttaaagaccgtattgcccaaccggattgtgccaacggtttcttattagacggtttcccgcgcaccattccgcaagcggatgcgttaaaagactcgggcgtgaacattgattacgtattagaattcgacgtgccggacgaagtgattgtagagcgcatgagcggtcgccgcgtgcaccaggcctccggtcgttcatatcatatcgtttataacccgccgaaggtggaaggcaaagacgatgtgaccggcgaagatttaattatccgcgccgacgacaaaccggaaaccgttttggatcgtttagcggtttatcacaaacaaacccagcctttggttgactactatcaagcggaagctaatgcaggcaacaccaaatacttccgtttagacggcaccaaaaaagtagaagaagtgagtgccgaattaaattccattttaggttaa

SEQ ID NO: 2149 - protein, 214 aa, Mannheimia succiniciproducens MBEL55E
MKIILLGAPGAGKGTQAQFIMNKFGIPQISTGDMFRAAIKAGTELGKQAKALMDEGKLVPDELTVALVKDRIAQPDCANGFLLDGFPRTIPQADALKDSGVNIDYVLEFDVPDEVIVERMSGRRVHQASGRSYHIVYNPPKVEGKDDVTGEDLIIRADDKPETVLDRLAVYHKQTQPLVDYYQAEANAGNTKYFRLDGTKKVEEVSAELNSILG

SEQ ID NO: 2150 - DNA, 711 bp, Legionella pneumophila subsp. pneumophila str. Philadelphia 1
  CDS (1)..(711): transl_table=11
atgttactatatttgaaagtatataatgattacgaattatttaaggagttttggatgcgattaatgcttttaggtggaccgggagccggcaaaggaacccaagcttcacttttaattaaccgttataaaattcctcaaatttctaccggtgacatgctgcgtgctgccatagcaaaaggtacgcccttaggattaagtgcccaaaaaatcatggaatcaggtgggttggtgtccgatgatattattatcgggttagtgaaggaaagactaaaaaaccctgattgtgatagaggattcctgtttgatggttttccaagaacattggtccaggccgaagctttaaaagatgcagaaatccatttggatcatgtgatagaaatagccgtcgatgacgaagaaataattgaacgcatcagcgggcgacgcattcaccagccttctggtagggtttatcacgttgtgaatcaaccgccgaaaaatccgggtgtagatgacatcacaggtgagcctctgattcaacgtgatgatgataaagaagaaaccatacgtaagcgcttacaggtttaccatagccaaacagcgccattggtgcaatattataaggaatgggctgaatctggctctaaagaagctccaaaatttcacactattagtggtacaggtacagtagagcaaatatttgacaacatcgtaacgatactcgaaacttag

SEQ ID NO: 2151 - protein, 236 aa, Legionella pneumophila subsp. pneumophila str. Philadelphia 1
MLLYLKVYNDYELFKEFWMRLMLLGGPGAGKGTQASLLINRYKIPQISTGDMLRAAIAKGTPLGLSAQKIMESGGLVSDDIIIGLVKERLKNPDCDRGFLFDGFPRTLVQAEALKDAEIHLDHVIEIAVDDEEIIERISGRRIHQPSGRVYHVVNQPPKNPGVDDITGEPLIQRDDDKEETIRKRLQVYHSQTAPLVQYYKEWAESGSKEAPKFHTISGTGTVEQIFDNIVTILET

SEQ ID NO: 2152 - DNA, 642 bp, Silicibacter pomeroyi DSS-3
  CDS (1)..(642): transl_table=11
atgaacatcattctgttgggcccgccgggtgcgggcaaaggcacccaggcgcggcatctggtcgagactcgcggcatgatccagctctcgaccggtgacatgctgcgcgcggcgcgcagctcgggcaccgagatgggcaagaaggtcgcggccatcatggacgcgggcaagctggtcaccgacgagatcgtgatcggcctgatcgaggaacagctgaccactcagacgggcgccggtttcatctttgacgggttcccgcgcaccctggcgcaggccgacgcgctggcggcgctgctggccaagctgggccagtcgctgcacaccgtgatcgagatccgcgtcgatgacgaggcgctggtcgatcgtatctcggggcggttcacctgcggtggctgcggcgaggtctatcacgacaagaccaagccgaccaaggtggacggtgtctgcgacaattgcggcagcaccgagatggtgcgccgggccgacgacaatgccgacagcctgcgcacgcgactgatggaatattacaagaaaacgtcacccttgatcggctattactatgccaagggcgatttgcgcccggtaaacggcttggccgatatcaaggaagtgaccgcctcgatcgaggccattctgggctga

SEQ ID NO: 2153 - protein, 213 aa, Silicibacter pomeroyi DSS-3
MNIILLGPPGAGKGTQARHLVETRGMIQLSTGDMLRAARSSGTEMGKKVAAIMDAGKLVTDEIVIGLIEEQLTTQTGAGFIFDGFPRTLAQADALAALLAKLGQSLHTVIEIRVDDEALVDRISGRFTCGGCGEVYHDKTKPTKVDGVCDNCGSTEMVRRADDNADSLRTRLMEYYKKTSPLIGYYYAKGDLRPVNGLADIKEVTASIEAILG

SEQ ID NO: 2154 - DNA, 669 bp, Silicibacter pomeroyi DSS-3
  CDS (1)..(669): transl_table=11
atgaccacccccgccgttctgatccttctcggccctccgggtgccgggaagggcacccaggcccgcatgctggaagaaaagttcgggctggtgcagctatcgaccggcgatctgctgcgcgccgccgtggccgccggaacccccgccggcaaacaggccaaggcggtgatggaggcgggtgatctggtttccgacgagatcgtcatcgccatcctgcgcgaccggctggctgaacctgactgtgccaagggcgtgatcctcgacggctttccccgcaccaccgtgcaggccgaggcgctggacacgctgctgtccgagagcggtcagcgcatcaacgccgccatcagcctcgaggtcgaggacggagagatggtgacccgcatttcgggccgctacacctgtggcggctgcggcgagggctatcacgacacgttcaagcagccggccgaggcaggcaaatgcgacaagtgcggcggcaccgagatgaagcggcgcgccgatgacaatgccgaaaccgtggccagccggctcgaggcctatcacgcgcagaccgcgccgctgatcgcctattacgacggccacggcgtgctgcaacggatcgacgccatgggagagatcgacgagatcgcccagggcctcgccaccatcgtcaagggggcgatggcctag

SEQ ID NO: 2155 - protein, 222 aa, Silicibacter pomeroyi DSS-3
MTTPAVLILLGPPGAGKGTQARMLEEKFGLVQLSTGDLLRAAVAAGTPAGKQAKAVMEAGDLVSDEIVIAILRDRLAEPDCAKGVILDGFPRTTVQAEALDTLLSESGQRINAAISLEVEDGEMVTRISGRYTCGGCGEGYHDTFKQPAEAGKCDKCGGTEMKRRADDNAETVASRLEAYHAQTAPLIAYYDGHGVLQRIDAMGEIDEIAQGLATIVKGAMA

SEQ ID NO: 2156 - DNA, 657 bp, Psychrobacter arcticus 273-4
  CDS (1)..(657): transl_table=11
atgatgcgtattattttgctaggtccaccaggcgccggtaaaggtacccaggctcagtttatttctaaagaatatgatatgccgcagatttcaactggtgatatgctgcgtgcagcaatcaaagaaggcagtgagcttggcaaacaagccaaagacgtgatgaacgctggtggtttggtttctgatgatcttatcattaacctagtgcaagaacgcatcgctaagcctgattgtgtcaatggctgtattttagatggttttccgcgtactattccacaagcgcaagcgcttgcagatgccaatgttacgattgaccatgtgatcgaaatcagcgtacctgatgatgaaatcgtcaagcgtttatcaggtcgtcgccaacatgccggctcaggtcgtgtgtatcacattgatcacaatccaccccagcaagaaggcattgatgatgtcacgggcgaagcgcttatccagcgtgaagacgataaagagtcaaccattcgcgaccgtttagccatttatcatgagcagacttctaccttagttggcttttatcaagacaaggctaaagaaggcggcgatgcccctaagtatgacaaattcgatggcacgcaaggtattgatgatgtaaaacaacaaatattctctgccctaaaaagctaa

SEQ ID NO: 2157 - protein, 218 aa, Psychrobacter arcticus 273-4
MMRIILLGPPGAGKGTQAQFISKEYDMPQISTGDMLRAAIKEGSELGKQAKDVMNAGGLVSDDLIINLVQERIAKPDCVNGCILDGFPRTIPQAQALADANVTIDHVIEISVPDDEIVKRLSGRRQHAGSGRVYHIDHNPPQQEGIDDVTGEALIQREDDKESTIRDRLAIYHEQTSTLVGFYQDKAKEGGDAPKYDKFDGTQGIDDVKQQIFSALKS

SEQ ID NO: 2158 - DNA, 555 bp, Anabaena variabilis ATCC 29413
  CDS (1)..(555): transl_table=11
gtgacgcgactaatcttcttggggccgccgggggcaggtaaaggaacacaagctcaaattttggctgaacatttacatattccgcatatttctactggggatatattgcggcaagccatgaaagagcaaactcccttgggaatcaaagctcaaagctatgtggatagtggcgagttggttcctgaccagttagtgcaagacttagtcgaggaacgtcttgagcaagcagatgctaaatctggctggatattagatggttttcctcgtaaagttacacaggcggcttttctggaagaattgctgcaaaaaactggtcaaggtggtgaaagagtagtcaatttagatgccccagatgatgttgtcgtcacacggttgttatccagaggcagaaaagacgacaccgaagaggtaatccgtcgccgcctggaaatctaccgcaacgacactgcacccttgattgattattacagcgatcgccaaaaacttttgaccatcaatggcgaccagtcccaagaagaagtcactcacgaattgaaagaaactttaggttcgtaa

SEQ ID NO: 2159 - protein, 184 aa, Anabaena variabilis ATCC 29413
MTRLIFLGPPGAGKGTQAQILAEHLHIPHISTGDILRQAMKEQTPLGIKAQSYVDSGELVPDQLVQDLVEERLEQADAKSGWILDGFPRKVTQAAFLEELLQKTGQGGERVVNLDAPDDVVVTRLLSRGRKDDTEEVIRRRLEIYRNDTAPLIDYYSDRQKLLTINGDQSQEEVTHELKETLGS

SEQ ID NO: 2160 - DNA, 669 bp, Geobacter metallireducens GS-15
  CDS (1)..(669): transl_table=11
gtgtctggaaatgaaaatgcgatgaatttgattttccttggtcctcctggcgcaggcaaggggacgcaagctaaccttcttgtcggtacgtatggcattccgcagatttctaccggtgatatcctgcggtcagccgttgcgaatcagacttcgctggggatcacggctaagtcctatatggatgccggttcgcttgttcctgatgaagttgtcgtgggtattgttaatgagcgacttgcggctgacgattgtgccgctggttttattcttgacggattcccgcggactgtggcccaggctgatgcgctgggtggcatgttgcagggggctgggcggtcgattgcccatgttatatcgttcgaagtggactatgcggtgttggttgatcgtctgacgggacggcgcatgtgtagggcatgtggtcgtggtttccatgttctgtatgatcggccatccgtggaagggcgctgtgatagttgtggcggggagctttatcagagagatgatgataaagtggagacaatccgtcgtcgtcttgatgtttatgacgagcagactgttccccttaagttgtattatgagcgtgcatcactgctgaggaaggttgatgctcttggctcaatagaatccgtttctcaatcaattcagaacatagtggcgagtaggtag

SEQ ID NO: 2161 - protein, 222 aa, Geobacter metallireducens GS-15
MSGNENAMNLIFLGPPGAGKGTQANLLVGTYGIPQISTGDILRSAVANQTSLGITAKSYMDAGSLVPDEVVVGIVNERLAADDCAAGFILDGFPRTVAQADALGGMLQGAGRSIAHVISFEVDYAVLVDRLTGRRMCRACGRGFHVLYDRPSVEGRCDSCGGELYQRDDDKVETIRRRLDVYDEQTVPLKLYYERASLLRKVDALGSIESVSQSIQNIVASR

SEQ ID NO: 2162 - DNA, 726 bp, Syntrophus aciditrophicus SB
  CDS (1)..(726): transl_table=11
ttgacccggtgccggattttgcctatagtcccaaaactgcaaacgaaattgaaagttaaggaggttatcaggaatatgaagattattcttttgggagcgccgggcgccgggaagggcacagtggccaaactgctgacggagtatgatggttccgtacagatttccacgggagacattctgcgggcggccgtcaaggaaggaacagagcttggacgggaggccaaaggctacatggatcggggtgatctggttcccgatgcgctgatcatgcggatgatggaaacccgccttcaacagccggattgtgcaaacggattcatcctggacggttttcccagaacgattccccaggccgaggccttgaagaagctcctggaaaaactgaatattcgactgaattttgtcgtcaatctggaagttccgcgggatgtgatcctggatcggctgaccactcggagaacctgctccaatccggattgtcaggaaatatacaatatcaaaagcaatcctcccctgcccgatggccgctgcaagaaatgcggcagtccgacgattcagcgggatgatgagaccgaagaagccattctgaaccgtctggaaacctacaatgagaaaaccgcgcctctgattggcttttatgaaagggaagggctgctcaagacattttcctcagtcagcagcgccgaaaccgtggaagccgttaaaaaggccttgaaggaatgctga

SEQ ID NO: 2163 - protein, 241 aa, Syntrophus aciditrophicus SB
MTRCRILPIVPKLQTKLKVKEVIRNMKIILLGAPGAGKGTVAKLLTEYDGSVQISTGDILRAAVKEGTELGREAKGYMDRGDLVPDALIMRMMETRLQQPDCANGFILDGFPRTIPQAEALKKLLEKLNIRLNFVVNLEVPRDVILDRLTTRRTCSNPDCQEIYNIKSNPPLPDGRCKKCGSPTIQRDDETEEAILNRLETYNEKTAPLIGFYEREGLLKTFSSVSSAETVEAVKKALKEC

SEQ ID NO: 2164 - DNA, 654 bp, Frankia sp. CcI3
  CDS (1)..(654): transl_table=11
gtgcgcctcgtactggtcgggccgcccggtgccggaaagggcacccaggccgcgttcattgcccaggcgcggtcgatccctaagatctccaccggggacatcttccgggcgaacgtgcgacagggaaccgaactgggcgtcaaggccaagaccttcatggatgccggtgatctcgtaccggacgagatcaccatcggtatggtccgcaaccgcttggccgaggacgacgcggtcaagggattcctgctcgatggttttcctcgtaacgtcccgcaggccgaggtgctcgggcagatgctcgatggcatggggacccgtctggacgtggtgctcgagctcgtcgtcgacgacgacgaggtggtgcgccggctgtccggtcggcgcacctgtcggaactgcggtcacatctggcacatcgacttcgacccgccgtcggtcgaaggcgtctgtgaccggtgtggtggcgagctgttccagcgcgacgacgatcggtcggagacggtccgccatcggctcgaggtctacgcggaccagacggcgccgctggtggcctactacgccgaaaagggcatcctgatcggtatcgacgccaccggaccggtggataacgtcaccgaccgcgcgctcgacgccctgcggcactacggcgactga

SEQ ID NO: 2165 - protein, 217 aa, Frankia sp. CcI3
MRLVLVGPPGAGKGTQAAFIAQARSIPKISTGDIFRANVRQGTELGVKAKTFMDAGDLVPDEITIGMVRNRLAEDDAVKGFLLDGFPRNVPQAEVLGQMLDGMGTRLDVVLELVVDDDEVVRRLSGRRTCRNCGHIWHIDFDPPSVEGVCDRCGGELFQRDDDRSETVRHRLEVYADQTAPLVAYYAEKGILIGIDATGPVDNVTDRALDALRHYGD

SEQ ID NO: 2166 - DNA, 711 bp, Acidobacteria bacterium Ellin345
  CDS (1)..(711): transl_table=11
gtgcagagtgatacgcgtaaagtcggtccggtgattttgttcggaccgcccggagcagggaaaggcacccaatccaagcgcctggtgcaggcgctgggggtcccgcagatctccacgggcgacatcctcagggagaacgtcgcgcaggaaacagggtggggaaaacaggccaaggccgccatggaaagtggccaactggtgtcagactttatcgtctgcgccatggttgccgaaaggcttggcaagccggacaccagccgagggtgtatcctcgacgggtttccgagaaccgtcgcccaggccgaatggctggataagttgttgacgggaaagctctttgaaagtactcgggtcagcttagcaagtaaccttccaccggttgtgatttcgatcaaggtggactataatcaattgctgcaacggcttaccggacgtcgttcgtgtccctcctgcggaacgatctacaacgtttactcgaagcctcccaaggtcgagggaatttgcgaccttgagggctcgaagcttgtaatgcggcaggatgaccgcgaagaagtcatcgccggacgtctgaaggcatacgagcagcagactcttcctcttgagaagtattaccgggctcaaggtcgtctgtttgaaatcaatggcgacgccccggttgagaagatcacagaggagatgttgagtctcatcgagcatggcaatcatttgtaa

SEQ ID NO: 2167 - protein, 236 aa, Acidobacteria bacterium Ellin345
MQSDTRKVGPVILFGPPGAGKGTQSKRLVQALGVPQISTGDILRENVAQETGWGKQAKAAMESGQLVSDFIVCAMVAERLGKPDTSRGCILDGFPRTVAQAEWLDKLLTGKLFESTRVSLASNLPPVVISIKVDYNQLLQRLTGRRSCPSCGTIYNVYSKPPKVEGICDLEGSKLVMRQDDREEVIAGRLKAYEQQTLPLEKYYRAQGRLFEINGDAPVEKITEEMLSLIEHGNHL

SEQ ID NO: 2168 - DNA, 753 bp, Acidobacteria bacterium Ellin345
  CDS (1)..(753): transl_table=11
atggctaccgagacgacgaaccatcgtgcggcctggctccagggcccatccgcaaaatgcgagactccgacgtgcaccgaacaagcctggcgcctcgttctcctgggtgctccgggggttggcaagggcacacaagctgaactcttgaacgagcagctccacgcgtgtcatctgtcgaccggagatgtcttccgcgccgccagcaagagcgcgggccaactcagcccggcaatgaaagccgcaagtgacttcatgcgcaaaggcgaactcgttcccgactcgacggtctgggagatggttcgagaacgcaaggagtgtttgcactgcgttggcggtttcatcctcgatggattcccccgcacgctcgggcaagccgagtcgctggcgagactgatgaaagaggaaggcatctcgctccacgccgtcatcaactacgatctgcccgcaactgagatcgtcgctcgcttgagcggacgccgcacctgcgaaggctgcaaggcggtttacaacgtcatcgaacggccgccgaaaaccgagggtctctgcgacaaatgtggtggtgcactcttccaacgcgaggatgacaagccggagtcaatcaaagtacgactcgacgcctacgacaagctcacctcaccgctgatcgatttttacaaaaagttgggagcgttggtgagcgtggatgcgcacggaacgccggcggaaatctgcgaccgcacgatactcgctttgcagcttaagacagcgaagtag

SEQ ID NO: 2169 - protein, 250 aa, Acidobacteria bacterium Ellin345
MATETTNHRAAWLQGPSAKCETPTCTEQAWRLVLLGAPGVGKGTQAELLNEQLHACHLSTGDVFRAASKSAGQLSPAMKAASDFMRKGELVPDSTVWEMVRERKECLHCVGGFILDGFPRTLGQAESLARLMKEEGISLHAVINYDLPATEIVARLSGRRTCEGCKAVYNVIERPPKTEGLCDKCGGALFQREDDKPESIKVRLDAYDKLTSPLIDFYKKLGALVSVDAHGTPAEICDRTILALQLKTAK

SEQ ID NO: 2170 - DNA, 684 bp, Silicibacter sp. TM1040
  CDS (1)..(684): transl_table=11
atgaccacagatgttatgacccgccccgcggtactgatcctgctgggccctccgggggctggcaaaggcacgcaggcgcggatgcttcaggaaaaatacggccttgtgcagctttccaccggggatcttctgcgtgcggccgtggctgcgggcaccgatgcgggcaaacaggccaaggcggtgatggatgcgggcggtctggtctctgacgagatcgtcatcgccatcctcaaggaccggatgaacgacgcagattgccgcaacggggtcatcctcgacggcttcccgcgcacaaccgtgcaggccaaagcgctggatgggctgctggcctcgaccggacagcggatcaacgcagcaatcagcctcgaagtgaatgacagcgcgatggtgacacggatctccgggcgctccacctgcgcggattgcggagaaggctatcacgacaccttcaagccgcctatgccgggtgaagtctgcgccaaatgcggcggtgaaaccctcacgcggcgcgctgatgatcgggcagagacagtggccagccggcttgaggcctatcatgcgcagaccgcaccgctgatcgcctattaccaagaggccggcgtgctgaaatccgtggatgcaatggcggaaatcagcagcgttgcgacgcagatatcctctgtggtggaaacgatcctgcactaa

SEQ ID NO: 2171 - protein, 227 aa, Silicibacter sp. TM1040
MTTDVMTRPAVLILLGPPGAGKGTQARMLQEKYGLVQLSTGDLLRAAVAAGTDAGKQAKAVMDAGGLVSDEIVIAILKDRMNDADCRNGVILDGFPRTTVQAKALDGLLASTGQRINAAISLEVNDSAMVTRISGRSTCADCGEGYHDTFKPPMPGEVCAKCGGETLTRRADDRAETVASRLEAYHAQTAPLIAYYQEAGVLKSVDAMAEISSVATQISSVVETILH

SEQ ID NO: 2172 - DNA, 648 bp, Myxococcus xanthus DK 1622
  CDS (1)..(648): transl_table=11
atgaacctgatcctgttggggccgccgaacgcggggaagggcacgcaggcgaagcgactgttcgccgacttccagatcccccagatctccaccggagacatcctccgcaaggcagtcgcggagggcacggagctgggcagggtggccggcccgctgatggccgccgggcagtacgtcccggacgacgtcgtgattggcatcgtcgaggagcgcctcaaggaggcggacgtggccaagggcttcgtcctggacggctttccgcgcacgccgggccaggcggacgcgttggacaagatgctggggcgcctgggcaagcagctgagcgccgtcatctcgctcgaggtgccgcacgcgaagctggtggagcgcggctccggccggcgggtctgcccggtggacggcagcgtctaccacgtctaccagagcccgccgaagcgggcggggtactgtgacaagtgcaataccgggcttgtccagcgcccggatgatatgcccgaggtcatcgagaagcgccttcagaagtacgactcggagacggcgccgctgaaggccttctatgagaagaagggtctgctcaagagcgtggacggcgtgggcacgcccgagggcatctacgaggagatcaaggccgctgcgggcaaggcctga

SEQ ID NO: 2173 - protein, 215 aa, Myxococcus xanthus DK 1622
MNLILLGPPNAGKGTQAKRLFADFQIPQISTGDILRKAVAEGTELGRVAGPLMAAGQYVPDDVVIGIVEERLKEADVAKGFVLDGFPRTPGQADALDKMLGRLGKQLSAVISLEVPHAKLVERGSGRRVCPVDGSVYHVYQSPPKRAGYCDKCNTGLVQRPDDMPEVIEKRLQKYDSETAPLKAFYEKKGLLKSVDGVGTPEGIYEEIKAAAGKA

SEQ ID NO: 2174 - DNA, 627 bp, Rubrobacter xylanophilus DSM 9941
  CDS (1)..(627): transl_table=11
atgaggatcatccttctgggcccccagggggcgggcaaggggacgcaggcggcccggctctcggagaggacgggggccaggcacatctcgaccggggatctggtgcgggccgagatcaaggccggcacggagctgggcaggaaggtccaggagtacaacgaccgcggcgagctggtgcccgacgagatcatcgtggagatggccaagccgcacctgcgggaggcgggctcctggatcctggacggcttcccgcgcaccgaggcgcaggcgcgggcgctggacgaggccctggaggagctgggggtgggcctcgacagggtggtggcgctggaggcccccgacgaggtgctcgtccggcgcctctccgggcggcgccagagcgaggcgaccggccggatctaccacctcgagcacgacccgccgcccccggacgacccgggccccttcgtccagcgcaaggacgacaccgaggaggccatccggcgccggctcaggctctaccacgagcagacggagcccctgaagggctactacgccgagcgggggctgctggccaccgtggacgccacccgcagcatagaggaggtaaccgaggagctgctgcgggtgctgggggtgggcgcttga

SEQ ID NO: 2175 - protein, 208 aa, Rubrobacter xylanophilus DSM 9941
MRIILLGPQGAGKGTQAARLSERTGARHISTGDLVRAEIKAGTELGRKVQEYNDRGELVPDEIIVEMAKPHLREAGSWILDGFPRTEAQARALDEALEELGVGLDRVVALEAPDEVLVRRLSGRRQSEATGRIYHLEHDPPPPDDPGPFVQRKDDTEEAIRRRLRLYHEQTEPLKGYYAERGLLATVDATRSIEEVTEELLRVLGVGA

SEQ ID NO: 2176 - DNA, 660 bp, Pediococcus pentosaceus ATCC 25745
  CDS (1)..(660): transl_table=11
atgagtaaattaaacctcgttttgatgggtcttccaggtgctggtaaaggtacacaggctcagagaattattgaggatttcaaaattccacatatttcaactggtgacattttccgtgaagctatgaaaaatgaaaccgaaatgggtgtggaagcaaagaagttcattgataagggtgaacttgttcccgatagtgtaactaacgggatcgtcgaagatcgtcttgcaatggacgatgtcaacgatggttttatgcttgatggttttcctagaaatatcgatcaagctaaggcgctagatgaaatgacatctcgtttaaacaaaccacttacagcagtgattaacattcatgttgatcctgaagttttggttgaaagactatctggcagatttatttgtaaaaattgtggagctacttatcataagctttacaatccaccaaaggttgaaggaacttgtgatgtttgcggacatcacgaattcttccaacgtgaggacgacaagccagaaactgtaaaaaatcgcattgctgttaatactaaacttaacactccgttgatttcttactatgaagaaaagcatctcctttacaacattaatggcgatcaggatatcaacgatgtttattctgaagtcaaaaaagtattagaggctctctaa

SEQ ID NO: 2177 - protein, 219 aa, Pediococcus pentosaceus ATCC 25745
MSKLNLVLMGLPGAGKGTQAQRIIEDFKIPHISTGDIFREAMKNETEMGVEAKKFIDKGELVPDSVTNGIVEDRLAMDDVNDGFMLDGFPRNIDQAKALDEMTSRLNKPLTAVINIHVDPEVLVERLSGRFICKNCGATYHKLYNPPKVEGTCDVCGHHEFFQREDDKPETVKNRIAVNTKLNTPLISYYEEKHLLYNINGDQDINDVYSEVKKVLEAL

SEQ ID NO: 2178 - DNA, 603 bp, Magnetospirillum magnetotacticum MS-1
  CDS (1)..(603): transl_table=11
atgcggatcattctgctcggaccgccgggagcggggaagggcacgcagtccgagcgaatcgtggagcgctaccgcgtaccgcagctctccaccggcgacatgctgcgcgccgccgtcgccgccgagacgccggtgggcctcgaagcgaagtcgatcatggagagcggcggcctggtgccggacgcggtggtggtcgggatcgtcgccgaccgcatcgaggaggccgatgccaagaatggcttcatcctcgacggtttcccccgcacggtggagcaagccaaggccctcgacgcgatgctggcggagaagggcatcgccctcgacgccgtcgtcgaattcgtcgtggacgagaatgccctcgtcggccgcatcgccaagcgggccgaggagacggcggcccggggccagccggtgcgcaaggacgacacgccggaggtcttcaagacccgcctcgatgcttacaagaagcagacggcgccgctgtcggactactatgccggcaccggtctgttgcggaaggtcgatggcatgaagccgatcgatgaggtcacgggcgatttgacggggcttctcgacggtttccgcgagaaggcggcctcctga

SEQ ID NO: 2179 - protein, 200 aa, Magnetospirillum magnetotacticum MS-1
MRIILLGPPGAGKGTQSERIVERYRVPQLSTGDMLRAAVAAETPVGLEAKSIMESGGLVPDAVVVGIVADRIEEADAKNGFILDGFPRTVEQAKALDAMLAEKGIALDAVVEFVVDENALVGRIAKRAEETAARGQPVRKDDTPEVFKTRLDAYKKQTAPLSDYYAGTGLLRKVDGMKPIDEVTGDLTGLLDGFREKAAS

SEQ ID NO: 2180 - DNA, 654 bp, Magnetospirillum magnetotacticum MS-1
  CDS (1)..(654): transl_table=11
atgaatctcgttctgttgggcccgcccggtggcggcaagggaacccaggccaagcgtcttcaagagaagtatggcctggtacagctctccaccggcgacatgctgcgcgccgccgtggccgccggttcggacgttggcaagaaggccaaggccgtgatggatgccggtcagctggtgtccgacgagatcgtcatcgccatcatcgatgagcgcctggaccagcccgatgtggccaagggcgccatcttcgatggttttccccggaccgttgcccaggccgaggcgctggacgccatgatggcccgtaagggaaagaagctggaattcgccatcgagatccaggttcccgacgcctatatcgtcgagcgcattaccggccgctatacctgcgccaagtgcggcgctggctatcacgacaagtttcagctgcccaaggtcgcaggcaagtgcgattcctgtggcggcaccgagttcgcgcgccgtcccgacgacaatgtcgagaccgtgaccaagcggctcgacgcctatcacgcccagaccgctccgctgctgccctattacgacaagaagggcgcgctgaagctggtcgacggcaccatggacattgccgacgtgaccaaggccctggaagggattttggacgcggcgaagtaa

SEQ ID NO: 2181 - protein, 217 aa, Magnetospirillum magnetotacticum MS-1
MNLVLLGPPGGGKGTQAKRLQEKYGLVQLSTGDMLRAAVAAGSDVGKKAKAVMDAGQLVSDEIVIAIIDERLDQPDVAKGAIFDGFPRTVAQAEALDAMMARKGKKLEFAIEIQVPDAYIVERITGRYTCAKCGAGYHDKFQLPKVAGKCDSCGGTEFARRPDDNVETVTKRLDAYHAQTAPLLPYYDKKGALKLVDGTMDIADVTKALEGILDAAK

SEQ ID NO: 2182 - DNA, 639 bp, Rickettsia sibirica 246
  CDS (1)..(639): transl_table=11
gtgatagtaatttttttaggtcctccaggagcgggaaagggcacacaaggaaaaaagatagctaaaaaaattgatttactacatatagcaatcggtgatatatttagaacaattattaaaacatcaactagtgaagcagagttaattaataattatgttaagcaaggggagcttatccctaatgaaatagttaatcaagtaatcaaaaattttttattatcctctgaatataaaaacggctacatattagatggatatccgcgtaatttagagcaagcgaaattttttgaatcatttattaaagaaaaaattaaaataatatattttgatgtttcagatgaattattaattaaaagaattttaggaagatatagttgtaaaaattgcggtaaaatatataatagatacttcttgcagcctaaaactgataatgtatgtgatgtttgcggttcaagtacatttgattatagaaaagacgataatgaagaagtaataaaaaaaagaattgaagtatataaaacagaaacatatccgttaatagattattataaaaatagtggtaatttttatatagttaatggaagtaaaaatgaacaagaaatagaaattgatatacagaaaatactaaaaataaattga

SEQ ID NO: 2183 - protein, 212 aa, Rickettsia sibirica 246
MIVIFLGPPGAGKGTQGKKIAKKIDLLHIAIGDIFRTIIKTSTSEAELINNYVKQGELIPNEIVNQVIKNFLLSSEYKNGYILDGYPRNLEQAKFFESFIKEKIKIIYFDVSDELLIKRILGRYSCKNCGKIYNRYFLQPKTDNVCDVCGSSTFDYRKDDNEEVIKKRIEVYKTETYPLIDYYKNSGNFYIVNGSKNEQEIEIDIQKILKIN

SEQ ID NO: 2184 - DNA, 636 bp, Fusobacterium nucleatum subsp. vincentii ATCC 49256
  CDS (1)..(636): transl_table=11
atgattaatttgaatttagtattatttggagcacctggagcaggaaaaggaacacaagcaaaatttattgtcgataaatatggaatacctcaaatttcaacaggggatatattgagagtagccgtagctaataaaacaaaattaggtttagaagctaaaaaatttatggatgctggacaattagttcctgatgaagttgttaatggtttagttgctgaaagattagcagaaaaagattgtgaaaaaggttttataatggatggttttccaagaactgttgttcaagcaaaagccttagatgaaatattgacaaaattaggaaaacaaatagaaaaagttatagctttaaatgtaccagataaagatataatagaaagaattacaggaagaagaacatcaaaagtaactggaaaaatttatcatattaagtttaacccaccagttgatgaaaagccagaagatttagttcaaagagcagatgacacagaagaagttgttgtaaaaagattagaaacttatcataatcaaactgcaccagttttagattattacaaggcacaaaataaggtaactgaaattgatggaactaaaaaattagaagatattacaaaagatatatttaaaattttaggatag

SEQ ID NO: 2185 - protein, 211 aa, Fusobacterium nucleatum subsp. vincentii ATCC 49256
MINLNLVLFGAPGAGKGTQAKFIVDKYGIPQISTGDILRVAVANKTKLGLEAKKFMDAGQLVPDEVVNGLVAERLAEKDCEKGFIMDGFPRTVVQAKALDEILTKLGKQIEKVIALNVPDKDIIERITGRRTSKVTGKIYHIKFNPPVDEKPEDLVQRADDTEEVVVKRLETYHNQTAPVLDYYKAQNKVTEIDGTKKLEDITKDIFKILG

SEQ ID NO: 2186 - DNA, 657 bp, Prosthecochloris aestuarii DSM 271
  CDS (1)..(657): transl_table=11
atgaggattatcttactgggggcacccggcgcaggcaaaggaactcaggctcaattcatttcgacagctttcaatatcccgcagatttcaaccggagatatgctgcgggcagcgattcaagcccaaacccctttaggacttgaagccaaaaaggtcatggatgacggaaaacttgtatcggatgagatcattctgaaactggtcaaggaacgaatcaatgagccggactgccagcagggttgcctcttcgatggttttccccgtacactggctcaggctgaggctctcaggcaggaaaatatcactatcaatcacgtcatagaaatagatgtcgataacgaagaaattatccaaagaatgagtggccgaagagtccatcttgcctctggcagaacctatcatgtcattttcaatcctcccaagaaagaaggagttgacgacataacaggagagccgctgatccaacgcgaagacgataccgaagagaccgtacgcaaacgccttgaaatatatcacaatcaaacagctccgcttattgattactaccgggagtgggaagagaaagatttgctgcaagctcccaaattcagctcaatcaaaggaagcgggagcgttgaagagatccgcgaaaaaatttttactgagctcaatgcatga

SEQ ID NO: 2187 - protein, 218 aa, Prosthecochloris aestuarii DSM 271
MRIILLGAPGAGKGTQAQFISTAFNIPQISTGDMLRAAIQAQTPLGLEAKKVMDDGKLVSDEIILKLVKERINEPDCQQGCLFDGFPRTLAQAEALRQENITINHVIEIDVDNEEIIQRMSGRRVHLASGRTYHVIFNPPKKEGVDDITGEPLIQREDDTEETVRKRLEIYHNQTAPLIDYYREWEEKDLLQAPKFSSIKGSGSVEEIREKIFTELNA

SEQ ID NO: 2188 - DNA, 576 bp, Roseovarius nubinhibens ISM
  CDS (1)..(576): transl_table=11
atgaatattatccttctcggaccgccgggtgccggcaaaggcactcaagcgcaactcctcgtgcaagagcgcgacatgattcagctgtcgaccggcgacatgctgcgcgaggccaaggacagcggcaccgagatgggtaagatcgtcgccgatgtgatggcgcggggcgagctcgtcaccgacgagatcgtcatcggcctgatccgcgaaaagctcgatggggaccgcaagggcgggttcatcttcgacgggttcccgcgcactctggcccaggccgatgcgctggcgggcctgctggccgagaagggcgagagcctcgatgcggtgatcgagatgcaggtggatgacgagacgctggtcaagcggatcgtcaaccgcgctgaagaggcccgcgccgccggcaagccggtgcgcgccgatgacaacgccgacagcgtacgcatccggctcatggaatattacaagaagaccgcgccgctcattggctattaccatgccaaggggcagctcaaatcggtggacggtctgggcgccatcgacgaggtgcgcggcgcgatcggctcgctgctgggctaa

SEQ ID NO: 2189 - protein, 191 aa, Roseovarius nubinhibens ISM
MNIILLGPPGAGKGTQAQLLVQERDMIQLSTGDMLREAKDSGTEMGKIVADVMARGELVTDEIVIGLIREKLDGDRKGGFIFDGFPRTLAQADALAGLLAEKGESLDAVIEMQVDDETLVKRIVNRAEEARAAGKPVRADDNADSVRIRLMEYYKKTAPLIGYYHAKGQLKSVDGLGAIDEVRGAIGSLLG

SEQ ID NO: 2190 - DNA, 645 bp, Oceanicola batsensis HTCC2597
  CDS (1)..(645): transl_table=11
atgaacatcattcttcttggaccgccgggtgccggcaagggcacccaggcccggaagcttgtcgacgaccgcgacatgatccagctgtcgaccggcgacatgctgcgcgaggcgcggacctcgggcacggagatgggcaagatcgtcgcggacgtgatggacagcggcaagctggtcaccgacgacatcgtaatcggcctgatccgcgagaagctggaaggcgagaagaagggcggtttcatcttcgacggcttcccccggactctcgcccaggccgacgcgctggagcagctgctcggcgattgcggcgagtcgctggacgcggtcatcgagctgcgggtcgaggaagaggcgctggtctcgcggatcacgggccggtcgacctgcgcgaactgcggcgaggtctaccatgacgagaccaagccgatcccggcggacggcaaatgctctgtctgcggcggaaccgagttcaagcgccgggcggatgacaacgaggaaagcctcaagacgcgcctgatggaatactacaagcagacctcgccgctgatcgggtactattatgcgaagggcaagctgcacggtgttgatggccttgcggaaatggacgaggtcgagacctcgatcaagggtatcctcgacgcctga

SEQ ID NO: 2191 - protein, 214 aa, Oceanicola batsensis HTCC2597
MNIILLGPPGAGKGTQARKLVDDRDMIQLSTGDMLREARTSGTEMGKIVADVMDSGKLVTDDIVIGLIREKLEGEKKGGFIFDGFPRTLAQADALEQLLGDCGESLDAVIELRVEEEALVSRITGRSTCANCGEVYHDETKPIPADGKCSVCGGTEFKRRADDNEESLKTRLMEYYKQTSPLIGYYYAKGKLHGVDGLAEMDEVETSIKGILDA

SEQ ID NO: 2192 - DNA, 645 bp, Erythrobacter sp. NAP1
  CDS (1)..(645): transl_table=11
gtgaacatcattcttcttggccctccgggcgcgggcaagggcacgcaaagcgctggcttggtagagcgccacggcatgaagcagctttcaaccggcgacatgctccgcgctgcggtcaaggcaggcactccggtcgggcttcaggcaaaagcggtcatggatcgcggcgagctggtttcggacgagatcgtctcgaacctgatcgacgagaaccttgccgccatgcccgctgaccagggcgcgatcttcgacggctatccgcgcaccgcagcgcaagcaggcgaccttgaccgtatccttgcgaaaaatggccgcagtctcgatcgcgtgatcgagcttgaagtgaatgtcgatgctctggttgaacgcatcacggggcgcttttcctgcgcaaattgcggcgcgctttatcacgataccgcgaacccgcccgcgaaagagggcgtgtgcgacgtgtgccactcgaccgagttcaagcgccgccctgacgacaacgaggaaaccgtgcgcacccgcatggaggaataccgcgccaagaccgcgccgatccttccgggctatgaagagcgcggcatcgtctcgcgcgtcgacggcatggcggaaatcgctgaagtggctagcgccatcgacgcaattcttgcctga

SEQ ID NO: 2193 - protein, 214 aa, Erythrobacter sp. NAP1
MNIILLGPPGAGKGTQSAGLVERHGMKQLSTGDMLRAAVKAGTPVGLQAKAVMDRGELVSDEIVSNLIDENLAAMPADQGAIFDGYPRTAAQAGDLDRILAKNGRSLDRVIELEVNVDALVERITGRFSCANCGALYHDTANPPAKEGVCDVCHSTEFKRRPDDNEETVRTRMEEYRAKTAPILPGYEERGIVSRVDGMAEIAEVASAIDAILA

SEQ ID NO: 2194 - DNA, 558 bp, Synechococcus sp. RS9917
  CDS (1)..(558): transl_table=11
atgaagcaacggctcctcttcctcggccctcccggcgccggcaagggcacccaggcggcccgactgtgtgccgcccatggcatgcagcatctctccaccggcgatctgctgcgctcggaggtggccgccggaaccgccctaggacaggaagctgaagcggtgatgaaccgcggcgaactggtgagtgatgcgctggttttggcgatcgtgaaaggccagctcggccgcctcagcacaggcggttggctgctcgacggatttcctcgcacggtggcccaggcggaagccctcaccccgctgctggcggaactccaacaacccctcgaagcggtgctactcctcgagctcgatgatgccgtgctgatcgagcgcatgctggcgcgcggccgggccgatgacaccgaagccgtgatccgccatcggctggaggtctaccgggagaaaacagcacccctgatcgacttctaccgtcaacagggtctgctctgctcggtggaagcgcagggcagcatcgaggcgattaccaagcggattgaagccacccttcaaggggcttga

SEQ ID NO: 2195 - protein, 185 aa, Synechococcus sp. RS9917
MKQRLLFLGPPGAGKGTQAARLCAAHGMQHLSTGDLLRSEVAAGTALGQEAEAVMNRGELVSDALVLAIVKGQLGRLSTGGWLLDGFPRTVAQAEALTPLLAELQQPLEAVLLLELDDAVLIERMLARGRADDTEAVIRHRLEVYREKTAPLIDFYRQQGLLCSVEAQGSIEAITKRIEATLQGA

SEQ ID NO: 2196 - DNA, 552 bp, Synechococcus sp. WH 7805
  CDS (1)..(552): transl_table=11
atgaagcaacgtctgctgttcatcggccccccaggggcaggcaagggaacccaggcttcacgcctctgcgacacccacggacttcgccatctctccacaggcgacctgctgcgctctgaggtttcagcaggcagcgccctgggcaaggaagccgaagcggtcatgaaccgcggcgagctcgtcagcgatgacctggttctcgccatcgtccgttctcagctcacagcgctgaagggccagggctggcttctcgatggctttcctcgcaatgttgcgcaagccgaagcactggagcccctgctcggagaactgcaacaaagcatcgagacggtcgttcttctggaactcgacgacgaggtccttgtcgagcgactgcttgccaggggtcgagcggacgacaacgaatcggtcattcgcaatcgtctcgaggtgtatcgcaagcagaccgccccgctgatcgactactaccgagccaagggactgttgatctccatcgacgcccagggcagcgtggaagacatcaccacaagacttgaagcaaatctggcttga

SEQ ID NO: 2197 - protein, 183 aa, Synechococcus sp. WH 7805
MKQRLLFIGPPGAGKGTQASRLCDTHGLRHLSTGDLLRSEVSAGSALGKEAEAVMNRGELVSDDLVLAIVRSQLTALKGQGWLLDGFPRNVAQAEALEPLLGELQQSIETVVLLELDDEVLVERLLARGRADDNESVIRNRLEVYRKQTAPLIDYYRAKGLLISIDAQGSVEDITTRLEANLA

SEQ ID NO: 2198 - DNA, 645 bp, Pseudoalteromonas tunicata D2
  CDS (1)..(645): transl_table=11
atgcgcattattcttttgggcgcaccaggtgcgggtaaaggtactcaagctcaatttctgatggaaaaattttcgattccacagatttctacgggcgatatgttacgtgctgcaattaaagaaggcacaccacttggtttagaagccaaaaaagtgatggatgcaggtcaattgatttctgatgatatcatcattggtcttgttaaagagcgtattgctaaagctgattgtgaaaaaggctttttgttagacggtttcccacgcactattccacaagcagatgcaatgaaagaaaatggcgttgttgttgatcacgttattgaatttgatgttgctgatgaagtgattgttgagcgtatggctggacgtcgtgttcacccaggttcaggccgtgtttatcatgttgtttataatccttcaaaagttgaaggtaaagatgatgtaaccggtgaagacttgatcattcgtgatgatgatgttgaagaaacagtgcgtaaacgtttaggtatttaccatgaccaaactaagccacttgtcagctattatcaggcagaagctgatgcgggcaatactcagtaccataaattagatggtacacaagctgttgatgcggtaagcgcccaattagctgagttattagggtaa

SEQ ID NO: 2199 - protein, 214 aa, Pseudoalteromonas tunicata D2
MRIILLGAPGAGKGTQAQFLMEKFSIPQISTGDMLRAAIKEGTPLGLEAKKVMDAGQLISDDIIIGLVKERIAKADCEKGFLLDGFPRTIPQADAMKENGVVVDHVIEFDVADEVIVERMAGRRVHPGSGRVYHVVYNPSKVEGKDDVTGEDLIIRDDDVEETVRKRLGIYHDQTKPLVSYYQAEADAGNTQYHKLDGTQAVDAVSAQLAELLG

SEQ ID NO: 2200 - DNA, 645 bp, Photobacterium sp. SKA34
  CDS (1)..(645): transl_table=11
atgcgcatcattcttctgggcgctccaggtgcaggtaaaggtactcaagctcaattcattatggaaaagtttggtattcctcaaatttcaactggtgacatgctacgtgctgcaatcaaagcaggtactgagctaggcaaacaagcgaaatcagtgatcgatgcaggtcaattggtatctgacgatatcattcttggtcttgtaaaagagcgtattgcggcagatgattgtgcaaaaggcttcctactagatggtttcccacgcacaattcctcaagctgatggcctaaaagaaaacggcgttaacgttgattacgttatcgagtttgatgtggctgacgatgtgatcgttcagcgtatggcgggtcgtcgtgctcaccttgcttctggtcgtacttaccacgctgtttataacccaccaaaggttgaaggtaaagatgacgtaacaggcgaagagcttgttatccgtgaagatgacaaagaagaaacagttcgtgcacgtctaaacgtatatcacacgcaaactgcaccacttatcgagtactacggtaaagaagcagaagcaggcaacactaagtaccttaagttcgacggtacactccctgttgctgaagttagcgctgcgctagaaaaagcattagcttaa

SEQ ID NO: 2201 - protein, 214 aa, Photobacterium sp. SKA34
MRIILLGAPGAGKGTQAQFIMEKFGIPQISTGDMLRAAIKAGTELGKQAKSVIDAGQLVSDDIILGLVKERIAADDCAKGFLLDGFPRTIPQADGLKENGVNVDYVIEFDVADDVIVQRMAGRRAHLASGRTYHAVYNPPKVEGKDDVTGEELVIREDDKEETVRARLNVYHTQTAPLIEYYGKEAEAGNTKYLKFDGTLPVAEVSAALEKALA

SEQ ID NO: 2202 - DNA, 660 bp, Neptuniibacter caesariensis
  CDS (1)..(660): transl_table=11
atgcgtattatccttctgggcgcaccaggcgcaggtaaaggtactcaggcacagtacatttgtgaaaagtacaacattccacagatctctactggcgatatgctgcgtgccgcggtaaaagcgggtaccccgctgggcgtaaaagcaaaagaagttatggatgcgggccagttggtttccgatgacattatcatcggtctggtaaaagagcgtattgctgaagcagattgtgcaaatggtttcctgtttgatggtttcccacgtacgattcctcaggcagatgcgctgaaagatgcaggtgtaaagatcgatgcggttgctgagatcgatgtagcggatgaagagattgttaagcgtatggcaggccgccgtgtgcacccaggttctggccgtacttaccacgttgtattcaatccgcctaaagttgaaggtaaggatgatgtgacgggtgaagatctggttcagcgcgctgatgatgctgaagataccgtacgtgaccgtctgaaagtttaccatgaccagacagctcctctgattacttactacaagggctgggctgaagaagatgcagctgctgcaccttcttacgtttatgtacctggcgtaggttctgtcgaagatattcgcgatgcggtatttgcaggtctggaaaacgcttaa

SEQ ID NO: 2203 - protein, 219 aa, Neptuniibacter caesariensis
MRIILLGAPGAGKGTQAQYICEKYNIPQISTGDMLRAAVKAGTPLGVKAKEVMDAGQLVSDDIIIGLVKERIAEADCANGFLFDGFPRTIPQADALKDAGVKIDAVAEIDVADEEIVKRMAGRRVHPGSGRTYHVVFNPPKVEGKDDVTGEDLVQRADDAEDTVRDRLKVYHDQTAPLITYYKGWAEEDAAAAPSYVYVPGVGSVEDIRDAVFAGLENA

SEQ ID NO: 2204 - DNA, 648 bp, delta proteobacterium MLMS-1
  CDS (1)..(648): transl_table=11
atgaaattgattcttttgggcgcccccggcgccggtaaaggtacggtggccaagatgctcaccgccatcgacggctcggtccagatttccaccggcgacatcctgcggggtgaggtgcaggccggcagcgaactgggcaaacaggcccaggaatacatgaaccggggtgacctggtgcccgattccctgatcatggggatcatggaaaaacggctccagcagcccgattgcgccaaagggtttctgctcgacggctttccccgcaccattccccaggccgaggccctgcaggaactgctggcccggcttaacattaagctcgacatggtggtcaacatcgacgtgccccgggaagtgctgctggaccggctcaccacccgccgcacctgcaccaactccgactgccaggcgatatacaacgtcaagagcatgccgcccaaacaggaaggggtttgtgaccactgcggcagcccggtgatccaacgcgacgacgagacggaaaaagcgatcagccaccgcctggagacctaccaggaaatgaccgcgcccctggtcggtttctacgaaaaggaagggttactcaacaacatcgtcggcacttccagcgacgaggtggtggcggcgatcaaagccgaactggccaagtag

SEQ ID NO: 2205 - protein, 215 aa, delta proteobacterium MLMS-1
MKLILLGAPGAGKGTVAKMLTAIDGSVQISTGDILRGEVQAGSELGKQAQEYMNRGDLVPDSLIMGIMEKRLQQPDCAKGFLLDGFPRTIPQAEALQELLARLNIKLDMVVNIDVPREVLLDRLTTRRTCTNSDCQAIYNVKSMPPKQEGVCDHCGSPVIQRDDETEKAISHRLETYQEMTAPLVGFYEKEGLLNNIVGTSSDEVVAAIKAELAK

SEQ ID NO: 2206 - DNA, 645 bp, Vibrio sp. Ex25
  CDS (1)..(645): transl_table=11
atgcgcatcattcttctaggtgctccaggtgcaggtaaaggcacacaagcaaacttcatcatggaaaaatacggtattccacaaatctctactggtgatatgcttcgtgctgctatcaaagcaggtacagagcttggtaaacaagctaaagctgttatcgacgctggtcagctagtttctgatgaaatcatccttggccttatcaaagagcgtatcgctcaagaagactgtgcgaacggtttcctactggatggtttcccacgtactattcctcaagctgacggcctaaaagaaatgggcgttgatgtagactacgttatcgaatttgacgttgcagatgatgtgattgttgagcgtatggcaggtcgtcgtgctcaccttccttctggtcgtacttaccacgttgtttacaacccacctaaagtggaaggtaaagatgacgtaactggtgaagatcttgttgttcgtgatgacgacaaagaagaaacagtacgtgcacgtctaggtgtttaccacgagcaaactgcaccactaatcaactactacggtaaagaagctgaagcaggcaacactaagtaccttaagtttgatggtactaagcaagtagctgaagttagtgcagatatcgagaaagcactctcttaa

SEQ ID NO: 2207 - protein, 214 aa, Vibrio sp. Ex25
MRIILLGAPGAGKGTQANFIMEKYGIPQISTGDMLRAAIKAGTELGKQAKAVIDAGQLVSDEIILGLIKERIAQEDCANGFLLDGFPRTIPQADGLKEMGVDVDYVIEFDVADDVIVERMAGRRAHLPSGRTYHVVYNPPKVEGKDDVTGEDLVVRDDDKEETVRARLGVYHEQTAPLINYYGKEAEAGNTKYLKFDGTKQVAEVSADIEKALS

SEQ ID NO: 2208 - DNA, 645 bp, Alteromonadales bacterium TW-7
  CDS (1)..(645): transl_table=11
atgcgcattattcttttgggcgcgccgggtgcaggtaaaggtactcaagctcagtttttaatggacaagtacggtattccacaaatttcaactggcgatatgctacgtgctgcaattaaagaaggcactccacttggcttagaagcaaaaaaagtaatggacgcaggtcagctaatttctgacgatatcattattggtttagttaaagagcgtattgctaaagctgattgcgaaaaaggttttttactagatggctttccacgtaccattccacaagcagatgcaatgaaagaaaatggcgtagtagttgatcacgttattgaatttgatgttgctgatgaagtaattgtagagcgtatgggcggacgtcgtgttcatcctggctcgggccgtgtttatcatgttgtttacaatccaccaaaagtggaaggtaaagatgatgaaacaggtgaagagttaattgtgcgcgctgacgacacagaagagactgtgcgtaaacgtctaggtatttaccatgagcaaactatgccgttggttgattactaccaagctgaagccgctgcaggcaacacgcagtaccataaacttgacggtacacaagccgtagaagttgtaagtgctcagttaggtgagcttttgggttaa

SEQ ID NO: 2209 - protein, 214 aa, Alteromonadales bacterium TW-7
MRIILLGAPGAGKGTQAQFLMDKYGIPQISTGDMLRAAIKEGTPLGLEAKKVMDAGQLISDDIIIGLVKERIAKADCEKGFLLDGFPRTIPQADAMKENGVVVDHVIEFDVADEVIVERMGGRRVHPGSGRVYHVVYNPPKVEGKDDETGEELIVRADDTEETVRKRLGIYHEQTMPLVDYYQAEAAAGNTQYHKLDGTQAVEVVSAQLGELLG

SEQ ID NO: 2210 - DNA, 639 bp, marine gamma proteobacterium HTCC2080
  CDS (1)..(639): transl_table=11
atgcgaattattctcctaggcgcacctggcgctggaaagggcactcaagcgaagttcctgtgtgagcaatttgatattcctcaaatctctacgggtgatatgttgcgtgctgctgttgcggcaggtaccgagttagggttacaggcgaaaagtattatggatgctggcgggttagtttctgacgagctaatcataggtctggttaaagaccgactgcagcaacctgattgcgtaacaggctgccttttcgatggcttccccagaacgattcctcaagcacaggcaatggtagatgccgacattagtgtcgatcatgtcatagagattgcagtcgacaatgaggagatcgtagggcgtctaagtgggcgacgcgttcatcctgcaagtggtcgcatttatcatcttgtgcacaatccgcccgaggtcgatggcgttgatgatgcaacaggtgaaatgctgatacagcgcgatgacgacaaagaggcaacggttcgaaagcgtcttgatgtttatcagcagcagacgagaccgctggttgatttttatcagaagcttgacggacccgcgtatcataagattcatggtgtcggtaacgtcgaaaatatttccgcagagataaaaaaactattgcagaactga

SEQ ID NO: 2211 - protein, 212 aa, marine gamma proteobacterium HTCC2080
MRIILLGAPGAGKGTQAKFLCEQFDIPQISTGDMLRAAVAAGTELGLQAKSIMDAGGLVSDELIIGLVKDRLQQPDCVTGCLFDGFPRTIPQAQAMVDADISVDHVIEIAVDNEEIVGRLSGRRVHPASGRIYHLVHNPPEVDGVDDATGEMLIQRDDDKEATVRKRLDVYQQQTRPLVDFYQKLDGPAYHKIHGVGNVENISAEIKKLLQN

SEQ ID NO: 2212 - DNA, 654 bp, Marinobacter sp. ELB17
  CDS (1)..(654): transl_table=11
atgcgcatcatcatgttgggcgccccgggcgccgggaagggtacacaggctcagttcatgacagagcggttcgatattcctcagatctccaccggcgacatgttgcgcgccgcggtcaaggccgagtcggatctgggaagtaaggtcaaggaagtgatggcctcgggtggtttggtgtcagacgacattatcatcgctttgattgacgagcgcatccagaaagcggattgcaaaaacggctttctgctcgacggctttccgcgcaccattcctcaggctgaagagctgaaaaaccagggcatcgctatcgattacgtggttgagatcaccgtcgccgatgaagaaattgtcagccgcctgtcaggccggcgcgtgcacgaaagcagtggccgcatctaccacgtcaaatacgatccaccaaaagtggaagacaaagacaacgaaactggcgaagcgttgattcagcgtgaagacgatagtgaagaaaccgtgcgtaaacgcctgggtatttatcaccagcaaaccgctccacttataggttactacaaggattgggttgccaaagatgcggacagcgcgccacgttatgttcaagttgaaggcattggcagtctggacgatattcgcgcccagatcagcgccaagctgaggtaa

SEQ ID NO: 2213 - protein, 217 aa, Marinobacter sp. ELB17
MRIIMLGAPGAGKGTQAQFMTERFDIPQISTGDMLRAAVKAESDLGSKVKEVMASGGLVSDDIIIALIDERIQKADCKNGFLLDGFPRTIPQAEELKNQGIAIDYVVEITVADEEIVSRLSGRRVHESSGRIYHVKYDPPKVEDKDNETGEALIQREDDSEETVRKRLGIYHQQTAPLIGYYKDWVAKDADSAPRYVQVEGIGSLDDIRAQISAKLR

SEQ ID NO: 2214 - DNA, 645 bp, Erythrobacter sp. SD-21
  CDS (1)..(645): transl_table=11
atggatatcattcttctcggccctccgggcgcaggcaagggcacgcaagcgcatcgtcttgtcgagcatcacggcatgatgcagctgtcgaccggcgacatgctgcgcgaaacgcgcaaggccgataccgagctgggccgcacggtttccgacatcatggattcgggcggtctcgtgtcggacgacatcgtctcggccatgatcggcgccaaactggccgacatgggccccgacgtgggtgccatcttcgacggctatccgcgtaccgagcatcaggctgcgcagctcgacgaaatcctcgccaagcacggccgcagccttgaccacgtcatcgagctcgaagtgaacgaggatgcgctggtcgagcgtattactggccgttacacctgcgccaattgcggcgcgggctatcacgataccttcaagcagccgaagatcgaaggtgtgtgcgacgaatgtggctcgactgaattcaagcgccgccccgacgataacgaggaaaccgtgcgccaccgcatgtcggtctatcgcaacgagacggctccgatcctgcccggttacgagaagcgcggcatcgtgaagcgcgtcgacggcatgggcgcaatcgacgaagtcacgcacgcgatcgacgcaatcctctcctga

SEQ ID NO: 2215 - protein, 214 aa, Erythrobacter sp. SD-21
MDIILLGPPGAGKGTQAHRLVEHHGMMQLSTGDMLRETRKADTELGRTVSDIMDSGGLVSDDIVSAMIGAKLADMGPDVGAIFDGYPRTEHQAAQLDEILAKHGRSLDHVIELEVNEDALVERITGRYTCANCGAGYHDTFKQPKIEGVCDECGSTEFKRRPDDNEETVRHRMSVYRNETAPILPGYEKRGIVKRVDGMGAIDEVTHAIDAILS

SEQ ID NO: 2216 - DNA, 645 bp, Moritella sp. PE36
  CDS (1)..(645): transl_table=11
atgcgtattattttattaggtgcaccaggtgcaggaaagggaactcaagcacagttcatcatggaaaattatggtgttccgcaaatctctactggtgatatgctacgagctgctattaaagaaggttctgagttaggtcaaaaagttaaagctgttatggatagtggccaactagtatctgacggactaattattgaattagttaaagatcgcgttaagaaagaagattgtgcaaaaggtttcctactagacggtttcccacgtactatcccacaagctgacgctatgaaagaaaacggcattgacgttgatttcgtacttgaatttgacgtgcctgatgaagaaatcgttaaacgtatgagtggtcgtcgtgttcacgctccttctggccgtgtttaccacactgtttataatccgcctaaagtggcaggtaaagataacgaaactggtgacgaattaacaatccgtgtggatgatgttgaagaaactgttcgtaaacgtttaggtatctaccatgaccaaactgcaccacttattgcttattatggcaaagaagcggaagcaggtaacagcaaatatgttacattcgacggtacacaaactgttgatgcggtaagcaagcaattagctgaattacttggctag

SEQ ID NO: 2217 - protein, 214 aa, Moritella sp. PE36
MRIILLGAPGAGKGTQAQFIMENYGVPQISTGDMLRAAIKEGSELGQKVKAVMDSGQLVSDGLIIELVKDRVKKEDCAKGFLLDGFPRTIPQADAMKENGIDVDFVLEFDVPDEEIVKRMSGRRVHAPSGRVYHTVYNPPKVAGKDNETGDELTIRVDDVEETVRKRLGIYHDQTAPLIAYYGKEAEAGNSKYVTFDGTQTVDAVSKQLAELLG

SEQ ID NO: 2218 - DNA, 678 bp, Rickettsiella grylli
  CDS (1)..(678): transl_table=11
atgagaattattttattaggtccacctggggcaggaaaagggactcaggcaaaatttttaacgcgttactatcatattcctcaaatttcgaccggcgatatgttacgtctcgcagtcaatcagcgcacttctttgggctttcaggttaaaacattaatggaccaaggccaattaatttcagatgagatcattattaaattagttgaatcgcgtattcaacaaagtgattgtatcaacggttttttatttgatggatttccgcgtacattaggtcaggccgaagcgatacgcgcacaacgtatttttatcgattttgttatagaaattaaagtagacgacgatgaaatcgtaaagcggctcagtggccgtcgtattcatcccgcttcaggacgtatttatcatctcgtgtatactccccccaaagtagctaataaagacgatataactggagaggagctcattcaacgtcacgatgataccgaagcaataatacgcgaacgtttacgcatttaccaccaacaaacgaagcctttacgttgctattatcaggaatggcaaaataaaggcgaggaaggtttcccttgctatatttcaattcatgggcaagcagatgttgaagacgttcgtcagcgtattttttcagcgcttaaagaaaacaggcaaaaaaaaacaaattaa

SEQ ID NO: 2219 - protein, 225 aa, Rickettsiella grylli
MRIILLGPPGAGKGTQAKFLTRYYHIPQISTGDMLRLAVNQRTSLGFQVKTLMDQGQLISDEIIIKLVESRIQQSDCINGFLFDGFPRTLGQAEAIRAQRIFIDFVIEIKVDDDEIVKRLSGRRIHPASGRIYHLVYTPPKVANKDDITGEELIQRHDDTEAIIRERLRIYHQQTKPLRCYYQEWQNKGEEGFPCYISIHGQADVEDVRQRIFSALKENRQKKTN

SEQ ID NO: 2220 - DNA, 654 bp, Thauera sp. MZ1T
  CDS (1)..(654): transl_table=11
atgcgtctgattctgttgggaccgccgggagccggcaagggtacgcaagccaacttcatcaaggagaagttcggcattccgcaaatctccaccggcgacatgctgcgcgccgcggtgaaggcgggcaccccgctgggcctggaggcgaagaaggtcatggatgccggcggcctcgtgtccgacgacatcatcatcggcctggtgaaggaccgcctgcagcaggaagactgcaagtccggctacatgttcgacggcttcccgcgcaccatcccgcaggccgacgcgatgaaggacgccggcgtgccgatcgacttcgtgctcgagatcgacgtgccggacgccgaaatcgtcgaacgcatgagcgggcgccgcgcccatctggcttcgggccgcacctaccacgtcaagtacaacccgcccaaggtcgcgggcaaggacgacgtcaccggcgaagacctggtgcagcgcgacgacgacaaggaagaaaccgtcaagaagcgcctcgacgtctaccactcgcagaccaagccgctggtcgagtactacagcaagtgggcggcctcgggcgacgccaaggcgcccaaggtgcgcaagatctccggcctcggcgcggtggatgcgatcaccgcgaacgccttcgcggcgctgaagtag

SEQ ID NO: 2221 - protein, 217 aa, Thauera sp. MZ1T
MRLILLGPPGAGKGTQANFIKEKFGIPQISTGDMLRAAVKAGTPLGLEAKKVMDAGGLVSDDIIIGLVKDRLQQEDCKSGYMFDGFPRTIPQADAMKDAGVPIDFVLEIDVPDAEIVERMSGRRAHLASGRTYHVKYNPPKVAGKDDVTGEDLVQRDDDKEETVKKRLDVYHSQTKPLVEYYSKWAASGDAKAPKVRKISGLGAVDAITANAFAALK

SEQ ID NO: 2222 - DNA, 564 bp, Cyanothece sp. PCC 8801
  CDS (1)..(564): transl_table=11
atgaatcaagccaagggattaatttttttaggacctccgggttcaggcaaaggaactcaagctgaactgttatcaaaacagctacaaatccctcacatttccaccggagagatgttacggcaagcgattgcccaacagagtgatttgggacaaaaagcccaaatttacgttgatagaggggatttagttcctgatgagttgcttttggacttaattcgagaacgtctaggtcggtctgatagccaaaacggttggattttagacggttttccgcgtaatgttgcccaagctacttttttagaggaattactcgcggaattatcccagttctctgaccaggccatcaatttagacgtgcctgatgagctactcattgaacgacttctgttaagaggacgcaaagacgataatgaagtaaccatccgccatcgcctagaagtctatcgagaacagactaagccagtcattgattattaccaagggcgaggcagactatgttcgattgatggcagtccttccccagaagtcgtcactgcttccttaaagcaaatcgtaacagcctag

SEQ ID NO: 2223 - protein, 187 aa, Cyanothece sp. PCC 8801
MNQAKGLIFLGPPGSGKGTQAELLSKQLQIPHISTGEMLRQAIAQQSDLGQKAQIYVDRGDLVPDELLLDLIRERLGRSDSQNGWILDGFPRNVAQATFLEELLAELSQFSDQAINLDVPDELLIERLLLRGRKDDNEVTIRHRLEVYREQTKPVIDYYQGRGRLCSIDGSPSPEVVTASLKQIVTA

SEQ ID NO: 2224 - DNA, 564 bp, Cyanothece sp. PCC 7424
  CDS (1)..(564): transl_table=11
atgacaaaacccataggattaatttttttaggcccacccggctcgggaaaaggaactcaagctcaagtcttatctcaatctctccaaattccccatatctcaaccggcgatattctccgacaagctatcaccgatagcacccctttaggcataaaagctcaaagctatatggataaaggcgagttagttccagatgacttgctcttagatttaattaaaaatcgtctgagtcaacctgatgctcaacaaggatggattttagatggatttcctcgcacggttgctcaagcttgttttttagaaaatcttctcgcccaactggatctattctctgaatgtgtcgttaatctagaagttccggaagatgttctgattgaacgtcttttaggacgaggccgacaagatgatcatgagacaaccattcgtcgtcgtctccaagtttaccacgaacaaactgcgccggtaattgattattatcgtcaacggggaaatttaaattcccttaatggcaatcgtccccctgaacaagttagtcactccctcaaagaaattatcatctcttga

SEQ ID NO: 2225 - protein, 187 aa, Cyanothece sp. PCC 7424
MTKPIGLIFLGPPGSGKGTQAQVLSQSLQIPHISTGDILRQAITDSTPLGIKAQSYMDKGELVPDDLLLDLIKNRLSQPDAQQGWILDGFPRTVAQACFLENLLAQLDLFSECVVNLEVPEDVLIERLLGRGRQDDHETTIRRRLQVYHEQTAPVIDYYRQRGNLNSLNGNRPPEQVSHSLKEIIIS

SEQ ID NO: 2226 - DNA, 657 bp, Herbaspirillum seropedicae
  CDS (1)..(657): transl_table=11
atgcgcctcatccttttaggagcgcctggtgccggtaaaggcacgcaagccacttttatcaaggaaaaattcaacattccgcaaatctccaccggcgacatgctgcgcgcggccgtggcggcgggtactgaactgggcgtcgcggccaagaaggtgatggacgcgggcggtctggtttctgacgacatcatcatcggcctggtcaaggatcgcctcaagcaggccgattgcgccaacggctacctgttcgacggcttcccgcgcaccacgcgccaggccgacgcgatgaaggaagccggcgtggccatcgactacgtgctggaaatcgacgtgcccgacagcgccatcgtcgagcgcatgagcggtcgccgcgtgcatccgggttcgggtcgcagctaccacgtcaagttcaacccgcccaaggtcgagggcaaggatgacgtcaccggcgagccgctggtgcagcgcgatgacgacaaggaagaaaccgtcctgaagcgcctggccgtctaccacgaccagaccaaggtgctgctgggttactacagcaactgggcagcctcgggccagccgggtgcgccgaagtatcgcaagatcgccggcgtgggtccggtggaagaaatcagggatcgtgcatttgccgccctggcggagtaa

SEQ ID NO: 2227 - protein, 218 aa, Herbaspirillum seropedicae
MRLILLGAPGAGKGTQATFIKEKFNIPQISTGDMLRAAVAAGTELGVAAKKVMDAGGLVSDDIIIGLVKDRLKQADCANGYLFDGFPRTTRQADAMKEAGVAIDYVLEIDVPDSAIVERMSGRRVHPGSGRSYHVKFNPPKVEGKDDVTGEPLVQRDDDKEETVLKRLAVYHDQTKVLLGYYSNWAASGQPGAPKYRKIAGVGPVEEIRDRAFAALAE

SEQ ID NO: 2228 - DNA, 654 bp, Magnetospirillum gryphiswaldense
  CDS (1)..(654): transl_table=11
atgaatctggttctgttggggccgccgggcggcggcaagggtacccaggccaagcgcctgatggacaagtacggtctggtgcaattgtccaccggcgacatgctgcgcgccgccgtcgcctcgggctcggacatcggcaagaaggccaaggcggtgatggatgccggccagctggtgtccgacgacatcgtcatcggcatcatcgatgatcgcctggaccaacccgacaccaagaacggagtcatcttcgacggcttcccccggaccgtcgcccaggccgaagccctggatgccatgatggccaagaagggcaagcagctggatttcgccatcgaaatccgcgtgcccgacgcccccatcgtcgaacgcatcaccgggcgctacacctgcgccaagtgcggcgccggctatcacgacaagttccagcagccgaaagtcgccggaacctgtgattcctgcggcggcaccgagttcactcggcgcgccgatgacaatgccgaaaccgtgaacaagcgccttgccgcctatcacgatcagacggcccccctgctgccctattatcaggccaaggggaattatcatctggtggatggtacccaggatatcgccgtggtcaccacggacctggaagtcatcctcggaaaggccgggtga

SEQ ID NO: 2229 - protein, 217 aa, Magnetospirillum gryphiswaldense
MNLVLLGPPGGGKGTQAKRLMDKYGLVQLSTGDMLRAAVASGSDIGKKAKAVMDAGQLVSDDIVIGIIDDRLDQPDTKNGVIFDGFPRTVAQAEALDAMMAKKGKQLDFAIEIRVPDAPIVERITGRYTCAKCGAGYHDKFQQPKVAGTCDSCGGTEFTRRADDNAETVNKRLAAYHDQTAPLLPYYQAKGNYHLVDGTQDIAVVTTDLEVILGKAG

SEQ ID NO: 2230 - DNA, 660 bp, Lactobacillus reuteri
  CDS (1)..(660): transl_table=11
atgagtatgaatcttgtattaatgggtcttccaggtgccggtaaaggtactcaagctcaaaagatcgttgaagattttccaattcctcatatctcaactggagatatttttcgggcagccataaaaaatgaaactcccatgggaattgaagctaagaaatatattgataaaggtgaacttgttccggacgaagttactaacggtatcgttaaggaacggttagctcaagatgatactaaagatggctttatgctggatggatttcctcgtaatcttaaccaagcagcagctttggataagatgttagcagagagtaatcggcatcttgatgctgtgatcaatattcacgtcgaaccggatgtattggtagaacgtttaagtggacgttttatttgccgtaactgtggaacaacgtatcataagctttacaatgctcctaaagttgaaggcacatgtgacgtttgtggtcatcatgaattttatcagcgtgatgatgataagcctgaaacggttaagaatcgtctagatgttaatattaagttgaacacaccactggtagactattaccaaaagaaaggtgttttgcacgaaattaatggtgaacaagatatcgataaagtttacgaagatatcaagaaagtattaacaaacctaaactag

SEQ ID NO: 2231 - protein, 219 aa, Lactobacillus reuteri
MSMNLVLMGLPGAGKGTQAQKIVEDFPIPHISTGDIFRAAIKNETPMGIEAKKYIDKGELVPDEVTNGIVKERLAQDDTKDGFMLDGFPRNLNQAAALDKMLAESNRHLDAVINIHVEPDVLVERLSGRFICRNCGTTYHKLYNAPKVEGTCDVCGHHEFYQRDDDKPETVKNRLDVNIKLNTPLVDYYQKKGVLHEINGEQDIDKVYEDIKKVLTNLN

SEQ ID NO: 2232 - DNA, 738 bp, Vitis vinifera
  CDS (1)..(738)
atggcgaccctttcggcgaatttggaggatattccttctgtggatctcatgacggagcttcttcgtcgcatgaagtgctctaccaagcctgacaaacgcctcattctaatcggtccacctggatcaggaaaaggtacccaatctccaattataaaggatgaatactgcttgtgccacttggctactggtgatatgttaagagcagctgttgctgctaaaacccctcttggtattaaggctaaagaggctatggagaagggtgaacttgtttctgatgatctggttgttggcattatagatgaagcaattaagaagccttcatgtcagaaaggcttcattcttgatggatttccgaggactgaggtccaagcacaaaagcttgatgagatgcttgaaaagcagggtgttaaagttgataaggtgctgaactttgcaattgatgatgggatcttggaagagagaattacgggtcgttggatgcacccatctagtggtaggacttaccacacaaaatttgcacctccgaaggttcatggcattgatgatgtcactggtgaacctttgattcagcgtaaagatgatactgctgctgttctcaagtcaaggctggaggcatttcacaggcaaacagaaccagtaattgactattacaccaagaagggcatcgtcgctaaccttcatgcagagaaatccccgaaggaggtcacgactgaggttcagaaggccctttcttcgtga

SEQ ID NO: 2233 - protein, 245 aa, Vitis vinifera
MATLSANLEDIPSVDLMTELLRRMKCSTKPDKRLILIGPPGSGKGTQSPIIKDEYCLCHLATGDMLRAAVAAKTPLGIKAKEAMEKGELVSDDLVVGIIDEAIKKPSCQKGFILDGFPRTEVQAQKLDEMLEKQGVKVDKVLNFAIDDGILEERITGRWMHPSSGRTYHTKFAPPKVHGIDDVTGEPLIQRKDDTAAVLKSRLEAFHRQTEPVIDYYTKKGIVANLHAEKSPKEVTTEVQKALSS

SEQ ID NO: 2234 - DNA, 666 bp, Vitis vinifera
  CDS (1)..(666)
atgaagtgctcctccaagcctgacaagcgtctcattctcgtcggtccacctggatctgggaagggcacacagtcacccattattaaggatgagtactgcttgtgccacttggccactggtgatatgctgagagtagctgttgctgctaaaactcctctaggaattaaagctaaagaagctatggataagggagaacttgtaactgatgacttggttgttggaataattgatgaagcaatgaagaagccctcatgtcagaaaggtttcattcttgatgggtttccaaggactgttgtccaagcagaaaagctagatgaaatgcttgcaaagcagggaaataaaattgataaggtgcttaactttgcaattgacgatgccatattggaggagaggatcactggacgttggatccacccctcaagtggtcggacataccacacaaagtttgcacctcccaaagtttcaggtgttgatgatgttactggagagccactgattcaacgaaaagatgatactcctgaagttctgaagtcaaggctggaggcttttcacaggcaaactgaaccagttattgattattatgccaaaaagaatgtccttgcccagcttcatgccgagaaacccccaaaagaggtctctgctgaggttcagaaagctctctcttag

SEQ ID NO: 2235 - protein, 221 aa, Vitis vinifera
MKCSSKPDKRLILVGPPGSGKGTQSPIIKDEYCLCHLATGDMLRVAVAAKTPLGIKAKEAMDKGELVTDDLVVGIIDEAMKKPSCQKGFILDGFPRTVVQAEKLDEMLAKQGNKIDKVLNFAIDDAILEERITGRWIHPSSGRTYHTKFAPPKVSGVDDVTGEPLIQRKDDTPEVLKSRLEAFHRQTEPVIDYYAKKNVLAQLHAEKPPKEVSAEVQKALS

SEQ ID NO: 2236 - DNA, 567 bp, Microcystis aeruginosa PCC 7806
  CDS (1)..(567): transl_table=11
atgagcaaacggatcggtgtgatatttttgggaccgcccggatcgggaaaaggaacccaagcggcaaaattagcggaatctctgacgattcctcatatttctaccggtgaaattttacgtcaagcaattacagagaagacagaacttggtcagcaagcacaagcttatgtggaaaagggcgaattagtccccgatgagttgttgttaggtttaattcaggaacgtttaaaacagcctgacagtgctaagggttggattcttgatggttttccccgcacggtggcacaggcgagctttttagacgcattactggaagaattggccgatagttatacatttgtggttaatttggctgtaccagatacggtcttaattgagcgtctcatgcaacggggtcgtcaagatgatactaaagaaacgatctcccgtcgcctacaggtatatatcgaccaaactgcccccgttttagattattacggtcaaaaagggactcttaaccatatcgacggtaatcaaccgatggacacggttactgccgctctaacagcagttgtgactcctgggtaa

SEQ ID NO: 2237 - protein, 188 aa, Microcystis aeruginosa PCC 7806
MSKRIGVIFLGPPGSGKGTQAAKLAESLTIPHISTGEILRQAITEKTELGQQAQAYVEKGELVPDELLLGLIQERLKQPDSAKGWILDGFPRTVAQASFLDALLEELADSYTFVVNLAVPDTVLIERLMQRGRQDDTKETISRRLQVYIDQTAPVLDYYGQKGTLNHIDGNQPMDTVTAALTAVVTPG

SEQ ID NO: 2238 - DNA, 747 bp, Populus trichocarpa
  CDS (1)..(747)
atggcaggcagtgcagcagcagcagcaaacttggaagatgtgccatcactggatctcatgagtgagctcctccgtcgcctgaagtgttctgacaaacccgacaagcgtctcatactcatcggccctcctggatctggaaaaggtactcaatcaccaatcattaaggatgagcactgtctatgccacttggctactggtgatatgttgagagctgctgttgctgctaaaacccctcttggcatcaaggctaaggaagcaatggaaaagggggaacttgtttctgatgacttggttgttggcattatagatgaagcaatgaaaaaaccttcatgtcagaaaggtttcattctagatggatttccaaggactgtggtccaagcacagaagcttgatgacatgcttcaaaagcagggaagtaaaattgataaggtgctgaattttgcaattgatgatgcaattttggaggagaggatcacaggtcgctggatccatccttctagtggtagaacctaccatacaaaatttgcacctcccaaggctcctggtgttgatgatgtaactggagaacctttgattcaacgcaaagatgatactgccgctgttcttaagtcaaggctggaggcatttcacaagcaaactgaaccggttattgattattataagaagaaaggtgctgttgcagagcttcatgcagagaaacctccaaaggaggttacaactgaggttaagaaagtgctttcctcttga

SEQ ID NO: 2239 - protein, 248 aa, Populus trichocarpa
MAGSAAAAANLEDVPSLDLMSELLRRLKCSDKPDKRLILIGPPGSGKGTQSPIIKDEHCLCHLATGDMLRAAVAAKTPLGIKAKEAMEKGELVSDDLVVGIIDEAMKKPSCQKGFILDGFPRTVVQAQKLDDMLQKQGSKIDKVLNFAIDDAILEERITGRWIHPSSGRTYHTKFAPPKAPGVDDVTGEPLIQRKDDTAAVLKSRLEAFHKQTEPVIDYYKKKGAVAELHAEKPPKEVTTEVKKVLSS

SEQ ID NO: 2240 - DNA, 819 bp, Penicillium marneffei
  CDS (1)..(819)
atggctcccatcacgcaagagaccgtcgacggtctcaaggatatcattcacaagctcgagtcgcgcgttgccgatttggaaagccgcctcgtccatggcagcccggcttccaactcgaaatcgctcgccgagcaattccgaattatcttgatcggtcctcctggcgctggcaagggaacccaggctcctcgtttgaaggaaaagtactgcgtgtgccacttggccaccggtgatatgctgcgatctcaggtcgccaagaagacgccattgggtaaggaagcgaagaagatcatggaccagggtggtttggtcagcgacgagatcatggtcaacatgatcaagagcgagctcgagaccaactcggagtgcaagaacggattcattcttgacggctttccccgtaccgttgcccaggctgagcgcctagatgacatgctgtccgcgcgtaatgagaagctccaacacgccgttgaattgcaaatcgacgacgctctcctcgtcgcccgtataaccggtcgattggtccaccctgcctctggacgctcatatcacaagatcttcaacccgcctaagcaggacatgaaggacgacattaccggcgagcccttgattcaacgttccgacgacaacgccgcaaccttggaaaagcgattggccacctaccatgctcagacctcccctgttgtcgactactacaagaagactggtatctggtgcggtattgacgccagccaggaacctggccaggtctggaagagtcttctcggcgttttccaacccagctccagcatcctgagcaaagttggtctgtccaaataa

SEQ ID NO: 2241 - protein, 272 aa, Penicillium marneffei
MAPITQETVDGLKDIIHKLESRVADLESRLVHGSPASNSKSLAEQFRIILIGPPGAGKGTQAPRLKEKYCVCHLATGDMLRSQVAKKTPLGKEAKKIMDQGGLVSDEIMVNMIKSELETNSECKNGFILDGFPRTVAQAERLDDMLSARNEKLQHAVELQIDDALLVARITGRLVHPASGRSYHKIFNPPKQDMKDDITGEPLIQRSDDNAATLEKRLATYHAQTSPVVDYYKKTGIWCGIDASQEPGQVWKSLLGVFQPSSSILSKVGLSK

SEQ ID NO: 2242 - DNA, 639 bp, Spiroplasma citri
  CDS (1)..(639): transl_table=4
atgcgaaattttattttgttaggagctcctggaagtggaaaaggaacccaatcagaccatttagtcaaaaagtttggttttactcatatttcaactggcaatattattcgagataatattaagcaaaaaacaccattaggtattttgtgtcaacagtatgctgaccagggaaaattagttccggatgatattatgattcaaatggttgaaaaccatttacaaatagtaaggggtgatttaatttgagatggttttccacgcacaattgcacaagcaaaaaaattagatcaattattgcaaaaactaaatagcaaagttgaccatacgttatattttgaaattgatgaagcaaagttaatcgaacgaattatgggacgtttaacttgtccaacttgtgggcgaacatatcataaaacagcattgccaccaaaagtagcatgagtttgtgatgatgatcaaaccccattagtacaacgaaaagatgataacgaagaaaaaattaaaattagattagcggcatatcatgctgatactgcaccgttaattgaatattatttaaatcagcaagtattaaccgttattgatgctgatatggaaggacatgctgtttgagatcaaattatggcagttttaaaataa

SEQ ID NO: 2243 - protein, 212 aa, Spiroplasma citri
MRNFILLGAPGSGKGTQSDHLVKKFGFTHISTGNIIRDNIKQKTPLGILCQQYADQGKLVPDDIMIQMVENHLQIVRGDLIWDGFPRTIAQAKKLDQLLQKLNSKVDHTLYFEIDEAKLIERIMGRLTCPTCGRTYHKTALPPKVAWVCDDDQTPLVQRKDDNEEKIKIRLAAYHADTAPLIEYYLNQQVLTVIDADMEGHAVWDQIMAVLK

SEQ ID NO: 2244 - DNA, 705 bp, Saccharomyces cerevisiae
  CDS (1)..(705)
atgaaagcagacgcgaaacaaataacacatctactcaaacctcttcgacttttattattgggggctccagggtcaggtaaagggacacagacttcgagattactaaagcaaattccacaattatcttcaatttcgtcaggcgacattttacgtcaggaaataaaatctgaatctaccctaggccgagaggctactacctacattgctcaaggcaagttattaccggatgatctcataacgcgtctgataacttttcgtctttcggcattgggttggttaaaaccatctgccatgtggttgctcgatggatttcctcgaactactgcgcaagcttctgccttagacgagctgctgaaacagcatgacgccagcttgaatctagtggtagagctagatgtacccgaatccaccatattagaaaggatcgagaacagatatgttcacgttcctagtgggagagtgtataacttacaatataatcctcccaaagtgccaggattagacgatatcaccggagaaccattgaccaagaggcttgatgacacagcggaagtgtttaaaaaaaggctagaagagtacaagaaaacaaatgagcctttaaaagattattacaaaaaaagtgggatttttggtaccgtctctggggaaacatcagatattatcttcccgaaattattgaaccttataaccagcaaattcggctaa

SEQ ID NO: 2245 - protein, 234 aa, Saccharomyces cerevisiae
MKADAKQITHLLKPLRLLLLGAPGSGKGTQTSRLLKQIPQLSSISSGDILRQEIKSESTLGREATTYIAQGKLLPDDLITRLITFRLSALGWLKPSAMWLLDGFPRTTAQASALDELLKQHDASLNLVVELDVPESTILERIENRYVHVPSGRVYNLQYNPPKVPGLDDITGEPLTKRLDDTAEVFKKRLEEYKKTNEPLKDYYKKSGIFGTVSGETSDIIFPKLLNLITSKFG

SEQ ID NO: 2246 - DNA, 642 bp, Bacillus stearothermophilus
  CDS (1)..(642): transl_table=11
atgaatttagtactaatgggtttgcctggtgccggaaaaggtactcaagcggaaaaaattgttgaaacatacggaattccgcatatttccactggtgatatgttccgtgcggccattaaagaggggacaccattaggattgcaagcaaaagaatatatggatcgcggcgatcttgttccggatgaagtaaccatcggcatcgttcgcgaacgtttaagcaaagacgattgtcaaaaagggtttttgctagacggattcccacggacggttgcccaagcggaagcgttagaaaacattcttgccgaattaaaccgctcgattgattatgtcattcatattcatgtagataaagatattttaatggaacggctgacaggaagaagaatttgcaaaaattgtggcgcaacgtaccatctagtatttaatccgccggcaaagccaggcgtttgcgataaatgcggcggcgaactataccaacgcgccgatgataacgaagagacggtagccaaccggctcgaagtaaacgtcaaacaaacgcagccgctgctggatttttacgagaaaaaaggatacctacgccacatcaacggacagcaagatattgaaaaagtattcgccgatattcgtgagcttctcggatag

SEQ ID NO: 2247 - protein, 213 aa, Bacillus stearothermophilus
MNLVLMGLPGAGKGTQAEKIVETYGIPHISTGDMFRAAIKEGTPLGLQAKEYMDRGDLVPDEVTIGIVRERLSKDDCQKGFLLDGFPRTVAQAEALENILAELNRSIDYVIHIHVDKDILMERLTGRRICKNCGATYHLVFNPPAKPGVCDKCGGELYQRADDNEETVANRLEVNVKQTQPLLDFYEKKGYLRHINGQQDIEKVFADIRELLG

SEQ ID NO: 2248 - DNA, 651 bp, Marinibacillus marinus
  CDS (1)..(651): transl_table=11
gtgaatattgtattaatgggtttacctggtgctggtaaaggtacccaggctgaacagattattgaaaaatatgaaatccctcatatctcaacaggagatatgttccgtgcagccattaaaaatggcacggaattaggcttgaaagcaaaatcgttcatggaccaaggaaacttggtaccagatgaagtaaccatcggaattgtgcatgaacgattaagtaaagatgattgccaaaaagggttcttgcttgacggttttccaagaacagtagctcaagctgacgcgcttgactcgttacttactgaccttggcaaaaaattagactatgttctaaacatcaaggtggaacaagaagaattgatgaaacgtcttacaggacgttggatttgcaaaacttgcggagccacatatcatacaatctttaatcctcctgcagtagaaggtatctgtgataaagacggtggagaactttaccagcgtatagatgacaagcctgagactgttaagaatcgtttagatgttaatatgaaacaaacgcagcctcttcttgatttttatagtcaaaagggcgtgttaaaggatattgatggtcaacaggatattaagaaagtatttgttgatatcaatgacttgctcggaggccttcgctaa

SEQ ID NO: 2249 - protein, 216 aa, Marinibacillus marinus
MNIVLMGLPGAGKGTQAEQIIEKYEIPHISTGDMFRAAIKNGTELGLKAKSFMDQGNLVPDEVTIGIVHERLSKDDCQKGFLLDGFPRTVAQADALDSLLTDLGKKLDYVLNIKVEQEELMKRLTGRWICKTCGATYHTIFNPPAVEGICDKDGGELYQRIDDKPETVKNRLDVNMKQTQPLLDFYSQKGVLKDIDGQQDIKKVFVDINDLLGGLR

SEQ ID NO: 2250 - DNA, 669 bp, Saccharomyces cerevisiae
  CDS (1)..(669)
atgtctagctcagaatccattagaatggtcctaattggcccacctggtgccggtaaaggtactcaagctccaaatttgcaagagcgtttccatgccgctcacttggccactggtgacatgttgagatctcaaatcgcaaagggcactcaattaggtttggaagcaaagaaaattatggaccaaggtggtttagtctctgatgacattatggttaacatgatcaaggatgaattgaccaacaatccagcttgtaagaatgggttcatcttggacggtttcccaaaaaccattcctcaggctgaaaaattggaccaaatgttgaaagaacaaggaactcctttggaaaaagccatcgaattgaaggttgatgatgaattgttggttgccagaattaccggtagattaattcacccagcctctggcagatcctaccacaagatctttaacccaccaaaggaagacatgaaggatgacgtcaccggtgaagctttagttcaaagatctgatgacaatgcagacgccttgaagaagagattagctgcttaccatgctcaaaccgaaccaattgttgacttttacaaaaagaccggtatctgggctggtgttgatgcttcccaacctcctgctactgtttgggctgacatcttgaacaagctaggtaaggattaa

SEQ ID NO: 2251 - protein, 222 aa, Saccharomyces cerevisiae
MSSSESIRMVLIGPPGAGKGTQAPNLQERFHAAHLATGDMLRSQIAKGTQLGLEAKKIMDQGGLVSDDIMVNMIKDELTNNPACKNGFILDGFPKTIPQAEKLDQMLKEQGTPLEKAIELKVDDELLVARITGRLIHPASGRSYHKIFNPPKEDMKDDVTGEALVQRSDDNADALKKRLAAYHAQTEPIVDFYKKTGIWAGVDASQPPATVWADILNKLGKD

SEQ ID NO: 2252 - DNA, 639 bp, Spiroplasma kunkelii
  CDS (1)..(639): transl_table=4
atgcgaaattttattttgttaggagctcctggtagtggaaaaggaacccaatcagaccatttagttaaaaagtttggttttacgcatatttcaaccggtaatattattcgtgataatactaagcaaaatacatcattaggtattttgtgccaacagtatgctgaccagggaaaattagttcctgatgatattatgattcaaatggttgaaaatcatttacaaacagtaactggtgatttaatttgagatggttttccgcgcacaattgcgcaagcaaaaaaattagatcaattattgcaaaaactaaatagtaaggttgatcatacattatattttgaaattgatgaagcaaagttaatcgaacgaattacggaacgtttaacttgttcaacttgtggacgaacatatcataaaacagcattgcccccaaaagtgtcatgagtttgtgatgatgatcaaacgccattagtacaacgtaaagatgataatgaagaaaaaattaaaattagattagcggcatatcatgctgatactgcaccgctaattgaatattatttaaatcagcaagtattaaccgttattgatgctgatatggaaggaaatgctgtctgagaccaaattatggcagttttaaaataa

SEQ ID NO: 2253 - protein, 212 aa, Spiroplasma kunkelii
MRNFILLGAPGSGKGTQSDHLVKKFGFTHISTGNIIRDNTKQNTSLGILCQQYADQGKLVPDDIMIQMVENHLQTVTGDLIWDGFPRTIAQAKKLDQLLQKLNSKVDHTLYFEIDEAKLIERITERLTCSTCGRTYHKTALPPKVSWVCDDDQTPLVQRKDDNEEKIKIRLAAYHADTAPLIEYYLNQQVLTVIDADMEGNAVWDQIMAVLK

SEQ ID NO: 2254 - DNA, 651 bp, Unknown
  uncultured marine group II euryarchaeote 37F11
  CDS (1)..(651): transl_table=11
atggatgaaggagagcgacaaggtatgctcaacatcgttttgttcggacctcctggtgctggaaagggcactcaggctcaaagaatgatggatgctacagggttgcctcaagtctctacaggggatatgctacgtgctgcagttaaggctgggacctctgttggaattgaagcaaaatcatacatggacaaaggagctcttgtaccagattcagtcattattgatttaattcgagatcgcctacatgatgacgacgcaaaaaacggagttatgtttgatggttttccacggactgtaccacaggctgaagcattatctgagatcgttgaagtttctgcagtattagcaatcgatgttccagacgaacgcattgttgagcgaatctgtggcaggtacagttgcggcacgtgtggaactgtttaccacgatacattcaatccaatccaaaatggtatttgcggatgtgggtcattcactgagaagagaagagcagatgatgtagaagaaacagttcttgctcgattggaagcataccatacacaaacctctccacttgcagacttttatcgtgctgcaggaattttccaccatgtagatggcgatcgagatatcgatgttattacaacagatttactcgcagttctaggatga

SEQ ID NO: 2255 - protein, 216 aa, Unknown
  uncultured marine group II euryarchaeote 37F11
MDEGERQGMLNIVLFGPPGAGKGTQAQRMMDATGLPQVSTGDMLRAAVKAGTSVGIEAKSYMDKGALVPDSVIIDLIRDRLHDDDAKNGVMFDGFPRTVPQAEALSEIVEVSAVLAIDVPDERIVERICGRYSCGTCGTVYHDTFNPIQNGICGCGSFTEKRRADDVEETVLARLEAYHTQTSPLADFYRAAGIFHHVDGDRDIDVITTDLLAVLG

SEQ ID NO: 2256 - DNA, 555 bp, Anabaena sp
  CDS (1)..(555): transl_table=11
gtgacgcgactaatcttcttggggccgccgggagcaggtaaaggaacacaagctcaaattttggctgaacatttacatattccgcatatttccactggggacatattgcggcaagccatgaaagagcaaactcccttgggaatcaaagctcaaagctatgtagatagtggcgagttggttcctgatcagttagtgcaagacttggtagaagagcgtcttgagcaagcagatgctaaatctggttggatattggatggtttccctcgtaaagtcacacaagcggcttttctggaagaattgctgcaaaaaactggtcaaggtggcgaaagagtagtcaatttggatgcggcagatgatgtcgtggtagcacggttgttatccagaggcaggaaagatgacaccgaagaggtaattcgtcgccgcctggaaatttaccgcagcgatactgcacccttgattgattattatagcgatcgccaaaaacttctaaccatcaatggcgaccagtcccaagaagaagtcactcacgaattgaaagcaactttaggttcataa

SEQ ID NO: 2257 - protein, 184 aa, Anabaena sp [sequence omitted]

SEQ ID NO: 2258 - DNA, 741 bp, Arabidopsis thaliana
  CDS (1)..(741)
atggcgaccggtggtgctgcggcggatttggaagatgttcagacggtggatctcatgtcggagctcctccgccgcctcaagtgttctcagaagcccgacaaacgcctcatcttcattggacctccagggtcagggaaaggtactcaatctccagtagtgaaggatgagtattgcttgtgtcacttatccactggagacatgttaagagctgctgttgcttctaagacccctcttggtgtcaaggctaaagaagctatggaaaaaggagagctcgtctctgatgatttggttgttggtataattgatgaagccatgaacaagccaaaatgtcaaaaaggatttatccttgatgggttccccaggactgttactcaggcagagaagctcgatgagatgcttaagaggcgaggaactgaaattgacaaagttctcaactttgctattgatgacgcaatcttggaggaaagaataaccgggcgatggatccacccatcgagtggcaggagttaccacaccaaatttgctcctcccaaaacccctggagttgatgatattactggagagcctctgatccaacgtaaagatgataacgctgatgttctaaagtcgaggcttgcagctttccacagtcaaactcaaccggtgattgattactacgcaaagaaggccgttctcacaaacatccaggccgagaaggctccccaagaagttacatcagaggttaaaaaagcattgtcatga

SEQ ID NO: 2259 - protein, 246 aa, Arabidopsis thaliana
MATGGAAADLEDVQTVDLMSELLRRLKCSQKPDKRLIFIGPPGSGKGTQSPVVKDEYCLCHLSTGDMLRAAVASKTPLGVKAKEAMEKGELVSDDLVVGIIDEAMNKPKCQKGFILDGFPRTVTQAEKLDEMLKRRGTEIDKVLNFAIDDAILEERITGRWIHPSSGRSYHTKFAPPKTPGVDDITGEPLIQRKDDNADVLKSRLAAFHSQTQPVIDYYAKKAVLTNIQAEKAPQEVTSEVKKALS

SEQ ID NO: 2260 - DNA, 663 bp, Schizosaccharomyces pombe
  CDS (1)..(663)
atggctggcatgagacttattttagttggacctccaggtgctggaaaaggcactcaggcccccaacattcagaagaaatatggcatcgcccatcttgctactggtgacatgttgcgctctcaagtagctcgtcaaactgagctcggtaaagaagctaagaagatcatggatcagggtggtcttgtcagcgatgacattgtcactggtatgatcaaggatgagatcctcaacaatcctgagtgcaagaacggcttcatcctggacggtttcccccgtactgtcgtccaagctgaaaagcttaccgctcttcttgatgaactcaaacttgacttgaatactgtccttgagttacaagttgatgatgaacttttggtcagacgtatcactggtcgtctcgtccatcccggatctggccgtagctaccacttggaatttaatcctcctaaagttcctatgaaagacgatgttactggcgagcctcttatccaacgttccgatgataacgccgatgctttgcgcaagcgtttggtcacttatcacgaacaaactactcctgtcgttgagttttacaaaaagaagggtaaatgggctgctgttgatgctgctcaaaaacctgagcaagtttgggagcagatcgttgctattcttgagaaggctgagtaa

SEQ ID NO: 2261 - protein, 220 aa, Schizosaccharomyces pombe
MAGMRLILVGPPGAGKGTQAPNIQKKYGIAHLATGDMLRSQVARQTELGKEAKKIMDQGGLVSDDIVTGMIKDEILNNPECKNGFILDGFPRTVVQAEKLTALLDELKLDLNTVLELQVDDELLVRRITGRLVHPGSGRSYHLEFNPPKVPMKDDVTGEPLIQRSDDNADALRKRLVTYHEQTTPVVEFYKKKGKWAAVDAAQKPEQVWEQIVAILEKAE

SEQ ID NO: 2262 - DNA, 669 bp, Saccharomyces cerevisiae
  CDS (1)..(669)
atgtctagctcagaatccattagaatggtcctaattggcccacctggtgccggtaaaggtactcaagctccaaatttgcaagagcgtttccatgccgctcacttggccactggtgacatgttgagatctcaaatcgcaaagggcactcaattaggtttggaagcaaagaaaattatggaccaaggtggtttagtctctgatgacattatggttaacatgatcaaggatgaattgaccaacaatccagcttgtaagaatgggttcatcttggacggtttcccaagaaccattcctcaggctgaaaaattggaccaaatgttgaaagaacaaggaactcctttggaaaaagccatcgaattgaaggttgatgatgaattgttggttgccagaattaccggtagattaattcacccagcctctggcagatcctaccacaagatctttaacccaccaaaggaagacatgaaggatgacgtcaccggtgaagctttagttcaaagatctgatgacaatgcagacgccttgaagaagagattagctgcttaccatgctcaaaccgaaccaattgttgacttttacaaaaagaccggtatctgggctggtgttgatgcttcccaacctcctgctactgtttgggctgacatcttgaacaagctaggtaaggattaa

SEQ ID NO: 2263 - protein, 222 aa, Saccharomyces cerevisiae
MSSSESIRMVLIGPPGAGKGTQAPNLQERFHAAHLATGDMLRSQIAKGTQLGLEAKKIMDQGGLVSDDIMVNMIKDELTNNPACKNGFILDGFPRTIPQAEKLDQMLKEQGTPLEKAIELKVDDELLVARITGRLIHPASGRSYHKIFNPPKEDMKDDVTGEALVQRSDDNADALKKRLAAYHAQTEPIVDFYKKTGIWAGVDASQPPATVWADILNKLGKD

SEQ ID NO: 2264 - DNA, 747 bp, Arabidopsis thaliana
  CDS (1)..(747)
atggcaacgagcagtgcggcttctgttgatatggaagatattcagactgttgatctcatgtctgagcttcttcgccgtatgaaatgtgcctctaaacctgacaaacgtctcgttttcatcggtccacctggttcagggaaaggtacacagtctccggtcataaaggatgagttttgtttgtgtcatttgtctactggtgacatgcttagagctgctgttgctgctaagactcctcttggtgtgaaggcaaaggaagcaatggataagggagagcttgtttctgatgacttggttgttggtatcatggatgaagcaatgaacagacccaaatgtcagaaaggtttcattcttgatgggttcccgcggactgtgactcaagcagagaagcttgatgagatgcttaatagaaggggagctcagatagataaggtgcttaattttgcgatcgatgattcggttctcgaagaaagaattactggaaggtggattcacccttcaagtggaagaagctatcatactaaattcgcacctcctaaagttccaggagtcgatgatctgactggagagccattgattcaacgtaaagatgacaatgcggatgttcttagatcaaggctagatgcattccacaagcagacgcaaccggtaattgactattatgcgaagaaggagaatctggtgaacataccggcagagaaggccccggaagaggttacaaaagtggtgaagaaggttgtgtctacatga

SEQ ID NO: 2265 - protein, 248 aa, Arabidopsis thaliana
MATSSAASVDMEDIQTVDLMSELLRRMKCASKPDKRLVFIGPPGSGKGTQSPVIKDEFCLCHLSTGDMLRAAVAAKTPLGVKAKEAMDKGELVSDDLVVGIMDEAMNRPKCQKGFILDGFPRTVTQAEKLDEMLNRRGAQIDKVLNFAIDDSVLEERITGRWIHPSSGRSYHTKFAPPKVPGVDDLTGEPLIQRKDDNADVLRSRLDAFHKQTQPVIDYYAKKENLVNIPAEKAPEEVTKVVKKVVST

SEQ ID NO: 2266 - DNA, 660 bp, Acinetobacter sp
  CDS (1)..(660): transl_table=11
atgcgcattattttactcggaccacctggagcaggtaaaggtactcaggctcagttgatctgtaagcgctatgatatcccacaaatttcaaccggtgatatgctccgagctgcgattcgtgaaggaactgaacttggcttaaaagctaaaagtgtgatggagtctggtggactggtatcagatgagctaattattggtctggtaaaagagcgtattgctcaacccgattgcgaaaacggctgcattttcgatggtttcccgcgtacgattccacaagctgaagctttggaaaatgcaggaattacaattgatcacgtgattgagatcgctgtaccagacgaagaaattgtaaagcgtctctctggtcgacgtcagcatccagcttctggtcgtgtctatcacattgagtacaatccacctaaagtggaaggtaaagatgatgtgacaggtgaagaacttgttcagcgtccagatgatttagaagaaaccattcgtaagcgtcttgggtcttaccacagtgaaactgaacaattggttggtttctatcaaggtcgtgcagcgtctggtgaaaatgcaccgacatataacaaattagatggcttacgtaccattgatgtggttcaaaaagatctatttgctattttagacgagactaaataa

SEQ ID NO: 2267 - protein, 219 aa, Acinetobacter sp
MRIILLGPPGAGKGTQAQLICKRYDIPQISTGDMLRAAIREGTELGLKAKSVMESGGLVSDELIIGLVKERIAQPDCENGCIFDGFPRTIPQAEALENAGITIDHVIEIAVPDEEIVKRLSGRRQHPASGRVYHIEYNPPKVEGKDDVTGEELVQRPDDLEETIRKRLGSYHSETEQLVGFYQGRAASGENAPTYNKLDGLRTIDVVQKDLFAILDETK

SEQ ID NO: 2268 - DNA, 657 bp, Acidovorax sp
  CDS (1)..(657): transl_table=11
atgagactgattctgctcggcgctcccggcgccggaaagggtacgcaggccgcgttcatctgccagaaattcggcatcccccagatctccaccggcgacatgctgcgcgccgccgtcaaggccggcacgcccctgggcctgcaagccaaggccgtcatggatgcgggccagctcgtcagcgacgacctgatcatcaacctggtgaaggagcgcatcgccgagcccgactgtgcccagggtttcctgttcgacggcttcccacgcaccatcccccaggcagacgccatgaaagccgcgggcgtgaagctcgactatgtgctggagatcgacgtgccgttcgacgccatcatcgagcgcatgagcggccgccgctcccacccggcttcgggccgcacctaccacgtgaagttcaacccgcccaaggtcgaaggcaaggacgacgtgacgggcgagcccctggtgcagcgcgaggacgacaaggaagaaaccgtcaagaagcgcctgcaggtctacagcgaccagacccgcccgctggtggactattactccagctgggccaagaccgatcccgccaacgcccccaagtaccgtgccattcaaggcaccggcagcgtggaggaaatcacccagcgcgccctgacggcgctgtcgagctga

SEQ ID NO: 2269 - protein, 218 aa, Acidovorax sp
MRLILLGAPGAGKGTQAAFICQKFGIPQISTGDMLRAAVKAGTPLGLQAKAVMDAGQLVSDDLIINLVKERIAEPDCAQGFLFDGFPRTIPQADAMKAAGVKLDYVLEIDVPFDAIIERMSGRRSHPASGRTYHVKFNPPKVEGKDDVTGEPLVQREDDKEETVKKRLQVYSDQTRPLVDYYSSWAKTDPANAPKYRAIQGTGSVEEITQRALTALSS

SEQ ID NO: 2270 - DNA, 591 bp, Agrobacterium tumefaciens
  CDS (1)..(591): transl_table=11
atgagactgatatttttgggtccgccgggtgcgggcaagggaacccaggccaagcggctgactgacaagtacgggatcccgcagctttccaccggtgacatgcttcgcgctgcggtcagcgcgggcaccgaaatcggcaagcgcgccaaagccgtcatggacgccggcgggctcgtttccgacgatatcgtcaatcagatcgtttccgaacgcatcgaagcaccggactgtgccaagggctttattctcgacggctatccgcgcaccgttccgcaggccaaggcgcttgcggacaatatgcgcaagaagaatcaggtcctggatgccgtcatcgaactgaaggtggatgaagaggcgttgattcgccgaatcgaaaaccgcgtagctgaaaccattgccgctggcggcacggttcgctcggatgacaatccggaagctttccgcaagcgtctgacagaatatcgcgaaaagaccgcgccgctgtctgcctattacagcgaacagggcgagctggtgacgcttgatggcatggctgatgtcgatgccgtcactgaggccattgagcgcgttctcgagaaagcctctgcctga

SEQ ID NO: 2271 - protein, 196 aa, Agrobacterium tumefaciens [sequence omitted]

SEQ ID NO: 2272 - DNA, 621 bp, Aquifex aeolicus
  CDS (1)..(621): transl_table=11
atgatactggttttcctaggacctcccggtgcaggaaagggaactcaggctaagagactcgcaaaagagaagggctttgtccacatatccacaggagatatcttaagggaagccgttcagaagggaacacccctcggtaaaaaagccaaagaatacatggaaaggggggaactcgttcccgatgacttaataatagctttaatagaggaagtatttccgaagcacggaaacgtcatatttgacggctttcccagaaccgtaaaacaggcagaggcccttgacgagatgcttgaaaagaaaggacttaaagttgaccatgttctcctctttgaagttcccgacgaggtggtaatagaaaggctttcaggaagaaggataaatcccgaaacgggagaggtttaccacgtgaagtacaacccaccgcctcccggtgtgaaggttattcaaagggaagacgacaaacccgaagtcattaaaaagagactcgaggtttacagagagcaaaccgctcccctcattgaatattacaagaagaaaggtatattaagaataatagacgcaagtaaacctgttgaggaggtttacaggcaagttttagaggttataggagatggcaattga

SEQ ID NO: 2273 - protein, 206 aa, Aquifex aeolicus
MILVFLGPPGAGKGTQAKRLAKEKGFVHISTGDILREAVQKGTPLGKKAKEYMERGELVPDDLIIALIEEVFPKHGNVIFDGFPRTVKQAEALDEMLEKKGLKVDHVLLFEVPDEVVIERLSGRRINPETGEVYHVKYNPPPPGVKVIQREDDKPEVIKKRLEVYREQTAPLIEYYKKKGILRIIDASKPVEEVYRQVLEVIGDGN

SEQ ID NO: 2274 - DNA, 654 bp, Archaeoglobus fulgidus
  CDS (1)..(654): transl_table=11
atgaacctgatttttctcggcccacccggagcgggtaagggtacgcaggcaaagagagtttccgaaaagtatggcattccgcagatttcaaccggtgatatgctgagggaggctgttgctaaggggacggagctgggaaaaaaggccaaggagtacatggacaagggggagcttgtgcctgacgaggttgttattggcatagtcaaggagaggctgcagcagcctgactgtgagaagggctttatcctcgacggatttccgagaactctcgctcaagcagaggctctcgacgagatgctcaaagagctgaacaagaaaatcgatgccgtcatcaacgttgttgttcctgaggaggaagtcgtaaagagaatcacgtacagaagaacgtgcagaaactgcggagccgtctatcatctgatttacgctccacccaaggaggataacaagtgtgacaagtgcggtggagagctataccagagagacgacgataaggaggaaactgtgagggagaggtacagggtttacaagcaaaatacggagccgcttatcgattactacagaaagaagggcatactctacgacgtggacggaaccaaagatatagagggcgtctggaaagagatagaggccatattggaaaagatcaaatcctga

SEQ ID NO: 2275 - protein, 217 aa, Archaeoglobus fulgidus
MNLIFLGPPGAGKGTQAKRVSEKYGIPQISTGDMLREAVAKGTELGKKAKEYMDKGELVPDEVVIGIVKERLQQPDCEKGFILDGFPRTLAQAEALDEMLKELNKKIDAVINVVVPEEEVVKRITYRRTCRNCGAVYHLIYAPPKEDNKCDKCGGELYQRDDDKEETVRERYRVYKQNTEPLIDYYRKKGILYDVDGTKDIEGVWKEIEAILEKIKS

SEQ ID NO: 2276 - DNA, 654 bp, Azoarcus sp
  CDS (1)..(654): transl_table=11
atgcgactgattctgttgggaccgccgggcgccggcaagggcacgcaagcgaacttcatcaaggagaagttcggcattccgcagatctccaccggcgacatgctgcgcgccgcggtcaaggccggcaccccgctgggcatcgaggccaagaaggtgatggacgccggtggcctggtgtccgacgagatcatcatcggcctggtgaaggaccgcctgcagcaggacgattgcaaggccggctacatgttcgacggcttcccgcgcaccatccctcaggccgacgcgatgaaggacgccggcgtgccgatcgacttcgtgctcgagatcgacgtgcccgacagcgagatcgtggaacgcatgagcggccgccgcgcccacctggcctccggccgcacctaccacgtcaagtacaacccgcccaaggtcgagggcaaggatgacgtcaccggcgaagacctggtgcagcgcgacgacgacaaggaagagaccgtcaagaagcgcctggacgtctaccacgcccagaccaagccgctggtcgagtactacagcagctgggccgcctccggcgacgccaaggcgcccaaggtgcgcaagatctccggcctcggtgccgtggatgagattaccgcccgcgccttcgacgcgctgaagtaa

SEQ ID NO: 2277 - protein, 217 aa, Azoarcus sp
MRLILLGPPGAGKGTQANFIKEKFGIPQISTGDMLRAAVKAGTPLGIEAKKVMDAGGLVSDEIIIGLVKDRLQQDDCKAGYMFDGFPRTIPQADAMKDAGVPIDFVLEIDVPDSEIVERMSGRRAHLASGRTYHVKYNPPKVEGKDDVTGEDLVQRDDDKEETVKKRLDVYHAQTKPLVEYYSSWAASGDAKAPKVRKISGLGAVDEITARAFDALK

SEQ ID NO: 2278 - DNA, 654 bp, Azoarcus sp
  CDS (1)..(654): transl_table=11
atgcgtctgattctgttgggaccgccgggcgcgggaaaaggtacgcaggcgaacttcatcaaggagaagttcggcattccgcagatttccacgggtgacatgctgcgcgccgccgtcaaggccggcaccccgttgggcgtcgaggcgaagaaagtcatggacgcgggcggcttggtgtccgatgacatcatcatcggcctcgtgaaggatcgcctgaaggaagacgactgcaagtccggctacatgttcgacggcttcccgcggacgatcccgcaggccgacgcgatgaaggaagccggcgtgccgatcgatttcgtcctcgaaatcgacgtgcccgacagcgagatcatcgagcgcatgagcgggcggcgcgcgcacctggcgtcggggcgcacctaccatgtcaagtacaatccgccgaaagtcgccggcaaggacgacctcaccggcgaagacctggtccagcgtgacgacgaccgcgaggagacggtggcgaagcgcctcgaggtctatcattcgcagaccaagccgctcgtcgagtactactcgaagtgggccgcgtcgggcgagccgggcacgccgaaagtgcgcaagatcagtggcctcggcgcggtggacgagatcacttcgcgggctttcgcggcgctgaagtaa

SEQ ID NO: 2279 - protein, 217 aa, Azoarcus sp
MRLILLGPPGAGKGTQANFIKEKFGIPQISTGDMLRAAVKAGTPLGVEAKKVMDAGGLVSDDIIIGLVKDRLKEDDCKSGYMFDGFPRTIPQADAMKEAGVPIDFVLEIDVPDSEIIERMSGRRAHLASGRTYHVKYNPPKVAGKDDLTGEDLVQRDDDREETVAKRLEVYHSQTKPLVEYYSKWAASGEPGTPKVRKISGLGAVDEITSRAFAALK

SEQ ID NO: 2280 - DNA, 651 bp, Bacillus cereus
  CDS (1)..(651): transl_table=11
atgaacttaattttaatggggcttcctggtgctggtaaaggtacacaagccgaacagattgttgccaagtataacatccctcacatctcaacaggagatatgttccgtgcagctatgaaggctgaaactgaaatgggtttacaagcaaaatcttttattgataaaggtgcacttgttccagatgaagttacaatcggaatcgttcgtgaacgtttaagccaagaagactgcgtaagaggcttcttattagatggtttcccacgaactgttgcacaagcatcagctcttgaagagattatgaaagatcttggcaaaaaaatcgactatgttttaaacattaatgtggattcagggttgttattaaagcgccttacaggccgtcgcatttgtaaagagtgcggtgcgacttaccacttagaattcaatccgccagcaaaagctgacgtgtgcgataaatgtggtggcgaattatatcaacgctctgatgacaatgaagaaactgtagcaaatcgcttagatgtaaatattaagcaaactaaacctttgcttgatttctacgaggagcttggttacttacaaagcattaatggtgagcaagatatcaataaagtatttgctgatatcgatgttctcatcggaggcttagcgtaa

SEQ ID NO: 2281 - protein, 216 aa, Bacillus cereus
MNLILMGLPGAGKGTQAEQIVAKYNIPHISTGDMFRAAMKAETEMGLQAKSFIDKGALVPDEVTIGIVRERLSQEDCVRGFLLDGFPRTVAQASALEEIMKDLGKKIDYVLNINVDSGLLLKRLTGRRICKECGATYHLEFNPPAKADVCDKCGGELYQRSDDNEETVANRLDVNIKQTKPLLDFYEELGYLQSINGEQDINKVFADIDVLIGGLA

SEQ ID NO: 2282 - DNA, 570 bp, Bacteroides fragilis
  CDS (1)..(570): transl_table=11
atgctgaacattgtaattttcggtgctcccggttcaggaaagggaacacaaagcgaacgtattgttgagaaatacggaattaatcacatttcaacaggagatgtattgcgtgcagaaattaaaaacggcacagaactgggtaaaacagctaaaggctacattgatcagggacagttgattccggatgaattgatggtagacattctggcaagtgtgtttgatagtttcaaagatagcaaaggggttatttttgacggtttcccaagaactattccacaggctgaggcgttgaaagtgatgttgaaagaacgtggtcaggacatctctgtgatgttggatctggatgttccggaagaagaactgatgactcgtctgattaaacgtggtaaggaatcgggccgtgcagatgataatgaagagaccatcaaaaaacgtttggttgtatataatacacagacttcaccgttgaaagaatattataaaggcgaaggcaaataccagcatatcaatggtcttggaaccatggaaggtatcttcgaagatatttgtaaagcggtagatacattataa

SEQ ID NO: 2283 - protein, 189 aa, Bacteroides fragilis
MLNIVIFGAPGSGKGTQSERIVEKYGINHISTGDVLRAEIKNGTELGKTAKGYIDQGQLIPDELMVDILASVFDSFKDSKGVIFDGFPRTIPQAEALKVMLKERGQDISVMLDLDVPEEELMTRLIKRGKESGRADDNEETIKKRLVVYNTQTSPLKEYYKGEGKYQHINGLGTMEGIFEDICKAVDTL

SEQ ID NO: 2284 - DNA, 654 bp, Bacillus halodurans
  CDS (1)..(654): transl_table=11
ttgaatctgatccttatgggacttcctggtgctggtaaaggtacacaggcagaaaagatcattgagaagtacggcatcccacacatttcaacaggtgacatgtttcgtgctgcgatgaagaacgagaccgagcttggattaaaagcaaaatcgtacatggatgcaggggaactggttcctgatgaagtaacgattggtatcgttcgggatcgtctcagtcaagacgattgccaaaatggctttttgcttgacgggtttccacgaactgtcgctcaagcagaagcgttagaagatattttggcgtcacttgataaaaagcttgattatgtcattaacattgatgtgcctgaacagttgctgatggaccgtctaacgggtcgtcgtgtttcgcctacatcaggaagaacgtatcatgtcattttcaaccctcctaaggttgaaggcatttgcgatgtggacggcagcgagttgattcaacgtgatgatgataagccggaaacggtgaaaaagcgccttgaagtcaaccagaagcaagctcagccacttattgatttttattctgaaaaaggctaccttcaaaacattaacggagatcaagacatctcccgagtgtttgaagatatcaacgaacttctgaaaggactctcttcatga

SEQ ID NO: 2285 - protein, 217 aa, Bacillus halodurans
MNLILMGLPGAGKGTQAEKIIEKYGIPHISTGDMFRAAMKNETELGLKAKSYMDAGELVPDEVTIGIVRDRLSQDDCQNGFLLDGFPRTVAQAEALEDILASLDKKLDYVINIDVPEQLLMDRLTGRRVSPTSGRTYHVIFNPPKVEGICDVDGSELIQRDDDKPETVKKRLEVNQKQAQPLIDFYSEKGYLQNINGDQDISRVFEDINELLKGLSS

SEQ ID NO: 2286 - DNA, 654 bp, Bacillus licheniformis
  CDS (1)..(654): transl_table=11
atgaacttagtcttaatgggactgcctggagccggtaaagggacacaggctgaacggattgttgaagattttgggatacctcatatctcaacaggagacatgttccgcgctgcgatgaaagaagaaacggatctgggactcgaagccaaatcatacattgataaaggtgagcttgttccggatgaagtgacaattggtattgtcagggagagacttggcaagaatgattgtgacggaggttttcttctggacggatttccgagaacagtcgctcaagctgaagcacttgaggaaattcttaaaggacttggcaagtcgattgaccatgtcatcaacattcaagtcgataaagatgcattgatggaacgtctgacaggacgcagaatctgcaaaaactgcggtgcaacttatcatttagtctttaatccgcctgcaaaagaaaatgtatgcgacaagtgtggaggagagctttatcagcgtgaagacgataatgaagctaccgtatccacgcggttagaggtcaacatgaagcaaacccagcctttactcgatttctatgaagataaaggatatctcgtaaacattgacgggcagaagcacatcaatgaagtttacgctgatataaaggagcttctcggaggccgggacaaatga

SEQ ID NO: 2287 - protein, 217 aa, Bacillus licheniformis
MNLVLMGLPGAGKGTQAERIVEDFGIPHISTGDMFRAAMKEETDLGLEAKSYIDKGELVPDEVTIGIVRERLGKNDCDGGFLLDGFPRTVAQAEALEEILKGLGKSIDHVINIQVDKDALMERLTGRRICKNCGATYHLVFNPPAKENVCDKCGGELYQREDDNEATVSTRLEVNMKQTQPLLDFYEDKGYLVNIDGQKHINEVYADIKELLGGRDK

SEQ ID NO: 2288 - DNA, 654 bp, Bacillus clausii
  CDS (1)..(654): transl_table=11
atgaatttaattttaatgggattgccaggcgccggcaaaggaacacaggcggagaaaattgtgaacgactatggcattccgcacatttctacaggcgatatgtttcgcgctgcgatgaaaaatgaaacggagcttggcttgaaagcgaagtcgtttatagacgcaggtgatcttgtccctgacgaagtaacaattggaatagtcaaagagcgtttgtcggaagacgattgcgagaatgggtttttgctcgatggttttcctcgtaccattgcccaggcggaagcgctggaaggcattctttcatccctcggcaaacagcttgaccatgtgttgaatatcgcagtcccgaaagaacttctgatggagcgtttaacgggacgccgcgtgtctcctactacgggtaagacataccatattgtgtataacccgccaaaagtggaaggcaaatgcgatattgacggcagcgatttaattcaacgcgacgacgacaagccggaaacggtcaaaagacgcctagaagtaaatgaaaagcaaacgaagccactcattgacttttatgaagcaaaaggctacttaagacaagtggacggcaaccaagacatgaacactgtgtatgctgacataaaagcgattctatcggagaagcgtgcatga

SEQ ID NO: 2289 - protein, 217 aa, Bacillus clausii
MNLILMGLPGAGKGTQAEKIVNDYGIPHISTGDMFRAAMKNETELGLKAKSFIDAGDLVPDEVTIGIVKERLSEDDCENGFLLDGFPRTIAQAEALEGILSSLGKQLDHVLNIAVPKELLMERLTGRRVSPTTGKTYHIVYNPPKVEGKCDIDGSDLIQRDDDKPETVKRRLEVNEKQTKPLIDFYEAKGYLRQVDGNQDMNTVYADIKAILSEKRA

SEQ ID NO: 2290 - DNA, 654 bp, Bacillus stearothermophilus
  CDS (1)..(654): transl_table=11
atgaatttagtgctgatggggctgccgggtgccggcaaaggcacgcaggccgagaaaatcgtagcggcttacggtattccgcacatttcaacgggcgatatgtttcgggcggcgatgaaggaaggaacgccgctagggcttcaagcgaagcaatatatggaccgcggcgaccttgttccggatgaagtgacgatcggcattgtccgtgaacggctgagcaaagacgattgccaaaacggttttttgctcgatggattcccgcgcacggtcgctcaagcggaggcgctggaaacgatgttggccgacattggccgcaaacttgactatgtcatccatatcgatgtccgccaagacgttttaatggagcgcttgaccggcagacggatttgccgcaactgcggagcgacgtaccatcttatttttcatccgccggcgaaaccgggtgtttgcgataagtgcgggggggaattgtaccagcgcgccgatgataacgaagcgacagtggcgaaccggctcgaagtgaatatgaaacaaatgaagccgctcgttgacttttacgaacaaaaaggctatttgcgcaacattaacggcgaacaggacatggaaaaggtgtttgccgatattcgtgaattgctcgggggacttgctcgatga

SEQ ID NO: 2291 - protein, 217 aa, Bacillus stearothermophilus
MNLVLMGLPGAGKGTQAEKIVAAYGIPHISTGDMFRAAMKEGTPLGLQAKQYMDRGDLVPDEVTIGIVRERLSKDDCQNGFLLDGFPRTVAQAEALETMLADIGRKLDYVIHIDVRQDVLMERLTGRRICRNCGATYHLIFHPPAKPGVCDKCGGELYQRADDNEATVANRLEVNMKQMKPLVDFYEQKGYLRNINGEQDMEKVFADIRELLGGLAR

SEQ ID NO: 2292 - DNA, 570 bp, Bacteroides thetaiotaomicron
  CDS (1)..(570): transl_table=11
atgttgaacattgtaattttcggtgctccgggttcaggaaaaggaacgcagagcgaacgtattgtagaaaagtatggaatcaaccacatctcgacaggagatgtattgcgtgcagaaatcaagaacggcacggagctgggcaaaactgctaaaggttacatcgaccagggtcagttgattccggatgaattaatgattgatattctggcaagcgtattcgatagcttcaaagacagcaaaggtgtaattttcgacggtttcccaagaacaattgcacaggcggaagcattaaagaaaatgttggcggaaagaggacaggatgtttctgtaatgttggatctcgaagttccggaagatgaactgatggtgcgtctgatcaaacgtggcaaagactccggtcgtgctgatgacaacgaagaaacaatcaaaaaacgtctgcatgtatatcattcacagacatctccgctgatcgactggtacaagaacgaaaagaaataccagcacatcaacggtctgggtactatggatggtatcttcgctgatatctgcgaagcggtagacaaattataa

SEQ ID NO: 2293 - protein, 189 aa, Bacteroides thetaiotaomicron
MLNIVIFGAPGSGKGTQSERIVEKYGINHISTGDVLRAEIKNGTELGKTAKGYIDQGQLIPDELMIDILASVFDSFKDSKGVIFDGFPRTIAQAEALKKMLAERGQDVSVMLDLEVPEDELMVRLIKRGKDSGRADDNEETIKKRLHVYHSQTSPLIDWYKNEKKYQHINGLGTMDGIFADICEAVDKL

SEQ ID NO: 2294 - DNA, 636 bp, Bdellovibrio bacteriovorus
  CDS (1)..(636): transl_table=11
atgaacttgatcctgtttggagccccgggggccggtaaaggtacgcagtctgagcttttgattaaacgccagggaatgacacagatcagcactggcgatctattcagagcagccattaaagggcagacggaccttggtaaaaaggcccaggaatttatggataagggtcaacttgtgccggatagcatcgttatcggcatggttgaagaagtccttcaaaaaggcgtccaaaactttattttagatggtttccctagaactgtggctcaggctcaggctctagatgaattacttgtaaaaatgaatctatccatcgggaaggctatcttccttgaggttccaatgagaatcttgatggataggctgactggcagacgcgtttgtaaaaattgcggcgctgtctatcatatagtcagtaagccctccaaagtagagggcaaatgtgatttgtgcggtggtgaggtcattcaacggaatgatgacaaggcagaggttattgagacccgcctgaagacttatgaagagttcacaagccccctaaaagagttttataaaaaatcaggcaaatatactgaagtggacggaaatagggacaccgaagaagtctataaagagatcgaaaaaataataaaatag

SEQ ID NO: 2295 - protein, 211 aa, Bdellovibrio bacteriovorus
MNLILFGAPGAGKGTQSELLIKRQGMTQISTGDLFRAAIKGQTDLGKKAQEFMDKGQLVPDSIVIGMVEEVLQKGVQNFILDGFPRTVAQAQALDELLVKMNLSIGKAIFLEVPMRILMDRLTGRRVCKNCGAVYHIVSKPSKVEGKCDLCGGEVIQRNDDKAEVIETRLKTYEEFTSPLKEFYKKSGKYTEVDGNRDTEEVYKEIEKIIK

SEQ ID NO: 2296 - DNA, 561 bp, Bifidobacterium longum
  CDS (1)..(561): transl_table=11
atgcgtctgctcatcatgggcccccagggcgtgggcaagggcacccaggctgctctgctcgccgaacacttcaacatccccaccatctccaccggcgacatcttccgctacaacatcaagaacaagaccgaactcggccttgaggcgatgagctacaccgacaagggcgagctggttccggactccctgaccaacaagatcgtcaaggatcgtctggccaaggaagactgcaagaacggctggatcctcgacggctacccgcgtaacgccgcccaggtcaccgctctcgacgagatgctcgccgacctcgacactccgctcgaccacgtggtggccctcgaagccgcccgcgacgtgctgctggagcgtatgaagaagcgcgccgccgagcagggccgcgctgacgacactccggaggccatcgccaagcgcctggagacctatgagaaggaaaccgctccgctgctcgatatctacgaggcccgtggcctgctcgtcgtggtcaacggcgtcggcgacatcgacgagatcagcggccgtatcatcagccacctcgagtag

SEQ ID NO: 2297 - protein, 186 aa, Bifidobacterium longum [sequence omitted]

SEQ ID NO: 2298 - DNA, 681 bp, Blochmannia floridanus
  CDS (1)..(681): transl_table=11
atgtacaatattatctttttaggtcctccaggttctggaaaaggaactcaggcacatttaatttctactaaatatggaatatctaatatttctgcaggagagatattaaaacatgcattatctgtgacaaaatttcattttaattttaatactgataatatgttaaatcagataaattctggaaatttagtagatgatgaattaatcattccattaattattaaacgtattagacaagatgattgtaaaaagggttttatattagatgggtttcctagaacaataggacaagcaatagctattgaacaaaataaaattgctattgattttgtaatagaatttaatatttcagattctgcaattattaaccgaatagtagggaggcaagttcacataaaatctgggagaacatatcatattaaatttaatcctcctaaattagatgggatagatgatattactggagaaaaattagttattcgtgctgatgataatgcacaggtaatactgcaaagattaaatcagtaccgaaaatataccatatttctttcagattattatcaaaaacaatctcaacaaggaaatatgcgctattttattattaatgggaatcaagaaattactaaaatttataaagaattaattaatatttttaattttcatatatttaaaatgaattga

SEQ ID NO: 2299 - protein, 226 aa, Blochmannia floridanus
MYNIIFLGPPGSGKGTQAHLISTKYGISNISAGEILKHALSVTKFHFNFNTDNMLNQINSGNLVDDELIIPLIIKRIRQDDCKKGFILDGFPRTIGQAIAIEQNKIAIDFVIEFNISDSAIINRIVGRQVHIKSGRTYHIKFNPPKLDGIDDITGEKLVIRADDNAQVILQRLNQYRKYTIFLSDYYQKQSQQGNMRYFIINGNQEITKIYKELINIFNFHIFKMN

SEQ ID NO: 2300 - DNA, 657 bp, Bordetella bronchiseptica
  CDS (1)..(657): transl_table=11
atgcgtctcattctgctcggaccgcccggagccggcaaaggcacccaagccgcctttctcacccaacactacggcatcccgcagatatccaccggtgacatgctgcgcgccgccgtcaaggccggcacgccgctgggcctggaagccaagaaggtcatggacgcgggcggcctggtctcggacgacctgatcatcggcctggtgcgcgatcgcctgacccagcccgattgcgccaacggctacctgttcgacggtttcccgcgcaccatcccgcaggccgacgcgctcaagagcgccggcatcgcgctggattacgtggtcgagatcgaagtgccggaaagcgacatcatcgaacgcatgagcggacgccgcgtgcacccggccagcggccgcagctaccacgtacgcttcaatccgcccaaggccgaaggcgtggacgacgtcacgggcgaaccgctggtgcagcgcgacgacgaccgcgaggaaaccgtgcgccatcgtctcaacgtctaccagaaccagacccgcccgctggtcgactactactcgtcctgggcccagtccgatgccgccgcggcgcccaagtaccgcaagatctccggcgtcggctcggtcgacgaaatcaagagccgcctgtcccaggctctgcagagctaa

SEQ ID NO: 2301 - protein, 218 aa, Bordetella bronchiseptica
MRLILLGPPGAGKGTQAAFLTQHYGIPQISTGDMLRAAVKAGTPLGLEAKKVMDAGGLVSDDLIIGLVRDRLTQPDCANGYLFDGFPRTIPQADALKSAGIALDYVVEIEVPESDIIERMSGRRVHPASGRSYHVRFNPPKAEGVDDVTGEPLVQRDDDREETVRHRLNVYQNQTRPLVDYYSSWAQSDAAAAPKYRKISGVGSVDEIKSRLSQALQS

SEQ ID NO: 2302 - DNA, 657 bp, Bordetella parapertussis
  CDS (1)..(657): transl_table=11
atgcgtctcattctgctcggaccgcccggagccggcaaaggcacccaagccgcctttctcacccaacactacggcatcccgcagatatccaccggtaacatgctgcgcgccgccgtcaaggccggcacgccgctgggcctggaagccaagaaggtcatggacgcgggcggcctggtctcggacgacctgatcatcggcctggtgcgcgatcgcctgacccagcccgattgcgccaacggctacctgttcgacggtttcccgcgcaccatcccgcaggccgacgcgctcaagagcgccggcatcgcgctggattacgtggtcgagatcgaagtgccggaaagcgacatcatcgaacgcatgagcggacgccgcgtgcacccggccagcggccgcagctaccacgtacgcttcaatccgcccaaggccgaaggcgtggacgacgtcacgggcgaaccgctggtgcagcgcgacgacgaccgcgaggaaaccgtgcgccatcgtctcaacgtctaccagaaccagacccgcccgctggtcgactactactcgtcctgggcccagtccgatgccgccgcggcgcccaagtaccgcaagatctccggcgtcggctcggtcgacgaaatcaagagccgcctgtcccaggctctgcagagctaa

SEQ ID NO: 2303 - protein, 218 aa, Bordetella parapertussis
MRLILLGPPGAGKGTQAAFLTQHYGIPQISTGNMLRAAVKAGTPLGLEAKKVMDAGGLVSDDLIIGLVRDRLTQPDCANGYLFDGFPRTIPQADALKSAGIALDYVVEIEVPESDIIERMSGRRVHPASGRSYHVRFNPPKAEGVDDVTGEPLVQRDDDREETVRHRLNVYQNQTRPLVDYYSSWAQSDAAAAPKYRKISGVGSVDEIKSRLSQALQS

SEQ ID NO: 2304 - DNA, 657 bp, Bordetella pertussis
  CDS (1)..(657): transl_table=11
atgcgtctcattctgctcggaccgcccggagccggcaaaggcacccaagccgcctttctcacccaacactacggcatcccgcagatatccaccggtgacatgctgcgcgccgccgtcaaggccggcacgccgctgggcctggaagccaagaaggtcatggacgcgggcggcctggtctcggacgacctgatcatcggcctggtgcgcgatcgcctgacccagcccgattgcgccaacggctacctgttcgacggtttcccgcgcaccatcccgcaggccgacgcgctcaagagcgccggcatcgcgctggattacgtggtcgagatcgaagtgccggaaagcgacatcatcgaacgcatgagcgaacgccgcgtgcacccggccagcggccgcagctaccacgtacgcttcaatccgcccaaggccgaaggcgtggacgacgtcacgggcgaaccgctggtgcagcgcgacgacgaccgcgaggaaaccgtgcgccatcgtctcaacgtctaccagaaccagacccgcccgctggtcgactactactcgtcctgggcccagtccgatgccgccgcggcgcccaagtaccgcaagatctccggcgtcggctcggtcgacgaaatcaagagccgcctgtcgcaggctctgcagagctaa

SEQ ID NO: 2305 - protein, 218 aa, Bordetella pertussis
MRLILLGPPGAGKGTQAAFLTQHYGIPQISTGDMLRAAVKAGTPLGLEAKKVMDAGGLVSDDLIIGLVRDRLTQPDCANGYLFDGFPRTIPQADALKSAGIALDYVVEIEVPESDIIERMSERRVHPASGRSYHVRFNPPKAEGVDDVTGEPLVQRDDDREETVRHRLNVYQNQTRPLVDYYSSWAQSDAAAAPKYRKISGVGSVDEIKSRLSQALQS

SEQ ID NO: 2306 - DNA, 648 bp, Buchnera aphidicola subsp
  CDS (1)..(648): transl_table=11
atgcgtattattttgctaggagcacctggaacaggaaagggtacacaaggaaaatttattacagaaaaatataaaattcctcaaatatctacaggtgatatgctccgagaaagtgttgtgttgaaaaataaaataggaatgattattaaaaatattattgaagagggtaaactagtctctgatgaaattgtatgtcatttaataaaaaatagaattaaaaaacacgactgtatcaatggttttatattagatggttttccaagaactatccaacaagctttgtacttatcaaaaaaaaatattaaaatagattatgtattagaattcataattccacatgaatatatattagaacgtatatcaggaagacgcatacatatacaatcaggacgtatctatcatgtaaaattcaagcccccaaaaatcaaagacaaagacgatctaactggacaaactttaatcacaagaaaagatgatacaaaagagggcattaaaaaaagattagaagaatacaaaaaagtacatgatcctttagtacaatattatattcatgaaaaaaaacggggtaatataaaattttttcaaattgatgctatgctttcattttcatctattagaaaaaaattagaaacaattttaaaaaaatag

SEQ ID NO: 2307 - protein, 215 aa, Buchnera aphidicola subsp
MRIILLGAPGTGKGTQGKFITEKYKIPQISTGDMLRESVVLKNKIGMIIKNIIEEGKLVSDEIVCHLIKNRIKKHDCINGFILDGFPRTIQQALYLSKKNIKIDYVLEFIIPHEYILERISGRRIHIQSGRIYHVKFKPPKIKDKDDLTGQTLITRKDDTKEGIKKRLEEYKKVHDPLVQYYIHEKKRGNIKFFQIDAMLSFSSIRKKLETILKK

SEQ ID NO: 2308 - DNA, 645 bp, Buchnera aphidicola subsp
  CDS (1)..(645): transl_table=11
atgcgtattattttattaggtgctccaggtacaggaaaaggaacacaagcaaaattgattacagaaaattataatatccccaaaatatcaacaggagatattttaagagaaaatattcaaaaaaaaaatacaattggtaaaaaaatacacaatattttaaaaaatggagaattagtttccaatagaattgtatgtaatttaataggagaaagaattcaaaaaaaagattgtattcatggttttttattagatggatttccaagaacacaaaaacaagctgaatacatatcaaatcttaaaataaaaattgattatgttttagaattaatagttccatacgaattaattttaaagaggatatgtggaagaagagtgcatactccatctggaagaatttataatatcaattataatcctcctagggaagaaggaaaagacgatcttactcaagaaaaattaactatcagagaagatgatacaattgaaattgttaaaaaaagactagaaaactacgaaaaaaattcttttttactaaataaatattatttaagagaaaaaaaattaaaaaagttgcaatattttaaaattgatggaaaacaaagcatttataaaattcaaagagaaataaagatgatgttaaaataa

SEQ ID NO: 2309 - protein, 214 aa, Buchnera aphidicola subsp
MRIILLGAPGTGKGTQAKLITENYNIPKISTGDILRENIQKKNTIGKKIHNILKNGELVSNRIVCNLIGERIQKKDCIHGFLLDGFPRTQKQAEYISNLKIKIDYVLELIVPYELILKRICGRRVHTPSGRIYNINYNPPREEGKDDLTQEKLTIREDDTIEIVKKRLENYEKNSFLLNKYYLREKKLKKLQYFKIDGKQSIYKIQREIKMMLK

SEQ ID NO: 2310 - DNA, 663 bp, Burkholderia sp
  CDS (1)..(663): transl_table=11
atgcgtttgatcctgttgggcgcgcccggcgcgggaaagggcacccaggcaaacttcatcaaggaaaaattcggcatcccgcaaatctcgacgggcgacatgctgcgcgcggccgtgaaggccggcacgccgctcggcgtcgaggcgaagggctacatggacgccggcaagctggtgccggacgcgctgatcatcggcctcgtcaaggagcgcctgaaggaatccgactgcgcgaacggctatctgttcgacggtttcccgcgcacgatcgcgcaggctgacgccatgaaggaagccggcgtcgcgatcgactacgtgctcgagatcgacgtgccgttctcggaaatcatcgagcgcatgagcggccgccgcacgcacccggcatcgggccgcacgtaccacgtcaagttcaacccgccgaaggtcgaaggccacgacgacgtgacgggcgagccgctgatccagcgcgacgacgacaaggaagaaaccgtcaagaagcgcctcgaagtgtacgaagcgcagaccaagccgctgatcacgtactacggcgactgggcgcagcgcggcgaggaaaacggcctgaaggctccgcagtatcgcaagatctcgggcctcggcagcgtcgaggaaatccgcgagcgcgcgtttggcgcactgaagtaa

SEQ ID NO: 2311 - protein, 220 aa, Burkholderia sp
MRLILLGAPGAGKGTQANFIKEKFGIPQISTGDMLRAAVKAGTPLGVEAKGYMDAGKLVPDALIIGLVKERLKESDCANGYLFDGFPRTIAQADAMKEAGVAIDYVLEIDVPFSEIIERMSGRRTHPASGRTYHVKFNPPKVEGHDDVTGEPLIQRDDDKEETVKKRLEVYEAQTKPLITYYGDWAQRGEENGLKAPQYRKISGLGSVEEIRERAFGALK

SEQ ID NO: 2312 - DNA, 663 bp, Burkholderia thailandensis
  CDS (1)..(663): transl_table=11
atgcgtttgatcctgttgggcgcgcccggcgcgggaaagggcacccaggcaaacttcatcaaggaaaagttcggcattccgcaaatctcgacgggcgacatgctgcgcgccgccgtgaaggccggcacgccgctcggcgtcgaagcgaaggcgtacatggatgaaggcaagctcgtgccggattcgctgatcatcggcctcgtcaaggagcgcctgaaggaagcggactgcgcgaacggctacctgttcgacggcttcccgcgcacgatcgcgcaggccgacgcgatgaaggaagcgggcgtcgcgatcgactacgtgctcgagatcgacgtgccgttctcggaaatcatcgagcggatgagcggccgccgcacgcacccggcgtcgggacgcacgtaccacgtgaagttcaacccgccgaaggtcgagggcaaggacgacgtgacgggcgagccgctgattcagcgcgacgacgacaaggaagaaacggtgaagaagcgcctcgacgtgtacgaagcgcagacgaagccgctcatcacgtattacggcgactgggcgacgcgcggcgaggagaacggcctgaaggcgcccgcgtaccggaagatctccggcctcggcgccgtcgacgaaatccgcgcgcgcgtgttcgacgcgctgaagtga

SEQ ID NO: 2313 - protein, 220 aa, Burkholderia thailandensis
MRLILLGAPGAGKGTQANFIKEKFGIPQISTGDMLRAAVKAGTPLGVEAKAYMDEGKLVPDSLIIGLVKERLKEADCANGYLFDGFPRTIAQADAMKEAGVAIDYVLEIDVPFSEIIERMSGRRTHPASGRTYHVKFNPPKVEGKDDVTGEPLIQRDDDKEETVKKRLDVYEAQTKPLITYYGDWATRGEENGLKAPAYRKISGLGAVDEIRARVFDALK

SEQ ID NO: 2314 - DNA, 663 bp, Burkholderia vietnamiensis
  CDS (1)..(663): transl_table=11
atgcgtttgatcctgttgggcgcgcccggcgcgggaaagggcacccaggcaaacttcatcaaggaaaaattcggcatcccgcaaatctcgacgggtgacatgctgcgtgcggccgtcaaggccggctcgccgctcggcgtcgaggcgaagggctacatggatgccggcaagctcgtccccgacgcgctgatcatcggcctcgtgaaggaacgcctgaaggaatccgattgcgcgaacggctacctgttcgacggcttcccgcgcacgatcgcgcaggccgacgcgatgaaggaagccggcgtcgcgatcgactacgtgctcgaaatcgacgtgccgttctcggaaatcgtcgagcgcatgagcggtcgtcgcacgcacgcggcatcgggccgcacctaccacgtgaagttcaatccgccgaaggtcgaaggccaggacgacgtgacgggcgagccgctgatccagcgcgacgacgacaaggaagaaaccgtcaagaagcgcctcgaagtgtacgaagcgcagaccaagccgctgatcacgtattacggcgactgggcgcagcgcggcgaggaaaacggcctgaaggcgccgcagtatcggaagatctcgggcctcggcagcgtcgaggaaatccgcgagcgtgcgttcgaagcgctgaagtaa

SEQ ID NO: 2315 - protein, 220 aa, Burkholderia vietnamiensis
MRLILLGAPGAGKGTQANFIKEKFGIPQISTGDMLRAAVKAGSPLGVEAKGYMDAGKLVPDALIIGLVKERLKESDCANGYLFDGFPRTIAQADAMKEAGVAIDYVLEIDVPFSEIVERMSGRRTHAASGRTYHVKFNPPKVEGQDDVTGEPLIQRDDDKEETVKKRLEVYEAQTKPLITYYGDWAQRGEENGLKAPQYRKISGLGSVEEIRERAFEALK

SEQ ID NO: 2316 - DNA, 666 bp, Burkholderia xenovorans
  CDS (1)..(666): transl_table=11
atgcgtttgattcttttgggtgcgcccggcgcaggtaagggcactcaggccaccttcatcaaggaaaagttcggcattccgcaaatttccaccggtgacatgctgcgcgcagccgttaaagccggcacgccgctcggccttgaagccaagcgcttcatggacgctggtgaactggtcacggacgaactgatcatcaatctggtgaaagaacgtctgcagcagccggactgcgcgaacggctatctgttcgacggttttccgcgcaccattccgcaggccgaggccatgaagcaggccggcgtcgcgatcgactacgtgctggagatcgacgtgccgttcgaggagatcatcgtgcggatgagcggccgccgctcgcacgccgcgtcgggccgtacgtaccacgtcaagttcaatccgccgaaggttgaaggcctggacgacgtgaccggagaaccgctgatccagcgcgacgacgacaaggaagaaacagtcaagaagcgtctggaagtgtatgaggcgcagaccaagccgttgatcgagtactacaccaactgggcgaagaacggcgattcgtcgaccccgttgaaggcgccgcagtatcgccgcatttcgggcctcggcagcgtcgatgaaattcgtgaacgcgcgtttgaggcgttgaagtaa

SEQ ID NO: 2317 - protein, 221 aa, Burkholderia xenovorans
MRLILLGAPGAGKGTQATFIKEKFGIPQISTGDMLRAAVKAGTPLGLEAKRFMDAGELVTDELIINLVKERLQQPDCANGYLFDGFPRTIPQAEAMKQAGVAIDYVLEIDVPFEEIIVRMSGRRSHAASGRTYHVKFNPPKVEGLDDVTGEPLIQRDDDKEETVKKRLEVYEAQTKPLIEYYTNWAKNGDSSTPLKAPQYRRISGLGSVDEIRERAFEALK

SEQ ID NO: 2318 - DNA, 645 bp, Carboxydothermus hydrogenoformans
  CDS (1)..(645): transl_table=11
gtgaaacttttaatcatgggccctccgggggctggaaaaggaacccaggcggaaaaaattgttaaagagtttggtattacccatatttccaccggcgatatgttccgggctgctttaaaaaatcaaacgcccctgggattaaaagcaaaagaatatatggataaaggtgagctggtacccgatgaaatcgtaattgctatggtggaagaaagaatatcggcaccggactgcgcaaaaggctttcttttggacggttttccccggaccataccacaggcggaagctctggataaaaagcttgccgaaatgggaataaccttagatggtgtgatcaatattgaagttccgcgggaagaattaattgaaaggttaactgggagaagggtctgtcgccagtgcggagcaacctaccatgtgaaattcaatccgccaaaagttgaaggagtttgcgatgcttgtggcggagaattataccaaagaagcgatgattctttagaaacagtaagcaaccgtttggatgtctatgaagcgcagaccgcacctttaaaagattattatgccaaaaccggtttgttgaaaaatattgatggtacaaaatctattgaagaagtattcgcttcaattaaaaatgctctccaaaagtaa

SEQ ID NO: 2319 - protein, 214 aa, Carboxydothermus hydrogenoformans
MKLLIMGPPGAGKGTQAEKIVKEFGITHISTGDMFRAALKNQTPLGLKAKEYMDKGELVPDEIVIAMVEERISAPDCAKGFLLDGFPRTIPQAEALDKKLAEMGITLDGVINIEVPREELIERLTGRRVCRQCGATYHVKFNPPKVEGVCDACGGELYQRSDDSLETVSNRLDVYEAQTAPLKDYYAKTGLLKNIDGTKSIEEVFASIKNALQK

SEQ ID NO: 2320 - DNA, 642 bp, Chlamydophila abortus
  CDS (1)..(642): transl_table=11
atgttaaacaagattttttatattattatggggcctccgggatcgggtaagggcacacaatcccagcgtcttgctcatcagttaaagctcccccacatgagttctggagaactgtttcgttctgctatagattcggcttctcctttgggaattaaggctgctgagtatatcaatcaaggtcttctggttcccgatgcgattgtttggggcatggttcaagaagctttaaaccaacccgagtgtcagtctggatgtattattgatgggtttccaagaactctagatcaagcaattcttctgaatgatttctttatgcaatcttacgctgattatcgtgttatacaattagatgtttctaatgaagagattattcgtaggattcattctcgattcatctgtccttcttgtaaacatgtatacaatcaaaatcagggattgagtgagtgccctacgtgtcaaatgaaattagttcgtcgctctgatgacactctagaggtgattcataagagactcgagagttatgagaagttaactgctccgttaattgactattatcaagagctagggaaattaacacgtatcccttctgaggcatctcctgatgatgtttttcaaagtattgaagcttgcataaaagcttga

SEQ ID NO: 2321 - protein, 213 aa, Chlamydophila abortus
MLNKIFYIIMGPPGSGKGTQSQRLAHQLKLPHMSSGELFRSAIDSASPLGIKAAEYINQGLLVPDAIVWGMVQEALNQPECQSGCIIDGFPRTLDQAILLNDFFMQSYADYRVIQLDVSNEEIIRRIHSRFICPSCKHVYNQNQGLSECPTCQMKLVRRSDDTLEVIHKRLESYEKLTAPLIDYYQELGKLTRIPSEASPDDVFQSIEACIKA

SEQ ID NO: 2322 - DNA, 645 bp, Chlamydophila caviae
  CDS (1)..(645): transl_table=11
atggtaaatagtattttttacattattatggggcctccgggctctggtaagggcacgcaatcgcaacgtcttgctaatcacttagggcttcctcatattagctcgggagaccttttcagatctgctataaagtcagctacccccctaggaagtaaagctgcagaatacataaataaaggacttcttgttcccgataatcttgtctgggagatagtacaagaaactttaaataaaccaggttgtaagtctggatgtattatcgatggatttcctagaactttagatcaagcagtccttttgaatgattttttagttaaatccaatgcagcagattatcgtgtaatacaattagatgtttctgctgaggaaattatttccaggattcattctcgatttatttgccctgcatgtaattatgtatataaccagagtcaaggttttaaggagtgcccaacatgtcatgttgccttgattcgtcgttctgatgatagtttagaggttattcatcagagactagaaagttatgaaaaagctacagttcctgtaattaactattatgaagatctgggaaaactcatccatatcccttctgagacatctcccgatgaagtttttcaaagtattttagcttgtacggaagcctaa

SEQ ID NO: 2323 - protein, 214 aa, Chlamydophila caviae
MVNSIFYIIMGPPGSGKGTQSQRLANHLGLPHISSGDLFRSAIKSATPLGSKAAEYINKGLLVPDNLVWEIVQETLNKPGCKSGCIIDGFPRTLDQAVLLNDFLVKSNAADYRVIQLDVSAEEIISRIHSRFICPACNYVYNQSQGFKECPTCHVALIRRSDDSLEVIHQRLESYEKATVPVINYYEDLGKLIHIPSETSPDEVFQSILACTEA

SEQ ID NO: 2324 - DNA, 762 bp, Chlamydia muridarum
  CDS (1)..(762): transl_table=11
atggatcgatcccccctctttcttatcatcatgggagccccgggatccggaaaaggcacccagtcaaagttattagcatctcaattgtctctccagcatatcagctccggggacttactcagaaatgcggtttcccaaaacacaccacttggccaagaaatcaaatcctacttagatcagggcaaattgttaccagatcaattagtctggaagttagtccatgaaaaacttgatgagttacaacaagatactttattacgaaaactttcctttttatctcgttcagaaaatggcgccattttagatggcttcccaagaacagtcgctcaagccaaactgttgaatgagtttctctgctcctatttccctgattataaaatcatccttttagatatttctgatgaagaagtcctcaatcgcttaacttctcgctacatctgtccgtcttgtcagggtatttataacaaacaacaaggattctctcgatgtcctaaatgtttagtagagctaactcgtagatctgatgacactccagaagtgattcttgatagaattcagacctataaacaagaaacacagcctgttttggattattatgcagctctgcaaagactcatcactattgatgctaatgctcccacccagcaggtgtttaagaacattttagatgctcttcctgaatctaactataccattcataagaaaagttgttgcgattgttgtgactgtgactgctatgatggttgtgactgcgaagagtag

SEQ ID NO: 2325 - protein, 253 aa, Chlamydia muridarum
MDRSPLFLIIMGAPGSGKGTQSKLLASQLSLQHISSGDLLRNAVSQNTPLGQEIKSYLDQGKLLPDQLVWKLVHEKLDELQQDTLLRKLSFLSRSENGAILDGFPRTVAQAKLLNEFLCSYFPDYKIILLDISDEEVLNRLTSRYICPSCQGIYNKQQGFSRCPKCLVELTRRSDDTPEVILDRIQTYKQETQPVLDYYAALQRLITIDANAPTQQVFKNILDALPESNYTIHKKSCCDCCDCDCYDGCDCEE

SEQ ID NO: 2326 - DNA, 642 bp, Chlamydia pneumoniae
  CDS (1)..(642): transl_table=11
gtgactaagggctctgtttttattattatggggcctccaggctcaggcaaaggaacccaatctcaatatcttgccaatagaataggcttaccccacatcagtactggggatttattaagagcgattattcgagaaggaactcctaatggattgaaggctaaagcctacctagataagggtgcttttgttcctagtgattttgtatgggaaatactgaaagaaaaactgcaaagccaagcctgctctaaaggatgcattatcgatgggttcccgagaaccttagatcaggcgcatcttctggatagttttcttatggacgtccattctaactacacggtgattttcctagagatttctgaagacgagatcttaaaaagagtgtgttcaagatttctttgcccctcctgttcgcgtatctacaacacaagtcagggacataccgaatgtccagactgtcatgtgcctttgatacggcgttctgacgataccccggaaatcattaaagaaagattaacaaaatatcaagaacgcacagctcctgttattgcctattatgacagcttagggaagctatgtagggtttcttctgaaaacaaagaggatcttgtttttgaagacattttgaaatgcatttataaatag

SEQ ID NO: 2327 - protein, 213 aa, Chlamydia pneumoniae
MTKGSVFIIMGPPGSGKGTQSQYLANRIGLPHISTGDLLRAIIREGTPNGLKAKAYLDKGAFVPSDFVWEILKEKLQSQACSKGCIIDGFPRTLDQAHLLDSFLMDVHSNYTVIFLEISEDEILKRVCSRFLCPSCSRIYNTSQGHTECPDCHVPLIRRSDDTPEIIKERLTKYQERTAPVIAYYDSLGKLCRVSSENKEDLVFEDILKCIYK

SEQ ID NO: 2328 - DNA, 657 bp, Chlorobium tepidum
  CDS (1)..(657): transl_table=11
atgagaataatcctgttgggcgcgccgggcgccggcaaaggaacacaggcacaatatatttctgaagcttttggcataccccagatatcgaccggcgacatgctgcgtgccgctgtcaaggcagccactcctcttggactcgcagccaaaaagatcatggatgagggtggactcgtcccggacgacctcatcatcagccttgtcaaagagcgcatagcgcaaccagactgcgccaatggctgcctttttgacggcttcccgcgcaccctggcccaagccgaagccctgagagctgggggtattcgaatcgaccatatcattgaaatgaacgtccctgacgaagagatcatcaaacgcatgagcggacgccgcgtccatctcgcctctggccgcacctaccacgtcacattcaacccaccagctgtaccggacaaggacgacctcactggtgaaccgctggtgcagcgcaacgacgactgcgaagagaccgttcgcaagcgactgaaagcctaccacgagctgaccgaaccgctggtcggctactatcgcaacctctcgatgaacggctccgctgacgctccgaaatactccagaatcgcaggaatcggcaccgtcgaacagatcaaagatgagatcatcgccaccctcaacggctaa

SEQ ID NO: 2329 - protein, 218 aa, Chlorobium tepidum
MRIILLGAPGAGKGTQAQYISEAFGIPQISTGDMLRAAVKAATPLGLAAKKIMDEGGLVPDDLIISLVKERIAQPDCANGCLFDGFPRTLAQAEALRAGGIRIDHIIEMNVPDEEIIKRMSGRRVHLASGRTYHVTFNPPAVPDKDDLTGEPLVQRNDDCEETVRKRLKAYHELTEPLVGYYRNLSMNGSADAPKYSRIAGIGTVEQIKDEIIATLNG

SEQ ID NO: 2330 - DNA, 657 bp, Chromobacterium violaceum
  CDS (1)..(657): transl_table=11
atgcgattgatcctgttgggcgcgcccggcgccggcaaaggcacccaggccaactacatccgcgagaagttcggcatcccgcagatctccaccggcgacatgctgcgcgccgcggtcaaggccggcaccccgctgggcctggaagccaaggccatcatggatgccggcggcctggtccgcgacgacatcatcatcggcctggtcaaggagcgaatcgcccaggacgactgcgccaacggcttcctgttcgacggcttcccgcgcaccattccgcaggcggaagcgatgatcgccgccggcgtcgacatcgactacgtggtggagatcgacgtgccggacgccgccatcgtcgagcgcatggccggccgccgcgtgcacctggcttcgggccgcacctaccatgtcaccttcaacccgcccaaagcggccggcaaggacgacgtgaccggcgaggacctggtccagcgcgacgacgacaaggaagaaaccgtgaagaagcgcctggctgtctaccacgagcagaccgccgtgctggtgggcttctacggcaagctggccgagagcggcagcgccaaggcgccgaagtacgtgaagatcgacggcacccgcgcggtggaaaccgtgcgcgacgacgtgctgaaggcgctgggcgcctga

SEQ ID NO: 2331 - protein, 218 aa, Chromobacterium violaceum
MRLILLGAPGAGKGTQANYIREKFGIPQISTGDMLRAAVKAGTPLGLEAKAIMDAGGLVRDDIIIGLVKERIAQDDCANGFLFDGFPRTIPQAEAMIAAGVDIDYVVEIDVPDAAIVERMAGRRVHLASGRTYHVTFNPPKAAGKDDVTGEDLVQRDDDKEETVKKRLAVYHEQTAVLVGFYGKLAESGSAKAPKYVKIDGTRAVETVRDDVLKALGA

SEQ ID NO: 2332 - DNA, 648 bp, Clostridium acetobutylicum
  CDS (1)..(648): transl_table=11
atgaaaataattttattaggtcctccaggtgcaggaaaaggaactcaggcaaagttaataagcagtgaattctctattcctcacatatcaacaggtgatatatttagagctaatataagtggaaaaacagaacttggaatgaaggctaaaggatatatggataaaggtcttctagttccagatgaattaactatagatatagttaaggatagaatatctaaagatgattgcaaaagtggatttttactagatggctttccaagaacagtaaatcaagcagaagcccttgataaatttcttgtaggcagaaaagaaaaaattgattgtgcattgttaatagacgttccaagagaaaaaatatttaacagaatgacaggaagaagagtttgtagtaaatgtggagctagttatcacattgaatataatcctactaaagtggaaggtatatgtgatctctgtggtagtcctgtggttcaaagaaaagatgattcagaggatacagttaaagagagattagatgtttatgatagacagactgagccacttgtagtatattatagaaatgaagcagttcttaaatcagttgatggtactcaggatatagataaagtttttgaggatataagaaatgtcttaggagagatatag

SEQ ID NO: 2333 - protein, 215 aa, Clostridium acetobutylicum
MKIILLGPPGAGKGTQAKLISSEFSIPHISTGDIFRANISGKTELGMKAKGYMDKGLLVPDELTIDIVKDRISKDDCKSGFLLDGFPRTVNQAEALDKFLVGRKEKIDCALLIDVPREKIFNRMTGRRVCSKCGASYHIEYNPTKVEGICDLCGSPVVQRKDDSEDTVKERLDVYDRQTEPLVVYYRNEAVLKSVDGTQDIDKVFEDIRNVLGEI

SEQ ID NO: 2334 - DNA, 651 bp, Clostridium difficile
  CDS (1)..(651): transl_table=11
atgagaataatattacttggacctccaggtgctggtaaaggtactcaggcggtaggaatagtagaaaaatacaatatacctcatatatcaacaggagatatattcagaaagaatataaaagagggaacagaacttggaaaaaaagctaaagaatacatggaccaaggtttattagtaccagatgagttaactgtaggtttagttactgatagaatatctcaagaagattgtaaaaatggatttatgttagatggatttccaagaaatgtagcacaaggagaacatttagatatcttcttaaaaaatgctggtatatcactagataaagttgtcaatattgaagttgataagagtatattagtgtctagagcagttggtagaagaatatgtaagtcttgtggagctacttaccatgttgagtttaatcctcctaaagtagaaggtgtatgtgatgtatgccaaggagaattatatcaaagagctgatgataatgaagaaactgtatctaagagaatacaagtttatctagatgaaactaagcctttagtagattattatagcaaacaaggtataatagcagatataaaaggtgatcaagcaatagataaagtatttgaagatattgtcgcagccttaggaagtggaaaataa

SEQ ID NO: 2335 - protein, 216 aa, Clostridium difficile
MRIILLGPPGAGKGTQAVGIVEKYNIPHISTGDIFRKNIKEGTELGKKAKEYMDQGLLVPDELTVGLVTDRISQEDCKNGFMLDGFPRNVAQGEHLDIFLKNAGISLDKVVNIEVDKSILVSRAVGRRICKSCGATYHVEFNPPKVEGVCDVCQGELYQRADDNEETVSKRIQVYLDETKPLVDYYSKQGIIADIKGDQAIDKVFEDIVAALGSGK

SEQ ID NO: 2336 - DNA, 651 bp, Clostridium perfringens
  CDS (1)..(651): transl_table=11
gtgaagatagttttattaggtcctcctggagcaggaaaaggaacacaggcaaaatcaattagtaatagatattcaattcctcatatatctacaggagatatctttagaaaaaatatttcagagaacactcctttaggtattgaggctaaatcatacatggataatggacagttagttccagatgaagtaactatcaacatggtaaaagatagacttcaacaagatgattgtaagaatggatatttattagatggtttcccaagaacagttcatcaagcagaagctttagataactttttaactgaaagagaagagtcaatagacacagctcttttaatagaagtacctaaagaattcatacttgaaagaatgacaggaagaagagtttgtccttcatgtggagcaagttatcacataaagtttaatccaccaactaatgatggaaaatgtgatctttgcggatcagatgttattcaaagaaaagatgacactgaagaaacagttaaggaaagacttgatgtgtatgaaaatcaaacacaaccattaattgatttttataaaaacaaaaagcaactttcagtagtagatggaacacaagcaataaacgaggtctttgagagtatctgtaaaatattagggagcgacaagtaa

SEQ ID NO: 2337 - protein, 216 aa, Clostridium perfringens
MKIVLLGPPGAGKGTQAKSISNRYSIPHISTGDIFRKNISENTPLGIEAKSYMDNGQLVPDEVTINMVKDRLQQDDCKNGYLLDGFPRTVHQAEALDNFLTEREESIDTALLIEVPKEFILERMTGRRVCPSCGASYHIKFNPPTNDGKCDLCGSDVIQRKDDTEETVKERLDVYENQTQPLIDFYKNKKQLSVVDGTQAINEVFESICKILGSDK

SEQ ID NO: 2338 - DNA, 657 bp, Clostridium perfringens
  CDS (1)..(657): transl_table=11
atgcccgtgaagatagttttattaggtcctcctggagcaggaaaaggaacacaggcaaaatcaattagtaatagatattcaattcctcacatatctacaggagatatctttagaaaaaatatttcagagaatactcctttaggtattgaggctaaatcatacatggataatggacagttagttccagatgaagtaactatcaacatggtaaaagatagacttcaacaagatgattgtaagaacggatatttattagatggtttcccaagaacagttcatcaagcagaagctttagataacttcttaactgaaagagaagagtcaatagacacagctcttttaatagaagtacctaaagaatttatacttgaaagaatgacaggaagaagagtttgtccttcatgtggagcaagttatcacataaagtttaatccaccaactaatgatggaaaatgtgatctttgcggatcagatgttattcaaagaaaagatgacactgaagaaacagttaaggaaagacttgatgtgtatgaaaatcaaacacaaccattaattgatttttataaaaacaaaaagcaactttcagtagtagatggaacacaagcaataaacgaggtctttgagagtatctgtaaaatattagggagcgacaagtaa

SEQ ID NO: 2339 - protein, 218 aa, Clostridium perfringens
MPVKIVLLGPPGAGKGTQAKSISNRYSIPHISTGDIFRKNISENTPLGIEAKSYMDNGQLVPDEVTINMVKDRLQQDDCKNGYLLDGFPRTVHQAEALDNFLTEREESIDTALLIEVPKEFILERMTGRRVCPSCGASYHIKFNPPTNDGKCDLCGSDVIQRKDDTEETVKERLDVYENQTQPLIDFYKNKKQLSVVDGTQAINEVFESICKILGSDK

SEQ ID NO: 2340 - DNA, 651 bp, Clostridium tetani
  CDS (1)..(651): transl_table=11
ttgaatataattttattaggacctccaggagctggaaaaggaactcaagcgaaacttataagtgaaaaatattctataccccatatatcaactggagatatttttagaaagaatatttctaataaaactccactaggaatggaagctaagagctatatggataaaggtcaattagttccagacgagttgactattgaaatagttaaagatagattaggtgaagaggattgtaaaaatggatttctattagatggttttccaagaaccgtaaagcaagcagaagcattagatgaatttttacaaaataaaagttcaaaaacagatgctgctttattaatagatgtacctcaagaacttattcttgaaaggatgacaggaagaagagtttgtggagaatgtggtgctagctaccatataaaatttattacacctaaaactgaaggagtatgtgatctttgtggtggaaaactagtgcaaagaaaagatgatacaaaagaaacagttcttgaaagattagaagtatattcaaaacaaactcaacctcttatagaatattataaaaataagaacgttcttttggcattagatggtacaaaagaaaagaatgaagtatttgagaatatttccaatgttctaggagcgattaattaa

SEQ ID NO: 2341 - protein, 216 aa, Clostridium tetani
MNIILLGPPGAGKGTQAKLISEKYSIPHISTGDIFRKNISNKTPLGMEAKSYMDKGQLVPDELTIEIVKDRLGEEDCKNGFLLDGFPRTVKQAEALDEFLQNKSSKTDAALLIDVPQELILERMTGRRVCGECGASYHIKFITPKTEGVCDLCGGKLVQRKDDTKETVLERLEVYSKQTQPLIEYYKNKNVLLALDGTKEKNEVFENISNVLGAIN

SEQ ID NO: 2342 - DNA, 654 bp, Clostridium thermocellum
  CDS (1)..(654): transl_table=11
atgagacttgttctgcttggagcacctggtgcgggaaaaggaacgcaggcggtggttatatcacaaaagtacaatgtgcctcacatatcgacgggagacatattccgctctaatataaaaaacggcaccgaacttggcaggaaagcaaaagagtatattgacaaaggattactggtgccggatgaattgacggtggatatcgtaaaagacagaatttctcagcctgattgcaaagcgggattcattctcgacggtttccccagaacgatatatcaggcggaaagactggacgagattttaaaagaattgaatgttgaattggactgcgctttaaacatatatgttcctgacgaggaaataattaaaagaatgtcaggacgaagagtctgctcaaaatgtggtatgagctatcatatagtatataatcagccaaaggtggaaaacatttgtgacagctgcaacggtgaattgattcagagagacgatgacaaagaggaaacagtcatccaaaggctaaacacatatcacaagcagacagaacctctcattgaatattatgaaaagaagggaaaacttttaaccgtacacggacaggaaggcgtggacgacacgactaaagaggttttgaatgctttgagtggagttaaactatga

SEQ ID NO: 2343 - protein, 217 aa, Clostridium thermocellum
MRLVLLGAPGAGKGTQAVVISQKYNVPHISTGDIFRSNIKNGTELGRKAKEYIDKGLLVPDELTVDIVKDRISQPDCKAGFILDGFPRTIYQAERLDEILKELNVELDCALNIYVPDEEIIKRMSGRRVCSKCGMSYHIVYNQPKVENICDSCNGELIQRDDDKEETVIQRLNTYHKQTEPLIEYYEKKGKLLTVHGQEGVDDTTKEVLNALSGVKL

SEQ ID NO: 2344 - DNA, 645 bp, Colwellia psychrerythraea
  CDS (1)..(645): transl_table=11
atgcgcattgttttattgggtgctccaggcgctggtaaaggcacacaagcacagttcttaatggctaaatttggtattccacagatctcaacaggcgatatgctacgtgctgctattaaagcaggatcggagctaggtaacaaagccaaagccgtaatggatgctggtcaattagtttctgacgatttaatcatcggattagttaaagagcgagtagctcaagaagattgtaaagctggttttttacttgatggctttcctcgcacaataccacaagcagatgcaatgaaagaaagtggtattgttgttgaccatgttcttgaatttgatgtaccagatgaagtcattgttgaacgtatggctggccgtcgtgtacattctggctcaggtcgtgtttatcaccttgtttataacccaccaaaggttgaaggcaaagatgatgtaagtggtgacgatttatccattcgtccagatgatgaagaagcgacagtgcgtaagcgtttagctatttaccacgagcaaactaagccattggtagatttctatcaagcagaagctaaatcaggtagctgtagttatttaactattgatggcacacaagccgttgaaaaagttaaccaattattatcagctcaactggcttaa

SEQ ID NO: 2345 - protein, 214 aa, Colwellia psychrerythraea
MRIVLLGAPGAGKGTQAQFLMAKFGIPQISTGDMLRAAIKAGSELGNKAKAVMDAGQLVSDDLIIGLVKERVAQEDCKAGFLLDGFPRTIPQADAMKESGIVVDHVLEFDVPDEVIVERMAGRRVHSGSGRVYHLVYNPPKVEGKDDVSGDDLSIRPDDEEATVRKRLAIYHEQTKPLVDFYQAEAKSGSCSYLTIDGTQAVEKVNQLLSAQLA

SEQ ID NO: 2346 - DNA, 546 bp, Corynebacterium diphtheriae
  CDS (1)..(546): transl_table=11
atgcgactcgtacttcttggacctcccggtgctggcaaaggcacccaagcggctatcctctccgaaaagctgcgcattcctcacatctctaccggtgacctattccgtgccaacattggcgaaggcaccccactgggtaaggaagcaaaatcttatattgatgccggcaagcttgtgcctaccgacgtcaccgcgcgcatggtgaaggctcgcctccaaaaagacgacgcagaggttggattccttcttgacggcttcccacgcactgttgagcaggctgagatcctcaaggaaatgctgaaaggattcggcgttgagctcaacggtgttattaactacgaagtcgctgaagatgtagtagttgagcgcatgcttgctcgtggccgtgcggacgacaacgaagacaccatccgcacccgtctgcaggtttaccgcgacgaaaccgcaccacttatccgccactatggtgacgacatcatcaccatcaaggcagaaggtagcatcgaggacatcaatgctcgcaccctcggagcactgggcaagtaa

SEQ ID NO: 2347 - protein, 181 aa, Corynebacterium diphtheriae
MRLVLLGPPGAGKGTQAAILSEKLRIPHISTGDLFRANIGEGTPLGKEAKSYIDAGKLVPTDVTARMVKARLQKDDAEVGFLLDGFPRTVEQAEILKEMLKGFGVELNGVINYEVAEDVVVERMLARGRADDNEDTIRTRLQVYRDETAPLIRHYGDDIITIKAEGSIEDINARTLGALGK

SEQ ID NO: 2348 - DNA, 546 bp, Corynebacterium efficiens
  CDS (1)..(546): transl_table=11
atgcgactcgttctccttggtccccccggtgccggcaagggcacccaggcagccatcctctctgagaagctcggtatcccccacatctccaccggagacctgttccgcgccaatatcggcgagggcaccccgcttggcatcgaggccaagcagtacatcgatgccggcaagctggtgcccaccgatgtcaccgcccgcatggtgcagtcccgtctggccgaggccgacgccgccgagggtttcctcctggacggcttcccccgcaccgttgagcaggccgatatcctggctgatctcctcgacaaggccggtaacccacttgacggtgtcattaactaccaggtctccgaggatgtcgttgtcgagcgcatgctctcccgtggtcgcgccgacgacaatgaggagaccatccgcacccgtctcggtgtctaccgcgatgaaaccgccccgctgatcagccactacggtgacaagatcatcaacatcgaggctgaggggtccgttgaggacatcaacgcccgcaccctcgaggcactgggtaagtag

SEQ ID NO: 2349 - protein, 181 aa, Corynebacterium efficiens [sequence omitted]

SEQ ID NO: 2350 - DNA, 654 bp, Dechloromonas aromatica
  CDS (1)..(654): transl_table=11
atgaaattgattctgttgggcgcacctggcgccggcaagggaacgcaagccactttcatttccaagcagtttggcattccgcagatttccaccggcgacatgttgcgtgcccaggtcaaggctggcaccgcgctgggtctcgaagccaagaagcacatggatgcaggcggcctggtgccggatgccgtgatcatcggtatggtcaaggatcgcctgacccaggacgattgcaagaacggttacctgttcgacggcttcccgcgcaccattccccaggctcaggcgatgaaggatgctggtgtgccgatcgagttcgtcctcgaaatcgacgtgccggacagcgacatcgtcgagcgcatggctggtcgccgtgcccacctggcttcggggcgcacctatcacgtcaagttcaacccgccgaaggttgaaggcatcgacgacgtgaccggcgaaccgctcgtgcaacgtgacgacgataaggaagaaaccgtcaaaaaacgtctggaaatctaccattcgcaaaccaagccgctggtcgatttctacggcaagtgggcggccgaaggcgatgccaaggcccccaaggtgcgcaaggtggccggcgtcggtagcgtcgacaacatcaccaagagcgtttttgaagcgctgaaataa

SEQ ID NO: 2351 - protein, 217 aa, Dechloromonas aromatica
MKLILLGAPGAGKGTQATFISKQFGIPQISTGDMLRAQVKAGTALGLEAKKHMDAGGLVPDAVIIGMVKDRLTQDDCKNGYLFDGFPRTIPQAQAMKDAGVPIEFVLEIDVPDSDIVERMAGRRAHLASGRTYHVKFNPPKVEGIDDVTGEPLVQRDDDKEETVKKRLEIYHSQTKPLVDFYGKWAAEGDAKAPKVRKVAGVGSVDNITKSVFEALK

SEQ ID NO: 2352 - DNA, 651 bp, Dehalococcoides sp
  CDS (1)..(651): transl_table=11
gtgtataatgttattttccttggagccccgggttcgggcaaaggcacgcaaggtgaagtagttgccaaagaactcaagctggcgcatatggctacaggtgatttgtttcgcaaagctatagagtgcggtgatgagttgggtgataccgttaagtcctatatggaacggggcgaactggtgccggatgagattaccattagtgtggtcttgaagcaccttgcaggtttaaaagatgttaccggaattatcctggatggatttccccgaagtctgcgacaagccgaagcgctggatgaagcgctggtacagcagggacaggggattggcagggtaatatatataaatgtgccggaagatgagcttgtccggcgcttgagcggccgctgggtttgccgaagttgtcagtcaccttatcagagtggctgtgcggaggtgaccaagggaaaatgtagtcgctgtcagggtgagttatatcagcgccctgatgatacaccggaaactgtaaaggaaaggctcaaagtgtactttagcaaaacagcgcctcttattgaatactaccgctcaaagggtaagctcagtgagatagatggtatggctgaaatatcagaggttaccaaacgtattatatcagctataaagtgcggtaagtaa

SEQ ID NO: 2353 - protein, 216 aa, Dehalococcoides sp
MYNVIFLGAPGSGKGTQGEVVAKELKLAHMATGDLFRKAIECGDELGDTVKSYMERGELVPDEITISVVLKHLAGLKDVTGIILDGFPRSLRQAEALDEALVQQGQGIGRVIYINVPEDELVRRLSGRWVCRSCQSPYQSGCAEVTKGKCSRCQGELYQRPDDTPETVKERLKVYFSKTAPLIEYYRSKGKLSEIDGMAEISEVTKRIISAIKCGK

SEQ ID NO: 2354 - DNA, 594 bp, Deinococcus radiodurans
  CDS (1)..(594): transl_table=11
atgacacagtccaagaacaaggtcgtgatttttctcggccctcccggcgccggcaaaggcacccaggcggcgcggctggcgcaggaacatcagctcgtgcagctgagcactggcgacattttgcgtgaccacgtggcgcgtggcaccgccctcggccagcaggcggggccactgatggaagccgggcaactcgtgcccgacgagctgctgatcgccctgattcgtgaccggctggccgacatggagccggtgcgcgtcattttcgacggctttccacgcacccaggcccaggccgaagcgctcgacctgctgctcgaagaactcggggcgccggtcagcgccgtcccgctgctcgaagtgccggatcaagtgctcattgaccgcatcgtggatcgcggacggcaggcggtggccgagggccgcgctccccgcgccgacgacaacgaggaaacggcccgcaagcgccagcaggtctaccgcgagcagacccagccgctcatcgactactatgcccggcgcggccacctctacacggtggacggcctcggcacgcctgacgaggtgtacgagcggattctgagcggaatgcactga

SEQ ID NO: 2355 - protein, 197 aa, Deinococcus radiodurans [sequence omitted]

SEQ ID NO: 2356 - DNA, 654 bp, Desulfitobacterium hafniense
  CDS (1)..(654): transl_table=11
atgagagcaatcctcatggggccccctggggcaggtaaaggaacacaagctgccgatttaattacacggtatcaaatccctcatatttctaccggggatatgttccgggctgcgattaaagcaggaactgccctgggaatgaaagctaaggaatatatggatgccggttctctcgtccctgacgaggtaaccatcgggatcgttgctgagcgattggcagaacccgattgcagcaaaggattcttgttggatggttttccacggacagttgctcaagcggacgctttagacaagattctcacccagctcaagatgaatcttgacggcgtgatcaatatcgaagttcctgaagcaaaactccttgagcgcctgacaggccgccggatttgccggcagtgtggagggacttaccatatggttttcaatccacccgcagcagaagcggtttgcgataaatgcggtggagagctttatcaacgcagcgatgacactttggaaaccgccaagaaccggttgcaggtctataatgatcaaactcagcccctcatcgattactatcgagaaaagggcctgctgaaggagatcaacggggaccaggatattgcccaagtgctgcaggatattgtggacgctatggagcatgggcatgattga

SEQ ID NO: 2357 - protein, 217 aa, Desulfitobacterium hafniense
MRAILMGPPGAGKGTQAADLITRYQIPHISTGDMFRAAIKAGTALGMKAKEYMDAGSLVPDEVTIGIVAERLAEPDCSKGFLLDGFPRTVAQADALDKILTQLKMNLDGVINIEVPEAKLLERLTGRRICRQCGGTYHMVFNPPAAEAVCDKCGGELYQRSDDTLETAKNRLQVYNDQTQPLIDYYREKGLLKEINGDQDIAQVLQDIVDAMEHGHD

SEQ ID NO: 2358 - DNA, 651 bp, Enterococcus faecalis
  CDS (1)..(651): transl_table=11
atgaacctcattttaatgggattacctggagcaggtaaaggcacccaagcagaaaaaatcattgatacgtatggcattccacatatttctactggagatatgttccgtgcagcaatgaaaaatgaaactgccttgggcctagaagcgaaatcttatatcgataaaggtgaactggttcctgacgaagtaacaaacggaattgttaaagaacgccttgctgaaccagatacagacaaaggattcctattagatggtttcccacgtacactggatcaagcaaaagcattagatacaatgcttaaagaattaaacaaaaaaattgatgctgtcattgacatccatgtagaagaagatgtattaatcgagcgtttagctggacgattcatctgtcgcacatgtggcgcaacgtatcataaattattcaacccgccaaaagttgaaggcacttgtgatcgctgtggcggacatgaattctaccaaagagaagatgataagcccgaaacggttaaaaatcgtttggcagtcaacattgaaagtagcgcaccaatcttagctttctataaagaacaaggcttgatgcatacaatcgatggcaatcgcgaaatcgatactgttttttctgatgtgaaaaaaatcattgacgaaaactaa

SEQ ID NO: 2359 - protein, 216 aa, Enterococcus faecalis
MNLILMGLPGAGKGTQAEKIIDTYGIPHISTGDMFRAAMKNETALGLEAKSYIDKGELVPDEVTNGIVKERLAEPDTDKGFLLDGFPRTLDQAKALDTMLKELNKKIDAVIDIHVEEDVLIERLAGRFICRTCGATYHKLFNPPKVEGTCDRCGGHEFYQREDDKPETVKNRLAVNIESSAPILAFYKEQGLMHTIDGNREIDTVFSDVKKIIDEN

SEQ ID NO: 2360 - DNA, 645 bp, Erwinia carotovora subsp
  CDS (1)..(645): transl_table=11
atgcgtattattctgctgggcgctccgggcgcaggcaaaggtactcaggctcaattcatcatgggaaaatacggtattccgcagatttccacgggtgacatgctgcgtgcagcggtaaaagccggtactgaattgggcaagcaggctaaagaaatcatggacgcgggtaaactggtcactgatgaactggtcattgctctggttaaagagcgcattgcacaggacgattgccgtaacggttttctactggatggcttcccacgcaccattccgcaggctgatgctatgaaagatgctggcatcgatgtggactacgtcatcgaattcgcagttcctgacgaactgatcatcgatcgtatcattggtcgtcgcgttcatgcggcgtccggtcgtgtttatcacgtaaaatttaatccgcctaaagttgaagacaaagacgatgtgaccggcgaagacctgagcgttcgtaaggacgatcaggaagataccgtgcgtaaacgtctggttgaatatcatcagcagactgcgccactggtttcttactatcagaaagaagctgacgcgggtaatacgcgctatttcaaagtggaaggcacgcgtaaagtagaagaagttcgcgcagaactggaaaccattctgggctag

SEQ ID NO: 2361 - protein, 214 aa, Erwinia carotovora subsp
MRIILLGAPGAGKGTQAQFIMGKYGIPQISTGDMLRAAVKAGTELGKQAKEIMDAGKLVTDELVIALVKERIAQDDCRNGFLLDGFPRTIPQADAMKDAGIDVDYVIEFAVPDELIIDRIIGRRVHAASGRVYHVKFNPPKVEDKDDVTGEDLSVRKDDQEDTVRKRLVEYHQQTAPLVSYYQKEADAGNTRYFKVEGTRKVEEVRAELETILG

SEQ ID NO: 2362 - DNA, 636 bp, Fusobacterium nucleatum subsp
  CDS (1)..(636): transl_table=11
atgattaatttgaatttagtattatttggagcaccgggagcaggaaaagggacacaagcaaaatttattgttgataaatatggaatacctcaaatttcaacaggggatatattgagagtagccgtagctaataaaacaaaattaggtttagaagctaaaaaatttatggatgcaggacaattagttccagatgaaattgttaatggattagttgctgaaagattggcagaaaaagactgtgaaaaaggtttcataatggatggttttcccagaaatgttgctcaagcaaaagttttagatgaaatattaacaaaattaggaaaacaaatagaaaaagttatagctttaaatgtaccagataaagatataatagaaagaattacaggaagaagaacatcaaaagtaactggaaaaatttatcatattaagtttaacccaccagttgatgaaaaaccagaagatttagttcaaagagcagatgatacagaagaagttgttgtaaaaagattagaaacatatcataatcaaactgcaccagttttagattactataaagtacaaaataaagtaactgaaattgatggaactaaaaaattagaagatattacacaagatatatttaaaattttaggatag

SEQ ID NO: 2363 - protein, 211 aa, Fusobacterium nucleatum subsp
MINLNLVLFGAPGAGKGTQAKFIVDKYGIPQISTGDILRVAVANKTKLGLEAKKFMDAGQLVPDEIVNGLVAERLAEKDCEKGFIMDGFPRNVAQAKVLDEILTKLGKQIEKVIALNVPDKDIIERITGRRTSKVTGKIYHIKFNPPVDEKPEDLVQRADDTEEVVVKRLETYHNQTAPVLDYYKVQNKVTEIDGTKKLEDITQDIFKILG

SEQ ID NO: 2364 - DNA, 654 bp, Geobacillus kaustophilus
  CDS (1)..(654): transl_table=11
atgaatttagtgctgatggggctgccgggtgccggcaaaggcacgcaggccgggaaaattgtcgaggcttacggaattccgcatatttcaacgggagatatgtttcgagcggcgatcaaagaagggacgccgttagggttgcaggcaaagcagtatatggaccgcggcgaccttgtgccggatgaggtgacgatcggcatcgtccgcgaacggctgagcaaagaggattgccaacatggttttttgctcgatggattcccgcgcacggtcgcccaagcagaagcgcttgaaacgttgctttcggaaatcgggcgcaagcttgactatgtcatccatatcgacgttcgccaagaggtcttaatggagcgcctgaccggcagacgtatttgccgcaactgcggagcaacgtaccatctcgtttttcatccgccggcgaaaccgggcgtatgcgataaatgtggtggcgatctgtaccagcgccccgatgataatgaagcaacggtggccaatcggcttgaggtgaatatgaaacaaatgaagccgctcctcgatttttacgagcaaaaaggctatttgcgccacattaacggcgaacaggaaatggaaaaggtgtttgctgatatttgtgaagtgctcgggggacttgctcgatga

SEQ ID NO: 2365 - protein, 217 aa, Geobacillus kaustophilus
MNLVLMGLPGAGKGTQAGKIVEAYGIPHISTGDMFRAAIKEGTPLGLQAKQYMDRGDLVPDEVTIGIVRERLSKEDCQHGFLLDGFPRTVAQAEALETLLSEIGRKLDYVIHIDVRQEVLMERLTGRRICRNCGATYHLVFHPPAKPGVCDKCGGDLYQRPDDNEATVANRLEVNMKQMKPLLDFYEQKGYLRHINGEQEMEKVFADICEVLGGLAR

SEQ ID NO: 2366 - DNA, 654 bp, Geobacter sulfurreducens
  CDS (1)..(654): transl_table=11
atgaatctggtgtttctcggtccgcctggtgccggcaaggggacgcaggcaaacctgttaactcgtacgtatgaagtcccgcagatttcaaccggcgaaatacttcgcgcagccgttaagtcaaagacccctatgggggtcaaggctaaagagtacatggatcagggtgcactcgtccctgacagtgtcgttgtcggtattgtagaggagcggctagcttcgcctgattgtgcgtccggctttatccttgacggatttccccgtaccgttgcccaggccgatgcactcaagcaggtgcttggtgcgttgggtaagcagatagagcacgtcgtctcgtttgaagtcgacaagggtgtgcttctggagcgtatcgtcggtcgcagggtgtgccgtgcatgcggacgggcatttcatgtcaaatttgatccacccctcgttgacggtgtctgtgatgcgtgtggtggagagctctatcagcgtgatgacgaccgcgaagacaccatgcggcgtaggcttgaagtttatgatgagcagacagcgcccctgaaatcatattatgagggtgagaggctcctgcggaaagtgaatgctctggagccgatcgaagatgtacagcgtcagattgtgaagcttgtcgagagttgtaacgggtga

SEQ ID NO: 2367 - protein, 217 aa, Geobacter sulfurreducens
MNLVFLGPPGAGKGTQANLLTRTYEVPQISTGEILRAAVKSKTPMGVKAKEYMDQGALVPDSVVVGIVEERLASPDCASGFILDGFPRTVAQADALKQVLGALGKQIEHVVSFEVDKGVLLERIVGRRVCRACGRAFHVKFDPPLVDGVCDACGGELYQRDDDREDTMRRRLEVYDEQTAPLKSYYEGERLLRKVNALEPIEDVQRQIVKLVESCNG

SEQ ID NO: 2368 - DNA, 663 bp, Gloeobacter violaceus
  CDS (1)..(663): transl_table=11
gtggccactcgacggctgatgttgctcggcgctccgggagcgggcaagggtacccaggcccaactgctcatgcaggagctgggactgccacaggtttcaacgggcgatattctgcgcgctgcggtcaaagaaggcacccccctgggactcgaagcccagagctatatgaaccgcggcgcgctggtgcctgacgcggtggtcgtcggcttgatcgaagaccgcctggcccggccggacgccggcggcggctggatcctcgacggctttccccgcacccccgcccaggcggaagcgctcgacggactgcttgcccacctggctcagtccctggaggcggtcgtgctcatcgacgtacccgaggcgcaactcatcgagcggctcaccggacggcgcacttgcccgctgtgcaagcgcatctttcacgtgcgcttcaatccgccgcccgcggcgccgcctttttgtaccgaccataccgactgcccgagcgaactggtgcagcgccccgacgacacccttgaggtggtcagcaaacggctgaacgtctatcgcgaatcgaccgagccgctgattcggtactaccaggagcagcagaaactgacgagtgtcgatggggatcggtcgccggaagtggtatacagcgaactgcgggaattattgggttaa

SEQ ID NO: 2369 - protein, 220 aa, Gloeobacter violaceus
MATRRLMLLGAPGAGKGTQAQLLMQELGLPQVSTGDILRAAVKEGTPLGLEAQSYMNRGALVPDAVVVGLIEDRLARPDAGGGWILDGFPRTPAQAEALDGLLAHLAQSLEAVVLIDVPEAQLIERLTGRRTCPLCKRIFHVRFNPPPAAPPFCTDHTDCPSELVQRPDDTLEVVSKRLNVYRESTEPLIRYYQEQQKLTSVDGDRSPEVVYSELRELLG

SEQ ID NO: 2370 - DNA, 648 bp, Haemophilus ducreyi
  CDS (1)..(648): transl_table=11
atgaaagttatcctattaggtgcacccggcgcaggtaaaggcacacaagcacaattcattatgcataaatttggtatcccacaaatttcaacgggtgatatgttccgtgcagcaattaaagaaggaacagaattaggtaaacaagcaaaagcattaatggatcaaggaaaattagtgcctgatgatttaacggttgcattagtaaaagatcgtatcgctcaaccagattgcgcccatggctttttattagatggtttcccacgtactattccacaagccgatgcattaaaagatgccggtgtaaaaattgatttagttctagaatttgatgttgctgacgaagttattgtagaacggatgagtggccgccgtgttcatcaaccatcagggcgaacataccatatcatatacaatccacctaaagtagcaggtcaagatgatattactggcgaagaattaatcacccgtgctgatgataaagccgaaacggtattagaacgtttagccgtatatcatcaacaaacgaaaccgcttatcgcttactatattgctgaagccgaaaaaggcaatacgcgctatgagcgtttagatggcactaaaccggttgagcaagtcagcgctgaattagctaatattttcaaccaataa

SEQ ID NO: 2371 - protein, 215 aa, Haemophilus ducreyi
MKVILLGAPGAGKGTQAQFIMHKFGIPQISTGDMFRAAIKEGTELGKQAKALMDQGKLVPDDLTVALVKDRIAQPDCAHGFLLDGFPRTIPQADALKDAGVKIDLVLEFDVADEVIVERMSGRRVHQPSGRTYHIIYNPPKVAGQDDITGEELITRADDKAETVLERLAVYHQQTKPLIAYYIAEAEKGNTRYERLDGTKPVEQVSAELANIFNQ

SEQ ID NO: 2372 - DNA, 645 bp, Haemophilus influenzae
  CDS (1)..(645): transl_table=11
atgaaaattattcttttaggtgcaccgggtgcaggtaaaggcactcaagcacaatttattatgaacaaatttggtatcccgcaaatttcaactggtgatatgttccgtgctgcaatcaaagcggggactgaacttggcaaacaagctaaagcattaatggatgaaggtaaattagtgccagatgaattaaccgttgcccttgtaaaagatcgtattgctcaagctgactgcacaaatggtttcttgttagatggtttccctcgtactattccacaagcggatgcactgaaagattcaggtgttaaaattgactttgttttagaatttgatgtgccagacgaagtgattgttgaacgtatgagtggccgtcgcgtacaccaagcgtctggccgttcttaccacatcgtttataatccaccaaaagtggaaggtaaagatgatgtaacaggcgaagatttaattattcgtgcagacgataaaccagaaactgtattagatcgtttagccgtatatcataaacaaactagcccattaattgattattaccaagcagaagcgaaagcggggaatactcaatatttccgtttagacggtacacaaaaagtagaagaagttagccaagagttagataaaatcttaggctaa

SEQ ID NO: 2373 - protein, 214 aa, Haemophilus influenzae
MKIILLGAPGAGKGTQAQFIMNKFGIPQISTGDMFRAAIKAGTELGKQAKALMDEGKLVPDELTVALVKDRIAQADCTNGFLLDGFPRTIPQADALKDSGVKIDFVLEFDVPDEVIVERMSGRRVHQASGRSYHIVYNPPKVEGKDDVTGEDLIIRADDKPETVLDRLAVYHKQTSPLIDYYQAEAKAGNTQYFRLDGTQKVEEVSQELDKILG

SEQ ID NO: 2374 - DNA, 645 bp, Haemophilus somnus
  CDS (1)..(645): transl_table=11
atgaaaatcattcttttgggggcacctggtgcaggcaaaggtactcaagcacaatttattacaaataagtttggcattcctcaaatttctactggtgatatgctacgtgctgcaattaaagctggaagtgaattgggacaaaaggctaaaatcttaatggatatgggacaattggtacctgatgatttgattatttctttggtgaaagaacgtgtagcacaagaagattgcgagaaaggttttttactggacggtttcccacgtacaattccacaagcagacgctttaaaatccgttggtatcagtattgattatgtattggaatttgatgtgccggatgaagttattgttgagcgtatgagtggtcgtcgtgttcaccctgcttctggacggacttatcacattgtttacaacccgccaaaagtggaagataaagatgatataaccggtgaagatttaattcttcgtgcagatgataaacctgaaactgttctagatcgtttaaaaatttatcataataccactaaacttttggttgattattatcaagctgaagctgcacaaggtaacacgaaatactttcgattagatggtacacaaaaagttgaagaagtgagtcaagaactggacaagatcttgagctaa

SEQ ID NO: 2375 - protein, 214 aa, Haemophilus somnus
MKIILLGAPGAGKGTQAQFITNKFGIPQISTGDMLRAAIKAGSELGQKAKILMDMGQLVPDDLIISLVKERVAQEDCEKGFLLDGFPRTIPQADALKSVGISIDYVLEFDVPDEVIVERMSGRRVHPASGRTYHIVYNPPKVEDKDDITGEDLILRADDKPETVLDRLKIYHNTTKLLVDYYQAEAAQGNTKYFRLDGTQKVEEVSQELDKILS

SEQ ID NO: 2376 - DNA, 657 bp, Herminiimonas arsenicoxydans
  CDS (1)..(657): transl_table=11
atgcgcctcatccttttaggagcgcctggtgccggtaagggcacgcaagctggtttcatcaaagacaaatacaatatcccgcaaatttccactggcgacatgttgcgcgctgcggtcaaggcaggtacgccattgggcatcgctgccaaaaaaatcatggacgagggtggtctggtatcggacgacatcatcatcggtctggtcaaggacaggttgaaggatggagattgtgcaaacggctatctgttcgatggctttccgcgcaccattccgcaagccgatgcaatgaaagatgccggtgtcgccatcgattacgtgctggaaatcgatgtgcctgacgaagcgattgtcgaacgcatgagcggtcgtcgtgtacatcctgcatccggtcgcacgtatcatgtcaaattcaatccgccgaaagtggcgggccgcgatgatgtgaccggcgaagagctgatccagcgcgacgacgacaaggaagaaacggtcaaaaagcgtttgtccgtctatcacgatcagaccgaagtgctggtcggctattacaacaagtgggcggaatccggccagccgggtgcgcccaagtatcgcaagattgccggtgtcggtccggtcgatcaaattcgggacaacgcttttaaagcgttggaaggctaa

SEQ ID NO: 2377 - protein, 218 aa, Herminiimonas arsenicoxydans
MRLILLGAPGAGKGTQAGFIKDKYNIPQISTGDMLRAAVKAGTPLGIAAKKIMDEGGLVSDDIIIGLVKDRLKDGDCANGYLFDGFPRTIPQADAMKDAGVAIDYVLEIDVPDEAIVERMSGRRVHPASGRTYHVKFNPPKVAGRDDVTGEELIQRDDDKEETVKKRLSVYHDQTEVLVGYYNKWAESGQPGAPKYRKIAGVGPVDQIRDNAFKALEG

SEQ ID NO: 2378 - DNA, 648 bp, Idiomarina loihiensis
  CDS (1)..(648): transl_table=11
atgcgcattattttgttaggcgccccgggagctggaaaaggaactcaggcacaattcctgatgaatacttttgggatccctcaaatttccaccggtgatatgctgcgttcagcaattaagtccggttcggaactgggtaaaaaggccaaacaagttatggatgccggacagttagtgtcggacgacatcattatcgaattggtcaaagaacgaattgcagagccagactgccagaatggttttttactcgacggttttccaagaaccattccgcaagccgacgcgatgcgcgataacggtatcgaaattgattacgtgctggaatttgatgttccggacgaaattattgttgatcgcatgagtggtcgccgtgtccaccctggttccggccgtgtttatcatgttgagcacaatccaccgaaagtggaaggcaaagatgacgaaacgggtgaagatctggttgtgcgcccggatgatcaggaacagacggttcgtaaacgcctttcggtttaccacgagcagacggaacctttggtagagtattatcaaaagctgtctgaagaaggtaagacggagtatcacaaaattgatggtacgcaacccgttgaaagagtcagtgagcaactgggcgatttgctcagaaagtaa

SEQ ID NO: 2379 - protein, 215 aa, Idiomarina loihiensis
MRIILLGAPGAGKGTQAQFLMNTFGIPQISTGDMLRSAIKSGSELGKKAKQVMDAGQLVSDDIIIELVKERIAEPDCQNGFLLDGFPRTIPQADAMRDNGIEIDYVLEFDVPDEIIVDRMSGRRVHPGSGRVYHVEHNPPKVEGKDDETGEDLVVRPDDQEQTVRKRLSVYHEQTEPLVEYYQKLSEEGKTEYHKIDGTQPVERVSEQLGDLLRK

SEQ ID NO: 2380 - DNA, 645 bp, Klebsiella pneumoniae subsp
  CDS (1)..(645): transl_table=11
atgcgtattattctgcttggcgctccgggcgcgggtaaaggaactcaggctcagttcatcatggagaaatacggtattccgcaaatctccaccggcgatatgctgcgcgcggcggtaaaatccggctctgagctcggtaagcaagcgaaagacattatggacgcaggcaagctggtgaccgatgagctggtcatcgcgctggtgaaagagcgtatcgcccaggaagattgccgtaacggcttcctgctggacggcttcccgcggaccattccgcaggctgacgccatgaaagaggcgggcattaccgttgattacgtgctggaattcgacgtgccggacgaactgatcgtcgaccgcatcgttggccgtcgcgtccacgcggcatccggtcgcgtataccacatcaaattcaatccgccgaaggtggaaggcaaagacgacgtgaccggcgaagagctgaccacccgtaaagacgatcaggaagagaccgtgcgtaagcgtctggtagaataccatcagatgacagcgccgctgatcggctactacaccaaagaagcgcaggcgggcaacaccaaatacgccaaagtcgacggcaccaaagcggtagctgacgtgcgcgccgaactggaaaaaatcctcggctga

SEQ ID NO: 2381 - protein, 214 aa, Klebsiella pneumoniae subsp
MRIILLGAPGAGKGTQAQFIMEKYGIPQISTGDMLRAAVKSGSELGKQAKDIMDAGKLVTDELVIALVKERIAQEDCRNGFLLDGFPRTIPQADAMKEAGITVDYVLEFDVPDELIVDRIVGRRVHAASGRVYHIKFNPPKVEGKDDVTGEELTTRKDDQEETVRKRLVEYHQMTAPLIGYYTKEAQAGNTKYAKVDGTKAVADVRAELEKILG

SEQ ID NO: 2382 - DNA, 657 bp, Lactobacillus acidophilus
  CDS (1)..(657): transl_table=11
atgattaacttaattcttttaggtttaccaggtgctggtaaaggtacagcatcagaaagaatcgtcgataaatatcacttaactcatatctcaactggagatatgtttagggaagcaatggcaaacaagactaaagttggtcttgaagctaagagctacattgataaaggtaacttagtaccagatgaagttactgcaagattagttgaagaacgtttaagtcaacctgatattaaagaaggttatatcttagatggttttccaagaactactgtgcaagcagaacttttagaaggtattactaagcgtttgaagaagccattaactaatgtcattgcgcttgaagttgatgaagatactttgattaagcgtttatcagcaagatacatgtgtaaaaattgtggtgctacgtacaacaagatttctaagcaacctaaagttgaaggtacttgtgatcgttgtggtagtcatgaattttatcaacgtgaagatgataagccagaagttgttaagaatcgtcttgaagttaatgaaaagatgaatgcacctttgaaggacttttaccaaaagaaaggtttgcttactataattaatggtgaacaaactccagaaaaagtctttgaagacattgatgcggtattgagcaataatcaataa

SEQ ID NO: 2383 - protein, 218 aa, Lactobacillus acidophilus
MINLILLGLPGAGKGTASERIVDKYHLTHISTGDMFREAMANKTKVGLEAKSYIDKGNLVPDEVTARLVEERLSQPDIKEGYILDGFPRTTVQAELLEGITKRLKKPLTNVIALEVDEDTLIKRLSARYMCKNCGATYNKISKQPKVEGTCDRCGSHEFYQREDDKPEVVKNRLEVNEKMNAPLKDFYQKKGLLTIINGEQTPEKVFEDIDAVLSNNQ

SEQ ID NO: 2384 - DNA, 654 bp, Lactobacillus johnsonii
  CDS (1)..(654): transl_table=11
atgattaatttaattcttttaggtttgcctggtgcaggcaaaggaacagcttctgaaagcattgtggataagtatcacttagcacatatctctaccggtgatatgtttagagaagctatggctaatgaaactcctgttggtttggaagctaaaagttatattgataaaggaaatttggtcccagatgaagttacagctaagttagttgaagaacgacttaagcaacccgacactaaaaacggattcatcttggatggatttccaagaaccactgttcaagcagaacttcttgaagatataactaaacggttggaaaaaccgttaactaatgtaattgcaattgatgttgatgaagatgttttgatcaaacgtttatcagcacgttacatttgtaaaaaatgtggtgcaacttacaataagatttcaaatccaactaaagtagaaggtacttgtgatcgttgcggaggacatgaatttttccaacgtgaggatgacaagccagaagttgttaaaaatcgcttagaagttaacaagaaaatgaatactcctcttcgtgatttttatgaagaaaaaggaattctttcaactgttaacggtgaacaaactccggaaaaagtatttgaagacattgacaaaattttaagtaaagactag

SEQ ID NO: 2385 - protein, 217 aa, Lactobacillus johnsonii
MINLILLGLPGAGKGTASESIVDKYHLAHISTGDMFREAMANETPVGLEAKSYIDKGNLVPDEVTAKLVEERLKQPDTKNGFILDGFPRTTVQAELLEDITKRLEKPLTNVIAIDVDEDVLIKRLSARYICKKCGATYNKISNPTKVEGTCDRCGGHEFFQREDDKPEVVKNRLEVNKKMNTPLRDFYEEKGILSTVNGEQTPEKVFEDIDKILSKD

SEQ ID NO: 2386 - DNA, 648 bp, Lactococcus lactis subsp
  CDS (1)..(648): transl_table=11
atgaatttattaatcatgggacttccaggagctggtaaaggaactcaagctgagttcatcgttaaaaattatggagtaaatcacatttcaacaggtgacatgttccgtgccgcaatgaaaaacgaaactgaaatgggtaaacttgctaaatctttcatcgataaaggtgaactcgtacctgatgaagtaacgaacggaattgttaaagaacgtttagcacaagatgatatcaaagcttcaggcttcttgcttgatggatatccacgtacgattgaccaagctcatgcacttgatacaatgcttgaagaactcggaattaaacttgatgccgttgtaaatatcgttgttaacccagatattttggttgaccgtttaagtggccgttacatctgccgtaactgtggagcaacttatcataaaatcttcaatccaactaaagttgaaggcgtttgtgacgtttgtggtagtcatgacctttatcaacgtgcggatgatgttccagaaacagttaaaaatcgtttggatgtcaatattaaagaatcagctccaattattgaacactacactgaacttggacttgttaaaaacattgaaggtgaacaagaaattagccaagtaacagaagatattaaaaaagttttaggataa

SEQ ID NO: 2387 - protein, 215 aa, Lactococcus lactis subsp
MNLLIMGLPGAGKGTQAEFIVKNYGVNHISTGDMFRAAMKNETEMGKLAKSFIDKGELVPDEVTNGIVKERLAQDDIKASGFLLDGYPRTIDQAHALDTMLEELGIKLDAVVNIVVNPDILVDRLSGRYICRNCGATYHKIFNPTKVEGVCDVCGSHDLYQRADDVPETVKNRLDVNIKESAPIIEHYTELGLVKNIEGEQEISQVTEDIKKVLG

SEQ ID NO: 2388 - DNA, 651 bp, Lactobacillus plantarum
  CDS (1)..(651): transl_table=11
atgaacctgattttaatgggattaccgggtgccggtaagggtactcaagcacagaagattcttgaagattttgatattccacatatctcgaccggagatatcttccgtgcagccattaagaacgaaacgaagatgggcttggaagccaagaagtatattgatgcaggtaacttagtaccagacgaagtcactaacggcatcgtccgtgatcggttagctgaagcggatactaaaaatggtttcctattagatggttacccacgtaacatcgatcaagctcatgctttgaaacaaatcggtgaagaactcaataagccacttgatggggtcatcaacattcatgttgaacccgcagtacttgttgaacgactttccggtcggtttatctgccggacttgcggtgcaacttaccataagttgtacaacaagcctaaggtagaaggaacctgtgatgtgtgtggcggtcatgatttctatcaacgtgatgatgacaagccagcaaccgttaagaatcggttagacgtgaacattaagttgaacacgccattaattgattattacggtcaagaaaagttactctacaatgtcgacggtgatcgcgacattgatgatgtctacaaagatatcaagaaaattcttgataacctgtaa

SEQ ID NO: 2389 - protein, 216 aa, Lactobacillus plantarum
MNLILMGLPGAGKGTQAQKILEDFDIPHISTGDIFRAAIKNETKMGLEAKKYIDAGNLVPDEVTNGIVRDRLAEADTKNGFLLDGYPRNIDQAHALKQIGEELNKPLDGVINIHVEPAVLVERLSGRFICRTCGATYHKLYNKPKVEGTCDVCGGHDFYQRDDDKPATVKNRLDVNIKLNTPLIDYYGQEKLLYNVDGDRDIDDVYKDIKKILDNL

SEQ ID NO: 2390 - DNA, 564 bp, Leptospira interrogans serogroup Icterohaemorrhagiae serovar
  CDS (1)..(564): transl_table=11
gtgaagaatattatcttcatggggcctcctggggctggaaaaggtacacaagcaaagattctttgtgagcgcctttctattcctcagatttctacaggagatattttacgcgaggcagtaaagaatcaaactgcgatgggaatagaagcaaaacgttatatggatgcgggagacttggttccagattccgtagtgattggaatcataaaagatcgcattcgagaagcggattgtaaaaatggatttttgttggatggatttccgagaaccgtggaacaagcggaagctttagatacacttttaaaaaatgaaggcaagtctattgataaagcgattaatcttcaggttccggatgcggaactcttaaagagattactcggccgtgcagaaatagaaggtcgcgcggacgataacgaagtgacgattaaaaatcgtctcgataattataataagaagaccttacctcttctagatttttacgccacccgtaagaaactttctcaagtgaacggcgttggaagtctcgaagaagttacttctttgattcaaaaggagcttgcgtaa

SEQ ID NO: 2391 - protein, 187 aa, Leptospira interrogans serogroup Icterohaemorrhagiae serovar [sequence omitted]

SEQ ID NO: 2392 - DNA, 648 bp, Listeria innocua
  CDS (1)..(648): transl_table=11
ttgaaattagtattaatgggactgcccggcgccggaaaaggcacacaagcggaacagattgttgagaaatacaacattcctcatatttccactggagatatgttccgagcagctatgaaaaataatacggaattaggaaagaaagctaaatcctttatggacaatggcgaccttgttcctgatgaagtaacaaatggtatcgttcgtgaacgtttggccgaagatgatgctaagaatggtttcttgcttgatggttttccgcgtacagtggaacaagcagaagagctagaaaatattctaagtgatttagggacagaacttgatgctgtcattaacattgaagttgataaagatgttttaatgaaacgtcttacaggtcgttggatttgtcggacttgcggtaaaacttaccatgaaatctataacccaccgaaagttcctgggaaatgtgatttagatggtggagaactttaccaacgcgaagatgacaaaaaagaaactgttgaaaatcgactaaatgtcaatatgaaacagaccaagccgcttcttgatttttactctgaaaaaggtaaacttcatagcataaacggcgagcaagatattaatgacgtttttgtagatgtggaaaaaattcttgcttctttttga

SEQ ID NO: 2393 - protein, 215 aa, Listeria innocua
MKLVLMGLPGAGKGTQAEQIVEKYNIPHISTGDMFRAAMKNNTELGKKAKSFMDNGDLVPDEVTNGIVRERLAEDDAKNGFLLDGFPRTVEQAEELENILSDLGTELDAVINIEVDKDVLMKRLTGRWICRTCGKTYHEIYNPPKVPGKCDLDGGELYQREDDKKETVENRLNVNMKQTKPLLDFYSEKGKLHSINGEQDINDVFVDVEKILASF

SEQ ID NO: 2394 - DNA, 648 bp, Listeria monocytogenes serotype 4b
  CDS (1)..(648): transl_table=11
ttgaaattagtattaatgggactgcccggcgccggaaaaggcacacaagcggaacagattgttgagaaatacaacattcctcatatttccactggagatatgttccgagcagctatgaaaaataatacggaattaggaaagaaagctaaatcctttatggataatggcgaccttgttcctgatgaagtaacaaatggtatcgttcgtgaacgtttggccgaagatgatgctaagaatggtttcttgcttgatggttttccgcgcactgtggaacaagcagaagagctagaaaatattctaaatgatttagggacagaacttgatgctgtcattaacattgaagttgataaagatgttttaatgaaacgtcttacaggtcgttggatttgtcggacttgcggtaagacttaccatgaaatttacaacccaccgaaagttcctgggaaatgtgatttagatggcggagaactttaccaacgcgatgacgacaagaaagaaacggttgaaaaacgactaaatgtaaatatgaaacagaccaagccgcttctagatttttattctgaaaagggtaaacttcataacataaacggcgagcaagacattaaagacgtttttgtagatgtggaaaaaattcttgcttctttttga

SEQ ID NO: 2395 - protein, 215 aa, Listeria monocytogenes serotype 4b
MKLVLMGLPGAGKGTQAEQIVEKYNIPHISTGDMFRAAMKNNTELGKKAKSFMDNGDLVPDEVTNGIVRERLAEDDAKNGFLLDGFPRTVEQAEELENILNDLGTELDAVINIEVDKDVLMKRLTGRWICRTCGKTYHEIYNPPKVPGKCDLDGGELYQRDDDKKETVEKRLNVNMKQTKPLLDFYSEKGKLHNINGEQDIKDVFVDVEKILASF

SEQ ID NO: 2396 - DNA, 648 bp, Listeria monocytogenes
  CDS (1)..(648): transl_table=11
ttgaaattagtattaatgggactgcccggcgccggaaaaggcacacaagcggaacagattgttgagaaatacaacattcctcatatttccactggagatatgttccgagcagctatgaaaaataatacggaattaggacgcaaggctaaatcgttcatggataatggcgaccttgtacctgacgaagtaacaaatggtatcgttcgtgaacgtttaagcgaagatgatgctaaggatggtttcttgcttgacggttttccacgtactgtggaacaagcgcaagaattagaaaacattctaagtgatttagggacagaacttgatgctgtcattaacattgatgttgaaaaagatgttttgatgaaacgtcttaccggtcgctggatttgccgaacttgcggtaaaacttaccacgaaatttacaacccaccgaaagtacctgggaaatgtgatttagatggtggagaactttaccaacgcgatgacgacaagaaagaaacggttgaaaaacgactaaatgtaaatatgaaacagaccaagccgcttctagatttttattctgaaaagggtaaacttcataacataaacggcgagcaagaaattaaagacgtttttgtagatgtggaaaaaattcttgcttctttttga

SEQ ID NO: 2397 - protein, 215 aa, Listeria monocytogenes
MKLVLMGLPGAGKGTQAEQIVEKYNIPHISTGDMFRAAMKNNTELGRKAKSFMDNGDLVPDEVTNGIVRERLSEDDAKDGFLLDGFPRTVEQAQELENILSDLGTELDAVINIDVEKDVLMKRLTGRWICRTCGKTYHEIYNPPKVPGKCDLDGGELYQRDDDKKETVEKRLNVNMKQTKPLLDFYSEKGKLHNINGEQEIKDVFVDVEKILASF

SEQ ID NO: 2398 - DNA, 657 bp, Mannheimia succiniciproducens
  CDS (1)..(657): transl_table=11
atggagatttctatgaaaattattcttttaggcgcaccgggcgcaggcaaaggaacacaagctcaatttatcatgaacaaattcggtatcccgcaaatctcaacgggggatatgttccgcgccgcaatcaaagcgggcaccgaattaggtaaacaagctaaagcattaatggatgaaggcaaattagtgcctgacgaattaaccgtcgccctggttaaagaccgtattgcccaaccggattgtgccaacggtttcttattagacggtttcccgcgcaccattccgcaagcggatgcgttaaaagactcgggcgtgaacattgattacgtattagaattcgacgtgccggacgaagtgattgtagagcgcatgagcggtcgccgcgtgcaccaggcctccggtcgttcatatcatatcgtttataacccgccgaaggtggaaggcaaagacgatgtgaccggcgaagatttaattatccgcgccgacgacaaaccggaaaccgttttggatcgtttagcggtttatcacaaacaaacccagcctttggttgactactatcaagcggaagctaatgcaggcaacaccaaatacttccgtttagacggcaccaaaaaagtagaagaagtgagtgccgaattaaattccattttaggttaa

SEQ ID NO: 2399 - protein, 218 aa, Mannheimia succiniciproducens
MEISMKIILLGAPGAGKGTQAQFIMNKFGIPQISTGDMFRAAIKAGTELGKQAKALMDEGKLVPDELTVALVKDRIAQPDCANGFLLDGFPRTIPQADALKDSGVNIDYVLEFDVPDEVIVERMSGRRVHQASGRSYHIVYNPPKVEGKDDVTGEDLIIRADDKPETVLDRLAVYHKQTQPLVDYYQAEANAGNTKYFRLDGTKKVEEVSAELNSILG

SEQ ID NO: 2400 - DNA, 639 bp, Mesoplasma florum
  CDS (1)..(639): transl_table=4
atgaatattatgttattaggagcacctggttcaggtaaaggaactttggcagaaaaattaatcaagaatcaaggatttaatcaaatgtcaacaggagatttgatgcgtaaagaaatcaatgatgaaacacctttaggaattgaatgtgcaagatatatgaatgaaggtagattagtacctgatgaagttacaatgggtattgtaaaaaactttttacaagataatcataatcaattaatttttgatggaattccaagaacattaaatcaagctaaaattttagaagaaaacttaattgaactaaatgcaaaaatagataaagttatatacattgatgttccaagtgaaattttattaaacagaataagtggaagattaatttgtccaaaatgcaaagttagttaccatatcattagcagaaaaccaaaattagaaggaatttgtgataatgatggaactgaactagttcgtagaccagatgatgctccagaaaaagttaaagttagacttgaagcatatgcaaatgaaacagcaccattagtagattactataaaaataaacctggatttattcatattgtagataatgcgaacacaactgctgaagaagtttatgcagaagttttaggagctttatag

SEQ ID NO: 2401 - protein, 212 aa, Mesoplasma florum
MNIMLLGAPGSGKGTLAEKLIKNQGFNQMSTGDLMRKEINDETPLGIECARYMNEGRLVPDEVTMGIVKNFLQDNHNQLIFDGIPRTLNQAKILEENLIELNAKIDKVIYIDVPSEILLNRISGRLICPKCKVSYHIISRKPKLEGICDNDGTELVRRPDDAPEKVKVRLEAYANETAPLVDYYKNKPGFIHIVDNANTTAEEVYAEVLGAL

SEQ ID NO: 2402 - DNA, 648 bp, Methanosarcina acetivorans
  CDS (1)..(648): transl_table=11
atgaatataatactcttcgggcccccgggtgccggcaaaggtacccaggccaaaaaactggttgatttctacggaattccgcagatttccacaggggatatcctgcgggcaaatgttagagaaggaacagaactgggccttgcagccaaggcatatatggacaaaggagaacttgtccctgaccaggtgcttatcggcataattaaaaaccgtctgaatgaggcagactgcgaaaaaggtttcattctcgacggatacccgaggactgtccctcaggctgatgccctggaagcaatcctcgatgaaatcgaaaaacccatcgatgtcgtcctcaaccttgaggtgcctgacgaagtgcttgtaggaagaataagtgggcgtcttatgtgcaaatgcggggcaagttatcacattatttccaatcccccaaagaaggataacgtctgtgacatatgtggcggtgaggtcttccagcgtgctgacgataccgcagaagccgtccagaaccgcctggatgtctacaaaaagcagacccagccgctgatcaactactataaagagaaaggcatccttgtcacccttgacgggacaaaggagatagatgtggtctttgaggacctgaaggcaattctggcaaagtttgcctga

SEQ ID NO: 2403 - protein, 215 aa, Methanosarcina acetivorans
MNIILFGPPGAGKGTQAKKLVDFYGIPQISTGDILRANVREGTELGLAAKAYMDKGELVPDQVLIGIIKNRLNEADCEKGFILDGYPRTVPQADALEAILDEIEKPIDVVLNLEVPDEVLVGRISGRLMCKCGASYHIISNPPKKDNVCDICGGEVFQRADDTAEAVQNRLDVYKKQTQPLINYYKEKGILVTLDGTKEIDVVFEDLKAILAKFA

SEQ ID NO: 2404 - DNA, 648 bp, Methanosarcina barkeri
  CDS (1)..(648): transl_table=11
atgaatataatactcttcgggcccccaggtgccggaaaaggtacccaggccaaaaaaatggttgacaactatggaatcccgcagatctccacaggtgatatcctgcgggcaaatgtcagggaaggaaccgagcttgggcttgcagccaaggaatatatggacaaaggagaacttgttcctgatgaggtacttatagggattatcaagaaccgtcttaaagaacaggactgtgaaaagggtttcatccttgacgggtatccaagaacaatacctcaggctgatgctcttgcagtcatacttgatgagatcaataagcccatagatgttgttctcaatctcgaagtgcctgatgaagaactgattgaaagaataagcggtcgccttatgtgcaactgcggtgcgagctaccacaggacttttaacccgccgaaaaaagatgatgtctgtgacatttgcgggggtaaggttttccagcgtgctgatgacaaagaagaggctgtcaagaaccgtcttaatgtctataaaaagcagacagaacctcttattgactattacacaaagcagggacttctggtaactctagacggcacaaaagatatcgacgaggtatttgaagaaataaaggcagttcttaaaaaatttgcctga

SEQ ID NO: 2405 - protein, 215 aa, Methanosarcina barkeri
MNIILFGPPGAGKGTQAKKMVDNYGIPQISTGDILRANVREGTELGLAAKEYMDKGELVPDEVLIGIIKNRLKEQDCEKGFILDGYPRTIPQADALAVILDEINKPIDVVLNLEVPDEELIERISGRLMCNCGASYHRTFNPPKKDDVCDICGGKVFQRADDKEEAVKNRLNVYKKQTEPLIDYYTKQGLLVTLDGTKDIDEVFEEIKAVLKKFA

SEQ ID NO: 2406 - DNA, 648 bp, Methanococcoides burtonii
  CDS (1)..(648): transl_table=11
atgaatgttgtattgtttggtccaccgggtgcaggaaaaggcacccaggccaaagaacttgataagcattatcagatccctcacatatctaccggtgatatcctgagggctaatgtgcgcgatggtactaaacttggtaaagaagcaaagggctatatggataaaggcgaactggttcctgatgaggtgcttattggtgtcataaagaaccgtctggctgaatctgattgtaagcctggctatcttcttgatgggtatccaaggacaactcctcaggcagatgctttatcttcgattcttgtggagatcggcatgcctttagaggtcgtactgaatatagatgttgctgatgaggaacttgtcacccgcctttgtggcaggtacgtgtgtacgtgtggtgaaagctatcatatgaagttcaaccctcctaaaaaggagaatgtttgtgatgcatgtggtgcggatctttaccagcgtgacgatgacaaggaagatgttatcaggcagaggcttgattcatacaaggaaaagacacaacctctcataagctattatggtgagaaaggtcttcttgtggacatcgatggtactggtgcaatagatcggatattttcggatatctgtaaaacccttgatcagtacaaataa

SEQ ID NO: 2407 - protein, 215 aa, Methanococcoides burtonii
MNVVLFGPPGAGKGTQAKELDKHYQIPHISTGDILRANVRDGTKLGKEAKGYMDKGELVPDEVLIGVIKNRLAESDCKPGYLLDGYPRTTPQADALSSILVEIGMPLEVVLNIDVADEELVTRLCGRYVCTCGESYHMKFNPPKKENVCDACGADLYQRDDDKEDVIRQRLDSYKEKTQPLISYYGEKGLLVDIDGTGAIDRIFSDICKTLDQYK

SEQ ID NO: 2408 - DNA, 645 bp, Methylococcus capsulatus
  CDS (1)..(645): transl_table=11
atgcgcatcatgttgctgggaagccctgggtctggtaagggtacgcaggccaagtacctcacggagcgtttcggcatcccccagatttccaccggcgacatgctgcgtgccgcggtgcgcgagggtacgcctctgggcatggaggcgaagaagatcatggatgccgggcagctggtgtcggattcgatcatcctcggcttgatcaaggagcgtattgccgcgccggactgcgcgaacggctttctgttggatggctttcctcgaacgatcgtccaggccgacgctttggccgagttgggcgtgacgctcgaccacgtggtggagatcgcggtggatgacgaggagattgtccggcgtttgagcggccggcgggtgcatccggcttccgggcgtacctaccacgtggtgttcaatcccccaaaggtggaaggcagggacgacgagaccggcgagccgctggtccaacgcgaggatgacaaggaggagaccatccgcaggcgcttggagatctaccatgtccagaccaagccattggtcgattactaccggagcaaagcggcacagggcggggtgaagttccacaccgtgccgggggtgggcagcgtcgaggcgatccgtgacgcggtgctggccagcctggcctga

SEQ ID NO: 2409 - protein, 214 aa, Methylococcus capsulatus
MRIMLLGSPGSGKGTQAKYLTERFGIPQISTGDMLRAAVREGTPLGMEAKKIMDAGQLVSDSIILGLIKERIAAPDCANGFLLDGFPRTIVQADALAELGVTLDHVVEIAVDDEEIVRRLSGRRVHPASGRTYHVVFNPPKVEGRDDETGEPLVQREDDKEETIRRRLEIYHVQTKPLVDYYRSKAAQGGVKFHTVPGVGSVEAIRDAVLASLA

SEQ ID NO: 2410 - DNA, 657 bp, Methylobacillus flagellatus
  CDS (1)..(657): transl_table=11
atgagagtcatactattaggcgcaccgggggctggtaaaggcacccaggccaccttcatcaaggaagcattcgacatcccgcagatttccaccggtgacatgctgcgtgccgcagtgaaggcgggcacccagctgggcctggaagccaagcgttatatggactccggcggcctggtcccggatgatgtcatcatcggcctcgtcaaggaacgcatcaaggatgccgactgccagcaaggcttcctgttcgacggcttcccccgcaccatcccccaggcggaagcgatgaagcaggctggggtcgatatcgactatgtggttgaaatcgatgtgcccgatgaggaaatcatcaagcgcatgagcggccgccgcacgcatttgccatccggccgaacctatcatgtcgtattcaatccgcccaaagtcgcggggaaggacgatgtcaccggcgaggatctggtacagcgcgacgacgacaaggaagaaaccgtcgccaagcgcctggaggtgtaccatcgccagaccaagccgctggtggactattattccaactgggcagcaaacggcgccgccaatgcccccaaatatgtgcgtatttccggcctgggtgaagtcagtgaaatccgcaggcaagtcttgcaggcgcttggcaagtag

SEQ ID NO: 2411 - protein, 218 aa, Methylobacillus flagellatus
MRVILLGAPGAGKGTQATFIKEAFDIPQISTGDMLRAAVKAGTQLGLEAKRYMDSGGLVPDDVIIGLVKERIKDADCQQGFLFDGFPRTIPQAEAMKQAGVDIDYVVEIDVPDEEIIKRMSGRRTHLPSGRTYHVVFNPPKVAGKDDVTGEDLVQRDDDKEETVAKRLEVYHRQTKPLVDYYSNWAANGAANAPKYVRISGLGEVSEIRRQVLQALGK

SEQ ID NO: 2412 - DNA, 648 bp, Methanosarcina mazei
  CDS (1)..(648): transl_table=11
atgaatataatactcttcgggcccccgggtgccggcaaaggtacccaggccaaaaaactggttgacttctacggaattccgcagatttccacaggagatatcctgcgggcaaatgttagagaaggaacggaactgggacttgcagccaaggcatacatggacaaaggagaacttgtccctgataacgtacttataggcattatcaaaaaccgccttaatgaggaagactgcaaaaaaggcttcattcttgacggatacccgagaactgtccctcaggctgatgccctggaaacaatcctcgatgaaattgacaagcccatcgacgtcgtcctcaaccttgaggttcctgatgaagtgcttgtggaaaggataagcgggcgccttatgtgcaaatgtggggcaagctatcacacaattgccaacccaccaaagaaggacaatatctgcgatatctgcggcggcgaagtctaccagagggacgacgacaaagcagaggctgtccagaaccgtctggacgtttacaagaagcagacccagcctcttatcaattattatgaagaaaagggcattcttgtcacacttgacggcacaaaggacataaatgtggtctttgaggatataaaagcagttctggcaaaatttgcctga

SEQ ID NO: 2413 - protein, 215 aa, Methanosarcina mazei
MNIILFGPPGAGKGTQAKKLVDFYGIPQISTGDILRANVREGTELGLAAKAYMDKGELVPDNVLIGIIKNRLNEEDCKKGFILDGYPRTVPQADALETILDEIDKPIDVVLNLEVPDEVLVERISGRLMCKCGASYHTIANPPKKDNICDICGGEVYQRDDDKAEAVQNRLDVYKKQTQPLINYYEEKGILVTLDGTKDINVVFEDIKAVLAKFA

SEQ ID NO: 2414 - DNA, 654 bp, Moorella thermoacetica
  CDS (1)..(654): transl_table=11
atgcgcttggtattacttggaccacccggcgccgggaaagggacccaggccagggagattaaccagcgcctggccataccccatatttctaccggcgatatgttccgcgaggcgatcaaaagggggacgcccctgggacgccaggcggaagtatatatcaagggcgggcgcctggttcctgatgaggtaactattgggttggtgcaggaacgcctggttcaacctgattgccggaatggcttcctcctggacggctttccccggacagtagcccaggcggaagccctggattcctggctgtcgagccggggggagaggttggatgccgttattgacatcgaggtgccccgggatgctttgctggagcgcctgacagggcgccgggtttgccgccagtgcggggccacctatcatgtgcgctataacccgcctgcagtaccggggaagtgtgatgcctgcggtcaggatctggtccagcgggccgacgatacagaagccacggtgaacaagcgcctggatgtttataacgagcagacggctcccctcgttaactactaccggcagcgcggtcttttaaaggaaattgacggcagccaggccatcccggcggtaatcctggctataggcagggccctgggaagagactggcaatga

SEQ ID NO: 2415 - protein, 217 aa, Moorella thermoacetica
MRLVLLGPPGAGKGTQAREINQRLAIPHISTGDMFREAIKRGTPLGRQAEVYIKGGRLVPDEVTIGLVQERLVQPDCRNGFLLDGFPRTVAQAEALDSWLSSRGERLDAVIDIEVPRDALLERLTGRRVCRQCGATYHVRYNPPAVPGKCDACGQDLVQRADDTEATVNKRLDVYNEQTAPLVNYYRQRGLLKEIDGSQAIPAVILAIGRALGRDWQ

SEQ ID NO: 2416 - DNA, 654 bp, Mycoplasma mobile
  CDS (1)..(654): transl_table=4
atgataaggaatttaatttttttaggagctccaggttctggtaaaggatcaacagctcttgaaattagcactaaatatgatatagaacatatttcaactggggaaatttttagaaatgaaataaaaaacaaaacccctttaggtttaaaagtagctgaaattgttaatgatggtaaatatgtacctgatgagttgactaatcaaattgttttaaaaaaattaaaagaattaaaacaagaaaacaagaaatttattttagatggatatcctagaacgttaaatcaagccatgtttttatctagtgtcttagatgaaaaaatacttgcagtgcttttggaagttcctactaatttgattattgaaagattatcttttagaagaatttgtccaatttgcaaaagtatttatcatctaaaatataatccttcaaaaaaaggtgagttttgtgaaaatcatttggaaaatttaactaaaattgaagcaaggcaagatgattcagaagaatcaattaaaaaaagattaaaaatttataacgaagaaacaaaaccaatgattgattactacaagaaaaaccaatcacttgtagtaatcaattcagaagaatctgttaaaaaagttgcctctttagttattaagaaagtttttaatgattaa

SEQ ID NO: 2417 - protein, 217 aa, Mycoplasma mobile
MIRNLIFLGAPGSGKGSTALEISTKYDIEHISTGEIFRNEIKNKTPLGLKVAEIVNDGKYVPDELTNQIVLKKLKELKQENKKFILDGYPRTLNQAMFLSSVLDEKILAVLLEVPTNLIIERLSFRRICPICKSIYHLKYNPSKKGEFCENHLENLTKIEARQDDSEESIKKRLKIYNEETKPMIDYYKKNQSLVVINSEESVKKVASLVIKKVFND

SEQ ID NO: 2418 - DNA, 648 bp, Neisseria gonorrhoeae
  CDS (1)..(648): transl_table=11
atgaaagcattacttttaggcgcaccgggcgcgggcaaaggcactcaggcgcaattcatcaccgccgcgttcggcattccgcaaatctctaccggcgacatgctccgtgccgcgattaaggcaggcacgcccttgggtttggaagcgaaaaaaatcatcgatgaaggcggtttggtgcgcgacgacatcattatcggcatggtcaaagaacgcatcgcgcaagacgactgcaaaaacggtttcctgttcgacggtttcccgcgtacattggcgcaagccgaagcgatggtggaagcaggcgtgggtttggacgcggtcgttgaaatcgacgtatccgacagcgtgattgtcgaccgcatgagcggccgccgcgtgcatttggcttccggccgtacttaccacgttacctacaatccgcctaaaaccgaaggcaaagacgacgtaaccggcgaagatttgattcagcgcgacgacgacaaagaagaaaccgtgaaaaaacgtcttgccgtttaccacgagcaaaccgaagttttggttgatttttacagcaagctggaaggcgaacacgcgccgaaatacatcaaagtcgacggtacccaagcagtagaagctgtgaaagccgaagtattgggcgcattgggcaaataa

SEQ ID NO: 2419 - protein, 215 aa, Neisseria gonorrhoeae
MKALLLGAPGAGKGTQAQFITAAFGIPQISTGDMLRAAIKAGTPLGLEAKKIIDEGGLVRDDIIIGMVKERIAQDDCKNGFLFDGFPRTLAQAEAMVEAGVGLDAVVEIDVSDSVIVDRMSGRRVHLASGRTYHVTYNPPKTEGKDDVTGEDLIQRDDDKEETVKKRLAVYHEQTEVLVDFYSKLEGEHAPKYIKVDGTQAVEAVKAEVLGALGK

SEQ ID NO: 2420 - DNA, 648 bp, Neisseria meningitidis serogroup B
  CDS (1)..(648): transl_table=11
atgaaagcattacttttaggcgcgccgggcgcgggcaaaggcactcaggcgcaattcatcaccgcagcgttcggcattccgcaaatctctaccggcgacatgctccgtgccgcgattaaggcaggcacgcccttgggtttggaagcgaaaaaaatcattgacgaaggcggcttggtgcgcgacgacatcattatcggcatggtcaaagaacgcatcgcgcaagacgactgcaaaaacggtttcttgtttgacggtttcccgcgcacattggcacaagccgaagcgatggttgaagcaggcgtggatttggatgcagtcgttgaaatcgatgtgcctgacagcgtgattgtcgaccgcatgagcggccgccgcgtgcatttggcttccggccgtacttaccacgttacctacaacccgcccaaagttgaaggcaaagacgacgtaaccggcgaagatttgattcagcgcgacgacgacaaagaagaaaccgtgaaaaaacgccttgccgtttaccacgagcaaaccgaagttttggtcgatttttacagcaaactggaaggcgaacacgcgcctaaatacatcaaagttgacggcacccaagcagtagaagccgtgaaagccgaagtattgggcgcattgggcaaataa

SEQ ID NO: 2421 - protein, 215 aa, Neisseria meningitidis serogroup B
MKALLLGAPGAGKGTQAQFITAAFGIPQISTGDMLRAAIKAGTPLGLEAKKIIDEGGLVRDDIIIGMVKERIAQDDCKNGFLFDGFPRTLAQAEAMVEAGVDLDAVVEIDVPDSVIVDRMSGRRVHLASGRTYHVTYNPPKVEGKDDVTGEDLIQRDDDKEETVKKRLAVYHEQTEVLVDFYSKLEGEHAPKYIKVDGTQAVEAVKAEVLGALGK

SEQ ID NO: 2422 - DNA, 648 bp, Neisseria mucosa
  CDS (1)..(648): transl_table=11
atgaaagtattattgttaggcgcgccgggcgcgggcaaaggcactcaggcacaattcatcaccgctgcgttcggcattccgcaaatttctaccggcgatatgctccgcgctgcgattaaagcaggcgcgccgctgggtttggaagcgaaaaaaatcattgacgaaggcggcttggtgcgcgacgacatcatcatcggcatggtcaaagaacgcatcgcgcaagacgactgcaaaaacggtttcctgttcgacggcttcccgcgcacgctggcacaagccgaagcgatggttgaagcgggtgtggatttggacgcggtcgttgaaatcgacgtacccgacagcgtgattgtcgaccgcatgagcggccgccgcgtccacttggcttccggccgtactcaccacgttacctacaatccgcccaaagtcgaaggtaaagacgacgtaaccggcgaagatttgattcagcgcgacgacgacaaagaagaaaccgtcaaaaaacgccttgccgtgtaccacgagcaaaccgaagtgctggtcgatttttacagcaagctggaaggcgaacacgcgccgaaatacatcaaggttgacggcactcagccggtagaagccgtgaaagccgaaatattgggcgcattgggcaaataa

SEQ ID NO: 2423 - protein, 215 aa, Neisseria mucosa
MKVLLLGAPGAGKGTQAQFITAAFGIPQISTGDMLRAAIKAGAPLGLEAKKIIDEGGLVRDDIIIGMVKERIAQDDCKNGFLFDGFPRTLAQAEAMVEAGVDLDAVVEIDVPDSVIVDRMSGRRVHLASGRTHHVTYNPPKVEGKDDVTGEDLIQRDDDKEETVKKRLAVYHEQTEVLVDFYSKLEGEHAPKYIKVDGTQPVEAVKAEILGALGK

SEQ ID NO: 2424 - DNA, 546 bp, Nocardia farcinica
  CDS (1)..(546): transl_table=11
gtgagagttgtactgctcggtccgccgggtgccggcaagggcacccaggccgtcctgctgtcggaaaagctgggcgtcccgcacatctccaccggggacctgttccgcgcgaacatcagccagcagaccccgctgggccgcgaggcccagaagtacatggacgccggcgacctggtgcccagcgacgtgaccaaccgcatggtcgaggcgcgggtgaacgagcccgacgccgccaacgggttcgtcctcgacgggtatccgcgcacggtcgaccaggccgacgcgctggagaagatcctcggcgacatgaactccaagctggacgcggtgctgtgcttcgtcgtcccggaggacaccgtcgtcgagcgcatgctcgcgcgcggccgcaacgacgacaccgaagacgtcatccgtaaccgcatgcgggtctaccgcgaggagaccgagccgctgctcgaccactacgacggcctggtcgtcacggtcgacggtgtcggcgaggtcgacgaggtcaacgagcgggcgctgcgggcgctcggccgttga

SEQ ID NO: 2425 - protein, 181 aa, Nocardia farcinica
MRVVLLGPPGAGKGTQAVLLSEKLGVPHISTGDLFRANISQQTPLGREAQKYMDAGDLVPSDVTNRMVEARVNEPDAANGFVLDGYPRTVDQADALEKILGDMNSKLDAVLCFVVPEDTVVERMLARGRNDDTEDVIRNRMRVYREETEPLLDHYDGLVVTVDGVGEVDEVNERALRALGR

SEQ ID NO: 2426 - DNA, 651 bp, Novosphingobium aromaticivorans
  CDS (1)..(651): transl_table=11
gtgaacatcatcctgttgggccctccgggcgcgggcaagggcacccaggcacagcgtctggtcgagcggcatggcatgaagcagctctcgacgggcgacatgctgcgcgccgccgtcaaggcggagacgccggtcggcctcaaggccaaggcagtgatggaggcggggcagctcgtctcggacgagatcgtctcggcgctgatcggcgacgagctcgacgcgatgccggcaggccagggcgcgatcttcgacggttatccgcgcactgcaccccaggcagagtcgcttgatgccatcctcgagagccgcgggcgcaagcttgaccacgtgatcgagctcgacgtcaacgaggacgcgctcgtcgaacgcatcaccggccgctacacctgcgccacctgcgggaagggctatcacgacaagttcgagaagcctgcggtcgagggcacctgcgacaagtgcggcggtcatgaattcaagcgccgtcccgacgacaacgaggaaaccgtgcgcacgcgcatggcggagtatcgcgccaagaccgcgccgatcctgccgatctacgagagccgcggcatcgtgtcgcgcgtcgacggcatggccgacatggacgacgtcacggcggccattgaggcgatcctcgcggcgcgctaa

SEQ ID NO: 2427 - protein, 216 aa, Novosphingobium aromaticivorans
MNIILLGPPGAGKGTQAQRLVERHGMKQLSTGDMLRAAVKAETPVGLKAKAVMEAGQLVSDEIVSALIGDELDAMPAGQGAIFDGYPRTAPQAESLDAILESRGRKLDHVIELDVNEDALVERITGRYTCATCGKGYHDKFEKPAVEGTCDKCGGHEFKRRPDDNEETVRTRMAEYRAKTAPILPIYESRGIVSRVDGMADMDDVTAAIEAILAAR

SEQ ID NO: 2428 - DNA, 648 bp, Oceanobacillus iheyensis
  CDS (1)..(648): transl_table=11
ttgaatttgattttgatgggcttacctggtgctggtaaaggcacacaggctgcgaaaattaatgaaaagtataacatccctcatatttcaacaggagatatgttccgattagctattaaagagggtactgaactcggtaaaaaagcaaaggaatttatggatcaaggtgaccttgttccagacgaagttactgttgggattgttaaggaacgcctagcgatggacgattgtgcaaatggtttccttttagacggattccctcgcacaactcgacaagcagaagaattacaaaatctactgtctgacctaggtaagtcaatagattatgtcatccatgtggatgtaccagaagaaaaattggtagagcgtttaactggacggagaatttgtccgacatgcggaacagcttatcatgtggtgtataatcctccaaaagaggaaggcatctgtgataaagatggctcccagttaattcagcgagatgatgaccaaccagaaacagttaaaaaccgtttagctgttaatatagagcaaacacaaccattacttgatttttatcaagataaaggttatcttgtgaaagtgaacggagatagagatatcaatgttgttttccaagatattgaatccattttagagaaaaaatag

SEQ ID NO: 2429 - protein, 215 aa, Oceanobacillus iheyensis
MNLILMGLPGAGKGTQAAKINEKYNIPHISTGDMFRLAIKEGTELGKKAKEFMDQGDLVPDEVTVGIVKERLAMDDCANGFLLDGFPRTTRQAEELQNLLSDLGKSIDYVIHVDVPEEKLVERLTGRRICPTCGTAYHVVYNPPKEEGICDKDGSQLIQRDDDQPETVKNRLAVNIEQTQPLLDFYQDKGYLVKVNGDRDINVVFQDIESILEKK

SEQ ID NO: 2430 - DNA, 654 bp, Onion yellows phytoplasma
  CDS (1)..(654): transl_table=11
atgatactaatattattaggaccgcccggaattggtaaagggactcaagcttctgttttatcagatattttaaaaattaaccacattgcaacaggcgatatttttcgtaaaaattttaaagaaaatactgaattaggcattttaattaaaaaaattattgctcaaggacttttagttcctgacgacattactaaccaaatgatagctgattacttgtctaaggacatcgctactaaagattttttattagacggttttccccgcaatgttttgcaagctcgttttttggatgattttttcaaaaactctcatttatttttaactaaagtcatctattttaacgctggcacccaagatttaatgaaaagaattgtaggacgcagaatttgtcccgaatgtggtaaggtttatcacatcgaaaacattcctcccaaaactccaggtatttgtgacaaagaccaaaaaaccttaattcaaagagaagatgacaaaccagaaaccttccttaagcgcctcaaagtgtttaatcaagaaacattgccattagtgcaatattatcgcgaacaaaatcaactttttgaagtagatggtatgcaaaacatcgaccaagttactaaaatgattttagaagttttagaaacagaccgcaaatga

SEQ ID NO: 2431 - protein, 217 aa, Onion yellows phytoplasma
MILILLGPPGIGKGTQASVLSDILKINHIATGDIFRKNFKENTELGILIKKIIAQGLLVPDDITNQMIADYLSKDIATKDFLLDGFPRNVLQARFLDDFFKNSHLFLTKVIYFNAGTQDLMKRIVGRRICPECGKVYHIENIPPKTPGICDKDQKTLIQREDDKPETFLKRLKVFNQETLPLVQYYREQNQLFEVDGMQNIDQVTKMILEVLETDRK

SEQ ID NO: 2432 - DNA, 657 bp, Paracoccus denitrificans
  CDS (1)..(657): transl_table=11
atggcgatcaacatcattctgctgggcccgcccggcgcaggcaagggcacgcaggctcggcgtctgatcgacgagcgcggtctcgtccagctctcgaccggcgacatgctgcgcgaggcgcgcagctcgggaaccgagatgggcaagcgcgtggccgaggtgatggaccggggcgagctggtgacggacgagatcgtcatcggcctgatccgcgaaaagctggggcagggcggcaagggtttcatcttcgacggtttcccgcgcaccctggcgcaggccgacgcgctccaggcgctgatggccgagatggaccagcgcatcgacgccgtgatcgagatgcgggtggatgatgccgcgctggtgtcgcgtatctcgggccgcttcacctgcggcaattgcggcgaggtctatcacgacgtgaccaagccgacgaaggagccgggcaaatgcgacgtctgcggctcgaccgacctgcgccggcgcgccgatgacaatgaggaaagcctcaagacccggctgatggagtattacaagaagacctcgccgctgatcggttactactatgtcaagggcaacctgaacccggtcgacggcctggccgagatcgacgaggtggcggcccaggtcgcgaaggtgatggacaagatccccgcctag

SEQ ID NO: 2433 - protein, 218 aa, Paracoccus denitrificans
MAINIILLGPPGAGKGTQARRLIDERGLVQLSTGDMLREARSSGTEMGKRVAEVMDRGELVTDEIVIGLIREKLGQGGKGFIFDGFPRTLAQADALQALMAEMDQRIDAVIEMRVDDAALVSRISGRFTCGNCGEVYHDVTKPTKEPGKCDVCGSTDLRRRADDNEESLKTRLMEYYKKTSPLIGYYYVKGNLNPVDGLAEIDEVAAQVAKVMDKIPA

SEQ ID NO: 2434 - DNA, 645 bp, Pasteurella multocida
  CDS (1)..(645): transl_table=11
atgaaaattatcctattaggtgcaccgggtgcggggaaagggacacaagcgcaatttattatgaataaatttggcattccacaaatttcaacgggtgatatgttgcgtggtgcaatcaaagcagggacagacttaggtaaacaagcaaaaaccttaatggatgcgggtcaattagtgccagatgatttaatcatttcattagtgaaagaacgtgttgcacaagccgattgtgccaaaggtttcttattagacggcttcccacgcaccattccacaagcggatgcattaaaaacagtcggtatccaaattgactacgttttagagtttgatgtgcctgatgaagtgatcgtagaacgtatgagtggtcgccgtgtacaccaagcctcaggtcgtacttatcacgtcgtttacaacccaccaaaagtagaagggaaagatgacgtgactggcgaagacttaatcatccgtgccgatgataaacctgaaactgtattagatcgcttaaaagtgtatcactccaccacgaaaccattagtggactactaccaagcagaagcgaaagcgggtaacaccaagtacttccgcttagacgggacgaaaaaagtggaagaagtgagtcaagaattagatactattttagcgtaa

SEQ ID NO: 2435 - protein, 214 aa, Pasteurella multocida
MKIILLGAPGAGKGTQAQFIMNKFGIPQISTGDMLRGAIKAGTDLGKQAKTLMDAGQLVPDDLIISLVKERVAQADCAKGFLLDGFPRTIPQADALKTVGIQIDYVLEFDVPDEVIVERMSGRRVHQASGRTYHVVYNPPKVEGKDDVTGEDLIIRADDKPETVLDRLKVYHSTTKPLVDYYQAEAKAGNTKYFRLDGTKKVEEVSQELDTILA

SEQ ID NO: 2436 - DNA, 645 bp, Photorhabdus luminescens subsp
  CDS (1)..(645): transl_table=11
atgcgtatcattctgctgggcgctccgggcgccggtaaagggactcaggcgcaatttatcgtggagaaatatgggatccctcaaatttctactggcgatatgttgcgttctgcggttaaggctggcacagaattgggtttaaaagcaaaagcgctgatggatcatggtaagctggttactgatgaactggttattgctttggtcaaagagcgcatcaaacaagatgactgccgcaatggtttcttgttggatgggttcccccgtactattccccaagctgatgcgatgaaagaagcgggcattaatgttgattatgttctggaattcgatgttcccgatgaactgattattgaacgtatcattgggcgccgtatacatgcgccatccggccgtgtttatcacatcaaatttaatccaccggtagtggaaaacaaggatgatgttacaggtgaagagctgacagttcgtaaagacgatcacgaagatatcgtgcgtaaacgtttagttgaataccatcagcagacagcacctttagtatcctactatcaaaaagaagcagaagcagattataccaaatattttggaattgatggtactcgtaaggtatctgagattagtgaagaattatctaaaattttggattaa

SEQ ID NO: 2437 - protein, 214 aa, Photorhabdus luminescens subsp
MRIILLGAPGAGKGTQAQFIVEKYGIPQISTGDMLRSAVKAGTELGLKAKALMDHGKLVTDELVIALVKERIKQDDCRNGFLLDGFPRTIPQADAMKEAGINVDYVLEFDVPDELIIERIIGRRIHAPSGRVYHIKFNPPVVENKDDVTGEELTVRKDDHEDIVRKRLVEYHQQTAPLVSYYQKEAEADYTKYFGIDGTRKVSEISEELSKILD

SEQ ID NO: 2438 - DNA, 645 bp, Photobacterium profundum
  CDS (1)..(645): transl_table=11
atgcgcatcattcttctgggcgctccaggtgcaggtaaaggtacacaggcacaattcatcatggcgaagtttggtattccacaaatttctactggtgacatgttacgcgcagcgatcaaagcgggtactgagctaggtaaacaagcgaagtcagttattgacgctggtcagttggtgtctgatgatatcattcttggtctggttaaagagcgtattgcccaagacgattgtgcaaaaggtttcttacttgatggcttccctcgtacaattcctcaggctgatggcttgaaagaagtgggcgttgtggttgattacgtcatcgaattcgacgttgctgacagtgtaattgttgagcgtatggcgggtcgtcgtgcccatcttgcatcaggtcgtacttaccataatgtttacaacccaccaaaggttgaaggcaaagatgacgtaactggcgaagatcttgttatccgtgaagatgacaaagaagaaacagtgcttgctcgtttaggtgtataccacaaccaaacggcaccattgattgcttactacggtaaagaagcagaagctggcaacacgcagtacctgaagtttgacggtactaaagcggttgcagaagttagcgctgagttagaaaaagcactagcataa

SEQ ID NO: 2439 - protein, 214 aa, Photobacterium profundum
MRIILLGAPGAGKGTQAQFIMAKFGIPQISTGDMLRAAIKAGTELGKQAKSVIDAGQLVSDDIILGLVKERIAQDDCAKGFLLDGFPRTIPQADGLKEVGVVVDYVIEFDVADSVIVERMAGRRAHLASGRTYHNVYNPPKVEGKDDVTGEDLVIREDDKEETVLARLGVYHNQTAPLIAYYGKEAEAGNTQYLKFDGTKAVAEVSAELEKALA

SEQ ID NO: 2440 - DNA, 585 bp, Porphyromonas gingivalis
  CDS (1)..(585): transl_table=11
atgcttaacgtactaatcttcggtgctcccggttccgggaagggcacccaaagcgaagaactgatccgtcgatatggattccggcatatttcaaccggagagttgcttcgtgccgaaatcaaagctcagaccgaactgggccaagcagcagccggctacatcaacgagggacacctcgtacctgacagcctgatcgtggacatgatggaaaagctcatcagcactttggtcgataccgaggggattatcttcgacggatttccacgtaccattccccaagcagaagccatggagacgatgctcgcacatcatggatggaaggtggacatagtgctgaatctgcaagtacccgaggaaatgctcatcgaacgcctcctgaacagaggaaaggtcagtggtcgatcggatgacaacatcgagaccattcgcaagcgtctggatgtatatgccaacgagactgcaccattagtggatttcttcacccgaaagaatgtgctgcacaacgtggtaggtacggggacgatagaagagatcgctttgcgtatcgctcccattgtggacaagttccgcaaagtctctaactaa

SEQ ID NO: 2441 - protein, 194 aa, Porphyromonas gingivalis
MLNVLIFGAPGSGKGTQSEELIRRYGFRHISTGELLRAEIKAQTELGQAAAGYINEGHLVPDSLIVDMMEKLISTLVDTEGIIFDGFPRTIPQAEAMETMLAHHGWKVDIVLNLQVPEEMLIERLLNRGKVSGRSDDNIETIRKRLDVYANETAPLVDFFTRKNVLHNVVGTGTIEEIALRIAPIVDKFRKVSN

SEQ ID NO: 2442 - DNA, 549 bp, Prochlorococcus marinus
  CDS (1)..(549): transl_table=11
atgaagaatcgattgctatttttaggtccccctggtgcagggaaaggtacacaggcaagccttatttgtaaagatcaaggttttttgcatttgtctacaggagatttattacgcgaagaagtttctgggggaaccgatttagggaaaaaagctgaattgataatgaataaaggtgagcttgtaagtgatgaaattgttatatctattgttgaaaaaagacttatcaaatattcagaagggtggcttttggatggattcccaaggaatcttgcacaagctagtttgttacaaaatttgcttggaagaatttcacagcctattgaaattgttctcttaatagaaatagacgatgaaattttgactgagagaatgcttggacgaggtagaaaagatgacaataaagcagttataaagaatagactcaagatatataaagaccaaacttctccattagtagatcactacaaaaaacaaggaattcttaagtctattaatggttgcgggagtgtcgaagatgttaatagtcggatcaaggaagcattaagctga

SEQ ID NO: 2443 - protein, 182 aa, Prochlorococcus marinus
MKNRLLFLGPPGAGKGTQASLICKDQGFLHLSTGDLLREEVSGGTDLGKKAELIMNKGELVSDEIVISIVEKRLIKYSEGWLLDGFPRNLAQASLLQNLLGRISQPIEIVLLIEIDDEILTERMLGRGRKDDNKAVIKNRLKIYKDQTSPLVDHYKKQGILKSINGCGSVEDVNSRIKEALS

SEQ ID NO: 2444 - DNA, 648 bp, Pseudomonas syringae pv
  CDS (1)..(648): transl_table=11
atgcgcgtgattctgctaggagctcccggggccggtaaaggtactcaggcaaaattcatcactgaaaagttcggcatcccgcaggtttcgacaggcgacatgctgcgcgctgcagtcaaggctgaaaccgagcttggcctgaaagccaagagcgtcatggactcgggtggtctggtttccgatgacctgatcattggtctgatcaaggatcgtctggcccagccggattgtgcgaacggcgttctgttcgacggcttcccgcgcaccattcctcaggccgaagccctgttgaaagcaggtctggaaatcgaccacgtgctggaaatcgccgttgatgacgaagaaatcgtcaagcgcatgtcgggccgccgggttcacgaaggctctggtcgcatctatcacaccatcttcaacccgccgaaagttgagtgtatcgatgatgtgactggcgaaccgctgctgcagcgcaaggacgacgtcgaagagaccgtgcgccatcgcctgtcggtctaccatgcccagaccaagccgctggtcgagttctacagcaagctggaagcgaaggatggcaagcccaagtgcagccatattcctggcgtcggctcggttgaagagatcactgcaaaagtactggaagccctgaagtaa

SEQ ID NO: 2445 - protein, 215 aa, Pseudomonas syringae pv
MRVILLGAPGAGKGTQAKFITEKFGIPQVSTGDMLRAAVKAETELGLKAKSVMDSGGLVSDDLIIGLIKDRLAQPDCANGVLFDGFPRTIPQAEALLKAGLEIDHVLEIAVDDEEIVKRMSGRRVHEGSGRIYHTIFNPPKVECIDDVTGEPLLQRKDDVEETVRHRLSVYHAQTKPLVEFYSKLEAKDGKPKCSHIPGVGSVEEITAKVLEALK

SEQ ID NO: 2446 - DNA, 648 bp, Pseudomonas aeruginosa
  CDS (1)..(648): transl_table=11
atgcgtgtgattctgctcggggcacccggtgccggcaaaggcacccaggcacggttcatcaccgagaagttcggcattccgcagatctccaccggcgacatgctgcgcgccgcagtcaaggccggcagcccgctcggccagcaggtgaaaggcgtgatggacagcggcggcctggtatccgacgacatcatcatcgccctgatcaaggaacgcatcaccgaggccgattgcgccaagggcttcctgttcgacggcttcccgcggaccatcccgcaggccgaagcgctgaaggacgccggcgtgaccatcgaccatgtggtcgagatcgccgtcgacgacgaggagatcgtgtcgcgtatcgccggtcgtcgcgtgcatccggcctccggccgcgtgtaccacaccgagcacaacccgccgaaggtcgccggcaaggacgacgttaccggcgaagagctgatccagcgcgaggacgacaaggaagagaccgtgcgtcaccgcctgtcggtctaccattcgcagaccaagccgctggtcgacttctaccagaagctgtcggccgccgaaggcaccccgaaataccacagcatcgccggcgtcggctcggtcgagcagatcaccgcgaaagtgctttcggccctgagctga

SEQ ID NO: 2447 - protein, 215 aa, Pseudomonas aeruginosa
MRVILLGAPGAGKGTQARFITEKFGIPQISTGDMLRAAVKAGSPLGQQVKGVMDSGGLVSDDIIIALIKERITEADCAKGFLFDGFPRTIPQAEALKDAGVTIDHVVEIAVDDEEIVSRIAGRRVHPASGRVYHTEHNPPKVAGKDDVTGEELIQREDDKEETVRHRLSVYHSQTKPLVDFYQKLSAAEGTPKYHSIAGVGSVEQITAKVLSALS

SEQ ID NO: 2448 - DNA, 648 bp, Pseudomonas fluorescens
  CDS (1)..(648): transl_table=11
atgcgcgtaattctgctgggagctcccggggccggtaaaggtactcaggcaaagttcatcaccgaaaagttcggtattccacagatctccaccggtgacatgctgcgtgctgcggtcaaggccggcaccgagctgggcctgaaggccaagagcgtgatggacagcggtggcctggtgtccgatgacctgatcatcaacctggtcaaggaacgcatcagccaggccgactgcgtcaatggcttcctgttcgacggcttcccgcgcaccattccccaggccgaagcgctggtgaaggccggtgtcgagctggacaacgtggtggaaatcgccgtcgacgacgaagagatcgtccagcgcatcgccggtcgccgtgtgcacgaggcttcgggccgggtctaccacaccgtctacaacccgccgaagatcgctggcaaggatgacatcaccggtgaagacctggtgcagcgcaaggacgacaccgaggaaaccgtgcgtcatcgcctgtcggtctaccactcgcagaccaagccgctggtggagttctaccagcaactggctgccacccagggcaagcctaagtacagccatatccctggcgtcggttcggtggaagtgatcaccggcaaggtactcgaagccctgagctga

SEQ ID NO: 2449 - protein, 215 aa, Pseudomonas fluorescens
MRVILLGAPGAGKGTQAKFITEKFGIPQISTGDMLRAAVKAGTELGLKAKSVMDSGGLVSDDLIINLVKERISQADCVNGFLFDGFPRTIPQAEALVKAGVELDNVVEIAVDDEEIVQRIAGRRVHEASGRVYHTVYNPPKIAGKDDITGEDLVQRKDDTEETVRHRLSVYHSQTKPLVEFYQQLAATQGKPKYSHIPGVGSVEVITGKVLEALS

SEQ ID NO: 2450 - DNA, 651 bp, Pseudomonas fluorescens
  CDS (1)..(651): transl_table=11
atgcgcgtcattctgctgggagctcccggggccggtaaaggtactcaggctaagttcatcaccgagaaattcggcattccgcaaatctccaccggcgacatgctgcgtgccgcggtcaaggccggcaccgagctgggcatcaaggccaagagcatcatggatgccggcggcctggtgtcggatgacctgatcatcgcgctggtcaaagaccgtatcgctcaagccgattgcgccaagggtttcctgttcgatggcttcccgcgcaccattcctcaggctgaagcgctggtgactgccggtgtcgagctggacgccgtggtcgaaatcgccgttgaagacgaagaaatcgttcagcgtatcgccggtcgtcgcgttcacgaggccagcggccgcgtttaccacatcgtctacaacccgccgaaaattgccggtaaagacgacatcaccggcgaagagctggtacagcgcaaggacgacaccgaagaaaccgtgcgtcatcgcctgtcggtctaccactcgcagaccaagccgctggtggagttctaccagaacctgtccgccaagaacggtggcaagccgaagtacagccatatccctggcgtcggttcggttgaagcgatcactgccaaggtgcttgaagccctgagctga

SEQ ID NO: 2451 - protein, 216 aa, Pseudomonas fluorescens
MRVILLGAPGAGKGTQAKFITEKFGIPQISTGDMLRAAVKAGTELGIKAKSIMDAGGLVSDDLIIALVKDRIAQADCAKGFLFDGFPRTIPQAEALVTAGVELDAVVEIAVEDEEIVQRIAGRRVHEASGRVYHIVYNPPKIAGKDDITGEELVQRKDDTEETVRHRLSVYHSQTKPLVEFYQNLSAKNGGKPKYSHIPGVGSVEAITAKVLEALS

SEQ ID NO: 2452 - DNA, 651 bp, Pseudomonas putida
  CDS (1)..(651): transl_table=11
atgcgcgtaattctgctgggagctcccggggccggtaaaggtactcaggcaaagttcatcaccgaaaagttcggtatccctcagatctccaccggtgacatgctgcgtgccgccgtcaaggccggcaccccgctgggcctggaactgaagaaagtcatggatgccggccagctggtttccgacgagttgatcatcagcctggtcaaggagcgcatcgcccagcctgattgcgccaacggctgcctgttcgatggcttcccacgcaccatcccgcaagccgaagccatggtggctgctggtgtcgacatcgacgccgtggtcgaaattgccgtggatgacgaagaaatcgtcggccgcatggctggccgccgtgtgcacctggcctcgggccgcacctaccacattcagtacaacccgccgaaagtggaaggcaaggacgacgtcactggcgaagacctgatccagcgcgacgacgacaaggaagaaaccgttcgccatcgcctgtcggtctaccacacccagaccaagccgctggtggacttctaccagaagctgtcggccgccaatgctggcaagccgaagtacagccacatcgaaggtgtcggttcggtcgacgccatcactgccaaggtcctggcagccctgagctga

SEQ ID NO: 2453 - protein, 216 aa, Pseudomonas putida
MRVILLGAPGAGKGTQAKFITEKFGIPQISTGDMLRAAVKAGTPLGLELKKVMDAGQLVSDELIISLVKERIAQPDCANGCLFDGFPRTIPQAEAMVAAGVDIDAVVEIAVDDEEIVGRMAGRRVHLASGRTYHIQYNPPKVEGKDDVTGEDLIQRDDDKEETVRHRLSVYHTQTKPLVDFYQKLSAANAGKPKYSHIEGVGSVDAITAKVLAALS

SEQ ID NO: 2454 - DNA, 648 bp, Pseudomonas syringae pv
  CDS (1)..(648): transl_table=11
atgcgcgtgattctgctaggagctcccggggccggtaaaggtactcaggcaaaattcatcactgaaaagttcggcattccgcagatttcgactggcgacatgctgcgcgctgcggtcaaggccggcactgagctgggcctgaaagccaaaagcgtcatggacgcaggcaatctggtttccgatgacctgatcatcggcctgatcaaggaccgcctggccgagcccgattgcgcgaacggcgtactgttcgacggcttcccgcgcaccattcctcaggcagaagccctgttgaaggccggtctggaaatcgaccacgtgctcgaaatcgccgtggatgacgaagaaatcgtcaagcgcatgtcgggccgtcgtgttcacgaaggttccggccgcatctatcacacgatcttcaacccgccgaaggtcgaaggtgtcgatgacgtgactggcgaatcgctggtgcagcgcaaggacgatgtcgaagaaaccgtgcgcctgcgcctgaaggtctatcacgaccagaccaagccgctggttgagttctacagcaagcttgaagcgcagaatggcaagcccaagtgcagccacattccaggcgttggttcggttgaagagattacggccaaggtgctggtagcgctgagctga

SEQ ID NO: 2455 - protein, 215 aa, Pseudomonas syringae pv
MRVILLGAPGAGKGTQAKFITEKFGIPQISTGDMLRAAVKAGTELGLKAKSVMDAGNLVSDDLIIGLIKDRLAEPDCANGVLFDGFPRTIPQAEALLKAGLEIDHVLEIAVDDEEIVKRMSGRRVHEGSGRIYHTIFNPPKVEGVDDVTGESLVQRKDDVEETVRLRLKVYHDQTKPLVEFYSKLEAQNGKPKCSHIPGVGSVEEITAKVLVALS

SEQ ID NO: 2456 - DNA, 648 bp, Pseudomonas syringae pv
  CDS (1)..(648): transl_table=11
atgcgcgtgattctgctgggagctcccggggccggtaaaggtactcaggcaaaattcatcactgaaaagttcggcatcccgcaggtttcgacaggcgacatgctgcgcgctgcagtcaaggctgaaaccgagctgggcctgaaggccaagagcgtcatggactcaggcggtctggtttccgatgacctgatcatcggcctgatcaaggaccgtctggccgagccggactgcgcgaacggcgtgctgttcgatggcttcccgcgcaccattccacaggccgaagccctgttgaacgccggtctggaaatcgaccatgtgctggaaatcgcggtcgatgacgaagaaatcgtcaagcgcatgtccggccgccgggttcacgaaggttccgggcgcatctaccacactatcttcaatccgccgaaggtcgaaggtatcgatgatgtgaccggcgaaccgctgttgcagcgcaaggacgacgtcgaagaaaccgtgcgtcatcgcctgtccgtgtaccacgcgcagaccaagccgctggtcgagttttacagcaagctggaagcgaagaacggcaagcccaagtgcagccatatcccgggcgtcggctcggttgaggacatcactgcaaaagtactgaaagccttgagctga

SEQ ID NO: 2457 - protein, 215 aa, Pseudomonas syringae pv
MRVILLGAPGAGKGTQAKFITEKFGIPQVSTGDMLRAAVKAETELGLKAKSVMDSGGLVSDDLIIGLIKDRLAEPDCANGVLFDGFPRTIPQAEALLNAGLEIDHVLEIAVDDEEIVKRMSGRRVHEGSGRIYHTIFNPPKVEGIDDVTGEPLLQRKDDVEETVRHRLSVYHAQTKPLVEFYSKLEAKNGKPKCSHIPGVGSVEDITAKVLKALS

SEQ ID NO: 2458 - DNA, 663 bp, Pyrococcus abyssi
  CDS (1)..(663): transl_table=11
atgaacatacttatttttgggcccccgggaagtggaaaatcaacacaagcaaggagaataacggaaaggtatggtctaacttatatagcctctggagacataataagggcggaaataaaagccaggacacccctcggcattgaaatggagaggtacctatcaagaggcgacctaattccggacacaatcgtaaataccctgataatttcaaagctcagaagggtgagggagaacttcataatggacggctatcccaggacgccagaacaagttataaccctggaaaattacctgtatgaccacgggattaagctagatgtggcaattgatatatacataacaaaggaggagagcgttaggaggatctctggaaggaggatatgctccaagtgtggggccgtttatcacgttgagttcaacccaccgaaggttccggggaagtgcgatatatgcggcggtgagcttatacaaagaccggatgacagaccggagatagttgagaagaggtacgacatatactcaaagaacatggagccgataattaaattttatcagaagcagggaatttacgtgagaatagatgggcacggatcaatagacgaagtctgggagaggattagacccctactagattacatttataaccaggaaaataggcgatga

SEQ ID NO: 2459 - protein, 220 aa, Pyrococcus abyssi
MNILIFGPPGSGKSTQARRITERYGLTYIASGDIIRAEIKARTPLGIEMERYLSRGDLIPDTIVNTLIISKLRRVRENFIMDGYPRTPEQVITLENYLYDHGIKLDVAIDIYITKEESVRRISGRRICSKCGAVYHVEFNPPKVPGKCDICGGELIQRPDDRPEIVEKRYDIYSKNMEPIIKFYQKQGIYVRIDGHGSIDEVWERIRPLLDYIYNQENRR

SEQ ID NO: 2460 - DNA, 663 bp, Pyrococcus furiosus
  CDS (1)..(663): transl_table=11
gtgaacattctaatatttggtcccccagggagcggaaaatcaacccaggcaagaagaattgtagaaagatatggattaacttacatttcctctggagacttaataagaaaagaaattgcagaaggaacacctctcggacgagaaatgcaggcttatcttgccagaggagatctaattcctgacaccatagtgaacactttaataatctcaaagctcaggagggttagaaaggattttataatggatggctatcctagaactcccgagcaggtgatagcactagaaaattatctctatgaccatgggataaaaatagatgtggccatagacatatacgtctccctagaggagagtattagaagagtatctggaagaaggatatgtcccaagtgcggagcggtttatcatgtcgaattcaatcctcccaagatacctgggagatgtgatgtatgtggggcggagctagttcagagagaagatgatagaccggaagttgttgaaaaacgatataggatttatatgaaaaatatggagcccataatcaagttttatcagaagcagaggatctacgtaaaaataaacggacatggaaatattgacgaagtatgggagagaataaggcctctattagattacatccgcaatagggaggcgatgatttga

SEQ ID NO: 2461 - protein, 220 aa, Pyrococcus furiosus
MNILIFGPPGSGKSTQARRIVERYGLTYISSGDLIRKEIAEGTPLGREMQAYLARGDLIPDTIVNTLIISKLRRVRKDFIMDGYPRTPEQVIALENYLYDHGIKIDVAIDIYVSLEESIRRVSGRRICPKCGAVYHVEFNPPKIPGRCDVCGAELVQREDDRPEVVEKRYRIYMKNMEPIIKFYQKQRIYVKINGHGNIDEVWERIRPLLDYIRNREAMI

SEQ ID NO: 2462 - DNA, 663 bp, Pyrococcus horikoshii
  CDS (1)..(663): transl_table=11
atgaatatcctaatctttggccctccaggcagtgggaagtcaacccaagcaaggaggattactgaaagatatggtttgacgtatatttcctccggggatattataagagcagaaataagctcaagaacgccacttggattagaaatggagaagtatttatcaagaggtgacttaatacctgacacgatagttaacacgttgataatttcgaagctaagaagggttagggagaatttcattatggatggttatccaagaacgccagaacaggtaatagcccttgagaattacctctatgaccatggtattaaaattgatgtagccatagatatcttcataactaaggaagaaagcgtgaggagaatttctggaagaaggatatgctccaagtgtggagcagtatatcacattgaatttaaccctccaaagatcccaggaaagtgtgatatctgtggaggagatctaattcaaaggcctgacgataggcctgagatagtggagaagaggtacgacatatatatgaggaatatggaaccgataataaaattctaccagaagcagggaatttacgttaagatagatggtcatggatcgattaatgaagtttgggaaaggataaggcctctactggattacatttataatactaggagtaggcgatga

SEQ ID NO: 2463 - protein, 220 aa, Pyrococcus horikoshii
MNILIFGPPGSGKSTQARRITERYGLTYISSGDIIRAEISSRTPLGLEMEKYLSRGDLIPDTIVNTLIISKLRRVRENFIMDGYPRTPEQVIALENYLYDHGIKIDVAIDIFITKEESVRRISGRRICSKCGAVYHIEFNPPKIPGKCDICGGDLIQRPDDRPEIVEKRYDIYMRNMEPIIKFYQKQGIYVKIDGHGSINEVWERIRPLLDYIYNTRSRR

SEQ ID NO: 2464 - DNA, 675 bp, Pyrococcus kodakaraensis
  CDS (1)..(675): transl_table=11
gtgaacatacttatcttcggcccgcctggaagcgggaagagtacgcactcaagaacaataatggaaaagtacggcctcgtctatatttcgtcgggagacctcatcaggagagaaatcgaaaggaagtcttctctcggcagggagatggaggcctaccttagcaggggagacctcattccagataccatcgttaacaccctgataatctcaaagctccgccgccagagggagaactttatccttgacggctacccaaggacgccagaacaggtcatatcccttgagaactacctctttgaccatggtattaagctagacttggccctagaaatcttcatcgatgaggacacgagcgttgagaggatttccgggagaaggatatgccccaactgcggagcagtctatcacgtaaagtacaatccacccaaggtgccaggaatctgtgatgtctgcggctccgagctcatccagagggcagacgacagggaagaggtcgtcaggaagaggtacaggatatactcaaagaacatggagccgataatcaagttctaccgtgccaaggggatatacgttagggttgacggcgacgggccgataagtgaagtatggaagaggatacagcctttactggattacattcactcacgcgaggagaagaggaaggaacatgagtaa

SEQ ID NO: 2465 - protein, 224 aa, Pyrococcus kodakaraensis
MNILIFGPPGSGKSTHSRTIMEKYGLVYISSGDLIRREIERKSSLGREMEAYLSRGDLIPDTIVNTLIISKLRRQRENFILDGYPRTPEQVISLENYLFDHGIKLDLALEIFIDEDTSVERISGRRICPNCGAVYHVKYNPPKVPGICDVCGSELIQRADDREEVVRKRYRIYSKNMEPIIKFYRAKGIYVRVDGDGPISEVWKRIQPLLDYIHSREEKRKEHE

SEQ ID NO: 2466 - DNA, 666 bp, Ralstonia eutropha
  CDS (1)..(666): transl_table=11
atgcgtttgatcctgttgggcgcacccggcgctggcaaaggcacgcaagccaagttcatctgcgagaagttcggcattccgcaaatctccacgggcgacatgctgcgcgccgcggtgaaggccggtacaccgcttggcgtggaagccaagaaggtcatggatgcgggcggacttgtgtcggatgacatcattatcggcttggtcaaggaccgtcttaaggacgccgattgcaagaacggctacctgttcgatggcttcccgcgcaccattccgcaggccgaggccatgaaggaagccggcgtggcgatcgactacgtgctggaaatcgacgtgccgttcgacgccatcatcgagcgcatgagcggccgccgcgtgcacgtggcctcgggccggacctaccacgtcaagtacaacccgcccaaaacggaaggcgtcgacgatgaaaccggcgaagcgctgatccagcgcgacgacgacaaggaagacaccgtccgcaagcgcctggacgtgtattcgcagcaaacccgcccgctggtggactattactcggactgggccgccaagggcgatgccacggccaaggtgtccccgccgaagtaccgcaagatcgccggcgtgggcgatgtggacagcatcactgcccgcgtgttcgaagcgctcaagtaa

SEQ ID NO: 2467 - protein, 221 aa, Ralstonia eutropha
MRLILLGAPGAGKGTQAKFICEKFGIPQISTGDMLRAAVKAGTPLGVEAKKVMDAGGLVSDDIIIGLVKDRLKDADCKNGYLFDGFPRTIPQAEAMKEAGVAIDYVLEIDVPFDAIIERMSGRRVHVASGRTYHVKYNPPKTEGVDDETGEALIQRDDDKEDTVRKRLDVYSQQTRPLVDYYSDWAAKGDATAKVSPPKYRKIAGVGDVDSITARVFEALK

SEQ ID NO: 2468 - DNA, 666 bp, Ralstonia metallidurans
  CDS (1)..(666): transl_table=11
atgcgtttgatcctgttgggcgcacctggcgccggcaaaggcacgcaagccaagttcatctgcgagaagttcggcattccgcaaatctccacgggcgacatgctgcgcgccgcggtgaaggcgggcacgccgctgggcatcgaagccaagaaggtgatggacgcgggcggactggtgtcggatgacatcattatcggcctggtgaaagaccgtcttaagcagcctgattgcgaaaagggctacctgttcgatggtttcccgcgcacgattccgcaggccgaggcaatgaaggaagccggcgtggcgatcgactacgtgctggaaatcgacgtgccgttcgacgccatcatcgagcgcatgagcggccgccgcgtgcatgtggcgtcgggccggacataccacgtcaagttcaacccgccgaaggccgacatggtcgacgacgaaacgggcgaagcactgatccagcgcgacgacgacaaggaagagacggtgcgcaagcgcctggacgtgtactcgcagcaaacccgtccgctggtcgactactactcgaactgggccgccaacggcgatgcctcggcgaaggtatcgccgccgaagtaccgcaagatcgcgggtcttggcgaagtcgacaagatcacggcaagcgtgttcgacgcgctgaagtaa

SEQ ID NO: 2469 - protein, 221 aa, Ralstonia metallidurans
MRLILLGAPGAGKGTQAKFICEKFGIPQISTGDMLRAAVKAGTPLGIEAKKVMDAGGLVSDDIIIGLVKDRLKQPDCEKGYLFDGFPRTIPQAEAMKEAGVAIDYVLEIDVPFDAIIERMSGRRVHVASGRTYHVKFNPPKADMVDDETGEALIQRDDDKEETVRKRLDVYSQQTRPLVDYYSNWAANGDASAKVSPPKYRKIAGLGEVDKITASVFDALK

SEQ ID NO: 2470 - DNA, 669 bp, Ralstonia solanacearum
  CDS (1)..(669): transl_table=11
atgcggttgattctgttgggcgcacccggcgccggcaaaggtacgcaagccaaattcatctgcgaacgcttcggcattccgcagatctccaccggcgacatgctgcgcgccgccgtcaaggccggcaccccgctgggcatcgaagccaagaaggtgatggacgccggcggcctggtgtccgacgacatcatcatcggcctggtgaaggaccgcctgcagcagtccgactgcaagaacggctacctgttcgacggcttcccgcgcaccatcccccaggccgaagccatgaaggatgccggcgtgccgatcgactacgtgctggaaatcgacgtgccgttcgacgccatcatcgagcgcatgagcggccgccgcgtgcacgtggcctcgggccggacctatcacgtcaagtacaacccgcccaagaacgagggccaggacgacgaaaccggcgatccgctgatccagcgcgacgacgacaaggaagaaaccgtccgcaagcgcctgtccgtgtacgagaaccagacccgcccgctggtggactactactccggctgggccgagaacggcaacggtgccgccaaggtggcgccgcccaagtaccgcaagatcagcgggatcggcaacgtggaagacatcaccggccgcgtgttcggcgcactggaagcctga

SEQ ID NO: 2471 - protein, 222 aa, Ralstonia solanacearum
MRLILLGAPGAGKGTQAKFICERFGIPQISTGDMLRAAVKAGTPLGIEAKKVMDAGGLVSDDIIIGLVKDRLQQSDCKNGYLFDGFPRTIPQAEAMKDAGVPIDYVLEIDVPFDAIIERMSGRRVHVASGRTYHVKYNPPKNEGQDDETGDPLIQRDDDKEETVRKRLSVYENQTRPLVDYYSGWAENGNGAAKVAPPKYRKISGIGNVEDITGRVFGALEA

SEQ ID NO: 2472 - DNA, 639 bp, Rickettsia conorii
  CDS (1)..(639): transl_table=11
gtgatggtaatttttttaggtcctccaggagcgggaaagggcacacaaggaaaaaagatagctaaaaaaattgatttaccacatatagcaatcggtgatatatttagaacaattattaaaacatcaactagcgaagcagagttaattaataattatgttaagcaaggggagcttatccctaatgaaatagttaatcaagtaatcaaaaattttttattatcctctgaatataaaaacggctacatattagatggatatccgcgtaatttagagcaagcgaaattttttgaatcatttattaaagaaaaaattaaaataatatattttgatgtttcagatgaattattaattaaaagaattttaggaagatatagttgtaaaaattgcggtaaaatatataataggtacttcgtgcagcctaaaactgataatgtatgtgatgtttgcggttcaagtacatttgattatagaaaagacgataatgaagaagtaataaaaaaaagaattgaagtatataaaacagaaacatatccattaatagattattataagaatagtggtaatttttatatagttaatggaagtaaaaatgaacaagaaatagaaattgatatacagaaaatactaaaaataaattga

SEQ ID NO: 2473 - protein, 212 aa, Rickettsia conorii
MMVIFLGPPGAGKGTQGKKIAKKIDLPHIAIGDIFRTIIKTSTSEAELINNYVKQGELIPNEIVNQVIKNFLLSSEYKNGYILDGYPRNLEQAKFFESFIKEKIKIIYFDVSDELLIKRILGRYSCKNCGKIYNRYFVQPKTDNVCDVCGSSTFDYRKDDNEEVIKKRIEVYKTETYPLIDYYKNSGNFYIVNGSKNEQEIEIDIQKILKIN

SEQ ID NO: 2474 - DNA, 657 bp, Saccharophagus degradans
  CDS (1)..(657): transl_table=11
atgcgattaatcttattgggtgcgccaggcgcaggaaagggcactcaggcgaaatttattatggaggcctatggcgttccgcaaatttcaactggtgacatgctgcgtgctgcggtaaaagcgggctccccccttggtctaaaagttaaagatatcatgacttctggcgggctagtatctgacgacataatcattgatttggtaaaagaacgtattgccgaaccagattgccaaaaagggtttttgtttgatggcttcccgcgcactatcccacaagctgaagcactagtggctgcaggggtaaatatcgatcacgtgcttgaaatctttgttgaagatgaagaaattgtatctcgtttaagcggtcgtcgtgttcacgaagcctctggtcgtgtttatcacgttaaacacaacgcgcctaaaaccgaaggtgtagatgacgaaaccggtgagccgttggtgcaacgcgatgatgataaagaagagactgttcgcaaaaggttggctgtatatcatgagcaaactgagccgctagtcgatttttataaaaaactatccgcagaaagcagcgatagcctgccagtgtactctcgggtagatggtattggctctcttgatgatattcaggcgcgtgtttttgaagccctgaaaaagtag

SEQ ID NO: 2475 - protein, 218 aa, Saccharophagus degradans
MRLILLGAPGAGKGTQAKFIMEAYGVPQISTGDMLRAAVKAGSPLGLKVKDIMTSGGLVSDDIIIDLVKERIAEPDCQKGFLFDGFPRTIPQAEALVAAGVNIDHVLEIFVEDEEIVSRLSGRRVHEASGRVYHVKHNAPKTEGVDDETGEPLVQRDDDKEETVRKRLAVYHEQTEPLVDFYKKLSAESSDSLPVYSRVDGIGSLDDIQARVFEALKK

SEQ ID NO: 2476 - DNA, 645 bp, Salmonella choleraesuis
  CDS (1)..(645): transl_table=11
atgcgtattattctgcttggcgctccgggcgcgggtaaaggaactcaggctcagttcatcatggagaaatatggtattccgcaaatctccactggcgatatgctgcgcgccgcagtgaaatcaggctccgagttgggcaaacaggcgaaagatatcatggacgccggtaaactggtgaccgatgaactggtgattgcgctggttaaagagcgtatcgcccaggaagactgccgtaacggttttctgctggacggtttcccgcgcacgatcccgcaggctgacgcgatgaaagaagcgggtattgtcgtggattacgtgctggaattcgacgtaccggacgaactgatcgttgaccgtattgtgggccgtcgcgtacacgccgcctctggccgcgtttaccacgtaaagtttaatccgccgaaagtggaaggcaaagatgacgtcaccggcgaagatctgacgacccgtaaagacgatcaggaagagaccgttcgcaaacgtctggtggaatatcatcagatgaccgcgccgctgattggctactaccagaaagaagcggaagcgggcaacaccaaatacgctaaagttgacggtacgcaggccgttgccgacgtgcgcgcagcgctggaaaaaatcctcggttaa

SEQ ID NO: 2477 - protein, 214 aa, Salmonella choleraesuis
MRIILLGAPGAGKGTQAQFIMEKYGIPQISTGDMLRAAVKSGSELGKQAKDIMDAGKLVTDELVIALVKERIAQEDCRNGFLLDGFPRTIPQADAMKEAGIVVDYVLEFDVPDELIVDRIVGRRVHAASGRVYHVKFNPPKVEGKDDVTGEDLTTRKDDQEETVRKRLVEYHQMTAPLIGYYQKEAEAGNTKYAKVDGTQAVADVRAALEKILG

SEQ ID NO: 2478 - DNA, 645 bp, Shewanella oneidensis
  CDS (1)..(645): transl_table=11
atgcgcattatcctattgggcgccccaggtgccggtaaaggtacccaggcccagttcattatggaacagtatggtatcccacaaatttctactggcgatatgttacgtgcggccgttaaagccggtactccgctgggtttagaagcgaagaaagtgatggatgcaggccagctggtttctgatgatctgatcattggactggttaaagagcgtatcgcacaggacgattgtgctaaaggttttctgttagacggtttcccacgcactatcccacaagcggatgcgatggcggcaaacggtattagcattgatcacgtcatcgaaatcgatgtgccagacgaagaaatcgttaaacgcatgagcggtcgtcgcgttcaccccggttctggccgtgtttaccacgtagtattcaatccacctaaagtggaaggcaaggatgacgtgacgggcgaagatttagcgattcgtccagacgatgaagaagcgacagtacgtaagcgtttaggtatttaccatgagcaaactaagccattagttgagtactatggcaaagttgctgcggcgggtaacactcaataccacaaatttgatggtactcagtcagttgccgcggtgagcgagcagcttgccagcgtgcttaaataa

SEQ ID NO: 2479 - protein, 214 aa, Shewanella oneidensis
MRIILLGAPGAGKGTQAQFIMEQYGIPQISTGDMLRAAVKAGTPLGLEAKKVMDAGQLVSDDLIIGLVKERIAQDDCAKGFLLDGFPRTIPQADAMAANGISIDHVIEIDVPDEEIVKRMSGRRVHPGSGRVYHVVFNPPKVEGKDDVTGEDLAIRPDDEEATVRKRLGIYHEQTKPLVEYYGKVAAAGNTQYHKFDGTQSVAAVSEQLASVLK

SEQ ID NO: 2480 - DNA, 645 bp, Shewanella sp
  CDS (1)..(645): transl_table=11
atgcgcattatcctattgggcgccccaggtgccggtaaaggtacccaggcccagttcattatggaacagtatggtatcccacaaatttctactggcgacatgttacgtgctgccgttaaagccggtactccgctgggtttagaagcgaagaaagtgatggatgcaggccaactggtttctgatgatctgatcattggactggttaaagagcgtatcgcacaggacgactgtgttaaaggtttcctgttagacggtttcccacgcactatcccacaagcggatgcgatggcggcaaacggtatcagcattgatcacgtgatcgaaatcgatgtgccagacgaagaaatcgttaagcgcatgagcggtcgtcgcgttcacccaggttctggccgtgtttaccacgtggtattcaatccacctaaagtggaaggcaaggacgatgtaacaggcgaagacttagcgattcgtccagatgacgaagaagccacagtgcgtaagcgtttaggcatttaccacgagcaaactaagccattggttgaatactatggcaaagtggctgcggcgggtaacactcaataccacaagttcgatggtactcagtcggtagcggctgtgagtgcacagttagccagcgtgctgaaataa

SEQ ID NO: 2481 - protein, 214 aa, Shewanella sp
MRIILLGAPGAGKGTQAQFIMEQYGIPQISTGDMLRAAVKAGTPLGLEAKKVMDAGQLVSDDLIIGLVKERIAQDDCVKGFLLDGFPRTIPQADAMAANGISIDHVIEIDVPDEEIVKRMSGRRVHPGSGRVYHVVFNPPKVEGKDDVTGEDLAIRPDDEEATVRKRLGIYHEQTKPLVEYYGKVAAAGNTQYHKFDGTQSVAAVSAQLASVLK

SEQ ID NO: 2482 - DNA, 645 bp, Shigella flexneri
  CDS (1)..(645): transl_table=11
atgcgtatcattctgcttggcgctccgggcgcggggaaagggactcaggctcagttcatcatggagaaatatggtattccgcaaatctccactggcgatatgctgcgtgctgcggtcaaatctggctccgagctgggtaaacaagcaaaagacattatggatgctggcaaactggtcaccgacgaactggtgatcgcgctggttaaagagcgcattgctcaggaagactgccgtaatggtttcctgttggacggcttcccgcgtaccattccgcaggcagacgcgatgaaagaagcgggcatcaatgttgattacgttctggaattcgacgtaccggacgaactgattgttgatcgtatcgtaggccgccgcgttcatgcgccgtctggtcgtgtttatcacgttaaattcaatccgccgaaagtagaaggcaaagacgacgttaccggtgaagaactgactacccgtaaagacgatcaggaagaaaccgtgcgtaaacgtctggttgaataccatcagatgactgcaccgctgatcggctactactccaaagaagcggaagcgggtaacaccaaatacgcgaaagttgacggtaccaagcaggttgctgaagttcgcgctgatctggaaaaaatcctcggctaa

SEQ ID NO: 2483 - protein, 214 aa, Shigella flexneri
MRIILLGAPGAGKGTQAQFIMEKYGIPQISTGDMLRAAVKSGSELGKQAKDIMDAGKLVTDELVIALVKERIAQEDCRNGFLLDGFPRTIPQADAMKEAGINVDYVLEFDVPDELIVDRIVGRRVHAPSGRVYHVKFNPPKVEGKDDVTGEELTTRKDDQEETVRKRLVEYHQMTAPLIGYYSKEAEAGNTKYAKVDGTKQVAEVRADLEKILG

SEQ ID NO: 2484 - DNA, 660 bp, Sphingopyxis alaskensis
  CDS (1)..(660): transl_table=11
atgacgctcaatatcattctgctcggcccgccgggggcaggcaagggaacgcaggcatcgcggctcgaggatgagcatggcatggtccagctgtcgaccggcgacatgttgcgcgccgcggtcaaggcgggaacccccatcgggcttcaggccaaggcggtgatggacgcgggcgagctggtctcggacgcgatcgtgtcggggctgatcggcgagcggctcgacgaactcggtcccgatgtttcggtgatcttcgatggctatccgcgcaccgcggcacaggccgacgcgctcgacggcattttgtcggcacgcgggcgcacgctcgaccatgtcatcgaactcgtcgtcgatgaggatgcgctcgtcgatcgcatcaccggccgtttcagttgcgcccggtgcggcgagggctatcacgaccgctacaagctgcccaaggtcgccgacatctgcgatgtttgcgggtcgaaagagttcaaacgccgtcccgacgacaatgaggacaccgtgcgcacacgcatggtcgaatatcgggcgaagaccgcgccgatcctgccgatctatgaagcgcggggcatcgtcacccgggtcgatggcatggcgccgatcgaccgggtcaacgacgcgatcgaaacgatcctcggcaccgctggctag

SEQ ID NO: 2485 - protein, 219 aa, Sphingopyxis alaskensis
MTLNIILLGPPGAGKGTQASRLEDEHGMVQLSTGDMLRAAVKAGTPIGLQAKAVMDAGELVSDAIVSGLIGERLDELGPDVSVIFDGYPRTAAQADALDGILSARGRTLDHVIELVVDEDALVDRITGRFSCARCGEGYHDRYKLPKVADICDVCGSKEFKRRPDDNEDTVRTRMVEYRAKTAPILPIYEARGIVTRVDGMAPIDRVNDAIETILGTAG

SEQ ID NO: 2486 - DNA, 648 bp, Staphylococcus aureus
  CDS (1)..(648): transl_table=11
atgaatatcattttgatgggtttacctggcgcaggtaaaggaactcaagcaagtgaaattgtcaagaaattcccaataccccacatttcaactggtgacatgttcagaaaagctataaaagaagaaactgaattaggtaaagaagctaagtcttatatggaccgtggcgaattagttcctgatgaagtgactgtaggtatcgttaaggaaagaatttctgaagacgatgcaaaaaaaggctttttattagatggcttcccaagaacaatcgagcaagctgaggcattaaataatattatgtctgagcttgacagaaacattgatgctgtcatcaatatcgaagttccggaagaagaattaatgaaccgtcttacaggtcgtcgaatctgtgagtcatgtggtacaacgtatcatcttgtatttaatcctccgaaggtcgaaggtatttgtgatatcgatggtggtaaattgtatcaacgagaagatgataatcctgaaacggtagctaatcgtttgagtgttaatattaaacaatctaagcctattttagatttctatgatcaaaaaggtgtattgaaaaatattgatggttcaaaagatattagcgacgttaccaaagatgtcattgatattttagatcatttgtaa

SEQ ID NO: 2487 - protein, 215 aa, Staphylococcus aureus
MNIILMGLPGAGKGTQASEIVKKFPIPHISTGDMFRKAIKEETELGKEAKSYMDRGELVPDEVTVGIVKERISEDDAKKGFLLDGFPRTIEQAEALNNIMSELDRNIDAVINIEVPEEELMNRLTGRRICESCGTTYHLVFNPPKVEGICDIDGGKLYQREDDNPETVANRLSVNIKQSKPILDFYDQKGVLKNIDGSKDISDVTKDVIDILDHL

SEQ ID NO: 2488 - DNA, 648 bp, Staphylococcus epidermidis
  CDS (1)..(648): transl_table=11
atgaatatcattttaatgggcttacctggtgcaggtaaagggactcaggcgagtgaaattgttaagaaattcccaataccacatatttctactggtgacatgttcagaaaagcgattaaagatgaaacagatttaggaaaagaagctaaatcatatatggatcgtggagaattagttcctgatgaagttactgtaggtatcgttaaagaaagaatttctgaagacgatgcaaaaaaaggattcttgttagatggattcccaagaactatagatcaagctgagtcattaagtcaaattatgtctgagcttgatagagaaattgatgctgtcattaatatcgaagttcctgaggaagaattaatgaatcgtcttacaggtcgtcgtatctgtgagaaatgtggtacaacatatcatcttgtatttaatcctccaaaggttgatggtatatgtgatatcgatggtggaaagttatatcaacgtgaagatgacaatccagaaacagtatctaatcgtttgagcgttaatgttaaacaatctaagcctattttagaatattacaacaacaaaggtgtcttgaaaaacattgatggttcaaaagatattgacgaagtaaccaacgatgtcattgatatcttagatcatttataa

SEQ ID NO: 2489 - protein, 215 aa, Staphylococcus epidermidis
MNIILMGLPGAGKGTQASEIVKKFPIPHISTGDMFRKAIKDETDLGKEAKSYMDRGELVPDEVTVGIVKERISEDDAKKGFLLDGFPRTIDQAESLSQIMSELDREIDAVINIEVPEEELMNRLTGRRICEKCGTTYHLVFNPPKVDGICDIDGGKLYQREDDNPETVSNRLSVNVKQSKPILEYYNNKGVLKNIDGSKDIDEVTNDVIDILDHL

SEQ ID NO: 2490 - DNA, 663 bp, Streptomyces avermitilis
  CDS (1)..(663): transl_table=11
atgcgaatcgtcctcgtcgggccgccgggtgcagggaagggaacgcaggccgcgttcctcgccaagaacctgggaatcccgcacatctccacgggcgacctcttccgggccaacatcagccagcagaccgagctcggcaagctggccaagtcctacatggacgagggcaacctggtgccggacgaggtcaccatcgcgatggccaaggaccgcatggagcagcccgacgcggtgaacggcttcctcctcgacggcttcccgcgcaacgtcaagcaggccgaggcgctggacgagatgctgaagtccgagggcatgaagctggacgccgtgctggacctggaggtccccgaggacgaggtggtcaagcgcatcgccggccgccgcatctgccgcaacgactcggcgcacgtcttccacgtctcgtacaagccgccgaagcaggaaggcgtctgcgacgtctgtggcggcgagctgtaccagcgtgacgacgactccgaggagaccgtccgccggcggctggaggtctaccacacgcagaccgagccgatcatcgactactaccgggcgcagggcctggtcgtgacgatctcggcgctcggtccggtggaagaggtcacccagcgcgcgatggacgcactcaagcgcgaggacgccagcaagtag

SEQ ID NO: 2491 - protein, 220 aa, Streptomyces avermitilis
MRIVLVGPPGAGKGTQAAFLAKNLGIPHISTGDLFRANISQQTELGKLAKSYMDEGNLVPDEVTIAMAKDRMEQPDAVNGFLLDGFPRNVKQAEALDEMLKSEGMKLDAVLDLEVPEDEVVKRIAGRRICRNDSAHVFHVSYKPPKQEGVCDVCGGELYQRDDDSEETVRRRLEVYHTQTEPIIDYYRAQGLVVTISALGPVEEVTQRAMDALKREDASK

SEQ ID NO: 2492 - DNA, 654 bp, Streptomyces coelicolor
  CDS (1)..(654): transl_table=11
atgcgaatcgtcctcgtcgggcctccgggtgccggaaagggaacgcaggccacccgccttgccgagacgctgcacattccgcacatctccacgggcgacctgttccgcgcgaacatcagccagcagaccgaactgggcaagctcgcgaagtcctacatgaacgcgggcaacctcgtgccggacgaggtcaccatcgccatggcgaaggaccgcatggagcagcccgacgccgagggcggcttcctgctggacggcttcccgcgcaacgtctcccaggccgaggcgctggacgagctgctcgagaccgagggcatgaagctcgacgcggtgctggacctggaggcccccgaggacgaggtcgtcaagcggatcgccggccggcgcgtctgccgcaatgagccgaagcacgtcttccacgtgacgtacacgccgccgaagaaggaaggcgtctgcgacgtctgcggcggcgagctgtaccagcgggacgacgactccgaggagacggtccgcaagcggctggaggtctaccacacgcagaccgagccgatcatcgactactacaagtcgcagggcctggtcgccaccatcgccgcgacgggccccgtggacgaggtcacccgccgcgcgctggaggcgctcaagcgcgaccagtag

SEQ ID NO: 2493 - protein, 217 aa, Streptomyces coelicolor
MRIVLVGPPGAGKGTQATRLAETLHIPHISTGDLFRANISQQTELGKLAKSYMNAGNLVPDEVTIAMAKDRMEQPDAEGGFLLDGFPRNVSQAEALDELLETEGMKLDAVLDLEAPEDEVVKRIAGRRVCRNEPKHVFHVTYTPPKKEGVCDVCGGELYQRDDDSEETVRKRLEVYHTQTEPIIDYYKSQGLVATIAATGPVDEVTRRALEALKRDQ

SEQ ID NO: 2494 - DNA, 651 bp, Symbiobacterium thermophilum
  CDS (1)..(651): transl_table=11
atgcacatcattctgatgggcccgccgggagcaggcaagggaacccaggccgtgctgctggccgggcaggaaggcattccacacatctccaccggggacatcttccgtgcccacatgagccagggcactcccctgggcaagctggccaaggagtacgtggatgctggcaagtatgtaccggatgacgtgaccaacgccatggtcagggaccggcttgcacagcccgactgcaagaaggggttcgtcctggacggatacccgcggacgccggagcaggcccgggcgctggacgagatgctggctgagctgggcctcgcgttggacgccgtcatcaacatcgacgtgccggacgaactgctggtcgagcgtgcggtgggccgccgggtgtgccgctcctgtggggccacctatcacgtccggttcaacccgccccgcgaggccggccgctgtgaccggtgcggcggcgagctgtaccagcgcagcgacgaccaggaagagaaggttgcggtgcgcctcaacctgtaccattcccagacggcgccgcttctccagttctataaggaacgcgggctggttcgcaccgtccgcggagaccagcccatggaccaggtcacggccgacatcaaggaggccgtgcgggcttcccgctga

SEQ ID NO: 2495 - protein, 216 aa, Symbiobacterium thermophilum
MHIILMGPPGAGKGTQAVLLAGQEGIPHISTGDIFRAHMSQGTPLGKLAKEYVDAGKYVPDDVTNAMVRDRLAQPDCKKGFVLDGYPRTPEQARALDEMLAELGLALDAVINIDVPDELLVERAVGRRVCRSCGATYHVRFNPPREAGRCDRCGGELYQRSDDQEEKVAVRLNLYHSQTAPLLQFYKERGLVRTVRGDQPMDQVTADIKEAVRASR

SEQ ID NO: 2496 - DNA, 552 bp, Synechococcus sp
  CDS (1)..(552): transl_table=11
atgaaacaacgtctgctcttcatcggccccccaggagccggcaaaggaacccaggcatcacgcctctgcgagacccacggcctgcgccatctctccaccggcgacctgctgcgctcagaggtctcagcgggcagcgcccttggccaggaggccgaagcggtcatgaatcgcggtgaactcgtcagcgacgacctggtcctcgccatcgtccgctctcagctcaccgctctcaacggtcaaggctggctgctcgacggctttccccgcaacgtggcgcaggcggaggcactggagcccctgctcggggaattgcaacaaagcatcgaaacagtggtcctcctggaactggacgacgaggtcctcgtcgaacgactgctggctcggggacgggccgacgacaacgagtcggtgatccgcaatcgcctcgaggtgtatcgccagcagaccgcacctctgatcgactattaccaggccaggggactattgatctcagtggatgcccagggcagcgtggaagccatcacgacaagacttgaagcaagtctggcttga

SEQ ID NO: 2497 - protein, 183 aa, Synechococcus sp
MKQRLLFIGPPGAGKGTQASRLCETHGLRHLSTGDLLRSEVSAGSALGQEAEAVMNRGELVSDDLVLAIVRSQLTALNGQGWLLDGFPRNVAQAEALEPLLGELQQSIETVVLLELDDEVLVERLLARGRADDNESVIRNRLEVYRQQTAPLIDYYQARGLLISVDAQGSVEAITTRLEASLA

SEQ ID NO: 2498 - DNA, 663 bp, Thermotoga maritima
  CDS (1)..(663): transl_table=11
atgatggcgtaccttgtctttctaggacctccaggtgcaggaaaaggaacctacgcaaagagattgcaggaaataacggggattcctcatatatccaccggtgacattttcagggacattgtaaaaaaagagaacgacgagcttgggaaaaagataaaagagatcatggaaaggggagaactcgttccggacgaactcgtgaacgaggttgtgaaaagaagactctcagaaaaagattgtgaaagaggattcatactggacggctatccaagaaccgttgctcaggcggaattcctcgacggctttttgaaaactcaaaacaaagagctcacggctgctgtactctttgaagttcctgaggaagtggtcgttcagaggctcacggccagaaggatctgcccgaaatgtggaagaatttacaatttgatttcgctccctccaaaagaagacgaactgtgcgatgattgtaaagtgaagctcgttcagagagaagacgacaaagaagaaacagtgagacacagatacaaggtttatctcgaaaagacacagccagtgattgattactacgataaaaagggcattctcaaacgagtggatggtaccataggaatagacaacgtgatcgctgaagtgttaaagataatagggtggagtgataaatga

SEQ ID NO: 2499 - protein, 220 aa, Thermotoga maritima
MMAYLVFLGPPGAGKGTYAKRLQEITGIPHISTGDIFRDIVKKENDELGKKIKEIMERGELVPDELVNEVVKRRLSEKDCERGFILDGYPRTVAQAEFLDGFLKTQNKELTAAVLFEVPEEVVVQRLTARRICPKCGRIYNLISLPPKEDELCDDCKVKLVQREDDKEETVRHRYKVYLEKTQPVIDYYDKKGILKRVDGTIGIDNVIAEVLKIIGWSDK

SEQ ID NO: 2500 - DNA, 663 bp, Thermotoga neapolitana
  CDS (1)..(663): transl_table=11
atgatggcttatctggtgtttctcggacctccaggggccggaaaaggtacgtacgcaaagcgaatccaagaaaagacgggtattccccatatatccaccggcgacatcttcagagatattgtgaagaaagaaaacgatgaacttggaaagaaaataaaggagataatggaaaagggagaactggttcctgatgaactggtgaacgaggttgtgaaaagaagactttcagagaaagattgtgaaaaggggttcattctggatgggtatccaaggaccgtagcccaggcggagtttctcgactctttcctggaatcccaaaacaagcaactcacagctgccgtgctttttgatgttccagaggacgtggttgtccagaggctcacctcgagaagaatctgcccaaagtgcggtagaatctacaacatgatttcacttccaccaaaagaagacgaactgtgcgatgactgtaaagtaaaactcgttcagcgagacgacgacaaagaggaaacggtcagacacagatacaaggtttacctcgaaaaaactcaacccgtgatagactattacgggaaaaagggtatcctcaaaagagtggacggcacgatagggatcgacaacgtggttgccgaggtactcaaaataatagggtggagtgataaatga

SEQ ID NO: 2501 - protein, 220 aa, Thermotoga neapolitana
MMAYLVFLGPPGAGKGTYAKRIQEKTGIPHISTGDIFRDIVKKENDELGKKIKEIMEKGELVPDELVNEVVKRRLSEKDCEKGFILDGYPRTVAQAEFLDSFLESQNKQLTAAVLFDVPEDVVVQRLTSRRICPKCGRIYNMISLPPKEDELCDDCKVKLVQRDDDKEETVRHRYKVYLEKTQPVIDYYGKKGILKRVDGTIGIDNVVAEVLKIIGWSDK

SEQ ID NO: 2502 - DNA, 561 bp, Thermus thermophilus
  CDS (1)..(561): transl_table=11
gtggacgtgggacaggcggtgatcttcctgggacctccgggggcgggcaagggcacccaggcctcgaggctcgcccaggagctcggcttcaagaagctctccacgggggacatcctccgggaccacgtggcccgggggacccctttgggcgagcgggtgaggcccatcatggagcggggggacctggtccccgacgacctcatcctggagcttatccgggaggagctggccgagcgggtgatctttgacggcttcccccgcaccctggcccaggccgaggccttggaccgcctcctttcggagaccggcacccggctcctcggggtggtgctggtggaggtccccgaggaggagctcgtccggcgcatcctcaggcgggccgagctcgagggccgctccgacgacaacgaggagaccgtgaggcgccgcctcgaggtctaccgggagaaaaccgagcccctggtgggctactatgaggccaggggggtgctgaagcgggtggacgggctcggcaccccggacgaggtttacgcccggatccgggcggcgttagggatctga

SEQ ID NO: 2503 - protein, 186 aa, Thermus thermophilus
MDVGQAVIFLGPPGAGKGTQASRLAQELGFKKLSTGDILRDHVARGTPLGERVRPIMERGDLVPDDLILELIREELAERVIFDGFPRTLAQAEALDRLLSETGTRLLGVVLVEVPEEELVRRILRRAELEGRSDDNEETVRRRLEVYREKTEPLVGYYEARGVLKRVDGLGTPDEVYARIRAALGI

SEQ ID NO: 2504 - DNA, 666 bp, Thermoanaerobacter tengcongensis
  CDS (1)..(666): transl_table=11
atgcgggtggtgcttctgggcccccctggtgccggaaaagggacccaagcgcttaaaattgctaaggagtttgacattcctcacatatctacaggcgatatttttaggcaaaatctgagagacaatacagagttaggtaaactggcaaaggagtatatggacaaaggacttttggtccccgatgaagtgactaacaggatagtagaagacaggctggaaaaagaggactgcaaaaaggggtttttgctggacggatatccgcggaatatacctcaggcggaggaactggataaatttttggaggagagagggcattctcttactgctgttataaatattcaggttgagagagaggctttgatagacaggataacaggcagaagggtatgtcctgtgtgcggtgctacttatcacataaaaacttctcctccgaaagtagataatgtgtgcgataagtgtggcagtgagcttatacaaaggtcagatgataaattggagtctgtggtaaaaaggttggaagtgtacgagaaagagacaaagccattaattgattattatacaaaaaaaggtattttggtaaacatcgatggaaataaatcaattgatgaggtatttgaagacataaaaaaggctttgttaggagataggagagatgatatacattaa

SEQ ID NO: 2505 - protein, 221 aa, Thermoanaerobacter tengcongensis
MRVVLLGPPGAGKGTQALKIAKEFDIPHISTGDIFRQNLRDNTELGKLAKEYMDKGLLVPDEVTNRIVEDRLEKEDCKKGFLLDGYPRNIPQAEELDKFLEERGHSLTAVINIQVEREALIDRITGRRVCPVCGATYHIKTSPPKVDNVCDKCGSELIQRSDDKLESVVKRLEVYEKETKPLIDYYTKKGILVNIDGNKSIDEVFEDIKKALLGDRRDDIH

SEQ ID NO: 2506 - DNA, 654 bp, Thiobacillus denitrificans
  CDS (1)..(654): transl_table=11
atgcgtctgattctgttgggcggccctggcgccggcaaaggcacccaggccaattacatcaaggaaaaatacggcattccgcaaatctccaccggcgacatgctgcgtgcgcagatcaaggcgggcaccgaactcggcatgaaggccaaggcgatcatggacgccggcggcctcgtctccgacgacatcatcatcggcatggtcaaggcgcgcctgcaggaggccgactgcaagaacggttacctgttcgacggcttcccgcgcacgatcccgcaagccgaggcgatgaaggctgccggcgtgccgatcgactacgtcgtcgagatcgacgtcgccgacgaggaaatcatcaagcgcatgtcgggccgccgcgtccacgtcgcgtccggccgcacctaccacgtcgtgttcaacccgcccaaggtcgccggcaaggacgacgtgaccggcgaggacctgatccagcgcgacgacgaccaggaagagaccgtcaagaaacgcctcgacgtctaccacgcacagaccgagccgctcgtgaagtactacggcgactgggcagcacgcggcgaagccggcgcgcccaagtacgtcaagatttcgggcgtcggcaaggtcgagcagatccgcgattcgatcttcgccgccctcggctga

SEQ ID NO: 2507 - protein, 217 aa, Thiobacillus denitrificans
MRLILLGGPGAGKGTQANYIKEKYGIPQISTGDMLRAQIKAGTELGMKAKAIMDAGGLVSDDIIIGMVKARLQEADCKNGYLFDGFPRTIPQAEAMKAAGVPIDYVVEIDVADEEIIKRMSGRRVHVASGRTYHVVFNPPKVAGKDDVTGEDLIQRDDDQEETVKKRLDVYHAQTEPLVKYYGDWAARGEAGAPKYVKISGVGKVEQIRDSIFAALG

SEQ ID NO: 2508 - DNA, 645 bp, Vibrio parahaemolyticus
  CDS (1)..(645): transl_table=11
atgcgcatcattcttctaggtgctccaggtgcaggtaaaggcacacaagcaaacttcatcatggataaatacggtattccacaaatctctactggtgatatgcttcgtgctgctatcaaagcaggtacagaacttggcaaacaagctaaagctgttatcgacgctggtcagctagtttctgatgaaatcatccttggtcttatcaaagagcgtatcgctcaagacgattgtgagaaaggtttcctactagatggtttcccacgcactattcctcaggctgatggcctaaaagaaatgggcgttgaagtagattacgttatcgaattcgacgtagctgacgatgtgatcgttgagcgtatggctggtcgtcgtgctcaccttccttcaggtcgtacttaccacgttgtttacaacccacctaaagtggaaggtaaagacgacgtaacgggtgaagatcttgttgttcgcgatgacgacaaagaagaaacagtacgtgcacgtctaggtgtttaccacgagcaaactgcaccacttatcgattactacggtaaagaagctgcagcaggcaaaactaagtacctaaaatttgacggtactaagcaagttgctgaagtaagtgctgatatcgagaaggcattagcataa

SEQ ID NO: 2509 - protein, 214 aa, Vibrio parahaemolyticus
MRIILLGAPGAGKGTQANFIMDKYGIPQISTGDMLRAAIKAGTELGKQAKAVIDAGQLVSDEIILGLIKERIAQDDCEKGFLLDGFPRTIPQADGLKEMGVEVDYVIEFDVADDVIVERMAGRRAHLPSGRTYHVVYNPPKVEGKDDVTGEDLVVRDDDKEETVRARLGVYHEQTAPLIDYYGKEAAAGKTKYLKFDGTKQVAEVSADIEKALA

SEQ ID NO: 2510 - DNA, 645 bp, Vibrio vulnificus
  CDS (1)..(645): transl_table=11
atgcgcatcattcttctaggtgctccaggtgcaggtaaaggcacacaggctcaattcatcatggagaagtatggtattccacaaatctctactggtgacatgctacgtgctgctatcaaagcaggtactgagcttggtaaacaagcaaaagctgttatcgacgctggtcagctagtttctgatgaaatcattcttggtctaatcaaagagcgtattgctcaagaagattgtgcgaaaggtttcctattggatggtttcccacgtacgatcccacaagctgacggtcttaaagagatgggtgtggcagttgattacgttatcgagtttgacgttgctgacgatgtgatcgttgagcgtatggctggccgtcgtgcgcacctgccttcaggtcgtacttaccacgttgtttacaacccacctaaagtggaaggtaaagacgacgtaacaggtgaagatcttgttgttcgtgacgacgacaaagaagaaaccgtacgcgctcgtttaggtgtttaccactcacaaactgcaccacttatcgagtactacggtaaagaagccgcagaaggcaacacgaagtacctaaaatttgatggtactaagcaagttgctcaagtgagtgctgatatcgagaaggcattagcataa

SEQ ID NO: 2511 - protein, 214 aa, Vibrio vulnificus
MRIILLGAPGAGKGTQAQFIMEKYGIPQISTGDMLRAAIKAGTELGKQAKAVIDAGQLVSDEIILGLIKERIAQEDCAKGFLLDGFPRTIPQADGLKEMGVAVDYVIEFDVADDVIVERMAGRRAHLPSGRTYHVVYNPPKVEGKDDVTGEDLVVRDDDKEETVRARLGVYHSQTAPLIEYYGKEAAEGNTKYLKFDGTKQVAQVSADIEKALA

SEQ ID NO: 2512 - DNA, 645 bp, Vibrio vulnificus
  CDS (1)..(645): transl_table=11
atgcgcatcattcttctaggtgctccaggtgcaggtaaaggcacacaggctcaattcatcatggagaagtatggtattccacaaatctctactggtgacatgctacgtgctgctatcaaagcaggtactgagcttggtaaacaagcaaaagctgttatcgacgctggtcagctagtttctgatgaaatcattcttggtctaatcaaagagcgtattgctcaagaagattgtgcgaaaggtttcctattggatggtttcccacgtacgattccacaagctgacggtcttaaagagatgggtgtggcagttgattacgttatcgagtttgacgttgctgacgatgtgatcgttgagcgtatggctggccgtcgtgcgcacctgccttcaggtcgtacttaccacgttgtttacaacccacctaaagtggaaggtaaagacgacgtaacaggtgaagatcttgttgttcgtgacgacgacaaagaagaaaccgtacgcgctcgtttaggtgtttaccactcacaaacggcaccacttatcgagtactacggtaaagaagcggcagaaagcaacacgaagtacctaaaatttgatggtactaagcaagttgctcaagtgagtgctgatatcgagaaggcattagcataa

SEQ ID NO: 2513 - protein, 214 aa, Vibrio vulnificus
MRIILLGAPGAGKGTQAQFIMEKYGIPQISTGDMLRAAIKAGTELGKQAKAVIDAGQLVSDEIILGLIKERIAQEDCAKGFLLDGFPRTIPQADGLKEMGVAVDYVIEFDVADDVIVERMAGRRAHLPSGRTYHVVYNPPKVEGKDDVTGEDLVVRDDDKEETVRARLGVYHSQTAPLIEYYGKEAAESNTKYLKFDGTKQVAQVSADIEKALA

SEQ ID NO: 2514 - DNA, 564 bp, Xanthomonas axonopodis pv
  CDS (1)..(564): transl_table=11
atgcgattggttctgttgggaccgcccggttcgggcaagggcacccaggcgacacgtctcaaagacacgtttgatattccgcatatttccaccggcgacctgttgcgcgccgaagtggccgctggctcgccgctgggattgaaggccaaggaagtgatggcacgcggcgacctggtgtccgacgacatcctgctcggcatgctcgaggcgcgccttggccaggccgatgtggccaagggtttcatcctggatggctacccgcgcaacgtggcccaggccaatgcgctggacgaactgctcggcaagatcggtcagccgctggatgccgtggtgcagctggatgtggccagcgagttgctggtcgagcgcatcgccggtcgtgccaaggccgaaggccgcgaagacgacaacccggaatcggtccgcaagcgtctgcaggtctacaccgattcaactgcaccggtgatcggcttctacgagcagcgcggcaagttggcgcgcgtggatggcgtgggttcgctggacgaagtgctggagcgcatcagcaaggcgctcgggcgctga

SEQ ID NO: 2515 - protein, 187 aa, Xanthomonas axonopodis pv [sequence omitted]

SEQ ID NO: 2516 - DNA, 597 bp, Xylella fastidiosa
  CDS (34)..(597): transl_table=11
ttgccgttgtttttttctatatggagtgaattaatgcgattggttctattgggaccacctggttcaggtaaaggcactcaggcggcgcaaatgaaggaaacattacagattccgcatatttccactggtgacctgttgcgcagtgaagtggttgctgggactcctcttggcctacaggccaagcaagtcatggcacaaggtgatttggtttccgatgcgattctgatcggcatgcttgagtcacgtttgagccatacggatgtagtaaaaggcttcatccttgatggctatccgcgcaatctgtctcaggccgctgcgctggatgggttgttagccaagctcgggcatcctttaaatgctgtggtgcagcttgaggtacccaccgatgtgttggtggaacgtattgctggccgtgctcaggctgaaggccgtgaggatgacactcctgatgcggtgcgtaagcgtttgcaggtctataacgattcaaccgcgccggtcatcggtttctatcagcagcgcggcatcttgttgcgcgtggatggtgtggggcgtttggatgaggtttcccagcgtattgtggttgcactgggttgctga

SEQ ID NO: 2517 - protein, 187 aa, Xylella fastidiosa [sequence omitted]

SEQ ID NO: 2518 - DNA, 564 bp, Xylella fastidiosa
  CDS (1)..(564): transl_table=11
atgcgattggttctattgggaccacctggttcaggtaaaggcactcaggcggcgcaaatgcaggaaacattacagattccgcatatttccactggtgacctgttgcgcagtgaagtggttgctgggactcctcttggcctacaggccaagcaagtcatggcacaaggtgatttggtttccgatgcgattttgcttggcatgcttgagtcacgtttgagccatacggatgtagtaaaaggcttcatccttgatggctatccgcgcaatctgtctcaggccgctgcgctggatgggttgttagccaagttcgggcatcctttaaatgctgtggtgcagcttgaggtacccaccgatgtgttggtggaacgtattgctggccgtgctcaggcggaaggccgtgaggatgacactcctgatgcggtgcgtaagcgtttgcaggtctataacgattcaaccgcgccggtcatcggtttctatcagcagcgcggcatcttgttgcgcgtggatggtgtgggacgtttggatgaggtttcccagcgtattgcggttgcgctgggttgctga

SEQ ID NO: 2519 - protein, 187 aa, Xylella fastidiosa
MRLVLLGPPGSGKGTQAAQMQETLQIPHISTGDLLRSEVVAGTPLGLQAKQVMAQGDLVSDAILLGMLESRLSHTDVVKGFILDGYPRNLSQAAALDGLLAKFGHPLNAVVQLEVPTDVLVERIAGRAQAEGREDDTPDAVRKRLQVYNDSTAPVIGFYQQRGILLRVDGVGRLDEVSQRIAVALGC

SEQ ID NO: 2520 - DNA, 645 bp, Yersinia enterocolitica
  CDS (1)..(645): transl_table=11
atgcgtatcattctgctgggcgctccgggcgctggtaagggtactcaggctcaattcatcatggagaaatacggtattccgcaaatgtgtactggtgatatgttgcgcgccgctgtaaaagcaggttctgagttaggtctgaaagcgaaagaaattatggatgccggcaagctggtcacgcatgaactggttatcgcattggttaaagagcgcattacacaggacgattgccgtgacggtttcctgctacatgggttcccgcgtaccattcctcaagctgatgccatgaaagaagccggtatcaaggttgattatgtattggagtttgatgttccagacgaactgattgttgatcgcatcgttgggcgtcgggtacatgctgcttcaggtcgggtttatcacattaaattcaacccacctaaagtggaagataaagatgatgtgaccggtgaagaactgacaattcgtaaagatgatcaggaagcaacagttcgcaaacgtctggttgaatatcatcagcaaactgcaccattggtttcttactatcgtaaagaagctgatgcaggtaacacacaatattttaaactggacggaacccgtaaagtagcagaagtcagtgcggaactggcgactattctcggttaa

SEQ ID NO: 2521 - protein, 214 aa, Yersinia enterocolitica
MRIILLGAPGAGKGTQAQFIMEKYGIPQMCTGDMLRAAVKAGSELGLKAKEIMDAGKLVTHELVIALVKERITQDDCRDGFLLHGFPRTIPQADAMKEAGIKVDYVLEFDVPDELIVDRIVGRRVHAASGRVYHIKFNPPKVEDKDDVTGEELTIRKDDQEATVRKRLVEYHQQTAPLVSYYRKEADAGNTQYFKLDGTRKVAEVSAELATILG

SEQ ID NO: 2522 - DNA, 672 bp, Zymomonas mobilis
  CDS (1)..(672): transl_table=11
atgaatattattctttttggcccgccgggggctggcaaaggaacacaagcccatcgattggttcatgactttgggatggttcagctctctacaggtgatattttgcgtcaggccgttaaagaaggcactgaagtgggcaaaatcgctggcgaattgatgaaggccggtaagctgattcctgatgacctgatgatcagaattttgggcgagcgtctcgataaacccgataccaaaaatggcgtcatttttgatggttttcctcggacaaaacctcaggttgaagcgctcgataagttattggcagaacgccacagcaaacttgattgcgtcattgagatcaaagtcgatgaaaacgccttagtaaagcggattgtcggacgctatgtttgtgctcaatgtggcgctggatatcacgatgaattcaaacgcccccacaaagaaggggtttgtgacatctgtggttctactgaattcaaacgtcgccctgatgataatgaagaagccgttcgggcaagattagtagaatatcacgaaaagactgccccaattttgccggtttatgaagcaagaggcattgtcgcttacgtagacgggatgctccccatgggagacgtcgcgactaaaatcgcagaaattctgaaagagaagggtgctaaacctatctctgcataa

SEQ ID NO: 2523 - protein, 223 aa, Zymomonas mobilis
MNIILFGPPGAGKGTQAHRLVHDFGMVQLSTGDILRQAVKEGTEVGKIAGELMKAGKLIPDDLMIRILGERLDKPDTKNGVIFDGFPRTKPQVEALDKLLAERHSKLDCVIEIKVDENALVKRIVGRYVCAQCGAGYHDEFKRPHKEGVCDICGSTEFKRRPDDNEEAVRARLVEYHEKTAPILPVYEARGIVAYVDGMLPMGDVATKIAEILKEKGAKPISA

SEQ ID NO: 2524 - DNA, 732 bp, Oryza sativa
  CDS (1)..(732)
atggcggcggcggcgaacctggaggacgtcccgtccatggatctgatgaacgagctgctacgccgcatgaagtgcagctccaagcccgacaagcgcctcatcctcgtaggtccacctggctctggaaagggaacacaatcgcccattattaaggatgagtactgcttatgccatttagctacaggtgatatgttgagagctgctgttgctgctaagactcctttaggagtcaaggcgaaagaagcaatggacaagggagagcttgtttctgatgacttggttgttggaattattgatgaagccatgaagaaaccttcatgtcaaaagggtttcattcttgatgggttcccacggacagttgttcaggcacagaagcttgatgaaatgctggaaaagaaaggtacaaaggtcgataaggttcttaactttgccattgatgattcaattttggaagaaagaattactggccggtggatccatccctccagtggcaggagttatcacactaagtttgcacctccaaaggttcctggagttgatgatgtcactggagaaccactaattcaaaggaaagacgacacagctgaggttttgaagtctagacttgaagccttccacaaacaaactgaaccagtgattgactactactccaagaaggccttggtggccaatcttcatgccgagaagccaccgaaagaagtaactgctgaagtccagaaagttctttcgtaa

SEQ ID NO: 2525 - protein, 243 aa, Oryza sativa
MAAAANLEDVPSMDLMNELLRRMKCSSKPDKRLILVGPPGSGKGTQSPIIKDEYCLCHLATGDMLRAAVAAKTPLGVKAKEAMDKGELVSDDLVVGIIDEAMKKPSCQKGFILDGFPRTVVQAQKLDEMLEKKGTKVDKVLNFAIDDSILEERITGRWIHPSSGRSYHTKFAPPKVPGVDDVTGEPLIQRKDDTAEVLKSRLEAFHKQTEPVIDYYSKKALVANLHAEKPPKEVTAEVQKVLS

SEQ ID NO: 2526 - DNA, 726 bp, Oryza sativa
  CDS (1)..(726)
atggcggcgaacctggaggacgtgccgtcgatggagctgatgacggagctgctccgccgcatgaagtgcagctccaagcccgacaagcgcgtcatcctcgtcggtccacctggctgcggaaagggaacacagtcaccgctgattaaggatgaattttgcttgtgccatttagccactggtgatatgttgagggctgcagtggctgctaaaactccacttgggattaaggctaaagaagctatggacaagggagagcttgtttctgatgacttggttgttgggattattgatgaagccatgaagaaaacttcatgccagaaaggttttatccttgatggtttccctagaactgttgttcaagcacagaagcttgatgaaatgttggccaaacaaggtactaagattgacaaggttctaaattttgcaattgatgatgcaatactggaagaacgaattaccggtcgttggatccacccatcaagtggtagatcttatcatacaaaatttgctcctcctaagactcctggacttgatgatgttactggagaacccttaattcaaaggaaagatgacacagctgcagtattgaagtcaaggcttgaagccttccacgtacaaactaagcctgtgattgactactacaccaagaagggcatagtcgcaaatctgcatgccgaaaaaccaccaaaggaagtgactgttgaggtccagaaagccctatcataa

SEQ ID NO: 2527 - protein, 241 aa, Oryza sativa
MAANLEDVPSMELMTELLRRMKCSSKPDKRVILVGPPGCGKGTQSPLIKDEFCLCHLATGDMLRAAVAAKTPLGIKAKEAMDKGELVSDDLVVGIIDEAMKKTSCQKGFILDGFPRTVVQAQKLDEMLAKQGTKIDKVLNFAIDDAILEERITGRWIHPSSGRSYHTKFAPPKTPGLDDVTGEPLIQRKDDTAAVLKSRLEAFHVQTKPVIDYYTKKGIVANLHAEKPPKEVTVEVQKALS

SEQ ID NO: 2528 - DNA, 723 bp, Brassica napus
  CDS (1)..(723)
atggcggatttggaagatgttcagaccgtggatctcatgtccgagctcctccgccgtctcaaatgttcacaaaagcccgacaaacgcctcatcttcataggacctccagggtcagggaaaggtacacagtctccaatagtgaaggatgagttttgcttgtgtcatttatccactggggacatgttaagagctgctgttgcttccaagacccctcttggtctcaaggccaaagaagctatggacaagggagcgcttgttactgatgaactggttgttggtataattgatgaagccatgaacaagccaaaatgtcagaaaggttttatccttgatgggtttcccaggactgttgctcaggcagagaagctagacgagatgcttaagaagcgaggaactggaatcgacaaagttctcaactttgctattgatgactcagtcctggaggaaagaataaccggtagatggatccacccgtcgagtggcaggagttaccacaccaaattcgcgcctcccaaaactcctggcgttgatgatattaccggagagcctctgatccaacgcaaagatgataacgctgaggttctaaggtcaagacttgctgctttccacactcaaactgaaccggtgattgactactacgcgaagaaggctgttcttacaaacatccatgctgagaaggctccacaagaagttacgtcagaggttcagaaagcattgtcctga

SEQ ID NO: 2529 - protein, 240 aa, Brassica napus
MADLEDVQTVDLMSELLRRLKCSQKPDKRLIFIGPPGSGKGTQSPIVKDEFCLCHLSTGDMLRAAVASKTPLGLKAKEAMDKGALVTDELVVGIIDEAMNKPKCQKGFILDGFPRTVAQAEKLDEMLKKRGTGIDKVLNFAIDDSVLEERITGRWIHPSSGRSYHTKFAPPKTPGVDDITGEPLIQRKDDNAEVLRSRLAAFHTQTEPVIDYYAKKAVLTNIHAEKAPQEVTSEVQKALS

SEQ ID NO: 2530 - DNA, 726 bp, Triticum aestivum
  CDS (1)..(726)
atggcggcgaacctagaggacgtgccgtcggtggatctcatcaccgaggtgctccgccgcgccaagtgcagctccaagcccgacaagcgcatcatcctcatcggtccacctggctctggaaagggtacgcagtcgccccttattaaggatgaatattgcttgtgccatttagccactggtgatatgctgagggctgctgttgctgctaagactcctctggggatcaaggctaaagaagctatgaacaagggagagcttgtttcagatgacttggttgttgggattatcgatgaagccatgaagaaaccctcttgccagaaaggttttatccttgatggcttccctagaactgttgttcaagcacaaaagctcgatgacatgctggcaaagcaaggtgctaaagttgacaaggttttaaacttcgcaattgatgatgcaatattggaagaacgaattactggccgctggatacacccatcgagtggcagatcttaccatacaaagtttgctcctccgaagactcctggagttgatgatgttaccggagagcccttgattcaaaggaaagatgacacagctgcggttttaaagtcaaggcttgaggctttccatatgcagaccgaacctgtgattgactactactccaagaatggcttggtggcaaatcttcatgcagagaaaccaccaaaggaagtgaccgttgaggtgcagaaagcccttcaatga

SEQ ID NO: 2531 - protein, 241 aa, Triticum aestivum
MAANLEDVPSVDLITEVLRRAKCSSKPDKRIILIGPPGSGKGTQSPLIKDEYCLCHLATGDMLRAAVAAKTPLGIKAKEAMNKGELVSDDLVVGIIDEAMKKPSCQKGFILDGFPRTVVQAQKLDDMLAKQGAKVDKVLNFAIDDAILEERITGRWIHPSSGRSYHTKFAPPKTPGVDDVTGEPLIQRKDDTAAVLKSRLEAFHMQTEPVIDYYSKNGLVANLHAEKPPKEVTVEVQKALQ

SEQ ID NO: 2532 - DNA, 741 bp, Linum usitatissimum
  CDS (1)..(741)
atggcgagcccttcggcggcgactttggaagatgttcccatcgttgatctcatgaccgagctcctccgccgcatgaagtgtgccaccaaacctgacaagcgcctcattcttatcggtcctcctggatcaggaaaaggtactcaatcaccgatcattaaggatgagttctgcttgtgtcacttggctacaggggatatgttgagagctgctgttgcaggcaaaactcctcttggaatcaaggctaaggaggcaatggaaaagggacaacttgtttctgatgatttggtagttggaattattgatgaagcaatcaagaagccctcttgtcaaaaaggcttcattcttgatgggtttccacggactgtggtccaggcgcagaagcttgatgagatgcttgagaagcaaggagtcaaagttgataaggtgctgaattttgccattgatgattctattttggaagagagaattactggtcgctggatccacccttcaagtggtagaacctatcacaccaaatttggacctcccaagaaccctggtgttgatgatgtaactggagaaccgttgatccagcggaaggatgacacagctgcagtcctaaagattaggctggaggcattccataagcagactgaacccgtgattaactattacaagcaaaagggtgctgttgcggatctccacgcagagaaagctcccaaagaggtcacagctgaggttgagaaagcgctttcctcctga

SEQ ID NO: 2533 - protein, 246 aa, Linum usitatissimum
MASPSAATLEDVPIVDLMTELLRRMKCATKPDKRLILIGPPGSGKGTQSPIIKDEFCLCHLATGDMLRAAVAGKTPLGIKAKEAMEKGQLVSDDLVVGIIDEAIKKPSCQKGFILDGFPRTVVQAQKLDEMLEKQGVKVDKVLNFAIDDSILEERITGRWIHPSSGRTYHTKFGPPKNPGVDDVTGEPLIQRKDDTAAVLKIRLEAFHKQTEPVINYYKQKGAVADLHAEKAPKEVTAEVEKALSS

SEQ ID NO: 2534 - DNA, 726 bp, Zea mays
  CDS (1)..(726)
atggcggcgaatctagaggacgtgccgtctctggatctgatgcacgaactgctccgtcggatgaagtgcagctccaagcccgacaagcacctcatcctcatcggcccacctggctctggaaagggtactcagtctccccttattaaggatgaatattgcctgtgccatttagccactggtgatatgttgagggctgctgtggcagccaagacaactctaggtatcaaagctaaagaagctatggataagggagagcttgtttcagataacttggttgtggggattattgatgaagctatgaagaaaccgtcatgccagaaaggtttcattcttgatggcttccctagaactgtcactcaagcacagaagcttgatgagatgttggtaaagcaaggtgctaatgttgacaaggtcctaaactttgcaattgatgatgctatattggaagaacggattactggccgttggatccacccacccagtggtaggacttaccatacaaaatttgcacctccaaagtctccaggagttgatgatgtaactggagagccattgattcaaaggagggatgacactgccgaggttttgaagtcaaggcttgaagccttccacaaacaaactgagcctgtgattgattattactctaagaagggcttggtggtaaatctgcctgcggagaaaccaccaaaggaagtgactgctgaggtgctgaaagccctctcatga

SEQ ID NO: 2535 - protein, 241 aa, Zea mays
MAANLEDVPSLDLMHELLRRMKCSSKPDKHLILIGPPGSGKGTQSPLIKDEYCLCHLATGDMLRAAVAAKTTLGIKAKEAMDKGELVSDNLVVGIIDEAMKKPSCQKGFILDGFPRTVTQAQKLDEMLVKQGANVDKVLNFAIDDAILEERITGRWIHPPSGRTYHTKFAPPKSPGVDDVTGEPLIQRRDDTAEVLKSRLEAFHKQTEPVIDYYSKKGLVVNLPAEKPPKEVTAEVLKALS

SEQ ID NO: 2536 - DNA, 726 bp, Zea mays
  CDS (1)..(726)
atggcggcgaatctggaggacgtgccgtcactggatctgatgcacgagctgctccgccgcatgaagtgcagctccaagcccgacaagcgcctcatcctcatcggtccacctggctctggaaagggaactcagtctcctattatcaaggatgactattgcttgtgccatttagccactggtgatatgctgagggctgctgtggcggccaagacacctctaggtatcaaagctaaagaagctatgaataagggagagcttgtttcagatgatttggttgtgggcattattgatgaagctatgaagaaaccctcatgccagaaaggtttcattcttgatggctttcctagaactgtcactcaagcacagaagcttgatgagatgttggcaaagcaaggtgccaatgttgacaaagtcctgatctttgcaattgatgatgctgtattggaagaacggattactggtcgttggatccactcagccagtggtaggacttaccactcaaaatttgcacctccaaagtctccaggagttgatgatgtaactggagagccattgattcaaaggagagatgacaccgctgaggtcttgaagtcaaggcttgaagctttccacagacaaaccgaacctgtgattgattattactccaagaagggcttagtggtgaacctgcctgcagagaaaccaccgaaggaagtgactgctgaggtgcagaaagccctctcgtga

SEQ ID NO: 2537 - protein, 241 aa, Zea mays
MAANLEDVPSLDLMHELLRRMKCSSKPDKRLILIGPPGSGKGTQSPIIKDDYCLCHLATGDMLRAAVAAKTPLGIKAKEAMNKGELVSDDLVVGIIDEAMKKPSCQKGFILDGFPRTVTQAQKLDEMLAKQGANVDKVLIFAIDDAVLEERITGRWIHSASGRTYHSKFAPPKSPGVDDVTGEPLIQRRDDTAEVLKSRLEAFHRQTEPVIDYYSKKGLVVNLPAEKPPKEVTAEVQKALS

SEQ ID NO: 2538 - DNA, 726 bp, Hordeum vulgare
  CDS (1)..(726)
atggcggcgaacctcgaggacgtgccgtcggtggatctcatcaccgaggtgctccgccgcgccaagtgcagctccaagcccgacaagcgcatcatcctcgtcggtccacctggctctggaaagggtacacagtcaccccttattaaagatgaatattgcttgtgccatttagccactggtgatatgctgagggctgctgtcgctgctaagactcctctggggatcaaggctaaagaagcaatgaacaagggagagcttgtttcagatgacttggttgttgggattattgatgaagccatgaagaaaccttcatgccagaaaggttttatccttgatggcttccctagaactgttgttcaagcacaaaagctcgatgacatgctggcaaggcaaggcgctaaagttgacaaggttttgaactttgcaattgatgatgcaattttggaagaacgaattactggccgttggatacacccatcgagtggtagatcttaccatacgaagtttgctcctccgaagactcctggagttgatgatgttaccggagagcccttgattcaaaggaaagatgacacagctgcggtcttaaagtcaaggcttgaggctttccatatgcaaactgaacctgtgattgactactactccaagaatgggttggtggtaaatcttcatgcggagaaaccaccaaaggaagtgaccgttgaggtgcagaaagccctttcatga

SEQ ID NO: 2539 - protein, 241 aa, Hordeum vulgare
MAANLEDVPSVDLITEVLRRAKCSSKPDKRIILVGPPGSGKGTQSPLIKDEYCLCHLATGDMLRAAVAAKTPLGIKAKEAMNKGELVSDDLVVGIIDEAMKKPSCQKGFILDGFPRTVVQAQKLDDMLARQGAKVDKVLNFAIDDAILEERITGRWIHPSSGRSYHTKFAPPKTPGVDDVTGEPLIQRKDDTAAVLKSRLEAFHMQTEPVIDYYSKNGLVVNLHAEKPPKEVTVEVQKALS

SEQ ID NO: 2540 - DNA, 738 bp, Brassica napus
  CDS (1)..(738)
atggcgaaaagcagtgtagacatggaagacattcagacagtcgatctcatgtctgagctcctccgtcgcatgaagtgtgcctctaaacctgacaaacgtctcgttttcatcggcccacctggttcaggaaaaggtacgcagtctccggtcataaaggatgagttctgcttgtgccatttgtctaccggtgacatgcttagagctgctgttgctgctaagtcccctcttggtgtcaaggcgaaggaagctatggacaagggagagcttgtttctgatgacttggttgttggaatcatggatgaagcaatgaacagacccaaatgtcagaaaggtttcattcttgatgggtttcctaggaccgtcacacaagctgagaagcttgatgagatgcttaatagaagaggagctcagattgacaaagtgcttaattttgcaatcgacgattcggttcttgaagaaagaattactggaaggtggattcacccttcaagtggaaggagctatcataccaaattcgcacctcctaaagttcctggagtcgatgatgtgactggagagccattgattcaacgtaaagatgacaatgcggatgttcttaggtcaaggctggatgcattccacaagcagacgcaaccggttattgactactacgcgaagaaggggaatctggtgaacataccagcagagaaggctccggaagaggttaccaaagtggtgaagaaggttgtgtctgcatga

SEQ ID NO: 2541 - protein, 245 aa, Brassica napus
MAKSSVDMEDIQTVDLMSELLRRMKCASKPDKRLVFIGPPGSGKGTQSPVIKDEFCLCHLSTGDMLRAAVAAKSPLGVKAKEAMDKGELVSDDLVVGIMDEAMNRPKCQKGFILDGFPRTVTQAEKLDEMLNRRGAQIDKVLNFAIDDSVLEERITGRWIHPSSGRSYHTKFAPPKVPGVDDVTGEPLIQRKDDNADVLRSRLDAFHKQTQPVIDYYAKKGNLVNIPAEKAPEEVTKVVKKVVSA

SEQ ID NO: 2542 - DNA, 726 bp, Hordeum vulgare
  CDS (1)..(726)
atggcggcgaacctcgaggacgtgccgtcggtggatctcatcaccgaggtgctccgccgcgccaagtgcagctccaagcccgacaagcgcatcatcctcgtcggtccacctggctctggaaagggaacacaatcaccccttattaaagatgaatattgcttgtgccatttagccactggcgatatgctgagggctgctgtcgccgctaagactcctctggggatcaaggctaaagaagcaatgaacaagggagagcttgtttcagatgacttggttgttgggattattgatgaagccatgaaaaaaccttcatgtcaaaaaggttttatccttgatggcttccctagaactgttgttcaagcacaaaagctcgatgaaatgctggcaaagcaaggcgctaaagttgacaaggttctgaactttgcaattgatgatgcaattttggaagaacgaattactggccgttggatacacccatcgagtggtagatcttaccatacgaagtttgctcctccgaagactcctggagttgatgatgttaccggagagcccttgattcaaaggaaagatgacacagctgcggtcttaaagtcaaggcttgaggctttccatatgcaaactgaacctgtgattgactactactccaagaatgggttggtggtaaatcttcatgcggagaaaccaccaaaggaagtgaccgttgaggtgcagaaagccctttcatga

SEQ ID NO: 2543 - protein, 241 aa, Hordeum vulgare
MAANLEDVPSVDLITEVLRRAKCSSKPDKRIILVGPPGSGKGTQSPLIKDEYCLCHLATGDMLRAAVAAKTPLGIKAKEAMNKGELVSDDLVVGIIDEAMKKPSCQKGFILDGFPRTVVQAQKLDEMLAKQGAKVDKVLNFAIDDAILEERITGRWIHPSSGRSYHTKFAPPKTPGVDDVTGEPLIQRKDDTAAVLKSRLEAFHMQTEPVIDYYSKNGLVVNLHAEKPPKEVTVEVQKALS

SEQ ID NO: 2544 - DNA, 726 bp, Triticum aestivum
  CDS (1)..(726)
atggcggcgaacatcgaggacgtgccttcggtggatctcatcaccgaggtgctccgccgcgccaagtgcagctccaagcccgacaagcgcatcatcctcgtcggtccacctggctctggaaagggtacacagtctccccttattaaggatgaatattgtttgtgccatttagccactggtgatatgctgagggctgctgttgctgctaagactcctctggggatcaaggctaaagaagctatggacaagggagagcttgtttcagatgacttggttgttgggattatcgatgaagccatgaagaaaccctcttgccagaaaggttttatccttgatggcttccctagaactgttgttcaagcacaaaagctcgatgaaatgctggcaaagcaaggtgctaaagttgacaaggttctaaatttcgcaattgatgatgcaatattggaagaacgaattactggccgctggatacacccatcgagtggcagatcttaccatacaaagtttgctcctccgaagactcctggagttgatgatgttaccggagagcccttgattcaaaggaaagatgacacagctgtggttttaaagtcaaggcttgaggctttccatatgcaaaccgaacctgtgattgactactactccaagaatggcttagtggcaaatcttcatgcggagaaaccaccaaaggaagtgaccgccgaggtgcagaaagctctttcgtga

SEQ ID NO: 2545 - protein, 241 aa, Triticum aestivum
MAANIEDVPSVDLITEVLRRAKCSSKPDKRIILVGPPGSGKGTQSPLIKDEYCLCHLATGDMLRAAVAAKTPLGIKAKEAMDKGELVSDDLVVGIIDEAMKKPSCQKGFILDGFPRTVVQAQKLDEMLAKQGAKVDKVLNFAIDDAILEERITGRWIHPSSGRSYHTKFAPPKTPGVDDVTGEPLIQRKDDTAVVLKSRLEAFHMQTEPVIDYYSKNGLVANLHAEKPPKEVTAEVQKALS

SEQ ID NO: 2546 - DNA, 726 bp, Zea mays
  CDS (1)..(726)
atggcggcgaatctagaggacgtgccgtctctggatctgatgcacgaactgctccgtcggatgaagtgcagctccaagcccgacaagcacctcatcctcatcggcccacctggctctggaaagggtactcagtctccccttattaaggatgaatattgcctgtgccatttagccactggtgatatgttgagggctgctgtggcagccaagacaactctaggtatcaaagctaaagaagctatggataagggagagcttgtttcagataacttggttgtggggattattgatgaagctatgaagaaaccgtcatgccagaaaggtttcattcttgatggcttccctagaactgtcactcaagcacagaagcttgatgagatgttggcaaagcaaggtgctaatgttgacaaggtcctaaactttgcaattgatgatgctatattggaagaacggattactggccgttggatccacccacccagtggtaggacttaccatacaaaatttgcacctccaaagtctccaggagttgatgatgtaactggagagccattgattcaaaggagggatgacactgccgaggttttgaagtcaaggcttgaagccttccacaaacaaactgagcctgtgattgattattactctaagaagggcttggtggtaaatctgcctgcggagaaaccaccaaaggaagtgactgctgaggtgctgaaagccctctcatga

SEQ ID NO: 2547 - protein, 241 aa, Zea mays
MAANLEDVPSLDLMHELLRRMKCSSKPDKHLILIGPPGSGKGTQSPLIKDEYCLCHLATGDMLRAAVAAKTTLGIKAKEAMDKGELVSDNLVVGIIDEAMKKPSCQKGFILDGFPRTVTQAQKLDEMLAKQGANVDKVLNFAIDDAILEERITGRWIHPPSGRTYHTKFAPPKSPGVDDVTGEPLIQRRDDTAEVLKSRLEAFHKQTEPVIDYYSKKGLVVNLPAEKPPKEVTAEVLKALS

SEQ ID NO: 2548 - DNA, 726 bp, Zea mays
  CDS (1)..(726)
atggcggcgaatctggaggacgtgccgtcgctggatctgatgcacgagttgctccgccgcatgaagtgcagctccaagcccgacaagcgcctcatcgtcatcggcccacctggctctggaaagggaacccagtctcccattattaaggatgaatattgcttgtgccatttagccactggtgatatgctgagggctgctgtggcggccaagacacctctaggtatcaaggcaaaagaagctatggataagggagagcttgtttcagatgacatggttgtggggattattgatgaagctatgaagaaaccttcatgccagaaaggtttcattcttgatggctttcctagaactgtcactcaagcacagaagctcgatgaaatgttggcaaagcaaggtgctaatgttgacaaggtcctaaacttcgcaattgatgatgctatattggaagaacggattactggtcgttggatccacccacccagtggtaggacttaccatacaaaatttgcacctccaaagtctccaggagttgataatgtaactggagagccattgattcaaaggagggatgacactgccgaggttttgaagtcaaggcttaaacccttccacaaacaaaatgagcctgggattgattattactctaagaagggcttggtggtaaatcggcctgcggagaaaccaccaaaggaagtgactgctaaggtgttgaaagccctttcatga

SEQ ID NO: 2549 - protein, 241 aa, Zea mays
MAANLEDVPSLDLMHELLRRMKCSSKPDKRLIVIGPPGSGKGTQSPIIKDEYCLCHLATGDMLRAAVAAKTPLGIKAKEAMDKGELVSDDMVVGIIDEAMKKPSCQKGFILDGFPRTVTQAQKLDEMLAKQGANVDKVLNFAIDDAILEERITGRWIHPPSGRTYHTKFAPPKSPGVDNVTGEPLIQRRDDTAEVLKSRLKPFHKQNEPGIDYYSKKGLVVNRPAEKPPKEVTAKVLKALS

SEQ ID NO: 2550 - DNA, 726 bp, Zea mays
  CDS (1)..(726)
atggcggcgaatctggaggacgtgccgtcgctggatctgatgcacgagttgctccgccgcatgaagtgcagctccaagcccgacaagcgcctcatcgtcatcggcccacctggctctggaaagggaacccagtctcccattattaaggatgaatattgcttgtgccatttagccactggtgatatgctgagggctgctgtggcggccaagacacctctaggtatcaaggcaaaagaagctatggataagggagagcttgtttcagatgacatggttgtggggattattgatgaagctatgaagaaaccttcatgccagaaaggtttcattcttgatggctttcctagaactgtcactcaagcacagaagctcgatgaaatgttggcaaagcaaggtgctaatgttgacaaggtcctgaacttcgcaattgatgatgctatattggaagaacggattactggtcgttggatccattcggccagtggtaggacttaccattcaaaatttgcacctccaaagtctccgggagttgatgatgtaactggagagccattgattcaacgaagagatgacacagctgagatcttgaagtcaaggcttgaagccttccacagacaaactgaacctgtgattgagtattactccaagagaggcttagtggtgaacctgcccgcagagaaaccaccaaaggaagtgactgctgaggttttgaaagccctctcttga

SEQ ID NO: 2551 - protein, 241 aa, Zea mays
MAANLEDVPSLDLMHELLRRMKCSSKPDKRLIVIGPPGSGKGTQSPIIKDEYCLCHLATGDMLRAAVAAKTPLGIKAKEAMDKGELVSDDMVVGIIDEAMKKPSCQKGFILDGFPRTVTQAQKLDEMLAKQGANVDKVLNFAIDDAILEERITGRWIHSASGRTYHSKFAPPKSPGVDDVTGEPLIQRRDDTAEILKSRLEAFHRQTEPVIEYYSKRGLVVNLPAEKPPKEVTAEVLKALS

SEQ ID NO: 2552 - DNA, 726 bp, Zea mays
  CDS (1)..(726)
atggcggcgaatctggaggacgtgccgtcactggatctgatgcacgagctgctccgccgcatgaagtgcagctccaagcccgacaagcgcctcatcctcatcggtccacctggctctggaaagggaactcagtctcctattatcaaggatgaatattgcttgtgccatttagccactggtgacatgctgagggctgctgtggcggccaagacacctctaggtatcaaagctaaagaagctatgaataagggagagcttgtttcagatgatttggttgtgggcattattgatgaagctatgaagaaaccctcatgccagaaaggtttcattcttgatggctttcctagaactgtgactcaagcacagaagcttgatgagatgttggcaaagcaaggtgccaatgttgacaaagtcctgaactttgcaattgatgatgctgtattggaagaacggattactggtcgttggatccactcagccagtggtaggacttaccactcaaaatttgcacctccaaagtctccaggagttgatgatgtaactggagagccattgattcaaaggagagatgacaccgctgaggtcttgaagtcaaggcttgaagctttccacagacaaaccgaacctgtgattgattattactccaagaagggcttagtggtgaacctgcctgcagagaaaccaccgaaggaagtgactgctgaggtgcagaaagccctctcgtga

SEQ ID NO: 2553 - protein, 241 aa, Zea mays
MAANLEDVPSLDLMHELLRRMKCSSKPDKRLILIGPPGSGKGTQSPIIKDEYCLCHLATGDMLRAAVAAKTPLGIKAKEAMNKGELVSDDLVVGIIDEAMKKPSCQKGFILDGFPRTVTQAQKLDEMLAKQGANVDKVLNFAIDDAVLEERITGRWIHSASGRTYHSKFAPPKSPGVDDVTGEPLIQRRDDTAEVLKSRLEAFHRQTEPVIDYYSKKGLVVNLPAEKPPKEVTAEVQKALS

SEQ ID NO: 2554 - DNA, 25 bp, Artificial sequence
  primer
atgaaagcagacgcgaaacaaataa

SEQ ID NO: 2555 - DNA, 27 bp, Artificial sequence
  primer
tcaataatttcggaagataatatctga

SEQ ID NO: 2556 - protein, 252 aa, Artificial sequence
  consensus sequence
  Variant (2)..(2): Xaa in position 2 is any amino acid
  Variant (5)..(5): Xaa in position 5 is any amino acid
  Variant (11)..(23): Xaa in position 11 to 23 is any amino acid
  Variant (24)..(24): Xaa in position 24 is any or no amino acid
  Variant (29)..(30): Xaa in position 29 to 30 is any amino acid
  Variant (32)..(37): Xaa in position 32 to 37 is any amino acid
  Variant (38)..(41): Xaa in position 38 to 41 is any or no amino acid
  Variant (43)..(43): Xaa in position 43 is any amino acid
  Variant (46)..(47): Xaa in position 46 to 47 is any amino acid
  Variant (48)..(50): Xaa in position 48 to 50 is any or no amino acid
  Variant (52)..(57): Xaa in position 52 to 57 is any amino acid
  Variant (59)..(59): Xaa in position 59 is any amino acid
  Variant (62)..(62): Xaa in position 62 is any amino acid
  Variant (64)..(76): Xaa in position 64 to 76 is any amino acid
  Variant (77)..(131): Xaa in position 77 to 131 is any or no amino acid
  Variant (133)..(135): Xaa in position 133 to 135 is any amino acid
  Variant (142)..(143): Xaa in position 142 to 143 is any amino acid
  Variant (146)..(147): Xaa in position 146 to 147 is any amino acid
  Variant (149)..(156): Xaa in position 149 to 156 is any amino acid
  Variant (157)..(170): Xaa in position 157 to 170 is any or no amino acid
  Variant (172)..(182): Xaa in position 172 to 182 is any amino acid
  Variant (183)..(184): Xaa in position 183 to 184 is any or no amino acid
  Variant (186)..(186): Xaa in position 186 is any amino acid
  Variant (187)..(188): Xaa in position 187 to 188 is any or no amino acid
  Variant (190)..(190): Xaa in position 190 is any amino acid
  Variant (191)..(195): Xaa in position 191 to 195 is any or no amino acid
  Variant (197)..(197): Xaa in position 197 is any amino acid
  Variant (198)..(198): Xaa in position 198 is any or no amino acid
  Variant (200)..(205): Xaa in position 200 to 205 is any amino acid
  Variant (207)..(207): Xaa in position 207 is any amino acid
  Variant (208)..(225): Xaa in position 208 to 225 is any or no amino acid
  Variant (227)..(227): Xaa in position 227 is any amino acid
  Variant (230)..(236): Xaa in position 230 to 236 is any amino acid
  Variant (239)..(244): Xaa in position 239 to 244 is any amino acid
  Variant (246)..(246): Xaa in position 246 is any amino acid
  Variant (248)..(251): Xaa in position 248 to 251 is any amino acid
GXPGXGKGTQXXXXXXXXXXXXXXSTGDXXRXXXXXXXXXXTXLGXXXXXAXXXXXXGXLVXDXXXXXXXXXXXXXXXXXXXXXXXXXXXXXXXXXXXXXXXXXXXXXXXXXXXXXXXXXXXXXXXXXXXXGXXXDGFPRTXXQAXXLXXXXXXXXXXXXXXXXXXXXXXVXXXXXXXXXXXXXRXXXRXXXXXXGXXYXXXXXXPXXXXXXXXXXXXXXXXXXXRXDDXXXXXXXRLXXXXXXTXPXXXXY

SEQ ID NO: 2557 - protein, 16 aa, Artificial sequence
  protein pattern
  Variant (2)..(2): Xaa in position 2 is any or no amino acid
  Variant (4)..(4): Xaa in position 4 is Ala, Leu or Pro
  Variant (7)..(7): Xaa in position 7 is Ala, Cys, Gly, Ser, Thr or Val
  Variant (13)..(13): Xaa in position 13 is Ala, Gly, Ser or Thr
  Variant (14)..(15): Xaa in position 14 to 15 is any amino acid
  Variant (16)..(16): Xaa in position 16 is Ile, Leu, Met or Val
LXGXPGXGKGTQXXXX

SEQ ID NO: 2558 - DNA, 720 bp, Saccharomyces cerevisiae
  CDS (1)..(720)
atggcaatagcattatggtattgtccaccacaaggatcagttgcttacgagacattacagatgcttatattttcgtttcaaacgttgttcccagattcaccagtttttgaacctcatgtgacggtaacgtcccatttggtgtgcaatagtaaagatgatgtcaacaaaatcttgacctcctgtgttgctgccatccaatcgataaggtcacaccaaacagcaaagaaaggacgtaagggacaggtatcccatgctgttgcagctcctttggtatctttcaatggatgcagtgtaggtaaacaatatttcaagaaaattgtgctcgagtgtaacaagaacaaaatactttatggggtcgcacaagtcatgagagagatgtacgtagagatcgatcctgagacgcgaagtagccgtgccgccacttgggtgcacgaggaattccatcctcacgtctcattgctttattcggatattcatccggtaagtcaggcgtcattgcgagtagttcaacaaagaattgaagatgctctagacgtgcaactagttccaagagagaaacgtaagggttccggaaacgctgatgggtccaatgaagtgcaaatgagatgggattttgacgtatcttcatcgctatcttggaatatcccaggaacgtttaaagtggtcaactgtgtggggcccgttcaagaatgggaggtattgggacgggtggacgtttaa

SEQ ID NO: 2559 - protein, 239 aa, Saccharomyces cerevisiae
MAIALWYCPPQGSVAYETLQMLIFSFQTLFPDSPVFEPHVTVTSHLVCNSKDDVNKILTSCVAAIQSIRSHQTAKKGRKGQVSHAVAAPLVSFNGCSVGKQYFKKIVLECNKNKILYGVAQVMREMYVEIDPETRSSRAATWVHEEFHPHVSLLYSDIHPVSQASLRVVQQRIEDALDVQLVPREKRKGSGNADGSNEVQMRWDFDVSSSLSWNIPGTFKVVNCVGPVQEWEVLGRVDV

SEQ ID NO: 2560 - DNA, 651 bp, Ashbya gossypii
  CDS (1)..(651)
atggctgtcgcgctctggtactgcccgcccgccaactcgccctgttatgacaccgtcaactccctcatcctctcgctgcagaccctcttccccgatgccgtgctcttcgagccacacgtgaccatcacgtcccagctgcgctgcgactccgctgacgacgccgccgccgtgctcgccgccgcctgcgccgccctgcgcgcctgccgcccccagctcgacgcccgcggctcccccgtcgtccgcttcgacgccgtcgccgtcggccgccgctacttcgacaaggtccacctcgcctgcgcccacgaccgcttcctctacggcgtcgcccaggtcatccgcgagctgttcgtccaggacccgcccgaccccgccgccgccgcggactgggtccactcctccttccgcccccacctctccctcgtctacagcgacctctaccacgtcgaccaggccctgctccgcgtcctgcgccagcgcatcggcgacgccctgggcgccgcgctgctgccgcacccgcctgccccggggctgcaggccctctgggccctgcagccgccgttggacggttggagcatccccggctccttcaaggtcgtccgatgcgagggccccgtccgcgactggcacgtgctcgccgccgccgatctctga

SEQ ID NO: 2561 - protein, 216 aa, Ashbya gossypii
MAVALWYCPPANSPCYDTVNSLILSLQTLFPDAVLFEPHVTITSQLRCDSADDAAAVLAAACAALRACRPQLDARGSPVVRFDAVAVGRRYFDKVHLACAHDRFLYGVAQVIRELFVQDPPDPAAAADWVHSSFRPHLSLVYSDLYHVDQALLRVLRQRIGDALGAALLPHPPAPGLQALWALQPPLDGWSIPGSFKVVRCEGPVRDWHVLAAADL

SEQ ID NO: 2562 - DNA, 582 bp, Candida glabrata
  CDS (1)..(582)
atgagtattgcgctgtggtactgtcctgctccagggacgttggattacgaagtgttaaagacgctgataaactctttgcagttgctggtgccgggttctccgagctttgagccccatcttactgtagtgacacatttgcaagtgcagaacaggggcgatgttagcaaagtgttgcagtcgtgttcgagttgcctcaagacgatccctaaagggcatagtctgatcaagtacagtaactggtctatcaacaagcaatatttcaagaaaatagtgttagagtgtgagaaagataaatatttgttgagcttggcgcagttaatgcgtgagttgtatgttgagatagaggatcagaagcgcagggccgagcattgggtaatagaggagttccaaccgcatgtgtcacttatgtacaatgacagccagataacaaaggccacagagatggtggtgagacagcgcatacatgacgcaatgcagttgtttagcaacaatccatccagcaagagttggagaacgttcaaagtagtgtcatgcgaagggcctgtagaagaatggcaggtgttgggctccgtgacactttga

SEQ ID NO: 2563 - protein, 193 aa, Candida glabrata
MSIALWYCPAPGTLDYEVLKTLINSLQLLVPGSPSFEPHLTVVTHLQVQNRGDVSKVLQSCSSCLKTIPKGHSLIKYSNWSINKQYFKKIVLECEKDKYLLSLAQLMRELYVEIEDQKRRAEHWVIEEFQPHVSLMYNDSQITKATEMVVRQRIHDAMQLFSNNPSSKSWRTFKVVSCEGPVEEWQVLGSVTL

SEQ ID NO: 2564 - DNA, 705 bp, Debaryomyces hansenii
  CDS (1)..(705): transl_table=12
atgagttcactcaacaccttatttcccggtcaaccaccaaaattcgaacctcatataactatatcttccaacattgatgtagatttggaccatcccgataaaaccaaatccgatgtatacagaattttatcagcaagtttagttgcaatagattcgttaccaaaaaatcattccaatttggttacattaggaaaggtggacagtcagagaaagtttttcaaaaaattgtatttccaagttgcaagagatccaaatttagtatcctttgccactataatcagagaattatttgtacaattaccagctgatatcgaacaagaaaatatgaagaaaaacccacatttgtacactacggatagccatggaaataccgttaagaaaaagtcaaaacaatcacaagatggtaggatagaagcgatagacatgcctagaatccagagtgaagctcaagaacaagcatccttgtggagtgtcactgaattcgatccacatctttctttggtttacaacgacttacatcctatcgacagtgcattgtggaggacaataaaaaccagaattcaagactatttgaatatagataattgcgattcagatgatttaacagataacggattaggctgggacaatggaatacttaaattagttttatgtgaaggtgatgtaaacgattgggtagttttgggtagtgccgacttgcactag

SEQ ID NO: 2565 - protein, 234 aa, Debaryomyces hansenii
MSSLNTLFPGQPPKFEPHITISSNIDVDLDHPDKTKSDVYRILSASLVAIDSLPKNHSNLVTLGKVDSQRKFFKKLYFQVARDPNLVSFATIIRELFVQLPADIEQENMKKNPHLYTTDSHGNTVKKKSKQSQDGRIEAIDMPRIQSEAQEQASLWSVTEFDPHLSLVYNDLHPIDSALWRTIKTRIQDYLNIDNCDSDDLTDNGLGWDNGILKLVLCEGDVNDWVVLGSADLH

SEQ ID NO: 2566 - DNA, 642 bp, Kluyveromyces lactis
  CDS (1)..(642)
atgggtatatctctatggttatgtccatatggacacagtcctgaatatgagacttttaaaactctgatagagtcattacaaactttattcccgaattctcctgtatttgagccccatgttactgtgtgtagtggtctctcatgtgagaacatggaggaagtgcataaggtacttgagatggctcatcatgctataaatgcagtaaaatctaaagtagatagtgagaatgcgcttgtcgagtttgatggtttcaatattggcaagaagtactttgagaaatgcagattggagtgcaaaccaaaccctatgttgtacagtctcgcgaagttgataagatcgatgttcgtcggagaattgaacattgatacctggttatttgaggaattccatccacatctttcgctagcctactcagatatctatccgatggaccaagcaatgatacggttgataaggcagagaattgaagacttatttgatgtaactacagaagaaatagagtcgcatagcagggaccaagacgcgtataaattacaacacactctcaaaggatggtctttcccgttgactttcaaagtggtcagatgtgaaggtcctgtagaagaatgggaagtgctatcagaagtgacagtccatggataa

SEQ ID NO: 2567 - protein, 213 aa, Kluyveromyces lactis
MGISLWLCPYGHSPEYETFKTLIESLQTLFPNSPVFEPHVTVCSGLSCENMEEVHKVLEMAHHAINAVKSKVDSENALVEFDGFNIGKKYFEKCRLECKPNPMLYSLAKLIRSMFVGELNIDTWLFEEFHPHLSLAYSDIYPMDQAMIRLIRQRIEDLFDVTTEEIESHSRDQDAYKLQHTLKGWSFPLTFKVVRCEGPVEEWEVLSEVTVHG

SEQ ID NO: 2568 - DNA, 660 bp, Yarrowia lipolytica
  CDS (1)..(660)
atgactaacctaggtacatctctatggctccagcctcctaggaactcgccaatttggcagcagcttgccactacaatccagggcctgaagcccatcttttcagactcggaaaacttcgagcctcacattacacttacttccaacatttccgtcaacacccaaggccaggtcgactttgtgttagatcgagcagttgccgcagccaaatgcgtgccccagggcttccagattcacctgtcgtccgtcaagtacggatcgcggttcttcaagaaggtctatctccaggtcgagcccactccagagctcctttcactcgcccgaatatgccgcgaggactttgtgtacatgcccgaggccatgtcacaggcacgcaactaccaggccatgtctgcggaggaaagacaaaaaattgacacccaagtgggccagcgggctgccgagtggaccagaaacgagtacgaccctcatgtgtctctggtgtactctgatctgtaccccgttgaagacgcagaccggcgaaccattgagacgagactggaggacactttcggatccggatacgacgagagcggtcttggatggaaaaatggacgtttcgctctggtgcggtgcgaaggacctgtggacgagtgggaagtgcttggtgttcgggacttttaa

SEQ ID NO: 2569 - protein, 219 aa, Yarrowia lipolytica
MTNLGTSLWLQPPRNSPIWQQLATTIQGLKPIFSDSENFEPHITLTSNISVNTQGQVDFVLDRAVAAAKCVPQGFQIHLSSVKYGSRFFKKVYLQVEPTPELLSLARICREDFVYMPEAMSQARNYQAMSAEERQKIDTQVGQRAAEWTRNEYDPHVSLVYSDLYPVEDADRRTIETRLEDTFGSGYDESGLGWKNGRFALVRCEGPVDEWEVLGVRDF

SEQ ID NO: 2570 - DNA, 25 bp, Artificial sequence
  primer
atggcaatagcattatggtattgtc

SEQ ID NO: 2571 - DNA, 23 bp, Artificial sequence
  primer
ttaaacgtccacccgtcccaata

SEQ ID NO: 2572 - protein, 280 aa, Artificial sequence
  consensus sequence
  Variant (3)..(4): Xaa in position 3 to 4 is any amino acid
  Variant (6)..(7): Xaa in position 6 to 7 is any amino acid
  Variant (8)..(18): Xaa in position 8 to 18 is any or no amino acid
  Variant (20)..(31): Xaa in position 20 to 31 is any amino acid
  Variant (36)..(36): Xaa in position 36 is any amino acid
  Variant (38)..(39): Xaa in position 38 to 39 is any amino acid
  Variant (41)..(49): Xaa in position 41 to 49 is any amino acid
  Variant (50)..(55): Xaa in position 50 to 55 is any or no amino acid
  Variant (57)..(59): Xaa in position 57 to 59 is any amino acid
  Variant (61)..(65): Xaa in position 61 to 65 is any amino acid
  Variant (67)..(87): Xaa in position 67 to 87 is any amino acid
  Variant (88)..(104): Xaa in position 88 to 104 is any or no amino acid
  Variant (106)..(106): Xaa in position 106 is any amino acid
  Variant (108)..(109): Xaa in position 108 to 109 is any amino acid
  Variant (111)..(117): Xaa in position 111 to 117 is any amino acid
  Variant (119)..(121): Xaa in position 119 to 121 is any amino acid
  Variant (123)..(125): Xaa in position 123 to 125 is any amino acid
  Variant (128)..(129): Xaa in position 128 to 129 is any amino acid
  Variant (131)..(134): Xaa in position 131 to 134 is any amino acid
  Variant (135)..(184): Xaa in position 135 to 184 is any or no amino acid
  Variant (186)..(187): Xaa in position 186 to 187 is any amino acid
  Variant (189)..(191): Xaa in position 189 to 191 is any amino acid
  Variant (194)..(194): Xaa in position 194 is any amino acid
  Variant (197)..(197): Xaa in position 197 is any amino acid
  Variant (200)..(200): Xaa in position 200 is any amino acid
  Variant (202)..(202): Xaa in position 202 is any amino acid
  Variant (204)..(208): Xaa in position 204 to 208 is any amino acid
  Variant (209)..(209): Xaa in position 209 is any or no amino acid
  Variant (211)..(212): Xaa in position 211 to 212 is any amino acid
  Variant (214)..(217): Xaa in position 214 to 217 is any amino acid
  Variant (220)..(220): Xaa in position 220 is any amino acid
  Variant (222)..(233): Xaa in position 222 to 233 is any amino acid
  Variant (234)..(258): Xaa in position 234 to 258 is any or no amino acid
  Variant (260)..(261): Xaa in position 260 to 261 is any amino acid
  Variant (262)..(264): Xaa in position 262 to 264 is any or no amino acid
  Variant (267)..(267): Xaa in position 267 is any amino acid
  Variant (269)..(269): Xaa in position 269 is any amino acid
  Variant (275)..(276): Xaa in position 275 to 276 is any amino acid
  Variant (278)..(278): Xaa in position 278 is any amino acid
LWXXPXXXXXXXXXXXXXIXXXXXXXXXXXXFEPHXTXXSXXXXXXXXXXXXXXXVXXXLXXXXXAXXXXXXXXXXXXXXXXXXXXXXXXXXXXXXXXXXXXXXFXKXXLXXXXXXXLXXXAXXXREXXVXXXXXXXXXXXXXXXXXXXXXXXXXXXXXXXXXXXXXXXXXXXXXXXXXXXXXXAXXWXXXEFXPHXSLXYXDXXXXXXAXXRXXXXRIXDXXXXXXXXXXXXXXXXXXXXXXXXXXXXXXXXXXXXXWXXXXXFKXVXCEGPVXXWXVL

SEQ ID NO: 2573 - protein, 26 aa, Artificial sequence
  protein pattern
  Variant (2)..(6): Xaa in position 2 to 6 is any amino acid
  Variant (7)..(8): Xaa in position 7 to 8 is any or no amino acid
  Variant (10)..(10): Xaa in position 10 is Leu or Val
  Variant (13)..(13): Xaa in position 13 is any amino acid
  Variant (15)..(15): Xaa in position 15 is Asn or Ser
  Variant (17)..(17): Xaa in position 17 is Ile or Leu
  Variant (18)..(18): Xaa in position 18 is His or Tyr
  Variant (19)..(19): Xaa in position 19 is any amino acid
  Variant (20)..(20): Xaa in position 20 is Ile, Met or Val
  Variant (21)..(21): Xaa in position 21 is Asp, Glu or Ser
  Variant (22)..(22): Xaa in position 22 is Asp, Gln or Ser
  Variant (24)..(25): Xaa in position 24 to 25 is any amino acid
WXXXXXXXHXSLXYXDXXXXXXAXXR

SEQ ID NO: 2574 - protein, 26 aa, Artificial sequence
  protein pattern
  Variant (2)..(2): Xaa in position 2 is Asp, Glu or Lys
  Variant (4)..(5): Xaa in position 4 to 5 is any amino acid
  Variant (7)..(7): Xaa in position 7 is Ala, Glu or Gln
  Variant (8)..(8): Xaa in position 8 is Cys or Val
  Variant (9)..(10): Xaa in position 9 to 10 is any amino acid
  Variant (11)..(11): Xaa in position 11 is Asp, Asn or Thr
  Variant (12)..(13): Xaa in position 12 to 13 is any amino acid
  Variant (15)..(15): Xaa in position 15 is any amino acid
  Variant (16)..(16): Xaa in position 16 is Gly or Ser
  Variant (17)..(17): Xaa in position 17 is Leu or Val
  Variant (19)..(19): Xaa in position 19 is any amino acid
  Variant (20)..(20): Xaa in position 20 is Ile, Leu or Val
  Variant (21)..(21): Xaa in position 21 is any amino acid
  Variant (23)..(23): Xaa in position 23 is Glu or Ser
  Variant (24)..(24): Xaa in position 24 is any amino acid
  Variant (25)..(25): Xaa in position 25 is Phe or Tyr
FXKXXLXXXXXXXLXXXAXXXRXXXV

SEQ ID NO: 2575 - protein, 18 aa, Artificial sequence
  protein pattern
  Variant (2)..(2): Xaa in position 2 is any amino acid
  Variant (3)..(3): Xaa in position 3 is any or no amino acid
  Variant (5)..(5): Xaa in position 5 is any amino acid
  Variant (6)..(6): Xaa in position 6 is any or no amino acid
  Variant (8)..(8): Xaa in position 8 is any amino acid
  Variant (12)..(12): Xaa in position 12 is Asp, Glu, Gln or Arg
  Variant (13)..(13): Xaa in position 13 is Asp or Glu
  Variant (15)..(15): Xaa in position 15 is any amino acid
  Variant (18)..(18): Xaa in position 18 is Ala, Gly or Ser
FXXVXXCXGPVXXWXVLX

SEQ ID NO: 2576 - protein, 22 aa, Artificial sequence
  protein pattern
  Variant (2)..(4): Xaa in position 2 to 4 is any or no amino acid
  Variant (6)..(10): Xaa in position 6 to 10 is any amino acid
  Variant (11)..(11): Xaa in position 11 is any or no amino acid
  Variant (16)..(16): Xaa in position 16 is Ile or Val
  Variant (18)..(18): Xaa in position 18 is Ile, Leu or Val
  Variant (19)..(19): Xaa in position 19 is Cys, Ser or Thr
  Variant (21)..(21): Xaa in position 21 is any amino acid
  Variant (22)..(22): Xaa in position 22 is Ile or Leu
LXXXFXXXXXXFEPHXTXXSXX

SEQ ID NO: 2577 - DNA, 1194 bp, Saccharomyces cerevisiae
  CDS (1)..(1194)
atgtcgcctttgagaaagacggttcctgaatttttggcacacttaaaatcactgccaatttcaaaaattgcaagcaacgatgtgttaacaatatgtgttggtaacgagtcagcagatatggactcaattgctagtgcaatcacttattcgtactgccaatacatatataatgaaggtacttactcggaggagaaaaagaaaggaagctttattgtcccaattatcgacattcctagagaagacctcagtttaagaagagacgtaatgtatgtcctagaaaaactgaaaattaaggaggaggaattattcttcattgaagatttaaagagcttgaagcaaaatgtctcccagggtactgaattaaactcttacttggtagataataacgatacaccaaagaatttgaaaaattatatagataacgtcgttggcattatagaccaccattttgacttgcaaaaacatttggatgctgaacctcggattgtaaaagtgtccggcagttgctcatcgctggtttttaactactggtatgaaaaattgcaaggtgaccgtgaagtggtgatgaacattgcaccacttttgatgggggccatcttaatagacacttcaaatatgaggcgcaaagtcgaggaaagtgataaattagctatcgagagatgccaagctgttcttagtggtgcggttaatgaagtgtctgcgcaaggtttagaggacagcagtgagttttataaagagataaaatcaagaaagaacgatattaaaggattttcggtaagcgatattctaaagaaggactacaaacaattcaatttccaaggaaagggacacaaagggttagagattggtctttcatcaatagtaaaaagaatgtcttggctattcaatgaacacggtggtgaagcagatttcgtcaaccaatgcagaagatttcaggcggagagggggctcgatgtattggttctgttgacttcatggaggaaagctggtgattcacacagagaattggtcatattgggagactctaacgtggtacgtgaactcattgaaagggttagcgacaagctccaacttcaattatttgggggcaatcttgatggaggtgtggcgatgtttaagcaactgaacgtcgaggccaccagaaagcaagtcgtcccctatttagaggaagcgtactcaaacctggaagagtga

SEQ ID NO: 2578 - protein, 397 aa, Saccharomyces cerevisiae
MSPLRKTVPEFLAHLKSLPISKIASNDVLTICVGNESADMDSIASAITYSYCQYIYNEGTYSEEKKKGSFIVPIIDIPREDLSLRRDVMYVLEKLKIKEEELFFIEDLKSLKQNVSQGTELNSYLVDNNDTPKNLKNYIDNVVGIIDHHFDLQKHLDAEPRIVKVSGSCSSLVFNYWYEKLQGDREVVMNIAPLLMGAILIDTSNMRRKVEESDKLAIERCQAVLSGAVNEVSAQGLEDSSEFYKEIKSRKNDIKGFSVSDILKKDYKQFNFQGKGHKGLEIGLSSIVKRMSWLFNEHGGEADFVNQCRRFQAERGLDVLVLLTSWRKAGDSHRELVILGDSNVVRELIERVSDKLQLQLFGGNLDGGVAMFKQLNVEATRKQVVPYLEEAYSNLEE

SEQ ID NO: 2579 - DNA, 1218 bp, Drosophila melanogaster
  CDS (1)..(1218)
atgtgctttctacgatttttggcccaggccaggggcaccttgggacggcatctggcggaggcctcaccagttgcctgggctgctgctcccgacgtttccggccggaaattacatctggtaatgggcaacgaatcgtgtgacttggactccgccgtttcggccgtcactttggcttttgtctacgcgcagcgtcatcgggagcacgactatgtacctatactgaacattcctcgccgggactacccgttgaaaaccgaggtgggccacttgtttgtgaaatgtgggattgccgagcccgtgttgctcttccgagacgatattccccgggaagtggtccaggatgtgaacgttattctcgtggaccaccatgtaagcccgctggcgccaaatgttactgaaattttggatcacaggcccttggaggacagcagtccatccttcaagcagctgccaacactctgccaactggacatagatgcctcggtgggttcctgcgccactctggtggcccagcggtatttggcagaggaccaaccccgatccactagcgtggcccagctgctgcacgccaccatcgtgctggacacaattaattttgcacccgcggccaagcgctacgggccaaaggacgaagccatggtacagaagttggagagcgagcttaaccgtaaggacgctcaaagaagtagcctttttgatgagctagtggctgcaagggcggatattagtaagctaactctcaccgaagttttgcgcaaggatatgaaggtcttgcaaaccgatcgtcaggtggttcccttagctggaatgcccatcctagtcagagattttgtggagaaaagcggcgccgaaaaagccgttcgcgagtttggcgtggagagtaaccttttggttatcctgggaatgtatgtatcacctgccgatggccaggtgcagcgtgacctggccttgatctctctctccggccaaggccaattcgttcaacgcgtccagcaagcactgatggagtctaacgatccaaaattggagttgcgacctcacgaggtggacacccgctttatgggcggctgcttcttgcgccaacacaacgtccaggccaccagaaagcacatcctgcccattgttaagcgagcgctgcttgaatgggaagcggatcacgcctgcgattgtgacgaggtgtacttcttcaaggagaagccgcagctgggactctcttaa

SEQ ID NO: 2580 - protein, 405 aa, Drosophila melanogaster
MCFLRFLAQARGTLGRHLAEASPVAWAAAPDVSGRKLHLVMGNESCDLDSAVSAVTLAFVYAQRHREHDYVPILNIPRRDYPLKTEVGHLFVKCGIAEPVLLFRDDIPREVVQDVNVILVDHHVSPLAPNVTEILDHRPLEDSSPSFKQLPTLCQLDIDASVGSCATLVAQRYLAEDQPRSTSVAQLLHATIVLDTINFAPAAKRYGPKDEAMVQKLESELNRKDAQRSSLFDELVAARADISKLTLTEVLRKDMKVLQTDRQVVPLAGMPILVRDFVEKSGAEKAVREFGVESNLLVILGMYVSPADGQVQRDLALISLSGQGQFVQRVQQALMESNDPKLELRPHEVDTRFMGGCFLRQHNVQATRKHILPIVKRALLEWEADHACDCDEVYFFKEKPQLGLS

SEQ ID NO: 2581 - DNA, 1254 bp, Magnaporthe grisea 70-15
  CDS (1)..(1254)
atgccgccatcaccacatcctcgctccatcacaggcttccttgccaaagcgaagcgagccttggtcgcgcccaagagcacgcgacaagctcctctccaccttgtggtggacctcgactccttctgctccgccttcctgtacgcctatctgcgatctcacactgcgcccaactacacactacacataccgcttgcaaacataccgcacgaggatatccatctccgcagagacgtcgagtcggtgtttgccacagctggcgtgcagcgcgaccaacttatctctttgtcaaatgtcccaggtgaagaagacctcaagccggaggacactaaatggatcctggtggaccacaacgaacttacggggcccttggcgcaaagagggtttggaaaaagtgtcgtgggctgcattgatcaccatgtcgacgagggcaccgtgcccgtggacacgggagacgagccaagaatcatcaggccctgcgggagcaatgtgagcttggtgatggaatactgccgggagacatgggaccgaatcgctcatggtacaggcaactcaggagaggatgcagacacgacccaacccggaagcccaagtgtggcggcacagctggctcgcatagcgatgggcccggttgtggctgatacacactgcctgaaatccaagtccaagacgacgcccctggatatcgagacagccgatatgcttgaggggagaatcaaggccgagaagctagaatacgatcgcgaagcgtactttgatgaacttggtcaactcaaagaggacataaccggcttcagctatcgcgatgtcctgcgaaaggactacaaggagtggacgtccaccgaccaggaaggcacgcagcgtctcggcgtgtcagcggtgcctcaaggctttcactacctgctggaccatgttggaccgaaagaggacctcttcagagatgtgcgcgagtgggccaccgagcgccagcttgacctagtcagcatcatgacggtgcagcctgacggggagcacttggcacgtgagctgttgttgtgtgcgttcaacaagcgggcgatcattacggccaggaagtttactgagacctacgccgaggagctgcaccttgaaacttggggcgagggtggcaagcttgacgattacgacgatgaggacggccgggtggagtggtgcaggtgttggcaccagcacaacagggagcatagtcgcaagcaggttgcacccatgctgagggagatgatgaagggcggtgcttga

SEQ ID NO: 2582 - protein, 417 aa, Magnaporthe grisea 70-15
MPPSPHPRSITGFLAKAKRALVAPKSTRQAPLHLVVDLDSFCSAFLYAYLRSHTAPNYTLHIPLANIPHEDIHLRRDVESVFATAGVQRDQLISLSNVPGEEDLKPEDTKWILVDHNELTGPLAQRGFGKSVVGCIDHHVDEGTVPVDTGDEPRIIRPCGSNVSLVMEYCRETWDRIAHGTGNSGEDADTTQPGSPSVAAQLARIAMGPVVADTHCLKSKSKTTPLDIETADMLEGRIKAEKLEYDREAYFDELGQLKEDITGFSYRDVLRKDYKEWTSTDQEGTQRLGVSAVPQGFHYLLDHVGPKEDLFRDVREWATERQLDLVSIMTVQPDGEHLARELLLCAFNKRAIITARKFTETYAEELHLETWGEGGKLDDYDDEDGRVEWCRCWHQHNREHSRKQVAPMLREMMKGGA

SEQ ID NO: 2583 - DNA, 1161 bp, Gibberella zeae PH-1
  CDS (1)..(1161)
atgtctactaggttgtctttgggcggctttttggtcaaggccaaggcggctttgacagctcccgcttcgcaacgaaagggacctcttacttttgttgtaggaaatgagtcagctgacctcgattctctttgctcagctgtggtttatgcctatcttcgcagtcatgcccctcctcataccctacacatccccctctcaaacctgccccgcgaggatctggctcttcgcactgaaatgtcggctgttctcaagcatgctggactgactctaaaagatctcttgactttatctgagcttccagacttgaagcctgaagagacgcgctggttgctagttgatcataattcactcactggcccactcaccaagtactcggagcaagttactggctgcgtcgaccaccacgcagatgaggatgttgtgagaaaggatgccaagccaagagtcgtcgaaacttgtggaagctgcatgagtctggttgtggacgagacgcgcgaaatctgggaagagctctcgaccaaggatgctcaagacagcgacgcagccaccgagaacgaaaagcttgtcagactcgctatcggacctatcatgtccgatacgataaacatgacagctgaagccaaggtgcgcgagcaagataccaaagctgtaacattcctggaggaacgcatgccctttgaccgcgcagcctactttgacgaaatctctgcagtaaaagaagacatttccgagctgagcttgcgcgatattttccgaaaggactataaagagtggaacggctcagggctgaagcttggaatcagctgcgtcgtgcaaaactttgactatcttgtcagcaaggcgggcaacccagagcctctgctcgatgcctttgaggattgggtcaaggagcgcaatctcgatgtggcgagtataatgacaacgtcgcatcccgacggcgagttccagcgacatctgcttgtgtggggtatcagcgatcaaggtcgcgaggcagtggatagattcgtggcagactcgggtgagaagctgaagctggagatgtggaaggatggagagttggataagcatggacatagtagatttgcatggaggcagcatgacctcacgtcgagtagaaaacaggttgcgccgttgttgagggaggctcttaagaagagttga

SEQ ID NO: 2584 - protein, 386 aa, Gibberella zeae PH-1
MSTRLSLGGFLVKAKAALTAPASQRKGPLTFVVGNESADLDSLCSAVVYAYLRSHAPPHTLHIPLSNLPREDLALRTEMSAVLKHAGLTLKDLLTLSELPDLKPEETRWLLVDHNSLTGPLTKYSEQVTGCVDHHADEDVVRKDAKPRVVETCGSCMSLVVDETREIWEELSTKDAQDSDAATENEKLVRLAIGPIMSDTINMTAEAKVREQDTKAVTFLEERMPFDRAAYFDEISAVKEDISELSLRDIFRKDYKEWNGSGLKLGISCVVQNFDYLVSKAGNPEPLLDAFEDWVKERNLDVASIMTTSHPDGEFQRHLLVWGISDQGREAVDRFVADSGEKLKLEMWKDGELDKHGHSRFAWRQHDLTSSRKQVAPLLREALKKS

SEQ ID NO: 2585 - DNA, 1143 bp, Candida glabrata CBS 138
  CDS (1)..(1143)
atgccaaatttacagcagttccttaaacaattgcgtactgtggaaattccacgattgataaaacaatcggtttcaaccttgaatatagtctgtggtaatgaatctgccgattttgattctgttgcttgtgccatttcatatgcctacttcgagcatgctaagagtgcccaaaatgtttatgtgcctataatcaatatcccaaaggaagaccttatgatgaggagagatataatgtttactttgaacaagctagacatctcacaagatcttttgttttttagagaagaccttatggaatataataaacaattcaacacaatcaacgcagtgattgttgatcacaacgaacttccaaaaccaaccaagcagctaataacagatgttattggtattattgatcaccatgcggataagcaattatatccgaatgccaatcctagaattatcacagttactggaagctgttcatcgctggtaactaacttctggagtaaaaacttagaaagtaacaagtaccatgaggctctcaacgactgtgcaccgctacttatttctgctggtcttctagatactgcaaatatgaaatataaagttgagaaccccgacgtagaagcattcaaacactatggtgatttgaatattcctctatttactcaattcgatagcgctttccgtgagttaagatcagccaaagacaatattgatggtttgacagtaaaacagttaatcaggaaggactataaggaatatgatttaatccctaagtctttggaatccaaaaaattaaactttggtgtgacttcaattgttgaaccggtagaggaactattcaaacgtttcaatagtaaagataattttttcaacagttgctataaatatagagaggaatatgatttagattgcttagtattactaacttcttggaatgaccctaaagagggcagattcagaagagagttgatcattattccaaaggatggtctttacgacactgtcgaaaatttgtgcaataatgcccccaaattggaactcaaagttttggataaagaaagccagaagtttgtaatctatgagcaattcgacttgagctcaagtagaaaaagaattatgccttatctgcaagacgtctactcaacaatttaa

SEQ ID NO: 2586 - protein, 380 aa, Candida glabrata CBS 138
MPNLQQFLKQLRTVEIPRLIKQSVSTLNIVCGNESADFDSVACAISYAYFEHAKSAQNVYVPIINIPKEDLMMRRDIMFTLNKLDISQDLLFFREDLMEYNKQFNTINAVIVDHNELPKPTKQLITDVIGIIDHHADKQLYPNANPRIITVTGSCSSLVTNFWSKNLESNKYHEALNDCAPLLISAGLLDTANMKYKVENPDVEAFKHYGDLNIPLFTQFDSAFRELRSAKDNIDGLTVKQLIRKDYKEYDLIPKSLESKKLNFGVTSIVEPVEELFKRFNSKDNFFNSCYKYREEYDLDCLVLLTSWNDPKEGRFRRELIIIPKDGLYDTVENLCNNAPKLELKVLDKESQKFVIYEQFDLSSSRKRIMPYLQDVYSTI

SEQ ID NO: 2587 - DNA, 1152 bp, Kluyveromyces lactis NRRL Y-1140
  CDS (1)..(1152)
atggttggcaggcttgtaaagttcttaacacaattaaagggatcgcatgtgaacgcactgaaaaaatgcagcagtaaggacagttgtttcttaaatatagtctgcggaaacgaatctgcagatcttgatagtattgtcagcactatagcatatgcttatctcagcttccttaacgacccgtctgctcttctacttccagtaataaacattccaaaggaagatctaaaacttaggagagatgtttgttacttgttagactcacactcaatatcaagtgatttgctatattttaaagaagatttgcgtaattggagcaaactaccatcatgtgacatcaattgtgttcttgtggaccataacgacattccacatacgaataaggatgttttactaaatgttgttggcattgtagatcatcataaagatgttggtttacatacagaatcagttgaaacattctcaggaccaagaattattcaaactgcaggtagttgctccagtttggtgttcgactattggttcaaaatttcaaagagtaatgaacaagcatgtgccgctattaaagatgtggttccactactgcttggtgctcttctaatagatactgatgacatgaaacataaagtagagcacatcgacaccgtagcactcgaggaatacaaaaagctatcacaagaatctgtggatactaatcgactgtaccaaaagctaagagaagctaaagatgatataaacggtctatattttcatgatatcttaagaaaagattacaaggaattcaactttaatcccgaaacacgttgcggtatagcttcggtcgtgaaatcaattcaatggattgaaaggaggttcgataaagcaaatattgaaagtacctgtactaagtatatcgaagaaaatagtcttgacattcttgttttaatgactagtttcactgagaatgatatcttctcgaagcaaattgcttttcagattaaccccaaccgtgatccacagctgttgaaatcattagtcaatgacttggctccgaagctggatttggttaagattgagtcattatcatccaagtgctttgagtgctatgatcaaaaaaatactaaaatgagtagaaagcaagtggctccctttatcgaagagttcatacataagtag

SEQ ID NO: 2588 - protein, 383 aa, Kluyveromyces lactis NRRL Y-1140
MVGRLVKFLTQLKGSHVNALKKCSSKDSCFLNIVCGNESADLDSIVSTIAYAYLSFLNDPSALLLPVINIPKEDLKLRRDVCYLLDSHSISSDLLYFKEDLRNWSKLPSCDINCVLVDHNDIPHTNKDVLLNVVGIVDHHKDVGLHTESVETFSGPRIIQTAGSCSSLVFDYWFKISKSNEQACAAIKDVVPLLLGALLIDTDDMKHKVEHIDTVALEEYKKLSQESVDTNRLYQKLREAKDDINGLYFHDILRKDYKEFNFNPETRCGIASVVKSIQWIERRFDKANIESTCTKYIEENSLDILVLMTSFTENDIFSKQIAFQINPNRDPQLLKSLVNDLAPKLDLVKIESLSSKCFECYDQKNTKMSRKQVAPFIEEFIHK

SEQ ID NO: 2589 - DNA, 1239 bp, Debaryomyces hansenii CBS767
  CDS (1)..(1239): transl_table=12
atgtcagtaagatcgtatttagtcactctaaagaagcaattagagaccaactcaattaagtccccgttaagatttgttactggtaatcaatcggctgatttagattcagtaattagtgccattagttttgcatatttcaattataagaaggacgaatccttgttaatcccgttaattaatatatccagaactgactttaagttacggagggacattgttaccttattggattcctattcaataactgaggatagcttatatttcattgaagatttcaaaagaataactgcttccgatgttcctattgaattaacgttagttgatcactgtaacatccaaggggatgtattcactgactatctttctaaaggaaagctagatattgttgggattatagaccaccaccaggacgaatcagtatttttaaatgctaacccaagaataatacatagtaatgggtcttgttctgcgttagtctttaattattggtatgaccaatttagtaataaagatatcttctacgaaaaagataatgaaattgttcctttgttattaggatctttactaattgatacgtcaaatatgagccagaaggttgaagaaggtgatgttatcgcatttaaagaatatcaaaatattttacaaaagaatgaaattttactcaaagggttaggaaactatgcttgccaaagcactgataatattgaaaaattacttaagggatattataagcaaataaaagtagctaaaaaggatatgaaaggtttcaagttttatgatattttaaaaaaagattataaacaattcaaattcacctccagatgtaatgtgtctacagtggttggatttagctcaattggtaaatctttctattggttattgtcaaactattctatgcaagaaatatcagaaactttcaatgaaatcatgaaggattttaatttagatcttttaatcatgacgacttcctatactagacaagaaaatgatcaatacacaagagagttcagttatgctttcaactcaagcaatccacgtaaagatattttgttgcaattagcgaatttagctaacgatgaattgaaattagattccgatatatacaagcttgaaaatcttaacagttatctcgctgacttgggaaaaggtcaaacatttaagatctacaatcaaaacaacacagcagcttcaagaaagcaaatagttcctgttattaaggatattcttgagaataactag

SEQ ID NO: 2590 - protein, 412 aa, Debaryomyces hansenii CBS767
MSVRSYLVTLKKQLETNSIKSPLRFVTGNQSADLDSVISAISFAYFNYKKDESLLIPLINISRTDFKLRRDIVTLLDSYSITEDSLYFIEDFKRITASDVPIELTLVDHCNIQGDVFTDYLSKGKLDIVGIIDHHQDESVFLNANPRIIHSNGSCSALVFNYWYDQFSNKDIFYEKDNEIVPLLLGSLLIDTSNMSQKVEEGDVIAFKEYQNILQKNEILLKGLGNYACQSTDNIEKLLKGYYKQIKVAKKDMKGFKFYDILKKDYKQFKFTSRCNVSTVVGFSSIGKSFYWLLSNYSMQEISETFNEIMKDFNLDLLIMTTSYTRQENDQYTREFSYAFNSSNPRKDILLQLANLANDELKLDSDIYKLENLNSYLADLGKGQTFKIYNQNNTAASRKQIVPVIKDILENN

SEQ ID NO: 2591 - DNA, 1236 bp, Yarrowia lipolytica CLIB122
  CDS (1)..(1236)
atgaactgcacgatctcctgtcgcgagttctggtcgagggattcgagggcctggggggtgatagattccatgccagctcacaagctcttctgttcaaaatgtccatcactagctaccttggaaaagtggccgagaaatgggctgctatcaaggtctcctgcggcgttcaccatcgtctcgggtaatgagtcggccgacattgattcgtgtgtctcgtcggctctctacgcctacctgtcacagtcacagtccaaggttgacgtcttcccgctcatcaacatccccaagcaagacattctgctgcgacgagactttctgtggctgctggccaagctcaacatcaaggacaactcgttcctcttcctcgatgatctgaaccccgagctgctcaaacacgcctctctggctctcgtggatcacaacaaggtcaccgcctctctggcccagctcgacgacaaggtgattggtgtcattgaccaccacgaagacgagggactgtacaagtccgccgaccccagagtcgtcatcaagaacggatcgtgctcgtctctggtatacacctggtggaacaagacactcggcggtctcaatggcaccattgcctcggactctgccctcaatgagcttgccctggcccctcttctcatcgacacctccaacatgaagtccaaggtcgaggcccacgataccgaggcctacgagctcatcaccaaggctctgagtcgtatttctgcctttgccacatccaaggatgtcaagtcgttctacaagacactggacgagaagaagcgagacctgtcgggctttgacgccgtccagatgctccgaaaggactacaaagactgggccgaaaacggtgccaagctgggaatgagcactgtggttctggacctcagcaacatgctcaagcaggacccaaagttcttccccaagctccatgacttttgcgaggagcacaacgtgaccgtgcacgtgaccatgacctcgtacactgacgctgatactggcaaacacgcccgccagatgatcatttactcgcccaagggttgcaatgacggcgttcaaaagttcctcgacgcttctgccgaccttgaactcgagcccttttctgtggacgacagcggcatccctggtaagctgtgggtgttccagcagaacaacgctaaggccagccggaagcaggtggctcccaagctgcgatctgctctgtttggaactcacttctcgtctatctag

SEQ ID NO: 2592 - protein, 411 aa, Yarrowia lipolytica CLIB122
MNCTISCREFWSRDSRAWGVIDSMPAHKLFCSKCPSLATLEKWPRNGLLSRSPAAFTIVSGNESADIDSCVSSALYAYLSQSQSKVDVFPLINIPKQDILLRRDFLWLLAKLNIKDNSFLFLDDLNPELLKHASLALVDHNKVTASLAQLDDKVIGVIDHHEDEGLYKSADPRVVIKNGSCSSLVYTWWNKTLGGLNGTIASDSALNELALAPLLIDTSNMKSKVEAHDTEAYELITKALSRISAFATSKDVKSFYKTLDEKKRDLSGFDAVQMLRKDYKDWAENGAKLGMSTVVLDLSNMLKQDPKFFPKLHDFCEEHNVTVHVTMTSYTDADTGKHARQMIIYSPKGCNDGVQKFLDASADLELEPFSVDDSGIPGKLWVFQQNNAKASRKQVAPKLRSALFGTHFSSI

SEQ ID NO: 2593 - DNA, 1476 bp, Aspergillus nidulans FGSC A4
  CDS (1)..(1476)
atggccgccttcaatcgctgctccgccatttccctcgctcttttgaaaatgagtgtaaaaagagttggagaaggatcccaagaaagtaggagggggatgtccggagtcgcattattccgctccgacccctcattgacacctcaggcacaaaatttctcacttcaggttcatcaccgcttcgtttccggttcgctgtctcgtgcggagtcccccatctacgtcatcggcaatccctccgccgacctcgattcaatcgtctcagccctcgtgtactcgtactttgccaacaatcgtgttccacgcgactacccacgccctcatgtgcctgtgattaacctcgataatgtttccgccgggcccgaacttggcaggttacgccctgaattcgtgaaagcactccaactatctagatccgatgcgggggacactgtggagagctcgccgcttgaagaacactttctgactgtggcggactttgcgaaccaagtgaaggaacgacgtcttgaaacccaattacaagctgattctgtcctggtagactggaacgcgttgccggtgcgatcttcggacacccgctcggggaatggttccctacctagcctgccagtagagttcactgtcctaggctgcattgaccaccatgcagacgaggggtttctccctcctattgctagcacccagcctagcctgatcgcgacgaccggttcatgtacttcactcgtcgtcaccgagctcgagaaaatgggcctctggcacaaatccgatgaaatgcccccaaatgaagaagtgttggcgaaacttgcgatgagcccaatccttattgacacggccaatctcaagtccaaagacaaagtgactaatctcgatatctcggctcgcgatttcctctttcccaaagcaaccgcaaccgatgctcgatgggatgctgatggattttacgctgagattcaagaaacaaagcagaatagtctagatctgcttaccgtagatgagattctaggccgggactacaaagactgggacgagaaacctaccagacacgctaatcaactcccgctacgaatcggtatctgttccgttgtcaagccaataccctggattgttcgaaaggcaggcaatccatacgccttcatcgactgcctgaaatcgttcgcctcagagcgcaagttggacgtggtttccgttatgaccgcgttcagctcaaaagagggtcggttttcccgggaattgcttgtttggggacttaacagcgagggcgcgaatgctgtaaaagccctaatctccgaagcaagctccgagttgggcttggaggaatggaaatcacttgatgagggtgatgatgctcaaggcatcaaagatgcgttaagtgctctcgaggatgattctcaattggcgcgtctatggatacagacgaatgtggccaagagtaggaaacaggttgctccacttatcagagcagctgctgcctctctatag

SEQ ID NO: 2594 - protein, 491 aa, Aspergillus nidulans FGSC A4
MAAFNRCSAISLALLKMSVKRVGEGSQESRRGMSGVALFRSDPSLTPQAQNFSLQVHHRFVSGSLSRAESPIYVIGNPSADLDSIVSALVYSYFANNRVPRDYPRPHVPVINLDNVSAGPELGRLRPEFVKALQLSRSDAGDTVESSPLEEHFLTVADFANQVKERRLETQLQADSVLVDWNALPVRSSDTRSGNGSLPSLPVEFTVLGCIDHHADEGFLPPIASTQPSLIATTGSCTSLVVTELEKMGLWHKSDEMPPNEEVLAKLAMSPILIDTANLKSKDKVTNLDISARDFLFPKATATDARWDADGFYAEIQETKQNSLDLLTVDEILGRDYKDWDEKPTRHANQLPLRIGICSVVKPIPWIVRKAGNPYAFIDCLKSFASERKLDVVSVMTAFSSKEGRFSRELLVWGLNSEGANAVKALISEASSELGLEEWKSLDEGDDAQGIKDALSALEDDSQLARLWIQTNVAKSRKQVAPLIRAAAASL

SEQ ID NO: 2595 - DNA, 1206 bp, Candida albicans SC5314
  CDS (1)..(1206): transl_table=12
atgtcaattaaatcatacttaacaaatttaagacaacaattgaagtccaagtccttgaactccccacttaccgttgtcactggtaatcagtcagctgacatggattcagttgttagtgctttaacttttgcttatttttccaatttgcatagtaaacagtacataattccattgattaatatccctagaagagacttgaaattaagaagagatatagtaacgttattagattactattctataaccgaggatcttttgttttttgtagaagattttcaaaacattgtcaaggaatcagatcaaatattgatcaatttggttgatcacaacaacatccaaggagatgaactacacgaagcatttggagccggaaaacttaaagtggtaggaattattgaccaccatgaggatgaaggacaatttgttgaatcgcaaccaagaattatacgtacttgtgggtcaaactccagtttagttttcaattatttttacaatgaattctttaaaagtaatacctcaaaattcttagaaactcaacttgaagctataaagttattgttgggaccgttgctcattgacacttccggtatgactcaaaaagtcgaagaaccagatacggaagccttttccatttaccaaaaagcattagaaggagatgaaaaatttatacagttgtttgcaaattctggagataaagatccatacaccaactactattctactttaaaggcagctaagaaagatgtctcaggattcaaatttgttgatcttttgcgtaaggactacaaacaatttacatttgatagtggtgacagagttgggttcagttcagtcactaaggcattcaaatggattgtggccaattactccaaggaagaaatcggaaaaacattgatcaaaacacttgaagagaacaatattgatttattgattattggaactcatttcactcggaaggacaatgacaagtacacaagagaattcggttactattacaaaaagctggaaaacgaaaaattcaacaatttgcacaatttggcagaaacaaaattgcaactcaataatgaagtttatggagccgacaagattgtatcaacagttgaaaccttaagcagccacggtaacttcaaagtatttaaccaaggaaatataagtgcgtcaagaaagcaagttgttccaattgtaaaggagattcttgaaaattga

SEQ ID NO: 2596 - protein, 401 aa, Candida albicans SC5314
MSIKSYLTNLRQQLKSKSLNSPLTVVTGNQSADMDSVVSALTFAYFSNLHSKQYIIPLINIPRRDLKLRRDIVTLLDYYSITEDLLFFVEDFQNIVKESDQILINLVDHNNIQGDELHEAFGAGKLKVVGIIDHHEDEGQFVESQPRIIRTCGSNSSLVFNYFYNEFFKSNTSKFLETQLEAIKLLLGPLLIDTSGMTQKVEEPDTEAFSIYQKALEGDEKFIQLFANSGDKDPYTNYYSTLKAAKKDVSGFKFVDLLRKDYKQFTFDSGDRVGFSSVTKAFKWIVANYSKEEIGKTLIKTLEENNIDLLIIGTHFTRKDNDKYTREFGYYYKKSENEKFNNLHNLAETKLQLNNEVYGADKIVSTVETLSSHGNFKVFNQGNISASRKQVVPIVKEILEN

SEQ ID NO: 2597 - DNA, 1221 bp, Podospora anserina
  CDS (1)..(1221)
atggcacagagggtgtccctcaagtcatttttggctacagcccgcaaggcactcacggcacctccatctcaaagaccgaatcctctcacttttgtggtaggaaatgagtctgctgacctggattcaatctgctcagccgtcctctatgcctacttccgcacccatgccccttcatcccagtcagctctccacatcccgctctccaacctcccccttgccgaccttgccctccgtgctgagctcaacgcaatcttcgccccctcctccaactcagtcaccccagacgacctgatcaccctctccgacctcccttcaccttctgatctgccaccatcagcaacaaaatggtacctagtcgaccacaacgtcctcaccggcgacctcactaagcgcggttacgacaaatccgtcataggctgcgtcgaccaccacgatgacgagggcatcatcccctccgacgcccaaccaagagtattcgccaaatgcggcagctgcatgagtctcgttctctcacagtgccagccaatctgggatcagctccaaagccaccaagaaatcgacgaggaactggccagggtggccatggctcccatcttgatcgacactgtcaaactcacttcaaaagacaagaccacagactgggatgtcaatgccgcagcgtatgcggaggagaagcttgttgccactctcagtgttgccaggtcaaacaggcaaagatacgacagagagaagtattttgatcatctttcggagctgaaggatagtatccttcacctgtcctaccgcgacattctcagaaaggattacaaaaagtggaccgatgggtcgttgaacttggggatatcaaccgttgttcagggctttgagacttgcttggctgaggtgggggataagcagacgttcttggctgctcttaaggactgggccaaggagcagcagctggatattgcggcggttatgacagtctccaaaccgggcggtgtctttacgagggagctgcttgtttgggggttgggtggtcaggacgctgtgaaggtcgcgagaagatttgccgagaagaatggggggtcgctggggctggagaagtggaacaatggagaactggatggggaggagggtggtgagtggagggcatgttggaggcagatggatgttgggagtagcagaaagcaggtggctcccatgttgagagaggtcatgaaggagtctgcgaggttgtaa

SEQ ID NO: 2598 - protein, 406 aa, Podospora anserina
MAQRVSLKSFLATARKALTAPPSQRPNPLTFVVGNESADLDSICSAVLYAYFRTHAPSSQSALHIPLSNLPLADLALRAELNAIFAPSSNSVTPDDLITLSDLPSPSDLPPSATKWYLVDHNVLTGDLTKRGYDKSVIGCVDHHDDEGIIPSDAQPRVFAKCGSCMSLVLSQCQPIWDQLQSHQEIDEELARVAMAPILIDTVKLTSKDKTTDWDVNAAAYAEEKLVATLSVARSNRQRYDREKYFDHLSELKDSILHLSYRDILRKDYKKWTDGSLNLGISTVVQGFETCLAEVGDKQTFLAALKDWAKEQQLDIAAVMTVSKPGGVFTRELLVWGLGGQDAVKVARRFAEKNGGSLGLEKWNNGELDGEEGGEWRACWRQMDVGSSRKQVAPMLREVMKESARL

SEQ ID NO: 2599 - DNA, 1098 bp, Drosophila melanogaster
  CDS (1)..(1098)
atgggcaacgaatcgtgtgacttggactccgccgtttcggccgtcactttggcttttgtctacgcgcagcgtcatcgggagcacgactatgtacctatactgaacattcctcgccgggactacccgttgaaaaccgaggtgggccacttgtttgtgaaatgtgggattgccgagcccgtgttgctcttccgagacgatattccccgggaagtggtccaggatgtgaacgttattctcgtggaccaccatgtaagcccgctggcgccaaatgttactgaaattttggatcacaggcccttggaggacagcagtccatccttcaagcagctgccaacactctgccaactggacatagatgcctcggtgggttcctgcgccactctggtggcccagcggtatttggcagaggaccaaccccgatccactagcgtggcccagctgctgcacgccaccatcgtgctggacacaattaattttgcacccgcggccaagcgctacgggccaaaggacgaagccatggtacagaagttggagagcgagcttaaccgtaaggacgctcaaagaagtagcctttttgatgagctagtggctgcaagggcggatattagtaagctaactctcaccgaagttttgcgcaaggatatgaaggtcttgcaaaccgatcgtcaggtggttcccttagctggaatgcccatcctagtcagagattttgtggagaaaagcggcgccgaaaaagccgttcgcgagtttggcgtggagagtaaccttttggttatcctgggaatgtatgtatcacctgccgatggccaggtgcagcgtgacctggccttgatctctctctccggccaaggccaattcgttcaacgcgtccagcaagcactgatggagtctaacgatccaaaattggagttgcgacctcacgaggtggacacccgctttatgggcggctgcttcttgcgccaacacaacgtccaggccaccagaaagcacatcctgcccattgttaagcgagcgctgcttgaatgggaagcggatcacgcctgcgattgtgacgaggtgtacttcttcaaggagaagccgcagctgggactctcttaa

SEQ ID NO: 2600 - protein, 365 aa, Drosophila melanogaster
MGNESCDLDSAVSAVTLAFVYAQRHREHDYVPILNIPRRDYPLKTEVGHLFVKCGIAEPVLLFRDDIPREVVQDVNVILVDHHVSPLAPNVTEILDHRPLEDSSPSFKQLPTLCQLDIDASVGSCATLVAQRYLAEDQPRSTSVAQLLHATIVLDTINFAPAAKRYGPKDEAMVQKLESELNRKDAQRSSLFDELVAARADISKLTLTEVLRKDMKVLQTDRQVVPLAGMPILVRDFVEKSGAEKAVREFGVESNLLVILGMYVSPADGQVQRDLALISLSGQGQFVQRVQQALMESNDPKLELRPHEVDTRFMGGCFLRQHNVQATRKHILPIVKRALLEWEADHACDCDEVYFFKEKPQLGLS

SEQ ID NO: 2601 - DNA, 1155 bp, Schizosaccharomyces pombe
  CDS (1)..(1155)
atgaaattaggcagatttttagaaaacggaagggagcaaatacgaaatctcctcttaaatgcttcgactgtatcgtctgccccgtcttttagctttgttagtggaaatgaatcagcagatcttgacagttgcgctagttcaatcgtatatgcgtattgcctgcaaagaaaacagctgggtaggattgtagtacctttttttaacattcctcgaaaggagctacgtcttaggcctgaactgtcttatttgttgaacttagcatcaatatcttccgatgatattgtctttttagatgatattgtaaaattaccaaaaagaatattcagtaatcctatttatttagttgatcacaattctttggaccgtaaagacctagaaaatttcaacggcagtatcgctggtattatagatcaccacaaagatgaagggggatccttacatgctgatccaagaatcattgaggaatgcggtagctgctgtactttagtttgccgatattttatgcctgtcattagatctctatatgattccaaagtatctgaacttcaccaaacagcaaccaaccttgctgttttggcacttggccctattttaattgatactggaaatttaaaaaatgaaaagactactgataccgatgttaaaatagtaaatgacttatgctcatttgtgccaaaagattgggttcgagatgagttttttgatactctgaaagagaaaaagaagagctgtaagggtttttcttttgatgatctactacgcagggatttaaaacagtattttccggacggaatagtcgtcaattatgccagtgttggaaagggattagattggatcaagaaaaaacgtctcggatgggaagatgaattgaaaagttttgccgaagtgcaaaattctgatttggtaattgttgggttatctctgagtaagaacgacgagtttggtcgtcaattgattttatacaagcgtactgaaaggggagctggtcttgccgattctttcttaaaacttagcaaacaaaatttaggattagaaattattgaagagaaagataatggcgacctcagtatgtggaatcaaagaaattccgctgctagcagaaagaaagtagttcccttacttatggactcagttaaacaagtcgcttcaaaatag

SEQ ID NO: 2602 - protein, 384 aa, Schizosaccharomyces pombe
MKLGRFLENGREQIRNLLLNASTVSSAPSFSFVSGNESADLDSCASSIVYAYCLQRKQLGRIVVPFFNIPRKELRLRPELSYLLNLASISSDDIVFLDDIVKLPKRIFSNPIYLVDHNSLDRKDLENFNGSIAGIIDHHKDEGGSLHADPRIIEECGSCCTLVCRYFMPVIRSLYDSKVSELHQTATNLAVLALGPILIDTGNLKNEKTTDTDVKIVNDLCSFVPKDWVRDEFFDTLKEKKKSCKGFSFDDLLRRDLKQYFPDGIVVNYASVGKGLDWIKKKRLGWEDELKSFAEVQNSDLVIVGLSLSKNDEFGRQLILYKRTERGAGLADSFLKLSKQNLGLEIIEEKDNGDLSMWNQRNSAASRKKVVPLLMDSVKQVASK

SEQ ID NO: 2603 - DNA, 24 bp, Artificial sequence
  primer
atgtcgcctttgagaaagacggtt

SEQ ID NO: 2604 - DNA, 23 bp, Artificial sequence
  primer
tcactcttccaggtttgagtacg

SEQ ID NO: 2605 - protein, 451 aa, Artificial sequence
  consensus sequence
  Variant (2)..(2): Xaa in position 2 is any amino acid
  Variant (5)..(5): Xaa in position 5 is any amino acid
  Variant (7)..(7): Xaa in position 7 is any amino acid
  Variant (9)..(9): Xaa in position 9 is any amino acid
  Variant (12)..(13): Xaa in position 12 to 13 is any amino acid
  Variant (15)..(18): Xaa in position 15 to 18 is any amino acid
  Variant (21)..(31): Xaa in position 21 to 31 is any amino acid
  Variant (32)..(41): Xaa in position 32 to 41 is any or no amino acid
  Variant (43)..(44): Xaa in position 43 to 44 is any amino acid
  Variant (46)..(46): Xaa in position 46 is any amino acid
  Variant (48)..(49): Xaa in position 48 to 49 is any amino acid
  Variant (50)..(54): Xaa in position 50 to 54 is any or no amino acid
  Variant (56)..(57): Xaa in position 56 to 57 is any amino acid
  Variant (60)..(80): Xaa in position 60 to 80 is any amino acid
  Variant (81)..(90): Xaa in position 81 to 90 is any or no amino acid
  Variant (92)..(101): Xaa in position 92 to 101 is any amino acid
  Variant (102)..(110): Xaa in position 102 to 110 is any or no amino acid
  Variant (114)..(122): Xaa in position 114 to 122 is any amino acid
  Variant (123)..(139): Xaa in position 123 to 139 is any or no amino acid
  Variant (141)..(141): Xaa in position 141 is any amino acid
  Variant (143)..(144): Xaa in position 143 to 144 is any amino acid
  Variant (148)..(148): Xaa in position 148 is any amino acid
  Variant (150)..(157): Xaa in position 150 to 157 is any amino acid
  Variant (158)..(164): Xaa in position 158 to 164 is any or no amino acid
  Variant (166)..(171): Xaa in position 166 to 171 is any amino acid
  Variant (175)..(176): Xaa in position 175 to 176 is any amino acid
  Variant (179)..(195): Xaa in position 179 to 195 is any amino acid
  Variant (196)..(216): Xaa in position 196 to 216 is any or no amino acid
  Variant (218)..(224): Xaa in position 218 to 224 is any amino acid
  Variant (227)..(231): Xaa in position 227 to 231 is any amino acid
  Variant (232)..(233): Xaa in position 232 to 233 is any or no amino acid
  Variant (235)..(238): Xaa in position 235 to 238 is any amino acid
  Variant (239)..(239): Xaa in position 239 is any or no amino acid
  Variant (241)..(265): Xaa in position 241 to 265 is any amino acid
  Variant (266)..(286): Xaa in position 266 to 286 is any or no amino acid
  Variant (288)..(298): Xaa in position 288 to 298 is any amino acid
  Variant (299)..(299): Xaa in position 299 is any or no amino acid
  Variant (301)..(301): Xaa in position 301 is any amino acid
  Variant (304)..(304): Xaa in position 304 is any amino acid
  Variant (306)..(341): Xaa in position 306 to 341 is any amino acid
  Variant (342)..(353): Xaa in position 342 to 353 is any or no amino acid
  Variant (355)..(373): Xaa in position 355 to 373 is any amino acid
  Variant (374)..(375): Xaa in position 374 to 375 is any or no amino acid
  Variant (377)..(399): Xaa in position 377 to 399 is any amino acid
  Variant (400)..(404): Xaa in position 400 to 404 is any or no amino acid
  Variant (406)..(420): Xaa in position 406 to 420 is any amino acid
  Variant (421)..(438): Xaa in position 421 to 438 is any or no amino acid
  Variant (440)..(445): Xaa in position 440 to 445 is any amino acid
  Variant (448)..(450): Xaa in position 448 to 450 is any amino acid
VXGNXSXDXDSXXSXXXXAYXXXXXXXXXXXXXXXXXXXXXPXXNXPXXXXXXXDXXLRXXXXXXXXXXXXXXXXXXXXXXXXXXXXXXXDXXXXXXXXXXXXXXXXXXXLVDXXXXXXXXXXXXXXXXXXXXXXXXXXVXGXXDHHXDXXXXXXXXXXXXXXXPXXXXXXGSCXXLVXXXXXXXXXXXXXXXXXXXXXXXXXXXXXXXXXXXXXXLXXXXXXXDTXXXXXXXKXXXXXDXXXXXXXXXXXXXXXXXXXXXXXXXXXXXXXXXXXXXXXXXXXXXXKXXXXXXXXXXXXLXKDXKXXXXXXXXXXXXXXXXXXXXXXXXXXXXXXXXXXXXXXXXXXXXXXXXEXXXXXXXXXXXXXXXXXXXXXRXXXXXXXXXXXXXXXXXXXXXXXXXXXXLXXXXXXXXXXXXXXXXXXXXXXXXXXXXXXXXXQXXXXXXRKXXXP

SEQ ID NO: 2606 - protein, 17 aa, Artificial sequence
  protein pattern
  Variant (3)..(3): Xaa in position 3 is Glu, Pro or Gln
  Variant (5)..(5): Xaa in position 5 is Ala or Cys
  Variant (7)..(7): Xaa in position 7 is Ile, Leu or Met
  Variant (10)..(11): Xaa in position 10 to 11 is any amino acid
  Variant (13)..(16): Xaa in position 13 to 16 is any or no amino acid
GNXSXDXDSXXSXXXXA

SEQ ID NO: 2607 - protein, 14 aa, Artificial sequence
  protein pattern
  Variant (2)..(2): Xaa in position 2 is Arg or Ser
  Variant (3)..(3): Xaa in position 3 is Ile, Leu or Val
  Variant (4)..(4): Xaa in position 4 is Phe, Ile or Val
  Variant (5)..(6): Xaa in position 5 to 6 is any amino acid
  Variant (7)..(7): Xaa in position 7 is Ala, Cys, Asn, Ser or Thr
  Variant (10)..(10): Xaa in position 10 is Cys or Asn
  Variant (11)..(11): Xaa in position 11 is any amino acid
  Variant (12)..(12): Xaa in position 12 is Ala, Ser or Thr
PXXXXXXGSXXXLV

SEQ ID NO: 2608 - protein, 16 aa, Artificial sequence
  protein pattern
  Variant (2)..(6): Xaa in position 2 to 6 is any amino acid
  Variant (7)..(7): Xaa in position 7 is any or no amino acid
  Variant (10)..(10): Xaa in position 10 is any amino acid
  Variant (11)..(11): Xaa in position 11 is Ile or Val
  Variant (12)..(12): Xaa in position 12 is Ala, Leu or Val
  Variant (14)..(14): Xaa in position 14 is any amino acid
  Variant (15)..(15): Xaa in position 15 is Ile, Leu or Val
  Variant (16)..(16): Xaa in position 16 is Glu, Lys or Arg
QXXXXXXRKXXXPXXX

SEQ ID NO: 2609 - DNA, 1836 bp, Saccharomyces cerevisiae
  CDS (1)..(1836)
atggagatattcaaggaagaagaagaagaagctttttcggcgatagaaggtataatatatgcctgtgaggtgtatgaccctgtaccccgtcatttacataaaagcaaaacaaagatcatcaatgctgctaaattaattatagaaacgcatctttcatattatacaatactcaataacatttcagatatacaagcctatctttctacttggcttagggatcttggaacgacaggtccataccaaacaattctttcagaaagtatttctctcatgtttgaccgcactgtatctatcttcaggaaatgtacgatagagggaggttttccacatttgatcgcacgtctttatctcagattgaaaagctaccagaagctcttaaacgatgcaggattaaagaattttttttcaagctacgattatgctttcggggttgcatacaaccttgtaaattgctctgaatacaggtatgacgaagttcattacatatcgaacggcacttactcattagttgcatcgatgaagatagatcctgctgaagtcattaaaagggaacattttaggcttacaattccgaaatttaacatatctaatatattaattgaaatttttcatttgctcgatggattagcattttttaaggtgaaccctgatagtttatctatatctacagcttcagcagaaacaatctttcgcagtatctccgaaggtaatcatcaggtcctagaattggggagaagtttaatgtttccattgttgaggactggagattttgaaatctgtcgtattgacgacgcgggagctgtcataacatttacagaagcgaaggatgtaaaactagaaataatcagtctggatgaagtttcctgggtaatgcagtggaaatcttgtcttcaaaattatgagagaagggcagcaaatgacagttcatttatcaaaacacacctacaatttaagaaggccaacaatttcaatgaagataataatgggctaggactaattgtagacagaaatattccaacagatgattttacgctagcttctacaaaccgtcaaagtcccccgccttcaaatactggttgttcattacacaggtctaaacccttgcatatccctttatcatctgttattcgtgaagacttttatgatagctctctaaatgagcgtatatctaaagacggagatagcagttgtgaatccttcagtggcgccgaaagtatcttatcagactacgattttcatgataatgaattttttaacaaccagtcacctcattatttttcagaacacatagacaataactcgagagaggtggtaataacagatgaaaatacgataatatctttggaaaatacccaagtaagtcggtggtcaaattactcatggcaaaaaatttcaccgcatcaattacaggtctctattatccaactgcgcatgggaaacttcattgtggcttatgattctgattataaccttcatcagttcaaaattcgtttgtgtgacgatataaaatgtatacaatccacagagcaagacatacaaatacgtgtcccgctcggcgcaataatgtgcagcgtcactggtatcttgaatattaggacgaaggacgctgacaagttgcttcgggtattaagcttttataccactgaccacacggaagctgtatcgcactcaaacaatcaagatgctactgcaagtccactttcgtcagtttcatcagcaatggatctcaagcattcattacagaaatgttcctctacaataatgccccaagagttgacgcaggacgtcatcggttcaaaatcagacctaatcagtaatattcgtcaaaaaatataa

SEQ ID NO: 2610 - protein, 611 aa, Saccharomyces cerevisiae
MEIFKEEEEEAFSAIEGIIYACEVYDPVPRHLHKSKTKIINAAKLIIETHLSYYTILNNISDIQAYLSTWLRDLGTTGPYQTILSESISLMFDRTVSIFRKCTIEGGFPHLIARLYLRLKSYQKLLNDAGLKNFFSSYDYAFGVAYNLVNCSEYRYDEVHYISNGTYSLVASMKIDPAEVIKREHFRLTIPKFNISNILIEIFHLLDGLAFFKVNPDSLSISTASAETIFRSISEGNHQVLELGRSLMFPLLRTGDFEICRIDDAGAVITFTEAKDVKLEIISLDEVSWVMQWKSCLQNYERRAANDSSFIKTHLQFKKANNFNEDNNGLGLIVDRNIPTDDFTLASTNRQSPPPSNTGCSLHRSKPLHIPLSSVIREDFYDSSLNERISKDGDSSCESFSGAESILSDYDFHDNEFFNNQSPHYFSEHIDNNSREVVITDENTIISLENTQVSRWSNYSWQKISPHQLQVSIIQLRMGNFIVAYDSDYNLHQFKIRLCDDIKCIQSTEQDIQIRVPLGAIMCSVTGILNIRTKDADKLLRVLSFYTTDHTEAVSHSNNQDATASPLSSVSSAMDLKHSLQKCSSTIMPQELTQDVIGSKSDLISNIRQKI

SEQ ID NO: 2611 - DNA, 1809 bp, Saccharomyces pastorianus
  CDS (1)..(1809)
atggaattattaaagcgcgaagaggaaaagacgatctcgacgttaaaagccattatttatggttgtcaaacatatggatcgataccgcatcatttacatgaacgtttaacaaaggtcgtcagtgctgctagatcgatcgtcgctacttattcatttcacggctcaatcggtggtatctcagatgtgagggcctatctctcagtttggcttaaagatctgggggttttacgtttatatcaaacgattctattggaaagtatttccttgatactcgatccagctacacccatttttaggaaatgctcggaaatggatgattttccgcatttgattatacgtatttactccagattagaaggctaccagaaccttataaacgataaaatattagccaagttttttgtagactttgattttacatttagggccgtatacaataaggcaaactgtaccacttacacctatgataacgttcatcttatatcggacgaagcgtatccattggttgcgtctatgaagataaatcttacgcatgtcatcaaaagaggttattttagactctcaatcccgacattaaacgtttccgatatattagtcgagatccttcatatacccgatggattggcattttttaaagtttgctatggcaatctgcccaattcggatgattctatcaaaactattttcaacagcgtttctgaagagaatcaccaaatcctagaattgggaaaaagtttgatgtatccgattttcaggattggagatctagagatcaacaacattaatgaaatcggagcagtgataacgttttccgaagtggaaaacttaaaattggaaatacttagcctggatcaaatctcatggataacacaatggaaatcgagtttccaaaagttcgcagcaaaggcggctaatgacagtacattcatcaaaggccacatgagattcaataaactaaacaacattgatgaaattaatattgggctaggtctcaatctcgatgtggaggcccaaggagagaacttcgtaccattatctgcagaaaacaaaagatcctcgccctcaaatacagtttgctcattacacaggtcaaaacctctacaaattcctttatcgtttgctattcaaaacgattttgatgatatttctttgaaggggcatatatccctcgatgaagatatcagtgatgaatctgttagtggtttagagagtagtatatcagactatgagtttcatgacaacacgtttggtagttaccaatcaatttcttacccttctacggatgtagaaaataactcaatggacatggtaatcaccgatgaaaacactgtcctttctatcaagaatgttcgaataagtcattggtcaaacaactcgtggaaaaaaatctcttcggctcaactgcaactcagtgttattcgactacgtatgggaagctttatggtagctcatgaccctgagttcaagaatctccaccatttgattattcgtttgagtgatgatataaaatgtacgcaatcaacaaaacaggacatacaattacgtgtcccaccaaacgaattaatgtgcacctttaccggcattctgaatatcaggtctagcgacaacgataagttactaccattattaaacttttatacgacatgccatgcggaaactatgtcacattcaagcaccatggaatctgtttcaagtgaagtttcctctgtttcatcagcgatggaacacaggcattcgatactgaagtgctcttcagtaataataccccatactttgacgcaggacgtcatcgattcaacacttgactag

SEQ ID NO: 2612 - protein, 602 aa, Saccharomyces pastorianus
MELLKREEEKTISTLKAIIYGCQTYGSIPHHLHERLTKVVSAARSIVATYSFHGSIGGISDVRAYLSVWLKDLGVLRLYQTILLESISLILDPATPIFRKCSEMDDFPHLIIRIYSRLEGYQNLINDKILAKFFVDFDFTFRAVYNKANCTTYTYDNVHLISDEAYPLVASMKINLTHVIKRGYFRLSIPTLNVSDILVEILHIPDGLAFFKVCYGNLPNSDDSIKTIFNSVSEENHQILELGKSLMYPIFRIGDLEINNINEIGAVITFSEVENLKLEILSLDQISWITQWKSSFQKFAAKAANDSTFIKGHMRFNKLNNIDEINIGLGLNLDVEAQGENFVPLSAENKRSSPSNTVCSLHRSKPLQIPLSFAIQNDFDDISLKGHISLDEDISDESVSGLESSISDYEFHDNTFGSYQSISYPSTDVENNSMDMVITDENTVLSIKNVRISHWSNNSWKKISSAQLQLSVIRLRMGSFMVAHDPEFKNLHHLIIRLSDDIKCTQSTKQDIQLRVPPNELMCTFTGILNIRSSDNDKLLPLLNFYTTCHAETMSHSSTMESVSSEVSSVSSAMEHRHSILKCSSVIIPHTLTQDVIDSTLD

SEQ ID NO: 2613 - DNA, 1836 bp, Saccharomyces pastorianus
  CDS (1)..(1836)
atggagatattcaaggaagaagaagaagaagctttttcggtgatagaaggtataatatatgcctgtgaggtgtatgaccctgtaccccgtcatttacataaaagcaaaacaaagatcatcaatgccgctaaattaattatagaaacgcatctttcatactatacaatactcaataacatttcagatatacaagcctatctttttacttggcttagggatcttggaacgacaggttcataccaaacaattctttcagaaagtatttctctcatgtttgaccgcactgtatctatcttcaggaaatgtacgatagagggaggttttccacatttgatcgcacggctttatctcagattgaaaagctaccagaagctcttaaacgatgcaggattaaagatttttttttcaagctacgattatgctttcggggctgcatacaaccttgtaaattgctctgaatacaggtatgacgaagttcattacatatcgaacggcactcactcattagttgcatcgatgaagatagatcctgctgaagtcattaaaagggaacattttaggcttacaattccgaaatttaacatatctaatatattaattgaaatttttcatttgctcgatggattagcattttttaaggtgaaccctgatagtttatctatatctactgcttcagcagaaacaatctttcacagtatctccgaaggtaatcatcaggtcctagaattggggagaagtttaatgtttccattgttgaggactggagattttgaaatctgtcgtactgacgacgcgggagctgtcataacatttacagaagcgaaggatgtaaaactagaaataatcagtctggatgaagtttcctgggtaatgcagtggaaatcttgtcttcaaaattatgagagaaagacagcaaatgacagttcatttatcaaaacacacctacaatttaagaaggccaacaatttcaatgaagataataatgggctaggactaattgtagacagaaatattccaacagatgattttatgctagcttctacaaaccgtcaaagtcccccgccttcaaatactggttgttcattacacaggtctaaacccttgcatatccctttatcatctgttattcgtgaagacttttatgatagctctctaaatgagcgtatatctaaagacggagatagcagttctgaatccttcagtggtgccgaaagtatcttatcagactacgattttcatgataatgaattttttaacaaccagtcacctcattatttttcagaacacatagacaataactcgagagaggtggtaataacagatgaaaatacgataatatctttggaaaatacccaagtaagtcggtggtcaaattactcatggcaaaaaatttcaccgcatcaattacaggtctctattatccaactgcgcatgggaaacttcattgtggcttataattctgatcataaccttcatcagttcaaaattcgtttgtgtgacgatataaaatgtatacaatccacagagcaagacatacaaatacgtgtcccgctcggagcaataatgtgcagcgtcactggtatcttgaatattaggacgaaggacgctgacaagttacttcgggtattaagcttttataccactgaccacacggaagctgtatcgcactcaaacaatcaaggtgctactgcaagtccactttcgtcagtttcatcagcaatggatctcaagcattcattacagaaatgttcctctacaataatgccccaagagttgacgcaggacgtcatcggttcaaaatcagacctaatcagtaatattcgtcaaaaaatataa

SEQ ID NO: 2614 - protein, 611 aa, Saccharomyces pastorianus
MEIFKEEEEEAFSVIEGIIYACEVYDPVPRHLHKSKTKIINAAKLIIETHLSYYTILNNISDIQAYLFTWLRDLGTTGSYQTILSESISLMFDRTVSIFRKCTIEGGFPHLIARLYLRLKSYQKLLNDAGLKIFFSSYDYAFGAAYNLVNCSEYRYDEVHYISNGTHSLVASMKIDPAEVIKREHFRLTIPKFNISNILIEIFHLLDGLAFFKVNPDSLSISTASAETIFHSISEGNHQVLELGRSLMFPLLRTGDFEICRTDDAGAVITFTEAKDVKLEIISLDEVSWVMQWKSCLQNYERKTANDSSFIKTHLQFKKANNFNEDNNGLGLIVDRNIPTDDFMLASTNRQSPPPSNTGCSLHRSKPLHIPLSSVIREDFYDSSLNERISKDGDSSSESFSGAESILSDYDFHDNEFFNNQSPHYFSEHIDNNSREVVITDENTIISLENTQVSRWSNYSWQKISPHQLQVSIIQLRMGNFIVAYNSDHNLHQFKIRLCDDIKCIQSTEQDIQIRVPLGAIMCSVTGILNIRTKDADKLLRVLSFYTTDHTEAVSHSNNQGATASPLSSVSSAMDLKHSLQKCSSTIMPQELTQDVIGSKSDLISNIRQKI

SEQ ID NO: 2615 - DNA, 25 bp, Artificial sequence
  primer
atggagatattcaaggaagaagaag

SEQ ID NO: 2616 - DNA, 29 bp, Artificial sequence
  primer
ttatattttttgacgaatattactgatta

SEQ ID NO: 2617 - protein, 603 aa, Artificial sequence
  consensus sequence
  Variant (3)..(4): Xaa in position 3 to 4 is any amino acid
  Variant (6)..(6): Xaa in position 6 is any amino acid
  Variant (10)..(12): Xaa in position 10 to 12 is any amino acid
  Variant (14)..(17): Xaa in position 14 to 17 is any amino acid
  Variant (21)..(21): Xaa in position 21 is any amino acid
  Variant (23)..(24): Xaa in position 23 to 24 is any amino acid
  Variant (26)..(28): Xaa in position 26 to 28 is any amino acid
  Variant (30)..(30): Xaa in position 30 is any amino acid
  Variant (34)..(36): Xaa in position 34 to 36 is any amino acid
  Variant (39)..(41): Xaa in position 39 to 41 is any amino acid
  Variant (44)..(45): Xaa in position 44 to 45 is any amino acid
  Variant (47)..(48): Xaa in position 47 to 48 is any amino acid
  Variant (50)..(50): Xaa in position 50 is any amino acid
  Variant (51)..(51): Xaa in position 51 is any or no amino acid
  Variant (53)..(59): Xaa in position 53 to 59 is any amino acid
  Variant (63)..(64): Xaa in position 63 to 64 is any amino acid
  Variant (68)..(69): Xaa in position 68 to 69 is any amino acid
  Variant (72)..(72): Xaa in position 72 is any amino acid
  Variant (76)..(79): Xaa in position 76 to 79 is any amino acid
  Variant (85)..(85): Xaa in position 85 is any amino acid
  Variant (91)..(92): Xaa in position 91 to 92 is any amino acid
  Variant (94)..(97): Xaa in position 94 to 97 is any amino acid
  Variant (103)..(107): Xaa in position 103 to 107 is any amino acid
  Variant (113)..(113): Xaa in position 113 is any amino acid
  Variant (115)..(115): Xaa in position 115 is any amino acid
  Variant (117)..(117): Xaa in position 117 is any amino acid
  Variant (120)..(121): Xaa in position 120 to 121 is any amino acid
  Variant (124)..(124): Xaa in position 124 is any amino acid
  Variant (126)..(126): Xaa in position 126 is any amino acid
  Variant (129)..(130): Xaa in position 129 to 130 is any amino acid
  Variant (132)..(133): Xaa in position 132 to 133 is any amino acid
  Variant (136)..(138): Xaa in position 136 to 138 is any amino acid
  Variant (140)..(141): Xaa in position 140 to 141 is any amino acid
  Variant (143)..(145): Xaa in position 143 to 145 is any amino acid
  Variant (148)..(149): Xaa in position 148 to 149 is any amino acid
  Variant (152)..(153): Xaa in position 152 to 153 is any amino acid
  Variant (155)..(155): Xaa in position 155 is any amino acid
  Variant (158)..(158): Xaa in position 158 is any amino acid
  Variant (161)..(161): Xaa in position 161 is any amino acid
  Variant (164)..(168): Xaa in position 164 to 168 is any amino acid
  Variant (176)..(179): Xaa in position 176 to 179 is any amino acid
  Variant (184)..(185): Xaa in position 184 to 185 is any amino acid
  Variant (189)..(189): Xaa in position 189 is any amino acid
  Variant (192)..(193): Xaa in position 192 to 193 is any amino acid
  Variant (195)..(195): Xaa in position 195 is any amino acid
  Variant (197)..(197): Xaa in position 197 is any amino acid
  Variant (200)..(200): Xaa in position 200 is any amino acid
  Variant (203)..(203): Xaa in position 203 is any amino acid
  Variant (205)..(206): Xaa in position 205 to 206 is any amino acid
  Variant (215)..(218): Xaa in position 215 to 218 is any amino acid
  Variant (220)..(221): Xaa in position 220 to 221 is any amino acid
  Variant (223)..(224): Xaa in position 223 to 224 is any amino acid
  Variant (226)..(227): Xaa in position 226 to 227 is any amino acid
  Variant (231)..(231): Xaa in position 231 is any amino acid
  Variant (233)..(233): Xaa in position 233 is any amino acid
  Variant (236)..(236): Xaa in position 236 is any amino acid
  Variant (240)..(240): Xaa in position 240 is any amino acid
  Variant (245)..(245): Xaa in position 245 is any amino acid
  Variant (249)..(249): Xaa in position 249 is any amino acid
  Variant (251)..(252): Xaa in position 251 to 252 is any amino acid
  Variant (254)..(254): Xaa in position 254 is any amino acid
  Variant (257)..(257): Xaa in position 257 is any amino acid
  Variant (260)..(265): Xaa in position 260 to 265 is any amino acid
  Variant (272)..(272): Xaa in position 272 is any amino acid
  Variant (274)..(277): Xaa in position 274 to 277 is any amino acid
  Variant (282)..(282): Xaa in position 282 is any amino acid
  Variant (286)..(287): Xaa in position 286 to 287 is any amino acid
  Variant (290)..(291): Xaa in position 290 to 291 is any amino acid
  Variant (296)..(297): Xaa in position 296 to 297 is any amino acid
  Variant (299)..(304): Xaa in position 299 to 304 is any amino acid
  Variant (309)..(309): Xaa in position 309 is any amino acid
  Variant (313)..(313): Xaa in position 313 is any amino acid
  Variant (315)..(316): Xaa in position 315 to 316 is any amino acid
  Variant (318)..(318): Xaa in position 318 is any amino acid
  Variant (320)..(320): Xaa in position 320 is any amino acid
  Variant (323)..(324): Xaa in position 323 to 324 is any amino acid
  Variant (326)..(326): Xaa in position 326 is any amino acid
  Variant (328)..(328): Xaa in position 328 is any amino acid
  Variant (333)..(334): Xaa in position 333 to 334 is any amino acid
  Variant (336)..(342): Xaa in position 336 to 342 is any amino acid
  Variant (344)..(346): Xaa in position 344 to 346 is any amino acid
  Variant (348)..(354): Xaa in position 348 to 354 is any amino acid
  Variant (359)..(359): Xaa in position 359 is any amino acid
  Variant (369)..(369): Xaa in position 369 is any amino acid
  Variant (374)..(375): Xaa in position 374 to 375 is any amino acid
  Variant (377)..(378): Xaa in position 377 to 378 is any amino acid
  Variant (381)..(381): Xaa in position 381 is any amino acid
  Variant (383)..(383): Xaa in position 383 is any amino acid
  Variant (386)..(388): Xaa in position 386 to 388 is any amino acid
  Variant (391)..(391): Xaa in position 391 is any amino acid
  Variant (393)..(393): Xaa in position 393 is any amino acid
  Variant (395)..(395): Xaa in position 395 is any amino acid
  Variant (397)..(397): Xaa in position 397 is any amino acid
  Variant (400)..(400): Xaa in position 400 is any amino acid
  Variant (403)..(403): Xaa in position 403 is any amino acid
  Variant (406)..(407): Xaa in position 406 to 407 is any amino acid
  Variant (411)..(411): Xaa in position 411 is any amino acid
  Variant (416)..(416): Xaa in position 416 is any amino acid
  Variant (418)..(420): Xaa in position 418 to 420 is any amino acid
  Variant (423)..(424): Xaa in position 423 to 424 is any amino acid
  Variant (426)..(426): Xaa in position 426 is any amino acid
  Variant (428)..(431): Xaa in position 428 to 431 is any amino acid
  Variant (435)..(437): Xaa in position 435 to 437 is any amino acid
  Variant (445)..(446): Xaa in position 445 to 446 is any amino acid
  Variant (448)..(449): Xaa in position 448 to 449 is any amino acid
  Variant (451)..(453): Xaa in position 451 to 453 is any amino acid
  Variant (455)..(455): Xaa in position 455 is any amino acid
  Variant (459)..(459): Xaa in position 459 is any amino acid
  Variant (462)..(462): Xaa in position 462 is any amino acid
  Variant (466)..(467): Xaa in position 466 to 467 is any amino acid
  Variant (471)..(471): Xaa in position 471 is any amino acid
  Variant (473)..(473): Xaa in position 473 is any amino acid
  Variant (475)..(475): Xaa in position 475 is any amino acid
  Variant (480)..(480): Xaa in position 480 is any amino acid
  Variant (482)..(482): Xaa in position 482 is any amino acid
  Variant (485)..(490): Xaa in position 485 to 490 is any amino acid
  Variant (491)..(491): Xaa in position 491 is any or no amino acid
  Variant (494)..(496): Xaa in position 494 to 496 is any amino acid
  Variant (500)..(500): Xaa in position 500 is any amino acid
  Variant (506)..(506): Xaa in position 506 is any amino acid
  Variant (510)..(510): Xaa in position 510 is any amino acid
  Variant (515)..(515): Xaa in position 515 is any amino acid
  Variant (519)..(522): Xaa in position 519 to 522 is any amino acid
  Variant (525)..(526): Xaa in position 525 to 526 is any amino acid
  Variant (534)..(535): Xaa in position 534 to 535 is any amino acid
  Variant (537)..(537): Xaa in position 537 is any amino acid
  Variant (542)..(543): Xaa in position 542 to 543 is any amino acid
  Variant (545)..(545): Xaa in position 545 is any amino acid
  Variant (550)..(550): Xaa in position 550 is any amino acid
  Variant (552)..(552): Xaa in position 552 is any amino acid
  Variant (554)..(555): Xaa in position 554 to 555 is any amino acid
  Variant (559)..(565): Xaa in position 559 to 565 is any amino acid
  Variant (567)..(568): Xaa in position 567 to 568 is any amino acid
  Variant (576)..(578): Xaa in position 576 to 578 is any amino acid
  Variant (581)..(582): Xaa in position 581 to 582 is any amino acid
  Variant (587)..(587): Xaa in position 587 is any amino acid
  Variant (589)..(589): Xaa in position 589 is any amino acid
  Variant (591)..(592): Xaa in position 591 to 592 is any amino acid
  Variant (599)..(599): Xaa in position 599 is any amino acid
  Variant (601)..(602): Xaa in position 601 to 602 is any amino acid
MEXXKXEEEXXXSXXXXIIYXCXXYXXXPXHLHXXXTKXXXAAXXIXXTXXSXXXXXXXISDXXAYLXXWLXDLGXXXXYQTILXESISLXXDXXXXIFRKCXXXXXFPHLIXRXYXRLXXYQXLXNDXXLXXFFXXXDXXFXXXYNXXNCXXYXYDXVHXISXXXXXLVASMKIXXXXVIKRXXFRLXIPXXNXSXILXEIXHXXDGLAFFKVXXXXLXXSXXSXXTIFXSXSEXNHQXLELGXSLMXPXXRXGDXEIXXXXXXGAVITFXEXXXXKLEIXSLDXXSWXXQWKSXXQXXXXXXANDSXFIKXHXXFXKXNNXXEXNXGLGLXXDXXXXXXXFXXXSXXXXXXXPSNTXCSLHRSKPLXIPLSXXIXXDFXDXSLXXXISXDXDXSXESXSGXESXXSDYXFHDNXFXXXQSXXYXSXXXXNNSXXXVITDENTXXSXXNXXXSXWSNXSWXKISXXQLQXSXIXLRMGXFXVAXXXXXXXLHXXXIRLXDDIKCXQSTXQDIQXRVPXXXXMCXXTGILNIRXXDXDKLLXXLXFYTTXHXEXXSHSXXXXXXXSXXSSVSSAMXXXHSXXKCSSXIXPXXLTQDVIXSXXD

SEQ ID NO: 2618 - protein, 59 aa, Artificial sequence
  protein pattern
  Variant (2)..(2): Xaa in position 2 is any amino acid
  Variant (8)..(8): Xaa in position 8 is any amino acid
  Variant (12)..(12): Xaa in position 12 is Glu or Lys
  Variant (17)..(17): Xaa in position 17 is Ile or Leu
  Variant (21)..(21): Xaa in position 21 is Leu or Pro
  Variant (22)..(22): Xaa in position 22 is Gly or Asn
  Variant (23)..(23): Xaa in position 23 is Ala or Glu
  Variant (24)..(24): Xaa in position 24 is Ile or Leu
  Variant (27)..(27): Xaa in position 27 is Ser or Thr
  Variant (28)..(28): Xaa in position 28 is Phe or Val
  Variant (36)..(36): Xaa in position 36 is Ser or Thr
  Variant (37)..(37): Xaa in position 37 is any amino acid
  Variant (39)..(39): Xaa in position 39 is Ala or Asn
  Variant (44)..(44): Xaa in position 44 is any amino acid
  Variant (45)..(45): Xaa in position 45 is Leu or Val
  Variant (47)..(47): Xaa in position 47 is Asn or Ser
  Variant (52)..(52): Xaa in position 52 is Cys or Asp
  Variant (54)..(54): Xaa in position 54 is Ala or Thr
  Variant (56)..(56): Xaa in position 56 is Ala or Thr
  Variant (57)..(57): Xaa in position 57 is Met or Val
LXDDIKCXQSTXQDIQXRVPXXXXMCXXTGILNIRXXDXDKLLXXLXFYTTXHXEXXSH

SEQ ID NO: 2619 - protein, 60 aa, Artificial sequence
  protein pattern
  Variant (2)..(3): Xaa in position 2 to 3 is any amino acid
  Variant (6)..(6): Xaa in position 6 is Ile or Val
  Variant (11)..(11): Xaa in position 11 is Lys or Arg
  Variant (15)..(15): Xaa in position 15 is Phe or Tyr
  Variant (17)..(17): Xaa in position 17 is Ile or Leu
  Variant (18)..(18): Xaa in position 18 is Phe or Leu
  Variant (20)..(20): Xaa in position 20 is any amino acid
  Variant (23)..(23): Xaa in position 23 is Phe or Leu
  Variant (26)..(26): Xaa in position 26 is Cys or Asn
  Variant (27)..(27): Xaa in position 27 is Asn or Arg
  Variant (28)..(28): Xaa in position 28 is any amino acid
  Variant (29)..(29): Xaa in position 29 is Asp or Asn
  Variant (30)..(30): Xaa in position 30 is Asp or Glu
  Variant (31)..(31): Xaa in position 31 is Ala or Ile
  Variant (38)..(38): Xaa in position 38 is Ser or Thr
  Variant (40)..(40): Xaa in position 40 is Ala or Val
  Variant (41)..(41): Xaa in position 41 is Glu or Lys
  Variant (42)..(42): Xaa in position 42 is Asp or Asn
  Variant (43)..(43): Xaa in position 43 is Leu or Val
  Variant (48)..(48): Xaa in position 48 is Ile or Leu
  Variant (52)..(52): Xaa in position 52 is Glu or Gln
  Variant (53)..(53): Xaa in position 53 is Ile or Val
  Variant (56)..(56): Xaa in position 56 is Ile or Val
  Variant (57)..(57): Xaa in position 57 is any amino acid
EXXHQXLELGXSLMXPXXRXGDXEIXXXXXXGAVITFXEXXXXKLEIXSLDXXSWXXQWK

SEQ ID NO: 2620 - protein, 61 aa, Artificial sequence
  protein pattern
  Variant (3)..(3): Xaa in position 3 is any amino acid
  Variant (4)..(4): Xaa in position 4 is any or no amino acid
  Variant (6)..(7): Xaa in position 6 to 7 is any amino acid
  Variant (8)..(8): Xaa in position 8 is any or no amino acid
  Variant (14)..(14): Xaa in position 14 is Ala or Ile
  Variant (16)..(16): Xaa in position 16 is Ile or Leu
  Variant (18)..(18): Xaa in position 18 is any amino acid
  Variant (21)..(21): Xaa in position 21 is Glu or Lys
  Variant (22)..(22): Xaa in position 22 is Gly or Ser
  Variant (25)..(25): Xaa in position 25 is any amino acid
  Variant (27)..(27): Xaa in position 27 is Ile or Leu
  Variant (30)..(30): Xaa in position 30 is any amino acid
  Variant (31)..(31): Xaa in position 31 is Gly or Ile
  Variant (33)..(34): Xaa in position 33 to 34 is any amino acid
  Variant (37)..(37): Xaa in position 37 is Ser or Val
  Variant (38)..(38): Xaa in position 38 is Asp or Ser
  Variant (39)..(39): Xaa in position 39 is Phe or Tyr
  Variant (41)..(41): Xaa in position 41 is Phe or Tyr
  Variant (42)..(42): Xaa in position 42 is Ala or Thr
  Variant (44)..(44): Xaa in position 44 is any amino acid
  Variant (45)..(46): Xaa in position 45 to 46 is Ala or Val
  Variant (49)..(49): Xaa in position 49 is any amino acid
  Variant (50)..(50): Xaa in position 50 is Ala or Val
  Variant (53)..(53): Xaa in position 53 is Ser or Thr
  Variant (54)..(54): Xaa in position 54 is Glu or Thr
  Variant (56)..(56): Xaa in position 56 is any amino acid
  Variant (59)..(59): Xaa in position 59 is Glu or Asn
KCXXEXXXFPHLIXRXYXRLXXYQXLXNDXXLXXFFXXXDXXFXXXYNXXNCXXYXYDXVH

SEQ ID NO: 2621 - protein, 60 aa, Artificial sequence
  protein pattern
  Variant (2)..(2): Xaa in position 2 is any amino acid
  Variant (3)..(4): Xaa in position 3 to 4 is any or no amino acid
  Variant (6)..(7): Xaa in position 6 to 7 is any or no amino acid
  Variant (11)..(11): Xaa in position 11 is any amino acid
  Variant (12)..(12): Xaa in position 12 is Asp or Glu
  Variant (13)..(13): Xaa in position 13 is Met or Val
  Variant (21)..(21): Xaa in position 21 is Ile or Val
  Variant (22)..(22): Xaa in position 22 is Ile or Leu
  Variant (24)..(24): Xaa in position 24 is Ile or Leu
  Variant (25)..(25): Xaa in position 25 is Glu or Lys
  Variant (27)..(27): Xaa in position 27 is Thr or Val
  Variant (28)..(28): Xaa in position 28 is Gln or Arg
  Variant (29)..(29): Xaa in position 29 is Ile or Val
  Variant (31)..(31): Xaa in position 31 is His or Arg
  Variant (35)..(35): Xaa in position 35 is any amino acid
  Variant (38)..(38): Xaa in position 38 is any amino acid
  Variant (42)..(42): Xaa in position 42 is Pro or Ser
  Variant (43)..(43): Xaa in position 43 is any amino acid
  Variant (47)..(47): Xaa in position 47 is Leu or Val
  Variant (49)..(49): Xaa in position 49 is Ile or Val
  Variant (51)..(51): Xaa in position 51 is Gln or Arg
  Variant (56)..(56): Xaa in position 56 is Asn or Ser
  Variant (58)..(58): Xaa in position 58 is Ile or Met
SXXXDXXNNSXXXVITDENTXXSXXNXXXSXWSNXSWXKISXXQLQXSXIXLRMGXFXVA

SEQ ID NO: 2622 - protein, 60 aa, Artificial sequence
  protein pattern
  Variant (2)..(2): Xaa in position 2 is any amino acid
  Variant (4)..(4): Xaa in position 4 is Leu or Met
  Variant (5)..(5): Xaa in position 5 is Gln or Arg
  Variant (7)..(7): Xaa in position 7 is any or no amino acid
  Variant (9)..(9): Xaa in position 9 is any amino acid
  Variant (12)..(13): Xaa in position 12 to 13 is any amino acid
  Variant (15)..(15): Xaa in position 15 is any amino acid
  Variant (17)..(17): Xaa in position 17 is any amino acid
  Variant (22)..(22): Xaa in position 22 is any amino acid
  Variant (23)..(23): Xaa in position 23 is Leu or Val
  Variant (25)..(25): Xaa in position 25 is any amino acid
  Variant (26)..(26): Xaa in position 26 is Glu or Asn
  Variant (27)..(27): Xaa in position 27 is Ala or Ile
  Variant (28)..(28): Xaa in position 28 is Pro or Gln
  Variant (29)..(29): Xaa in position 29 is Gly or Thr
  Variant (30)..(30): Xaa in position 30 is Asp or Glu
  Variant (31)..(31): Xaa in position 31 is Asp or Asn
  Variant (33)..(33): Xaa in position 33 is any amino acid
  Variant (34)..(34): Xaa in position 34 is Leu or Pro
  Variant (35)..(35): Xaa in position 35 is Ala or Leu
  Variant (37)..(37): Xaa in position 37 is Ala or Thr
  Variant (38)..(38): Xaa in position 38 is Glu or Asn
  Variant (39)..(39): Xaa in position 39 is Asn or Arg
  Variant (40)..(40): Xaa in position 40 is any amino acid
  Variant (41)..(41): Xaa in position 41 is Arg or Ser
  Variant (42)..(43): Xaa in position 42 to 43 is Pro or Ser
  Variant (48)..(48): Xaa in position 48 is Gly or Val
  Variant (58)..(58): Xaa in position 58 is any amino acid
KXHXXFXKXNNXXEXNXGLGLXXDXXXXXXXFXXXSXXXXXXXPSNTXCSLHRSKPLXIP

SEQ ID NO: 2623 - protein, 56 aa, Artificial sequence
  protein pattern
  Variant (3)..(3): Xaa in position 3 is Asp or Asn
  Variant (4)..(4): Xaa in position 4 is Glu or Gly
  Variant (5)..(5): Xaa in position 5 is Ala or Thr
  Variant (6)..(6): Xaa in position 6 is His or Tyr
  Variant (7)..(7): Xaa in position 7 is Pro or Ser
  Variant (15)..(15): Xaa in position 15 is Asp or Asn
  Variant (16)..(16): Xaa in position 16 is Leu or Pro
  Variant (17)..(17): Xaa in position 17 is Ala or Thr
  Variant (18)..(18): Xaa in position 18 is Glu or His
  Variant (23)..(23): Xaa in position 23 is Glu or Gly
  Variant (24)..(24): Xaa in position 24 is His or Tyr
  Variant (28)..(28): Xaa in position 28 is Ser or Thr
  Variant (31)..(31): Xaa in position 31 is any amino acid
  Variant (32)..(32): Xaa in position 32 is Phe or Leu
  Variant (34)..(34): Xaa in position 34 is Ile or Val
  Variant (36)..(36): Xaa in position 36 is Asp or Asn
  Variant (39)..(39): Xaa in position 39 is Ile or Val
  Variant (42)..(42): Xaa in position 42 is Phe or Leu
  Variant (44)..(44): Xaa in position 44 is Ile or Leu
  Variant (45)..(45): Xaa in position 45 is Leu or Pro
  Variant (54)..(54): Xaa in position 54 is Cys or Asn
  Variant (55)..(55): Xaa in position 55 is any amino acid
  Variant (56)..(56): Xaa in position 56 is Asp or Gly
ISXXXXXLVASMKIXXXXVIKRXXFRLXIPXXNXSXILXEIXHXXDGLAFFKVXXX

SEQ ID NO: 2624 - protein, 56 aa, Artificial sequence
  protein pattern
  Variant (3)..(3): Xaa in position 3 is Ile or Leu
  Variant (4)..(4): Xaa in position 4 is Phe or Leu
  Variant (6)..(6): Xaa in position 6 is any or no amino acid
  Variant (10)..(12): Xaa in position 10 to 12 is any amino acid
  Variant (13)..(13): Xaa in position 13 is any or no amino acid
  Variant (15)..(15): Xaa in position 15 is Ala, Thr or Val
  Variant (16)..(16): Xaa in position 16 is Ile or Leu
  Variant (17)..(17): Xaa in position 17 is Glu or Lys
  Variant (18)..(18): Xaa in position 18 is Ala or Gly
  Variant (22)..(22): Xaa in position 22 is Ala or Gly
  Variant (24)..(24): Xaa in position 24 is Glu or Gln
  Variant (25)..(25): Xaa in position 25 is Thr or Val
  Variant (27)..(27): Xaa in position 27 is Asp or Gly
  Variant (28)..(28): Xaa in position 28 is Pro or Ser
  Variant (29)..(29): Xaa in position 29 is Ile or Val
  Variant (31)..(31): Xaa in position 31 is His or Arg
  Variant (35)..(35): Xaa in position 35 is Glu or Lys
  Variant (36)..(36): Xaa in position 36 is Arg or Ser
  Variant (37)..(37): Xaa in position 37 is any amino acid
  Variant (40)..(41): Xaa in position 40 to 41 is Ile or Val
  Variant (42)..(42): Xaa in position 42 is Asn or Ser
  Variant (45)..(45): Xaa in position 45 is Lys or Arg
  Variant (46)..(46): Xaa in position 46 is any amino acid
  Variant (48)..(48): Xaa in position 48 is Ile or Val
  Variant (49)..(49): Xaa in position 49 is Ala or Glu
  Variant (51)..(51): Xaa in position 51 is any amino acid
  Variant (52)..(52): Xaa in position 52 is any or no amino acid
  Variant (54)..(54): Xaa in position 54 is Phe or Tyr
  Variant (55)..(55): Xaa in position 55 is His or Tyr
  Variant (56)..(56): Xaa in position 56 is Gly or Thr
MEXXKXEEEXXXXSXXXXIIYXCXXYXXXPXHLHXXXTKXXXAAXXIXXTXXSXXX

SEQ ID NO: 2625 - protein, 39 aa, Artificial sequence
  protein pattern
  Variant (3)..(3): Xaa in position 3 is Ile or Val
  Variant (4)..(4): Xaa in position 4 is Gln or Arg
  Variant (8)..(8): Xaa in position 8 is any amino acid
  Variant (9)..(9): Xaa in position 9 is Thr or Val
  Variant (12)..(12): Xaa in position 12 is Lys or Arg
  Variant (16)..(16): Xaa in position 16 is Thr or Val
  Variant (17)..(19): Xaa in position 17 to 19 is any amino acid
  Variant (25)..(25): Xaa in position 25 is any amino acid
  Variant (31)..(31): Xaa in position 31 is Ile or Met
  Variant (32)..(32): Xaa in position 32 is Phe or Leu
  Variant (34)..(34): Xaa in position 34 is any amino acid
  Variant (35)..(35): Xaa in position 35 is any or no amino acid
  Variant (37)..(37): Xaa in position 37 is Pro or Val
  Variant (38)..(38): Xaa in position 38 is any amino acid
  Variant (39)..(39): Xaa in position 39 is Phe or Ile
SDXXAYLXXWLXDLGXXXXYQTILXESISLXXDXXTXXX

SEQ ID NO: 2626 - protein, 37 aa, Artificial sequence
  protein pattern
  Variant (2)..(4): Xaa in position 2 to 4 is any amino acid
  Variant (5)..(5): Xaa in position 5 is any or no amino acid
  Variant (12)..(12): Xaa in position 12 is Asp or Glu
  Variant (13)..(13): Xaa in position 13 is any amino acid
  Variant (14)..(14): Xaa in position 14 is Lys or Arg
  Variant (17)..(17): Xaa in position 17 is any or no amino acid
  Variant (19)..(19): Xaa in position 19 is any or no amino acid
  Variant (24)..(24): Xaa in position 24 is Thr or Val
  Variant (26)..(26): Xaa in position 26 is Ile or Met
  Variant (28)..(28): Xaa in position 28 is any amino acid
  Variant (29)..(29): Xaa in position 29 is Glu or Thr
  Variant (36)..(36): Xaa in position 36 is Asp or Gly
SXXXXSVSSAMXXXHSXLXKCSSXIXPXXLTQDVIXS

SEQ ID NO: 2627 - protein, 40 aa, Artificial sequence
  protein pattern
  Variant (3)..(3): Xaa in position 3 is any amino acid
  Variant (5)..(5): Xaa in position 5 is any or no amino acid
  Variant (7)..(7): Xaa in position 7 is any or no amino acid
  Variant (9)..(9): Xaa in position 9 is any amino acid
  Variant (10)..(10): Xaa in position 10 is Glu or Gly
  Variant (11)..(11): Xaa in position 11 is His or Arg
  Variant (14)..(14): Xaa in position 14 is any amino acid
  Variant (16)..(16): Xaa in position 16 is Glu or Gly
  Variant (18)..(18): Xaa in position 18 is any amino acid
  Variant (20)..(20): Xaa in position 20 is Cys, Asp or Ser
  Variant (23)..(23): Xaa in position 23 is Phe or Val
  Variant (26)..(26): Xaa in position 26 is Ala or Leu
  Variant (29)..(29): Xaa in position 29 is any amino acid
  Variant (30)..(30): Xaa in position 30 is Ile or Leu
  Variant (34)..(34): Xaa in position 34 is Asp or Glu
  Variant (39)..(39): Xaa in position 39 is Glu or Thr
DFXDXSXLXXXISXDXDXSXESXSGXESXXSDYXFHDNXF

SEQ ID NO: 2628 - DNA, 969 bp, Saccharomyces cerevisiae
  CDS (1)..(969)
atgtctcaaaaaaagaaggcttcccatccagccatcaatctcatggctggcggcacagcaggtttatttgaagcattgtgttgtcatcctttagatacaattaaggtgagaatgcaaatatacagacgggtagctggtattgaacatgttaaacccccaggatttattaaaactgggcgtaccatttatcaaaaagaaggtttcttggctctgtataaaggtctaggtgctgtggtcatcggtattatacctaagatggcaatccgtttctcgtcttatgaattctatagaaccttattggttaacaaggaatcaggaattgtgtctaccggtaatacttttgttgctggtgttggggctggtatcaccgaagctgttcttgtcgtgaacccgatggaagttgtaaagattaggttacaagctcagcatttaactccgagtgagccaaatgctggtcctaaatataacaacgccattcatgcagcctacactattgtcaaagaagaaggtgtttctgccttatatagaggcgtttccttaactgcggcaaggcaagcaactaatcagggtgctaacttcacagtttattctaaactgaaggagtttttgcagaattaccatcagatggatgtcctaccttcatgggaaacttcttgcataggtttgatttcgggtgctattgggccgttttccaacgctccattggatactataaagacaaggctgcaaaaggataagtccatctcattggaaaaacagtccggtatgaagaaaatcataaccattggtgctcaactactgaaagaagaaggttttagagctttgtacaagggtattaccccaagagtgatgagggtggctccaggtcaggctgtcacctttaccgtttatgaatatgtaagggagcatttagaaaatttgggtatattcaagaagaatgacacaccaaagccaaagccattaaagtag

SEQ ID NO: 2629 - protein, 322 aa, Saccharomyces cerevisiae
MSQKKKASHPAINLMAGGTAGLFEALCCHPLDTIKVRMQIYRRVAGIEHVKPPGFIKTGRTIYQKEGFLALYKGLGAVVIGIIPKMAIRFSSYEFYRTLLVNKESGIVSTGNTFVAGVGAGITEAVLVVNPMEVVKIRLQAQHLTPSEPNAGPKYNNAIHAAYTIVKEEGVSALYRGVSLTAARQATNQGANFTVYSKLKEFLQNYHQMDVLPSWETSCIGLISGAIGPFSNAPLDTIKTRLQKDKSISLEKQSGMKKIITIGAQLLKEEGFRALYKGITPRVMRVAPGQAVTFTVYEYVREHLENLGIFKKNDTPKPKPLK

SEQ ID NO: 2630 - DNA, 1089 bp, Ashbya gossypii
  CDS (1)..(1089)
atgcgcgagctcctattggcgctgcgtcggagacaaggtgcgggcggcccgccgtcggtgcccgttgtatatataggtgcgcgacgcagaagcgtagcggatccgtgcagcgcagtgtgccagcagccataccctgataaccacatgtcgtctaagaaatctaccaacccggccgtgaacctagttgcgggcgggaccgcgggcctgtttgaggcgctctgctgccacccattggacacgatcaaggtgcgcatgcagatctacaggcgcgcgaacgagggcacgaagccccctgggtttttgcgcacgggggccaacatctacagcggggagggcttgctggctttctacaagggcctcggagctgtggtgatcgggatcatccctaaaatggcgatccggttttcgtcatacgagttctaccggaccttgttggcggaccggcagacgggggtggtctcgacggggaacacgttcttggccggagtgggggcgggtgtcacggaggccgtgctggtggtgaacccgatggaggttgtgaagatccggttgcaggcgcagcacctgcatggcgctgctgagcagcagaagtacagaaacgcgatccaggccgcgtacttgatcgtcaaggaggaggggatcggcgcactctaccgcggcgtgtccttgacggcggcgcgtcaggcgacgaatcagggtgcgaacttcaccgtgtattcgaagctcatggagcggctgcaggagtatcacggtagccagaacctcccatcgtgggagacctcgttgatcggtttggtgtcgggcgcaatcggcccgttctcaaacgcgccgctagacaccatcaagacgcgcttgcagaaggacaagtccacgcgtaacctgtccaattgggtccgcattacgacgattggccgccagctcgtgcaggaggaggggttccgcgcgttgtataagggcatcaccccgcgtgttatgcgtgttgcgccaggccaggccgtgacgttcacggtctacgaatttgtgcgcaggcacctcgaggggctgggcctctttggctccgccaaacctaagccgaagccgcttcactag

SEQ ID NO: 2631 - protein, 362 aa, Ashbya gossypii
MRELLLALRRRQGAGGPPSVPVVYIGARRRSVADPCSAVCQQPYPDNHMSSKKSTNPAVNLVAGGTAGLFEALCCHPLDTIKVRMQIYRRANEGTKPPGFLRTGANIYSGEGLLAFYKGLGAVVIGIIPKMAIRFSSYEFYRTLLADRQTGVVSTGNTFLAGVGAGVTEAVLVVNPMEVVKIRLQAQHLHGAAEQQKYRNAIQAAYLIVKEEGIGALYRGVSLTAARQATNQGANFTVYSKLMERLQEYHGSQNLPSWETSLIGLVSGAIGPFSNAPLDTIKTRLQKDKSTRNLSNWVRITTIGRQLVQEEGFRALYKGITPRVMRVAPGQAVTFTVYEFVRRHLEGLGLFGSAKPKPKPLH

SEQ ID NO: 2632 - DNA, 1005 bp, Glycine max
  CDS (1)..(1005)
atgccgttcacaacctactgtcttgaaggagaacaaattaaatctccttcaattatgaaacaggatgttgcacaagataacaccaactcatattcaaagaattcaatcccaccctacatgaaggctatctctggctcacttggagggattatggaggcttcttgcctgcagcccattgatgtgatcaagaccagattgcagcttgataggtcagggaattacaagggaatactgcattgtggtgccacgatttcacgaacagaaggggtacgagctttatggaaaggattgacaccttttgccacacatttgaccttgaagtatgcacttcgaatgggttcaaatgctgtacttcaatcagcgtttaaggaccctgagactggcaagcttagtggttatggacggatcctttctggctttggtgctggggtgcttgaggctattattattgtcactccatttgaggtggtgaagataagattgcagcagcagagaggtctaagcccggagcttttgaaatacaaaggtcctgttcactgtgctcgaatgattattagggaagaaggcttccgtgggctttgggcaggagttgctcctactgtgatgcgtaacgggacaaatcaatctgccatgtttactgccaaaaatgcttttgatgtacttctgtggaagaaacatgaaggggatgggagagttctcctaccgtggcaatctatgatttctggattccttgcaggcacagcaggtcctatttgtactggtccatttgatgttgtgaaaacaaggttgatggctcagacgcgagaaggcggtggtgtactgaaatataagggtatgatccatgccattagaacaatatatgtagaagaaggacttcttgccttatggaaaggtctgttgcctcgactcatgaggatcccacctggacaggccattatgtggggtgtagctgatcaaataattggtttgtacgagaggaggtatcttcatcattcaactttgtaa

SEQ ID NO: 2633 - protein, 334 aa, Glycine max
MPFTTYCLEGEQIKSPSIMKQDVAQDNTNSYSKNSIPPYMKAISGSLGGIMEASCLQPIDVIKTRLQLDRSGNYKGILHCGATISRTEGVRALWKGLTPFATHLTLKYALRMGSNAVLQSAFKDPETGKLSGYGRILSGFGAGVLEAIIIVTPFEVVKIRLQQQRGLSPELLKYKGPVHCARMIIREEGFRGLWAGVAPTVMRNGTNQSAMFTAKNAFDVLLWKKHEGDGRVLLPWQSMISGFLAGTAGPICTGPFDVVKTRLMAQTREGGGVLKYKGMIHAIRTIYVEEGLLALWKGLLPRLMRIPPGQAIMWGVADQIIGLYERRYLHHSTL

SEQ ID NO: 2634 - DNA, 888 bp, Glycine max
  CDS (1)..(888)
atgaaggctatctctggctcacttggagggattatggaggcttcttgcctgcagcccattgatgtgatcaagaccagattgcagcttgataggtcagggaattacaagggaatactgcattgtggtgccacaatttcacgaacagaaggggtacgggctttatggaaaggattgacaccttttgccacacatttgaccttgaagtattcacttcgaatgggttctaatgctgtacttcaatcagcatttaaggaccctgagactgggaaggttagcggtcatgggaggttcctttctgggtttggtgctggggtgcttgaggctgttattattgtcactccatttgaggtggtgaagataagactgcagcagcagaggggtctaagcccagagcttttgaaatataaaggtcctgttcactgtgctcgcatgattattagggaagaaggcttctgtggtctttgggctggagttgctcctactgtgatgcgtaatgggacaaatcagtctgccatgtttactgccaaaaatgctttcgatgtgcttttgtggaagaaagatgaaggggatgggagagtcctccaaccatggcaatctatgatttctggattccttgcaggcacagcagggcctatttgtactggtccatttgatgtagtgaaaacaaggttgatggctcagagccgagaaggtggtggtgtactgaaatacaagggtatgatccatgccattagaacaatatatgcagaagaaggacttcttgccttatggaaaggtctgttgcctcgactcatgaggatcccacctggacaggccattatgtggggtgtagctgatcaaataattggtttgtatgagaggagatatcttcaactttcaacattgtaa

SEQ ID NO: 2635 - protein, 295 aa, Glycine max
MKAISGSLGGIMEASCLQPIDVIKTRLQLDRSGNYKGILHCGATISRTEGVRALWKGLTPFATHLTLKYSLRMGSNAVLQSAFKDPETGKVSGHGRFLSGFGAGVLEAVIIVTPFEVVKIRLQQQRGLSPELLKYKGPVHCARMIIREEGFCGLWAGVAPTVMRNGTNQSAMFTAKNAFDVLLWKKDEGDGRVLQPWQSMISGFLAGTAGPICTGPFDVVKTRLMAQSREGGGVLKYKGMIHAIRTIYAEEGLLALWKGLLPRLMRIPPGQAIMWGVADQIIGLYERRYLQLSTL

SEQ ID NO: 2636 - DNA, 951 bp, Glycine max
  CDS (1)..(951)
atgaaacaggatgttgcacaagataacaccaactcatatccaaagaaatcaatcccaccctacatgaaggctatctctggctcacttggagggattatggaggcttcttgcctgcagcccattgatgtgatcaagaccagattgcagcttgataggtcagggaattacaagggaatactgcattgtggtgccacaatttcacgaacagaaggggtacgggctttatggaaaggattgacaccttttgccacacatttgaccttgaagtattcacttcgaatgggttctaatgctgtacttcaatcagcatttaaggaccctgagactgggaaggttagcggtcatgggaggttcctttctgggtttggtgctggggtgcttgaggctgttattattgtcactccatttgaggtggtgaagataagactgcagcagcagaggggtctaagcccagagcttttgaaatataaaggtcctgttcactgtgctcgcatgattattagggaagaaggcttctgtggtctttgggctggagttgctcctactgtgatgcgtaatgggacaaatcagtctgccatgtttactgccaaaaatgctttcgatgtgcttttgtggaagaaagatgaaggggatgggagagtcctccaaccatggcaatctatgatttctggattccttgcaggcacagcagggcctatttgtactggtccatttgatgtagtgaaaacaaggttgatggctcagagccgagaaggtggtggtgtactgaaatacaagggtatgatccatgccattagaacaatatatgcagaagaaggacttcttgccttatggaaaggtctgttgcctcgactcatgaggatcccacctggacaggccattatgtggggtgtagctgatcaaataattggtttgtatgagaggagatatcttcaactttcaacattgtaa

SEQ ID NO: 2637 - protein, 316 aa, Glycine max
MKQDVAQDNTNSYPKKSIPPYMKAISGSLGGIMEASCLQPIDVIKTRLQLDRSGNYKGILHCGATISRTEGVRALWKGLTPFATHLTLKYSLRMGSNAVLQSAFKDPETGKVSGHGRFLSGFGAGVLEAVIIVTPFEVVKIRLQQQRGLSPELLKYKGPVHCARMIIREEGFCGLWAGVAPTVMRNGTNQSAMFTAKNAFDVLLWKKDEGDGRVLQPWQSMISGFLAGTAGPICTGPFDVVKTRLMAQSREGGGVLKYKGMIHAIRTIYAEEGLLALWKGLLPRLMRIPPGQAIMWGVADQIIGLYERRYLQLSTL

SEQ ID NO: 2638 - DNA, 954 bp, Oryza sativa Japonica Group
  CDS (1)..(954)
atgtcgccggcaccgcaggccgcttcgccggcggaggatcggcggggcgggagggcaccggtccccccctacgtgaaggcggcggcggggtcggtcggcggcgtgatggaggcgtgctgcctgcagccgatcgacgtcatcaagacgcggctgcagctagaccgctcgggggcgtaccggggcatcgcgcactgcggcaccaccgtcgtgcgctccgagggcgtgcgcgcgctctggaaggggctcacgcccttcgccacccacctcacgctcaagtacgcgctccgcctcggctccaacgccgtgctgcagtccgcgttcaaggaccccggcacgggcaaggtctccgcgcacggccgcctcgcctccgggttcggcgccggcgtcctcgaggccctcctcatcgtcacccccttcgaggtggttaaaatcaggttgcagcaacaaaaaggtctaagccctgacctgctgagatataaggggccaatacattgtgctaggacgattgttactgaggagggtctttttggcctgtgggctggagcattaccaaccgtcatgcgtaatggcacaaaccaagccgcaatgttcactgccaagaatacatttgatattgttctctggaagaagcatgaaggagatgggaaggttctccagccatggcagtcaatgatttcaggttttcttgcaggaactgcaggtccgatctgcactggacccttcgatgtcgtgaagactagactgatggcccaggggagaactggtgacatcaagtacaagggtatggtccacgcgatacgcacaatatacactgaagagggtctcagagccctttggaaaggtttgcttccgaggcttatgaggattccacctggtcaggctataatgtgggcggtggctgatcaggtgatgggcctctatgagagatcatatctgcagccggctcatatgtaa

SEQ ID NO: 2639 - protein, 317 aa, Oryza sativa Japonica Group
MSPAPQAASPAEDRRGGRAPVPPYVKAAAGSVGGVMEACCLQPIDVIKTRLQLDRSGAYRGIAHCGTTVVRSEGVRALWKGLTPFATHLTLKYALRLGSNAVLQSAFKDPGTGKVSAHGRLASGFGAGVLEALLIVTPFEVVKIRLQQQKGLSPDLLRYKGPIHCARTIVTEEGLFGLWAGALPTVMRNGTNQAAMFTAKNTFDIVLWKKHEGDGKVLQPWQSMISGFLAGTAGPICTGPFDVVKTRLMAQGRTGDIKYKGMVHAIRTIYTEEGLRALWKGLLPRLMRIPPGQAIMWAVADQVMGLYERSYLQPAHM

SEQ ID NO: 2640 - DNA, 930 bp, Arabidopsis thaliana
  CDS (1)..(930)
atggcgacgagaacggaatcgaagaagcagattccgccgtacatgaaagcagtctcaggctcactaggcggagtggtcgaggcttgttgtctccaaccaatcgacgtaatcaaaacgcgtctccagctagatcgcgtcggcgcttacaaaggaatcgctcactgtggttcgaaggtggttcgcaccgaaggagttcgtgctctctggaaaggcttaacaccgttcgctactcatctcacgcttaagtacacgcttcggatgggatccaacgccatgtttcaaaccgcctttaaggattccgagaccggaaaggtcagcaatcgtggccgttttctttccggattcggtgccggtgttcttgaagctctcgccattgttacaccctttgaggtggtgaaaattagacttcagcagcagaaaggattgagtcctgagcttttcaagtacaaaggaccaatacattgtgctagaaccatcgtgagagaagaaagcatacttggtttatggtcaggtgcagcaccgacggttatgcgaaacggaaccaaccaagctgtaatgttcacagcgaaaaacgcgtttgacatactcttgtggaacaaacacgaaggtgacggtaaaatcttgcagccatggcagtcaatgatctcagggtttttagctggaaccgcaggtccgttctgcacaggaccgtttgatgtggtgaaaacgaggttgatggctcagagcagagacagtgaaggtgggattagatataaagggatggttcatgccattagaacgatttatgcagaggaaggattagtggccttatggagagggttattgccgaggctaatgaggattcctccaggacaagccattatgtgggctgttgctgatcaagtcactggtctttatgagatgagatatcttcggaatgctcctttatag

SEQ ID NO: 2641 - protein, 309 aa, Arabidopsis thaliana
MATRTESKKQIPPYMKAVSGSLGGVVEACCLQPIDVIKTRLQLDRVGAYKGIAHCGSKVVRTEGVRALWKGLTPFATHLTLKYTLRMGSNAMFQTAFKDSETGKVSNRGRFLSGFGAGVLEALAIVTPFEVVKIRLQQQKGLSPELFKYKGPIHCARTIVREESILGLWSGAAPTVMRNGTNQAVMFTAKNAFDILLWNKHEGDGKILQPWQSMISGFLAGTAGPFCTGPFDVVKTRLMAQSRDSEGGIRYKGMVHAIRTIYAEEGLVALWRGLLPRLMRIPPGQAIMWAVADQVTGLYEMRYLRNAPL

SEQ ID NO: 2642 - DNA, 921 bp, Aedes aegypti
  CDS (1)..(921)
atgggtggagatctgaaggattttttgcgtcaagcagcaatgcaagtgggtgccggtggttcagcgggattcgtggaggtttgcatcatgcatcccttggatctggtgaagactcgactacagctacaagcgaaaccaggaagtgcgtcagctaaaactggaacctattacaatggagtgttcgactgcattcggaaaatggcccgatcggagggtttcttttccctgtacaagggaatcctgcctccggtgttggttgaaacgccgaaacgagccgttaaatttttaacctttgaacaatacaaacggttctttctgttcggtgctgataagcctacgccactgacattctccttagctggccttggtgcaggagtgaccgaagctatcttggtgaacccttttgaaatggtgaaagtgacgctgcaagccaacaaaaacaaagtcgggcaagttcctagcacgtgggccgtaacgcgacagatcatccatgaatctggttttggcctgaacggtctgaaccgagggctgacggcaaccatcggtcggaacggcgttttcaacatgatctacttcggattctatcacagcgtaaaagggttccttccggagtatgaggacccagtggaagagtttctccgtaaagtgggaattggttttgtgtccggtacccttggatccattgttaatatcccgtttgatgtggccaaatccaggattcagggtcctcaaccggtccctggtcaggtaaagtacaagtctacctttggctcgatcgccactgtgtatcgcgaagagggctttgcagctttgtacaaaggcttgacgccgaaagtgatgcgcttgggtccaggaggagcaatcatgttggttgtttacgattacgtgtacgagtttctcgagaactacttcaagcattga

SEQ ID NO: 2643 - protein, 306 aa, Aedes aegypti
MGGDLKDFLRQAAMQVGAGGSAGFVEVCIMHPLDLVKTRLQLQAKPGSASAKTGTYYNGVFDCIRKMARSEGFFSLYKGILPPVLVETPKRAVKFLTFEQYKRFFLFGADKPTPLTFSLAGLGAGVTEAILVNPFEMVKVTLQANKNKVGQVPSTWAVTRQIIHESGFGLNGLNRGLTATIGRNGVFNMIYFGFYHSVKGFLPEYEDPVEEFLRKVGIGFVSGTLGSIVNIPFDVAKSRIQGPQPVPGQVKYKSTFGSIATVYREEGFAALYKGLTPKVMRLGPGGAIMLVVYDYVYEFLENYFKH

SEQ ID NO: 2644 - DNA, 894 bp, Chlamydomonas reinhardtii
  CDS (1)..(894)
atgagcgataaaaagcgcggagcaaatgtgttggatagttctaggatgttcttcgccggtggaatggcaggcgctatcgcccggacgtgtacagcgcccttggatcgcatcaagctgctattccaggtccaggctgttgcggggcctggaacgtcacccacagcatacacgggcgtcggacaggcggcgatgaaaatcatccgggaggagggcttcctggcgttctggaagggcaacggcgtcaacatcatccgcatcttcccctactcggcggcgcagctggcgtccaacgacacctacaagcggctgctggcggatgagaagcacgagctgtcggtgcctcggcggctgctggcgggcgcgtgcgcgggcatgaccgccaccgcgctgacacacccgctggacacggtgcggctgcgcctggcgctgccaaaccacccctacaagggcgccatcgacgccgccaccatcatggtgcgcacggagggcatgatctcgctgtacaagggactggtgcccacgctcatcggcattgcgccctacgccgcgctgaacttcgcctcctacgacctcataaagaagtggatgtaccacggcgagcggccccagtccgcgatggccaacctcttggtgggcggcactagcggcaccatcgccgccagcatttgctacccgctcgacaccatccgccgccgcatgcagatgaaggggcaagcctacaagaaccagatggacgcgttccgcaccatcatggcgaaggagggcatgcgcggcttctaccgcggctgggtagccaacaccgttaaggtggtgccgcagaacgccattcgcatggtcagctacgaggccatgaagaacgtgctgggagtcaagaaggccaagactgacacgtaa

SEQ ID NO: 2645 - protein, 297 aa, Chlamydomonas reinhardtii
MSDKKRGANVLDSSRMFFAGGMAGAIARTCTAPLDRIKLLFQVQAVAGPGTSPTAYTGVGQAAMKIIREEGFLAFWKGNGVNIIRIFPYSAAQLASNDTYKRLLADEKHELSVPRRLLAGACAGMTATALTHPLDTVRLRLALPNHPYKGAIDAATIMVRTEGMISLYKGLVPTLIGIAPYAALNFASYDLIKKWMYHGERPQSAMANLLVGGTSGTIAASICYPLDTIRRRMQMKGQAYKNQMDAFRTIMAKEGMRGFYRGWVANTVKVVPQNAIRMVSYEAMKNVLGVKKAKTDT

SEQ ID NO: 2646 - DNA, 936 bp, Chlamydomonas reinhardtii
  CDS (1)..(936)
atgtcggacgacaagaagaagcaaccccacgtctcccccgccatcaagggcttcgccggctctatcggcggcgtggcggaagcatgcgcgctgcagcccatggatgtcatcaagacgcgcctgcagctggacaaggcgggcaagtacaagggcatctggggctgcggcaagaccatcatccaggaggaaggcgttgccgcgctgtggaagggcctcacgcccttcgccatgcacctcacgctcaagtacgcgctgcgcatgggctccaacagtgtctaccagtccatgttgcgtgacgacaacggcaagctgacggacgggcgccgcatgctggcgggcttccttgccggcatcacggaggcggtggtgatcgtgacaccgttcgaggtggtgaagatccggctgcagcagcagaaggggatggcaaaggagcagctcaagtataagggccccatcaactgcgcgctgacagtgctgcgggaggagggcatccgcggcatgtggtccggctgcacgcccacggtgctgcgcaacggcaccaaccagatgtgcctcttctgggccaagaacaacgtcgacaagttcctgtgggacaagcacgagggcgacggcaagatgctcacacccacgcagtccatgacctccggcttcctcgcggcgctgctgggccccatcgccaccgggccctttgacgtggccaagacgcggctcatggcgcagaccaagacctccggtggcacccgctacagcggcttctttgacgcgctcatgcgcatcccgcgtgaggagggcattatggccatgtggaaggggctgctgccgcggctgctgcgcatcccgcccggccaggccatcgtgtgggcggtcagcgaccagatcactggctactttgaggcgcagtccatcgcaaaggcctcgggcagcctgccggcgtaa

SEQ ID NO: 2647 - protein, 311 aa, Chlamydomonas reinhardtii
MSDDKKKQPHVSPAIKGFAGSIGGVAEACALQPMDVIKTRLQLDKAGKYKGIWGCGKTIIQEEGVAALWKGLTPFAMHLTLKYALRMGSNSVYQSMLRDDNGKLTDGRRMLAGFLAGITEAVVIVTPFEVVKIRLQQQKGMAKEQLKYKGPINCALTVLREEGIRGMWSGCTPTVLRNGTNQMCLFWAKNNVDKFLWDKHEGDGKMLTPTQSMTSGFLAALLGPIATGPFDVAKTRLMAQTKTSGGTRYSGFFDALMRIPREEGIMAMWKGLLPRLLRIPPGQAIVWAVSDQITGYFEAQSIAKASGSLPA

SEQ ID NO: 2648 - DNA, 954 bp, Physcomitrella patens subsp. patens
  CDS (1)..(954)
atgcgcaattcctcctcctcttctcacaaggcggacaatgccgtggccatccctccttacttcaaggccgtgtccgggtctctgggcggccttgtggaggcttgctgcttacagccgattgatgtgatcaagacgcgactgcagctcgacccccgacgcgagtacaaaggcatctatcattgtgggtctactattgtggagcgtgaaggggcgcgcgcgctatggaagggcttgacccccttcgccacgcatctcaccttgaagtacacgttgcggatgggctccaacgccctcttccaatccgcgcttgcggattctaagaccggccagcttagcgccgcgggccgtatggctgctggcttcggtgcaggtgttttggaagctgttgtgatcgtcactcctttcgaggttgtgaaaatcaagcttcaacaacagagaggattggggcgagagttgctgaagtataaggggcctgtgcactgtgccacgacaattgtgcgtgaagaggggttgaggggtctctgggcaggggttgctcccaccattctacggaacggaacgaaccaggctgtaatgttttcagtgaagaacggtgttgatcagctactgtggaagaaatacgagggggatggtgtcactctcttaccatggcagtcgatggtgtcaggatttctggcaggtttcgctggacctgtggccacaggaccatttgatgtagtcaaaacacgtcttatggcacaaagtcgagatgcaactggtgaagttagatacagaggattggtgcatgccatcactcgtatatatgctgaggaagggttgttggcattgtggaagggtttgctacctcgtttgatgcgtatacctccaggccaagccatcatgtgggcagttgcagatcaggtaactggcctctacgagcgcaggtatatcaagtccctgaacgcagccacctag

SEQ ID NO: 2649 - protein, 317 aa, Physcomitrella patens subsp. patens
MRNSSSSSHKADNAVAIPPYFKAVSGSLGGLVEACCLQPIDVIKTRLQLDPRREYKGIYHCGSTIVEREGARALWKGLTPFATHLTLKYTLRMGSNALFQSALADSKTGQLSAAGRMAAGFGAGVLEAVVIVTPFEVVKIKLQQQRGLGRELLKYKGPVHCATTIVREEGLRGLWAGVAPTILRNGTNQAVMFSVKNGVDQLLWKKYEGDGVTLLPWQSMVSGFLAGFAGPVATGPFDVVKTRLMAQSRDATGEVRYRGLVHAITRIYAEEGLLALWKGLLPRLMRIPPGQAIMWAVADQVTGLYERRYIKSLNAAT

SEQ ID NO: 2650 - DNA, 912 bp, Physcomitrella patens subsp. patens
  CDS (1)..(912)
atggcgatgtcggggtccttgggtggattggtggaagcgtgttgcttgcaacccatcgacgtgatcaaaacgcgcttgcagctcgactctcgggcccgtcgcgagtaccgaggcatccggcactgcggctccacgatcgtccagcaggagggtatgcgtgcgctgtggaagggcctgactccgtttgccacgcatcttaccttgaagtatactctccgaatgggctccaacgcgctctttcaatctgccttagcagatgcgcagacgggcaaacttagcgtgactgcacgacttgcagcaggcttcggcgcgggcgttctggaggccgttgcaatcgtcaccccattcgaggttgtgaaaattcggctacagcagcagagaaatgtcgttcgtgagctggtgaagtatcagggtcccgtgcattgcgcggcgaccatcgcacgcgaggagggactccgagggctgtgggccggcgttgcacccaccattttacgcaatggcaccaaccaggccgtcatgttttcggcgaaaaattactgcgacaagctcttgtggaagaaacacgacggggatgctgtcacgctcctgccatggcaatccatggtgtctggctttttggcaggttttgctggacctatcgcgacgggaccattcgacgtcgtgaagacacgcctgatggcacagactcgaggtctgcgaggtggcgacgcacaataccgaggaatgatgcacgcgatcactcggatatacgctgacgaaggattgtttgctttgtggaagggtttgctaccgcgtctgatgcgcattcccccaggtcaagcaatcatgtgggcagtcgcagatcaggtcacgggtctttacaaccgcaggtattcgccttttccctctattcaatgcaatctttacttctga

SEQ ID NO: 2651 - protein, 303 aa, Physcomitrella patens subsp. patens
MAMSGSLGGLVEACCLQPIDVIKTRLQLDSRARREYRGIRHCGSTIVQQEGMRALWKGLTPFATHLTLKYTLRMGSNALFQSALADAQTGKLSVTARLAAGFGAGVLEAVAIVTPFEVVKIRLQQQRNVVRELVKYQGPVHCAATIAREEGLRGLWAGVAPTILRNGTNQAVMFSAKNYCDKLLWKKHDGDAVTLLPWQSMVSGFLAGFAGPIATGPFDVVKTRLMAQTRGLRGGDAQYRGMMHAITRIYADEGLFALWKGLLPRLMRIPPGQAIMWAVADQVTGLYNRRYSPFPSIQCNLYF

SEQ ID NO: 2652 - DNA, 921 bp, Culex quinquefasciatus
  CDS (1)..(921)
atgggcaacgacctcaaggagttcctgcgtcaggcggcgatgcaggtcggtgccggaggatcggccggtttcgtagaagtttgcatcatgcacccgctggatctggtcaaaacgagactccagctgcaggccagtcccggaagcgccgctgcagcatcgtcagccacctactacaacggagtgttcgattgcatccgcaagatggccaaggcggagggcgtcttctcgctgtacaagggcattttaccgccggtgttggtggagacgccgaagcgtgcggtcaagtttctgaccttcgagcagtacaagcggttctttctgtttgggtcggacaagccgacgccactgacgttctcgctggctgggttgggtgccggagtaacggaggccattctggtgaatccgtttgagatggttaaggttacgctgcaggcgaataagaataaaatgggcgaggtcccgagcacgtgggccgtcacgcgccagatcatcaacgagtcgggcttcgggctgggcgggctgaaccggggcctgacggcgacgatcggccgcaacggcgtcttcaacatgatctactttggcttctaccacagcgtcaagggcgtactgccggagtatcaggaccccgtcaaggaattcctccggaaggtgggcatcggattcgtgtccggcacgttagggtccatcgtaaacattccgtttgatgtggccaagtccaggattcagggtcctcaaccggtccccggacaggtcaagtacaaatccacctttggatcgatggcgatcgtggcccgggaggaaggtttcggtgcgctgtacaagggactcacgcccaaggtgatgcggctgggaccgggtggcgccatcatgctggtagtgtacgattacgtgtacgagtttttggacgggtacttcaagtaa

SEQ ID NO: 2653 - protein, 306 aa, Culex quinquefasciatus
MGNDLKEFLRQAAMQVGAGGSAGFVEVCIMHPLDLVKTRLQLQASPGSAAAASSATYYNGVFDCIRKMAKAEGVFSLYKGILPPVLVETPKRAVKFLTFEQYKRFFLFGSDKPTPLTFSLAGLGAGVTEAILVNPFEMVKVTLQANKNKMGEVPSTWAVTRQIINESGFGLGGLNRGLTATIGRNGVFNMIYFGFYHSVKGVLPEYQDPVKEFLRKVGIGFVSGTLGSIVNIPFDVAKSRIQGPQPVPGQVKYKSTFGSMAIVAREEGFGALYKGLTPKVMRLGPGGAIMLVVYDYVYEFLDGYFK

SEQ ID NO: 2654 - DNA, 975 bp, Magnaporthe grisea 70-15
  CDS (1)..(975)
atggcgacaaaggtcagcaaagacggcaagccgccgccctctgccgccgtcaacctcatcgcgggcggcggcgccggcatgatggaggcgctggcttgccacccgctggacaccatcaaggtgcggatgcagctgtcgcgacgggcgcggcagcccggcgcacccaagcgcggcttccttgccacgggcgccgccatcgtcaagaaggagaccccgctgggtctgtacaagggcctgggcgcggtcctgacgggcattgtacccaagatggcgatccggttcacgagcttcgaggcgtacaagcagatgctggccgacaaggagacgggcggcgtgacgggccgcgcgacctttttggcggggctggctgcgggcgtcaccgaggcggtcgccgtcgtcacgcccatggaggtcatcaagatcaggctgcaggcgcagcaccacagcatggccgacccgctcgacataccaaagtaccgcaacgccgcgcacgccctgtacaccgtcgtcaaggaggagggcttcggcgccctgtaccgcggcgtctcgctcaccgcgctgcgccagggctccaaccaggccgtcaacttcaccgcgtacacgtacttcaaggagaagctgtccgagtggcagccgcagtacaacggcaccacgctgcccggctaccagaccaccctcatcggcttggtttcgggtgccatgggaccgctcagcaacgcgccgatcgacaccatcaagacgagactgcaaaaggcgccggcggttgagggcgtcagcgcattcaagaggatttcacagattgcgggcgagatgttcaggcaagaaggcatgcatgcattctacaaagggatcacgccgcgcataatgcgtgtcgcaccgggacaggcagtcacctttacggtgtacgaatacctgaaggagaagctcgagacgagaggaccattttcactttctggcggcgagtacaacgactag

SEQ ID NO: 2655 - protein, 324 aa, Magnaporthe grisea 70-15
MATKVSKDGKPPPSAAVNLIAGGGAGMMEALACHPLDTIKVRMQLSRRARQPGAPKRGFLATGAAIVKKETPLGLYKGLGAVLTGIVPKMAIRFTSFEAYKQMLADKETGGVTGRATFLAGLAAGVTEAVAVVTPMEVIKIRLQAQHHSMADPLDIPKYRNAAHALYTVVKEEGFGALYRGVSLTALRQGSNQAVNFTAYTYFKEKLSEWQPQYNGTTLPGYQTTLIGLVSGAMGPLSNAPIDTIKTRLQKAPAVEGVSAFKRISQIAGEMFRQEGMHAFYKGITPRIMRVAPGQAVTFTVYEYLKEKLETRGPFSLSGGEYND

SEQ ID NO: 2656 - DNA, 969 bp, Gibberella zeae PH-1
  CDS (1)..(969)
atggcttcaaagaacggcaatggcaaaaaggcgccgccctctgcggctgttaaccttattgctggtggtggtgctggtatgatggaagctctcgtctgccatcccctcgacacaatcaaggttcgcatgcagctctcaagacgcgctcgtcaaccaggagcccctaagcgcggcttcctgaaaaccggcgccgccatcgtcgcaaaagagacgcccctcggcctgtacaagggtctcggcgctgtctttacgggaattgtccccaagatggccatccgcttcacctcgtttgaaaagtacaagcagttcctcgccgacgagacgggcgccgtgtccggcaagagtgtctttattgctggtctggctgccggtgttacggaagccgtctgcgtcgtgacacccatggaggtcatcaagatccgtcttcaggcgcaacaccactccatggcggatcccctcgatgttcccaagtaccgcaacgctgctcacgcgctctacaccgtcgttaaggaagagggttttggtgcgctgtaccgcggtgtgagcttgacggctctgaggcagggttctaaccaggctgtcaactttactgcttacagctacttcaaggactggctgaagaaggcccagcctcagtatgagaacactaacctgcccaactaccagaccaccctgtgcggtcttgtgtcgggtgctatgggtcctctgagtaacgctcccatcgatactatcaagacacgtctgcaacggggaggtgctgagcctggagttagtgcttgggctcgtattactcgaattactacccaaatgttcaaggaagagggattctatgctttgtacaagggtatcacacctcgaattatgcgtgttgctcctggtcaggccgtcacctttacagtctacgagttcctcaaggataagatggagagaagtaacctgtctcttgtcggaggcaagtatgaggagtaa

SEQ ID NO: 2657 - protein, 322 aa, Gibberella zeae PH-1
MASKNGNGKKAPPSAAVNLIAGGGAGMMEALVCHPLDTIKVRMQLSRRARQPGAPKRGFLKTGAAIVAKETPLGLYKGLGAVFTGIVPKMAIRFTSFEKYKQFLADETGAVSGKSVFIAGLAAGVTEAVCVVTPMEVIKIRLQAQHHSMADPLDVPKYRNAAHALYTVVKEEGFGALYRGVSLTALRQGSNQAVNFTAYSYFKDWLKKAQPQYENTNLPNYQTTLCGLVSGAMGPLSNAPIDTIKTRLQRGGAEPGVSAWARITRITTQMFKEEGFYALYKGITPRIMRVAPGQAVTFTVYEFLKDKMERSNLSLVGGKYEE

SEQ ID NO: 2658 - DNA, 1047 bp, Candida glabrata CBS 138
  CDS (1)..(1047)
atgtcctcttctaaaaagaaatcttctaacccagttgtgaacctggtggctggtggtactgccggtctgtttgaagctctgtgttgtcatccactagatactataaaggtgcggatgcaaatttacaagagacaggcggcacccgctgctgctgcagttgcaagcatggctggcggtgctggaggtgctgcaactgctactgtcggtggtggtgatgccactgccgctattaagccacctggattcattagaaccggtagaaacatatatgcgcaagaagggtttttggccctatataaaggtctaggggccgttgtcatcggtattatcccaaagatggccatcagattttcttcctatgagttttacagaactctgctggctgacaaacaaacaggtgttgtttccacaagtaacactttcatcgcaggtgtaggtgctggtgtcactgaagctgtcttggttgttaaccctatggaagttgttaagattagactgcaggctcagcacttaaaccctaaccatgacttggccaaaccaaaatatacaaatgccgttcaagcaggttacactatcattaaggaggaaggtatctctgctctatacagaggtgtttctttaactgctgccagacaagccacaaaccaaggtgctaactttactgtttactcaaagttgagagagttcctacaggaataccacggtaccgaaacattaccatcttgggaaacatcctgtatcggtttgatctctggtgctattggtccattttcaaatgctccactggacactatcaagactagactacaaaaggataagtctactagcttcaaaggtgaatctggatggaagagaattgctcacattggtactcaattgttaaaggaagaaggtttcagagctctttacaaaggtattaccccaagagtgatgagagttgctccaggtcaagccgttacattcacagtatacgagtttgtcagaagacacctggagaacctgggcgtcttcagtaaacctacaccaaaaccaaagaagttgaactga

SEQ ID NO: 2659 - protein, 348 aa, Candida glabrata CBS 138
MSSSKKKSSNPVVNLVAGGTAGLFEALCCHPLDTIKVRMQIYKRQAAPAAAAVASMAGGAGGAATATVGGGDATAAIKPPGFIRTGRNIYAQEGFLALYKGLGAVVIGIIPKMAIRFSSYEFYRTLLADKQTGVVSTSNTFIAGVGAGVTEAVLVVNPMEVVKIRLQAQHLNPNHDLAKPKYTNAVQAGYTIIKEEGISALYRGVSLTAARQATNQGANFTVYSKLREFLQEYHGTETLPSWETSCIGLISGAIGPFSNAPLDTIKTRLQKDKSTSFKGESGWKRIAHIGTQLLKEEGFRALYKGITPRVMRVAPGQAVTFTVYEFVRRHLENLGVFSKPTPKPKKLN

SEQ ID NO: 2660 - DNA, 918 bp, Kluyveromyces lactis NRRL Y-1140
  CDS (1)..(918)
atggcttcgaaacaaaaatcttcaaacccagctgtcaatttgattgctggcggtggtgcgggtctaatggaaggtctatgttgccatccattggataccatcaaggttagaatgcagatctacaaaaatgctgttggttccggtgtaaaagcaccaggtttcatcaagactggtggtgaaatctatagaaatgaaggtttcttggcattttacaaaggtttaggtgctgtcgtcatcggtatcacaccaaagatggctattagattctcatcttatgagttctatagaactttgcttgctgataaggaaactggtaaagtttctactggtaacactttcattgctggtgtcggtgcaggtatcaccgaggctgtcgtcgttgtcaatccgatggaagtcgtgaagattagattacaagcacaacatctaaaccctgtcgaaggtgctccaaaatacaagaacgccgtgcaagcttgttacaccatcgtaaaagaggaaggtttcagcgctttgtaccgtggtgtttcattgactgctgctagacaagccaccaaccaaggtgctaatttcaccgtttactctaaattaaaagaattcttgcaaggttatcataatcaagaaatgttgccaagttgggaaacctcattgattgggttaatctcaggtgccattggtcccttctcaaatgcaccgttagataccatcaagacgagattgcaaaaggataaatctactaagaatatgtccggtctcaaaagaattaccatcattggtaaacaattgatccaagaagaaggtttccgtgccctatataaaggtatcaccccaagagtgatgcgtgtggctccaggtcaagctgtcactttcactgcttatgaattcattcgtaaagaattggagaagaccggtgtattttga

SEQ ID NO: 2661 - protein, 305 aa, Kluyveromyces lactis NRRL Y-1140
MASKQKSSNPAVNLIAGGGAGLMEGLCCHPLDTIKVRMQIYKNAVGSGVKAPGFIKTGGEIYRNEGFLAFYKGLGAVVIGITPKMAIRFSSYEFYRTLLADKETGKVSTGNTFIAGVGAGITEAVVVVNPMEVVKIRLQAQHLNPVEGAPKYKNAVQACYTIVKEEGFSALYRGVSLTAARQATNQGANFTVYSKLKEFLQGYHNQEMLPSWETSLIGLISGAIGPFSNAPLDTIKTRLQKDKSTKNMSGLKRITIIGKQLIQEEGFRALYKGITPRVMRVAPGQAVTFTAYEFIRKELEKTGVF

SEQ ID NO: 2662 - DNA, 957 bp, Debaryomyces hansenii CBS767
  CDS (1)..(957): transl_table=12
atgtcgaccactaaacctcaaaaacaaactaaaggaaagggtgttactgatttaattgctggtggtacagctggtttgttcgaagccttatgttgtcatccattagataccattaaggttagaatgcaattatacagaaagtcgggtcaaaaacctccaggtttcattaaaactggtatcaatattgtccaaaaggaaacatttatgtcgttgtacaaaggtttaggggcagttgttattggtatcgtcccaaagatggcattgagattctcctcatatgaattttatagatcgttattatacagaccagatgggtccatttctactggtaacacattccttgctggtgttggtgcaggtatcaccgaagccgttatggttgtcaaccctatggaagtcgtgaagattagattacaagcccaacaccactctatggctgacccattagatgttccaaagtatagaaatgccccacacgctgcttatcttattgtcaaggaagaaggtttcagtaccttgtacagaggtgtttcgttgactgctgctagacaagctaccaaccaaggtgttaatttcactgtttactcgaagattaaggaatacttgcaaggttaccacaataccgaagttttgccagcatgggaaacttcgtgtattggtttgatttctggtgctttaggtcctttatccaatgctcctttggataccattaagaccagattgcaaaagaccacttacgcttcgaatgaatcaggtttggttagaatcgttaaaatcgctaatcaattgatcaaggaagaaggtattcatgccttatacaagggtatcacccctagaattatgagagttgccccaggtcaagctgttacatttactgtttacgaatacatgaagcgtgttttagcaggcgaaacccaaattcctgttcctggcgtaagctctaaaaagatcgattag

SEQ ID NO: 2663 - protein, 318 aa, Debaryomyces hansenii CBS767
MSTTKPQKQTKGKGVTDLIAGGTAGLFEALCCHPLDTIKVRMQLYRKSGQKPPGFIKTGINIVQKETFMSLYKGLGAVVIGIVPKMALRFSSYEFYRSLLYRPDGSISTGNTFLAGVGAGITEAVMVVNPMEVVKIRLQAQHHSMADPLDVPKYRNAPHAAYLIVKEEGFSTLYRGVSLTAARQATNQGVNFTVYSKIKEYLQGYHNTEVLPAWETSCIGLISGALGPLSNAPLDTIKTRLQKTTYASNESGLVRIVKIANQLIKEEGIHALYKGITPRIMRVAPGQAVTFTVYEYMKRVLAGETQIPVPGVSSKKID

SEQ ID NO: 2664 - DNA, 960 bp, Yarrowia lipolytica CLIB122
  CDS (1)..(960)
atggctgctgacggaaagaagaagaagaacctcgctgttgatctcctggctggaggaaccgccggtctgtttgaggccctggtctgccatcctcttgacaccatcaaggtgcgaatgcagctcaccaaccgacagcacggcgttaaggaggtcggattcgtccagactggtgttaacattgccaagaaggagggtcctctggctctttacaagggtctcggagccgttgtgaccggtattgtgcccaagatggccatccgattcacgtcgtacgagtactaccgaggtcttctgaccaagcctgatggaaccatcagtgctttccacactttcattgccggtgttggtgccggaaccaccgaagctgttctggtcgtcaaccccactgaggtcatcaagatccgactccaggcccagcaccactccatggctgatcccctcgatgtccccaagtaccgaaacgctgctcactgtctctacaccgttgttcgagaggagggtccctctgctctgtacagaggtgtgattctcactgccacccgacaggccaccaaccagggtgttaacttcactgtctactctgagctcaaggcccgacttaacgagatgcagccccagttcaagggtgtccttccctcgtggcagacttccatcatcggtctgatctccggtgccctgggtcccctttctaacgcccccatcgataccatcaagacccgaatgcagcgagagggtggagccgccactcgaaacgagtctggtctctcccgattcactcgaatcacccgacagctcatccaccaggagggtttccgagctctgtacaagggtatcactccccgaatcatgcgagttgcccccggccaggccgtcaccttcaccgtctacgagtacatgcgaggtgtgctcgagaacacccccggtatcggaaagccttttgctgcccagtttgaggagtaa

SEQ ID NO: 2665 - protein, 319 aa, Yarrowia lipolytica CLIB122
MAADGKKKKNLAVDLLAGGTAGLFEALVCHPLDTIKVRMQLTNRQHGVKEVGFVQTGVNIAKKEGPLALYKGLGAVVTGIVPKMAIRFTSYEYYRGLLTKPDGTISAFHTFIAGVGAGTTEAVLVVNPTEVIKIRLQAQHHSMADPLDVPKYRNAAHCLYTVVREEGPSALYRGVILTATRQATNQGVNFTVYSELKARLNEMQPQFKGVLPSWQTSIIGLISGALGPLSNAPIDTIKTRMQREGGAATRNESGLSRFTRITRQLIHQEGFRALYKGITPRIMRVAPGQAVTFTVYEYMRGVLENTPGIGKPFAAQFEE

SEQ ID NO: 2666 - DNA, 912 bp, Candida albicans SC5314
  CDS (1)..(912): transl_table=12
atgtcttctacacaaaaacaaaagaagggtgctgttgatttcgttgctgggggtgttgctggtttattcgaagctttgtgttgtcatccattagataccatcaaagtgagaatgcaattatacaaaaaatccggtcaaaaaccaccaggttttattaaaacaggtgtcaatattgtccaaaaagaaggatttttgtcattatataaaggtttgggggccgttgttattggtattgtgccaaaaatggctatcagattcagttcatatgaattttaccgttcattctttttagacgaaaatggcaaaatttccactggtaagactttccttgctggtgttggtgctggtattaccgaatctgtcatggttgttaatcctatggaagttgtgaaaattagattacaagcacaacatcattctatgaaggacccattggacattccaaaatacagaaacgctcctcatgctgcatatcttattgtcaaggaagaaggtttcagtactttataccgtggtgtttctttaacttgtgccagacaagctaccaaccaaggtgctaactttgctacatattctaccatcaaagcatatcttcaaaaacaacaaaacactgaattattaccagcatggcaaaccagtattgtcggtttgatttctggtgcagtcggtccattaaccaatgctccattggataccattaaaacaagattacaaaagagtaagtttaccaacaaggaaaacggattggttcgtattgtcaaaatcggtaaacaattagtcaaagaagaaggtattaacgctttgtacaagggtatcactccaagaatcatgagagttgctccaggtcaagctgtggtattcacagtgtatgaagctgtcaaacattatttgacaaatgaacctactgcttaa

SEQ ID NO: 2667 - protein, 303 aa, Candida albicans SC5314
MSSTQKQKKGAVDFVAGGVAGLFEALCCHPLDTIKVRMQLYKKSGQKPPGFIKTGVNIVQKEGFLSLYKGLGAVVIGIVPKMAIRFSSYEFYRSFFLDENGKISTGKTFLAGVGAGITESVMVVNPMEVVKIRLQAQHHSMKDPLDIPKYRNAPHAAYLIVKEEGFSTLYRGVSLTCARQATNQGANFATYSTIKAYLQKQQNTELLPAWQTSIVGLISGAVGPLTNAPLDTIKTRLQKSKFTNKENGLVRIVKIGKQLVKEEGINALYKGITPRIMRVAPGQAVVFTVYEAVKHYLTNEPTA

SEQ ID NO: 2668 - DNA, 969 bp, Ustilago maydis 521
  CDS (1)..(969)
atgtcgaaatccgaggtcaacaataagtccaaggtggcaccttccacccatttgatcgccggtggtattgcaggtttcgccgaggcatgcacttgtcatcctctggacacgatcaaggtgcgcatgcagctctcgcgtaggggcaaaaaggcgggtgaaaagccacggggctttatcgccacaggcgctcacattatcaaacgtgagacacccttgggtctctacaagggtcttggagccgttgtggctggtattgttcccaagatggcgatccgattcatgagtttcgagcagtacaagacggctttggcggacaagacgacgggcaagacgtcgccacaaggagttttcctcgccggtctcggagctggtacgacagaagccgtggctgtggtcaacccgatggaggtggtcaagattcggctgcaagcacagcagcactcactcgccgatcctctcgaggtgcctcgctaccgtaacgccgcacacgcgctctacacgatcatccgcgaagaggggttcatgacgctgtaccgtggtgtagcgctcaccgccgcacgacaggctaccaatcaggccgctaacttcaccgcctaccaggagctcaagggcgctgcgcagcgcttccacggcaccaccgagctgccttcgtacgagacggcggtgattggtctgatctcgggtgctctgggacccttctcaaacgcgcccattgacacgatcaagacgcgtatccagcgagcgtccaaggtggaaggcgagaccgccattagccgtgtggtcaaggtggccaaggacatgtttgcacaggaaggtgcgagcgcgttctggaagggtatcactcctcgtgtagcacgtgtggcgcccggtcaggcggtggtgttcaccatttacgaaaaggtcaagggctacattgaggcagccaagacgggcgactttagccttaccgacactcgatccgacgagtga

SEQ ID NO: 2669 - protein, 322 aa, Ustilago maydis 521
MSKSEVNNKSKVAPSTHLIAGGIAGFAEACTCHPLDTIKVRMQLSRRGKKAGEKPRGFIATGAHIIKRETPLGLYKGLGAVVAGIVPKMAIRFMSFEQYKTALADKTTGKTSPQGVFLAGLGAGTTEAVAVVNPMEVVKIRLQAQQHSLADPLEVPRYRNAAHALYTIIREEGFMTLYRGVALTAARQATNQAANFTAYQELKGAAQRFHGTTELPSYETAVIGLISGALGPFSNAPIDTIKTRIQRASKVEGETAISRVVKVAKDMFAQEGASAFWKGITPRVARVAPGQAVVFTIYEKVKGYIEAAKTGDFSLTDTRSDE

SEQ ID NO: 2670 - DNA, 1029 bp, Cryptococcus neoformans var. neoformans B-3501A
  CDS (1)..(1029)
atgtcttctacaacatccaaaccctttgggggaggcgtcactggtgacagagtggcccctcctcctcccaaggccacaagcggtaaagagaaggtacctctgagtacgcatctgatcgcgggtggtgtcgctggcttagcagaatcacttgcttgtcatcctttggataccattaaggttcgaatgcaactatcaaaatccagaaaagcgaagggactcaaaccattaggcttctttgccacaggaagacaaattgctgctcgtgagacacctctgggcctgtacaagggtcttggtgctgtcgttagcggaattgtacccaagatggccattcgttttgctagtttcgagatgtacaagggatggttatcgaatcctgatggaagcatctcctcgaaagccacatttttagctggtctcggtgccggtgcgacagaggcggtagctgtcgtgacacccatggaagtaattaagattcgcctgcaagctcagcaacactcattggctgatcccctcgacatccctagatatcgcaacgccgcccacgctgcctttaccattgtccgagaggaaggaatcgctaccctctatcggggtgtttccctcaccgccctccgacaagcgacaaatcaaggtgtgaatttcacagcttatcagcaatttaagaaatgggccatggacttccaaccgcagcataaggaatcaggccaactgccaagctggcagactatgattttaggcttggttagtggtgccatgggaccattctccaacgctccaattgatactattaaaactcgtattcagaaagcttcaaaagtggaaggggaaaccgccctatcccggatggccaaggtcgcttcggaaatgtttaggaacgaaggggccaaggcgttttacaagggtattactcctcgtgtcttgcgtgtggctcctggccaggctattgtgttcactgtgtatgagcgtgtgaagaagatgattgatgttgcaaagggaactgctttaggtgccgaatacgacgagtag

SEQ ID NO: 2671 - protein, 342 aa, Cryptococcus neoformans var. neoformans B-3501A
MSSTTSKPFGGGVTGDRVAPPPPKATSGKEKVPLSTHLIAGGVAGLAESLACHPLDTIKVRMQLSKSRKAKGLKPLGFFATGRQIAARETPLGLYKGLGAVVSGIVPKMAIRFASFEMYKGWLSNPDGSISSKATFLAGLGAGATEAVAVVTPMEVIKIRLQAQQHSLADPLDIPRYRNAAHAAFTIVREEGIATLYRGVSLTALRQATNQGVNFTAYQQFKKWAMDFQPQHKESGQLPSWQTMILGLVSGAMGPFSNAPIDTIKTRIQKASKVEGETALSRMAKVASEMFRNEGAKAFYKGITPRVLRVAPGQAIVFTVYERVKKMIDVAKGTALGAEYDE

SEQ ID NO: 2672 - DNA, 921 bp, Vitis vinifera
  CDS (1)..(921)
atgtcggagtccaagaaaaccacaattccgccttacgtgaaagccctctccggctctatcggaggaatcgtggaggcgtcttgtctgcagcctatcgacgtcatcaaaaccaggttgcagctcgacacttccggcacctacaagggaatcatccactgtggcgccaccgtttatcgtacggaaggcgtgcgagccctatggaaggggttgactcccttcgccactcacctcaccctcaaatacactcttcgaatgggatccaatgctctgtttcagagtgccttcaaggattctcagaccggacagctcagcaacacgggtcggcttctttccggtttcggggcgggtgtgcttgaggctcttgttattgttacgccctttgaggtggttaaaattagactacagcagcagaggggattgagtcctgagcttctaaaatacaaaggtccaatacactgtgctcgtacaatcattcgtgaagaaggccttcgtggcctttgggcaggggcagctccaactgttatgcggaatgggacaaaccaggctgccatgtttacagcaaagaatgcttttgatggaatcttgtggaagaaacaagaaggtgatgggaaggtcctccaaccatggcaatctatgatttctggattccttgctggcacagcaggtcctgtgtgcactggcccctttgatgtagtaaaaacgagactgatggctcagggtcgagctggtggaaagttgaagtacaaaggcatggtccatgctattagaacaatatttgctgaggaaggattgcttgccctgtggaaaggactgctacctcggctcatgaggatcccacctggacaggccatcatgtggggtgtggctgaccaagtgacaggcttttacgagaggagacatattcataatgcacctttatag

SEQ ID NO: 2673 - protein, 306 aa, Vitis vinifera
MSESKKTTIPPYVKALSGSIGGIVEASCLQPIDVIKTRLQLDTSGTYKGIIHCGATVYRTEGVRALWKGLTPFATHLTLKYTLRMGSNALFQSAFKDSQTGQLSNTGRLLSGFGAGVLEALVIVTPFEVVKIRLQQQRGLSPELLKYKGPIHCARTIIREEGLRGLWAGAAPTVMRNGTNQAAMFTAKNAFDGILWKKQEGDGKVLQPWQSMISGFLAGTAGPVCTGPFDVVKTRLMAQGRAGGKLKYKGMVHAIRTIFAEEGLLALWKGLLPRLMRIPPGQAIMWGVADQVTGFYERRHIHNAPL

SEQ ID NO: 2674 - DNA, 975 bp, Neurospora crassa
  CDS (1)..(975)
atggcaaccaaagtcaaccaggatcccaagaagcggacttccgctgccaccaacctcatcgctggtggtggtgccggtatgatggaggctcttgtctgccaccctcttgataccatcaaggtccgcatgcagctctccaagcgcggccgcgtgcccggccaagccaagcgtggcttcatccgcaccggtgtcgagattgtcaagaaggagacggcgctcggtctttacaagggtctcggtgccgttctgacgggtatcgtccccaagatggccatccgtttcacctcgttcgagtggtacaagcagctcctggccgacaagcagactggtgttgtctcgggtcaggccaccttcttcgccggcttggctgccggtgtcaccgaggccgttgccgttgtcactcccatggaggtcatcaagattcgtctgcaggcgcagcaccactccatggctgatcctttggacgttcccaagtaccgcaacgccgcgcatgcgctctacactgtcgtgaaggaggagggttttggtgcgctttaccgcggtgtttccctgactgcgctccgccagggttccaaccaggccgtcaacttcactgcctacagctacttcaagaagtggctctatgattaccagcccgaatatgtcggccagaacctgccctcttaccaaaccactcttattggtctcgtttctggtgctatgggtcctctctcgaacgctcctatcgataccatcaagaccagactccagaagagcgttgctcagcccggcgagacggcattccagagaattaccaagatttctgctgagatgttcaagcaagaagggttccacgccttctacaagggcatcaccccccgcatcatgcgtgtcgcgcccggtcaggccgtcacatttactgtctacgagttccttaagcagaagctcgagcggagcggtcctgctgctttgaccggtggaaggtatgaggagtga

SEQ ID NO: 2675 - protein, 324 aa, Neurospora crassa
MATKVNQDPKKRTSAATNLIAGGGAGMMEALVCHPLDTIKVRMQLSKRGRVPGQAKRGFIRTGVEIVKKETALGLYKGLGAVLTGIVPKMAIRFTSFEWYKQLLADKQTGVVSGQATFFAGLAAGVTEAVAVVTPMEVIKIRLQAQHHSMADPLDVPKYRNAAHALYTVVKEEGFGALYRGVSLTALRQGSNQAVNFTAYSYFKKWLYDYQPEYVGQNLPSYQTTLIGLVSGAMGPLSNAPIDTIKTRLQKSVAQPGETAFQRITKISAEMFKQEGFHAFYKGITPRIMRVAPGQAVTFTVYEFLKQKLERSGPAALTGGRYEE

SEQ ID NO: 2676 - DNA, 888 bp, Arabidopsis thaliana
  CDS (1)..(888)
atgaaagcagtctcaggctcactaggcggagtcgtcgaggcttgttgtctccaaccaatcgacgtaatcaaaacgcgtctccagctagatcgcgtcggcgcttacaaaggaatcgctcactgtggttcaacggtggttcgcaccgaaggagttcgtgctctctggaaaggcttaacaccgttcgctactcatctcacgcttaagtacacgcttcggatgggatccaacgccatgtttcaaaccgcctttaaggattccgagaccggaaaggtcagcaatcgtggccgttttctttctggattcggcgccggtgttcttgaagctctcgccattgttacaccctttgaggtggtgaaaattagacttcagcagcagaagggattaagtcctgagcttttcaagtacaaaggaccaatacattgtgctagaaccatcgtgagagaagaaagcatacttggtttatggtcaggtgcagcaccaacagttatgcgaaacggaaccaaccaagctgtaatgttcacagcgaaaaacgcatttgacatactcttgtggaacaaacacgaaggtgacggtaaaatcttgcagccatggcagtcaatgatctcagggtttttagctggaaccgcaggtccgttctgcacaggaccgtttgatgtggtgaaaacgaggttgatggctcagagcagagacagtgaaggtgggattagatataaagggatggttcatgccattagaacgatttatgcagaggaaggattagtggccttatggagagggttattgccgaggctaatgaggattcctccaggacaagccattatgtgggctgttgctgatcaagtcactggtctttatgagatgagatatcttcggaatgctcctttatag

SEQ ID NO: 2677 - protein, 295 aa, Arabidopsis thaliana
MKAVSGSLGGVVEACCLQPIDVIKTRLQLDRVGAYKGIAHCGSTVVRTEGVRALWKGLTPFATHLTLKYTLRMGSNAMFQTAFKDSETGKVSNRGRFLSGFGAGVLEALAIVTPFEVVKIRLQQQKGLSPELFKYKGPIHCARTIVREESILGLWSGAAPTVMRNGTNQAVMFTAKNAFDILLWNKHEGDGKILQPWQSMISGFLAGTAGPFCTGPFDVVKTRLMAQSRDSEGGIRYKGMVHAIRTIYAEEGLVALWRGLLPRLMRIPPGQAIMWAVADQVTGLYEMRYLRNAPL

SEQ ID NO: 2678 - DNA, 1002 bp, Oryza sativa
  CDS (1)..(1002)
atggccgccgccgccgcgtccccctcctcttccccgccgccgccgccgatgtcgccggcaccgcaggccgcttcgccggcggaggatcggcggggcgggagggcaccggtccccccctacgtgaaggcggcggcggggtcggtcggcggcgtgatggaggcgtgctgcctgcagccgatcgacgtcatcaagacgcggctgcagctagaccgctcgggggcgtaccggggcatcgcgcactgcggcaccaccgtcgtgcgctccgagggcgtgcgcgcgctctggaaggggctcacgcccttcgccacccacctcacgctcaagtacgcgctccgcctcggctccaacgccgtgctgcagtccgcgttcaaggaccccggcacgggcaaggtctccgcgcacggccgcctcgcctccgggttcggcgccggcgtcctcgaggccctcctcatcgtcacccccttcgaggtggttaaaatcaggttgcagcaacaaaaaggtctaagccctgacctgctgagatataaggggccaatacattgtgctaggacgattgttactgaggagggtctttttggcctgtgggctggagcattaccaaccgtcatgcgtaatggcacaaaccaagccgcaatgttcactgccaagaatacatttgatattgttctctggaagaagcatgaaggagatgggaaggttctccagccatggcagtcaatgatttcaggttttcttgcaggaactgcaggtccgatctgcactggacccttcgatgtcgtgaagactagactgatggcccaggggagaactggtgacatcaagtacaagggtatggtccacgcgatacgcacaatatacactgaagagggtctcagagccctttggaaaggtttgcttccgaggcttatgaggattccacctggtcaggctataatgtgggcggtggctgatcaggtgatgggcctctatgagagatcatatctgcagccggctcatatgtaa

SEQ ID NO: 2679 - protein, 333 aa, Oryza sativa
MAAAAASPSSSPPPPPMSPAPQAASPAEDRRGGRAPVPPYVKAAAGSVGGVMEACCLQPIDVIKTRLQLDRSGAYRGIAHCGTTVVRSEGVRALWKGLTPFATHLTLKYALRLGSNAVLQSAFKDPGTGKVSAHGRLASGFGAGVLEALLIVTPFEVVKIRLQQQKGLSPDLLRYKGPIHCARTIVTEEGLFGLWAGALPTVMRNGTNQAAMFTAKNTFDIVLWKKHEGDGKVLQPWQSMISGFLAGTAGPICTGPFDVVKTRLMAQGRTGDIKYKGMVHAIRTIYTEEGLRALWKGLLPRLMRIPPGQAIMWAVADQVMGLYERSYLQPAHM

SEQ ID NO: 2680 - DNA, 894 bp, Glycine max
  CDS (1)..(894)
atgggagatgtggctaaggaccttgcagctgggactgttggaggggcagcacagttgatatgtggacacccctttgacaccatcaaggtcaagctccaaagccagcctgcaccactccctggtcagcttcccaagtattcaggtgcatttgatgctgtcaagcagacaatagcagctgaaggaccaaggggtttatacaaaggcatgggtgctccgcttgctacggtagcagccttcaatgctgtcctgtttacagtgaggggacaaatggaaacattagtgaggtccaatcctggtgcccccctcacagtggatcagcaggttgtttgtggggctggagccggagtagctgtttccattcttgcttgcccaactgaattgatcaaatgcaggttgcaagcacaaagtgcgcttgctggctctgaaacagctaccgtggctgttaagtatggaggacccatggatgtggccaggcatgttctcaagtcagaagggggcatgagaggtcttttcaagggcttggttcccactatggggcgtgagatacctggaaatgctatcatgtttggtgtatacgaagcattaaagcaaaagtttgcaggaggcactgatacttctgggctaagtagaggttctctgattgttgccggaggcttggctggagcttccttctggttcttagtttacccaactgatgttattaagagtgtgattcaagtagatgatcacagaaacccaaaattttctggttcatttgatgcattcagaaagattcgagctacagaagggttcaaaggcttgtataagggttttggtcctgcaatggctcgaagtgttcctgcaaatgcagcatgtttcttggcatatgagatgacaagatcagctctgggatga

SEQ ID NO: 2681 - protein, 297 aa, Glycine max
MGDVAKDLAAGTVGGAAQLICGHPFDTIKVKLQSQPAPLPGQLPKYSGAFDAVKQTIAAEGPRGLYKGMGAPLATVAAFNAVLFTVRGQMETLVRSNPGAPLTVDQQVVCGAGAGVAVSILACPTELIKCRLQAQSALAGSETATVAVKYGGPMDVARHVLKSEGGMRGLFKGLVPTMGREIPGNAIMFGVYEALKQKFAGGTDTSGLSRGSLIVAGGLAGASFWFLVYPTDVIKSVIQVDDHRNPKFSGSFDAFRKIRATEGFKGLYKGFGPAMARSVPANAACFLAYEMTRSALG

SEQ ID NO: 2682 - DNA, 903 bp, Brassica napus
  CDS (1)..(903)
atggcggatgcggcgaaagatttagcttcagggactgttggaggagcggctcagctaatcgtaggccacccatttgacacaatcaaggtcaagcttcagagccagcctgctccatcaccgggacaaccaccgaggtacacgggagcaatcgatgcggttaagcagaccgttgcttctgaaggacctaaaggtttgtacaaaggtatgggagctcctcttgcaaccgttgctgccttcaacgcggttctgttcaccgtgagaggtcagatggaaggtctgcttaggtctgaacctggagtgccgttgaccattagtcaacagtttgtgtgcggtgcaggcgctggtttcgctgtctcgttccttgcttgtcctaccgagttgatcaaatgcaggttgcaagcacaaggtgctggagggggagcctctaccacaggctcagtggttgcagctgtgaaatacggtggacctatggacgtggcccgtcacgtgctacgatcagaaggtggagcaagaggtctattcaaaggtttatttccgacatttgctcgtgaagtccccggaaacgcgacaatgtttgcagcctacgaagctttcaagaggttcttagctggtggttctgacacttcaagcttaggacaaggatcattgatcatggctggtggagttgctggtgcatccttctggggaattgtgtacccgaccgatgtggtgaagagtgttcttcaagtagatgattataagaaccctaagtacaagggttcaatggatgcttttaggaaaattctgaaagctgaaggagtgaaaggtttgtataaagggtttggtccagccatggctaggagtgttcctgctaatgctgcttgcttcttggcatatgagaagacaaggtcaagcttgggataa

SEQ ID NO: 2683 - protein, 300 aa, Brassica napus
MADAAKDLASGTVGGAAQLIVGHPFDTIKVKLQSQPAPSPGQPPRYTGAIDAVKQTVASEGPKGLYKGMGAPLATVAAFNAVLFTVRGQMEGLLRSEPGVPLTISQQFVCGAGAGFAVSFLACPTELIKCRLQAQGAGGGASTTGSVVAAVKYGGPMDVARHVLRSEGGARGLFKGLFPTFAREVPGNATMFAAYEAFKRFLAGGSDTSSLGQGSLIMAGGVAGASFWGIVYPTDVVKSVLQVDDYKNPKYKGSMDAFRKILKAEGVKGLYKGFGPAMARSVPANAACFLAYEKTRSSLG

SEQ ID NO: 2684 - DNA, 1062 bp, Brassica napus
  CDS (1)..(1062)
atggcatcagaggatgtgaagagcaccgagtcggcagctgtatcaacgatcgtaaacctggcggaggaagcgaagttggcgagagaaggagtcaaagctccgagccatgctgtcctcagcatctgcaagtctctcttcgccggtggcgtcgctggtggagtgtcacgaactgcagttgcacctctggaaaggatgaagatattgcttcaggtccaaaatccacataacataaagtatagtgggacagtccaaggattgaagtatatttggagaaccgagggggttcgtggactgttcaaaggaaacggcaccaactgtgctcgtattgttcctaactcggctgtcaaatttttcagctatgagcaggcttcaaagggtatactgtacatgtatcgtcagcagacaggaaatgagaatgcacaactcactcctgttttacggcttggagctggtgcaactgctggaataatagccatgtctgcaacatacccaatggatatggttcgtggaaggctaactgtccagactgcaaattctccttatcaatatagaggaattgcacatgctttatcaactgtcctgagagaggaaggtccaagggccctgtaccgtggttggcttccatcagtgattggagttgttccatatgtgggcttgaactttgcggtctatgagtctctaaaggactggctagtcaaagacaatcctttcggactagtggagaacaacgagctgaccatcataacgagactctcgtgtggtgctatagctggaacggttggtcaaacaattgcttatccactcgatgtgattcgtaggagaatgcaaatggtggggtggaaagatgcttcctctgtcgttacaggcgaggggagaagcaagcttgaatacaacggtatggttgatgcatttaggaagacagttcgtcatgaaggctttggagctttgtacaagggtttggtccccaactcagtgaaggttgtaccatcaattgcgattgcatttgtgacatatgagatggtgaaagacgttctaggagtggagtttaagatatcagactaa

SEQ ID NO: 2685 - protein, 353 aa, Brassica napus
MASEDVKSTESAAVSTIVNLAEEAKLAREGVKAPSHAVLSICKSLFAGGVAGGVSRTAVAPLERMKILLQVQNPHNIKYSGTVQGLKYIWRTEGVRGLFKGNGTNCARIVPNSAVKFFSYEQASKGILYMYRQQTGNENAQLTPVLRLGAGATAGIIAMSATYPMDMVRGRLTVQTANSPYQYRGIAHALSTVLREEGPRALYRGWLPSVIGVVPYVGLNFAVYESLKDWLVKDNPFGLVENNELTIITRLSCGAIAGTVGQTIAYPLDVIRRRMQMVGWKDASSVVTGEGRSKLEYNGMVDAFRKTVRHEGFGALYKGLVPNSVKVVPSIAIAFVTYEMVKDVLGVEFKISD

SEQ ID NO: 2686 - DNA, 897 bp, Brassica napus
  CDS (1)..(897)
atggcggatgcggcgaaagatttagcttcagggactgttggaggagcggctcagctaatcgtaggccacccatttgatacaatcaaggtcaagcttcagagccagcctgctccatcaccgggacaaccaccgaggtacacgggagcaatcgatgcggttaagcagaccgttgcttctgaaggacctaaaggtttgtacaaaggtatgggagctcctcttgcaaccgttgctgccttcaacgcggttctgttcaccgtgagaggtcagatggaaggtctgcttaggtctgaacctggagtgccgttgaccattagtcaacagtttgtgtgcggtgcaggcgctggtttcgctgtctcgttccttgcttgtcctaccgagttgatcaaatgcaggttgcaagcacaaggtgctggagcctctaccacaggctcagtggttgcagctgtgaaatacggtggacctatggacgtggcccgtcacgtgctacgatcggaaggtggagcaagaggtctattcaaaggtttatttccgacatttgctcgtgaagtccccggaaacgcgacaatgtttgcagcctacgaagctttcaagaggttcttagctggtggttctgacacttcaagcttaggacaagggtcattgatcatggctggtggagttgctggtgcgtccttctgggggtttgtgtacccgaccgatgtggtgaagagtgttcttcaggttgatgattataagaaccctaagtacaagggttcgatggatgcttttaggaagattctgaaagctgaaggagtgaaaggtttgtataaagggtttggtccagctatggctaggagtgttcctgctaatgctgcttgtttcttggcttatgagatgactaggtcaagcttgggataa

SEQ ID NO: 2687 - protein, 298 aa, Brassica napus
MADAAKDLASGTVGGAAQLIVGHPFDTIKVKLQSQPAPSPGQPPRYTGAIDAVKQTVASEGPKGLYKGMGAPLATVAAFNAVLFTVRGQMEGLLRSEPGVPLTISQQFVCGAGAGFAVSFLACPTELIKCRLQAQGAGASTTGSVVAAVKYGGPMDVARHVLRSEGGARGLFKGLFPTFAREVPGNATMFAAYEAFKRFLAGGSDTSSLGQGSLIMAGGVAGASFWGFVYPTDVVKSVLQVDDYKNPKYKGSMDAFRKILKAEGVKGLYKGFGPAMARSVPANAACFLAYEMTRSSLG

SEQ ID NO: 2688 - DNA, 1062 bp, Brassica napus
  CDS (1)..(1062)
atggcatcagaggatgtgaagagcaccgagtcggcagctgtatcaacgatcgtaaacctggcggaggaagcgaagttggcgagagaaggagtcaaagctccgagccatgctgtcctcagcatctgcaagtctctcttcgccggtggcgtcgctggtggagtgtcacgaactgcagttgcacctctggaaaggatgaagatattgcttcaggtccaaaatccacataacataaagtatagtgggacagtccaaggattgaagtatatttggagaaccgagggggttcgtggactgttcaaaggaaacggcaccaactgtgctcgtattgttcctaactcggctgtcaaatttttcagctatgagcaagcttcaaagggtatactgtacatgtatcgtcagcagccaggaaatgaaaatgcacaactcactcctgttttacggcttggagctggtgcaactgctggaataatagccatgtctgcaacatacccaatggatatggttcgtggaaggctaactgtccagactgcaaattctccttatcaatatagaggaattgcacatgctttatcaactgtcctgagagaggaaggtccaagggccctgtaccgtggttggcttccatcagtgattggagttgttccatatgtgggcttgaactttgcggtctatgagtctctaaaggactggctagtcaaagacaatcctttcggactagtggagaacaacgagctgaccatcataacgagactctcgtgtggtgccatagctggaacggttggtcaaacaattgcttatccactcgatgtgattcgtaggagaatgcaaatggtggggtggaaagatgcttcctctgtcgttacaggcgaggggagaagcaagcttgaatacaacggtatggttgatgcatttaggaagacagttcgtcatgaaggctttggagctttgtacaagggtttggtccccaactcagtgaaggttgtaccatcgattgcgattgcgtttgtgacatatgagatggtgaaagacgttctaggagtggagtttaagatatcagactga

SEQ ID NO: 2689 - protein, 353 aa, Brassica napus
MASEDVKSTESAAVSTIVNLAEEAKLAREGVKAPSHAVLSICKSLFAGGVAGGVSRTAVAPLERMKILLQVQNPHNIKYSGTVQGLKYIWRTEGVRGLFKGNGTNCARIVPNSAVKFFSYEQASKGILYMYRQQPGNENAQLTPVLRLGAGATAGIIAMSATYPMDMVRGRLTVQTANSPYQYRGIAHALSTVLREEGPRALYRGWLPSVIGVVPYVGLNFAVYESLKDWLVKDNPFGLVENNELTIITRLSCGAIAGTVGQTIAYPLDVIRRRMQMVGWKDASSVVTGEGRSKLEYNGMVDAFRKTVRHEGFGALYKGLVPNSVKVVPSIAIAFVTYEMVKDVLGVEFKISD

SEQ ID NO: 2690 - DNA, 942 bp, Brassica napus
  CDS (1)..(942)
atgtcgtcgtcggcgaagacggattcgaaaagccaggcgtcgattccgccctacatgaaggcaatctcgggttcgctgggcggagtggtcgaggcgtgctgtctccagccgatcgacgtcatcaagacgcgtctccagctagatcgcggcggcgcctacaagggaatcgcgcactgcggctccacggtggttcgcacggaaggcgtccgcgctctctggaaaggtttgacgccgttcgccactcacctgacgctcaagtacacgcttcggatgggatccaacgccatgttccagaccgtgttcaaggactcggagacgggcaaggtgagcaaccacggccgtttgctatccggattcggcgccggtgttctcgaagcgctcgccattgttacaccctttgaggtggtgaagattagacttcagcaacagaaaggtttgagtcccgagcttttcaagtacaaaggtcccatccactgtgctcgtaccatcgtcagagaagaatcctttttgggtctatggtctggtgctgcacccaccgttatgcgtaacggcaccaaccaagctgtcatgttcactgctaaaaactcctttgacgtcctcttgtggaacaagcacgaaggcgacggccaagccttgcagccctggcagtccatgatctctgggttcttagctggaaccgctggtcccttctgcaccggaccttttgatgtggtcaagaccaggttgatggctcagaccagagacggtgaaggtgggctgaaatacaaagggatggttcacgccattaggaccatttatgctgaggaaggactagtggctctatggagaggattgttgccgaggctgatgaggattcctcctggacaagccatcatgtgggctgttgctgatcaggtcactggtctctatgaaaagagatatctccttaacgcacctttatag

SEQ ID NO: 2691 - protein, 313 aa, Brassica napus
MSSSAKTDSKSQASIPPYMKAISGSLGGVVEACCLQPIDVIKTRLQLDRGGAYKGIAHCGSTVVRTEGVRALWKGLTPFATHLTLKYTLRMGSNAMFQTVFKDSETGKVSNHGRLLSGFGAGVLEALAIVTPFEVVKIRLQQQKGLSPELFKYKGPIHCARTIVREESFLGLWSGAAPTVMRNGTNQAVMFTAKNSFDVLLWNKHEGDGQALQPWQSMISGFLAGTAGPFCTGPFDVVKTRLMAQTRDGEGGLKYKGMVHAIRTIYAEEGLVALWRGLLPRLMRIPPGQAIMWAVADQVTGLYEKRYLLNAPL

SEQ ID NO: 2692 - DNA, 915 bp, Brassica napus
  CDS (1)..(915)
atggtagctgatagcaaatcaaacctttcattgcccaaaactttcgcctgcagtgccttctctgcctgcgtcgccgaggtatgtacgattccgttggacactgctaaagtgaggcttcagctccaaaagtctgccattgctggagatgttactttgcctaagtatcgtggattgctgggaactgttggtaccatagcaagggaagaagggcttcgttctctttggaaaggtgttgtaccaggcttgcatcgccaatgcctctttggaggtctaaggatcgggatgtatgagccggtcaaaaatttgtacgttggcaaagaccatgtaggcgatgttccgttgagcaagaagatccttgctggtttgacaacaggtgctctgggtatcatggtagcgaatccaactgatcttgtgaaagttagacttcaggctgaagggaaactagctgcaggtgtgccaagacggtatactggatcgttgaatgcgtattcaaccattgtgagacaggaaggagtcagagctctgtggactggtcttggacctaatgtagctagaaacgcaatcatcaatgctgctgaattagcgagttacgatcaagtgaaacagacaatcttgaagattccgggtttcactgataacgttgtcacacacattctatctggactgggagcaggtttctttgctgtctgcattggttcccctgttgacgtcgttaagtcaagaatgatgggagatccttcttacaaaggcactattgactgcttcgtcaaaacactgaaggcagacggacctatggcattttacaagggtttcatccccaactttggacgtctaggctcatggaacgtcatcatgtttttgaccctcgaacaggcaaagaagtatgtccgggaactagaatcgtccaagaaataa

SEQ ID NO: 2693 - protein, 304 aa, Brassica napus
MVADSKSNLSLPKTFACSAFSACVAEVCTIPLDTAKVRLQLQKSAIAGDVTLPKYRGLLGTVGTIAREEGLRSLWKGVVPGLHRQCLFGGLRIGMYEPVKNLYVGKDHVGDVPLSKKILAGLTTGALGIMVANPTDLVKVRLQAEGKLAAGVPRRYTGSLNAYSTIVRQEGVRALWTGLGPNVARNAIINAAELASYDQVKQTILKIPGFTDNVVTHILSGLGAGFFAVCIGSPVDVVKSRMMGDPSYKGTIDCFVKTLKADGPMAFYKGFIPNFGRLGSWNVIMFLTLEQAKKYVRELESSKK

SEQ ID NO: 2694 - DNA, 951 bp, Glycine max
  CDS (1)..(951)
atgaaacaggatgttgcacaagataacaccaactcatatccaaagaaatcaatcccaccctacatgaaggctatctctggctcacttggagggattatggaggcttcttgcctgcagcccattgatgtgatcaagaccagattgcagcttgataggtcagggaattacaagggaatactgcattgtggtgccacgatttcacgaacagaaggggtacgagctttatggaaaggattgacaccttttgccacacatttgaccttgaagtatgcacttcgaatgggttcaaatgctgtacttcaatcagcgtttaaggaccctgagactggcaagcttagtggttatggacggatcctttctggctttggtgctggggtgcttgaggctattattattgtcactccatttgaggtggtgaagataagattgcagcagcagagaggtctaagcccggagcttttgaaatacaaaggtcctgttcactgtgctcgaatgattattagggaagaaggcttccgtgggctttgggcaggagttgctcctactgtgatgcgtaacgggacaaatcaatctgccatgtttactgccaaaaatgcttttgatgtacttctgtggaagaaacatgaaggggatgggagagttctcctaccgtggcaatctatgatttctggattccttgcaggcacagcaggtcctatttgtactggtccatttgatgttgtgaaaacaaggttgatggctcagacgcgagaaggcggtggtgtactgaaatataagggtatgatccatgccattagaacaatatatgtagaagaaggacttcttgccttatggaaaggtctgttgcctcgactcatgaggatcccacctggacaggccattatgtggggtgtagctgatcaaataattggtttgtacgagaggaggtatcttcatcattcaactttgtaa

SEQ ID NO: 2695 - protein, 316 aa, Glycine max
MKQDVAQDNTNSYPKKSIPPYMKAISGSLGGIMEASCLQPIDVIKTRLQLDRSGNYKGILHCGATISRTEGVRALWKGLTPFATHLTLKYALRMGSNAVLQSAFKDPETGKLSGYGRILSGFGAGVLEAIIIVTPFEVVKIRLQQQRGLSPELLKYKGPVHCARMIIREEGFRGLWAGVAPTVMRNGTNQSAMFTAKNAFDVLLWKKHEGDGRVLLPWQSMISGFLAGTAGPICTGPFDVVKTRLMAQTREGGGVLKYKGMIHAIRTIYVEEGLLALWKGLLPRLMRIPPGQAIMWGVADQIIGLYERRYLHHSTL

SEQ ID NO: 2696 - DNA, 975 bp, Triticum aestivum
  CDS (1)..(975)
atggcctcacccccgtccccgcccccgccctcgccgccggcgcgggccgacgagccacgcagcggcgagggcagggcgccgatcccgccctacgtcaaggcggcggcggggtcgctcggcggcgtgatggaggcgtgctgcctgcagcccatcgacgtcgtcaagacgaggctgcagctcgaccgcgcgggggtctaccgcggcatcgcgcactgcggcaccaccgtcgcgcgcgccgagggcgtgccggcgctctggaaggggctcacgcccttcgccacccacctcacgctcaagtacgcgctccgcctcggctccaatgccatgctgcagtccgccttcaaggaccccgtcaccggcaaggtctccgcgcagggccgcctcgcctccggcttcggcgccggcgtcctcgaggccctcatcatcgttaccccattcgaggtggtaaagattagattgcagcaacaaaaaggactaagcacggacctgctgaaatataaagggcccatacactgtgcaaagacaattgttcgtgaggaaggcatttttggtctgtggtctggagcatcaccaactgtcatgcgtaacggtacaaaccaagctgcgatgttcacagccaagaacacgatagacattcttctctggaagaagcatgaaggggacggcaaggttctccagccatggcagtccatggtctctgggtttcttgcaggaaccgcagggccgatctgcaccgggcctttcgacgtggtgaagaccaggctgatggcccaagggaggaccggggacatcaagtacaagggcatgttccatgcgatacggacgatacacgcggaagagggcctccgagccctgtggaaaggcctgcttcccaggctcatgaggattccacctggtcaggccataatgtggacagtggctgatcaggtgatgggcctttacgagcgaacatatctgcagtcggctcaggtgtaa

SEQ ID NO: 2697 - protein, 324 aa, Triticum aestivum
MASPPSPPPPSPPARADEPRSGEGRAPIPPYVKAAAGSLGGVMEACCLQPIDVVKTRLQLDRAGVYRGIAHCGTTVARAEGVPALWKGLTPFATHLTLKYALRLGSNAMLQSAFKDPVTGKVSAQGRLASGFGAGVLEALIIVTPFEVVKIRLQQQKGLSTDLLKYKGPIHCAKTIVREEGIFGLWSGASPTVMRNGTNQAAMFTAKNTIDILLWKKHEGDGKVLQPWQSMVSGFLAGTAGPICTGPFDVVKTRLMAQGRTGDIKYKGMFHAIRTIHAEEGLRALWKGLLPRLMRIPPGQAIMWTVADQVMGLYERTYLQSAQV

SEQ ID NO: 2698 - DNA, 903 bp, Glycine max
  CDS (1)..(903)
atgagtcttaagggatttttcgagggtggtgtcgcttccatcgtcgcaggctgcaccactcacccactcgacctcatcaaagttcgaatgcaacttcaagaaacccacactctccgcccagcctttgcctttcacgctcccactccaatgcctcctccgccgccctccggccccatctccgtcggcctccgcatcgttcagtcggagggactcgccgctcttttctccggcgtctccgccaccgtcctccgccagacgctctactccaccacccgcatgggcctctacgacgtcctcaagcgccactggaccgaccccgaccgcggaaccatgcccctcacaagaaaaatcacggccgggctcgtcgccggcgggatcggagccgccgtgggcaaccccgccgacgtggcgatggtgcgaatgcaggccgacgggcgcctcccgccggcggagcgtcgcaactacaacggcgtgttcgacgcgatacggcgcatgagtaaccaagaaggcgttggtagcctgtggcgcggttcagcgcttacggtgaaccgcgcgatgatcgttacggcttctcagttggcctcgtacgaccagtttaaggaaagcattttaggacgcggctggatggaggacgggcttgggacccacgtgttagcgagttttgcggcgggttttgtggcctcgattgcgtcgaaccccattgatgttataaagactagggtgatgaacatgaaggctgaggcttacaatggggccttggattgtgctctcaagactgttagggccgaaggacctcttgccctttataagggtttcatccctacaatttcaaggcagggtcctttcaccgttgtcctctttgtcaccctcgaacaagtcaggaagctcttcaaggacttttga

SEQ ID NO: 2699 - protein, 300 aa, Glycine max
MSLKGFFEGGVASIVAGCTTHPLDLIKVRMQLQETHTLRPAFAFHAPTPMPPPPPSGPISVGLRIVQSEGLAALFSGVSATVLRQTLYSTTRMGLYDVLKRHWTDPDRGTMPLTRKITAGLVAGGIGAAVGNPADVAMVRMQADGRLPPAERRNYNGVFDAIRRMSNQEGVGSLWRGSALTVNRAMIVTASQLASYDQFKESILGRGWMEDGLGTHVLASFAAGFVASIASNPIDVIKTRVMNMKAEAYNGALDCALKTVRAEGPLALYKGFIPTISRQGPFTVVLFVTLEQVRKLFKDF

SEQ ID NO: 2700 - DNA, 891 bp, Zea mays
  CDS (1)..(891)
atgggggacgttgcgaaggacttgacggctgggaccgtgggaggggctgccaacctcatcgtcgggcacccgttcgacaccatcaaggtcaagctccagagccagcccacccctgctcccggacagctccccaagtacgccggcgccatcgatgctgtgaagcagacggtcgcggctgaaggtccgaggggcctatacaaggggatgggggcacctctggccaccgtagcggccttcaacgctgtcttgttcagtgtcagggggcagatggaggcgtttctcaggtcagagcctggtgtgccgctgacagtgaagcagcaggttgttgcgggcgccggtgctggaatcgcagtctccttcttggcttgtccaacagaactgatcaagtgcaggttgcaagcccagagttccttagccgaggcagccaccgcttctggtgtggctcttcccaaaggtccgatcgacgtggcgaagcatgttgtccgggacgccggcgccaaaggtctcttcaagggcctggtcccgacgatgggacgcgaggtccctggcaacgcactgatgttcggcgtgtacgaagccacgaagcagtacctggccggcggcccggacacgtcgggcctcggcaggggctcccaggtcctggcgggcggcctcgccggcgccgccttctggctgtccgtgtacccgacggacgtggtgaagagcgtgatccaggtggacgattacaagaagcccaagtactccgggtccctcgacgcgctgaggaagatcgtggcggctgatggggtgaagggcctgtacaaggggttcggacccgccatggcacgcagcgttccagccaatgccgcgacattcgtggcctacgagatcacgagatcggcgcttggttga

SEQ ID NO: 2701 - protein, 296 aa, Zea mays
MGDVAKDLTAGTVGGAANLIVGHPFDTIKVKLQSQPTPAPGQLPKYAGAIDAVKQTVAAEGPRGLYKGMGAPLATVAAFNAVLFSVRGQMEAFLRSEPGVPLTVKQQVVAGAGAGIAVSFLACPTELIKCRLQAQSSLAEAATASGVALPKGPIDVAKHVVRDAGAKGLFKGLVPTMGREVPGNALMFGVYEATKQYLAGGPDTSGLGRGSQVLAGGLAGAAFWLSVYPTDVVKSVIQVDDYKKPKYSGSLDALRKIVAADGVKGLYKGFGPAMARSVPANAATFVAYEITRSALG

SEQ ID NO: 2702 - DNA, 25 bp, Artificial sequence
  primer
atgtctcaaaaaaagaaggcttccc

SEQ ID NO: 2703 - DNA, 25 bp, Artificial sequence
  primer
ctactttaatggctttggctttggt

SEQ ID NO: 2704 - protein, 329 aa, Artificial sequence
  consensus sequence
  Variant (2)..(4): Xaa in position 2 to 4 is any amino acid
  Variant (6)..(13): Xaa in position 6 to 13 is any amino acid
  Variant (15)..(15): Xaa in position 15 is any amino acid
  Variant (17)..(17): Xaa in position 17 is any amino acid
  Variant (20)..(20): Xaa in position 20 is any amino acid
  Variant (22)..(22): Xaa in position 22 is any amino acid
  Variant (24)..(31): Xaa in position 24 to 31 is any amino acid
  Variant (32)..(63): Xaa in position 32 to 63 is any or no amino acid
  Variant (65)..(75): Xaa in position 65 to 75 is any amino acid
  Variant (78)..(80): Xaa in position 78 to 80 is any amino acid
  Variant (82)..(82): Xaa in position 82 is any amino acid
  Variant (85)..(125): Xaa in position 85 to 125 is any amino acid
  Variant (126)..(133): Xaa in position 126 to 133 is any or no amino acid
  Variant (135)..(136): Xaa in position 135 to 136 is any amino acid
  Variant (139)..(140): Xaa in position 139 to 140 is any amino acid
  Variant (141)..(141): Xaa in position 141 is any or no amino acid
  Variant (143)..(146): Xaa in position 143 to 146 is any amino acid
  Variant (147)..(147): Xaa in position 147 is any or no amino acid
  Variant (149)..(149): Xaa in position 149 is any amino acid
  Variant (151)..(152): Xaa in position 151 to 152 is any amino acid
  Variant (154)..(154): Xaa in position 154 is any amino acid
  Variant (158)..(158): Xaa in position 158 is any amino acid
  Variant (160)..(162): Xaa in position 160 to 162 is any amino acid
  Variant (163)..(176): Xaa in position 163 to 176 is any or no amino acid
  Variant (178)..(189): Xaa in position 178 to 189 is any amino acid
  Variant (190)..(190): Xaa in position 190 is any or no amino acid
  Variant (194)..(196): Xaa in position 194 to 196 is any amino acid
  Variant (197)..(198): Xaa in position 197 to 198 is any or no amino acid
  Variant (200)..(201): Xaa in position 200 to 201 is any amino acid
  Variant (203)..(205): Xaa in position 203 to 205 is any amino acid
  Variant (207)..(208): Xaa in position 207 to 208 is any amino acid
  Variant (210)..(217): Xaa in position 210 to 217 is any amino acid
  Variant (219)..(227): Xaa in position 219 to 227 is any amino acid
  Variant (229)..(234): Xaa in position 229 to 234 is any amino acid
  Variant (235)..(241): Xaa in position 235 to 241 is any or no amino acid
  Variant (243)..(250): Xaa in position 243 to 250 is any amino acid
  Variant (252)..(254): Xaa in position 252 to 254 is any amino acid
  Variant (256)..(257): Xaa in position 256 to 257 is any amino acid
  Variant (259)..(263): Xaa in position 259 to 263 is any amino acid
  Variant (265)..(265): Xaa in position 265 is any amino acid
  Variant (267)..(268): Xaa in position 267 to 268 is any amino acid
  Variant (270)..(270): Xaa in position 270 is any amino acid
  Variant (272)..(291): Xaa in position 272 to 291 is any amino acid
  Variant (292)..(307): Xaa in position 292 to 307 is any or no amino acid
  Variant (310)..(311): Xaa in position 310 to 311 is any amino acid
  Variant (314)..(314): Xaa in position 314 is any amino acid
  Variant (317)..(318): Xaa in position 317 to 318 is any amino acid
  Variant (320)..(322): Xaa in position 320 to 322 is any amino acid
  Variant (324)..(325): Xaa in position 324 to 325 is any amino acid
  Variant (327)..(328): Xaa in position 327 to 328 is any amino acid
GXXXGXXXXXXXXPXDXIKXRXQXXXXXXXXXXXXXXXXXXXXXXXXXXXXXXXXXXXXXXXXGXXXXXXXXXXXEGXXXLXKGXXXXXXXXXXXXXXXXXXXXXXXXXXXXXXXXXXXXXXXXXXXXXXXXXGXXAGXXXAXXXXXPXEXXKXRLQXQXXXXXXXXXXXXXXXXXYXXXXXXXXXXXXXEEGXXXXXLXXGXXXTXXRXXXXXXXXFXXXXXXXXXLXXXXXXXXXXXXXLXXXXXXXXGXXXGXXGXXXXXPXDXXKXRXXXXXXXXXXXXXXXXXXXXXXXXXXXXXXXXXXXXEGXXALXKGXXPXXXRXXPXXA

SEQ ID NO: 2705 - protein, 35 aa, Artificial sequence
  protein pattern
  Variant (2)..(7): Xaa in position 2 to 7 is any amino acid
  Variant (8)..(10): Xaa in position 8 to 10 is any or no amino acid
  Variant (12)..(12): Xaa in position 12 is Gly or Ser
  Variant (13)..(14): Xaa in position 13 to 14 is any amino acid
  Variant (15)..(15): Xaa in position 15 is Ala, Gly or Thr
  Variant (17)..(17): Xaa in position 17 is Trp or Tyr
  Variant (18)..(18): Xaa in position 18 is any amino acid
  Variant (20)..(21): Xaa in position 20 to 21 is any amino acid
  Variant (22)..(22): Xaa in position 22 is Leu or Pro
  Variant (23)..(23): Xaa in position 23 is Ala, Asn or Thr
  Variant (24)..(25): Xaa in position 24 to 25 is any amino acid
  Variant (27)..(27): Xaa in position 27 is Asn, Gln or Ser
  Variant (28)..(28): Xaa in position 28 is Ala, Gly or Val
  Variant (29)..(30): Xaa in position 29 to 30 is any amino acid
  Variant (31)..(31): Xaa in position 31 is Asn, Gln or Thr
  Variant (32)..(32): Xaa in position 32 is Ala, Gly, Ser or Val
  Variant (33)..(33): Xaa in position 33 is Ala or Val
  Variant (34)..(34): Xaa in position 34 is any amino acid
  Variant (35)..(35): Xaa in position 35 is Phe or Leu
AXXXXXXXXXEXXXXLXXGXXXXXXRXXXXXXXXX

SEQ ID NO: 2706 - protein, 30 aa, Artificial sequence
  protein pattern
  Variant (3)..(4): Xaa in position 3 to 4 is any amino acid
  Variant (5)..(5): Xaa in position 5 is Ala or Ser
  Variant (6)..(6): Xaa in position 6 is Phe, Leu or Met
  Variant (7)..(7): Xaa in position 7 is Trp or Tyr
  Variant (8)..(8): Xaa in position 8 is Lys or Arg
  Variant (10)..(10): Xaa in position 10 is Ile or Leu
  Variant (11)..(11): Xaa in position 11 is any amino acid
  Variant (13)..(17): Xaa in position 13 to 17 is any amino acid
  Variant (18)..(18): Xaa in position 18 is any or no amino acid
  Variant (20)..(21): Xaa in position 20 to 21 is any amino acid
  Variant (22)..(22): Xaa in position 22 is any or no amino acid
  Variant (24)..(24): Xaa in position 24 is Ile or Val
  Variant (25)..(25): Xaa in position 25 is any amino acid
  Variant (26)..(26): Xaa in position 26 is Phe or Trp
  Variant (27)..(29): Xaa in position 27 to 29 is any amino acid
  Variant (30)..(30): Xaa in position 30 is Asp or Glu
EGXXXXXXGXXPXXXXXXPXXXAXXXXXXX

SEQ ID NO: 2707 - protein, 26 aa, Artificial sequence
  protein pattern
  Variant (2)..(3): Xaa in position 2 to 3 is any amino acid
  Variant (4)..(4): Xaa in position 4 is Ala, Ser or Thr
  Variant (6)..(6): Xaa in position 6 is any or no amino acid
  Variant (8)..(13): Xaa in position 8 to 13 is any amino acid
  Variant (14)..(14): Xaa in position 14 is any or no amino acid
  Variant (16)..(16): Xaa in position 16 is any amino acid
  Variant (17)..(17): Xaa in position 17 is Asp or Glu
  Variant (18)..(18): Xaa in position 18 is any amino acid
  Variant (19)..(19): Xaa in position 19 is Ile or Val
  Variant (21)..(21): Xaa in position 21 is Cys, Thr or Val
  Variant (23)..(23): Xaa in position 23 is Ile, Leu or Met
  Variant (24)..(25): Xaa in position 24 to 25 is any amino acid
  Variant (26)..(26): Xaa in position 26 is Ala, Asp, Glu, Gly, Gln, Ser or Thr
GXXXGXAXXXXXXXPXXXXKXRXXXX

SEQ ID NO: 2708 - protein, 10 aa, Artificial sequence
  protein pattern
  Variant (2)..(2): Xaa in position 2 is Phe, Ile, Leu or Met
  Variant (4)..(4): Xaa in position 4 is any amino acid
  Variant (7)..(7): Xaa in position 7 is Thr or Val
  Variant (8)..(8): Xaa in position 8 is Lys or Arg
  Variant (9)..(9): Xaa in position 9 is Leu or Met
PXDXIKXXXQ

SEQ ID NO: 2709 - protein, 14 aa, Artificial sequence
  protein pattern
  Variant (2)..(2): Xaa in position 2 is any amino acid
  Variant (4)..(4): Xaa in position 4 is any amino acid
  Variant (5)..(5): Xaa in position 5 is Asp or Glu
  Variant (7)..(7): Xaa in position 7 is Ile or Val
  Variant (9)..(10): Xaa in position 9 to 10 is any amino acid
  Variant (11)..(11): Xaa in position 11 is Ile or Leu
  Variant (13)..(13): Xaa in position 13 is any amino acid
  Variant (14)..(14): Xaa in position 14 is Asp or Gln
VXPXXVXKXXXQXX

SEQ ID NO: 2710 - protein, 15 aa, Artificial sequence
  protein pattern
  Variant (2)..(2): Xaa in position 2 is Gly or Thr
  Variant (3)..(4): Xaa in position 3 to 4 is any amino acid
  Variant (5)..(5): Xaa in position 5 is Ala, Gly or Ser
  Variant (6)..(6): Xaa in position 6 is Phe or Leu
  Variant (7)..(7): Xaa in position 7 is Trp or Tyr
  Variant (10)..(13): Xaa in position 10 to 13 is any or no amino acid
  Variant (15)..(15): Xaa in position 15 is Ala, Gly or Thr
EXXXXXXKGXXXXLX

SEQ ID NO: 2711 - DNA, 2682 bp, Saccharomyces cerevisiae
  CDS (1)..(2682)
atggctggacaccatcacgaacatgaacaagagcgcgaccacgagcaagaacacgaacacgattcccttcaacggcctactactggatcagaaaggactagaagtatatccttttcgaagttgcttacgcggtcatggaaaaggaatgcgagttcatcgaacaacatgagtgtgtctagcgtgaatctgtattcggatccagagaactcgagagaatcagatcacaataatagtggctcagagggccagtcttcacgattttctaaattgaaaagtatgttccaatccggcaatagcagcaaaaatgccagtgcccataacagcagccaaagcagtcttgaaggtgactcggcgtcatcttcatctaagttaagatacgttaaaccaatgacttctgttgccaatgcttctccggcatctccaccactttctcccacgatcccggaaacggatgttcttcaaacaccaaagatggtacatatagatcaacatgaacatgagcgtgaacactcgaattgcgggtctccaataatgctttcatcatcctctttcagtcctactgttgccaggactgggacgggtaggagaagatcaccgtctactccgataatgcccagtcagaactcgaataactctagtagcacctctgctatcagaccaaataattatcgtcaccattcaggatctcaggggttttcttccaacaatccattcagagaaagggcaggtacggtacgcagtagtaacccatattttgcataccaaggtctaccaactcatgccatgtcttctcacgacctcgatgaaggattccaaccatatgcaaatggcagcggcattcactttttgtccacccccacctcgaagacaaattctttgacaaacaccaaaaatttaagtaatttatcactaaacgagattaaggaaaatgaagaagtgcaagaattcaataacgaggatttcttctttcacgatattccgaaagatttatcgctcaaagatacgctgaatggctcacccagtagaggtagttccaagagccccacgattactcaaacgttcccttcaatcattgtcggatttgacaatgagtacgaggaagataacaacaatgataaacatgatgaaaaggaagaacaacaaacgacaaccgacaataaaacgagaaatctttcacctaccaaacaaaatggtaaagctacccatccaaggataaaaatacctttaagaagagcagcttcagaaccaaacgggttgcaactcgcatctgccacatcgccgacatcttcttcagcaaggaaaacatcagggtccagtaatataaacgacaaaatcccaggccaatcagtgcctcctccaaactcatttttccctcaagaaccctctccaaagatttctgattttccagaacctaggaggtcccgacgtttgagaactaaatctttcagcaataaatttcaagatatcatggtgggaccacagtcttttgagaaaataagattgctgggccaaggtgatgtaggtaaagttttcttagtaagagagaaaaagacgaatagagtgtatgctttgaaagtcttgagtaaagacgaaatgataaaaagaaataaaatcaaacgtgttctgacagaacaagagattcttgccaccagcaatcatcccttcatcgtcacactataccattcgttccaatctgaagactatttgtatctctgtatggaatactgtatgggcggggagtttttcagagctttacaaacaaggaaaaccaaatgtatatgtgaagacgatgccaggttttatgccagtgaagtgacagcagcactagaatatttacatctgttgggttttatctatagagatttaaaaccagagaatattttgctgcatcaatcaggccatatcatgctttctgacttcgacttgtctattcaggctaaagattccaaggttcctgttgtcaagggttccgctcaatcaacccttgttgataccaaaatatgctcagatgggtttagaaccaattcctttgtcggaactgaagaatatattgcccctgaagtcataagaggtaatggccacaccgctgcggtcgattggtggacgctagggattttgatctatgaaatgttatttggtttcactccattcaaaggcgataacacaaatgaaacttttacgaatattttgaaaaatgaggtcagttttcccaataacaatgaaatctccagaacttgtaaggatttgatcaaaaaattactgacaaaaaatgaatctaaaagactgggttgcaaaatgggcgctgccgacgtgaagaaacacccctttttcaagaaagtccaatggtctttgctgagaaatcaagaaccgcctctgataccagtgttatctgaggatggatatgattttgctaaattatcatctaataagaagagacagactagtcaagacagccataaacatctcgatgagcaagagaaaaatatgtttgaagaacgagttgaatacgacgatgaagtctctgaagatgatccattccatgacttcaattcaatgagtttgatggaacaggataacaattcaatgatttatggtaataccaattcttatgggaaaattgcatacactccaaactccaacagatcgaggagtaatagtcatcgaaccttttttaagagataa

SEQ ID NO: 2712 - protein, 893 aa, Saccharomyces cerevisiae
MAGHHHEHEQERDHEQEHEHDSLQRPTTGSERTRSISFSKLLTRSWKRNASSSNNMSVSSVNLYSDPENSRESDHNNSGSEGQSSRFSKLKSMFQSGNSSKNASAHNSSQSSLEGDSASSSSKLRYVKPMTSVANASPASPPLSPTIPETDVLQTPKMVHIDQHEHEREHSNCGSPIMLSSSSFSPTVARTGTGRRRSPSTPIMPSQNSNNSSSTSAIRPNNYRHHSGSQGFSSNNPFRERAGTVRSSNPYFAYQGLPTHAMSSHDLDEGFQPYANGSGIHFLSTPTSKTNSLTNTKNLSNLSLNEIKENEEVQEFNNEDFFFHDIPKDLSLKDTLNGSPSRGSSKSPTITQTFPSIIVGFDNEYEEDNNNDKHDEKEEQQTTTDNKTRNLSPTKQNGKATHPRIKIPLRRAASEPNGLQLASATSPTSSSARKTSGSSNINDKIPGQSVPPPNSFFPQEPSPKISDFPEPRRSRRLRTKSFSNKFQDIMVGPQSFEKIRLLGQGDVGKVFLVREKKTNRVYALKVLSKDEMIKRNKIKRVLTEQEILATSNHPFIVTLYHSFQSEDYLYLCMEYCMGGEFFRALQTRKTKCICEDDARFYASEVTAALEYLHLLGFIYRDLKPENILLHQSGHIMLSDFDLSIQAKDSKVPVVKGSAQSTLVDTKICSDGFRTNSFVGTEEYIAPEVIRGNGHTAAVDWWTLGILIYEMLFGFTPFKGDNTNETFTNILKNEVSFPNNNEISRTCKDLIKKLLTKNESKRLGCKMGAADVKKHPFFKKVQWSLLRNQEPPLIPVLSEDGYDFAKLSSNKKRQTSQDSHKHLDEQEKNMFEERVEYDDEVSEDDPFHDFNSMSLMEQDNNSMIYGNTNSYGKIAYTPNSNRSRSNSHRTFFKR

SEQ ID NO: 2713 - DNA, 2688 bp, Candida glabrata CBS 138
  CDS (1)..(2688)
atggagcagcagggagtattggcaccgcctagtatcaatgagaggaacaggagtctatcgttttcgaagctgctgtcccgctcctggaggaagaacagcacaagtgcggtcgccagcgataacagcactgacaccgagaacaatgcggccaaccctaacatgatagcgttgcagaagaagattttgagttctaagactgatagttggagcgaggctgtcgatgatgagccagtacccagcggtggcagtcaatctcgtttcacaaaactgaagaatatcttcaacaacaataatagtaaccacaacacaagtaactctacgaggtcaggctcctcatgtgcctcaactgtgagtgggaagagtagctttgagaagttacccaaggatataagccaagtgaggtcgaacagtattccaagtccccaaaagtcaccatactccgataaaaaggggcataatgccaccagcgatgtagagatcggtttggtgagtcctgtctcagataaaatgaacattgatctcccgcaggtacccacatctgttcacgctagtacacttacaggtgaacacttgaaggaactgcatgagtatgaaatagctaaaccaaaacaggaagcatatgcgctgaattcaggaaaaaatgcgaatagacggagatcaccatcaacacctattaagccaagtcccagtttagtgtcctcacagagtgccaatggccagttctcatctacaaatccattcaacacaggcacaggctatgctaactataaggaaagaggcactgtgcagactacaaatagctatttcaactaccaagggctaccgccgcatgccagaaatgaaaatgactctaacttaaacgcattccaaaatggatctaaatatgcagctgtccaagagatgctatcattgccaaccacaccgtcttcgatgaacacctcattgacaactcacaacaaagaaggaagaaatttaagcaatgtatctttaaatgaaatcaaggagaatgaagaagtgagtgagttctatggtatggatgaggttcctaacctcgattccatgggaaataagaaaatggcatcatcttctccattgagagctagatccggtagtcccaaggcatcaaatgtaatggatagtgcacaaccatttccctctattgtagttggctatgatgacgcagatgcagaaacagatgagcagtctgcaaacccttcgcgtggatcgcacatttcttctgagcagaagggtaagccagaattgaacccgccaaaaaatgctaagtttccattacgtagagccgcatcagagactgatgcaatagacctgaatattttgaaatctgtaaaggcagctagtggagacctgtctgatacaacagatcagcataccaaactggaagaaattaaagaaccaagacgctcaagcagactgagaaataaatcttttagtaacaagttccaagatatcactgttggaccacaatcatttgaaaagattagactgcttggacaaggtgatgttggcaaggtttatttagtgaaagaaaagaggacgaacagactgtatgcgttgaagattttcagtaaatcagaaatgatcaagaggaagaagatcaagaggatcctggccgagcaagaaattcttgctactagcaaccacccatttgttgtaacattatatcattcgtttcaatcggaagattacttgtatctgtgtatggaatactgtatgggtggtgagttttttagagcgttgcaaactcgtaaaagtaaatgtatctcagaagaagatgccaaattttatgctagtgaagtcacagctgcattagaatatttacatctgcttgggttcatatacagagacttgaagccggaaaatattctattgcaccaatcgggccacattatgttgtcagattttgatctatctatccaggcgaaggacgcaaaagtgccagtagttaaaggtaatgcccagtccacggtggtcgatactaaaatttgttccgatggcttcagaaccaactcatttgttgggaccgaggagtatattgcgcccgaggtgataagaggcaacggccacacggcagcggttgattggtggacactaggtattcttatttatgagatgttgtttggcttcacacctttcaagggagagaacacaaatgagacatttagcaatatactgaaaaaggatgtcacattcccaaacaacaatgaggtctccagaaattgtaaagacctgattaagaagctactgataaagaacgagtccaagcgtctaggatctaagatgggtgcggcagatatcaagaaacatccattcttcaaaaaggttaattggactctgttgagaaatcaagagccaccgttaatcccagttttgactgagaatggttatgatttcacaaaattgtcatccaacaagaacaaaaaccgtgctaatggtaccgagaaggactccatagatgaacaagagcgcatcatgtttgaagaacgcgttgagtatgacgatgaggtttcagaggacgacccattccatgactttaactcaatgagtctcatgaagcaggataacaactccctgatatacggtgacaacaactcctatggtaaaattgcatatactccaaacgctaatagatcaagaagtaatagccacagagcattcttcaaaagatga

SEQ ID NO: 2714 - protein, 895 aa, Candida glabrata CBS 138
MEQQGVLAPPSINERNRSLSFSKLLSRSWRKNSTSAVASDNSTDTENNAANPNMIALQKKILSSKTDSWSEAVDDEPVPSGGSQSRFTKLKNIFNNNNSNHNTSNSTRSGSSCASTVSGKSSFEKLPKDISQVRSNSIPSPQKSPYSDKKGHNATSDVEIGLVSPVSDKMNIDLPQVPTSVHASTLTGEHLKELHEYEIAKPKQEAYALNSGKNANRRRSPSTPIKPSPSLVSSQSANGQFSSTNPFNTGTGYANYKERGTVQTTNSYFNYQGLPPHARNENDSNLNAFQNGSKYAAVQEMLSLPTTPSSMNTSLTTHNKEGRNLSNVSLNEIKENEEVSEFYGMDEVPNLDSMGNKKMASSSPLRARSGSPKASNVMDSAQPFPSIVVGYDDADAETDEQSANPSRGSHISSEQKGKPELNPPKNAKFPLRRAASETDAIDLNILKSVKAASGDLSDTTDQHTKLEEIKEPRRSSRLRNKSFSNKFQDITVGPQSFEKIRLLGQGDVGKVYLVKEKRTNRLYALKIFSKSEMIKRKKIKRILAEQEILATSNHPFVVTLYHSFQSEDYLYLCMEYCMGGEFFRALQTRKSKCISEEDAKFYASEVTAALEYLHLLGFIYRDLKPENILLHQSGHIMLSDFDLSIQAKDAKVPVVKGNAQSTVVDTKICSDGFRTNSFVGTEEYIAPEVIRGNGHTAAVDWWTLGILIYEMLFGFTPFKGENTNETFSNILKKDVTFPNNNEVSRNCKDLIKKLLIKNESKRLGSKMGAADIKKHPFFKKVNWTLLRNQEPPLIPVLTENGYDFTKLSSNKNKNRANGTEKDSIDEQERIMFEERVEYDDEVSEDDPFHDFNSMSLMKQDNNSLIYGDNNSYGKIAYTPNANRSRSNSHRAFFKR

SEQ ID NO: 2715 - DNA, 2325 bp, Kluyveromyces lactis NRRL Y-1140
  CDS (1)..(2325)
atggatggtgtgatgcttgataaagttgagctcaaccaacatgaagtaggggctgcaagagaacggtctagaagtatggcttctttgtctaaattcattccgaaatcaatatggaaacctcaacaacagcaacagcagcaacagccttctgaaacctccgaaggtaacacaaaagcatctaacagccatccggtaatgttacatgcttctttgcatgaagcacctgctattgtacttcaagaggcgaaacccgtatctcgcgaatccatagaacaagaaggcgctcccgcagaaaaggctgcaagtggaaactcgtcaaagttgtcaatgagactaaagaaagtctttggcaaaaaggaaccatcgcaaccccctgttgattccgagttgagccctccagctagtagtgaagctgctgctaatcatgatgcaaatgataccacgaatacactgaacagaaatagaacaaattccgacactgatcctgaacctaagaggaatttatacagcgacgggtctcaaattcaaggtactcctttgacttcaccttcaaaatctatctcttcatataacagcggcacgcataaacccaacaacttggttactggtaaccaagcttcaaaactctccccaaatttcgatatccccgaggcttcttccaatggaaatggatttgtgccctcatacaacagtatgacaaatatcagtacagcatctttgaatttgattgatgaaaatgaagaaacgcagaattttgagggttctctgcatcagtcaggtgaaatcatacatccagcaattactacacctttaaaatcagggtcagagagcccctttttatcctcacaatccatgaaaccctttccagcatcggatgaggcagaaaatagtcaccgtcgttctgaatcgaatggtgtatcggtgaaacctcagcttagaagaactgcatcacaaccaactgatgtgcatgtacaggtaaatggcaaaaccgcaagtacaaaagaagaattcagtccaagaagaggtactgttggtgcggatgcttcatttatccaacctcctaagaggtcagaaagactaaggaacaaatccttcagtaataagttccaagatattttagttggtccacagtcatttgagaaaatcagattattagggcaaggtgacgttggaagagtgtacttagtcagagaaaaacagacaaataggttatatgcattgaaaatattcagtaagccagaaatgataaaaaggaagaagatcaaaaggattttaactgagcaggaaattctagcaaccagtaatcatccctttattgttactttgtatcattctttccaaacggaagactacctgtatttatgtatggagtattgtatgggcggtgaatttttccgtgctttacaaacaagaaagacgaaatgtatctccgaagatgacgcaagattttactctagtgaagtgacggcggccttagaatacttgcatttaatgggttttatttatagagacttgaaacccgaaaatattctcttacatcaatctggacatatcatgttgtctgactttgatttatctgtacaagctaaggataccaaaaaccctcaggtgaaaggtaatgcatcgcattcacttgtggatacaaagatttgttctgacggatttagaaccaattcctttgttggtactgaagaatatattgctcctgaagtgataaggggtaacgggcatacggctgctgttgattggtggactttaggaattttgatatatgagatgttgtttggtttcacaccatttaaaggagacaacacaaatcaaacattctctaatatactgaaaaatgaggtggtcatccctaacaacaatgaaacctctagggcatgtaaggatttgatcagaaagcttttgattaaaaatgaaaacaaaagactaggctcaaaactaggggcttcagatatcaaaaagcatcctttcttcaaaaatgaccaatggtctcttttaaggaatcaagagccgccattaattcctgttttggcgaagaacggttgtgatttcgccaaactatccagtaatccaaaaggatccaaagataaaaaagattcggcggaacagcaagagaagctgatgttcgaagaaaaagtagaacttgatgatcaggtctccgacaacgacccgttccatgactttaactctatgagtttaatgaagcaagataacgattctttgatatatggtgacagtacatcgtatggaaaaatatcctatacgcccaaccaaaacagatctagaagtaatagtcatagaagtttcttcaaaagatga

SEQ ID NO: 2716 - protein, 774 aa, Kluyveromyces lactis NRRL Y-1140
MDGVMLDKVELNQHEVGAARERSRSMASLSKFIPKSIWKPQQQQQQQQPSETSEGNTKASNSHPVMLHASLHEAPAIVLQEAKPVSRESIEQEGAPAEKAASGNSSKLSMRLKKVFGKKEPSQPPVDSELSPPASSEAAANHDANDTTNTLNRNRTNSDTDPEPKRNLYSDGSQIQGTPLTSPSKSISSYNSGTHKPNNLVTGNQASKLSPNFDIPEASSNGNGFVPSYNSMTNISTASLNLIDENEETQNFEGSLHQSGEIIHPAITTPLKSGSESPFLSSQSMKPFPASDEAENSHRRSESNGVSVKPQLRRTASQPTDVHVQVNGKTASTKEEFSPRRGTVGADASFIQPPKRSERLRNKSFSNKFQDILVGPQSFEKIRLLGQGDVGRVYLVREKQTNRLYALKIFSKPEMIKRKKIKRILTEQEILATSNHPFIVTLYHSFQTEDYLYLCMEYCMGGEFFRALQTRKTKCISEDDARFYSSEVTAALEYLHLMGFIYRDLKPENILLHQSGHIMLSDFDLSVQAKDTKNPQVKGNASHSLVDTKICSDGFRTNSFVGTEEYIAPEVIRGNGHTAAVDWWTLGILIYEMLFGFTPFKGDNTNQTFSNILKNEVVIPNNNETSRACKDLIRKLLIKNENKRLGSKLGASDIKKHPFFKNDQWSLLRNQEPPLIPVLAKNGCDFAKLSSNPKGSKDKKDSAEQQEKLMFEEKVELDDQVSDNDPFHDFNSMSLMKQDNDSLIYGDSTSYGKISYTPNQNRSRSNSHRSFFKR

SEQ ID NO: 2717 - DNA, 2505 bp, Debaryomyces hansenii CBS767
  CDS (1)..(2505): transl_table=12
atggttaatttatcttcttcgaaatttcatattacagagcctgctgatgaagatatacagctgacactggtcaacgggaatcaaaagggacacgaagattcgtgcaatcgaagcagtacaccaaaatttgggtcaatatcgagattttttttcaataaggagcaatcggtatcgtcagatgtatccaacgccgattcgacggttagctcgaatacggacagcttaaatcataatcatgggtccaaaagtggtgtaactaacagcgaagcaagagaggatgagcatgacgatgcgaaacagcagcctggattgagcaaattgaaaagtttcttgaggctttcctcgaattcgcttctattgtcgaataatggtccgaatgataatggggaacagaatggtccgaaaggaacggatgtcataacgccaaatgccgagtcagtcaccccagtacgcagcaatgaagagaagactaagttgaagcacgagagcgatagaaacgaggaaggccacaatggaaataaagatggctccaatgtatcgacgaagcaagaggccagtgccggtatgatgaaaaagttcatgcttggaagaaagagatcagtttcgagtccaaccagtcctgcgaccggcaataggaaaccgcaacagagtaacctactgattaatacagagagcccaaaggatatcccagaaatcattactgagaatactgaaagccctgttatctcctctaatctttattttgcccatcagggtttaccgcctcatatgaataaccataataagaataatcatactcttgctgcaagtgcagccaatgaagatgatatttccgttgctttaaggcataacgattcggtattctcgcttaatgatggcggtcctttaaagcctcccaatgtatatcaatcaaagttatctgcaagtgatgaatcaggctctgagcatgagccaataccagagcatactaccgaatcgggactcaagacaccagaggaaagcactttgcagaataagaacaagttggaggttcctccacatacgttaccgcatcctggacaagctagtcctttccaaaagactttaagaagagttgcatccgcaccattagttcatagattactcaatgattcaaacacgagattgccacaaacgagagcttatgtttcaaatgacgatgactttgatatcactgagcatattggtgaattaaagagtggtagaccacggactttaagtaggggtagaatgtactcaagtgcttctaccaagatcatggacgcccaggttaatcaaaacagttttaagaagattagattattgggtaaaggtgacgttggtaaagtttatttggttaaagagaatttgtcaaatagattgtacgcaatgaaaatcttatctaaaaaggaaatgatcgaaagaaacaaaatcaagagagcattagccgagcaagatatcttagctaccagtaaccacccattcattgttaccctatatcactcatttcaatcaaatgattacttgtatttatgcatggaatattgtatgggtggtgaattttttagagccttacaaacaagggaaaccaaaacgatttctgaaactgatgctaagttttatgcggctgaggtaacagctgcattagaatatttacatttaatgggatttatttatagagatttaaaacctgaaaacattttattgcatcaatcagggcatattatgttgagtgatttcgatttatcgaaacaatctgaaagtacaaagaatccagagatttttttcagtaaaacatctcacggcttaagttccagcaataatcacaatggaccaacgttagacaccaaggcgtgcattgatggatttagaactaattcgtttgtcggtactgaagagtacattgcacctgaagttatccgaggcaaaggtcatacaagtgcagttgattggtggactttgggtattttcatttatgaaatgttatttggtactactccatttaagggaagagaccgaaagaagacgttcggcaatgttttgaaaaaggaggttaagtttttggaaactcgctcaatttcgtctagttgtaaaagtttaatcaaaaaattattgataaaagatgaagcaaagagattgggttcaaaaacaggtgcatccgacattaagaatcatgcgttctttaagaatacgcaatgggctctattaaggcaccaaaagcctccaatgatccctgttttaagcaagaataagagagcagataaagttgagaggtatgacagtgaagaagatcaaatcacggacagcactacagatgtttctgaaaataaggatattcttaatgacccttttgctaacttcagttctgtcacattacattataatgaactagattcaggtgatgatcaaatggtatacaatgaagcagacaacacggtatatacaagtgttgcatataccatgactaacgattcttcaccaaaacctaaacattttttaaaaagataa

SEQ ID NO: 2718 - protein, 834 aa, Debaryomyces hansenii CBS767
MVNLSSSKFHITEPADEDIQLTLVNGNQKGHEDSCNRSSTPKFGSISRFFFNKEQSVSSDVSNADSTVSSNTDSLNHNHGSKSGVTNSEAREDEHDDAKQQPGLSKLKSFLRLSSNSLLLSNNGPNDNGEQNGPKGTDVITPNAESVTPVRSNEEKTKLKHESDRNEEGHNGNKDGSNVSTKQEASAGMMKKFMLGRKRSVSSPTSPATGNRKPQQSNLLINTESPKDIPEIITENTESPVISSNLYFAHQGLPPHMNNHNKNNHTLAASAANEDDISVALRHNDSVFSLNDGGPLKPPNVYQSKLSASDESGSEHEPIPEHTTESGLKTPEESTLQNKNKLEVPPHTLPHPGQASPFQKTLRRVASAPLVHRLLNDSNTRLPQTRAYVSNDDDFDITEHIGELKSGRPRTLSRGRMYSSASTKIMDAQVNQNSFKKIRLLGKGDVGKVYLVKENLSNRLYAMKILSKKEMIERNKIKRALAEQDILATSNHPFIVTLYHSFQSNDYLYLCMEYCMGGEFFRALQTRETKTISETDAKFYAAEVTAALEYLHLMGFIYRDLKPENILLHQSGHIMLSDFDLSKQSESTKNPEIFFSKTSHGLSSSNNHNGPTLDTKACIDGFRTNSFVGTEEYIAPEVIRGKGHTSAVDWWTLGIFIYEMLFGTTPFKGRDRKKTFGNVLKKEVKFLETRSISSSCKSLIKKLLIKDEAKRLGSKTGASDIKNHAFFKNTQWALLRHQKPPMIPVLSKNKRADKVERYDSEEDQITDSTTDVSENKDILNDPFANFSSVTLHYNELDSGDDQMVYNEADNTVYTSVAYTMTNDSSPKPKHFLKR

SEQ ID NO: 2719 - DNA, 2385 bp, Candida albicans SC5314
  CDS (1)..(2385): transl_table=12
atggtacaactagctctattcaccaataacaaccacaacaataatagcaacaacaacactacaaatactttaaacgatgatacacaatatgattcaacaactatgaatacagaagatactcctataataccggacaagaccgataaactcaatggactggattcccgatctctgtcaagaaatagaactcgatccatatctttcacgaggtttcttttcaatagcaacaacaacaataacaacaataaagaccacactgaacaatcacgttgtccttcaaatgaaacactggataattctgttggttcacctgaacaacaaaattcggggtttaataaattgaagaaaatgttcaaaactaattcttctttgacacaagaagatgggaaaaatagtggaagaacaagatcggcttcaacaccgttaactccgcctaaagtgaagaaagaaaccagtgtacctgtcatcaccacaacaaaagcacctaataaggaagaaacaacaaccactaagatacattcgcctcctgaaagtcccgttgtgcaatctaatccatatttccaatatcaaggagtaccagcacatacaaatacatcccaaaacccacaaatcgaaacagcaccaggtagatcagatatgtcggttgccttgagacataatgattcggttttctcattgaatgaaaatggagttttaaaaccaccaaagattcattatagtgaattatcatcatcaagtgaagacaattccgaacctagttcacctgctctccctaaaacacccatgagagatctagttgaaaaggacgaattgcatttgaaacctattgaagatgaacgagatttagccatccccgcttcaccattccaaagagccttaagaagagtagcatcagctccattagtacatcgtcttttaaacgaaaagtcaccagaggatgccaataacaacaacaataataatactggtaataaccttggtggcccatttagtacttctacgcaaacatcacctaaaaaagatgagccatttgatatcaataaacatattggagaggttaaaatcactggccgaccaagaacttacactcaagatagaacctattcgaatgcagcaacaaggatagttgatgtacaagttggacctaatagttttgaaaaagtgaggttattagggaaaggtgatgttggtaaagttttcttggtacgagaaaaactgtcaaataaattgtatgcgatgaagattttaaataaaaaggaaatgattgagagaaataaaattaaacgagctttagcagaacaagaaattttagcaacttcaaatcatccatttattgtcactttatatcattcatttcaatcaaaagatcatttatatctttgtatggaatattgtatgggtggagaatttttccgagcacttcaaactcgagacacaaaaaccatttgtgaagctgatgccaaattttatgctgcggaagtgacggcagcattagaatatttacatcttatggggtttatatatcgtgatttaaaaccagaaaatattttacttcatcaatcaggacatattatgttgagtgattttgatttatcaaaacaaagtgaacgggcgaaaaacccggaaatatcatttcataaatcaggtatgcatttatcatcagcggggagctctaatcatcacaatggaccagcaattgatactaaagcatgtatagatggattccgaactaattcctttgttggaactgaagaatatattgcaccggaagtgattcgtggtaaaggtcatactagtgctgttgattggtggacattagggatatttctttatgaaatgttatttggaactactccttttaaaggtcaagatcggaagaaaacgtttgctaatgttttgaaaaaagatgtcaaattttccgacacccaacaactgatttcttcaaattgtcgaaatttaattaaaaaattattaattaaagatgaagaaaaaagattaggttccaaaactggagcttcggaaataaaaaatcatgcattttttaaagatactcaatgggcattattaagacatcaaaaaccaccaatgatccccgtcttaactaaatcaacttcaacttcaaattcaaacaaaaaatatgaaaaaccaatggaagatactgaagaaattgatgatgtgacatcaatatcaaaatcaattaatgaacaaatagatgatccattttcacaatttaactcagtgactttaagatatggtggtgaatttgaagatttaaatcaaagtccaatgtataatcctgatagtagtgcttatactagtgtggcttataccatgacttctaacaatgaaaattctttccgtcaaaaaagttttttgaaaaggtga

SEQ ID NO: 2720 - protein, 794 aa, Candida albicans SC5314
MVQLALFTNNNHNNNSNNNTTNTLNDDTQYDSTTMNTEDTPIIPDKTDKLNGSDSRSSSRNRTRSISFTRFLFNSNNNNNNNKDHTEQSRCPSNETSDNSVGSPEQQNSGFNKLKKMFKTNSSLTQEDGKNSGRTRSASTPLTPPKVKKETSVPVITTTKAPNKEETTTTKIHSPPESPVVQSNPYFQYQGVPAHTNTSQNPQIETAPGRSDMSVALRHNDSVFSLNENGVLKPPKIHYSELSSSSEDNSEPSSPALPKTPMRDLVEKDELHLKPIEDERDLAIPASPFQRALRRVASAPLVHRLLNEKSPEDANNNNNNNTGNNLGGPFSTSTQTSPKKDEPFDINKHIGEVKITGRPRTYTQDRTYSNAATRIVDVQVGPNSFEKVRLLGKGDVGKVFLVREKSSNKLYAMKILNKKEMIERNKIKRALAEQEILATSNHPFIVTLYHSFQSKDHLYLCMEYCMGGEFFRALQTRDTKTICEADAKFYAAEVTAALEYLHLMGFIYRDLKPENILLHQSGHIMLSDFDLSKQSERAKNPEISFHKSGMHLSSAGSSNHHNGPAIDTKACIDGFRTNSFVGTEEYIAPEVIRGKGHTSAVDWWTLGIFLYEMLFGTTPFKGQDRKKTFANVLKKDVKFSDTQQSISSNCRNLIKKLLIKDEEKRLGSKTGASEIKNHAFFKDTQWALLRHQKPPMIPVLTKSTSTSNSNKKYEKPMEDTEEIDDVTSISKSINEQIDDPFSQFNSVTLRYGGEFEDLNQSPMYNPDSSAYTSVAYTMTSNNENSFRQKSFLKR

SEQ ID NO: 2721 - DNA, 2583 bp, Zygosaccharomyces rouxii
  CDS (1)..(2583)
atggacgaagacctatacgtacgccctggcccagttatggataaagaaagaactaaatcatttgttaagcgtttcccccgttcattgagacgcaaggatggtgccggatccgttagtaatggtagcacttcgagtatagggactaatcaaaacacggaaattggtggtatatccgataattcaaacccttctgatagagcaaatacaccgattagtgataatggtggtaatgacgaatcctctcacacgtcggatccatctcagtcctctcaagctaagcaacaacaaaaccagacggctcctagttccaaattgaccaaattgaaacacattttccaaaccaatagtaataacggcaatggtaccagtgcagcggcatccggtggatccgaaaccaataattctactgcgtctttgactccaccgtcttcttccactgcacctgctagtaattccaattcaccaaggcgcagatctccatctacgccaggaaattccaattcaaatgtaaactccagccactctcatggcccagggttgaatgataaggttaagagcaagactgaccccaataaacagtcaacaactgaccataatccatttaatggtgatgattcttcatcttctcaacctgggaagaatgacaaagatgcaccaactttacctgatacccaatcctctcaagaattagataacagttttaattcacaatggacgaagtttacagaatatccggctgttccgtcttcttcgtcaactgccggctcaggagtttccactagtaaagaccatagaagtttgagtaatcaatcgctaaatgaaattaaggagaacgaagaagtgcacgaattttatactaaagatggtatcagggcctcatcaccttcaaaggcagcttcatctccaccagaaagttttcacagtccaactaatttgacgccccaagatacttttctaccttttccagcaatcgttgttggagtcgacaatgaatatgaagatgaatctagttcacgtattacaagatcaccagatcgtagcactcacagagcccatcgtggttcttcaccaccaattcctttacaacaagataaattatcaagtcagcaaaaagagcaacgggagcaatcggataatattttacagactaaaccgattttgagaagagcttcttcagtaccgaatgttctgaaaagtaaaagacttgtcagtgaaaatggagatggtaataatgctacggttcaagccagcataggttcatcatcaccatctaaggcctcaccacaagtttctagcgattatgaagaaccaaagagatcttctaggttgaggacgaaatcatttagcaacaaatttcatgatattaaagtggggccaggatcttttgagaaagtcagaattctaggtcaaggtgatgtaggtaaggtttttctggtcagagaaaaagtttctaataaactttatgccttgaagattttttctaaagctgaaatgatcaaaagaaaaaaaatcaaacgtatactggcggaacaggagattttggcctcaagtaatcacccttttatcgtgactctttatcattcttttcagtctgaggattatctatacctgtgcatggaatactgtatgggaggtgagttctttagagcgctacagacaagacgttccaaatgcatatcagaggacgacgctaggttttatgcaagtgaagtcattgctgccttggaatacttacatctgatggggttcatttatagagatttgaaacccgaaaatattcttttgcataaatcgggccatattatgctttctgattttgacctctccattcaagctaaagatgcaaaagatcctgtggctaaaggtaccgctcaatccactatagtcgatacaaagatttgttccgatggttttagaaccaattcattcgtcggtaccgaagaatatattgcacctgaagtgattaggggcaatggtcacactgctgctgtcgattggtggaccttgggaattctcatttacgaaatgcttttcggatgtacgcctttcaaatcatctaataccaatgaaactttctgcaacattttgaaaaatgaggttaattttcccaatagcaatgacattggaagatcttgtaaagatttgatcaaaaaattattaattaagaacgaactaaagcgtttaggttctaagatgggagctgcagacatcaagagacatccattcttcaaaaaagttcagtggtcctttttgagaaaccaagaaccaccattgattccagttttaacggatgacggctacgatttgaccaaattatacgcgaacaagaataaaggcaacggaccttccaatggtatgagctcatttgaaaagcttgaacgtaacatgtttgaagaaactgtggaatacgacgatcaagtatcagacaccgatccattccatgatttcaactccatgagtctcatgaaacaggacaataattcattaatttacggtgacagcaactcctacggtaaaatatcgtacactcctaattcaaataggtcaaggagtaacagtcataagggctttttcaaaaggtag

SEQ ID NO: 2722 - protein, 860 aa, Zygosaccharomyces rouxii
MDEDLYVRPGPVMDKERTKSFVKRFPRSLRRKDGAGSVSNGSTSSIGTNQNTEIGGISDNSNPSDRANTPISDNGGNDESSHTSDPSQSSQAKQQQNQTAPSSKLTKLKHIFQTNSNNGNGTSAAASGGSETNNSTASLTPPSSSTAPASNSNSPRRRSPSTPGNSNSNVNSSHSHGPGLNDKVKSKTDPNKQSTTDHNPFNGDDSSSSQPGKNDKDAPTLPDTQSSQELDNSFNSQWTKFTEYPAVPSSSSTAGSGVSTSKDHRSLSNQSLNEIKENEEVHEFYTKDGIRASSPSKAASSPPESFHSPTNLTPQDTFLPFPAIVVGVDNEYEDESSSRITRSPDRSTHRAHRGSSPPIPLQQDKLSSQQKEQREQSDNILQTKPILRRASSVPNVLKSKRLVSENGDGNNATVQASIGSSSPSKASPQVSSDYEEPKRSSRLRTKSFSNKFHDIKVGPGSFEKVRILGQGDVGKVFLVREKVSNKLYALKIFSKAEMIKRKKIKRILAEQEILASSNHPFIVTLYHSFQSEDYLYLCMEYCMGGEFFRALQTRRSKCISEDDARFYASEVIAALEYLHLMGFIYRDLKPENILLHKSGHIMLSDFDLSIQAKDAKDPVAKGTAQSTIVDTKICSDGFRTNSFVGTEEYIAPEVIRGNGHTAAVDWWTLGILIYEMLFGCTPFKSSNTNETFCNILKNEVNFPNSNDIGRSCKDLIKKLLIKNELKRLGSKMGAADIKRHPFFKKVQWSFLRNQEPPLIPVLTDDGYDLTKLYANKNKGNGPSNGMSSFEKLERNMFEETVEYDDQVSDTDPFHDFNSMSLMKQDNNSLIYGDSNSYGKISYTPNSNRSRSNSHKGFFKR

SEQ ID NO: 2723 - DNA, 2163 bp, Saccharomyces cerevisiae
  CDS (1)..(2163)
atgactcagcaagaataccgttccccctcacaacgcttatccaaggggaggagcatgtcgctacccaaaatatttgctcgtaatttgagatctctgcaaaacaatgcacctcctggcaaaaacatcaatgtcaattgtttgaacgtcaattcttgttcgttgtccgcaagcccaagctcacaaattaatatggcttgtaatggaaacaagcaagatcttcccataccgtttcccctgcatgtagaatgcaacgatagctggtcaagctccaaacttaacaagttcaaatcaatgtttaatcataacagatcaaagagcagtggtactacagatgcgtcaacttcagaaaaaggtacgcataagcgtgaaccccggtcgacgatacatacagagctgttacaaagttccattatcggtgagccaaatgtccatagtactacaagtagcacacttatacccaatgaggcgatatgctccacacctaatgagatctcaggtagctcttctccggacgcggagttatttacctttgacatgcccacagacccgtcatccttccacactcctagctccccaagttatatagcaaaggacagtagaaacctgagtaatggatctttgaatgatattaacgaaaatgaagagctccaaaatttccatagaaaaatcagcgaaaatggcagtgcctcccccctggctaacttgtcattatccaattcaccaattgattccccaaggaaaaatagcgaaaccagaaaggatcaaatacctatgaacataacaccacgtttaaggagggccgcttccgaaccgttcaatacggcaaaggatgggttaatgcgggaagattacattgccttgaaacaacctccaagcttgggagatattgtagaaccgaggagatctcgtcgtttaagaaccaagtcattcggtaacaagttccaagacattactgtcgaacctcaatccttcgaaaaaattagactacttggccaaggtgacgtaggtaaagtgtatttaatgagggaacgcgataccaaccagatattcgccctgaaagttttgaataaacatgagatgatcaagaggaagaaaattaaacgagtactcactgaacaggaaattctcgcgacaagtgatcatccatttattgtgacactgtatcattcctttcaaaccaaagactatttgtatctctgtatggaatactgcatgggaggggaattctttagagccttacaaacaagaaaaagtaaatgcattgcagaagaagatgcgaagttttacgccagtgaagtagtagcagctttggaatatttacacctactgggcttcatatacagagatttgaaacccgaaaacatattactgcatcaatctggtcatgtcatgctttctgactttgatttatccatccaagcaacgggatcaaaaaaacccaccatgaaagactctacgtatttagatacaaaaatttgttcagatggattcagaactaattcctttgttggtactgaagagtatttagctccagaagtaatcagagggaatggccacactgcagcagtagactggtggactttaggaatattgatttacgagatgctatttggctgtactccatttaaaggagataattcaaatgaaacattctctaacattttaaccaaggacgtcaaatttccacatgataaggaagtttcgaagaattgtaaagacctgataaagaaactactaaacaaaaacgaggcaaaaaggcttggttccaaatcaggagctgcagacataaagagacatcccttcttcaaaaaagttcagtggtcgttcttaagaaaccaagacccccctctaatacctgcattaaatgataacggctgcgaacttccttttatattgtcttgcaataaacacccgaaaaggaactcagtgagtgaacaggaaaccaaaatgttctgtgagaaagttgcaaacgatgatgaaattgatgaggctgatccattccatgattttaattctatgagtttaacgaagaaagatcacaatatcttaacctactctgaaaattatacctacggaaaaattctatacaaagcaacttgtacaaggccaaggcataacagctcacatagaagtttctttaaagacatcatacctgaactataa

SEQ ID NO: 2724 - protein, 720 aa, Saccharomyces cerevisiae
MTQQEYRSPSQRLSKGRSMSLPKIFARNLRSLQNNAPPGKNINVNCLNVNSCSLSASPSSQINMACNGNKQDLPIPFPLHVECNDSWSSSKLNKFKSMFNHNRSKSSGTTDASTSEKGTHKREPRSTIHTELLQSSIIGEPNVHSTTSSTLIPNEAICSTPNEISGSSSPDAELFTFDMPTDPSSFHTPSSPSYIAKDSRNLSNGSLNDINENEELQNFHRKISENGSASPLANLSLSNSPIDSPRKNSETRKDQIPMNITPRLRRAASEPFNTAKDGLMREDYIALKQPPSLGDIVEPRRSRRLRTKSFGNKFQDITVEPQSFEKIRLLGQGDVGKVYLMRERDTNQIFALKVLNKHEMIKRKKIKRVLTEQEILATSDHPFIVTLYHSFQTKDYLYLCMEYCMGGEFFRALQTRKSKCIAEEDAKFYASEVVAALEYLHLLGFIYRDLKPENILLHQSGHVMLSDFDLSIQATGSKKPTMKDSTYLDTKICSDGFRTNSFVGTEEYLAPEVIRGNGHTAAVDWWTLGILIYEMLFGCTPFKGDNSNETFSNILTKDVKFPHDKEVSKNCKDLIKKLLNKNEAKRLGSKSGAADIKRHPFFKKVQWSFLRNQDPPLIPALNDNGCELPFILSCNKHPKRNSVSEQETKMFCEKVANDDEIDEADPFHDFNSMSLTKKDHNILTYSENYTYGKILYKATCTRPRHNSSHRSFFKDIIPEL

SEQ ID NO: 2725 - DNA, 23 bp, Artificial sequence
  primer
atggctggacaccatcacgaaca

SEQ ID NO: 2726 - DNA, 26 bp, Artificial sequence
  primer
ttatctcttaaaaaaggttcgatgac

SEQ ID NO: 2727 - protein, 943 aa, Artificial sequence
  consensus sequence
  Variant (2)..(5): Xaa in position 2 to 5 is any amino acid
  Variant (7)..(102): Xaa in position 7 to 102 is any amino acid
  Variant (103)..(196): Xaa in position 103 to 196 is any or no amino acid
  Variant (199)..(229): Xaa in position 199 to 229 is any amino acid
  Variant (230)..(248): Xaa in position 230 to 248 is any or no amino acid
  Variant (250)..(283): Xaa in position 250 to 283 is any amino acid
  Variant (284)..(306): Xaa in position 284 to 306 is any or no amino acid
  Variant (308)..(308): Xaa in position 308 is any amino acid
  Variant (310)..(311): Xaa in position 310 to 311 is any amino acid
  Variant (315)..(369): Xaa in position 315 to 369 is any amino acid
  Variant (370)..(427): Xaa in position 370 to 427 is any or no amino acid
  Variant (431)..(431): Xaa in position 431 is any amino acid
  Variant (434)..(434): Xaa in position 434 is any amino acid
  Variant (436)..(461): Xaa in position 436 to 461 is any amino acid
  Variant (462)..(488): Xaa in position 462 to 488 is any or no amino acid
  Variant (490)..(491): Xaa in position 490 to 491 is any amino acid
  Variant (492)..(492): Xaa in position 492 is any or no amino acid
  Variant (494)..(494): Xaa in position 494 is any amino acid
  Variant (496)..(496): Xaa in position 496 is any amino acid
  Variant (498)..(499): Xaa in position 498 to 499 is any amino acid
  Variant (501)..(503): Xaa in position 501 to 503 is any amino acid
  Variant (504)..(510): Xaa in position 504 to 510 is any or no amino acid
  Variant (512)..(513): Xaa in position 512 to 513 is any amino acid
  Variant (515)..(516): Xaa in position 515 to 516 is any amino acid
  Variant (518)..(518): Xaa in position 518 is any amino acid
  Variant (520)..(520): Xaa in position 520 is any amino acid
  Variant (525)..(525): Xaa in position 525 is any amino acid
  Variant (530)..(530): Xaa in position 530 is any amino acid
  Variant (537)..(537): Xaa in position 537 is any amino acid
  Variant (540)..(540): Xaa in position 540 is any amino acid
  Variant (542)..(544): Xaa in position 542 to 544 is any amino acid
  Variant (546)..(547): Xaa in position 546 to 547 is any amino acid
  Variant (550)..(550): Xaa in position 550 is any amino acid
  Variant (552)..(554): Xaa in position 552 to 554 is any amino acid
  Variant (556)..(556): Xaa in position 556 is any amino acid
  Variant (560)..(560): Xaa in position 560 is any amino acid
  Variant (562)..(562): Xaa in position 562 is any amino acid
  Variant (567)..(567): Xaa in position 567 is any amino acid
  Variant (569)..(569): Xaa in position 569 is any amino acid
  Variant (591)..(592): Xaa in position 591 to 592 is any amino acid
  Variant (615)..(616): Xaa in position 615 to 616 is any amino acid
  Variant (618)..(618): Xaa in position 618 is any amino acid
  Variant (620)..(620): Xaa in position 620 is any amino acid
  Variant (622)..(622): Xaa in position 622 is any amino acid
  Variant (625)..(625): Xaa in position 625 is any amino acid
  Variant (629)..(629): Xaa in position 629 is any amino acid
  Variant (632)..(632): Xaa in position 632 is any amino acid
  Variant (641)..(641): Xaa in position 641 is any amino acid
  Variant (670)..(670): Xaa in position 670 is any amino acid
  Variant (672)..(675): Xaa in position 672 to 675 is any amino acid
  Variant (677)..(677): Xaa in position 677 is any amino acid
  Variant (679)..(686): Xaa in position 679 to 686 is any amino acid
  Variant (687)..(703): Xaa in position 687 to 703 is any or no amino acid
  Variant (707)..(707): Xaa in position 707 is any amino acid
  Variant (709)..(709): Xaa in position 709 is any amino acid
  Variant (732)..(732): Xaa in position 732 is any amino acid
  Variant (736)..(736): Xaa in position 736 is any amino acid
  Variant (746)..(746): Xaa in position 746 is any amino acid
  Variant (754)..(754): Xaa in position 754 is any amino acid
  Variant (760)..(764): Xaa in position 760 to 764 is any amino acid
  Variant (767)..(767): Xaa in position 767 is any amino acid
  Variant (769)..(769): Xaa in position 769 is any amino acid
  Variant (772)..(773): Xaa in position 772 to 773 is any amino acid
  Variant (775)..(775): Xaa in position 775 is any amino acid
  Variant (777)..(782): Xaa in position 777 to 782 is any amino acid
  Variant (783)..(783): Xaa in position 783 is any or no amino acid
  Variant (785)..(786): Xaa in position 785 to 786 is any amino acid
  Variant (789)..(789): Xaa in position 789 is any amino acid
  Variant (796)..(796): Xaa in position 796 is any amino acid
  Variant (798)..(798): Xaa in position 798 is any amino acid
  Variant (800)..(800): Xaa in position 800 is any amino acid
  Variant (807)..(807): Xaa in position 807 is any amino acid
  Variant (810)..(810): Xaa in position 810 is any amino acid
  Variant (814)..(814): Xaa in position 814 is any amino acid
  Variant (816)..(816): Xaa in position 816 is any amino acid
  Variant (820)..(821): Xaa in position 820 to 821 is any amino acid
  Variant (824)..(825): Xaa in position 824 to 825 is any amino acid
  Variant (828)..(828): Xaa in position 828 is any amino acid
  Variant (830)..(830): Xaa in position 830 is any amino acid
  Variant (833)..(833): Xaa in position 833 is any amino acid
  Variant (838)..(854): Xaa in position 838 to 854 is any amino acid
  Variant (855)..(867): Xaa in position 855 to 867 is any or no amino acid
  Variant (869)..(875): Xaa in position 869 to 875 is any amino acid
  Variant (877)..(884): Xaa in position 877 to 884 is any amino acid
  Variant (885)..(885): Xaa in position 885 is any or no amino acid
  Variant (889)..(890): Xaa in position 889 to 890 is any amino acid
  Variant (894)..(895): Xaa in position 894 to 895 is any amino acid
  Variant (897)..(905): Xaa in position 897 to 905 is any amino acid
  Variant (906)..(910): Xaa in position 906 to 910 is any or no amino acid
  Variant (912)..(916): Xaa in position 912 to 916 is any amino acid
  Variant (917)..(918): Xaa in position 917 to 918 is any or no amino acid
  Variant (920)..(923): Xaa in position 920 to 923 is any amino acid
  Variant (926)..(930): Xaa in position 926 to 930 is any amino acid
  Variant (931)..(932): Xaa in position 931 to 932 is any or no amino acid
  Variant (934)..(938): Xaa in position 934 to 938 is any amino acid
  Variant (939)..(939): Xaa in position 939 is any or no amino acid
  Variant (941)..(941): Xaa in position 941 is any amino acid
KXXXXSXXXXXXXXXXXXXXXXXXXXXXXXXXXXXXXXXXXXXXXXXXXXXXXXXXXXXXXXXXXXXXXXXXXXXXXXXXXXXXXXXXXXXXXXXXXXXXXXXXXXXXXXXXXXXXXXXXXXXXXXXXXXXXXXXXXXXXXXXXXXXXXXXXXXXXXXXXXXXXXXXXXXXXXXXXXXXXXXXXXXXXXXXXXXXXRSXXXXXXXXXXXXXXXXXXXXXXXXXXXXXXXXXXXXXXXXXXXXXXXXXXNXXXXXXXXXXXXXXXXXXXXXXXXXXXXXXXXXXXXXXXXXXXXXXXXXXXXXXXXXNXSXXSLNXXXXXXXXXXXXXXXXXXXXXXXXXXXXXXXXXXXXXXXXXXXXXXXXXXXXXXXXXXXXXXXXXXXXXXXXXXXXXXXXXXXXXXXXXXXXXXXXXXXXXXXXXXXXXXXXXLRRXASXPXXXXXXXXXXXXXXXXXXXXXXXXXXXXXXXXXXXXXXXXXXXXXXXXXXXXXEXXXSXRXRXXSXXXXXXXXXXKXXDXXVXPXSFEKXRLLGXGDVGKVXLVXEXXXNXXYAXKXXXKXEMIXRXKIKRXLXEQEILATSNHPFIVTLYHSFQXXDYLYLCMEYCMGGEFFRALQTRXXKXIXEXDAXFYAXEVXAALEYLHLXGFIYRDLKPENILLHQSGHIMLSDFDLSXQXXXXKXPXXXXXXXXXXXXXXXXXXXXXXXXXDTKXCXDGFRTNSFVGTEEYIAPEVIRGXGHTXAVDWWTLGIXIYEMLFGXTPFKGXXXXXTFXNXLKXXVXFXXXXXXXSXXCKXLIKKLLXKXEXKRLGSKXGAXDIKXHXFFKXXQWXXLRXQXPPXIPVLXXXXXXXXXXXXXXXXXXXXXXXXXXXXXXEXXXXXXXVXXXXXXXXXDPFXXFNSXXLXXXXXXXXXXXXXXYXXXXXXXYXXXXYTXXXXXXXSXXXXXXFXKR

SEQ ID NO: 2728 - protein, 59 aa, Artificial sequence
  protein pattern
  Variant (21)..(21): Xaa in position 21 is Asp, Glu, Lys or Arg
  Variant (22)..(22): Xaa in position 22 is Ser or Thr
  Variant (24)..(24): Xaa in position 24 is Cys or Thr
  Variant (26)..(26): Xaa in position 26 is Ala, Cys or Ser
  Variant (28)..(28): Xaa in position 28 is Ala, Asp, Glu or Thr
  Variant (31)..(31): Xaa in position 31 is Lys or Arg
  Variant (35)..(35): Xaa in position 35 is Ala or Ser
  Variant (38)..(38): Xaa in position 38 is any amino acid
  Variant (47)..(47): Xaa in position 47 is Leu or Met
LYLCMEYCMGGEFFRALQTRXXKXIXEXDAXFYAXEVXAALEYLHLXGFIYRDLKPENI

SEQ ID NO: 2729 - protein, 60 aa, Artificial sequence
  protein pattern
  Variant (4)..(5): Xaa in position 4 to 5 is any or no amino acid
  Variant (7)..(8): Xaa in position 7 to 8 is any or no amino acid
  Variant (31)..(31): Xaa in position 31 is any amino acid
  Variant (35)..(35): Xaa in position 35 is Ala or Ser
  Variant (45)..(45): Xaa in position 45 is Phe or Leu
  Variant (46)..(46): Xaa in position 46 is Ile or Leu
  Variant (53)..(53): Xaa in position 53 is any amino acid
  Variant (58)..(58): Xaa in position 58 is Gly or Ser
  Variant (59)..(59): Xaa in position 59 is Asp, Glu, Gln, Arg or Ser
  Variant (60)..(60): Xaa in position 60 is Asp or Asn
DTKXXIXXDGFRTNSFVGTEEYIAPEVIRGXGHTXAVDWWTLGIXXYEMLFGXTPFKXXX

SEQ ID NO: 2730 - protein, 58 aa, Artificial sequence
  protein pattern
  Variant (3)..(3): Xaa in position 3 is Lys or Arg
  Variant (5)..(5): Xaa in position 5 is Phe or Tyr
  Variant (8)..(8): Xaa in position 8 is Lys or Arg
  Variant (10)..(11): Xaa in position 10 to 11 is any amino acid
  Variant (12)..(12): Xaa in position 12 is Ser or Thr
  Variant (14)..(14): Xaa in position 14 is Lys or Arg
  Variant (15)..(15): Xaa in position 15 is Leu or Val
  Variant (18)..(18): Xaa in position 18 is Leu or Met
  Variant (20)..(20): Xaa in position 20 is Ile or Val
  Variant (21)..(21): Xaa in position 21 is Phe or Leu
  Variant (22)..(22): Xaa in position 22 is Asn or Ser
  Variant (24)..(24): Xaa in position 24 is any amino acid
  Variant (28)..(28): Xaa in position 28 is Glu or Lys
  Variant (30)..(30): Xaa in position 30 is any amino acid
  Variant (35)..(35): Xaa in position 35 is Ala, Ile or Val
  Variant (37)..(37): Xaa in position 37 is Ala or Thr
  Variant (40)..(40): Xaa in position 40 is Asp or Glu
  Variant (44)..(44): Xaa in position 44 is Ser or Thr
  Variant (50)..(50): Xaa in position 50 is Ile or Val
VGXVXLVXEXXXNXXYAXKXXXKXEMIXRXKIKRXLXEQXILAXSNHPFXVTLYHSFQ

SEQ ID NO: 2731 - protein, 57 aa, Artificial sequence
  protein pattern
  Variant (2)..(4): Xaa in position 2 to 4 is any amino acid
  Variant (5)..(6): Xaa in position 5 to 6 is any or no amino acid
  Variant (13)..(13): Xaa in position 13 is any amino acid
  Variant (15)..(15): Xaa in position 15 is Asp or Asn
  Variant (17)..(17): Xaa in position 17 is any amino acid
  Variant (22)..(22): Xaa in position 22 is Cys or Ser
  Variant (24)..(24): Xaa in position 24 is any amino acid
  Variant (27)..(27): Xaa in position 27 is Ala or Ser
  Variant (28)..(28): Xaa in position 28 is Asp or Glu
  Variant (29)..(29): Xaa in position 29 is Ile or Val
  Variant (31)..(31): Xaa in position 31 is any amino acid
  Variant (33)..(33): Xaa in position 33 is Ala or Pro
  Variant (37)..(37): Xaa in position 37 is any amino acid
  Variant (38)..(38): Xaa in position 38 is Thr or Val
  Variant (39)..(39): Xaa in position 39 is Asn or Gln
  Variant (41)..(41): Xaa in position 41 is Ala, Ser or Thr
  Variant (42)..(42): Xaa in position 42 is Phe or Leu
  Variant (45)..(45): Xaa in position 45 is any amino acid
  Variant (47)..(47): Xaa in position 47 is Asp, Glu or Lys
  Variant (50)..(50): Xaa in position 50 is Leu or Met
  Variant (53)..(53): Xaa in position 53 is Ala or Val
  Variant (55)..(55): Xaa in position 55 is Asn, Ser or Thr
  Variant (56)..(56): Xaa in position 56 is Asp, Glu or Lys
  Variant (57)..(57): Xaa in position 57 is Asp, Asn or Ser
SXXXXXLIKKLLXKXEXKRLGXKXGAXXXKXHXFFKXXXWXXLRXQXPPXIPXLXXX

SEQ ID NO: 2732 - protein, 27 aa, Artificial sequence
  protein pattern
  Variant (8)..(8): Xaa in position 8 is Ile or Val
  Variant (17)..(17): Xaa in position 17 is any amino acid
  Variant (19)..(19): Xaa in position 19 is Ala or Ser
  Variant (20)..(21): Xaa in position 20 to 21 is any amino acid
  Variant (22)..(22): Xaa in position 22 is Ala, Ser or Thr
  Variant (24)..(24): Xaa in position 24 is any amino acid
  Variant (26)..(26): Xaa in position 26 is any amino acid
  Variant (27)..(27): Xaa in position 27 is Ile, Met or Val
LLHQSGHXMLSDFDLSXQXXXXKXPXX

SEQ ID NO: 2733 - protein, 29 aa, Artificial sequence
  protein pattern
  Variant (2)..(5): Xaa in position 2 to 5 is any amino acid
  Variant (6)..(6): Xaa in position 6 is any or no amino acid
  Variant (8)..(8): Xaa in position 8 is any amino acid
  Variant (9)..(10): Xaa in position 9 to 10 is any or no amino acid
  Variant (12)..(12): Xaa in position 12 is Phe or Ile
  Variant (13)..(13): Xaa in position 13 is any amino acid
  Variant (15)..(15): Xaa in position 15 is Ala or Ile
  Variant (16)..(16): Xaa in position 16 is any amino acid
  Variant (18)..(18): Xaa in position 18 is Glu, Gly or Asn
  Variant (19)..(19): Xaa in position 19 is Pro or Gln
  Variant (20)..(20): Xaa in position 20 is Gly, Asn or Gln
  Variant (23)..(23): Xaa in position 23 is Glu or Lys
  Variant (25)..(25): Xaa in position 25 is Ile or Val
  Variant (27)..(27): Xaa in position 27 is Ile or Leu
RXXXXXSXXXKXXDXXVXXXSFXKXRXLG

SEQ ID NO: 2734 - protein, 15 aa, Artificial sequence
  protein pattern
  Variant (4)..(4): Xaa in position 4 is any amino acid
  Variant (5)..(5): Xaa in position 5 is Asp or Gln
  Variant (9)..(9): Xaa in position 9 is Met or Val
  Variant (10)..(10): Xaa in position 10 is Ser or Thr
  Variant (12)..(14): Xaa in position 12 to 14 is any amino acid
  Variant (15)..(15): Xaa in position 15 is Asp or Gly
DPFXXFNSXXLXXXX

SEQ ID NO: 2735 - protein, 24 aa, Artificial sequence
  protein pattern
  Variant (2)..(6): Xaa in position 2 to 6 is any amino acid
  Variant (7)..(7): Xaa in position 7 is any or no amino acid
  Variant (9)..(9): Xaa in position 9 is Gly or Thr
  Variant (10)..(10): Xaa in position 10 is any amino acid
  Variant (11)..(11): Xaa in position 11 is Ile or Val
  Variant (12)..(12): Xaa in position 12 is any amino acid
  Variant (14)..(15): Xaa in position 14 to 15 is any or no amino acid
  Variant (17)..(17): Xaa in position 17 is any amino acid
  Variant (18)..(18): Xaa in position 18 is Asn or Thr
  Variant (19)..(19): Xaa in position 19 is any amino acid
  Variant (20)..(20): Xaa in position 20 is Asn or Pro
  Variant (21)..(21): Xaa in position 21 is Asn or Arg
  Variant (22)..(22): Xaa in position 22 is any amino acid
  Variant (23)..(23): Xaa in position 23 is Asn or Arg
YXXXXXXYXXXXYXXTXXXXXXXS

SEQ ID NO: 2736 - protein, 12 aa, Artificial sequence
  protein pattern
  Variant (3)..(3): Xaa in position 3 is Ala, Cys, Gly, Ser or Thr
  Variant (5)..(5): Xaa in position 5 is Ile or Val
  Variant (8)..(8): Xaa in position 8 is any amino acid
  Variant (9)..(9): Xaa in position 9 is Asp or Glu
  Variant (11)..(11): Xaa in position 11 is any amino acid
  Variant (12)..(12): Xaa in position 12 is Phe or Ile
TFXNXLKXXVXX

SEQ ID NO: 2737 - protein, 19 aa, Artificial sequence
  protein pattern
  Variant (2)..(3): Xaa in position 2 to 3 is any amino acid
  Variant (4)..(6): Xaa in position 4 to 6 is any or no amino acid
  Variant (8)..(8): Xaa in position 8 is Ala or Asn
  Variant (9)..(11): Xaa in position 9 to 11 is any amino acid
  Variant (12)..(12): Xaa in position 12 is Ala or Glu
  Variant (15)..(15): Xaa in position 15 is Asp or Glu
  Variant (16)..(17): Xaa in position 16 to 17 is any amino acid
  Variant (18)..(18): Xaa in position 18 is Glu, Asn or Ser
  Variant (19)..(19): Xaa in position 19 is Phe or Val
NXXXXXLXXXXXNEXXXXX

SEQ ID NO: 2738 - DNA, 1839 bp, Saccharomyces cerevisiae
  CDS (1)..(1839)
atggctgaaatgaagaattcgacagctgctagttccagatggacgaagagtcgtctctcccatttctttccctcgtacactaatagcagtggtatgggggccgcctcaactgatcaatcttctacgcagggagaagaactgcaccataggaagcactgtgaagaagacaatgatggtcaaaaaccgaaaaagtctcccgtatccacctctacaatgcaaataaaatctagacaggatgaggacgaggatgacggtcgaattgtcattaaaccagttaacgatgaagatgatacatcagtgattataactttcaatcagtcaatatccccttttattattacattgacattcgttgcgtccatttctgggttcatgtttggttatgatactggttacatatcgagtgcgctaatttctatcaatagagatttagacaacaaagttttaacttatggagaaaaagaattaattacggccgccacatcattgggcgctttgattacaagtgtgggcgctggtactgctgctgatgtgtttggaagaagaccatgtttaatgttctccaatctgatgtttttgatcggagcaattttacaaattaccgcgcacaagttttggcaaatggcggccggtagactgattatgggtttcggtgtcggtattggttctttgatttctcctctttttattagtgaaattgctcctaagatgatcaggggtaggttaaccgttataaattccctatggctgacaggtggtcaattgattgcttacggttgtggtgcgggcctgaaccacgtcaaaaacggttggagaatcttagttggtttgtccttgatacctactgttttgcagttttcttttttctgttttttgccggatacaccaagatactacgtaatgaaaggcgatttaaagagagcaaaaatggttctcaaacgaagttacgtaaacactgaagatgaaataattgatcaaaaagttgaagaattatctagcttaaatcaatcgataccaggaaaaaatccaataacaaaattctggaatatggtcaaggaattgcacactgtgccttcaaatttcagagctttgattattggttgtggtctacaagccattcaacaattcacaggttggaattccttaatgtatttctccggtacaatatttgaaactgttggattcaaaaattcttctgccgtttctattattgtctcaggtactaattttgtgttcacattaatagcatttttctgtattgataaaatcggccgtaggtacattttactgattggactacctggtatgactgtggcgctggttatatgtgctatagcgttccatttcctaggtattaagtttaacggtgctgatgcagtagtggcatctgatggattttcatcttggggcattgtcattatcgtatttattattgtgtatgcagccttttatgccctcggtatcggcactgttccatggcaacaatcggaattatttccacaaaacgtcagaggtgtagggacatcctacgctactgccaccaattgggcaggttctttagtcattgcgtctacgttcttgactatgttacaaaatattacaccaacgggtacattttcattctttgccggtgtagcatgtttatcaaccattttttgttacttttgttatccaggactatcaggattggagttagaggaagttcaaacaattttaaaggacggattcaatatcaaagcctctaaagctctagctaaaaagaggaaacaacaggtggccgaaggtgctgcccatcataaactcaaattcgaacctacacaggaaattgtagaaagttag

SEQ ID NO: 2739 - protein, 612 aa, Saccharomyces cerevisiae
MAEMKNSTAASSRWTKSRLSHFFPSYTNSSGMGAASTDQSSTQGEELHHRKHCEEDNDGQKPKKSPVSTSTMQIKSRQDEDEDDGRIVIKPVNDEDDTSVIITFNQSISPFIITLTFVASISGFMFGYDTGYISSALISINRDLDNKVLTYGEKELITAATSLGALITSVGAGTAADVFGRRPCLMFSNLMFLIGAILQITAHKFWQMAAGRLIMGFGVGIGSLISPLFISEIAPKMIRGRLTVINSLWLTGGQLIAYGCGAGLNHVKNGWRILVGLSLIPTVLQFSFFCFLPDTPRYYVMKGDLKRAKMVLKRSYVNTEDEIIDQKVEELSSLNQSIPGKNPITKFWNMVKELHTVPSNFRALIIGCGLQAIQQFTGWNSLMYFSGTIFETVGFKNSSAVSIIVSGTNFVFTLIAFFCIDKIGRRYILLIGLPGMTVALVICAIAFHFLGIKFNGADAVVASDGFSSWGIVIIVFIIVYAAFYALGIGTVPWQQSELFPQNVRGVGTSYATATNWAGSLVIASTFLTMLQNITPTGTFSFFAGVACLSTIFCYFCYPGLSGLELEEVQTILKDGFNIKASKALAKKRKQQVAEGAAHHKLKFEPTQEIVES

SEQ ID NO: 2740 - DNA, 1521 bp, Oryza sativa Japonica Group
  CDS (1)..(1521)
atgacgatcgatttgtccatgcccgggagctccgggctcctggacgacgtaggggggaagaagcacatgaatttcttcagcaaccgctacgtgctcgcgctcacgggcgccgcaggaatcggcgggttcctctttggctacgacacaggtgtcatatctggagcccttttgtatattcgggatgactttccagcagtcagagacaattatttcttacaggagacaatcgttagcatggcattggtaggagccatcattggagcagctggcggcggctggatcaatgatacatacggccgtaggaagtctactcttgtggctgacatgctgtttgcacttggctcacttgttatgtgtgctgctggtggtccttacattctgattcttggaaggcttcttgttggcttgggtgtgggtatagcatcagtcacagcgccagtttacattgctgaagctgctccttcggaaattaggggaggtttggtgtcaactaatgtactcatgattactggtggtcaattcttctcctacctcatcaatcttggctttactgaggttcctggaacatggcgctggatgctcggagttgctgctgtgcctgcaattctacagtttgttctgatgctttttttgccagaatctccccgttggcttttctggaaggatgagaaagcaaaagctatttctgtcctagagaagatttatgactctgaccgtctagaggaagaggtagagcttcttgcttcttcttcaatgcatgaatttcagtctgatggtactgggagctatttggacattttcaagtcaaaggaactaaggctagcattttttgctggagctggtcttcaggcgttccagcaatttactggcatcaacactgtcatgtactacagcccaacaattgtccagatggctgggtttacctccaacaagttggcattgctcctttccctcatagtcgctggtatgaatgccgctgggaccattgttggaatctacctgattgaccgctgtggccggcgtcgcctggcccttacaagcttggctggtgtggtggtctccctcgccatcctagcaatggccttcatactgcagtcatcatcagatatctgttcgaatgcactcaatggtgcctgccaaggtgcactgggatggttcgcggtggcgggactcgctctatacatcgccttcttctccccaggcatggggccagttccatgggcagtgaactccgagatctaccccgaggcataccgtggaatgtgtggtggcatgtcagccactgtcaactgggtatctaacctgattgtggcacaaacattcctctcgatcgtcgggttggttgggaccggcctgaccttcctgatcatcgccggaatagcggtgctggccttcatcttcgtggctctctacgtgccggagactaaaggcctcagctttgagcaggttgagctcctgtggaaggagagagcatggggaaaccagggcaatcgccagagccttttgggcgctgcaccgtag

SEQ ID NO: 2741 - protein, 506 aa, Oryza sativa Japonica Group
MTIDLSMPGSSGLLDDVGGKKHMNFFSNRYVLALTGAAGIGGFLFGYDTGVISGALLYIRDDFPAVRDNYFLQETIVSMALVGAIIGAAGGGWINDTYGRRKSTLVADMLFALGSLVMCAAGGPYILILGRLLVGLGVGIASVTAPVYIAEAAPSEIRGGLVSTNVLMITGGQFFSYLINLGFTEVPGTWRWMLGVAAVPAILQFVLMLFLPESPRWLFWKDEKAKAISVLEKIYDSDRLEEEVELLASSSMHEFQSDGTGSYLDIFKSKELRLAFFAGAGLQAFQQFTGINTVMYYSPTIVQMAGFTSNKLALLLSLIVAGMNAAGTIVGIYLIDRCGRRRLALTSLAGVVVSLAILAMAFILQSSSDICSNALNGACQGALGWFAVAGLALYIAFFSPGMGPVPWAVNSEIYPEAYRGMCGGMSATVNWVSNLIVAQTFLSIVGLVGTGLTFLIIAGIAVLAFIFVALYVPETKGLSFEQVELLWKERAWGNQGNRQSLLGAAP

SEQ ID NO: 2742 - DNA, 1596 bp, Gibberella zeae PH-1
  CDS (1)..(1596)
atgtccatcaaggaagatacaaaaggacatcttgagcatcttgagcacagcaactctccagactctatccaagaggtcaacatcgacgacctcgactccatcgagcagacccagacgggcaagttctcctggctcgtctccatcactgctgccattggtggtatgctctttggctatgatacgggcatcatatctgctgtcctcgtctatatccatcaagatctcggcaagactcttacgtctcaggagaaggaactcgtcacttcagttacttctggtggtgctttcatcggagccatctttgctggagccaccgcggatcgatatggtcgaaaagtagctatctatgttggctgcctcttattcaccgtcggtgctatcatccaagctgcttctttctcagtcgcccaaatgaccgttggccgtgtcgttgttggatttggagtaggctctgccgccatgattgtgcccttgtacatcgccgaatgctctccttcaaagtaccgaggacgcatgatcggccttgacaatatgagcatcactggtggccagcttgtatcatacggcgttggagctgccttcgctcatgtcagtagtggatggagatggatggtgggaatcggtgcctttcctgctattatcctagcctgccttctgcccttttgcccggaatctcctcgacagctgatttttcatggaaaaccagacgaggccgctgctgttatccgtcgaatcttccccaatggtaccgagcaacaggtacaggacaagatccagcacttgacttaccacgtcaacgaggccaaggccctcaatgctggaaagtctggttggtgggtgttcaagcagctctatgttatccctgccaacttccgcgctcttgtctctgcctgtggacttatggccatctctcagctcagcggttttaactccctcatgtactattcgcctcttctcttctcgcttgtcggcttttccaacccagtcgctgtcggtactattatcgctggaaccaacttcatcttcacttgggttaacctcatgctcgttgatcgtgctggccgacgaagaatcttattatgcactgtaccctttatgggcattttcttagtcattgctgctgtctgcttcaagttcatccctatcaaccacgatttgtctcttgcatctgatgccaagattggatggcccgccattgtcgttctcatttccatggtcttctttgttgggttctattcttcaggtatcggcaacaccgcctggctttcaagcgagttcttccctatggaagttcgcgccatgggaaccatgatgctcaccatgacctgctggggctcaaacatcatcgttgcctctacgttcctcacccagatggagaatactactccttcaggtgcctttggattctacgccgccatatgcattctcggctgggtttgcatctacttctgttatcccgaggtcaagggaatgacattggaagatatcagagacatcttccagcacggctttggcgttcaacgagcacgagaagtgcagaagcagatgaagatggccaataaggcaatcacctctgaagttctcaccagggcatag

SEQ ID NO: 2743 - protein, 531 aa, Gibberella zeae PH-1
MSIKEDTKGHLEHLEHSNSPDSIQEVNIDDLDSIEQTQTGKFSWLVSITAAIGGMLFGYDTGIISAVLVYIHQDLGKTLTSQEKELVTSVTSGGAFIGAIFAGATADRYGRKVAIYVGCLLFTVGAIIQAASFSVAQMTVGRVVVGFGVGSAAMIVPLYIAECSPSKYRGRMIGLDNMSITGGQLVSYGVGAAFAHVSSGWRWMVGIGAFPAIILACLLPFCPESPRQLIFHGKPDEAAAVIRRIFPNGTEQQVQDKIQHLTYHVNEAKALNAGKSGWWVFKQLYVIPANFRALVSACGLMAISQLSGFNSLMYYSPLLFSLVGFSNPVAVGTIIAGTNFIFTWVNLMLVDRAGRRRILLCTVPFMGIFLVIAAVCFKFIPINHDLSLASDAKIGWPAIVVLISMVFFVGFYSSGIGNTAWLSSEFFPMEVRAMGTMMLTMTCWGSNIIVASTFLTQMENTTPSGAFGFYAAICILGWVCIYFCYPEVKGMTLEDIRDIFQHGFGVQRAREVQKQMKMANKAITSEVLTRA

SEQ ID NO: 2744 - DNA, 1713 bp, Candida glabrata CBS 138
  CDS (1)..(1713)
atggctggtgagaaggtggagttgagctccatggatagtgctatagagataaggcatgtgaaccagcatgccaaggaaatatcgtctgagaacaagtctgagagctatgacgacaataaggagtttgaagggtccaatcgcgtggtgataaagcctgttaacgacgaggacgatgtgtctgttatgataaattttaaccagggtgtgtcacacttcattattatgctgacttttgtcgcttccttgtccggtttcttgttcggttacgacaccggttacatatcctcggcgttgatttccatagggactgacctggacaacaaagagctgacgtacggtgagaaggaaatcaccaccgctgccacctccttgggtgctttgatctttgctttagtggcagggttctccgtagacatattcggcagaaaaccatgtcttatgttctcgaacattatgtttttgatcggtgctattcttcaagtcaccgcacacaagttctggcagatgactgcgggcagattcattatgggtttcggtgtcggtatcggttccttgatcgcaccattgtacattagtgagattgcaccaaaaatgatcagaggtagactgactgtgatcaactcactgtggctgacaggtggccagttgatcgcatacggttgtggtgctggtttgaatcacgtccacaacggttggagaattctggtcggtctctccttgattccaaccgtgctacagttcgtgttctttatcttcctaccagacacgcctagatactacgttatgaaaggtgactatgagaaggccaagagcgtgctgaagagaagttacaacggtgtctctgacgaactaatagacagaaagattgaagaactattagctttgaaccaatctattccaggtaagaatcatgtagaaagaacttggaacgctgtgaaagagttgcataccaaaccagctaactttagagctctgatcatcgcatgtggtttacaaggtatccaacaattcactggttggaactccttggtctatttctccggtactatttttgaatccgttggtttcaagaattcctctgcagtttccattatcgtttctggtacaaatttcatctttacactggtggctttcttctgcatagataaaatcggtagaagaaacattctgattataggtatcccaggtatgaccgtggctcatgttatgtccgctattgcgttccacttcattggaatcaagtttgtcggtaacaccgccatcgttgaacactcaggtttctcctcatggggtattgtaatcattgtgttcattatcatgtttgctgcattctacgctctaggtattggtaccgtgccatggcaacaatctgaactgttcccacaaaacgttagaggtgtcggtactgcttttgctactgctactaactgggccggttccttagttattgcttcaactttcttgactatgttacaaaacatcactcctacaggtacattcggtttctttgcaggcttatgtgtggtttctttcttcttctgttatttctgctacccagaactttcaggtttggaattggaagaagttcaaactattttgcaagatggtttcaatgtgcaagcatctaaggaactggcaaagaagcgtaagaggcaaattgctgttctaaagaaagcaaaacatcaaccaacagaagaaatcattgaagagtga

SEQ ID NO: 2745 - protein, 570 aa, Candida glabrata CBS 138
MAGEKVELSSMDSAIEIRHVNQHAKEISSENKSESYDDNKEFEGSNRVVIKPVNDEDDVSVMINFNQGVSHFIIMLTFVASLSGFLFGYDTGYISSALISIGTDLDNKELTYGEKEITTAATSLGALIFALVAGFSVDIFGRKPCLMFSNIMFLIGAILQVTAHKFWQMTAGRFIMGFGVGIGSLIAPLYISEIAPKMIRGRLTVINSLWLTGGQLIAYGCGAGLNHVHNGWRILVGLSLIPTVLQFVFFIFLPDTPRYYVMKGDYEKAKSVLKRSYNGVSDELIDRKIEELLALNQSIPGKNHVERTWNAVKELHTKPANFRALIIACGLQGIQQFTGWNSLVYFSGTIFESVGFKNSSAVSIIVSGTNFIFTLVAFFCIDKIGRRNILIIGIPGMTVAHVMSAIAFHFIGIKFVGNTAIVEHSGFSSWGIVIIVFIIMFAAFYALGIGTVPWQQSELFPQNVRGVGTAFATATNWAGSLVIASTFLTMLQNITPTGTFGFFAGLCVVSFFFCYFCYPELSGLELEEVQTILQDGFNVQASKELAKKRKRQIAVLKKAKHQPTEEIIEE

SEQ ID NO: 2746 - DNA, 1710 bp, Kluyveromyces lactis NRRL Y-1140
  CDS (1)..(1710)
atgaacgatacttcagagcattccagtgatgtctctcccatcattttcgatgatatctctcaaagcaaattgaaagactcatctgaaaatgaaaccacggatagaatcattatcaaaccggtcaatgatgaagatgacacttcagtcatgattactttcaaccaaaagatttctccgtttatcttgatcttgacctttacagcatctatctctggtttcatgtttggttatgatactggttatatatcgagtgcattggtctctataggtacggacttggataataaagctctaacatatggtgataaggaaataattacagctgcaacatctttgggtgccttaatctcagcagtgtttgcagggatttctgccgacatttttggtagaaaaccttgtctaatgttctctaatattctttttgtcattggtgctgcgttgcaggttagtgcacattcattttggcaaatggcagtaggtagattaattatggggttcggtgtcggtattgggtcgttactagcgccattattcatttctgaaatcgcaccaaaacatatcagaggtagactaacggtgataaactcactttggctaacaggtggtcaattgatcgcttatgcatgtggtgctgggttgaataaagttcataacggttggagaattttagtcggactttctttgattccaactgtggtgcaatttacatgcttcagcttcttgccagacactccgcgtttctacgtgataaaaggtaactataagaaggctgcagaagttttacaaaagagttacattaacgctccccaggaacttatcgatcaaaaaatccgtgaactatcagatttgaatgaggctatcccaggtaagacccctgtacacaagttcttcaacactgtcaaagaattacatactgtcccatgcaatttcagggcattggtgatcggttgtgctttacaaggtattcaacaattctgtggttggaattctttaatgtatttctctggtactatttttcaaactgttggtttcgaaaattctactgcagtgtctatcatcgttgccggtactaacttcgtattcactttagtcgctttctttgcgattgataaggtcggtcgtagagcaatccttttgattggcttgcctggtatgatggtttccttggttatgtgtgctatcgccttccatttcctagatataaaattcactggcgctggtgaatcggaagtttccaatggtggattcagttcttggggtatagtcgttatcgtattcatcatggtatatgcagcattctatgctctaggtatcggtactgtaccatggcagcaatctgaattatttgcaacatccgttagaggtgtaggtacttcttattgtacagctactaactgggctggttccctaattattgcatctaccttcctaacaatgttacaaaacataacaccgactggtacattttcattatttgctgcactagctgcagtatctaccgtcttctgttatctctgttatccagaactatctggtctagaattggaggaagtacaaactattttaagtgatggattcaacatcaaagcttccaaacaactagccaagaagagaaagcaacaaaatagcgaaatgcaaaggagatttagagaaaaggacatggaagcttatcaaaaggataaaccctccgatgaactacttgaaagttaa

SEQ ID NO: 2747 - protein, 569 aa, Kluyveromyces lactis NRRL Y-1140
MNDTSEHSSDVSPIIFDDISQSKLKDSSENETTDRIIIKPVNDEDDTSVMITFNQKISPFILILTFTASISGFMFGYDTGYISSALVSIGTDLDNKALTYGDKEIITAATSLGALISAVFAGISADIFGRKPCLMFSNILFVIGAALQVSAHSFWQMAVGRLIMGFGVGIGSLLAPLFISEIAPKHIRGRLTVINSLWLTGGQLIAYACGAGLNKVHNGWRILVGLSLIPTVVQFTCFSFLPDTPRFYVIKGNYKKAAEVLQKSYINAPQELIDQKIRELSDLNEAIPGKTPVHKFFNTVKELHTVPCNFRALVIGCALQGIQQFCGWNSLMYFSGTIFQTVGFENSTAVSIIVAGTNFVFTLVAFFAIDKVGRRAILLIGLPGMMVSLVMCAIAFHFLDIKFTGAGESEVSNGGFSSWGIVVIVFIMVYAAFYALGIGTVPWQQSELFATSVRGVGTSYCTATNWAGSLIIASTFLTMLQNITPTGTFSLFAALAAVSTVFCYLCYPELSGLELEEVQTILSDGFNIKASKQLAKKRKQQNSEMQRRFREKDMEAYQKDKPSDELLES

SEQ ID NO: 2748 - DNA, 1671 bp, Debaryomyces hansenii CBS767
  CDS (1)..(1671)
atgagtaattctactaaaaaggatgactgtcatgacgtgacaatagatagcactatatcagatattgaaatagaaaggtcaggctctacaaataatgttatgattgaaccaagtcccaaaagttcttcagaattgttgagctcagaatcagttatttctgattcggacgcaagaccatccaaattgattattttaatcacgttaacatcatctataagtgggtttatgtttgggtatgacaccggttacatatcgtctgcgttggtgaatattggcactgatttgagcaataaattattgtctaacggagagaaagaatttattacgtctgctacttctttgggtgcgttgatcggggctatcattggaggcatattagccaacttgattggaagaaaaatggtgttgttaggatcaaacgttatttttgttataggaactataattcaattagctgcacatactgtttggacgatgattgttggtagatttgttttgggactcggagtgggcattgcgtctttgatttcgcctttgatgttgagtgaattggcaccgtcaaaatataggggccgtttgattgttaccaactgtatgtttataactggaggtcaattggttgcctattttataaactggggattaactggtgtgaataatgggtggagagtatctgttggattatgtatggtaccccctataattcaatttgtgttgttttgtttcttacccgataccccaaggttttatattatggtaggtagagttgaagaagctagaaaagttttgagcaaaactcaccacaatccttccaatgctttcgttaatgcaactattcaagatatgatcgcctccaattcgactgttccaggaaataatccattagttcaagcgtggaactcaattaaaatcattcacacaaatccagcaaattttagggcattaatcttagcttgtggcttacaaggtatacagcaatttacggggtttaattctttaatgtatttcagtgcaacaattttcgaaactattgggttcgataatgcaactgcagtatctattattattgccgctacgaactttgtgtttacagggattgcattatgcattattgataagataggacgtagacgtatcctattaggtgcaattccatgcatgtgtatatcattagttctttgtgctattgccttccactttttaggtgtgaagtttacatcagattctgatgtcattgttgaagcgagaggcattactggctgggggattgttattattctcggtatggtgtggtttgtggcttcttacgctattggtataggtaacagtgcttggactggtgttgaattattctcagatgtaaatgttagagctgtcggctgtatgtatgctgctgctactaattgggctggttccttagttattgcatccactttcttgaccatgttggagaatattacacctcctggcacttttgcatttttcgcaggtttatgttttgttgcattcttttttgtttttttcttattgccagaagtttcaggcttggaactagaagaaactacagaatttttagcaaatggattcaatgttaaggcatctcgtcaaatttctaaggatagaaagaaagtgtcaaaattcgttactcaaaatgacgatcacagtgcataa

SEQ ID NO: 2749 - protein, 556 aa, Debaryomyces hansenii CBS767
MSNSTKKDDCHDVTIDSTISDIEIERSGSTNNVMIEPSPKSSSELLSSESVISDSDARPSKLIILITLTSSISGFMFGYDTGYISSALVNIGTDLSNKLLSNGEKEFITSATSLGALIGAIIGGILANLIGRKMVLLGSNVIFVIGTIIQLAAHTVWTMIVGRFVLGLGVGIASLISPLMLSELAPSKYRGRLIVTNCMFITGGQLVAYFINWGLTGVNNGWRVSVGLCMVPPIIQFVLFCFLPDTPRFYIMVGRVEEARKVLSKTHHNPSNAFVNATIQDMIASNSTVPGNNPLVQAWNSIKIIHTNPANFRALILACGLQGIQQFTGFNSLMYFSATIFETIGFDNATAVSIIIAATNFVFTGIALCIIDKIGRRRILLGAIPCMCISLVLCAIAFHFLGVKFTSDSDVIVEARGITGWGIVIILGMVWFVASYAIGIGNSAWTGVELFSDVNVRAVGCMYAAATNWAGSLVIASTFLTMLENITPPGTFAFFAGLCFVAFFFVFFLLPEVSGLELEETTEFLANGFNVKASRQISKDRKKVSKFVTQNDDHSA

SEQ ID NO: 2750 - DNA, 1623 bp, Yarrowia lipolytica CLIB122
  CDS (1)..(1623)
atgtcgctggacaaaaaccgccagatcacgacctctgagtcgtcgtctggaagcagtgccgatgaagggacccatatcatgagaggcctgaccagtactagtactcaggacgagaccactggttccatttcggaaggcaacctagaagccgagaaaatctcgccgtttgtgtttgtgctggttgccctggcctccatttccggattcctgtttggatacgacacgggctatgtttctggagctctggtggtcatcaaggaggatcttggacgtgccctttccaacggagataaggagctgattactgcttccacgtccctgggagctctccttggaggagttattgccggagccatgtgcgacttctttggccgaaagtgggttatcacctttgccaatattctgtttctggttggagctgccattcagtgtggagctcacgccgtgtggaccatgatcggaggccgattcgtcatgggatggggcgtgggtattgcatctctatgtgctcctctgtacatttccgagctggcccccactcgaatccgaggtcgtcttgtcgttctcaacgtcctggctatcaccggaggacagcttgtggcctacggaattggtgctggcatggcccacgtgcaccaaggatggagaattctagttggtctgtctatggtgcctgcctttgtgcaaatggtcatctttgtgttcatgcccgagactcctcgatatcttgttcgaaagaataagattgctgaggccaagaaggtgctggccaagacatatgccaccgatgacgacaaccttctcgaccgaaagctccacgaactcatgctccacaacgcatacaaggagtccggcctgtccactatggcgcgagctcgaaacactatgaaggaactttattgcgtacccagcaacttgcgagccctcataattgcttgtggactgcagggaatccagcagttttgtggtttcaactcgctcatgtacttttctgctaccatttttgaggtggtgggctttgataacgccacagccgtctccatcatcgttgctggaacgaactttgtcttcaccattgtcgcctttatggtcattgaccgtattggacgacgccgaattctcctgggaaccatctggggcatgtctctgggactcgttgtcaacgccattgctttccacttccttgacaagcagaaggaaaagaaccccaaccatgagctcgataaggaacacatttccggatgggcatacgtggtcctcgttgctcagctcgtctacgtcgccttctacgccactggtatcggtaatgtgccatggcagcagtcggagctgttccccatctccgtccgaggtgttggaactggcatggccactgccaccaactgggcaggatcgctcattgtgtcctccactttcctgaccatgttggaaaatatcacccccactggaacattttccttctacgccggtctctgtgctctcggagaagtgtttgtcttcttcctgtatcccgagacttccggcatggatctggagcagattcaacagctgctgacgggaggtttcaacatcaaggagagtatgcggctgtctgatgaggccaagagaggctacaagaagtag

SEQ ID NO: 2751 - protein, 540 aa, Yarrowia lipolytica CLIB122
MSLDKNRQITTSESSSGSSADEGTHIMRGLTSTSTQDETTGSISEGNLEAEKISPFVFVLVALASISGFLFGYDTGYVSGALVVIKEDLGRALSNGDKELITASTSLGALLGGVIAGAMCDFFGRKWVITFANILFLVGAAIQCGAHAVWTMIGGRFVMGWGVGIASLCAPLYISELAPTRIRGRLVVLNVLAITGGQLVAYGIGAGMAHVHQGWRILVGLSMVPAFVQMVIFVFMPETPRYLVRKNKIAEAKKVLAKTYATDDDNLLDRKLHELMLHNAYKESGLSTMARARNTMKELYCVPSNLRALIIACGLQGIQQFCGFNSLMYFSATIFEVVGFDNATAVSIIVAGTNFVFTIVAFMVIDRIGRRRILLGTIWGMSLGLVVNAIAFHFLDKQKEKNPNHELDKEHISGWAYVVLVAQLVYVAFYATGIGNVPWQQSELFPISVRGVGTGMATATNWAGSLIVSSTFLTMLENITPTGTFSFYAGLCALGEVFVFFLYPETSGMDLEQIQQLLTGGFNIKESMRLSDEAKRGYKK

SEQ ID NO: 2752 - DNA, 1554 bp, Aspergillus nidulans FGSC A4
  CDS (1)..(1554)
atgaatagcagagaagatacggagctatctgccgcccatgctccgctcctcgcacaagagcctgtactgaggcaacatgacgaagaccagtcaaagcactcgagcggccggtttatttggtatttgaccttctctgctggtattagcggtcttctttttggatatgacaccggtgtcatatcgtccacgctcgtatctatcgactctgatctctcgaaccgcccccttacaactttggataagagtttaattacgtcgtgcacaagtctctttgctctcatcgcaagcccgctggcgggcattttggcagatagacttggtcggaaaagggttattcttgtcgcggacgtcctctttactgtagggtcattcatacaagctgctaccggtgaagtatggggtatgatcattgggagaagtattgttggctttgcggtcggcagtgctagcctggttacacctttgtatatatcggagctggcaccttcagatgcgcgagggagattggtcactatactgagtctttttatcactggtggtcaggttgtagcatacatcatcggctggctattctcctacgttggtggtgggtggcgctggatggttggcttgggaatgcttccggcagtgttccaactcattattgttgtggctttgcccaagacaccccgatggctggtacaagcaggttacgaggacaaggctcagaggattctgtcagaggttcatcaggacgaccagaccgcgaaacaaacactgcgggatatccaacaagaggttgccgaagagaattcttcgaataaaagtgcaggcttcaagcagcgctcgcacgacctgttcaaaatcgcgggcaatcgaagagctttgactatcgccgtgatgctccaggcattacagcagctctgtggcttcaacagcttgatgtatttctcagcaacaattttctcccttctgtcattctcgtcgcctacgcttacctcgttatccgtggccctgacgaacttcctcttcacactgcttgcgtttgtctatattgaccggattgggcgccgtcgcatcttgctatattcgatacccgtgatgatcatctcgctcttcgtctgtgctgtgacattctcctttgtggagttgccgaaagatacatcagaggcgcaagctcgtcaagccgcgacggatagttccgttatcccactgttaatccttctatgtctcacagtgtatacagcagcgtacgcctttggcctcggcaatgtcccttggcagcaatcagagctctttcctctgaatgtgcggtcgcttgggtctgcccttgcaaccgcaacaaactggggctcgaactttgttgtcgggcttactttcctcccgatgatggagttgttatctccgagtctggtttttgcgctctacggggtcgtttgtattgccggatggtttggcgtacgaactttctaccctgaaatgagcgggctcaatttagaagacgtaaaggcccttcttgcggatagctggggtgtaagagcgagcttgattggggttcggaatagatctgcttag

SEQ ID NO: 2753 - protein, 517 aa, Aspergillus nidulans FGSC A4
MNSREDTELSAAHAPLLAQEPVLRQHDEDQSKHSSGRFIWYLTFSAGISGLLFGYDTGVISSTLVSIDSDLSNRPLTTLDKSLITSCTSLFALIASPLAGILADRLGRKRVILVADVLFTVGSFIQAATGEVWGMIIGRSIVGFAVGSASLVTPLYISELAPSDARGRLVTILSLFITGGQVVAYIIGWLFSYVGGGWRWMVGLGMLPAVFQLIIVVALPKTPRWLVQAGYEDKAQRILSEVHQDDQTAKQTLRDIQQEVAEENSSNKSAGFKQRSHDLFKIAGNRRALTIAVMLQALQQLCGFNSLMYFSATIFSLLSFSSPTLTSLSVALTNFLFTLLAFVYIDRIGRRRILLYSIPVMIISLFVCAVTFSFVELPKDTSEAQARQAATDSSVIPLLILLCLTVYTAAYAFGLGNVPWQQSELFPLNVRSLGSALATATNWGSNFVVGLTFLPMMELLSPSLVFALYGVVCIAGWFGVRTFYPEMSGLNLEDVKALLADSWGVRASLIGVRNRSA

SEQ ID NO: 2754 - DNA, 1587 bp, Aspergillus nidulans FGSC A4
  CDS (1)..(1587)
atgactatcgacgaagacgagaagactgccccagtgcatctggagtacgacggccatgaagccgacgacgactccatcgagaatattgccaccagctggttcgtctggcttgtctcccttacagcatctattgcgggcagtctctttggctacgataccggtatcatctccgctgtcctggtctatctgggaagcgacctcgatggacgcccagcgtctgagaacgagaaacaattgatcaccagtttatgctccggcgggtcttttgtgggcgccattattgccggtcttactgccgacaagtttggtcgaaagcctgccatttatgtcgggtgcgtgctatttaccgtcggcgcagtcctccaaggcgcagcatacagtatcgcgcaaatgtcagtcggacgcctaattgtcggatttggtgtggggagcgcctcgatggtagtgcctctctatattgcagaactatcacccacaaaagtccgcggcagactcatcggtctcaataacatgtccatcaccggcggccaagtcatttcttatggtatcggagcagcgttcgcgcacgttccgcatggctggcggtatatggttgggcttggaggcgtcccctcaatcatcctggcatgcctcctccccttctgccctgaatccccgcgccagctcgtctaccacggcaagacacaagaggccgaaactgtgatccgcaaaatctacaagggtgcctcggatgcccaggttgcagcaaaagttcggttgattgttagggcatgcgatgaatcacgagaactcaacaaagactccacgcgctgggccaagatcaagctcctgcattcgaacccggcgtacttccgcgcgctggtgtgcgcctgcggctttgctgtcattgcccagatgtccgggttcaatactctgatgtactactccgccacgctgtttgatcttgttggcttctcagaccccgttgcagtgggaatagttgttgcgggaaccaatttcgtcatgacgtgggtgaacatgatgcttgtcgacccccttggccgccggcgcgtcgtcctcctaaccgcctggggcatgtctgcgggcctgattgctgtagctatcgcattcaagtttatccctgtagacacctcaactctcgaactcgaaaccgataccgtcagcccacctgccattgtcgtgctcatctttatcatttggttcgttttcttctacggcgcgtccatggggaacacagcctggatgaacacagatttcttccccatggaagtccgcgcaatcgggacgatgttccagacttgctgtacctggggctcgaatataattgtatccagcacgtttctgagcatgatgcaggggataacgccgtctggcgcgttcgggttttatgccgctatctgtgggtttgggtatatcctgatttatttcttttaccctgaggtctcgggattaagtattgaggagatcagggaagtcttccaacatggatttggggtggcctattcgaggaaacttcgaaagacaaggaaggctgcggccagggcagcgagtgccgcaggggaagaagtcgaagcgaagacggtttaa

SEQ ID NO: 2755 - protein, 528 aa, Aspergillus nidulans FGSC A4
MTIDEDEKTAPVHLEYDGHEADDDSIENIATSWFVWLVSLTASIAGSLFGYDTGIISAVLVYLGSDLDGRPASENEKQLITSLCSGGSFVGAIIAGLTADKFGRKPAIYVGCVLFTVGAVLQGAAYSIAQMSVGRLIVGFGVGSASMVVPLYIAELSPTKVRGRLIGLNNMSITGGQVISYGIGAAFAHVPHGWRYMVGLGGVPSIILACLLPFCPESPRQLVYHGKTQEAETVIRKIYKGASDAQVAAKVRLIVRACDESRELNKDSTRWAKIKLLHSNPAYFRALVCACGFAVIAQMSGFNTLMYYSATLFDLVGFSDPVAVGIVVAGTNFVMTWVNMMLVDPLGRRRVVLLTAWGMSAGLIAVAIAFKFIPVDTSTLELETDTVSPPAIVVLIFIIWFVFFYGASMGNTAWMNTDFFPMEVRAIGTMFQTCCTWGSNIIVSSTFLSMMQGITPSGAFGFYAAICGFGYILIYFFYPEVSGLSIEEIREVFQHGFGVAYSRKLRKTRKAAARAASAAGEEVEAKTV

SEQ ID NO: 2756 - DNA, 1665 bp, Candida albicans SC5314
  CDS (1)..(1665): transl_table=12
atgggaagttcaaccaataatacacaatcaaaagctacccccagtgtgttagaaaatgaagtcaatagctcaaaatcatcagttgtttcatcaacgtcttctgctaaagggttgctacgtgaaaccactaatcatggtactatggaaacatcctcggttcagatatctgaatcagaatctcgtccatcgaaaatggtacttgtattaacacttgcatcatcaatttctggatttatgtttgggtacgatactggttatatatcttcagcattagttcaaattggtacagatttatctaacaaaattctaacatcaggtgaaaaagaatttataacttctgccacatcgttaggagctcttcttggtgctgttgttggtggtgtattagcaaatttgattggtagacgtagagttttattgggctcaaatatcattttcgttgtggggacaataatacaattggctgctcgtactgtgtggactatgatagccgggcgatttgttttaggttggggtgttggtattgcatcattgattgctcctttaatgatttcagaattagctcctgctaaatatcgtggtagattaattgttaccaatgtcatatttattactggtggtcaattaatagcttatttcataaattggggtcttacaagagtaagtcatggttggagagtatctgttggtttatgtatggtaccaccagttttacaatttgttttattttggtttttaccagatacaccaagattttacgtgatgaatgggaactttgaaaaggcaagacaagttttgagaaaagtacacgttgatccttcagatgaatttgtaaatgctactattgatgaaatgattgcctctgattcaactgtcccaggtaatggacctttacaaaaggcatggaaatcgatcaagattattcacactactccaggaaattttagagctttgatacttgcatgtggtttacaaggtatacaacaattcactgggtttaattcattaatgtatttcagtgcaaccatttttgaaactattggtttccataacgctacagctgtttctattatcattgctgccacaaatttcgtgtttacagggatagccatttgtattattgataaagttggtagaagaagaattttattggtaggaatgccatgcatgtgtatctcattaattgtctgtgctgttgccttccattatttgaatgttgatttcagtactggtacagttgtatctagaggtattaatggttgggggattgttgtgattataggaatgatattgtatgttgcttcttatgccataggtattggtaatgctgcttgggtgggtgttgaattgttttcagatgtcaatgtacgttccattggggcaatgtatgctgcatgtacaaattgggctggttcattggtgattgcttcgacattcttgacaatgttggaaaatataaccccaactgggacattttcattctttgctggattatgttttattgcatttttctttgtttatttcttgttaccagatactgctggtttggaattggaagaaaccaccgatttcttatccaacgggttcaatgtgaaacaagctgcacaattgtcaaaggaaagaaagaagcattccaagtttgctaaatcgaaaccaaccgtatag

SEQ ID NO: 2757 - protein, 554 aa, Candida albicans SC5314
MGSSTNNTQSKATPSVLENEVNSSKSSVVSSTSSAKGLLRETTNHGTMETSSVQISESESRPSKMVLVLTLASSISGFMFGYDTGYISSALVQIGTDLSNKILTSGEKEFITSATSLGALLGAVVGGVLANLIGRRRVLLGSNIIFVVGTIIQLAARTVWTMIAGRFVLGWGVGIASLIAPLMISELAPAKYRGRLIVTNVIFITGGQLIAYFINWGLTRVSHGWRVSVGLCMVPPVLQFVLFWFLPDTPRFYVMNGNFEKARQVLRKVHVDPSDEFVNATIDEMIASDSTVPGNGPLQKAWKSIKIIHTTPGNFRALILACGLQGIQQFTGFNSLMYFSATIFETIGFHNATAVSIIIAATNFVFTGIAICIIDKVGRRRILLVGMPCMCISLIVCAVAFHYLNVDFSTGTVVSRGINGWGIVVIIGMILYVASYAIGIGNAAWVGVELFSDVNVRSIGAMYAACTNWAGSLVIASTFLTMLENITPTGTFSFFAGLCFIAFFFVYFLLPDTAGLELEETTDFLSNGFNVKQAAQLSKERKKHSKFAKSKPTV

SEQ ID NO: 2758 - DNA, 1665 bp, Candida albicans SC5314
  CDS (1)..(1665)
atgggaagttcaaccaataatacacaatcaaaagctacccccagtgtgttagaaaatgaagtcaatagctcaaaatcatcagttgtttcatcaacgtcttctgctaaagggttgctacgtgaaaccactaatcatggtactatggaaacatcctcggttcagatatctgaatcagaatctcgtccatcgaaaatggtacttgtattaacacttgcatcatcaatttctggatttatgtttgggtacgatactggttatatatcttcagcattagttcaaattggtacagatttatctaacaaaattctaacatcaggtgaaaaagaatttataacttctgccacatcgttaggagctcttcttggtgctgttgttggtggtgtattagcaaatttgattggtagacgtagagttttattgggctcaaatatcattttcgttgtggggacaataatacaattggctgctcgtactgtgtggactatgatagccgggcgatttgttttaggttggggtgttggtattgcatcattgattgctcctttaatgatttcagaattagctcctgctaaatatcgtggtagattaattgttaccaatgtcatatttattactggtggtcaattaatagcttatttcataaattggggtcttacaagagtaagtcatggttggagagtatctgttggtttatgtatggtaccaccagttttacaatttgttttattttggtttttaccagatacaccaagattttacgtgatgaatgggaactttgaaaaggcaagacaagttttgagaaaagtacacgttgatccttcagatgaatttgtaaatgctactattgatgaaatgattgcctctgattcaactgtcccaggtaatggacctttacaaaaggcatggaaatcgatcaagattattcacactactccaggaaattttagagctttgatacttgcatgtggtttacaaggtatacaacaattcactgggtttaattcattaatgtatttcagtgcaaccatttttgaaactattggtttccataacgctacagctgtttctattatcattgctgccacaaatttcgtgtttacagggatagccatttgtattattgataaagttggtagaagaagaattttattggtaggaatgccatgcatgtgtatctcattaattgtctgtgctgttgccttccattatttgaatgttgatttcagtactggtacagttgtatctagaggtattaatggttgggggattgttgtgattataggaatgatattgtatgttgcttcttatgccataggtattggtaatgctgcatgggtgggtgttgaaatgttttcagatgtcaatgtacgttccattggggcaatgtatgctgcatgtacaaattgggctggttcattggtaattgctacgacattcttgacaatgttggaaaatataaccccaactgggacattttcattctttgctggattatgttttattgcatttttctttgtttatttcttgttaccagatactgctggtttggaattggaagaaaccaccgatttcttatccaacgggttcaatgtgaaacaagctgcacaattgtcaaaggaaagaaagaagcattccaagtttgctaaatcgaaaccaaccgtatag

SEQ ID NO: 2759 - protein, 554 aa, Candida albicans SC5314
MGSSTNNTQSKATPSVLENEVNSSKSSVVSSTSSAKGLLRETTNHGTMETSSVQISESESRPSKMVLVLTLASSISGFMFGYDTGYISSALVQIGTDLSNKILTSGEKEFITSATSLGALLGAVVGGVLANLIGRRRVLLGSNIIFVVGTIIQLAARTVWTMIAGRFVLGWGVGIASLIAPLMISELAPAKYRGRLIVTNVIFITGGQLIAYFINWGLTRVSHGWRVSVGLCMVPPVLQFVLFWFLPDTPRFYVMNGNFEKARQVLRKVHVDPSDEFVNATIDEMIASDSTVPGNGPLQKAWKSIKIIHTTPGNFRALILACGLQGIQQFTGFNSLMYFSATIFETIGFHNATAVSIIIAATNFVFTGIAICIIDKVGRRRILLVGMPCMCISLIVCAVAFHYLNVDFSTGTVVSRGINGWGIVVIIGMILYVASYAIGIGNAAWVGVEMFSDVNVRSIGAMYAACTNWAGSLVIATTFLTMLENITPTGTFSFFAGLCFIAFFFVYFLLPDTAGLELEETTDFLSNGFNVKQAAQLSKERKKHSKFAKSKPTV

SEQ ID NO: 2760 - DNA, 1704 bp, Ustilago maydis 521
  CDS (1)..(1704)
atggccgaccgtgatcccagcctcactcccgacgaggacaaacctcactctctccagtctgacgacaagttctcgcccaaagcatccaacgaccacgctcagctccaccaacttcacctcgctactcgctctgttgtctccacagagggcatcatcgatgcagccgaacttgatcaagtcctggacgaagccgccatcgaggctgctggccagggcgagagcaacagtctctacctctggacactcaccttcttcgccaccattggcggtctcttgtttggctacgacactggtgccatatccagcgtgcttgtccaagtgggcactgatctagacaacaaagagctgaccgatggcaacaaggaattcatcacctcggcactcaccgtcggcgccatcatctctgccctttgcgccggtgtcgtggcagacaagttcggccgaaaatggacgcttgtcatttgtgatatcatgttcattgtaggcgccgtcattcaagctgctgcccacaagaagtgggacgttgtgggtggaagatttgttctcggtctcggaatcggcgcagctgctcagatcgtgcccgtatacatccaagaactggctccggctcgagcgcgaggtcgtctcacgtgcctaaatagcatcgccgtcacctttggccaggtcgtagctaccgccatcggcgccggttttgaacatgtctcttctggctggcgctggatcattgccctcggcgccttccctcctatcatccaactcattggtattcactttttcatgtcagagtccccgcgctatctcgtcaagcaacgaagagaggacgaagccgcgcgagccctcacccgtatctatcctctcgccacccccgagcagatcaacgcaaagcttggcgttctcaagaagcacatccaaaccgaggacgctcccctccgctaccgaatcgtcaaggtctggaccgatgtacccactcgtagagccgtcttcctaacttccatggttctagcctcacaacaactttcaggcttcaactccctcatgtacttttctggcaccttgttcaagtcggccgggctcaagcaaccgatcgcaaccagtctcatcgtcagcggagccaacttcctctgcactttcatccctctcaagtacattgatcgtttcggccgtcgccgcttccttctcgccacgatgccctgtgtcattattttcttggtttgcaccgccggaatctttgcaaagatgctccaacccaccaaccagcgcctcgtcgagggttatccgtatccaacgtcgtacacctcggccatgcttgtctttatggttctctacgtctgctcgtatgccaccggtcttggcaacgtaccttggcaacaaggcgagttcttctccaccgagacgcgcatgatcggtacctctatctctaccgcagtcaactgggcggccaacctcgtcatctcttcgaccttcttgagccttatgaatgccatcactccttccggtgcttttggcttctacgcaggcctcacatttgtcttccttctcattgtttacttcctttaccctgagacctcgctgttgtcgctcgaggaggtgcgtaccactctcaacggcggcttcaacgtcaaaaagagtctcaaggtacgaaaggagaagatcgccctttggaacactcagaagcaggctgctaaagccgagaccgccgcttag

SEQ ID NO: 2761 - protein, 567 aa, Ustilago maydis 521
MADRDPSLTPDEDKPHSLQSDDKFSPKASNDHAQLHQLHLATRSVVSTEGIIDAAELDQVLDEAAIEAAGQGESNSLYLWTLTFFATIGGLLFGYDTGAISSVLVQVGTDLDNKELTDGNKEFITSALTVGAIISALCAGVVADKFGRKWTLVICDIMFIVGAVIQAAAHKKWDVVGGRFVLGLGIGAAAQIVPVYIQELAPARARGRLTCLNSIAVTFGQVVATAIGAGFEHVSSGWRWIIALGAFPPIIQLIGIHFFMSESPRYLVKQRREDEAARALTRIYPLATPEQINAKLGVLKKHIQTEDAPLRYRIVKVWTDVPTRRAVFLTSMVLASQQLSGFNSLMYFSGTLFKSAGLKQPIATSLIVSGANFLCTFIPLKYIDRFGRRRFLLATMPCVIIFLVCTAGIFAKMLQPTNQRLVEGYPYPTSYTSAMLVFMVLYVCSYATGLGNVPWQQGEFFSTETRMIGTSISTAVNWAANLVISSTFLSLMNAITPSGAFGFYAGLTFVFLLIVYFLYPETSLLSLEEVRTTLNGGFNVKKSLKVRKEKIALWNTQKQAAKAETAA

SEQ ID NO: 2762 - DNA, 1836 bp, Cryptococcus neoformans var. neoformans B-3501A
  CDS (1)..(1836)
atggagaaccccagtgggcccccaaaagtgcctgcagaggcgaacagggaaatcattgtttgtataaatactcaagtgtctcaaacagaaccatcatctcttgcaacttacgcaaagcaaattaaaatgaactccgacgaaattgcgcctgtcgcaacattatcgagcagctctttgccgccatccgagatgaaggctgaagcgacatcaagcggactcacgcacgaaggacagctcatcgatgaggctgtcattcaagctgaaaatgaggacaaaatgacaccttatctggtttttttgattggatcggctgctctgggcggtttcctgtatggatatgataccggtgtcgttggtatcgccctaccttacgttggtactgatctcggtcacgcactttcatctcctgagcaagagattgctaccgccgctaccacaatcggtgccatcttcggcgctgcaattttgggttacttcgccgataaatggggtcgtaaatggtgtttattgatctctgatttgttcttcactgctggtgcaatcatcattgcgtcgagtttctccctcggtcagctcactgccggtcgtttggttcttggtgtcggagtcggaggtgcggctatcatttgtcccctctatatcaccgaattggcaccgaccgctgttcgtggtcgttgtgtgggcacgaacggtttctttattcccttcggacagacagtatccgttgctatcggagcgggtttaaaagacgtcaaatacaactggcgaatcttattcggtctcggtgttgtgccatctttgctccagctctgcctgatgcacaaactccccgaatctcctcgagttttgattctgcgtggacaagatgatcgcgctcgtgaggttctcaaacaaatctaccgatacgcttctcatgaggtcatcgaactcaaacttgaaatcgtcaaggctcatgtccaggcaactactgttctcgaacgctcaaccacatgggctcaacgtgccaagaaactttggtgtcacaagccctaccgtcgatctattttgaccgtttgcatgattcaggtattcggtcagttcacaggttacaataccctgctgtactatgccggcacgttgttcggcctggttggcctctccaacgcttctttaggaggattgattccttccatcaccaataccttcttcctgcttgtgggtatgctctttgttgacagaatcgggcgacgagggctgcttatgaaatttggcccgctgatgatcattggcctgatctggtgtctgatcgcattctactttatgtgtaaggagaccggtggtttccttgttgaaggtttcgtctacaaccagagagatgtcggtcttgtcatcgcgggtatcgtcatctttgttatgggattcggctcaacatatgcccatatctgttggtatcaatcagaatatctcgctttggagatccgtgctatcggtagtgccattagtacgactgccagcttctctgccaacttggtggttgctgtgtctttcctttctgagcttgagactttgactccaagcggtacttatggtctttacctagggttcgtagtgatcggttacgtgctagcctactattgttatccagaaacgaagggcctatctatcgacgaagctttcagtctattcgacgatgatttcggagtcaagaagtccgtgaagatgcgacgagaaaaagccgaagctcagaagagatataacgctgaagggggagagtcaggtcaagttgttgattatcttggggccaagcctgaaacaagtcatatcgagcgagtggagccggtcgcaagtggactgtag

SEQ ID NO: 2763 - protein, 611 aa, Cryptococcus neoformans var. neoformans B-3501A
MENPSGPPKVPAEANREIIVCINTQVSQTEPSSLATYAKQIKMNSDEIAPVATLSSSSLPPSEMKAEATSSGLTHEGQLIDEAVIQAENEDKMTPYLVFLIGSAALGGFLYGYDTGVVGIALPYVGTDLGHALSSPEQEIATAATTIGAIFGAAILGYFADKWGRKWCLLISDLFFTAGAIIIASSFSLGQLTAGRLVLGVGVGGAAIICPLYITELAPTAVRGRCVGTNGFFIPFGQTVSVAIGAGLKDVKYNWRILFGLGVVPSLLQLCLMHKLPESPRVLILRGQDDRAREVLKQIYRYASHEVIELKLEIVKAHVQATTVLERSTTWAQRAKKLWCHKPYRRSILTVCMIQVFGQFTGYNTLLYYAGTLFGLVGLSNASLGGLIPSITNTFFLLVGMLFVDRIGRRGLLMKFGPLMIIGLIWCLIAFYFMCKETGGFLVEGFVYNQRDVGLVIAGIVIFVMGFGSTYAHICWYQSEYLALEIRAIGSAISTTASFSANLVVAVSFLSELETLTPSGTYGLYLGFVVIGYVLAYYCYPETKGLSIDEAFSLFDDDFGVKKSVKMRREKAEAQKRYNAEGGESGQVVDYLGAKPETSHIERVEPVASGL

SEQ ID NO: 2764 - DNA, 1704 bp, Cryptococcus neoformans var. neoformans B-3501A
  CDS (1)..(1704)
atgtcagctggaccagcccaacccaacatctacgcacccatccgcacatctcacagcggctatccatccccgacacactctggttcctccacgcccgcgtcgctggaattctccgatggtcgattgccggaaagcaatgtcgagagagatatgagcaaggtcgcggagagggtcgcccttctgggcgaggtggatgacggagcagtcatcgtggaaggcgaagataaaataaccaagttcgtgtggacgctggtgttggctgctgcgatctcaggcttactattcggctatgacacggccgccatctccggtatgctggtcattatcaaggacgatcttggcacaatattatcaagctggcaaaaagaagcgatcacctctgccacaactctcggtgcattattaggaggtcttgccgcaggttgcatttcagactttacaggtcgaaggctcgttattgtgtttgccaacgtcgcttttatcggtggttctatctgtcaagcagcttgccacactgtggcagtgatgatcgccggtcgattcatcgttggacttggtgtcggtctcgcgagctgtattgtgccattgtatattggagagctggcgcctaccatgattagaggacgattggttaccattaactgtgtcgctatcactttgggtcaagtcgtcgcttacgctattggtgccagtttccaaaatgcgcataatggttggcgatggattgtgggacttggcgcgatgccgtcgtttgttcaactcgcttcaatcggtttccttcccgaatcaccccgtattcttctgctccgctctgacgttgctggcgcacgagctattactgccaagatctaccctctcgcaaaagtcgagcaggttgacagaaaagtcgagatcatgaaagctgctgtcgatcagagtatcgagtataacgccaattctacatggtttgagaggctcaagagtttggttatggttggtaccaatcgacgagcgctaatcatcggatgtggattgcaagcagcccaacaactatgcggtttcaacactctgatgtactattctgcaaccatattcgccatgcttggattcaagaatgctacagccgtcggattgatcgtcgctactgtcaacgttttgttcaccctcgtcgctctcaagattgtcgaccctgtgggacgacgaagaactatgcttttcacccttcctattatgaccctcgccctcgtcctcgcggctatcttcttctactacctcacactctccaccaacggcatcctcatcgaggaccacgactacccccgctctttatccatccccgttctcctttccatgctcctctatgtcgcgggctacgcaaccggtctcggtaacatcccctggcaacagggagagctcttccgactcgaagtaagaggaatcggtacgagtatctgtacggccgtgaattggagttgtaatatgttgattgcgagcacgtttttgagtttgatggatgctgcaacgccaagtggggcgtttgggatttatgcggggttttgtgtgattggatggttgttttgttggatgctgtatcctgagacttccggactttcattggaagaagtatactttgttttcgaagaagggtttgggattgaaaaatctcagcagctgcgcaagcagaagctggaagaatctgccaagctcaaagccatatttgagtaa

SEQ ID NO: 2765 - protein, 567 aa, Cryptococcus neoformans var. neoformans B-3501A
MSAGPAQPNIYAPIRTSHSGYPSPTHSGSSTPASLEFSDGRLPESNVERDMSKVAERVALLGEVDDGAVIVEGEDKITKFVWTLVLAAAISGLLFGYDTAAISGMLVIIKDDLGTILSSWQKEAITSATTLGALLGGLAAGCISDFTGRRLVIVFANVAFIGGSICQAACHTVAVMIAGRFIVGLGVGLASCIVPLYIGELAPTMIRGRLVTINCVAITLGQVVAYAIGASFQNAHNGWRWIVGLGAMPSFVQLASIGFLPESPRILLLRSDVAGARAITAKIYPLAKVEQVDRKVEIMKAAVDQSIEYNANSTWFERLKSLVMVGTNRRALIIGCGLQAAQQLCGFNTLMYYSATIFAMLGFKNATAVGLIVATVNVLFTLVALKIVDPVGRRRTMLFTLPIMTLALVLAAIFFYYLTLSTNGILIEDHDYPRSLSIPVLLSMLLYVAGYATGLGNIPWQQGELFRLEVRGIGTSICTAVNWSCNMLIASTFLSLMDAATPSGAFGIYAGFCVIGWLFCWMLYPETSGLSLEEVYFVFEEGFGIEKSQQLRKQKLEESAKLKAIFE

SEQ ID NO: 2766 - DNA, 1617 bp, Oryza sativa subsp
  CDS (1)..(1617)
atggagggaggtgttcatgagttcgatggctcaaccttcagagagtgcttctccctctcatggaggaacccttatgtccttaggctcgccttctccgccggcatcggtggcctcctcttcggctacgacaccggtgtgatttcaggagctctgctttacatccgtgacgatttcccttcagttgacaagaacacatggcttcaggagatgatcgtgagcatggcggtggccggcgcgatcatcggggcggcgatcggcgggtgggcgaacgaccggtacggccgccggacgtcgatcctggtggccgacgcgctcttcttcgccggcgcggcggtgatggcgtcggcgacggggccggcgcagctggtggtggggcgggtgttcgtcgggctcggcgtcgggacggcgtccatgacgtcgccgctgtacatctcggaggcgtcgccggcgaggatacgcggcgcgctggtgagcaccaacggcctcctcatcaccggcgggcagttcttgtcgtacctcatcaacctcgccttcaccaaggcccccgggacgtggcggtggatgctcggcgtcgccgccatccccgccgtcgtccagttcttcctcatgctcttcctccccgagtcgccgagatggctctaccgaaaggggagggaggaggaagcagaggcgatcttgaggaagatatactcggcggaggaggtggagagggagaaggaggagttgaaggagtcggtggaggcggaggcgcgggagaggagctcgtcggagaagacgagcctggtggcgctgctgatgacgacggcgacggtgcggcgggggctggtcgccggcgtcgggctgcaggtgttccagcagctggtggggatcaacacggtgatgtactacagccccaccatcgtgcagctcgccgggttcgcctccaaccagacggcgctcgcgctgtccctcgtcaccgccggcctcaacgccgccggctccctcgtcagcatctacttcatcgaccgcaccgggcggcgcaagctgctcgtcatcagcctcgccggcgtcatcctctccctcgccctcctctccgccgtgttccacgaggccacctcccactccccgcccgtcggcgccgccgagaccgcccacttccacggcggcgcgctcacatgcccggactactcctcccgctcgtcgtcgtcgttctgggactgcacgaggtacgggtggctggcgatggcggggctggcgctgtacatcgccgccttctcgccggggatggggacggtgccgtggatcgtgaactcggaggtctacccgctgcggcaccgcggcgtgtgcggcggcgcggcggcgacggcgaactgggtgtcgaacctggcggtggcgcagtcgttcctgtcgctgacggacgccatcggggcggcgtggacgttcctcatcttcggcgggctgtccgtggcggcactcgcgttcgtgctcgtctgcgtgccggagaccaagggcctccccatcgaggaggtggagaagatgctcgagggaagggagctccgcctcaggttctgggccaagcgccgccaccaccacggcggcgacggcgacggcggcggagaaaagaccggcggcgtgtga

SEQ ID NO: 2767 - protein, 538 aa, Oryza sativa subsp
MEGGVHEFDGSTFRECFSLSWRNPYVLRLAFSAGIGGLLFGYDTGVISGALLYIRDDFPSVDKNTWLQEMIVSMAVAGAIIGAAIGGWANDRYGRRTSILVADALFFAGAAVMASATGPAQLVVGRVFVGLGVGTASMTSPLYISEASPARIRGALVSTNGLLITGGQFLSYLINLAFTKAPGTWRWMLGVAAIPAVVQFFLMLFLPESPRWLYRKGREEEAEAILRKIYSAEEVEREKEELKESVEAEARERSSSEKTSLVALLMTTATVRRGLVAGVGLQVFQQLVGINTVMYYSPTIVQLAGFASNQTALALSLVTAGLNAAGSLVSIYFIDRTGRRKLLVISLAGVILSLALLSAVFHEATSHSPPVGAAETAHFHGGALTCPDYSSRSSSSFWDCTRYGWLAMAGLALYIAAFSPGMGTVPWIVNSEVYPLRHRGVCGGAAATANWVSNLAVAQSFLSLTDAIGAAWTFLIFGGLSVAALAFVLVCVPETKGLPIEEVEKMLEGRELRLRFWAKRRHHHGGDGDGGGEKTGGV

SEQ ID NO: 2768 - DNA, 1521 bp, Oryza sativa
  CDS (1)..(1521)
atgacgatcgatttgtccatgcccgggagctccgggctcctggacgacataggggggaagaagtacatgaatttcttcagcaaccgctacgtgctcgcgctcacgggcgccgcaggaatcggcgggttcctctttggctacgacacaggtgtcatatctggagcccttttgtatattcgggatgactttccagcagtcagagacaattatttcttacaggagacaatcgttagcatggcattggtaggagccatcattggagcagctggcggcggctggatcaatgatacatacggccgtaggaagtctactcttgtggctgacatgctgtttgcacttggctcacttgttatgtgtgctgctggtggtccttacattctgattcttggaaggcttcttgttggcttgggtgtgggtatagcatcagtcacagcgccagtttacattgctgaagctgctccttcggaaattaggggaggtttggtgtcaactaatgtactcatgattactggtggtcaattcttctcctacctcatcaatcttggctttactgaggttcctggaacatggcgctggatgctcggagttgctgctgtgcctgcaattctacagtttgttctgatgctttttttgccagaatctccccgttggcttttctggaaggatgagaaagcaaaagctatttctgtcctagagaagatttatgactctgaccgtctagaggaagaggtagagcttcttgcttcttcttcaatgcatgaatttcagtctgacggtactgggagctatttggacattttcaagtcaaaggaactaaggctagcattttttgctggagctggtcttcaggcgttccagcaatttactggcatcaacaccgtcatgtactacagcccaacaattgtccagatggctgggtttacctccaacaagttggcattgctcctttccctcatagtcgctggtatgaatgccgctgggaccattgttggaatctacctgattgaccgctgtggccggcgtcgcctggcccttacaagcttggctggtgtggtggtctccctcgccatcctagcaatggccttcatactgcagtcatcatcagatatctgttcgaatgcactcaatggtgcctgccaaggtgcactgggatggttcgcggtggcgggactcgctctatacatcgccttcttctccccaggcatggggccagttccatgggcagtgaactccgagatctaccccgaggcataccgtggaatgtgtggtggcatgtcagccactgtcaactgggtatctaacctgattgtggcacaaacattcctctcgatcgtcgggttggttgggaccggcctgaccttcctgatcatcgccggaatagcggtgctggccttcatcttcgtggctctctacgtgccggagactaaaggcctcagctttgagcaggttgagctcctgtggaaggagagagcatggggaaaccagtgcaatcgccagagccttttgggcgctgcaccgtag

SEQ ID NO: 2769 - protein, 506 aa, Oryza sativa
MTIDLSMPGSSGLLDDIGGKKYMNFFSNRYVLALTGAAGIGGFLFGYDTGVISGALLYIRDDFPAVRDNYFLQETIVSMALVGAIIGAAGGGWINDTYGRRKSTLVADMLFALGSLVMCAAGGPYILILGRLLVGLGVGIASVTAPVYIAEAAPSEIRGGLVSTNVLMITGGQFFSYLINLGFTEVPGTWRWMLGVAAVPAILQFVLMLFLPESPRWLFWKDEKAKAISVLEKIYDSDRLEEEVELLASSSMHEFQSDGTGSYLDIFKSKELRLAFFAGAGLQAFQQFTGINTVMYYSPTIVQMAGFTSNKLALLLSLIVAGMNAAGTIVGIYLIDRCGRRRLALTSLAGVVVSLAILAMAFILQSSSDICSNALNGACQGALGWFAVAGLALYIAFFSPGMGPVPWAVNSEIYPEAYRGMCGGMSATVNWVSNLIVAQTFLSIVGLVGTGLTFLIIAGIAVLAFIFVALYVPETKGLSFEQVELLWKERAWGNQCNRQSLLGAAP

SEQ ID NO: 2770 - DNA, 1593 bp, Aspergillus oryzae
  CDS (1)..(1593)
atggattctgattcactgcaaatctctgagaataaagcggagatcttccacgatgaggacctggtctcaatagccttagatgactccattgaggaaacccatcccgggaaagcagtatggctgattgtctgtgcggtgtccatgggtggctttcttttcggctatgacacgggggttatatcttctgtactcgtcaatctggggtcggacctggggaaaccactcagctccaatgaacaagaattaattacctctatcacctccggaggcgctctgataggctcagtagcggcgggcatgacagccgacaaatacggccggaaacttgccatttacgtaggctgtatcatcttcttcataggaagcataattcaggcagccgcatactcgctcccccagatgactgttggtcgcctcgttgtgggcttcggcgtcggcgaggccgcgatgattgtcccattgtacattggagaaatggccccggcgcggtttcgtggccgcctcatagtctttgacaatatatgtgtcactttcggtcagcttgtctcatatgcactcggcgccgcgttcacggatgtggcttctgggtggagatacatggtgggcctcggcgcagtacctgctttgttgctcgttgcgatgatgccattttgccctgagacacctcgtcagttggtcctacatggtcgactggaagaggctaggcgtgtgatttcgaagatattcccacgagccactgaccgacaggtcgatgcgaaggcgagactgatccgatattcaattgaagaagccaccgcgtcgatatctaataagagccttgcatggcagatgagacagctttttactgttggtcagaatgtgcgagctcttataactgcttgcgccgttatggcggtatcccaactcggaggcttcaattcgcttatgtactacgcctccacgctcttttcaatggttgggtttgacaagcccaccgtggtgtcaatagtggttggagccactaattttatatttggattcccaaacttcatcttcattgaccgcttcggccgacggcgtatgctcctggttaccatccttggaatggcaagcatccttttcaaaatatgcctatctttggtggttgcctctgtagccttccactggattccagtgaaccatgacctcacggccgttgagacgcgcgagatgggctggcctaatatcttgcttctcgtgtctctcatcgtatatattgccttctactcggcaggtgtcgccccgatctcttgggtggggacggagtttctacctctcgaagttcgtgcattggggaccatgatgaacagcgtaacctgctggggctgcaacatcattatatcatcaacctttctgtcgatgatgaagggaatgacccctagtggaacctttggtttctacgctggaatatgcttgcttggattcatctttgcgattttctgctatgcagaggttcataacatgcctctcgagtctgtccgagagatatataaccatggatttggagtcaagtatgcacgggaggtgcagaaagaacttcacgaggctagagatgcagaggggagcacggcgtga

SEQ ID NO: 2771 - protein, 530 aa, Aspergillus oryzae
MDSDSLQISENKAEIFHDEDLVSIALDDSIEETHPGKAVWLIVCAVSMGGFLFGYDTGVISSVLVNLGSDLGKPLSSNEQELITSITSGGALIGSVAAGMTADKYGRKLAIYVGCIIFFIGSIIQAAAYSLPQMTVGRLVVGFGVGEAAMIVPLYIGEMAPARFRGRLIVFDNICVTFGQLVSYALGAAFTDVASGWRYMVGLGAVPALLLVAMMPFCPETPRQLVLHGRLEEARRVISKIFPRATDRQVDAKARLIRYSIEEATASISNKSLAWQMRQLFTVGQNVRALITACAVMAVSQLGGFNSLMYYASTLFSMVGFDKPTVVSIVVGATNFIFGFPNFIFIDRFGRRRMLLVTILGMASILFKICLSLVVASVAFHWIPVNHDLTAVETREMGWPNILLLVSLIVYIAFYSAGVAPISWVGTEFLPLEVRALGTMMNSVTCWGCNIIISSTFLSMMKGMTPSGTFGFYAGICLLGFIFAIFCYAEVHNMPLESVREIYNHGFGVKYAREVQKELHEARDAEGSTA

SEQ ID NO: 2772 - DNA, 1638 bp, Aspergillus oryzae
  CDS (1)..(1638)
atggcccaagacaaagatgcaaaatcccaatctccaacgtccataatgaatgatcccaaaaaagcgagcctacccgaaaatgcacacatcgaagtggccgctgggagtctcaccacggaaactggcatcgacgacctcccaattagtatgttcgtatggcttgttgcctttaccgcttcgattgctggaatgttgtttggctacgatactgggattatcagtgctgttcttgtctacatccatgatgggttagacaaccgcacgctcaccagcaacgaaaaggaattgatcacgtccctctgctcgggtggggcgttcttcggatctattttggctggattgacggcggataagttgggacgcaaagcagcaatctatttcggttgcgcgttgtttacaatcggagctgtccttcaaggcgccgcatacacgattgctcaaatggccgtgggtcgcgttgtagttggctttggtgtggggtcagctgccatggtggtgcctttgtatatcgctgaagtagcacctgcgaaggcccgtggacgacttattggcttgaataacatgtcaatcaccggtggtcaggtaacctcctatgctatcggagctgcctttgccaatgtcaaccatggctggcggtacatggtagggctcggggcattgccagccctaatcctggccgctctgatgcctttctgccccgagtccccacgccacttggtatacaaccatcgccaggaggaggcccggggcgtgctccgtagaatctacgggcacccatccgacgttcagctggcttcagttttagcctcgatatccgccgcctgtgacgaagctcgggagatcaacgagggcgcgacgcggtggaccaaaatgaagcagcttcatgccgtacccagcaatctccgggcattgatcagcgcatgtggcttgatggtcatatcacaactctcgggtttcaatacgcttatgtactactcctcaacactatttgcattagtaggcttcgataatcccaccgcagtagggatcgtcgtcgctggaaccaacttcatcatgacctgggtcaacatgatggtgatcgacaagatgggtcgtcgccgactgctcttatccacagcctggggtatgtccgtcggtcttattgcgatagcggtagcattctcctttattccagtcgacctagatactctcgatttgaagagcaacagtgtctctcctccggcgattgtcgtcttggtgttcattatctggttcgtgcttttctatggcgtctcggtcggcaacacggcatggatgagcacggatttcttccctctggaggtccgcgcgatgggcactatgtggatcacctgctctagctggggaagcaatgtcattgtatccagtacgtttttgtccatgatgaagagtatgaccccgtctggagcatttgggttctatgcgggcatctgtggtgttgggtacgttttgatatactttttctatccggaggtgtctggtttgtcgttggaggagattaaggaggtattcaaacatgggtttggagtgagatacgctcggaatctgcgcaaagagcgaagggatattatccaggagaggttgaggatacaaggcaagacggctgttgtggggcactga

SEQ ID NO: 2773 - protein, 545 aa, Aspergillus oryzae
MAQDKDAKSQSPTSIMNDPKKASLPENAHIEVAAGSLTTETGIDDLPISMFVWLVAFTASIAGMLFGYDTGIISAVLVYIHDGLDNRTLTSNEKELITSLCSGGAFFGSILAGLTADKLGRKAAIYFGCALFTIGAVLQGAAYTIAQMAVGRVVVGFGVGSAAMVVPLYIAEVAPAKARGRLIGLNNMSITGGQVTSYAIGAAFANVNHGWRYMVGLGALPALILAALMPFCPESPRHLVYNHRQEEARGVLRRIYGHPSDVQLASVLASISAACDEAREINEGATRWTKMKQLHAVPSNLRALISACGLMVISQLSGFNTLMYYSSTLFALVGFDNPTAVGIVVAGTNFIMTWVNMMVIDKMGRRRLLLSTAWGMSVGLIAIAVAFSFIPVDLDTLDLKSNSVSPPAIVVLVFIIWFVLFYGVSVGNTAWMSTDFFPLEVRAMGTMWITCSSWGSNVIVSSTFLSMMKSMTPSGAFGFYAGICGVGYVLIYFFYPEVSGLSLEEIKEVFKHGFGVRYARNLRKERRDIIQERLRIQGKTAVVGH

SEQ ID NO: 2774 - DNA, 1623 bp, Aspergillus oryzae
  CDS (1)..(1623)
atgtcactgaataagtactgtggcgaggacgactcgtacgaaaaagaaaaagcagagcaagtagaacatgttgacacgatagatgccgaaaagggacatctccaggacgcctccgaactcagtggcattgaagacacggcggcatccaaagctgcgtggttgatctcaataacggtctcaatcggtggtcttttattcgggtacgacaccggctatatctcctcggtactcgtgacgattggaacgtccctcggtcatactttgagctccagtgaggaagaactcgtcacttcattaacgagcggtggtgctttgatcggcgcagtaggagctggtctgaccgcggatcgctttggtcgccgctggcccatctggggggcttgtattcttttcgtactaggaacagtgctgcagacatgttcttattccgtacctcagtttgcagtcggtcggttcgttgtgggccttggtgtcggcagtgctgccatggttgtacctctgtatatcggtgaaatagcacctgccaaatatcgtggtcgcatggtggcattcaacaacatgagcgttacctttggtcagctcctggcgagtgcgatcggggccggttttgcgcaagtgaagggagaagcatggcgagcaactgtcggaattggagctgcaccagccgttgcacttgctgcactcctcttgctatgcccggagtcgcctcgtcagctagtctcgcacggtgataatgcaagtgcagatgctgttctgcaacgcatctacccgggatctaccaccgaacagcgcgaggctaagatccggtcgattgaattgtccctgcaggaggcgacgcatgcgatgtccgaagactcaatctgggccacgatcaaacgtgtgttcaccaccccatcaaccggtcgtgccgtcctgactgcatgcgtggtcatggctatcagtcaactgggtgggttcaacacattgatgtactacgctgcgaagcttttcgctatcgttggtttcaacaaccctacggctgtcggtattaccgtgtcagggactaactttgtcttctcggtcgtcaacctcttggttgtggatcgatttggacgacggattatcctgaccactacagtgcttggcatgggcatctgtatgctcatcaccgcggtcgcgtttcactatattcccgtcaatctgcaaacattggaagtggaaaccaataatgttggctggccgggaattgtcgtcctggtcactatcatttgctatgtagcctgctattcgtctggtgttgcgaccattgcgtggattggaactgagttgattccacttgaggtccgagctgtaggaacgatgatgaacacggttacttgctggagcaccaacattatcatctcctctaccttcctgtccatgatgaagggtatcacaccgagcggtgcatttgggttctacaccggcatctgcttcactggctgggtatttgtggtgttctttttccctgaatgcaagggcatgcctttggaggccattcgtgaagtgtttagcgatggttttggagtgcgctattccaagaaatggcaaaaggaacataaaaatgaggctagggctgccacggtcacctcgtttgggcactaa

SEQ ID NO: 2775 - protein, 540 aa, Aspergillus oryzae
MSLNKYCGEDDSYEKEKAEQVEHVDTIDAEKGHLQDASELSGIEDTAASKAAWLISITVSIGGLLFGYDTGYISSVLVTIGTSLGHTLSSSEEELVTSLTSGGALIGAVGAGLTADRFGRRWPIWGACILFVLGTVLQTCSYSVPQFAVGRFVVGLGVGSAAMVVPLYIGEIAPAKYRGRMVAFNNMSVTFGQLLASAIGAGFAQVKGEAWRATVGIGAAPAVALAALLLLCPESPRQLVSHGDNASADAVLQRIYPGSTTEQREAKIRSIELSLQEATHAMSEDSIWATIKRVFTTPSTGRAVLTACVVMAISQLGGFNTLMYYAAKLFAIVGFNNPTAVGITVSGTNFVFSVVNLLVVDRFGRRIILTTTVLGMGICMLITAVAFHYIPVNLQTLEVETNNVGWPGIVVLVTIICYVACYSSGVATIAWIGTELIPLEVRAVGTMMNTVTCWSTNIIISSTFLSMMKGITPSGAFGFYTGICFTGWVFVVFFFPECKGMPLEAIREVFSDGFGVRYSKKWQKEHKNEARAATVTSFGH

SEQ ID NO: 2776 - DNA, 1629 bp, Aspergillus oryzae
  CDS (1)..(1629)
atgggcactagacatgaaaacgatacattggaccctaacgctcctctacttattctagatggacacactacccacgacccccaaaacaatgaagaagataggcacattgatagcgagtcaaactactcgggaactcaatttatatgggcattgacattctctgctggtcttagtgggctattatttggttatgacacaggggtgatttcctcaacgctcgtatcaatcggcacggatctctccgatcgcgatcttacaacactagacaaaagcctaataacatcttgcacaagcttgtttgctttggttgccagcccccttgcgggggttctggctgacaagttcggtcgccggaaggttatattcgttgcagatgcgctgttcgctctaggtgcttttgtgcaggcaatctccaatgaagtatggggcatgattgctggtagaagtattgttgggttagctgttggcggcgcgagcttggtaactccattatacatctccgaattggcaccatccaatatgaggggcagactggtgacgattctctccttgttcatcaccggtggccaagttgtagcatacatcgtgggttggctcttttccttaattgacggaggctggcgctggatcgttggccttggaatacttccggcactctttcagcttgttatcctcaccgctctacctgaaactccccgatggctggcacaagcaggattcgaaacaaatgctatagctgtcctgggaaaggtctaccagggtcatccagacagtgactgcatcactaaacgaattttacgggaaattcagcaggaggtagcagaagaacggttaggtcatcctggtggttcttctggggctggccaacagtggattcactacgtcttgcagcgtaccacagagctcttctacgttggtggcaatagaagagcgttgattatagcgatgatgctacaaggttcgcagcagctctcgggcttcaactgtcttatgtacttctctggcattatattttcatctctctccttttcgtcgccgacgctcacgtcgctgtcagtggccacgactaactttctttttacattgcttgcatttacctacatcgataggatcggccggcgccgaatcctcctctattctatacctatcatgacaatatctctcatcgtttgcgcactaaccttctctttggtgtcatcagatttgtcctcttttccactgacacgtgcagggtccagtgacaccgtgccagatgattcaatgctccctatcactattctcttgtgtttaacggtttacacggcttcttacgccttcgggcttggcaatgtaccctggcagcagtccgagctgtttcctttaagtgtacggtctctcgggtctgcattcgctacagcaacgaactgggcctcaaatttcgttgtcgggctcacttttcttcccatgatggaactattgtctccagggtggacctttgggacctatgcggtcgtctgtgcagttagctggtttgctgtgtgggcgatctaccctgagatgagtgggctcggtttagaagaggtcaaggaactcctcgcagatggctggggtgtcaaggaaagtctggcgaggacccgcaacgactcctag

SEQ ID NO: 2777 - protein, 542 aa, Aspergillus oryzae
MGTRHENDTLDPNAPLLILDGHTTHDPQNNEEDRHIDSESNYSGTQFIWALTFSAGLSGLLFGYDTGVISSTLVSIGTDLSDRDLTTLDKSLITSCTSLFALVASPLAGVLADKFGRRKVIFVADALFALGAFVQAISNEVWGMIAGRSIVGLAVGGASLVTPLYISELAPSNMRGRLVTILSLFITGGQVVAYIVGWLFSLIDGGWRWIVGLGILPALFQLVILTALPETPRWLAQAGFETNAIAVLGKVYQGHPDSDCITKRILREIQQEVAEERLGHPGGSSGAGQQWIHYVLQRTTELFYVGGNRRALIIAMMLQGSQQLSGFNCLMYFSGIIFSSLSFSSPTLTSLSVATTNFLFTLLAFTYIDRIGRRRILLYSIPIMTISLIVCALTFSLVSSDLSSFPLTRAGSSDTVPDDSMLPITILLCLTVYTASYAFGLGNVPWQQSELFPLSVRSLGSAFATATNWASNFVVGLTFLPMMELLSPGWTFGTYAVVCAVSWFAVWAIYPEMSGLGLEEVKELLADGWGVKESLARTRNDS

SEQ ID NO: 2778 - DNA, 1614 bp, Neurospora crassa
  CDS (1)..(1614)
atgacagacaacccagaagagcccttgatcgccaacactcaatcgacggagagggaccaagatgatggcagccatgatgtcgaacatgcgcatgattcccggggagggaaacagcacatatcaccgcccggcctgttcatctggctactcaccttttccgccggaataagcggtctactcttcggctacgacacaggcgtaataagcgccacccttgtctctatcggtacctccctctcgcaccggcccctgacctcgctcgacaaatccgtcatcacctcatgcacctccctcttcgccctgctcgcgctacccttcgcctccgcgctcgccgacgaccggggccgcaagcgcgttgtcctcttcgccgacaccctcttcatcatcggcgccctctgccaggccgccagccggaccgtcgaggtcatggtaattgggcggtcggttgtcggcatagccatcggcgccgccagcttcgtgacgccgctgtacattgccgagctggcgcctgcgacgcaccgcggccggttggtgacgatgaacattgtgtttatcacgcttgggcaggtggttgcgtacgtggtaggctggatctttgggacgtatggtagtccggagacgacggggtggagatggatggtcgggttgggcgcggtgccggcggtttgtcaggtggtcatcttgttgtggatgccggagagcccgaggtggttggtgaaggacggaaggtcgcaagaggcaagagcggtgattgctaagattgccgcgggggatgatgcgcaggatccgtcgacgaggagggaagtggatgctgtgttgaagagcatcgagattgaggtgagagaggaggctacggctatgagactgggtggcgccggggccgggtatgcaaatgggaatgcagtgaatgcgtggatggaggctatgcgggaactgatcagggtgaggaggaacagacgggcattggcaattgcttgtctcctccagggtcttcagcagctgtgcggatttaactcgctcatgtacttctcggccacgatattcacgatggtggggttttcagagccgactttgacctcgctagtcgttgcagtcaccaactttgccttcaccttagttgccctggtgttgatcgaccgggtgggaaggagacgcattctactctggtctcttccctttatgattgcaggtctggtgcttgccggctatggcttttcgttcatcgagctcccgaattcagagaccagctcgccctcgacaacgggaggtcagggcggggccgtcattattttggcgagcatcatgatttatgtggctggctatgccatcggactgggcaatgtgccctggatgcagagcgagctcttctcactgagtgttcggtcagtgggcagtggtgttgcaacagcgaccaactggagcgccaactttgtgattggactgacgttccttccgctgatggaggccttgtcgccgtcttggacgtttgtcctgtacgcagtgatctgcgcggttgggtatggcctgatttggacggtataccctgaaaccgcagggctgagcttggaagatgcggcgacccttctagaagcggatgactggggggtgcggtaa

SEQ ID NO: 2779 - protein, 537 aa, Neurospora crassa
MTDNPEEPLIANTQSTERDQDDGSHDVEHAHDSRGGKQHISPPGLFIWLLTFSAGISGLLFGYDTGVISATLVSIGTSLSHRPLTSLDKSVITSCTSLFALLALPFASALADDRGRKRVVLFADTLFIIGALCQAASRTVEVMVIGRSVVGIAIGAASFVTPLYIAELAPATHRGRLVTMNIVFITLGQVVAYVVGWIFGTYGSPETTGWRWMVGLGAVPAVCQVVILLWMPESPRWLVKDGRSQEARAVIAKIAAGDDAQDPSTRREVDAVLKSIEIEVREEATAMRLGGAGAGYANGNAVNAWMEAMRELIRVRRNRRALAIACLLQGLQQLCGFNSLMYFSATIFTMVGFSEPTLTSLVVAVTNFAFTLVALVLIDRVGRRRILLWSLPFMIAGLVLAGYGFSFIELPNSETSSPSTTGGQGGAVIILASIMIYVAGYAIGLGNVPWMQSELFSLSVRSVGSGVATATNWSANFVIGLTFLPLMEALSPSWTFVLYAVICAVGYGLIWTVYPETAGLSLEDAATLLEADDWGVR

SEQ ID NO: 2780 - DNA, 1530 bp, Arabidopsis thaliana
  CDS (1)..(1530)
atgacattgacgatcccaaacgcacctgggagctccgggtacttggatatgttcccagagagaaggatgtcgtattttgggaattcttacattctgggtttgactgtcactgccggaatcggtggccttctgttcggttatgatacaggtgtaatttccggtgcccttttgtacattaaggatgatttcgaagttgttaagcagagcagtttcttacaggaaactattgtaagtatggctttagtcggtgccatgattggtgctgcagctggaggttggatcaatgactactacggtcgtaaaaaggcgactctttttgcagatgttgtctttgcagctggagctatcgttatggctgctgctcctgatccgtatgttttgatatcgggtcgtctcttggtcggtttaggagttggtgttgcttctgtgactgctccggtttatatagcggaagcatctccatcggaagttagaggtggacttgtgagcaccaacgtattgatgatcactggtggacagtttctttcatatctcgttaattctgctttcacacaggttccaggaacatggagatggatgcttggtgtttcaggcgttcccgctgtgattcagttcatcctcatgcttttcatgccagaatcccctcgatggcttttcatgaaaaatcgtaaagcggaagccatccaagtgctcgccagaacctatgacatctcgcggttagaagacgagattgatcatctttcagcggctgaagaggaagaaaaacaaaggaagcgcactgttggctacttggatgttttcagatccaaagaattgagacttgcatttcttgccggagcaggacttcaggcgtttcagcagttcactggtatcaatacagttatgtactacagccctacgatagtccaaatggctggatttcactcaaaccagctcgctttgttcctgtctctcattgttgctgccatgaatgctgctggaacagtcgtggggatttacttcatcgatcattgtggaaggaaaaagctagctctctcaagtttatttggcgtcattatatcactcttaatcctctcagtctcgtttttcaaacaatctgagacatcatctgatggagggctctatggttggctcgctgtgcttggcttagctctatacattgttttctttgcaccgggaatgggaccagtcccatggacggtgaactcagagatataccctcaacaataccgaggcatatgcggaggcatgtcagctacagttaactggatcagcaatttgattgtggcacaaacattcttgacaatcgcggaagctgctggaacaggaatgactttcttgattttggcgggaattgcggttcttgctgtaatctttgtgattgtgtttgtccctgagactcaagggctaacgttttcggaagttgaacagatttggaaagaaagagcttatggaaatatcagtggctggggcagtagcagtgatagcaacaacatggaagggttactcgagcagggatctcaatcttaa

SEQ ID NO: 2781 - protein, 509 aa, Arabidopsis thaliana
MTLTIPNAPGSSGYLDMFPERRMSYFGNSYILGLTVTAGIGGLLFGYDTGVISGALLYIKDDFEVVKQSSFLQETIVSMALVGAMIGAAAGGWINDYYGRKKATLFADVVFAAGAIVMAAAPDPYVLISGRLLVGLGVGVASVTAPVYIAEASPSEVRGGLVSTNVLMITGGQFLSYLVNSAFTQVPGTWRWMLGVSGVPAVIQFILMLFMPESPRWLFMKNRKAEAIQVLARTYDISRLEDEIDHLSAAEEEEKQRKRTVGYLDVFRSKELRLAFLAGAGLQAFQQFTGINTVMYYSPTIVQMAGFHSNQLALFLSLIVAAMNAAGTVVGIYFIDHCGRKKLALSSLFGVIISLLILSVSFFKQSETSSDGGLYGWLAVLGLALYIVFFAPGMGPVPWTVNSEIYPQQYRGICGGMSATVNWISNLIVAQTFLTIAEAAGTGMTFLILAGIAVLAVIFVIVFVPETQGLTFSEVEQIWKERAYGNISGWGSSSDSNNMEGLLEQGSQS

SEQ ID NO: 2782 - DNA, 1728 bp, Schizosaccharomyces pombe
  CDS (1)..(1728)
atgtcaatctcttccaaggattttcaaaatgtaacgtcagcgggtttcgctgatgatactttcgctgccgatacatttgctgctgataaaaaaagtccatttgaatcctcggtttttgaaaacaaaacccaggtgcttcctgtggacagcgtgtctagattatctaacggagctcgaagtcgcagcaattctaacatttctttatctgagccacacgcacttaacgacactgttgaagatcaaccagttagcaaatgggtttgggtgcttgcttttgctgccggtatcggtggtctactgtttggctatgatacaggtgtcatttcaggtgctcttgtagttataggtactagcttgggcggacatgaattaacaaatggtggtaaagaatttatcacctctgcaacatctcttggtgcacttttaggagggataattgctggtgcccttgccgacttttttggtagaaaaccggtaattgcaatagctagtatcatcatcatagttggttccatagtacaggttacggctcaccatctttggcatatgattgtaggtcgctttgttatcggttggggcgttggcattgcatcacttattattcctttgtacctaagtgaaatcgctccgtctaaaatacgcggaaggttggttatcatatatgttttattaattacagctggtcaagtaattgcctatggaattgatacagcttttgaacacgtccataatggttggcgctggatggttggtttagcaatggttcctgcagctttccaattattcattcttatttggctacccgaatctcctcgtttgttagttaaaaaagaaagatctcaggaggcttataacactctggctcgaatctatcctactgctcacccttacgaaataaagactaagctctatttaattcaagaaggagttcgtgatcctttttcaggatctagatggcaaaagattgtgaaaacttttaaagaattatatttcaatccttcaaatttccgtgcattgatactggcttgcggactgcaagcgatgcaacaactttccggatttaattcattaatgtatttttctagtactatttttgaggttgttggctttaacaatcctactgctactggtcttatcattgcagctactaattttgtatttaccattgttgcctttggtgtgattgatttttttggtcgaagaatcttgctcctgttgaccgtatggggaatgattgctgctttaattgtatgcgcggtggcttttcattttttgccgaaagacgagaatggcaattatacttctggtcaatcaaatgcttgggctatcgttgttttaatttcgatgattgtttacgttgcgtcgtatgcctctggacttggaaatctcccttggcaacaatccgagctttttcctatgtccgttagaggtctaggcactggcatgtctactgctgttaactgggctggtaatcttggtataggtgcttcgttcttaacattgatgagtgaaataacacccacaggaacgtttgccctttatggaggcctttgctttttaggatggcttggtgcacttttctgctatcctgatttaaccgattataccatcgaagaaattggggagctgcttaaacatggatttggagttcgtgaaagtatgcgacatctcaaacgcgttcgacaagagcgagcttggtctcgtgaagataaagagcaaaataactag

SEQ ID NO: 2783 - protein, 575 aa, Schizosaccharomyces pombe
MSISSKDFQNVTSAGFADDTFAADTFAADKKSPFESSVFENKTQVLPVDSVSRLSNGARSRSNSNISLSEPHALNDTVEDQPVSKWVWVLAFAAGIGGLLFGYDTGVISGALVVIGTSLGGHELTNGGKEFITSATSLGALLGGIIAGALADFFGRKPVIAIASIIIIVGSIVQVTAHHLWHMIVGRFVIGWGVGIASLIIPLYLSEIAPSKIRGRLVIIYVLLITAGQVIAYGIDTAFEHVHNGWRWMVGLAMVPAAFQLFILIWLPESPRLLVKKERSQEAYNTLARIYPTAHPYEIKTKLYLIQEGVRDPFSGSRWQKIVKTFKELYFNPSNFRALILACGLQAMQQLSGFNSLMYFSSTIFEVVGFNNPTATGLIIAATNFVFTIVAFGVIDFFGRRILLLLTVWGMIAALIVCAVAFHFLPKDENGNYTSGQSNAWAIVVLISMIVYVASYASGLGNLPWQQSELFPMSVRGLGTGMSTAVNWAGNLGIGASFLTLMSEITPTGTFALYGGLCFLGWLGALFCYPDLTDYTIEEIGELLKHGFGVRESMRHLKRVRQERAWSREDKEQNN

SEQ ID NO: 2784 - DNA, 1674 bp, Schizosaccharomyces pombe
  CDS (1)..(1674)
atggatttcaacaatattccccttgcgaccattaagtccagcgatgataagggtaaagactttatcgtggaaatgaccactcgtccttctgaaaccaagaagaaggttcctttttctgaggacatgcgtgaaatcccttctttaccgaacgaggaagaagcgaatgcaacggatccacaagccaacgaggtcgctgatgaaaacggtgaaggatttgaagctgaaaaaatcagtagttggatttgggtgctgtcggctgttgcaggtatttctggtttgctgttcggttatgacactggtgttatttcaggcgctctcgctgtcctcggtagcgatcttggtcacgtccttagctctggccaaaaagaattgattacctctgccacttccttcgccgcccttatatctgcaaccacttcaggatggcttgctgattgggtcggtcgcaaacggcttttgctatgtgcagatgcaatttttgtcatcggatctgttattatggctgcttcgcggaatgttgcaatgatggttgttggtcgttttattgtaggttatggaattggtcttacttctcttattgtcccaatgtatattactgagttggctcctgctcgtttgcgcggacgacttgtcatcatttacgtggtcttcattaccggtgggcagctgattgcctactcacttaatgctgcttttgaacatgtacatcaaggttggagaattatgtttggaattggtgcggcccccgccttaggtcagcttatttcgcttttctggactccggagtctccaaggtatttgcttagacataaccatgttgaaaaagtctacaagattttgtctcgaatccatcccgaagcaaagccagctgaaattgcatataaagtctcattgattcaagagggcgtcaaagttgattttcctgaagggaataagtttcaacatttctttcattctttaaaagtacttttcacggttccttcaaatagaagatccctttttattggttgcttccttcaatggttccaacaattttctggcactaatgcaattcaatatttctctgcaatcattttccaaagtgttggatttaaaaattctatctctgtcagtattgttgtcggtgctactaactttgttttcacaatagtcgcattcatgtttattgaccgtattggaagaagacgaattttgctttgtacttcagccgtgatgattgcaggtttggcgctttgtgcaatcgcttatcattttcttcctgcagacaccacccaaaacacaaacagtggttggcaatatgtcgtattagcatccatcattattttccttgctagctatgcttctggaatcggaaatattccctggcaacaagccgaattgtttcctatggaagtcagagcccttggtgctggattctcaactgctatcaactgggttggaaatctcatcattagtgcttcctttttgacaatgatggagtctatcacaccaacgggtacatttgcattgtttgctggattttgttttgttggactcgtgacaagctactttacttatcccgaacttgcaggaatgtctattgaaaatatacacaagctgcttgaaaaaggtttttggcaagctgtaaaggaaagtactaaacgcgttagaaaaggaagaatagatgaagcttga

SEQ ID NO: 2785 - protein, 557 aa, Schizosaccharomyces pombe
MDFNNIPLATIKSSDDKGKDFIVEMTTRPSETKKKVPFSEDMREIPSLPNEEEANATDPQANEVADENGEGFEAEKISSWIWVLSAVAGISGLLFGYDTGVISGALAVLGSDLGHVLSSGQKELITSATSFAALISATTSGWLADWVGRKRLLLCADAIFVIGSVIMAASRNVAMMVVGRFIVGYGIGLTSLIVPMYITELAPARLRGRLVIIYVVFITGGQLIAYSLNAAFEHVHQGWRIMFGIGAAPALGQLISLFWTPESPRYLLRHNHVEKVYKILSRIHPEAKPAEIAYKVSLIQEGVKVDFPEGNKFQHFFHSLKVLFTVPSNRRSLFIGCFLQWFQQFSGTNAIQYFSAIIFQSVGFKNSISVSIVVGATNFVFTIVAFMFIDRIGRRRILLCTSAVMIAGLALCAIAYHFLPADTTQNTNSGWQYVVLASIIIFLASYASGIGNIPWQQAELFPMEVRALGAGFSTAINWVGNLIISASFLTMMESITPTGTFALFAGFCFVGLVTSYFTYPELAGMSIENIHKLLEKGFWQAVKESTKRVRKGRIDEA

SEQ ID NO: 2786 - DNA, 1839 bp, Saccharomyces cerevisiae
  CDS (10)..(1839)
atggctgaaatgaagaattcgacagctgctagttccagatggacgaagagtcgtctctcccatttctttccctcgtacactaatagcagtggtatgggggccgcctcaactgatcaatcttctacgcagggagaagaactgcaccataggaagcactgtgaagaagacaatgatggtcaaaaaccgaaaaagtctcccgtatccacctctacaatgcaaataaaatctagacaggatgaggacgaggatgacggtcgaattgtcattaaaccagttaacgatgaagatgatacatcagtgattataactttcaatcagtcaatatccccttttattattacattgacattcgttgcgtccatttctgggttcatgtttggttatgatactggttacatatcgagtgcgctaatttctatcaatagagatttagacaacaaagttttaacttatggagaaaaagaattaattacggccgccacatcattgggcgctttgattacaagtgtgggcgctggtactgctgctgatgtgtttggaagaagaccatgtttaatgttctccaatctgatgtttttgatcggagcaattttacaaattaccgcgcacaagttttggcaaatggcggccggtagactgattatgggtttcggtgtcggtattggttctttgatttctcctctttttattagtgaaattgctcctaagatgatcaggggtaggttaaccgttataaattccctatggctgacaggtggtcaattgattgcttacggttgtggtgcgggcctgaaccacgtcaaaaacggttggagaatcttagttggtttgtccttgatacctactgttttgcagttttcttttttctgttttttgccggatacaccaagatactacgtaatgaaaggcgatttaaagagagcaaaaatggttctcaaacgaagttacgtaaacactgaagatgaaataattgatcaaaaagttgaagaattatctagcttaaatcaatcgataccaggaaaaaatccaataacaaaattctggaatatggtcaaggaattgcacactgtgccttcaaatttcagagctttgattattggttgtggtctacaagccattcaacaattcacaggttggaattccttaatgtatttctccggtacaatatttgaaactgttggattcaaaaattcttctgccgtttctattattgtctcaggtactaattttgtgttcacattaatagcatttttctgtattgataaaatcggccgtaggtacattttactgattggactacctggtatgactgtggcgctggttatatgtgctatagcgttccatttcctaggtattaagtttaacggtgctgatgcagtagtggcatctgatggattttcatcttggggcattgtcattatcgtatttattattgtgtatgcagccttttatgccctcggtatcggcactgttccatggcaacaatcggaattatttccacaaaacgtcagaggtgtagggacatcctacgctactgccaccaattgggcaggttctttagtcattgcgtctacgttcttgactatgttacaaaatattacaccaacgggtacattttcattctttgccggtgtagcatgtttatcaaccattttttgttacttttgttatccagaactatcaggattggagttagaggaagttcaaacaattttaaaggacggattcaatatcaaagcctctaaagctctagctaaaaagaggaaacaacaggtggccgaaggtgctgcccatcataaactcaaattcgaacctacacaggaaattgtagaaagttag

SEQ ID NO: 2787 - protein, 609 aa, Saccharomyces cerevisiae
MKNSTAASSRWTKSRLSHFFPSYTNSSGMGAASTDQSSTQGEELHHRKHCEEDNDGQKPKKSPVSTSTMQIKSRQDEDEDDGRIVIKPVNDEDDTSVIITFNQSISPFIITLTFVASISGFMFGYDTGYISSALISINRDLDNKVLTYGEKELITAATSLGALITSVGAGTAADVFGRRPCLMFSNLMFLIGAILQITAHKFWQMAAGRLIMGFGVGIGSLISPLFISEIAPKMIRGRLTVINSLWLTGGQLIAYGCGAGLNHVKNGWRILVGLSLIPTVLQFSFFCFLPDTPRYYVMKGDLKRAKMVLKRSYVNTEDEIIDQKVEELSSLNQSIPGKNPITKFWNMVKELHTVPSNFRALIIGCGLQAIQQFTGWNSLMYFSGTIFETVGFKNSSAVSIIVSGTNFVFTLIAFFCIDKIGRRYILLIGLPGMTVALVICAIAFHFLGIKFNGADAVVASDGFSSWGIVIIVFIIVYAAFYALGIGTVPWQQSELFPQNVRGVGTSYATATNWAGSLVIASTFLTMLQNITPTGTFSFFAGVACLSTIFCYFCYPELSGLELEEVQTILKDGFNIKASKALAKKRKQQVAEGAAHHKLKFEPTQEIVES

SEQ ID NO: 2788 - DNA, 1635 bp, Brassica napus
  CDS (1)..(1635)
atgcaatcgtcaacgtacgcagctgttaaaggaaacgctgcgtttgcgtttcagagacgtagcttctctaacctcgtcagcagatcggcgactactaccggaattcgcttctccaccggctcttacttcgcacaactccactcttccgcctcgaaagccatgggagcgaagcttgctcgcgctgagaacgggattcacagtctctcctcggtcaaagctcgatcggttagagcacaagcctcctctggtggtggtgacgaagaagaagcaatacctctgagatctgaaggaaaaatctcagggacggttttacccttcgttggtgttgcttgtcttggtgctatcttgtttggttatcatctcggggttgttaacggtgctcttgagtaccttgctaaggatcttggtatcgctgataatgctgttttgcaagggtggattgttagcgcgttgcttgctggtgcaacggtcggttctttcaccggaggtgcattagctgacaaatttggaagaactagaacttttcaattggatgctatcccgcttgctattggagctttcttatgtgcaacagctcagagtgtgcagactatgattgtgggacgtctgctcgcaggggttggaatcggaatctcatcagccattgtaccactttacatctccgagatatcaccaactgaaattcgcggtgcactcggatctgtgaaccagttgttcatatgtattggaatactcgcagccttgatagctggattaccccttgcagcaaaccctctatggtggaggacgatgtttggtgttgcagttatcccttccgttctattagccataggaatggggttttctccagaaagcccaaggtggctcgttcagcaaggaaaacttactcaagcggaaaaggctatcaaaactctgtatggtaaagaaaaagtggttgaactagtgcgtgacttatcaaactctggccaaggtacttctgagccagaggcaggatggtttgatctattcagcagccgctactggaaagttgtaagcgttggtgcggcgctcttcttgtttcagcagttagctgggataaatgcagttgtgtactactctacatctgtgttccgcagcgccggaatccaatctgatgttgcagccagtgctcttgttggagcatcaaacgtgtttggaactgctgttgcttcgtctttgatggacaaaatgggaaggaaaagtcttctacttactagctttggtggaatggcgttgtctatgctgttgctctcgttgtccttcacatggaaggctcttgctgcatattctggcactcttgctgttgttggaactgttctatatgtcctgtcattttcgcttggtgctggcccagtaccggctcttttgcttccagagatattcgcatccaggatcagagcaaaagccgtcgctctttctctcggcatgcactggatctcaaactttgtgattggactctacttcttgagcgttgtgactaaattcggaatcagcagtgtctacttgggattcgcaggagtgtgtgtccttgcagtcatgtacattgcaggaaacgtggtggagactaaaggacggtcactcgaggaaatagagcttgctcttacatccggagcttaa

SEQ ID NO: 2789 - protein, 544 aa, Brassica napus
MQSSTYAAVKGNAAFAFQRRSFSNLVSRSATTTGIRFSTGSYFAQLHSSASKAMGAKLARAENGIHSLSSVKARSVRAQASSGGGDEEEAIPLRSEGKISGTVLPFVGVACLGAILFGYHLGVVNGALEYLAKDLGIADNAVLQGWIVSALLAGATVGSFTGGALADKFGRTRTFQLDAIPLAIGAFLCATAQSVQTMIVGRLLAGVGIGISSAIVPLYISEISPTEIRGALGSVNQLFICIGILAALIAGLPLAANPLWWRTMFGVAVIPSVLLAIGMGFSPESPRWLVQQGKLTQAEKAIKTLYGKEKVVELVRDLSNSGQGTSEPEAGWFDLFSSRYWKVVSVGAALFLFQQLAGINAVVYYSTSVFRSAGIQSDVAASALVGASNVFGTAVASSLMDKMGRKSLLLTSFGGMALSMLLLSLSFTWKALAAYSGTLAVVGTVLYVLSFSLGAGPVPALLLPEIFASRIRAKAVALSLGMHWISNFVIGLYFLSVVTKFGISSVYLGFAGVCVLAVMYIAGNVVETKGRSLEEIELALTSGA

SEQ ID NO: 2790 - DNA, 1536 bp, Glycine max
  CDS (1)..(1536)
atggcaggaggagcttatgtagattcgggaaatgcaaagcaatttgatgggaaggtcacggcattcgtattggttacatgctttgtggcagccatgggaggcttactcttcggttatgatcttggaataaccggaggagtgacttctatggaaccatttctcatcaaattctttcccggtgtttataaacaaatgcaagatgatgttggccatagaagccaatattgcaaatttgacaacgagctccttacactcttcacctcttccttgtatcttgctgcattagtagcttctttctttgcttccaccactacaaggatgatgggacgcaaggcctccatgttcttaggaggcttgtttttccttgtgggggcattattaaacggcttcgccgtcaacattgaaatgctgatcataggccgcctcttgcttggtttcggtgtcggatactgtaatcagtccgttccggtgtatttgtccgaaatggctcctgcaaagattagaggagcacttaacatgggcttccaaatgatgatcacaattggcatcttaattgcaaatcttatcaactatggaacttccaaactagaaaacggatggagaatttctttgggtgtcggagctgttcctgccgtcttgttatgttttggagctcttttcttaggagacacacctaattccctgattgaaagaggtcaaaaggaagaagccaggaaaatgttgcaaaaaatccgtggcattgataatgttgaagaggagctacaagagcttgttcttgcaagtgagtcagctaaagaggtggagcacccatggaagaacattacaacgccaaaatacaggcctcagctcactttttgcaccttgattccatttttccaacaactcactggcattaacgttgtcatgttctatgcccctgtccttttcaagactttgggctttggcaacgatgcttcccttatgtcttcagttatcaccggaggtgtaaatgtggttgccactcttgtttccatcttgactgtggacaaggttggaagaaaagttttattccttgaaggtggtgttcaaatgttgatttgccagattgctactggagtcatgattgctatgaagttcggggtgagtggcgaaggctcgttttcctccggagaagccaaccttattttgttctttatatgtgcatttgttgctgcatttgcatggtcttggggtccactagggtggttggtgcctagtgaaatatgccctcttgaggttcgttcagcaggtcaagccatcaatgttgccgtaaacatgctgttcacttttgcgattgctcaagttttcctagtcatgctttgccacttgaagtttggccttttcttcttctttgctgcatttgtactcatcatgaccatcttcattgccatgttgttgcctgagacaaagaacatccccattgaagaaatgcatacagtctggagatcacattggttttggtcaaagattgttccacatgctgatgatgatcgcaagcctgaggctgcccaaagttga

SEQ ID NO: 2791 - protein, 511 aa, Glycine max
MAGGAYVDSGNAKQFDGKVTAFVLVTCFVAAMGGLLFGYDLGITGGVTSMEPFLIKFFPGVYKQMQDDVGHRSQYCKFDNELLTLFTSSLYLAALVASFFASTTTRMMGRKASMFLGGLFFLVGALLNGFAVNIEMLIIGRLLLGFGVGYCNQSVPVYLSEMAPAKIRGALNMGFQMMITIGILIANLINYGTSKLENGWRISLGVGAVPAVLLCFGALFLGDTPNSLIERGQKEEARKMLQKIRGIDNVEEELQELVLASESAKEVEHPWKNITTPKYRPQLTFCTLIPFFQQLTGINVVMFYAPVLFKTLGFGNDASLMSSVITGGVNVVATLVSILTVDKVGRKVLFLEGGVQMLICQIATGVMIAMKFGVSGEGSFSSGEANLILFFICAFVAAFAWSWGPLGWLVPSEICPLEVRSAGQAINVAVNMLFTFAIAQVFLVMLCHLKFGLFFFFAAFVLIMTIFIAMLLPETKNIPIEEMHTVWRSHWFWSKIVPHADDDRKPEAAQS

SEQ ID NO: 2792 - DNA, 1659 bp, Glycine max
  CDS (1)..(1659)
atggcatcaactactctcttcagcttcagactctctttgaacccactgcaccatcaacagacaacgaggccaaaatctctgctctcctctcctcgcaccaatccacgcctcgtttcttccattaacaatcatttggccctcacacgtgtcacatacccgcttctccaatctcactctgctcctaagcgcagattccatgtgtattctgatggggaaagctccgagtcgcttgtttctgacgctacataccaagaggaattttcttggtcttctgtaattcttccgtttctgttccctgcgttgggtggcttattatttggctatgatattggagccacctctggcgctacaatttcactgcagtcacctgagcttagcggtatatcatggtttaaactttctgctattcagcttggactagtggttagtggttccctatatggggctcttcttggctcgcttgttgcatttgccatagctgatttccttgggaggaagaaacaactcattactgcagcactgttgtatttgtttggtggtgtgattactgcctatgcaccagaacttggtgttctcttagcaggaaggctgctttatggacttggtataggtttggccatgcatggggctcctttatatattgcggagacttgtccatcacaaatccgtgggactttagtatcattaaaagaactcttcattgtcctggggattctgctgggttattttgtgggaagctttctgattgagaccgttgggggatggcggttcatgtatggatttagtgctccagttgctgtattaatggggcttggaatgttgactctccccaattctccacggtggttgcttctcagagcagtgcaaggaaaaggttcttttcaagatttgaaggaaaaggccattttttccctgagcaaattaaggggccgaccacctggtgacaaagaatccgagagacaagtagaagaaacccttgtctcattgaagtctgcctatgcagataaggaatcggaggggaatttcttagaggtgtttcagggtccgaatctgaaagctttcataattggtgggggactagtcttatttcaacagataacaggtcaaccaagtgttctgtactatgcaggtccaattcttcagagtgctggattttctgctgcatccgatgctacaaaagtttcggttgttattggcctattcaagttgctaatgacttggattgctgtcctaaaagttgatgatttggggagaagacctctgctgattggaggtgtcagtggcattgccctttctctagttctcctttctgcttattataaatttcttggaggtttcccacttgttgctgttggagctttacttctttatgttggttgctaccagatatcatttgggccgataagttggctaatggtatcagaggtcttcccacttcgcactagaggaaaggggattagtctggctgttcttaccaacttcgcttcaaatgctgttgtcacctttgcattctccccgctaaaggagtttctaggagcagaaaatctttttctcctttttggggctattgctattctatcacttttgttcattatcttttctgtcccagagacaaaaggcttgagtttagaagatatagaatccaaaatcttgaagtga

SEQ ID NO: 2793 - protein, 552 aa, Glycine max
MASTTLFSFRLSLNPLHHQQTTRPKSLLSSPRTNPRLVSSINNHLALTRVTYPLLQSHSAPKRRFHVYSDGESSESLVSDATYQEEFSWSSVILPFLFPALGGLLFGYDIGATSGATISLQSPELSGISWFKLSAIQLGLVVSGSLYGALLGSLVAFAIADFLGRKKQLITAALLYLFGGVITAYAPELGVLLAGRLLYGLGIGLAMHGAPLYIAETCPSQIRGTLVSLKELFIVLGILLGYFVGSFLIETVGGWRFMYGFSAPVAVLMGLGMLTLPNSPRWLLLRAVQGKGSFQDLKEKAIFSLSKLRGRPPGDKESERQVEETLVSLKSAYADKESEGNFLEVFQGPNLKAFIIGGGLVLFQQITGQPSVLYYAGPILQSAGFSAASDATKVSVVIGLFKLLMTWIAVLKVDDLGRRPLLIGGVSGIALSLVLLSAYYKFLGGFPLVAVGALLLYVGCYQISFGPISWLMVSEVFPLRTRGKGISLAVLTNFASNAVVTFAFSPLKEFLGAENLFLLFGAIAILSLLFIIFSVPETKGLSLEDIESKILK

SEQ ID NO: 2794 - DNA, 1644 bp, Brassica napus
  CDS (1)..(1644)
atgcagtcgtcaacgtatacggttaaagcaaacgccgcgtttgcgtttcagcgacggaccttctctaacctcctcaacagatccgccactaccactaccggaagccgcttctcgccgctcaacctccacctccactgctctgcttcgaaagccatgggagcgaagctcgctcgcgccgagaacgggatccaaaccgttatgaatctctcttccgtcaaagctcgatccgtcagagcacaggcctcctctgttggtggtggtggtgatgaggaagaagctgtacctctgagatccgaatcaaatagctccggcaccgttttgccgttcgttgctgttgcttgccttggtgctatattgtttggctatcaccttggggttgttaacggtgctcttgagtatcttgctaaggatcttggtattgctgataatactgttcttcaaggatggatcgttagcgcgctgcttgctggtgcaacggttggttcattcaccggaggtacattagctgacaagtttggacgaacaagaacgtttcaattggatgctatcccgcttgccattggagctttcttatgtgcaacagctcagagtgtgcaaaccatgattgtgggacgtctgcttgcaggaattggaattgggatctcatcagcgattgtgccactttacatatccgagatatccccaactgaaatccgtggagcacttggatctgtgaaccagttgttcatatgtataggaatactcgcagccttgatagctggattaccccttgcagcaaatcctctatggtggaggacgatgttgggtgttgctgtcatcccttccgttctattagccataggaatgggtttttctccagaaagcccaaggtggcttgttcagcaaggaaaagtctctgaagctgaaaaggcgatcaaaactctgtatggtaaagaaaaagtcgtcgagctagtgcgtgacttatcaacctctggccaaggtgtttctgagccagaggcaggatggtttgatctattcaacagccgctattggaaagttgtgagcgtaggtgcggctctctttttgtttcaacagttagctgggataaacgcagtggtgtactactctacatcagtgttccgtagcgccggtatccaatctgacgttgcagccagtgctctcgttggagcatcaaacgtctttggcactgctgttgcttcgtccttgatggacaaaatgggaaggaaaagtcttttactcataagcttcggtggaatggctttgtcgatgcttttgctctctttatccttcacatggaaggctcttgctgcatattctggcacccttgccgttgtaggaactgttttatatgtgctgtcattctcacttggtgctggcccggttccggctcttctccttccagagatattcgcatcccggatcagagcaaaagccgttgctctttccctcggaatgcactggatatcaaactttgtgattggtctctacttcctaagcgttgtgactaaattcggaatcagcagtgtctacttgggtttcgcggcagtatgtgtccttgcagtcatctacattgcaggaaacgtggtcgagactaaaggacggtcacttgaggaaatagagcttgctcttaactccggagcttga

SEQ ID NO: 2795 - protein, 547 aa, Brassica napus
MQSSTYTVKANAAFAFQRRTFSNLLNRSATTTTGSRFSPLNLHLHCSASKAMGAKLARAENGIQTVMNLSSVKARSVRAQASSVGGGGDEEEAVPLRSESNSSGTVLPFVAVACLGAILFGYHLGVVNGALEYLAKDLGIADNTVLQGWIVSALLAGATVGSFTGGTLADKFGRTRTFQLDAIPLAIGAFLCATAQSVQTMIVGRLLAGIGIGISSAIVPLYISEISPTEIRGALGSVNQLFICIGILAALIAGLPLAANPLWWRTMLGVAVIPSVLLAIGMGFSPESPRWLVQQGKVSEAEKAIKTLYGKEKVVELVRDLSTSGQGVSEPEAGWFDLFNSRYWKVVSVGAALFLFQQLAGINAVVYYSTSVFRSAGIQSDVAASALVGASNVFGTAVASSLMDKMGRKSLLLISFGGMALSMLLLSLSFTWKALAAYSGTLAVVGTVLYVLSFSLGAGPVPALLLPEIFASRIRAKAVALSLGMHWISNFVIGLYFLSVVTKFGISSVYLGFAAVCVLAVIYIAGNVVETKGRSLEEIELALNSGA

SEQ ID NO: 2796 - DNA, 1635 bp, Brassica napus
  CDS (1)..(1635)
atgcaatcgtcaacgtacgcagctgttaaaggaaacgctgcgtttgcgtttcagagacgtagcttctctaacctcgtcagcagatcggcgactactaccggaattcgcttctccaccggctcttacttcgcacaactccactcttccgcctcgaaagccatgggagcgaagcttgctcgcgctgagaacgggattcacagtctctcctcggtcaaagctcgatcggttagagcacaagcctcctctggtggtggtgacgaagaagaagcaatacctctgagatctgaaggaaaaatctcagggacggttttacccttcgttggtgttgcttgtcttggtgctatcttgtttggttatcatctcggggttgttaacggtgctcttgagtaccttgctaaggatcttggtatcgctgataatgctgttttgcaagggtggattgttagcgcgttgcttgctggtgcaacggtcggttctttcaccggaggtgcattagctgacaaattcggacgaactagaacttttcaattggatgctatcccgcttgccgttggagctttcttatgtgcaacagctcagagtgtgcagactatgattgtgggacgtctgctcgcaggggttggaatcggaatctcatcagccattgtaccactttacatttccgagatatcaccaactgaaattcgcggtgcactcggatctgtgaaccagttgttcatatgtataggaatactcgcagccttgatagctggattaccccttgcagcaaaccctctatggtggaggacgatgtttggtgttgcagttatcccttccgttctattagccataggaatggggttttctccagaaagcccaaggtggctcgttcagcaaggaaaacttactcaagcggaaaaggctatcaaaactctgtatggtaaagaaaaagtggttgaactagtgcgtgacttatcaaactctggccaaggtacttctgagccagaggcaggatggtttgatctattcagcagccgctactggaaagttgtaagcgttggtgcggcgctcttcttgtttcagcagttagctgggataaatgcagttgtgtactactctacatctgtgttccgcagcgccggaatccaatctgatgttgcagccagtgctcttgttggagcatcaaacgtgtttggaactgctgttgcttcgtctttgatggacaaaatgggaaggaaaagtcttctacttactagctttggtggaatggcgttgtctatgctgttgctctcgttgtccttcacatggaaagctcttgctgcatattcaggcactctcgctgttgttggaactgttctctatgtcctgtcattctcacttggtgctggcccggtaccagctcttcttcttccagagatattcgcatctcggatcagagcaaaagctgtcgctctttctctcggcatgcactggatctcaaactttgtgattggactctacttcttgagcgttgtgactaaattcggaatcagcagtgtgtacttgggattcgcaggagtgtgtgtccttgcagtcatgtacattgcaggaaacgtagtggagactaaaggacggtcactcgaggaaatagagcttgcacttacctctggagcttga

SEQ ID NO: 2797 - protein, 544 aa, Brassica napus
MQSSTYAAVKGNAAFAFQRRSFSNLVSRSATTTGIRFSTGSYFAQLHSSASKAMGAKLARAENGIHSLSSVKARSVRAQASSGGGDEEEAIPLRSEGKISGTVLPFVGVACLGAILFGYHLGVVNGALEYLAKDLGIADNAVLQGWIVSALLAGATVGSFTGGALADKFGRTRTFQLDAIPLAVGAFLCATAQSVQTMIVGRLLAGVGIGISSAIVPLYISEISPTEIRGALGSVNQLFICIGILAALIAGLPLAANPLWWRTMFGVAVIPSVLLAIGMGFSPESPRWLVQQGKLTQAEKAIKTLYGKEKVVELVRDLSNSGQGTSEPEAGWFDLFSSRYWKVVSVGAALFLFQQLAGINAVVYYSTSVFRSAGIQSDVAASALVGASNVFGTAVASSLMDKMGRKSLLLTSFGGMALSMLLLSLSFTWKALAAYSGTLAVVGTVLYVLSFSLGAGPVPALLLPEIFASRIRAKAVALSLGMHWISNFVIGLYFLSVVTKFGISSVYLGFAGVCVLAVMYIAGNVVETKGRSLEEIELALTSGA

SEQ ID NO: 2798 - DNA, 1599 bp, Brassica napus
  CDS (1)..(1599)
atggccggaggaggattcgcgacggcgacggcaaacggagtggagtttgaggcaaagataactccaatagttatcatctcttgcatcatggctgctaccggcggtctcatgttcggctacgacgttggtgtctccggcggagtgacatcgatgccggactttctgaagaagttttttccggtggttcaccggaaagtagaagccggagccgacaaaaacagcaactactgcaagtacgacaaccaaggactacaactcttcacatcatctctatacttagccggtctaaccgcaacgttcttcgcttcatacacgacgagaacgttaggacgaagaccaaccatgcttatagccggcgtgttcttcatcatcggtgtggttctcaacgccgcggctcaagacctagctatgctcattgcaggaaggatattacttggttgtggagttgggttcgctaatcaagctgtgcctttgttcttgtcggagattgcacctactaagatccgtggtggtcttaatattctgtttcaacttaacgtcactattggaatcctcttcgctaatcttgtcaactatggtaccgccaagatcaagggaggatggggatggagactatccttaggtttggccggagtcccggcgcttctactgacggtgggagctttgttggtgacggaaacaccgaacagtctcgtcgaaagaggtcgtcttgatgaaggaaaagccgttcttcgtcggattcggggtactgataatgtcgagccagagtttgctgatcttcttgaagctagccgccttgctaaagaagtcaaacacccttttagaaaccttcttcaacgtaggaataggcctcagcttgtcattgccgtggctttgcagatctttcaacaatgcactggaatcaacgccatcatgttctacgctcctgttctcttcagcactttaggttttggcaatgacgctgctctctactctgcggtggtcactggtgcagtcaacgtgctctccacggtagtctcaatctactctgttgacaaagtcggtcgtcgtgttcttctccttgaagctggtgtccaaatgttcttttctcaagtcgttatcgccattatactcggcatcaaagtcacagaccactcacaaaacctctccaaagggtttgcgattctagtcgtggtgatgatctgcacctacgtagctgctttcgcctggtcttggggaccgctcgggtggctaatccctagtgagactttccctctagagacacgttctgctggacagagtgtgacggtctgcgtcaacctcctcttcactttcatcatcgcgcaggctttcctctcgatgttgtgtcatttcaagttcgggatattcatcttcttttcttcttgggtcttggtgatgtctttctttgtgatgttcctccttcctgagaccaagaacattcctatcgaggagatgactgagagagtgtggaagaagcactggttctgggctaggttcatggatgatcatcacgatgatcaagtgttcgcgagtggtcatgtaaatggtaagaagagtaacggtaaatctaacggatttgacccttcaacacggctctaa

SEQ ID NO: 2799 - protein, 532 aa, Brassica napus
MAGGGFATATANGVEFEAKITPIVIISCIMAATGGLMFGYDVGVSGGVTSMPDFLKKFFPVVHRKVEAGADKNSNYCKYDNQGLQLFTSSLYLAGLTATFFASYTTRTLGRRPTMLIAGVFFIIGVVLNAAAQDLAMLIAGRILLGCGVGFANQAVPLFLSEIAPTKIRGGLNILFQLNVTIGILFANLVNYGTAKIKGGWGWRLSLGLAGVPALLLTVGALLVTETPNSLVERGRLDEGKAVLRRIRGTDNVEPEFADLLEASRLAKEVKHPFRNLLQRRNRPQLVIAVALQIFQQCTGINAIMFYAPVLFSTLGFGNDAALYSAVVTGAVNVLSTVVSIYSVDKVGRRVLLLEAGVQMFFSQVVIAIILGIKVTDHSQNLSKGFAILVVVMICTYVAAFAWSWGPLGWLIPSETFPLETRSAGQSVTVCVNLLFTFIIAQAFLSMLCHFKFGIFIFFSSWVLVMSFFVMFLLPETKNIPIEEMTERVWKKHWFWARFMDDHHDDQVFASGHVNGKKSNGKSNGFDPSTRL

SEQ ID NO: 2800 - DNA, 1683 bp, Glycine max
  CDS (1)..(1683)
atggcatcaacttctctcttcaacttcagactccctctgttcaacttcaacccactgcaccatcgacggataaagaggccaaaatctctgctctcctctcctcgcaacagtccacgcctcgtttcttccattaacgaccatttggcgctcacacgtgtcacatatccgcttctccaatctcactctgctccgaagcgcagattccacgttggtgtacagaaagagtattctgatggggaaagctctgagtcgattgtttctgacgctacataccaagaggaattttcctggtcttctgtagttcttccgtttctattccccgcattgggtggcttgttatttggttatgatattggtgccacctctggcgctacaatctcactgcagtcacctgagcttagcggtatatcatggttcaatctttctgccattcagcttggactagtggttagtggttccctatacggggctcttcttggctcgcttgttgcatttgcgatagctgatttccttgggaggaagaaacaactcattactgcagcactgttgtatttgtttggtggtgtgattactgcctatgcaccagaacttggtgttctcttaccaggaaggctgatttatggacttggtataggtttgggcatgcatggggctcctttatatattgcggagacttgcccatcacaaatccgtgggacattagtatcattaaaagaactcttcattgtccttgggattctgcttggttattttgtgggaagctttctgattgagacagttggaggatggcggttcatgtacggatttagtgctccagttgctgtattaatggggcttggaatgtggactctccccaattctccacggtggttgcttctcagagcagtgcaaggaaaaggttcttttcaagatttgaaggaacaggcaattgcttccctgagcaaattaaggggccgaccacctggtgacaaagaatctgagaagcaaatagaagagacccttgtctcattgaaatctgtctatgcagaccaggaatccgaggggaatttcttagaggtgtttcagggtcccaatctgaaagctttcataattggtggggggctagtcctatttcaacagataacaggtcaaccaagtgttctgtattatgcaggcccaattcttcagagtgctggattttctgctgcatctgatgctacaaaagtttcagttgttattggcctattcaagttactaatgacttggattgctgtcctaaaagttgatgatttggggagaagacctctgctgattggaggtgtcagtggcattgccctttctctagttctcctttctgcttattataaatttcttggaggttttccacttgttgctgttggagctttacttctttatgttggttgctaccagatatcatttgggccaataagttggctaatggtatcagaggtcttcccacttcgcactagaggcaaggggattagtctggctgttcttaccaacttcgcttcaaatgctgttgttacctttgcattctccccgctaaaggagtttctaggagctgaaaatctttttctcctttttggggctattgctactctatcacttttgttcattatcttttctgttccagagacaaaaggcatgagtttagaagatatagaatccaaaatcttgaagtga

SEQ ID NO: 2801 - protein, 560 aa, Glycine max
MASTSLFNFRLPLFNFNPLHHRRIKRPKSLLSSPRNSPRLVSSINDHLALTRVTYPLLQSHSAPKRRFHVGVQKEYSDGESSESIVSDATYQEEFSWSSVVLPFLFPALGGLLFGYDIGATSGATISLQSPELSGISWFNLSAIQLGLVVSGSLYGALLGSLVAFAIADFLGRKKQLITAALLYLFGGVITAYAPELGVLLPGRLIYGLGIGLGMHGAPLYIAETCPSQIRGTLVSLKELFIVLGILLGYFVGSFLIETVGGWRFMYGFSAPVAVLMGLGMWTLPNSPRWLLLRAVQGKGSFQDLKEQAIASLSKLRGRPPGDKESEKQIEETLVSLKSVYADQESEGNFLEVFQGPNLKAFIIGGGLVLFQQITGQPSVLYYAGPILQSAGFSAASDATKVSVVIGLFKLLMTWIAVLKVDDLGRRPLLIGGVSGIALSLVLLSAYYKFLGGFPLVAVGALLLYVGCYQISFGPISWLMVSEVFPLRTRGKGISLAVLTNFASNAVVTFAFSPLKEFLGAENLFLLFGAIATLSLLFIIFSVPETKGMSLEDIESKILK

SEQ ID NO: 2802 - DNA, 1569 bp, Glycine max
  CDS (1)..(1569)
atggccggcggaggtttcaccagcggcggcggcgccggagatttcgaggccaaaatcactcccatcgtcatcatttcatgtatcatggctgccaccggaggtctcatgttcggctacgacgtcggcgtttcaggtggtgtgacgtctatgcccccgttcttgaagaagttttttccgacggtatacagaaagacagtggaagagaaaggactggacagtaattactgcaaatacgacaaccaaggattacagcttttcacgtcgtctctgtatctggctggtttgacttcgacgttctttgcttcatacacgactcgtaggttgggaagaaggctgaccatgttgattgctggggtattcttcatctgtggagttgtccttaatgctgctgctcaagaccttgccatgctcatcgttggcagaatcttacttggctgtggtgttggctttgctaatcaggccgtgccagtgttcctctctgagatagcaccttcaagaatacgaggagcattgaatatattgttccagctcaatgtcacaattggcattctatttgctaaccttgtcaactatggcaccaacaaaatcaaaggtgggtggggttggaggctatctcttgggttggctggtatcccagcagttctgctaacattgggagccttgttcgtggtggacacccccaacagtctgatcgaacgtgggcgcttggaagaaggaaaaacagtgcttaaaaagattcgcggcactgacaacattgaacttgagttccaggaattgcttgaggccagtcgtgtggctaaagaggtcaagcatccattcaggaatcttctcaagcgcaggaaccgaccccaacttgtcatttccgttgccctacagatattccagcaattcacaggcatcaacgcaatcatgttttatgccccggtgctgttcaacacgttaggattcaagaacgatgcatccctgtattctgctgtgataactggggctgtgaacgtgctctccactgttgtatcgatctactcagtggacaaagtgggacgtcgcattctgttgctggaagctggtgtgcagatgttcttgtctcaagtggtgattgcaatcatactgggaataaaggtgacggaccattctgatgacctttcaaaaggcattgcaattctggtggttgtgatggtctgcactttcgtgtcttcctttgcatggtcttggggtcctcttgggtggcttatccccagtgagactttcccattggagactcgttccgctggtcagagtgtcaccgtttgtgttaacctgctcttcaccttcgtcattgcacaagccttcctctctatgctctgccacttcaagtttggtatcttcttgttcttctctggctgggtcctcgtcatgtctgtcttcgtgcttttcctgttgcccgagactaagaatgtccccatcgaagagatgaccgagagagtgtggaagcagcattggttctggaagaggtttatcgatgatgccgcggatgagaaagtagcccatgtctctaatggtaatggatttgatccaacctccaggttgtaa

SEQ ID NO: 2803 - protein, 522 aa, Glycine max
MAGGGFTSGGGAGDFEAKITPIVIISCIMAATGGLMFGYDVGVSGGVTSMPPFLKKFFPTVYRKTVEEKGLDSNYCKYDNQGLQLFTSSLYLAGLTSTFFASYTTRRLGRRLTMLIAGVFFICGVVLNAAAQDLAMLIVGRILLGCGVGFANQAVPVFLSEIAPSRIRGALNILFQLNVTIGILFANLVNYGTNKIKGGWGWRLSLGLAGIPAVLLTLGALFVVDTPNSLIERGRLEEGKTVLKKIRGTDNIELEFQELLEASRVAKEVKHPFRNLLKRRNRPQLVISVALQIFQQFTGINAIMFYAPVLFNTLGFKNDASLYSAVITGAVNVLSTVVSIYSVDKVGRRILLLEAGVQMFLSQVVIAIILGIKVTDHSDDLSKGIAILVVVMVCTFVSSFAWSWGPLGWLIPSETFPLETRSAGQSVTVCVNLLFTFVIAQAFLSMLCHFKFGIFLFFSGWVLVMSVFVLFLLPETKNVPIEEMTERVWKQHWFWKRFIDDAADEKVAHVSNGNGFDPTSRL

SEQ ID NO: 2804 - DNA, 1683 bp, Glycine max
  CDS (1)..(1683)
atggcatcaacttctctcttcaacttcagactccctctgttcaacttcaacccactgcaccatcgacggataaagaggccaaaatctctgctctcctctcctcgcaacagtccacgcctcgtttcttccattaacgaccatttggcgctcacacgtgtcacatatccgcttctccaatctcactctgctccgaagcgcagattccacgttggtgtacagaaagagtattctgatggggaaagctctgagtcgattgtttctgacgctacataccaagaggaattttcctggtcttctgtagttcttccgtttctattccccgcattgggtggcttgttatttggttatgatattggtgccacctctggcgctacaatctcactgcagtcacctgagcttagcggtatatcatggttcaatctttctgccattcagcttggactagtggttagtggttccctatacggggctcttcttggctcgcttgttgcatttgcgatagctgatttccttgggaggaagaaacaactcattactgcagcactgttgtatttgtttggtggtgtgattactgcctatgcaccagaacttggtgttctcttaccaggaaggctgatttatggacttggtataggtttgagcatgcatggggctcctttatatattgcggagacttgcccatcacaaatccgtgggacattagtatcattaaaagaactcttcattggccttgggattctgcttggttattttgtgggaagctttctgattgagacagttggaggatggcggttcatgtacggatttagtgctccagttgctgtattaatggggcttggaatgtggactctccccaattctccacggtggttgcttctcagagcagtgcaaggaaaaggttcttttcaagatttgaaggaacaggcaattgcttccctgagcaaattaaggggccgaccacctggtgacaaagaatctgagaagcaaatagaagagacccttgtctcattgaaatctgtctatgcagaccaggaatccgaggggaatttcttagaggtgtttcagggtcccaatctgaaagctttcataattggtggggggctagtcctatttcaacagataacaggtcaaccaagtgttctgtattatgcaggcccaattcttcagagtgctggattttctgctgcatctgatgctacaaaagtttcagttgttattggcctattcaagttactaatgacttggattgctgtcctaaaagttgatgatttggggagaagacctctgctgattggaggtgtcagtggcattgccctttctctagttctcctttctgcttattataaatttcttggaggttttccacttgttgctgttggagctttacttctttatgttggttgctaccagatatcatttgggccaataagttggctaatggtatcagaggtcttcccacttcgcactagaggcaaggggattagtctggctgttcttaccaacttcgcttcaaatgctgttgttacctttgcattctccccgctaaaggagtttctaggagctgaaaatctttttctcctttttggggctattgctactctatcacttttgttcattatcttttctgttccagagacaaaaggcatgagtttagaagatatagaatccaaaatcttgaagtga

SEQ ID NO: 2805 - protein, 560 aa, Glycine max
MASTSLFNFRLPLFNFNPLHHRRIKRPKSLLSSPRNSPRLVSSINDHLALTRVTYPLLQSHSAPKRRFHVGVQKEYSDGESSESIVSDATYQEEFSWSSVVLPFLFPALGGLLFGYDIGATSGATISLQSPELSGISWFNLSAIQLGLVVSGSLYGALLGSLVAFAIADFLGRKKQLITAALLYLFGGVITAYAPELGVLLPGRLIYGLGIGLSMHGAPLYIAETCPSQIRGTLVSLKELFIGLGILLGYFVGSFLIETVGGWRFMYGFSAPVAVLMGLGMWTLPNSPRWLLLRAVQGKGSFQDLKEQAIASLSKLRGRPPGDKESEKQIEETLVSLKSVYADQESEGNFLEVFQGPNLKAFIIGGGLVLFQQITGQPSVLYYAGPILQSAGFSAASDATKVSVVIGLFKLLMTWIAVLKVDDLGRRPLLIGGVSGIALSLVLLSAYYKFLGGFPLVAVGALLLYVGCYQISFGPISWLMVSEVFPLRTRGKGISLAVLTNFASNAVVTFAFSPLKEFLGAENLFLLFGAIATLSLLFIIFSVPETKGMSLEDIESKILK

SEQ ID NO: 2806 - DNA, 1506 bp, Glycine max
  CDS (1)..(1506)
atgactggggggggtatcactatgcaatcgacgccgggaagctcaggatacttggatttgtatccagagcggaagatgtcctttttcaaaaatccttacattctcggactggctgctgtcgccggcatcggtggtctcctcttcggctacgacactggtgtgatatcaggggctcttttatacattaaggatgattttgaggaggttagaaacagcaatcttctccaggaaacaatagtcagcatggctattgccggggcaatcgtgggagcagcattgggtggttggattaatgatgcctatggtcgaaagaaggccaccctctttgccgatgttatctttaccgccggagcaataatcatggcttctgctccagatccttatgttctcattttgggacgccttctggttggtttgggtgtgggcatagcttctgtcactgctcccgtttatattgcagaagcatcaccttccgaaataaggggttcattagtcagcacaaatgtcctcatgataaccggtggacagtttctttcctatcttgttaacctcgcttttactggtgttcctggcacttggcgatggatgcttggtgtttctggtgtgcctgctgttgttcagtttgttctcatgctcttcctccccgaatccccaagatggctttttgtcaagaataggaaaaatgaagccgttgatgtgctttctaagatctttgacgttgctcgcttagaagacgaagtcgatttcctcactgctcaatccgagcaagagcgccaaagaaggtcaaatatcaaattctgggatgtttttagatccaaagaaatcagactggcattcctcgtcggtgccggacttctggcttttcagcagttcacgggtattaacacagtcatgtactacagcccgacaattgtccaaatggcagggttccatgctaatgaattggctcttcttctatcccttatagttgccggcatgaatgcagccggaacaattcttggcatttaccttatcgaccatgctggacgaaaaaaattagctctttctagtctgggaggagtaattgtatctttggtcatcttggcctttgcattttataagcaatcatccacgtcaaatgagttgtatggatggcttgcagttgtaggcttagccttgtatattggttttttctcgccaggaatggggcctgtgccatggactctgagttcagagatatatccggaagaatatcgaggtatctgtgggggcatgtcagctactgtgtgttgggtctcaaatttgattgtctcagagacctttctttcaattgcggagggtatagggattggttcaacttttctgattattggtgtcatagctgtggttgcatttgtatttgtgcttgtttatgttccagagaccaaaggattgacctttgatgaagtggaagtaatatggagggagagagcttggggcaagaaccccaacacacaaaaccttcttgagcagggaagtagttcctaa

SEQ ID NO: 2807 - protein, 501 aa, Glycine max
MTGGGITMQSTPGSSGYLDLYPERKMSFFKNPYILGLAAVAGIGGLLFGYDTGVISGALLYIKDDFEEVRNSNLLQETIVSMAIAGAIVGAALGGWINDAYGRKKATLFADVIFTAGAIIMASAPDPYVLILGRLLVGLGVGIASVTAPVYIAEASPSEIRGSLVSTNVLMITGGQFLSYLVNLAFTGVPGTWRWMLGVSGVPAVVQFVLMLFLPESPRWLFVKNRKNEAVDVLSKIFDVARLEDEVDFLTAQSEQERQRRSNIKFWDVFRSKEIRLAFLVGAGLLAFQQFTGINTVMYYSPTIVQMAGFHANELALLLSLIVAGMNAAGTILGIYLIDHAGRKKLALSSLGGVIVSLVILAFAFYKQSSTSNELYGWLAVVGLALYIGFFSPGMGPVPWTLSSEIYPEEYRGICGGMSATVCWVSNLIVSETFLSIAEGIGIGSTFLIIGVIAVVAFVFVLVYVPETKGLTFDEVEVIWRERAWGKNPNTQNLLEQGSSS

SEQ ID NO: 2808 - DNA, 1530 bp, Triticum aestivum
  CDS (1)..(1530)
atgacgatcgatttgtccaccatgcccgggagctcctcctcccgtctcctggacgccgccgcggcgaggaaggacatgaacttcttcaaaaaccgctacgtgcttgggctcaccggcgtcgccggaatcggcgggttcctctttggatacgacacaggtgttatatctggagcgcttctgtatattcgggacgaatttccagctgtcaaagacaatctattcttgcaggagacaattgttagcatggcattacttggagccatgcttggagcagctgggggcggttggataaatgatgcctacggtcgtaaaaagtccactcttcttgctgacctgatgttcgcacttggttcactggttatgtgtgctgctggcggtccttacattctgatacttggaaggctctttgttggattgggtgtgggaatagcatcagtcactgccccagtttacatcgctgaagctgctccttcagaaatcaggggaggtttggtgtcaactaatgtcctcatgattactggcggccaattcttctcctacttggtcaatcttggctttaccgaggttcctgggacatggcgctggatgctcggagtagctgctgtgccagcaatcatacagtttgtgctgatgctttttctgccagaatctccccgctggctttaccggaaggatgagaaagcaaaagctattgctgtcctggagcagatatatgactctggtcgtctggaggaagaggttgagctgcttgcgtcggcttccatgcatgaattccagtctaactgtactgggagctatttggacatattcaggttgaaggaattaaggctagctttttttgctggagctggtcttcaggcctttcagcaatttactggcatcaacaccgtcatgtactacagccccacgatcgtccagatggctgggttcacttccaacaggctggccctgctactttccctcatcgttgccgccatgaatgcgagtggaaccatcgtcggaatctacctcatcgaccgttgtggccgccgccgcctggcccttacaagcctagccggggtcgtgctctccctcgtcatcctcgccacggccttcatactgcagtcatcctccagcctctgcgggagcctgttcagcggctcctgccaaggcgtgctggggtggttcgcggtcggagggctcgctctgtacatcgccttcttctctccgggcatggggccggtgccatgggccgtgaactcggagatctaccccgaggcctaccgcggcatgtgcggcggcatgtcggccaccgtcaactggatctccaacctgatcgtggcgcagacgttcctctcgatcgtggggtgggtcggcaccggcccaacattcataatcatcgccgggatagccgtgatggccttgatcttcgtcgccctctacgtgccggagaccaagggcctgagcttcgaggaggtggacctcctgtggaaagagcgggcctggggaagccagggcagccacgagagcctcctgggtgctgcgccgtaa

SEQ ID NO: 2809 - protein, 509 aa, Triticum aestivum
MTIDLSTMPGSSSSRLLDAAAARKDMNFFKNRYVLGLTGVAGIGGFLFGYDTGVISGALLYIRDEFPAVKDNLFLQETIVSMALLGAMLGAAGGGWINDAYGRKKSTLLADLMFALGSLVMCAAGGPYILILGRLFVGLGVGIASVTAPVYIAEAAPSEIRGGLVSTNVLMITGGQFFSYLVNLGFTEVPGTWRWMLGVAAVPAIIQFVLMLFLPESPRWLYRKDEKAKAIAVLEQIYDSGRLEEEVELLASASMHEFQSNCTGSYLDIFRLKELRLAFFAGAGLQAFQQFTGINTVMYYSPTIVQMAGFTSNRLALLLSLIVAAMNASGTIVGIYLIDRCGRRRLALTSLAGVVLSLVILATAFILQSSSSLCGSLFSGSCQGVLGWFAVGGLALYIAFFSPGMGPVPWAVNSEIYPEAYRGMCGGMSATVNWISNLIVAQTFLSIVGWVGTGPTFIIIAGIAVMALIFVALYVPETKGLSFEEVDLLWKERAWGSQGSHESLLGAAP

SEQ ID NO: 2810 - DNA, 25 bp, Artificial sequence
  primer
atggctgaaatgaagaattcgacag

SEQ ID NO: 2811 - DNA, 26 bp, Artificial sequence
  primer
ctaactttctacaatttcctgtgtag

SEQ ID NO: 2812 - protein, 530 aa, Artificial sequence
  consensus sequence
  Variant (2)..(3): Xaa in position 2 to 3 is any amino acid
  Variant (8)..(8): Xaa in position 8 is any amino acid
  Variant (10)..(11): Xaa in position 10 to 11 is any amino acid
  Variant (13)..(14): Xaa in position 13 to 14 is any amino acid
  Variant (15)..(32): Xaa in position 15 to 32 is any or no amino acid
  Variant (34)..(53): Xaa in position 34 to 53 is any amino acid
  Variant (54)..(58): Xaa in position 54 to 58 is any or no amino acid
  Variant (60)..(63): Xaa in position 60 to 63 is any amino acid
  Variant (66)..(72): Xaa in position 66 to 72 is any amino acid
  Variant (74)..(76): Xaa in position 74 to 76 is any amino acid
  Variant (78)..(79): Xaa in position 78 to 79 is any amino acid
  Variant (82)..(91): Xaa in position 82 to 91 is any amino acid
  Variant (93)..(94): Xaa in position 93 to 94 is any amino acid
  Variant (96)..(110): Xaa in position 96 to 110 is any amino acid
  Variant (113)..(115): Xaa in position 113 to 115 is any amino acid
  Variant (117)..(117): Xaa in position 117 is any amino acid
  Variant (119)..(119): Xaa in position 119 is any amino acid
  Variant (121)..(126): Xaa in position 121 to 126 is any amino acid
  Variant (128)..(129): Xaa in position 128 to 129 is any amino acid
  Variant (131)..(131): Xaa in position 131 is any amino acid
  Variant (133)..(134): Xaa in position 133 to 134 is any amino acid
  Variant (136)..(138): Xaa in position 136 to 138 is any amino acid
  Variant (141)..(141): Xaa in position 141 is any amino acid
  Variant (143)..(150): Xaa in position 143 to 150 is any amino acid
  Variant (152)..(152): Xaa in position 152 is any amino acid
  Variant (154)..(170): Xaa in position 154 to 170 is any amino acid
  Variant (171)..(174): Xaa in position 171 to 174 is any or no amino acid
  Variant (177)..(179): Xaa in position 177 to 179 is any amino acid
  Variant (181)..(184): Xaa in position 181 to 184 is any amino acid
  Variant (186)..(196): Xaa in position 186 to 196 is any amino acid
  Variant (197)..(197): Xaa in position 197 is any or no amino acid
  Variant (199)..(200): Xaa in position 199 to 200 is any amino acid
  Variant (203)..(203): Xaa in position 203 is any amino acid
  Variant (205)..(212): Xaa in position 205 to 212 is any amino acid
  Variant (213)..(221): Xaa in position 213 to 221 is any or no amino acid
  Variant (223)..(273): Xaa in position 223 to 273 is any amino acid
  Variant (274)..(302): Xaa in position 274 to 302 is any or no amino acid
  Variant (304)..(306): Xaa in position 304 to 306 is any amino acid
  Variant (309)..(310): Xaa in position 309 to 310 is any amino acid
  Variant (312)..(312): Xaa in position 312 is any amino acid
  Variant (314)..(316): Xaa in position 314 to 316 is any amino acid
  Variant (318)..(326): Xaa in position 318 to 326 is any amino acid
  Variant (329)..(341): Xaa in position 329 to 341 is any amino acid
  Variant (342)..(344): Xaa in position 342 to 344 is any or no amino acid
  Variant (346)..(348): Xaa in position 346 to 348 is any amino acid
  Variant (350)..(356): Xaa in position 350 to 356 is any amino acid
  Variant (358)..(359): Xaa in position 358 to 359 is any amino acid
  Variant (363)..(365): Xaa in position 363 to 365 is any amino acid
  Variant (367)..(382): Xaa in position 367 to 382 is any amino acid
  Variant (383)..(389): Xaa in position 383 to 389 is any or no amino acid
  Variant (391)..(415): Xaa in position 391 to 415 is any amino acid
  Variant (416)..(451): Xaa in position 416 to 451 is any or no amino acid
  Variant (453)..(455): Xaa in position 453 to 455 is any amino acid
  Variant (457)..(466): Xaa in position 457 to 466 is any amino acid
  Variant (467)..(467): Xaa in position 467 is any or no amino acid
  Variant (469)..(479): Xaa in position 469 to 479 is any amino acid
  Variant (481)..(489): Xaa in position 481 to 489 is any amino acid
  Variant (492)..(501): Xaa in position 492 to 501 is any amino acid
  Variant (502)..(502): Xaa in position 502 is any or no amino acid
  Variant (504)..(521): Xaa in position 504 to 521 is any amino acid
  Variant (524)..(525): Xaa in position 524 to 525 is any amino acid
  Variant (527)..(529): Xaa in position 527 to 529 is any amino acid
GXXFGYDXGXXSXXXXXXXXXXXXXXXXXXXXLXXXXXXXXXXXXXXXXXXXXXXXXXSXXXXGAXXXXXXXGXXXDXXGRXXXXXXXXXXFXXGXXXXXXXXXXXXXXXGRXXXGXGXGXXXXXXPXXIXEXXPXXXRGXLXXXXXXXXTXGXXXXXXXXXXXXXXXXXXXXXWRXXXGXXXXPXXXXXXXXXXXXPXXPRXLXXXXXXXXXXXXXXXXXAXXXXXXXXXXXXXXXXXXXXXXXXXXXXXXXXXXXXXXXXXXXXXXXXXXXXXXXXXXXXXXXXXXXXXXXXXXXXXXXXLXXXQQXXGXNXXXYXXXXXXXXXGFXXXXXXXXXXXXXXXXNXXXTXXXXXXXDXXGRRXXXLXXXXXXXXXXXXXXXXXXXXXXXFXXXXXXXXXXXXXXXXXXXXXXXXXXXXXXXXXXXXXXXXXXXXXXXXXXXXXXXXXXXXXGXXXWXXXXXXXXXXXRXXXXXXXXXXXWXXXXXXXXXFLXXXXXXXXXXXFXXXXXXXXXXXXXXXXXXPEXXGXXXE

SEQ ID NO: 2813 - protein, 48 aa, Artificial sequence
  protein pattern
  Variant (2)..(2): Xaa in position 2 is any amino acid
  Variant (3)..(4): Xaa in position 3 to 4 is any or no amino acid
  Variant (6)..(6): Xaa in position 6 is Ile or Val
  Variant (8)..(11): Xaa in position 8 to 11 is any amino acid
  Variant (12)..(13): Xaa in position 12 to 13 is any or no amino acid
  Variant (15)..(15): Xaa in position 15 is Leu or Val
  Variant (16)..(16): Xaa in position 16 is any amino acid
  Variant (17)..(17): Xaa in position 17 is Ile or Leu
  Variant (18)..(18): Xaa in position 18 is Ala, Gly, Gln or Ser
  Variant (20)..(20): Xaa in position 20 is any amino acid
  Variant (21)..(21): Xaa in position 21 is Ala, Cys or Ser
  Variant (23)..(25): Xaa in position 23 to 25 is any amino acid
  Variant (28)..(28): Xaa in position 28 is any amino acid
  Variant (30)..(34): Xaa in position 30 to 34 is any amino acid
  Variant (35)..(35): Xaa in position 35 is Ile, Leu, Met or Val
  Variant (36)..(36): Xaa in position 36 is any amino acid
  Variant (37)..(37): Xaa in position 37 is Ile, Leu or Val
  Variant (38)..(38): Xaa in position 38 is Cys, Gly, Thr or Val
  Variant (39)..(39): Xaa in position 39 is any amino acid
  Variant (41)..(41): Xaa in position 41 is any amino acid
  Variant (42)..(42): Xaa in position 42 is Phe, Leu or Val
  Variant (43)..(43): Xaa in position 43 is any amino acid
  Variant (44)..(44): Xaa in position 44 is Ala, Gly or Ser
  Variant (45)..(47): Xaa in position 45 to 47 is any amino acid
  Variant (48)..(48): Xaa in position 48 is Asp, Gly or Asn
GXXXGXGXXXXXXPXXXXEXXPXXXRGXLXXXXXXXXXXGXXXXXXXX

SEQ ID NO: 2814 - protein, 29 aa, Artificial sequence
  protein pattern
  Variant (2)..(2): Xaa in position 2 is any amino acid
  Variant (3)..(3): Xaa in position 3 is Ala, Gly, Ile, Leu or Val
  Variant (4)..(4): Xaa in position 4 is any amino acid
  Variant (5)..(5): Xaa in position 5 is Gln or Ser
  Variant (7)..(8): Xaa in position 7 to 8 is any or no amino acid
  Variant (10)..(10): Xaa in position 10 is any amino acid
  Variant (11)..(11): Xaa in position 11 is Asn or Pro
  Variant (12)..(12): Xaa in position 12 is Ala, Cys, Ser or Thr
  Variant (13)..(13): Xaa in position 13 is Ile, Leu or Val
  Variant (14)..(14): Xaa in position 14 is Leu, Met or Val
  Variant (15)..(16): Xaa in position 15 to 16 is Phe or Tyr
  Variant (17)..(17): Xaa in position 17 is Ala or Ser
  Variant (18)..(18): Xaa in position 18 is Ala, Gly, Pro, Ser or Thr
  Variant (19)..(19): Xaa in position 19 is any amino acid
  Variant (20)..(20): Xaa in position 20 is Ile, Leu or Val
  Variant (21)..(21): Xaa in position 21 is Phe, Leu or Val
  Variant (22)..(23): Xaa in position 22 to 23 is any amino acid
  Variant (24)..(24): Xaa in position 24 is Ala, Ile, Leu or Val
  Variant (25)..(25): Xaa in position 25 is Gly or Ser
  Variant (26)..(26): Xaa in position 26 is Phe or Ile
  Variant (27)..(27): Xaa in position 27 is any amino acid
  Variant (28)..(28): Xaa in position 28 is Ala, Glu, Asn or Ser
  Variant (29)..(29): Xaa in position 29 is Ala, Asp, Asn, Pro or Ser
LXXXXQXXGXXXXXXXXXXXXXXXXXXXX

SEQ ID NO: 2815 - protein, 19 aa, Artificial sequence
  protein pattern
  Variant (2)..(3): Xaa in position 2 to 3 is any amino acid
  Variant (4)..(4): Xaa in position 4 is any or no amino acid
  Variant (6)..(7): Xaa in position 6 to 7 is any amino acid
  Variant (8)..(8): Xaa in position 8 is any or no amino acid
  Variant (12)..(12): Xaa in position 12 is Asp or His
  Variant (13)..(13): Xaa in position 13 is any amino acid
  Variant (15)..(16): Xaa in position 15 to 16 is any amino acid
  Variant (17)..(17): Xaa in position 17 is Gly, Asn or Ser
  Variant (18)..(18): Xaa in position 18 is Ala, Gly or Ser
  Variant (19)..(19): Xaa in position 19 is Ala, Thr or Val
AXXXGXXXFGYXXGXXXXX

SEQ ID NO: 2816 - protein, 18 aa, Artificial sequence
  protein pattern
  Variant (2)..(4): Xaa in position 2 to 4 is any amino acid
  Variant (6)..(6): Xaa in position 6 is any amino acid
  Variant (7)..(7): Xaa in position 7 is Ile, Leu or Val
  Variant (8)..(8): Xaa in position 8 is Ala, Gly, Asn, Pro or Ser
  Variant (9)..(11): Xaa in position 9 to 11 is any amino acid
  Variant (12)..(12): Xaa in position 12 is Ile, Met or Val
  Variant (14)..(15): Xaa in position 14 to 15 is any amino acid
  Variant (18)..(18): Xaa in position 18 is Lys or Arg
NXXXTXXXXXXXDXXGRX

SEQ ID NO: 2817 - protein, 21 aa, Artificial sequence
  protein pattern
  Variant (2)..(2): Xaa in position 2 is any amino acid
  Variant (3)..(3): Xaa in position 3 is Ala, Cys, Gly, Ser or Thr
  Variant (4)..(4): Xaa in position 4 is Asn or Ser
  Variant (5)..(5): Xaa in position 5 is Phe, Ile, Leu, Met or Val
  Variant (6)..(6): Xaa in position 6 is Ala, Gly, Ile, Leu or Val
  Variant (7)..(7): Xaa in position 7 is Ile or Val
  Variant (8)..(8): Xaa in position 8 is Ala, Gly or Ser
  Variant (9)..(10): Xaa in position 9 to 10 is any amino acid
  Variant (13)..(13): Xaa in position 13 is Pro, Ser or Thr
  Variant (14)..(18): Xaa in position 14 to 18 is any amino acid
  Variant (19)..(19): Xaa in position 19 is Gly, Ser or Thr
  Variant (20)..(20): Xaa in position 20 is any amino acid
  Variant (21)..(21): Xaa in position 21 is Ala, Gly, Pro, Ser or Thr
WXXXXXXXXXFLXXXXXXXXX

SEQ ID NO: 2818 - DNA, 777 bp, Saccharomyces cerevisiae
  CDS (1)..(777)
atggctgccggtgtcccaaaaattgatgcgttagaatctttgggcaatcctttggaggatgccaagagagctgcagcatacagagcagttgatgaaaatttaaaatttgatgatcacaaaattattggaattggtagtggtagcacagtggtttatgttgccgaaagaattggacaatatttgcatgaccctaaattttatgaagtagcgtctaaattcatttgcattccaacaggattccaatcaagaaacttgattttggataacaagttgcaattaggctccattgaacagtatcctcgcattgatatagcgtttgacggtgctgatgaagtggatgagaatttacaattaattaaaggtggtggtgcttgtctatttcaagaaaaattggttagtactagtgctaaaaccttcattgtcgttgctgattcaagaaaaaagtcaccaaaacatttaggtaagaactggaggcaaggtgttcccattgaaattgtaccttcctcatacgtgagggtcaagaatgatctattagaacaattgcatgctgaaaaagttgacatcagacaaggaggttctgctaaagcaggtcctgttgtaactgacaataataacttcattatcgatgcggatttcggtgaaatttccgatccaagaaaattgcatagagaaatcaaactgttagtgggcgtggtggaaacaggtttattcatcgacaacgcttcaaaagcctacttcggtaattctgacggtagtgttgaagttaccgaaaagtga

SEQ ID NO: 2819 - protein, 258 aa, Saccharomyces cerevisiae
MAAGVPKIDALESLGNPLEDAKRAAAYRAVDENLKFDDHKIIGIGSGSTVVYVAERIGQYLHDPKFYEVASKFICIPTGFQSRNLILDNKLQLGSIEQYPRIDIAFDGADEVDENLQLIKGGGACLFQEKLVSTSAKTFIVVADSRKKSPKHLGKNWRQGVPIEIVPSSYVRVKNDLLEQLHAEKVDIRQGGSAKAGPVVTDNNNFIIDADFGEISDPRKLHREIKLLVGVVETGLFIDNASKAYFGNSDGSVEVTEK

SEQ ID NO: 2820 - DNA, 948 bp, Zea mays subsp. mays
  CDS (234)..(875)
aacctttattttgtttctgccaaacacttctcttcctctctccaatggcttcctccttatccttcgtctcatcctctcacctcactctccgcactccttccctcaccctacgcaaactctctccccctagaacctccgtttcgttctccgtcaaggcccagtccgtcgcactctcccaagacgatctcaagaaactcgcggcggagaaagccgtggaggcgatcaaaccggggatggtcctcggcctcggaaccggatccaccgccgccttcgccgtcgaccaaatcggaaaactcctctcctccggcgagctccacgacatcgtcggcatcccgacctcaaaacgcaccgaggagcaggccagatccctagggatccccctcgtggccctggacacgcatcctcggatcgacctggccatcgacggagcggacgaggtggatccgaatctggacctggtcaaggggcgaggaggcgcgctcctgagggagaagatggtggaggccgtggccgagagatttatcgtcgttgcggatgatacgaagctagtgaaggggctgggagggagtggtttagcgatgcctgtggaggttgttcagttctgctggaagtttaatttggtgaggctgagggatttgtttaaggagtttgggtgcgatgcgaagctgagggttggtgagggtggggaggcgtatgtgacggataatagtaattatattattgatttgtattttaaggagccgttgaaggatgggttcgctgcggggagggagattgggaagttggagggggttgtggagcatggtttgtttttggggatggctacttcggtgattattgctgggaagaatggtgttgaggttatgaacaagtgaggtttttttaaaagtttgatgtttttcttctttgtctcctctgtaataatattaccaattgagttattgtaat

SEQ ID NO: 2821 - protein, 213 aa, Zea mays subsp. mays
MVLGLGTGSTAAFAVDQIGKLLSSGELHDIVGIPTSKRTEEQARSLGIPLVALDTHPRIDLAIDGADEVDPNLDLVKGRGGALLREKMVEAVAERFIVVADDTKLVKGLGGSGLAMPVEVVQFCWKFNLVRLRDLFKEFGCDAKLRVGEGGEAYVTDNSNYIIDLYFKEPLKDGFAAGREIGKLEGVVEHGLFLGMATSVIIAGKNGVEVMNK

SEQ ID NO: 2822 - DNA, 1510 bp, Glycine max
  CDS (309)..(1109)
cccacgcgtccgaaaactcggaagctgcatggctgcgttcgttccttggtgttggtggaatctctctctctgactatgctgtgtctctttcccaggaccgcgcgaaacacgtaaatccccttcaaacacaacacaaaaacgcagtgtttccaccatctctatctctatctctatatataccctcacaaccaaacaatccccattccctctctaaccctatctaatctgtcttctcttacattcctttctccaccacacattcaattttaaacctctgggcgtggctagcttcaacctttaacattaacatggccattccctacccccatttcatcgccaccgagaaagccgccatggacgccggcctcctccacccctcctccccctccgtcatcctcacccaagacgatttgaagaaaatcgccgcctacaaggccgtcgagtacgtggagtccggcatggtcctcggcctaggcaccggctccaccgccaagcatgccgtcgaccgcatcggcgagctcctccgccagggcaagctcaaggacatcgtcggaatccccacctccacaaaaacccacgaacaagccctctccctcgggatccccctctccgatctcgacgcccaccccgccatcgatctcgccatcgacggcgccgacgaggtcgaccccttcctcaacctcgtcaagggccgtggcggctccctcctccgagaaaaaatggtcgaaggcgcatgcaagaagttcatcgtcatcgttgatgagtccaagctcgtaaactatttggggggtagtgggttggccatgcccgttgaggttattaagttctgttggaggttcaccgcggcgaggttgcagaagctttttgaggaggctgggtgcgttgccaggctcagaacttttggggagaaggagaaggaggagccttatgtgacggataatgggaactttattgtggatttgtatttcgagaggagtattggggatttgaaggctgctagtgatgctattttgcagcttgctggggttgtggagcatggcatgtttcttgatatggctaccactgttattgttgcaggggagctcgggttgacggtcaagaacaagtagttgttgttggtggttaggagaatgaaggtaggttaattggccaaggttgacatggggtttctaagttctatctaacccatttgtatggtgtagtagtaaaaaaggttttaatccaggggtaaagggggattttgattaaatccttttgttattcaatacagttgttggagaaagtttataagttctccggtagttttgttttgttttttttaggggcggggggatttagtttgagcaagcagaaagcaaaatggagagatgagtattaatctcatgcaatgactgttgtgtggcgttgaatcggttgtccgcacaatttgttgttcatttgacagacagtgtttaacatattgaatctatctatctaattcaatttttcataaaaaaaaaaaaaaaaaaaa

SEQ ID NO: 2823 - protein, 266 aa, Glycine max
MAIPYPHFIATEKAAMDAGLLHPSSPSVILTQDDLKKIAAYKAVEYVESGMVLGLGTGSTAKHAVDRIGELLRQGKLKDIVGIPTSTKTHEQALSLGIPLSDLDAHPAIDLAIDGADEVDPFLNLVKGRGGSLLREKMVEGACKKFIVIVDESKLVNYLGGSGLAMPVEVIKFCWRFTAARLQKLFEEAGCVARLRTFGEKEKEEPYVTDNGNFIVDLYFERSIGDLKAASDAILQLAGVVEHGMFLDMATTVIVAGELGLTVKNK

SEQ ID NO: 2824 - DNA, 1146 bp, Glycine max
  CDS (137)..(982)
  misc_feature (1123)..(1123): n is a, g, c or t
  misc_feature (1124)..(1124): n is a, g, c or t
  misc_feature (1125)..(1125): n is a, g, c or t
  misc_feature (1126)..(1126): n is a, g, c or t
  misc_feature (1127)..(1127): n is a, g, c or t
  misc_feature (1128)..(1128): n is a, g, c or t
  misc_feature (1129)..(1129): n is a, g, c or t
  misc_feature (1130)..(1130): n is a, g, c or t
  misc_feature (1131)..(1131): n is a, g, c or t
  misc_feature (1132)..(1132): n is a, g, c or t
  misc_feature (1133)..(1133): n is a, g, c or t
  misc_feature (1134)..(1134): n is a, g, c or t
  misc_feature (1135)..(1135): n is a, g, c or t
  misc_feature (1136)..(1136): n is a, g, c or t
  misc_feature (1137)..(1137): n is a, g, c or t
  misc_feature (1138)..(1138): n is a, g, c or t
  misc_feature (1139)..(1139): n is a, g, c or t
  misc_feature (1140)..(1140): n is a, g, c or t
  misc_feature (1141)..(1141): n is a, g, c or t
  misc_feature (1142)..(1142): n is a, g, c or t
  misc_feature (1143)..(1143): n is a, g, c or t
  misc_feature (1144)..(1144): n is a, g, c or t
  misc_feature (1145)..(1145): n is a, g, c or t
  misc_feature (1146)..(1146): n is a, g, c or t
ggaggaggatggaaaaggaatatccacccaactttgtgttgaaagcaaagagataaagtaataaaaaagggccaaacataaagcatcaaacctgggtggggtgtggctctactgttttctcttaccataatcatcaatggcttccttatccctctcctctcccccatctctctcttccgcacaccacaacgcctccacgcgccttattctacgcacccctaactcccttaaactgcgcactccaccccactccctccccgccatccgcgccatcaccctcacccaggacgacctcaagagactcgccgccgacaaggccgtggagtccgtcaagagcggcatggtcctcggcctgggcaccggctccactgctgccttcgtcgtcgccaagcttggcgcccttctcgcctccggccaactctccgacatcgtcggtgtccccacctccaaacgcacggaggagcaggcccgctccctcggcatccccctctccgtcctcgacgacaacccccgcctcgatctcgccatcgacggcgccgacgaggtcgaccccgacctcaacctcgtcaaaggccgcggcggcgccctcctccgcgagaagatggtcgaggccgcctccgacaagttcgtcgtggtcgtcgacgacaccaagctcgtggacggcctcggcggaagcgggctggccatgccggtggaggtggtccagttctgctggaagtacaatctggatcggcttcaggagcttttcaaggaagaaggtgtggaagcaaaattgagattggaggagagtgggaaaccctacgtcaccgataattccaattacatcgtggatttgtacttcaagactccaattagggatgcattggccgcaggcgctgaaatttccgctctggaaggcgtcgtcgagcatggcttgttcctcaacatggccacttctgtcatcatcgctggcaaatctggcgttgaagtcaaggccaagtgagactctgaagtaattcgtttcttcttcttcttctcattcttgtctctgtattatttttgttttcagtggaataataataattattgcgttatttggaaaaaaaaaaaaaaaaaaaaaaagacagaagaagaaataagaaannnnnnnnnnnnnnnnnnnnnnnn

SEQ ID NO: 2825 - protein, 281 aa, Glycine max
MASLSLSSPPSLSSAHHNASTRLILRTPNSLKLRTPPHSLPAIRAITLTQDDLKRLAADKAVESVKSGMVLGLGTGSTAAFVVAKLGALLASGQLSDIVGVPTSKRTEEQARSLGIPLSVLDDNPRLDLAIDGADEVDPDLNLVKGRGGALLREKMVEAASDKFVVVVDDTKLVDGLGGSGLAMPVEVVQFCWKYNLDRLQELFKEEGVEAKLRLEESGKPYVTDNSNYIVDLYFKTPIRDALAAGAEISALEGVVEHGLFLNMATSVIIAGKSGVEVKAK

SEQ ID NO: 2826 - DNA, 798 bp, Glycine max
  CDS (1)..(798)
atggccattccctacccccatttcatcgccaccgagaaagccgccatggacgccggcctcctccacccctcctccccctcctccgtcatcctcacccaagacgacctcaagaaaatcgccgcctacaaggccgtcgagtacgtcgagtccggcatggtcctcggcctcggcaccggctccactgccaagcacgccgtcgaccgcatcggcgagctcctccgccaaggaaaactcaaagacatcgtcggaatccccacctccaccaaaacccacgaccaggccctctccctcggcatccccctctccgatctcgactcccaccccaccgtcgatctcgccatcgacggcgccgacgaggtcgatcccttcctcaacctcgtcaagggccgcggcggctccctccttcgagaaaagatggtcgagggcgcctgcaagaagttcatcgtcatcgtcgacgagtccaagctcgttaactatttggggggcagcggcttggccatgcccgttgaggttattcagttctgttggaggttcaccgcggcgaggttgcagaagctttttcaggaggctgggtgcgttgccaagcttaggactttcgcggagaaggatgaaccttatgtcacggataatgggaactttattgtggatttgtatttcgagaggagtattggggatttgaaggctgccagtgatgcaattttgcagcttgctggagttgtggagcatggcatgtttcttgatatggctaccactgttattgttgcaggggagctagggctgacggtgaagaacaagtag

SEQ ID NO: 2827 - protein, 265 aa, Glycine max
MAIPYPHFIATEKAAMDAGLLHPSSPSSVILTQDDLKKIAAYKAVEYVESGMVLGLGTGSTAKHAVDRIGELLRQGKLKDIVGIPTSTKTHDQALSLGIPLSDLDSHPTVDLAIDGADEVDPFLNLVKGRGGSLLREKMVEGACKKFIVIVDESKLVNYLGGSGLAMPVEVIQFCWRFTAARLQKLFQEAGCVAKLRTFAEKDEPYVTDNGNFIVDLYFERSIGDLKAASDAILQLAGVVEHGMFLDMATTVIVAGELGLTVKNK

SEQ ID NO: 2828 - DNA, 804 bp, Arabidopsis thaliana
  CDS (1)..(804)
atgggttctgcattcgatccccttgtcacggccactgaggatctcgccgccgtcaactcggcgccgccactctcaaacctcacgcaagaagaactcaagaaaatcgccgcttataaagccgtcgaattcgtcgaatctggaatggttatcggtctcggcactggctccaccgcgaaacacgccgtggctcgtatcagcgagcttctccgagaaggaaaactcaaggatataatcggaatccctacttcaaccacaacgcatgagcaagcggtgtctctagggataccattatccgatctagattcgcatccggtggtggatctatcaatcgatggcgccgacgaagtcgatccggctcttaatctggtgaaaggacgcggcggatcgttattgagagagaagatgattgaaggagcatctaagaagttcgttgtgattgttgatgaatcgaagcttgtcaagtatatcggaggaagcggactcgctgttccggtggaggttgttccgttctgctgcgatttcacaagggggaaactggaagagctatttagagattcgggatgtgttgcgaagctgaggatgaaaatcggatctaacggcgaagaggcggcgccggctgtgacggataataggaattatgtggtggatttgtatttggagagagatattggagatttagaggtggcgagtgaggcgatattgaggtttcctggagtagtggagcatgggatgtttctgggaatggcgactacgttgatcgtcgccggcaaatttggtgttaccgtcaaggataggtttggataa

SEQ ID NO: 2829 - protein, 267 aa, Arabidopsis thaliana
MGSAFDPLVTATEDLAAVNSAPPLSNLTQEELKKIAAYKAVEFVESGMVIGLGTGSTAKHAVARISELLREGKLKDIIGIPTSTTTHEQAVSLGIPLSDLDSHPVVDLSIDGADEVDPALNLVKGRGGSLLREKMIEGASKKFVVIVDESKLVKYIGGSGLAVPVEVVPFCCDFTRGKLEELFRDSGCVAKLRMKIGSNGEEAAPAVTDNRNYVVDLYLERDIGDLEVASEAILRFPGVVEHGMFLGMATTLIVAGKFGVTVKDRFG

SEQ ID NO: 2830 - DNA, 831 bp, Arabidopsis thaliana
  CDS (1)..(831)
atggcttccttatccttcgtttcctcttctcaccttacgctacgcactccttctattgccctacgcagcactggctcttctcctcgaacctccgtttcattctccgtcaaggctcaatccgtcgcgctttcacaggacgatttgaagaagctcgcggcggagaaagctgtggaggcaattaaacctgggatggttctagggctcggaaccggatccaccgcagctttcgctgttgatcagatcgggaaactactctcttccggtgaactctacgatattgtcggtatcccaacgtcgaaacgaacggaggaacaagcacggtcgttagggattcctcttgttgggttagatacacatccgagaatcgatctcgctattgacggagcagacgaggtagatccgaatcttgatttagtcaaaggtcgtggaggtgctcttctccgtgagaaaatggtggaagctgtggctgacaagtttattgttgtggctgatgataccaaactcgttacaggactcggtggaagtggattagctatgccggtggaagttgttcaattctgctggaactttaatttgattagattgcaagacctcttcaaggaatttggatgtgaatcaaagcttagagttgatggtgatggcaagccttatgtgactgataacagtaattacattattgatttgtattttaagactcctttgaaggatggattcgctgcggctaaagagattgggaagtttcaaggagtggtggagcatggtctgtttctcggaatggctacttctgtcattatcgctggaaagaatggcgttgaagttatgaccaagtga

SEQ ID NO: 2831 - protein, 276 aa, Arabidopsis thaliana
MASLSFVSSSHLTLRTPSIALRSTGSSPRTSVSFSVKAQSVALSQDDLKKLAAEKAVEAIKPGMVLGLGTGSTAAFAVDQIGKLLSSGELYDIVGIPTSKRTEEQARSLGIPLVGLDTHPRIDLAIDGADEVDPNLDLVKGRGGALLREKMVEAVADKFIVVADDTKLVTGLGGSGLAMPVEVVQFCWNFNLIRLQDLFKEFGCESKLRVDGDGKPYVTDNSNYIIDLYFKTPLKDGFAAAKEIGKFQGVVEHGLFLGMATSVIIAGKNGVEVMTK

SEQ ID NO: 2832 - DNA, 684 bp, Sulfolobus solfataricus P2
  CDS (1)..(684): transl_table=11
gtggatccaaaggaattactagcaacgtatactttgaactatctaagaggaaaaaagataataggcgttggtactggaaaaactgttaagaaattgatagaagttttaagtagtgaagaaaatcttaaagaaagctcattatttgttgcgagctctatcgatactgaaatcgaattaagtaagcgcggttttaaagtactttcccttttctccgctattcaaccagaaatttacgtcgatagcttcgatatagttaccaaagacggtattatgataaagggtggaggaggtgccttgcttagggaaaaacttttggcatacttttctaaatacagaatttttataggagaatctactaaactaaaagacactaaagtgattgatattccaattgaggtcataagcgttggagtaagttatgtcaaatacaaattagagaaaatgggatttaccgtgaaaataagggagggaagcggtaaaatggggccaattatttcagataatggaaatgtgattttggacgtttctgttaaaactgaaaatctatgcgagtttgacagaatgataaagaatataccatcaatagtagaaactggaattttctgcaaggaattatataataagatcatattggctaatgaacaaggtagaattgaagaaatggatgcgggggacgggatttga

SEQ ID NO: 2833 - protein, 227 aa, Sulfolobus solfataricus P2
MDPKELLATYTLNYLRGKKIIGVGTGKTVKKLIEVLSSEENLKESSLFVASSIDTEIELSKRGFKVLSLFSAIQPEIYVDSFDIVTKDGIMIKGGGGALLREKLLAYFSKYRIFIGESTKLKDTKVIDIPIEVISVGVSYVKYKLEKMGFTVKIREGSGKMGPIISDNGNVILDVSVKTENLCEFDRMIKNIPSIVETGIFCKELYNKIILANEQGRIEEMDAGDGI

SEQ ID NO: 2834 - DNA, 684 bp, Clostridium acetobutylicum ATCC 824
  CDS (1)..(684): transl_table=11
atggcaaaggataatctaaaaaaaatatctgctaagaaggctttagaatatataaaggataacacggtaatagggctcggcggaggagagacaataggatatttatgtgattatttaaaggaaaaaattaaaagtggtttcaatattaaagtggtaacaccatctataaaaactagaaacacctgtattgaaaatggtattgaggttttatatacatcaagtgttgaacatttggatgtggcttttgatggatgtgatcagcttgatgaaaaattaaacgcccttaaaagctgtggaggaatacattcaaaggagaagattattgcttctatggctgataaatatattttacttactaatgaaagtaaattcgtaaagaaattagattctacataccctatagttttagaaatattggaggagtcagcaggttatgttaaaagaagaataagtgaaattggtggaaaagcaacctttagatcaagtgctgcaaaggatggattcactataacggatagtggaaatctattgttagatgtattctttgatgaattaggagatgctaaggaacttcaaaaggggcttaagggtataacaggagttgttgaaacttctttatttgtggatttagtaagtcaggcgataatagcttatgaagatgatataaagattatttctaaataa

SEQ ID NO: 2835 - protein, 227 aa, Clostridium acetobutylicum ATCC 824
MAKDNLKKISAKKALEYIKDNTVIGLGGGETIGYLCDYLKEKIKSGFNIKVVTPSIKTRNTCIENGIEVLYTSSVEHLDVAFDGCDQLDEKLNALKSCGGIHSKEKIIASMADKYILLTNESKFVKKLDSTYPIVLEILEESAGYVKRRISEIGGKATFRSSAAKDGFTITDSGNLLLDVFFDELGDAKELQKGLKGITGVVETSLFVDLVSQAIIAYEDDIKIISK

SEQ ID NO: 2836 - DNA, 681 bp, Agrobacterium tumefaciens str. C58
  CDS (1)..(681): transl_table=11
atgaagatcaaggccgccgaggccgcattgtcccatgtgcaggacggcatgcggctgggtatcggcaccggttcgacggccgaggaattcgtccgtcttctggcggagaaggttgcggccggcctgaaggtcgagggcgttcccacatccgagcgtaccgcacgtctgtgcgtcgagcttggcgtgccgctgaaatccctcgatgaattgccggaactggatctgaccatcgacggcgccgacgaagttgatcatgtactacgtctcgtcaagggcggcggcggcgcgctgctgcgcgaaaagatcgtggcggcagcatccggccgcatgatcgtcatcgccgaccagagcaaggtcgtcgagacgctgggcgcctttccgcttcccatcgagatcaatcccttcggccaggtggcgacacgcatcgccattgaaaaactggcggctcggtcgggtctttcgggcgaactgacgatgcgttcttccggcgacggcgccttcatgacggatggcggacacctgatcctcgacgcatcttttggccgtattcctgatgcagaagcactggcacgcgagctgaacactatccccggtgttgttgagcacggacttttcataaatttggcatcgcttgccatcatcgcgggccctgaaggcgcccgcatgatgcaggcagtataa

SEQ ID NO: 2837 - protein, 226 aa, Agrobacterium tumefaciens str. C58
MKIKAAEAALSHVQDGMRLGIGTGSTAEEFVRLLAEKVAAGLKVEGVPTSERTARLCVELGVPLKSLDELPELDLTIDGADEVDHVLRLVKGGGGALLREKIVAAASGRMIVIADQSKVVETLGAFPLPIEINPFGQVATRIAIEKLAARSGLSGELTMRSSGDGAFMTDGGHLILDASFGRIPDAEALARELNTIPGVVEHGLFINLASLAIIAGPEGARMMQAV

SEQ ID NO: 2838 - DNA, 735 bp, Brucella melitensis 16M
  CDS (1)..(735): transl_table=11
ttgagaatccgcgggggaagaaacgggaattctggaatggatgaagcacgcaagctcaagattgcggcggcagccgaagcgctgacttatgtaaaagacggaatgcggttgggcatcggcaccggctcgacggcggaagaatttgtgcgtctgctggctgaaaaggtgaagggtggctttcgcgtcattggtgttccgacttcggagcgcacagcaaaactgtgtgaggaactgggcgttgcgctcaccacactcgaagaaacgccgcatctggacctgacaattgacggtgcggatgaagttgacggcgaactcagccttatcaaaggcggaggcggcgcgctgcttcgcgagaagattgttgctgcggcttccgattccatgatcgtgattgccgaccagtctaaagttgtggaaacgctggggcgttttcccctgccgattgaagtcaaccgcttcggccttggcgcgacaatccgggcgattgaggcggcggctgtaaagtgtggtcttgcagggccgctgaacctgcggttaaaagacggttcacctttcctcaccgacggtgggcactacatcgtggatgcatcttttggccgcattcccgatccaaagacattatctgacgctctcttcgccataccgggcgtagtcgagcatggacttttcatcgaactggcgcgtgcggcgattatcgccggcaccgacggtatccgcaccatgaaccggtcttga

SEQ ID NO: 2839 - protein, 244 aa, Brucella melitensis 16M
MRIRGGRNGNSGMDEARKLKIAAAAEALTYVKDGMRLGIGTGSTAEEFVRLLAEKVKGGFRVIGVPTSERTAKLCEELGVALTTLEETPHLDLTIDGADEVDGELSLIKGGGGALLREKIVAAASDSMIVIADQSKVVETLGRFPLPIEVNRFGLGATIRAIEAAAVKCGLAGPLNLRLKDGSPFLTDGGHYIVDASFGRIPDPKTLSDALFAIPGVVEHGLFIELARAAIIAGTDGIRTMNRS

SEQ ID NO: 2840 - DNA, 672 bp, Pyrobaculum aerophilum str. IM2
  CDS (1)..(672): transl_table=11
atgttgaagaggctgttggcaagagaggcgattaggcttgtaaagagcggaatggtagtggggctcggctcaggtactacggcgcgcgagttcataaaagcgctcgccgaggcgggcgttgacgacgtcttgctagtggccacctcgtctgacagcgaaatactggcgtatgaggtagggctgggggacaggctccgccccatgtgggctgtggatagaattgacctagccgttgacggcgcggatgaagtgactaaggacaaggtattgctgaaggggaagggaggggcgttgttgagggagaaaatagtggactatgccgctgagaaattcgtcgttttgatcgaagagcataagcttgtggagagaataccgtcaaacaacccagtgccggtggaggtggtgccctgggcttggcgttttgtggccagagaggttgagaagaggtttggcggcgtcgccaaactacgccaagatggggggaagctggggcctgtcgtcacagacaacgggaattatattatagactggaacccccccggatttattgacccttatcttgaagatgagctcaaggccattccaggggttgtcgaaaatggcgtgttctccaagcggagagatgccacaattttagtggccagctcagacggcacaataaaaacactttaa

SEQ ID NO: 2841 - protein, 223 aa, Pyrobaculum aerophilum str. IM2
MLKRLLAREAIRLVKSGMVVGLGSGTTAREFIKALAEAGVDDVLLVATSSDSEILAYEVGLGDRLRPMWAVDRIDLAVDGADEVTKDKVLLKGKGGALLREKIVDYAAEKFVVLIEEHKLVERIPSNNPVPVEVVPWAWRFVAREVEKRFGGVAKLRQDGGKLGPVVTDNGNYIIDWNPPGFIDPYLEDELKAIPGVVENGVFSKRRDATILVASSDGTIKTL

SEQ ID NO: 2842 - DNA, 606 bp, Encephalitozoon cuniculi GB-M1
  CDS (1)..(606)
atggatcgagggtttccgaaatgcattgcgaataagacagtgattggaattgggacaggcactacagttgaaagatacatagatgcattacatcacgacgcgacgtatgtaccctccagcattaggacggcactgatacttagcgaaaaaggctttaccgtttcaagtcctttggcccatggagtcctagacctatacatagatggggcggattactttgacaagaatgggaacatgattaagggagggggaggggcattgaccacagaaaagctgctttactccatggccaaagagaccattataatagttcagagtcacaaatacagggaaacatttgatggatgttttattcctgttgaagccattcccacatctcttttgaaacttatttcaaccctagaaggaagtgggttgaagtattgtttaagggagactgatggaaagatgggaccattgatcaccgacttagggaactgcatagttgatgtagaatatgacgatgtatttatatcatcgtgcaagagcatttgtggtgttgtagagcatgggctgttcgagtcggttggaaataccacaattgtcgaagaagatggaaacaattga

SEQ ID NO: 2843 - protein, 201 aa, Encephalitozoon cuniculi GB-M1
MDRGFPKCIANKTVIGIGTGTTVERYIDALHHDATYVPSSIRTALILSEKGFTVSSPLAHGVLDLYIDGADYFDKNGNMIKGGGGALTTEKLLYSMAKETIIIVQSHKYRETFDGCFIPVEAIPTSLLKLISTLEGSGLKYCLRETDGKMGPLITDLGNCIVDVEYDDVFISSCKSICGVVEHGLFESVGNTTIVEEDGNN

SEQ ID NO: 2844 - DNA, 639 bp, Methanopyrus kandleri AV19
  CDS (1)..(639): transl_table=11
ttgagcggcaaacggaacgcggccaggaaagccgcggaagaggtctgccgacgcgggtacgaggtgatcggggttggtgccggcaccaccgtcgaggctttccttgaagagctggtgaagagagaggccgacgtactggtgttcaccacgatacccggcacgatcgatgcttgtcgccgcatcggactgaacgtgactacgataccgcccgaagagctcccggtcgccatcgacggagctgacgccgtggatcccgatggtaacctgctgaaaggaggaggggcctgccactcgttggagaaggcgatagattacaccgccgacgagttctgggtcgtcgtggacgagtcgaagctcgtcgagaacctctgggagctcccggtacccgttgaggtactccgcggctgctacgagttaacagttcggacgctggaggagttcggtgaggtcagaccgagaacgtgtgacgagaagtacgggcccgtggtctcggactcgggtaatcccatcgtcgacctgcatgtggacgactgggatcccgccgagctcgaacgcgagttgaactccgttcccggcgtagttgaatgcggcgtattccccggggacaaggtagataggatcatcgtcgggaggtcgtag

SEQ ID NO: 2845 - protein, 212 aa, Methanopyrus kandleri AV19
MSGKRNAARKAAEEVCRRGYEVIGVGAGTTVEAFLEELVKREADVLVFTTIPGTIDACRRIGLNVTTIPPEELPVAIDGADAVDPDGNLLKGGGACHSLEKAIDYTADEFWVVVDESKLVENLWELPVPVEVLRGCYELTVRTLEEFGEVRPRTCDEKYGPVVSDSGNPIVDLHVDDWDPAELERELNSVPGVVECGVFPGDKVDRIIVGRS

SEQ ID NO: 2846 - DNA, 843 bp, Drosophila melanogaster
  CDS (1)..(843)
atgttatctgggtttttgcgacgaggcgtccaaagagcacggttcaccttcacccagcaactcggcgaagatcttttgagcggcgcagcggcaacactccacacccagatacgcatgatggatgacattgcgctggacgcggccaagaagacggcggcccgcacggcggtggaccagtgggtgactgaggatacgaagattctggggattggcagcggatcgacggtggtgtacgccgtgcagcggatcgcggagcgcgtgtggaaggagggcgagctgacggacctcatctgcgtgccctcgtcctaccaggcgcgccatctgatactcgactacaaccttaacctgggcgatctggacaggaatcccaacatagacgtggccatcgacggggccgacgaggtcgatcgccatatggtgctgatcaagggcggcggcggctgcttgctgcaggagaaggtggtggcctcctgcgccaagcacttcatcgtggtggccgactacacaaagaactccatccgcctgggcgagcagtggtgccgcggcgtgcccatcgaggtggcgcccatggcgtacgtgcccatcaagctgcacatcgaggcgcttttcggcggcgaggcctcgttgcgtatggccaaggtgaaggcgggacccattgtcacggacaatggcaacttcctcctggactggaagttcatcgccaacagggagtacgactgggacgaggtcaaccgcgccatcaccctcatcccgggcgtcctggagacgggcctgttcgtgaacatggcccacaaatgctactacggcatggccaatggctcggtcaaggtccagaacaagtag

SEQ ID NO: 2847 - protein, 280 aa, Drosophila melanogaster
MLSGFLRRGVQRARFTFTQQLGEDLLSGAAATLHTQIRMMDDIALDAAKKTAARTAVDQWVTEDTKILGIGSGSTVVYAVQRIAERVWKEGELTDLICVPSSYQARHLILDYNLNLGDLDRNPNIDVAIDGADEVDRHMVLIKGGGGCLLQEKVVASCAKHFIVVADYTKNSIRLGEQWCRGVPIEVAPMAYVPIKLHIEALFGGEASLRMAKVKAGPIVTDNGNFLLDWKFIANREYDWDEVNRAITLIPGVLETGLFVNMAHKCYYGMANGSVKVQNK

SEQ ID NO: 2848 - DNA, 663 bp, Vibrio vulnificus CMCP6
  CDS (1)..(663): transl_table=11
atgagcatgactcaagatgaaatgaaaaaagccgctggttgggcagcgctcaaatatgtggaaaaaggcagcattgttggcgtaggaacaggctcaacggttaatcacttcatcgatgctcttggaaccatgagtgaagagatcaaaggtgcggtatccagctctgttgcatcaacagagaaacttgaagcgctaggtattaaaattttcgactgcaatgaagtcgcatctttagacatttatgttgatggcgcggacgaaatcaacgccgatcgtgaaatgatcaaaggcggtggcgcggcgctcactcgcgagaagatcgttgcggcgattgcggacaagtttatctgtatcgttgatggcacaaaggctgtcgatgttcttgggactttccctcttcctgttgaagtcatcccaatggctcgctcatacgttgcgcgtcaattggttaaactgggtggtgatccttgttaccgcgaaggggtgattactgacaacggtaacgtcatccttgatgtttacggtatgaagatcaccaatccaaaacagctggaagatcagatcaacggcatcccaggtgtcgtcactgtcggcctatttgctcatcgcggtgctgacgtggtcattaccggcactccagaaggcgccaaaattgaggaataa

SEQ ID NO: 2849 - protein, 220 aa, Vibrio vulnificus CMCP6
MSMTQDEMKKAAGWAALKYVEKGSIVGVGTGSTVNHFIDALGTMSEEIKGAVSSSVASTEKLEALGIKIFDCNEVASLDIYVDGADEINADREMIKGGGAALTREKIVAAIADKFICIVDGTKAVDVLGTFPLPVEVIPMARSYVARQLVKLGGDPCYREGVITDNGNVILDVYGMKITNPKQLEDQINGIPGVVTVGLFAHRGADVVITGTPEGAKIEE

SEQ ID NO: 2850 - DNA, 702 bp, Bacteroides thetaiotaomicron VPI-5482
  CDS (1)..(702): transl_table=11
atgaactgggaaaatcacctgatcaaagacctccaatggtccaatgagattatcaacagagaagcgaaagaacgtgtagcacgtgagatcgccgccacagccaaaacaggcgatgtgataggggccggctccggttccaccgtctacctcactttgtttgagctggcaaagcggattcacgaagagcacctatatctggaagtgattcccgcctctcaggaaatctccatgacttgcatacaactgggcatcccgcagaccaccctttgggacaaacgccccgactggacattcgacggagcggatgaggtagaccccgaccgcaacctgataaaaggacgtggcggagccatgttcaaagaaaagctgctgatcagaagcagcggaaaaaccttcattatcgtcgatcccagcaaacttgtcaatatcttgggaagcaaattccccataccggtagaggtgttcccgcatgcactgtcatacgtcgaaaaagaactgcgccgactgggtgcctccgaaatatcactacgccccgcccacggaaaagacggtcctattttgacagaaaacggaaactttatccttgatacccgtttccattatattgacgcttcgctggaagaacagctgaaaacaatcacgggcgttattgaaagcggacttttcatcaattacgacattgaagtagttgtaaccagataa

SEQ ID NO: 2851 - protein, 233 aa, Bacteroides thetaiotaomicron VPI-5482
MNWENHLIKDLQWSNEIINREAKERVAREIAATAKTGDVIGAGSGSTVYLTLFELAKRIHEEHLYLEVIPASQEISMTCIQLGIPQTTLWDKRPDWTFDGADEVDPDRNLIKGRGGAMFKEKLLIRSSGKTFIIVDPSKLVNILGSKFPIPVEVFPHALSYVEKELRRLGASEISLRPAHGKDGPILTENGNFILDTRFHYIDASLEEQLKTITGVIESGLFINYDIEVVVTR

SEQ ID NO: 2852 - DNA, 663 bp, Vibrio vulnificus YJ016
  CDS (1)..(663): transl_table=11
atgagcatgactcaagatgaaatgaaaaaagccgctggttgggcagcgctcaagtatgtggaaaaaggcagcattgttggcgtaggaacgggctcaacggttaatcacttcatcgatgctcttggaaccatgagtgaagagatcaaaggtgcggtatccagttctgttgcatcaacagaaaaacttgaagcgctaggcattaaaattttcgactgcaatgaagtcgcctctttagacatttacgttgatggcgcggacgaaatcaacgccgatcgtgaaatgatcaaaggcggtggcgcggcgctcactcgcgagaagatcgttgcagcgattgcggacaagtttatctgtatcgttgatggcacaaaggctgtcgatgttcttgggactttccctcttcctgttgaagtcatcccaatggctcgctcatacgttgcgcgtcaattggttaaacttggtggcgatccttgttaccgcgaaggggtgattactgacaacggtaacgtcatccttgatgtttacggtatgaagatcaccaatccaaaacagctggaagatcagatcaacgctattccaggcgtagtgactgtcggtctttttgctcatcgcggtgctgacgtggtcatcaccggcactccagaaggtgccaaaattgaggaataa

SEQ ID NO: 2853 - protein, 220 aa, Vibrio vulnificus YJ016
MSMTQDEMKKAAGWAALKYVEKGSIVGVGTGSTVNHFIDALGTMSEEIKGAVSSSVASTEKLEALGIKIFDCNEVASLDIYVDGADEINADREMIKGGGAALTREKIVAAIADKFICIVDGTKAVDVLGTFPLPVEVIPMARSYVARQLVKLGGDPCYREGVITDNGNVILDVYGMKITNPKQLEDQINAIPGVVTVGLFAHRGADVVITGTPEGAKIEE

SEQ ID NO: 2854 - DNA, 753 bp, Yersinia pestis biovar Microtus str. 91001
  CDS (1)..(753): transl_table=11
ttggcgaccccacctttatgtagtcatgatcaggagtcacgaatgagcaatcaacaaaatgacgccaagagggctgccgcccgtcgggtgattcaggatttcgtgttcgatggcatgacgttggggctgggttccgggaccacctcgcatttctttgtgcgcgaactgggccagcatgttgccaagggcttgcagttaacctgcaccacaacttctcgtgcgacgagcgaggtggcgcgtgacgtgggcattgagctctcggatccgaatgagatgaatgagattgatctgaccatcgacggcccagatgagattgaccggcggttcaatatgatcaagggcggtggagcctgccttctgtgggagaaaattatcgcccatgcctcgaagcggatgatttgtatttgtgatgagacaaaaatcgtcaattgcttggggcaatttccgctgccagtcgaaatcgtcccctttgcctggaaacagaccgaacgcagggtcgagcgggtactcgcggaacagggtctccatcatgtgccgattattcggcgtatggggggcgggcacccggtgatcactgacagtggaaactttattctggattgccattgcggggcgattatcacggcccctgaaccgctggaaatagagcttaatcgcattccgggggtggttgaaaacggtcttttcacccgtgaggctaccggtatggtggtgggctattttgacggttcctcctacgttcaactgcgataa

SEQ ID NO: 2855 - protein, 250 aa, Yersinia pestis biovar Microtus str. 91001
MATPPLCSHDQESRMSNQQNDAKRAAARRVIQDFVFDGMTLGLGSGTTSHFFVRELGQHVAKGLQLTCTTTSRATSEVARDVGIELSDPNEMNEIDLTIDGPDEIDRRFNMIKGGGACLLWEKIIAHASKRMICICDETKIVNCLGQFPLPVEIVPFAWKQTERRVERVLAEQGLHHVPIIRRMGGGHPVITDSGNFILDCHCGAIITAPEPLEIELNRIPGVVENGLFTREATGMVVGYFDGSSYVQLR

SEQ ID NO: 2856 - DNA, 1044 bp, Nasonia vitripennis
  CDS (1)..(1044)
atgtcgaagagcacgttggagagcgcgaaaaaaatcgcggcgtacaaagccgtggacgagtatgtaaaggacaacagtgttattgggattggtagtgggtcaactattgtttacgccgtccagaggttagctgaacgtgtgaaagaagaaaaactcaatgtagtttgtgtacctacctcatttcaagctcgccagcttattattaacaatcatttaagtttaggagatttagaaactcaccctcagttggattttgctattgatggtgctgatgaagttgactgtgatcttaatcttatcaagggaggtggaggttgcttattacaagaaaaaattgtagcctcttgtaccgatactttggttattatagcagattacacaaaaaattcgcaaaaacttggtgagcagtacaaaaaaggtcttcctttggaagtagtccctatggcctatgttcctataagaagaaaagtagaagaagattttggaggcagtgttaaattgagaatggcagtagctaaagcaggtccagtggtgactgacaatggcaattttattttggattggcaatttcctgacaatgtcaaggactggcctgctgtgaatcaaaaacttttgtcaattcctggtttagttgaaactggtctatttgttaatatggcgaaaaaagtattctttggaatgcctgatggtagcattaaagaacaagtgctaaaactcgttctttccctgctgataatcatcgagtccgtggaaatcgctcgagccgatgatggactggagatcgttgcaatgaaacggccattctgcaatgcattcacgggctgcggcagaaagcgcgacccgtcctacgcgtcgggcctgcagctgcccattccactgtaccgggcactgctgcggctgtccagtctgcgcaacggcgccgccgccgaggtcaggatgaggcagcgtccccttggtctcatcgggccggagaatctcgtgcaacttggcccgcaagctccacgtctgatggccgctccggtcgttgtgccgagcctatattaa

SEQ ID NO: 2857 - protein, 347 aa, Nasonia vitripennis
MSKSTLESAKKIAAYKAVDEYVKDNSVIGIGSGSTIVYAVQRLAERVKEEKLNVVCVPTSFQARQLIINNHLSLGDLETHPQLDFAIDGADEVDCDLNLIKGGGGCLLQEKIVASCTDTLVIIADYTKNSQKLGEQYKKGLPLEVVPMAYVPIRRKVEEDFGGSVKLRMAVAKAGPVVTDNGNFILDWQFPDNVKDWPAVNQKLLSIPGLVETGLFVNMAKKVFFGMPDGSIKEQVLKLVLSLLIIIESVEIARADDGLEIVAMKRPFCNAFTGCGRKRDPSYASGLQLPIPLYRALLRLSSLRNGAAAEVRMRQRPLGLIGPENLVQLGPQAPRLMAAPVVVPSLY

SEQ ID NO: 2858 - DNA, 816 bp, Aedes aegypti
  CDS (1)..(816)
atgttccaacgtttcttcgggacagtttcgctattctctggttctagatctataaaccctctattaagcagtatcgtcgccagccgtgcttcctcgtctgccgcagcaaaaatgagtctggatctggccaaaaagattgccgccttcaaagccgtcgacgagtacgtgcgggataacacggtggtcggagtgggcagcggttccaccgtggtctacgccgtgcaacgcctggccgagcgggttaaaaccgaaggattgaagctggtatgcattcccactagcttccaggcgcgccagttgattatcgaaagcggcctagtgctgggcgacttggagcaacacccgaagatccattgtgccatcgatggggccgatgaagtggacgctgacatggtcctgatcaaaggtggtggaggctgtctgctgcaggagaagattgtggcatcctgtgcggatcagctggtggtcattgctgattatacgaagaattccaagaaactaggagagcagtacaaaaaaggcattccaatcgaggtggttccaatggcgtacgttccgatcaggaacaaagtggcggccaaatatggaggaagtctgaagctacggatggccgtggcgaaagctggtcctgtcgtcactgacaacggtaactttattctggattggcacttcccggaagaaaagttcgattgggacgtcgtcaatcgtgacataatgatgattcctggagtagtggagacggggctgtttgtaaaaatggcaacgaaagcctattttggccttgccgatggatctgtgactgaaagaagcgcctag

SEQ ID NO: 2859 - protein, 271 aa, Aedes aegypti
MFQRFFGTVSLFSGSRSINPLLSSIVASRASSSAAAKMSLDLAKKIAAFKAVDEYVRDNTVVGVGSGSTVVYAVQRLAERVKTEGLKLVCIPTSFQARQLIIESGLVLGDLEQHPKIHCAIDGADEVDADMVLIKGGGGCLLQEKIVASCADQLVVIADYTKNSKKLGEQYKKGIPIEVVPMAYVPIRNKVAAKYGGSLKLRMAVAKAGPVVTDNGNFILDWHFPEEKFDWDVVNRDIMMIPGVVETGLFVKMATKAYFGLADGSVTERSA

SEQ ID NO: 2860 - DNA, 810 bp, Chlamydomonas reinhardtii
  CDS (1)..(810)
atgatgctcaaggccagtcccgctgctcgcgctgctgctcgccctgctgctcgcaacgtgcgcatgatggccgcgccggtctcaacccagctgagccaggatgagctgaagaagcaggctgcctggaaggctgttgagtacgttaagagcggcatggtggttggcctgggcacgggctcgaccgctgcgttcgcggtggaccggatcggccagctgctgaaggagggcaagctgcagaacatcgtcggtgtgcccacctcgatccgcacctacgagcaggctctgtctctgggcattcctctggccactctggatgagcagcccaagctggacgtcgccatcgatggtgccgacgaggtggaccccaacctggacgtggtgaagggccgcggtggcgctcttctgcgcgaaaagatggtggagatggcctcggctaagtttgtttgcatcgtggacgactccaagctggtcgagggcctgggcggctccaagctggccatgccggtggagattgtgcagttctgccacaagtacaccctgcagcgcctggctaacctgcccgaggtgaagggctgcgaggctaagctgcgcatgaacggcgacaagccctacgtgaccgacaacagcaactacatcgtggacctgtacttccagacccctatcaaggattcccaggccgcctccaaggccatcctgggcctggacggtgtcgttgaccacggcctgttcctggacatggtggacgtgtgcatcatcgccggcgccaccggcgtcaccgtgcaggagcgccccaaccccaagaagcactaa

SEQ ID NO: 2861 - protein, 269 aa, Chlamydomonas reinhardtii
MMLKASPAARAAARPAARNVRMMAAPVSTQLSQDELKKQAAWKAVEYVKSGMVVGLGTGSTAAFAVDRIGQLLKEGKLQNIVGVPTSIRTYEQALSLGIPLATLDEQPKLDVAIDGADEVDPNLDVVKGRGGALLREKMVEMASAKFVCIVDDSKLVEGLGGSKLAMPVEIVQFCHKYTLQRLANLPEVKGCEAKLRMNGDKPYVTDNSNYIVDLYFQTPIKDSQAASKAILGLDGVVDHGLFLDMVDVCIIAGATGVTVQERPNPKKH

(The sequence listing continues in the following parts.)

1. A method for producing a plant with increased yield as compared to a corresponding wild type plant comprising increasing or generating in a plant or a part thereof one or more activities selected from the group consisting of 3-phosphoglycerate dehydrogenase, Adenylate kinase, B2758-protein, Cyclic nucleotide phosphodiesterase, cysteine synthase, Exopolyphosphatase, geranylgeranyl reductase, Mating hormone A-factor precursor, mitochondrial succinate-fumarate transporter, modification methylase HemK family protein, Myo-inositol transporter, oxidoreductase subunit, peptidy-prolyl-cis-trans-isomerase, protein kinase, Ribose-5-phosphate isomerase, slr1293-protein, YDR049W-protein, YJL181W-protein, and YPL109C-protein-activity.

2. A method for producing a plant with increased yield as compared to a corresponding wild type plant comprising at least one of the steps selected from the group consisting of:
(i) increasing or generating the activity of a polypeptide comprising a polypeptide, a consensus sequence or at least one polypeptide motif as depicted in column 5 or 7 of table II or of table IV, respectively;
(ii) increasing or generating the activity of an expression product of a nucleic acid molecule comprising a polynucleotide as depicted in column 5 or 7 of table I, and
(iii) increasing or generating the activity of a functional equivalent of (i) or (ii).

3. The method of claim 1, comprising
(i) increasing or generating of the expression of at least one nucleic acid molecule; and/or
(ii) increasing or generating the expression of an expression product; and/or
(iii) increasing or generating one or more activities of an expression product encoded by at least one nucleic acid molecule;
wherein the at least one nucleic acid molecule comprises a nucleic acid molecule selected from the group consisting of:
(a) a nucleic acid molecule encoding the polypeptide shown in column 5 or 7 of table II;
(b) a nucleic acid molecule shown in column 5 or 7 of table I;
(c) a nucleic acid molecule which encodes a polypeptide sequence depicted in column 5 or 7 of table II and confers an increased yield as compared to a corresponding non-transformed wild type plant cell, a transgenic plant or a part thereof;
(d) a nucleic acid molecule having at least around 95% identity with the nucleic acid molecule sequence of a polynucleotide comprising the nucleic acid molecule shown in column 5 or 7 of table I and conferring an increased yield as compared to a corresponding non-transformed wild type plant cell, transgenic plant, or part thereof;
(e) a nucleic acid molecule encoding a polypeptide having at least around 95% identity with the amino acid sequence of the polypeptide encoded by the nucleic acid molecule of (a) to (c) and having the activity represented by a nucleic acid molecule comprising a polynucleotide as depicted in column 5 of table I and conferring an increased yield as compared to a corresponding non-transformed wild type plant cell, transgenic plant, or part thereof;
(f) a nucleic acid molecule which hybridizes with a nucleic acid molecule of (a) to (c) under stringent hybridization conditions and confers an increased yield as compared to a corresponding non-transformed wild type plant cell, transgenic plant, or part thereof;
(g) a nucleic acid molecule encoding a polypeptide which can be isolated with the aid of monoclonal or polyclonal antibodies made against a polypeptide encoded by one of the nucleic acid molecules of (a) to (e) and having the activity represented by the nucleic acid molecule comprising a polynucleotide as depicted in column 5 of table I;
(h) a nucleic acid molecule encoding a polypeptide comprising the consensus sequence or one or more polypeptide motifs as shown in column 7 of table IV and having the activity represented by a nucleic acid molecule comprising a polynucleotide as depicted in column 5 of table II or IV;
(i) a nucleic acid molecule encoding a polypeptide having the activity represented by a protein as depicted in column 5 of table II and conferring increased yield as compared to a corresponding non-transformed wild type plant cell, transgenic plant, or part thereof;
(j) a nucleic acid molecule which comprises a polynucleotide, which is obtained by amplifying a cDNA library or a genomic library using the primers in column 7 of table III and having the activity represented by a nucleic acid molecule comprising a polynucleotide as depicted in column 5 of table II or IV; and
k) a nucleic acid molecule which is obtained by screening a suitable nucleic acid library under stringent hybridization conditions with a probe comprising a complementary sequence of a nucleic acid molecule of (a) or (b) or with a fragment thereof, having at least around 50 nt of a nucleic acid molecule complementary to a nucleic acid molecule sequence characterized in (a) to (e) and encoding a polypeptide having the activity represented by a protein comprising a polypeptide as depicted in column 5 of table II.

4. A method for producing a transgenic plant with increased yield as compared to a corresponding non-transformed wild type plant, comprising
(i) transforming a plant cell, plant cell nucleus, or plant tissue with a nucleic acid molecule comprising a nucleic acid molecule selected from the group consisting of:
(a) a nucleic acid molecule encoding the polypeptide shown in column 5 or 7 of table II;
(b) a nucleic acid molecule shown in column 5 or 7 of table I;
(c) a nucleic acid molecule be encoding a polypeptide sequence depicted in column 5 or 7 of table II and conferring an increased yield as compared to a corresponding non-transformed wild type plant cell, transgenic plant, or part thereof;
(d) a nucleic acid molecule having at least around 95% identity with the nucleic acid molecule sequence of a polynucleotide comprising the nucleic acid molecule shown in column 5 or 7 of table I and conferring an increased yield as compared to a corresponding non-transformed wild type plant cell, transgenic plant, or part thereof;
(e) a nucleic acid molecule encoding a polypeptide having at least around 95% identity with the amino acid sequence of the polypeptide encoded by the nucleic acid molecule of (a) to (c) and having the activity represented by a nucleic acid molecule comprising a polynucleotide as depicted in column 5 of table I and confers conferring an increased yield as compared to a corresponding non-transformed wild type plant cell, transgenic plant, or part thereof;
(f) a nucleic acid molecule which hybridizes with a nucleic acid molecule of (a) to (c) under stringent hybridization conditions and confers an increased yield as compared to a corresponding non-transformed wild type plant cell, transgenic plant, or part thereof;
(g) a nucleic acid molecule encoding a polypeptide which can be isolated with the aid of monoclonal or polyclonal antibodies made against a polypeptide encoded by one of the nucleic acid molecules of (a) to (e) and having the activity represented by the nucleic acid molecule comprising a polynucleotide as depicted in column 5 of table I;
(h) a nucleic acid molecule encoding a polypeptide comprising the consensus sequence or one or more polypeptide motifs as shown in column 7 of table IV and having the activity represented by a nucleic acid molecule comprising a polynucleotide as depicted in column 5 of table II or IV;
(i) a nucleic acid molecule encoding a polypeptide having the activity represented by of a protein as depicted in column 5 of table II and conferring increased yield as compared to a corresponding non-transformed wild type plant cell, transgenic plant, or part thereof;
(j) a nucleic acid molecule which comprises a polynucleotide, which is obtained by amplifying a cDNA library or a genomic library using the primers in column 7 of table III and having the activity represented by a nucleic acid molecule comprising a polynucleotide as depicted in column 5 of table II or IV; and
(k) a nucleic acid molecule which is obtained by screening a suitable nucleic acid library under stringent hybridization conditions with a probe comprising a complementary sequence of a nucleic acid molecule of (a) or (b) or with a fragment thereof, having at least around 400 nt of a nucleic acid molecule complementary to a nucleic acid molecule sequence characterized in (a) to (e) and encoding a polypeptide having the activity represented by a protein comprising a polypeptide as depicted in column 5 of table II, and
(ii) regenerating a transgenic plant from that transformed plant cell nucleus, plant cell or plant tissue with increased yield.

5. The method of claim 2, wherein the one or more activities increased or generated is a 3-phosphoglycerate dehydrogenase, Adenylate kinase, B2758-protein, Cyclic nucleotide phosphodiesterase, cysteine synthase, Exopolyphosphatase, geranylgeranyl reductase, Mating hormone A-factor precursor, mitochondrial succinate-fumarate transporter, modification methylase HemK family protein, Myo-inositol transporter, oxidoreductase subunit, peptidy-prolyl-cis-trans-isomerase, protein kinase, Ribose-5-phosphate isomerase, slr1293-protein, YDR049W-protein, YJL181W-protein, or YPL109C-protein-activity.

6. The method of claim 1, wherein the resulting increased yield is under standard growth conditions, low temperature, drought or abiotic stress conditions.

7. An isolated nucleic acid molecule comprising a nucleic acid molecule selected from the group consisting of:
(a) a nucleic acid molecule encoding the polypeptide shown in column 5 or 7 of table II B;
(b) a nucleic acid molecule shown in column 5 or 7 of table I B;
(c) a nucleic acid molecule which, encodes a polypeptide sequence depicted in column 5 or 7 of table II and confers increased yield as compared to a corresponding non-transformed wild type plant cell, transgenic plant, or part thereof;
(d) a nucleic acid molecule having at least about 95% identity with the nucleic acid molecule sequence of a polynucleotide comprising the nucleic acid molecule shown in column 5 or 7 of table I and conferring increased yield as compared to a corresponding non-transformed wild type plant cell, transgenic plant, or part thereof;
(e) a nucleic acid molecule encoding a polypeptide having at least about 95% identity with the amino acid sequence of the polypeptide encoded by the nucleic acid molecule of (a) to (c) and having the activity represented by a nucleic acid molecule comprising a polynucleotide as depicted in column 5 of table I and conferring increased yield as compared to a corresponding non-transformed wild type plant cell, transgenic plant, or part thereof;
(f) a nucleic acid molecule which hybridizes with a nucleic acid molecule of (a) to (c) under stringent hybridization conditions and confers increased yield as compared to a corresponding non-transformed wild type plant cell, transgenic plant, or part thereof;
(g) a nucleic acid molecule encoding a polypeptide which can be isolated with the aid of monoclonal or polyclonal antibodies made against a polypeptide encoded by one of the nucleic acid molecules of (a) to (e) and having the activity represented by the nucleic acid molecule comprising a polynucleotide as depicted in column 5 of table I;
(h) a nucleic acid molecule encoding a polypeptide comprising the consensus sequence or one or more polypeptide motifs as shown in column 7 of table IV and having the activity represented by a nucleic acid molecule comprising a polynucleotide as depicted in column 5 of table II or IV;
(i) a nucleic acid molecule encoding a polypeptide having the activity represented by a protein as depicted in column 5 of table II and conferring an increased yield as compared to a corresponding non-transformed wild type plant cell, transgenic plant, or part thereof;
(j) a nucleic acid molecule which comprises a polynucleotide, which is obtained by amplifying a cDNA library or a genomic library using the primers in column 7 of table III and having the activity represented by a nucleic acid molecule comprising a polynucleotide as depicted in column 5 of table II or IV; and
(k) a nucleic acid molecule which is obtained by screening a suitable nucleic acid library under stringent hybridization conditions with a probe comprising a complementary sequence of a nucleic acid molecule of (a) or (b) or with a fragment thereof, having at least 400 nt, of a nucleic acid molecule complementary to a nucleic acid molecule sequence characterized in (a) to (e) and encoding a polypeptide having the activity represented by a protein comprising a polypeptide as depicted in column 5 of table II.

8. The nucleic acid molecule of claim 7, whereby the nucleic acid molecule according to (a) to (k) differs by at least one nucleotide from the sequence depicted in column 5 or 7 of table I A and encodes a protein which differs by at least one amino acid from the protein sequences depicted in column 5 or 7 of table II A.

9. A nucleic acid construct which confers the expression of the nucleic acid molecule of claim 7 and comprises one or more regulatory elements.

10. A vector comprising the nucleic acid molecule of claim 7 or comprising a nucleic acid construct comprising said nucleic acid molecule.

11. A process for producing a polypeptide, comprising expressing a polypeptide in a host nucleus or host cell comprising the nucleic acid construct of claim 9.

12. A polypeptide encoded by the nucleic acid molecule of claim 7 or as depicted in table II B, whereby the polypeptide differs from the sequence as shown in table II A by one or more amino acids.

13. An antibody, which binds specifically to the polypeptide of claim 12.

14. A plant cell nucleus, plant cell, plant tissue, propagation material, pollen, progeny, harvested material or plant comprising the nucleic acid molecule of claim 7.

15. A plant cell nucleus, plant cell, plant tissue, propagation material, seed, pollen, progeny, or plant part, resulting in a plant with increased yield after regeneration; or a plant with increased yield; or a part thereof; produced by the method of claim 1, wherein said yield is increased as corn aced to a corresponding wild type plant.

16. The transgenic plant cell nucleus, transgenic plant cell, transgenic plant or part thereof of claim 15 derived from a monocotyledonous plant.

17. The transgenic plant cell nucleus, transgenic plant cell, transgenic plant or part thereof of claim 15 derived from a dicotyledonous plant.

18. The transgenic plant cell nucleus, transgenic plant cell, transgenic plant or part thereof of claim 15, wherein the plant is selected from the group consisting of corn (maize), wheat, rye, oat, triticale, rice, barley, soybean, peanut, cotton, oil seed rape, canola, winter oil seed rape, manihot, pepper, sunflower, flax, borage, safflower, linseed, primrose, rapeseed, turnip rape, tagetes, a solanaceous plant, potato, tobacco, eggplant, tomato, Vicia species, pea, alfalfa, coffee, cacao, tea, Salix species, oil palm, coconut, perennial grass, forage crops and Arabidopsis thaliana.

19. The transgenic plant cell nucleus, transgenic plant cell, transgenic plant or part thereof of claim 15, wherein the plant is selected from the group consisting of corn, soy, oil seed rape, canola, winter oil seed rape, cotton, wheat and rice.

20. A transgenic plant comprising one or more of plant cell nuclei, plant cells, progeny, seed or pollen produced by the plant of claim 14.

21. A transgenic plant, transgenic plant cell nucleus, transgenic plant cell, plant comprising one or more of such transgenic plant cell nuclei or plant cells, progeny, seed or pollen derived from or produced by the plant of claim 14, wherein said transgenic plant, transgenic plant cell nucleus, transgenic plant cell, plant comprising one or more of such transgenic plant cell nuclei or plant cells, progeny, seed or pollen is genetically homozygous for a transgene conferring increased yield as compared to a corresponding non-transformed wild type plant cell, transgenic plant, or part thereof.

22. A process for the identification of a compound conferring increased yield in a plant cell, transgenic plant, or part thereof as compared to a corresponding non-transformed wild type plant cell, transgenic plant, or part thereof, comprising:
(a) culturing a plant cell, transgenic plant, or part thereof expressing the polypeptide of claim 12 and a readout system, wherein the readout system is capable of interacting with the polypeptide under suitable conditions which permit the interaction of the polypeptide with said readout system in the presence of a compound or a sample comprising a plurality of compounds, and the readout system is capable of providing a detectable signal in response to the binding of a compound to said polypeptide under conditions which permit the expression of said readout system and the polypeptide of claim 12; and
(b) identifying if the compound is an effective agonist by detecting the presence, absence, or increase of a signal produced by said readout system.

23. A method for the production of an agricultural composition comprising:
(a) providing the compound identified in the process of claim 22; and
(b) formulating said compound in a form acceptable for an application in agriculture.

24. A composition comprising:
(a) the nucleic acid molecule of claim 7;
(b) a nucleic acid construct which confers the expression of the nucleic acid molecule of claim 7 and comprises one or more regulatory elements;
(c) a vector comprising the nucleic acid molecule of claim 7;
(d) a polypeptide encoded by the nucleic acid molecule of claim 7 or as depicted in table II B, whereby the polypeptide differs from the sequence as shown in table II A by one or more amino acids; and/or
(e) an antibody which binds specifically to the polypeptide of (d); and optionally an agriculturally acceptable carrier.

25. The polypeptide of claim 12 or a nucleic acid molecule encoding said polypeptide, wherein the polypeptide or nucleic acid molecule is isolated from yeast or E. coli.

26. (canceled)

27. A method for identifying or selecting a plant with increased yield as compared to a corresponding non-transformed wild type plant comprising screening a population of plants with a marker comprising the nucleic acid molecule of claim 7.

28. A method for detection of yield increase in a plant or plant cell comprising screening a population of plants with a marker comprising the nucleic acid molecule of claim 7.

29. A method for the identification of a plant with an increased yield comprising:
(a) screening a population of one or more plant cell nuclei, plant cells, plant tissues or plants or parts thereof for an activity selected from the group consisting of 3-phosphoglycerate dehydrogenase, Adenylate kinase, B2758-protein, Cyclic nucleotide phosphodiesterase, cysteine synthase, Exopolyphosphatase, geranylgeranyl reductase, Mating hormone A-factor precursor, mitochondrial succinate-fumarate transporter, modification methylase HemK family protein, Myo-inositol transporter, oxidoreductase subunit, peptidy-prolyl-cis-trans-isomerase, protein kinase, Ribose-5-phosphate isomerase, slr1293-protein, YDR049W-protein, YJL181W-protein, and YPL109C-protein-activity;
(b) comparing the level of activity with the activity level in a reference;
(c) identifying one or more plant cell nuclei, plant cells, plant tissues or plants or parts thereof with the activity increased compared to the reference; and
(d) optionally producing a plant from the identified plant cell nuclei, cell or tissue.

30. A method for the identification of a plant with an increased yield comprising:
(a) screening a population of one or more plant cell nuclei, plant cells, plant tissues or plants or parts thereof for the expression level of an nucleic acid coding for a polypeptide conferring an activity selected from the group consisting of 3-phosphoglycerate dehydrogenase, Adenylate kinase, B2758-protein, Cyclic nucleotide phosphodiesterase, cysteine synthase, Exopolyphosphatase, geranylgeranyl reductase, Mating hormone A-factor precursor, mitochondrial succinate-fumarate transporter, modification methylase HemK family protein, Myo-inositol transporter, oxidoreductase subunit, peptidy-prolyl-cis-trans-isomerase, protein kinase, Ribose-5-phosphate isomerase, slr1293-protein, YDR049W-protein, YJL181W-protein, and YPL109C-protein-activity;
(b) comparing the level of expression with a reference;
(c) identifying one or more plant cell nuclei, plant cells, plant tissues or plants or parts thereof with the expression level increased compared to the reference; and
(d) optionally producing a plant from the identified plant cell nuclei, cell or tissue.

31. The plant of claim 14, wherein said plant shows an improved yield-related trait relative to a corresponding wild type plant.

32. The plant of claim 14, wherein said plant shows an improved nutrient use efficiency and/or abiotic stress tolerance relative to a corresponding wild type plant.

33. The plant of claim 14, wherein said plant shows an increased low temperature tolerance relative to a corresponding wild type plant.

34. The plant of claim 14, wherein the plant shows an increase of harvestable yield relative to a corresponding wild type plant.

35. The plant of claim 14, wherein the plant shows an increased yield relative to a corresponding wild type plant wherein yield increase is calculated on a per plant basis or in relation to a specific arable area.

36. A method for increasing yield of a population of plants, comprising:
(a) checking the growth temperature(s) in the area for planting;
(b) comparing the temperatures with the optimal growth temperature of a plant species or a variety considered for planting; and
(c) planting and growing one or more plants of claim 14 if the growth temperature is not optimal for the planting and growing of the plant species or the variety considered for planting.

37. The method of claim 1, comprising harvesting the plant or a part of the plant produced or planted and producing fuel with or from the harvested plant or part thereof.

38. The method of claim 1, wherein the plant is useful for starch production, comprising harvesting a plant part useful for starch isolation and isolating starch from this plant part.
